United States Patent Application Publication US 2007/0054278 A1 - sequence listing, part 128

SEQ ID NO: 303870 - DNA, 201 bp, Homo sapiens
aaggccccttcaatttaaacaactctccttacttctttcatgctctcctgggtaccctgaggccgttttgttgctccagcacaactctgaggtcgtggggkatgaatttggtgggactagttaaggtccttgacatgtccccactactcccaggagtgtaggaactaggttcctactttgctgtgaccatgcagggacttg

SEQ ID NO: 303871 - DNA, 201 bp, Homo sapiens
aaggtccttgacatgtccccactactcccaggagtgtaggaactaggttcctactttgctgtgaccatgcagggacttggaggagctctgggggctgctgmaacccaccctcttttcctctgagatcagaagcacatccaatgccctctgctttcagagcccccagggctatttggcctccctcttccccaagctcagcac

SEQ ID NO: 303872 - DNA, 201 bp, Homo sapiens
acaaatggagagccatacatcatatttaaaagttacatgtgtaactaacaaactgctaaataaaatgtgtttgatccttctactttgacaactatgccttratcacaaactggaaagccaggttcaaatatagacttctgggttctgcatcagaatatggtagtgtgtggagagttggcccttggcctttcaccaactctc

SEQ ID NO: 303873 - DNA, 201 bp, Homo sapiens
tcagctgagactgggaatagaaaagtgattgcttctaacctcagtgaaataaatcctcagtgagttaaaaaacggtggttcctctaaaaaaaaaaaattarggtaaaaaacagaacataaaaattatcatcttaaccttcttgtaagtgtgcaactcagtaatgttaagcatattcacattgttgtgaaccaaatctccag

SEQ ID NO: 303874 - DNA, 201 bp, Homo sapiens
gtgataaactatggttattcagatatgactattcggcagatatttttcaaaatggacaaagggaacctgataattcaaggaaaacagctgaaagtattcaytgccaatgataaatctaaggtttcaagcaaaatatttttggaaaatttttattcaccaccataagcttggcagattcccagtacttagaaaactttttga

SEQ ID NO: 303875 - DNA, 201 bp, Homo sapiens
ccaatatgtaatattgcaaaatcattcatgggtaaatgattcatccaaagcacaatggatttttaatgtaacagagtatgagaagtgcattaatatggctkcccattccacagtccaacttaaacctttaagaaactgacacttgttgagttttggtgtagtatcagataagaatatccataattgtgcaaaaaggctatc

SEQ ID NO: 303876 - DNA, 201 bp, Homo sapiens
tgctgcagcctcaacctcctaggttcaagtgatcctctggcctcagcctccagagtagttgggaccacaggtgcaaaccaccacacacacttggctaattyttaaaatttttgtggagatgggggtttcgctatgttgcccaagctggtcttgaactcctggcttcaagcgatcctcccaccttggcctcccaaaatgctt

SEQ ID NO: 303877 - DNA, 201 bp, Homo sapiens
agataaaagttccaggcccctagctctcctttccatcctttgtattgctatctgagctttaaagagggtaagtgttatgttgaactgaaatcagcatttgyatgtgaaaggtaattagctcattaatggcagtcagataatgagatactggagttggtaatttcctttaaactgcaatttattgtgaatagggaggcactg

SEQ ID NO: 303878 - DNA, 201 bp, Homo sapiens
gataaaagttccaggcccctagctctcctttccatcctttgtattgctatctgagctttaaagagggtaagtgttatgttgaactgaaatcagcatttgcrtgtgaaaggtaattagctcattaatggcagtcagataatgagatactggagttggtaatttcctttaaactgcaatttattgtgaatagggaggcactgg

SEQ ID NO: 303879 - DNA, 201 bp, Homo sapiens
ggattcatgaaggcttaaacacatggtcaggggatcagactcactaatagctcttttatgtttcttccacttattgagataaaatctttttttttttttttgaaacaaggtttcactctgtcacccaggctggaatacagtggtgtgatgatggcttgctgcagcctcaacctcctaggttcaagtgatcctctggcctca

SEQ ID NO: 303880 - DNA, 201 bp, Homo sapiens
atctgagctttaaagagggtaagtgttatgttgaactgaaatcagcatttgcatgtgaaaggtaattagctcattaatggcagtcagataatgagatactrgagttggtaatttcctttaaactgcaatttattgtgaatagggaggcactggaaagtaaaatccacatagttctgtagaatagtaagatttgagtgttct

SEQ ID NO: 303881 - DNA, 201 bp, Homo sapiens
tggattcatgaaggcttaaacacatggtcaggggatcagactcactaatagctcttttatgtttcttccacttattgagataaaatctttttttttttttttgaaacaaggtttcactctgtcacccaggctggaatacagtggtgtgatgatggcttgctgcagcctcaacctcctaggttcaagtgatcctctggcctc

SEQ ID NO: 303882 - DNA, 201 bp, Homo sapiens
tggcagtcagataatgagatactggagttggtaatttcctttaaactgcaatttattgtgaatagggaggcactggaaagtaaaatccacatagttctgtrgaatagtaagatttgagtgttcttgtccggctagcctgtttggagaagagatgaggaaatacaaccttgagttatgagggaggaatcttatctttagagc

SEQ ID NO: 303883 - DNA, 201 bp, Homo sapiens
ctagttgttacaactcacagtaagggaagcgggtgttgctgctattatcctacaatgcacaggaccacaggacagccctccaacacaaagaattctcaggytcaagacatcaatagtgccaaggttgagaaaccctgctgtacatagcgttggatcgtgtgaatataccaccatttatttctctgtgtatttcttagagcc

SEQ ID NO: 303884 - DNA, 201 bp, Homo sapiens
ctcttaaagcaagagactcagcataatggtgagaggagctcacactccagagaaagtacatgtgcgttaatgacttgatgtcatttttcactcctctgtgkttttggacagatgattctcaactgtggttgcgttagcaagacctgtgattcccagataagtgagattaccagtatcctaaaaaatatttaggaaagaggg

SEQ ID NO: 303885 - DNA, 201 bp, Homo sapiens
tattttgaagtgaatttgactacaaatattttgaaaaatatatgcccctatgtattgaatctaaaaagcaattacaatttgtccttttcctctaattctcytatgcaactatcagaatggaaaataaatttcaggatacttttggatcaaaaatgacagaaatcaaattgcttgacatctagtaaccagagtggacatgaa

SEQ ID NO: 303886 - DNA, 201 bp, Homo sapiens
gagaaatcagaacaccctgtttatttaaattcctcttaaagcaagagactcagcataatggtgagaggagctcacactccagagaaagtacatgtgcgttratgacttgatgtcatttttcactcctctgtggttttggacagatgattctcaactgtggttgcgttagcaagacctgtgattcccagataagtgagatta

SEQ ID NO: 303887 - DNA, 201 bp, Homo sapiens
ggcaattctttttttctgatttacagttgtgtttttttaaagatggcaactttgttttactttcttcttccttctatattattttgaagtgaatttgactrcaaatattttgaaaaatatatgcccctatgtattgaatctaaaaagcaattacaatttgtccttttcctctaattctcttatgcaactatcagaatggaa

SEQ ID NO: 303888 - DNA, 201 bp, Homo sapiens
agtttctatgtgtattttttcagtagttttcctgtctcttcctttgtggtccagctgtcattggacatttcttgctgctgaagatgtagcttctctgaatrccacattcgatgccttctaatttgctgtgctgtatactgagaaatcagaacaccctgtttatttaaattcctcttaaagcaagagactcagcataatggt

SEQ ID NO: 303889 - DNA, 201 bp, Homo sapiens
aggcagaggctgcagtgagctgagatcacgccactacactccagcctgggcaacagagcgagactccatctcaaaaaataagataaaatgaaaagacagayatttaatgcagatatctaagctttaaaagattggatgactcaagccaatggcaattctttttttctgatttacagttgtgtttttttaaagatggcaact

SEQ ID NO: 303890 - DNA, 201 bp, Homo sapiens
catataacatcaaccatcacagtttctatgtgtattttttcagtagttttcctgtctcttcctttgtggtccagctgtcattggacatttcttgctgctgmagatgtagcttctctgaataccacattcgatgccttctaatttgctgtgctgtatactgagaaatcagaacaccctgtttatttaaattcctcttaaagc

SEQ ID NO: 303891 - DNA, 201 bp, Homo sapiens
agcattgtaacatgcctgagggccaccggctcagatgagttttctctacttcagaaagctattttccctttccagatttctttctttttttttttttttttaatgtaaagccatttcccagccagtgcagtcttctgtggtcactacattcctcatggaatatttaaaattatttaaaattaaatattccatgaggaatgt

SEQ ID NO: 303892 - DNA, 201 bp, Homo sapiens
agtcttttgtctaattaggcctttgactgattggatgaggcccactcacattctggagggtactctactttactcaaagtctactgatttaaatgttaatyccatctaaaaagtacctctacagaaacatctagaataatgtttgactaaatatctgagtactgtggcctagctaagttgacatataacatcaaccatcac

SEQ ID NO: 303893 - DNA, 201 bp, Homo sapiens
gcattagcactggctgttatcatttagtattacctctttcttctataaaacaaggaatgtgtatgtagttatgaaatcattctcttggtttataccatatcaactagatatttgtcagtgaaaaattgaaaatctacctcttcaccctctttgaattgtagtttgcattaaaaagattcgcatatttgaattttcaaaact

SEQ ID NO: 303894 - DNA, 201 bp, Homo sapiens
tcctcattcatttttctactaagttgaacattatttactctatattaaggctgtctctactttaaaaatgtgtgtgtgtgtgtgtgtgtgtgtgtgtgtgtttaaaaataattctagtattttacttctggaaggaaaattaggaggtcacctttaagctctttatatgacagttgatatacagcgttaagagctgtgcca

SEQ ID NO: 303895 - DNA, 201 bp, Homo sapiens
ctgcctgttttggtaggcctataagctaggaatggtttttacatttttttaaaagactgatggggagaagtgaaaggaaaaattatattttgtgttatgamaagtatatgaaattaaaattttagtgtctataaataaagctttcgaaacgtaccatgcttattcgtttacacattgtggcttcttttacagcaaggatgg

SEQ ID NO: 303896 - DNA, 201 bp, Homo sapiens
cctaattccttccccatgcaaatgaaagcattgtaacatgcctgagggccaccggctcagatgagttttctctacttcagaaagctattttccctttccasatttctttctttttttttttttttttaatgtaaagccatttcccagccagtgcagtcttctgtggtcactacattcctcatggaatatttaaaattattt

SEQ ID NO: 303897 - DNA, 201 bp, Homo sapiens
tattttctgtatggagtcttctctttaatgtttgtaggaaaagaactgccaactcatattttatgttttttagaaaattgtcaggctgagtgcagtggctyatgcctgcaatcctggcacttacggaggacaaggcggcttgagcctgggagtttgagaccagcctgtgcaacatagcaagacctcatccttacaaaaaaa

SEQ ID NO: 303898 - DNA, 201 bp, Homo sapiens
tcacttgtattttgttcctatttaatgcgattaatttctgtaaaatcctaaatagtgtcttctaaatggcaagccgctgtgccagtagctttttatatcartggggttttaattcccaccttcctgcttgcatcaagaattccttctcagttgtgatgggggactttgtcaagcattagaaagggacgaggtggtctctcc

SEQ ID NO: 303899 - DNA, 201 bp, Homo sapiens
aaaggaaggtagcacattccttctgttttatgcatctttaccatggaaaccaaagaaacagctaccagtcacattcatcccttcatcatttccacccctcrcttacctccaaccctggctaccctcccacccccaccccctatacacacacatagacacctaggagagggaaagggacagactgcctctaggggactggaa

SEQ ID NO: 303900 - DNA, 201 bp, Homo sapiens; identical to SEQ ID NO: 63422

SEQ ID NO: 303901 - DNA, 201 bp, Homo sapiens
ccatggaaaccaaagaaacagctaccagtcacattcatcccttcatcatttccacccctcacttacctccaaccctggctaccctcccacccccacccccyatacacacacatagacacctaggagagggaaagggacagactgcctctaggggactggaaagaagggaaggcaaaggcctgggcctttcctcttacatca

SEQ ID NO: 303902 - DNA, 201 bp, Homo sapiens
tcatcatttccacccctcacttacctccaaccctggctaccctcccacccccaccccctatacacacacatagacacctaggagagggaaagggacagacygcctctaggggactggaaagaagggaaggcaaaggcctgggcctttcctcttacatcatttcctggattaacatttttcaaggcccacagacagtgctgt

SEQ ID NO: 303903 - DNA, 201 bp, Homo sapiens
tttccacccctcacttacctccaaccctggctaccctcccacccccaccccctatacacacacatagacacctaggagagggaaagggacagactgcctcyaggggactggaaagaagggaaggcaaaggcctgggcctttcctcttacatcatttcctggattaacatttttcaaggcccacagacagtgctgttatgtt

SEQ ID NO: 303904 - DNA, 201 bp, Homo sapiens
ttcctcattcatttttctactaagttgaacattatttactctatattaaggctgtctctactttaaaaatgtgtgtgtgtgtgtgtgtgtgtgtgtgtgtgtttaaaaataattctagtattttacttctggaaggaaaattaggaggtcacctttaagctctttatatgacagttgatatacagcgttaagagctgtgcc

SEQ ID NO: 303905 - DNA, 201 bp, Homo sapiens
atttattgaatgaccaaaccaggatctctatttgtcataattaacaatagctaccaaagccttatattctttaattatagtttttagtctattcactgtckttaagtctattctaaacacagcatttgccttttctaattgaagcactccacccgcacctttatattatcaacgttctgcccagtaagtcttgcagtggcc

SEQ ID NO: 303906 - DNA, 201 bp, Homo sapiens
ccacaattacttttttaaaacaattttatgttgggtgtgtgcttttaaagacatttgtagactttatggatttaaactacctggaagaaaatccgagattytatccctataaactttattcttctacaccctcctccagtcattattaatttatgaataattcatgccttcccaatttccagcaaagtaagcaactcaagc

SEQ ID NO: 303907 - DNA, 201 bp, Homo sapiens
cgcgccgacccccaacccccaattccccggcacttgggtcccaccctccccgggagggggcgtggggaggaggagtaagagtggggcacggagggaagcargagaaagaggctctgtgtggaattcccggggcagtcctcgccccgcagcccctctccacctcgcgactctgggaatctgcgctccttggggtcgccgcgc

SEQ ID NO: 303908 - DNA, 201 bp, Homo sapiens
catcatgccctgctaattaccttttccttattttcagaattgtgcacagtataacattatttttctagaagtagccactttttttttttttttttttttttgagatggagtctcgctctgtcacccaggctggagtgcagagaagcgatctcgtctcactgcaacctccgcctcccaagttcgagcaattctcctgcctca

SEQ ID NO: 303909 - DNA, 201 bp, Homo sapiens
ataacaccccacaacctgaatccttcacttctcagattaaataatattccccaaagacacttagtttacttctagcttgctttaacaacaaaaataataaygcatatccctataccacgtctctgttttcaaagcattttctcaggcattatttcatttgatcctcacaaaagccctagaaaacaggcagcaattattatc

SEQ ID NO: 303910 - DNA, 201 bp, Homo sapiens
ttatggtgcacttgctcctcatgctgagggttcacagaagtaggcagagaaacagaagacagactctgggctcaagacacttcccaggaacagtataggcrcatggcaaatactaaatggatagctgccattatttcccttctcttctgcaagttcctgaagatttagaggactgcccacttttgaagatgcagcatttta

SEQ ID NO: 303911 - DNA, 201 bp, Homo sapiens
actcagcagtttggccgctgaacattctatcttcagccaccaccctgcaagcctcagatgattgtactggttactgaatgggttgacctctctctagtagrtagacgtgcaatggacacatagtaggtgcctgataaatgtttattcttatataatgtgtattaccgaaatatctttgaggtgtatttgtggtgggccggg

SEQ ID NO: 303912 - DNA, 201 bp, Homo sapiens
agtttcgcaattaaaagtttaagatggatttatattggctccagtgaagaatatgtgttttattaattaatactgtgcttggttttgtcttattttatagragaaccagcagaaatccaccaatgtagtctatcaggcccaccatgtgagcaggaataagagagggcaagtggttggaacaaggggtgggttccgaggatg

SEQ ID NO: 303913 - DNA, 201 bp, Homo sapiens
tgttcatatatatatatatatatacaaattgcaaactgacatgtgacacaattttatggaaattagtgtaacgtattacatgcttgttttatcattagaargaggctgggagatgtagtagaaagcctgggtgttagtcctaaccctaccatcagtgagaaatagagtcaaggtcaactacagaaataagagtctgatcaa

SEQ ID NO: 303914 - DNA, 201 bp, Homo sapiens
atggagtcttctctttaatgtttgtaggaaaagaactgccaactcatattttatgttttttagaaaattgtcaggctgagtgcagtggctcatgcctgcartcctggcacttacggaggacaaggcggcttgagcctgggagtttgagaccagcctgtgcaacatagcaagacctcatccttacaaaaaaataaaaacatt

SEQ ID NO: 303915 - DNA, 201 bp, Homo sapiens
gatccttggagtagaggaagttgtacattcaaggttttctaccctttttgtgtgtgtttattttaatgaggacaatgggaactacaccatttctttcctgytagttcatcctggattacctttttatatccattaaacatagaaattctgaagccatgtctgcctacatgtcatcctgattgcctttgtgtataattgcag

SEQ ID NO: 303916 - DNA, 201 bp, Homo sapiens
atcaaccccttcaagactgataaagacagagcagaggttctttagtatctagagtccccagaagtcaggaaggttgtgaacttggatgggtaaaaaaaatwtctgttttgagatgaagtcttgctctgtctcccaggctggagtgcagtggcacgatctcggctcactgcaacctccacctcctgtgtccaagcgattctc

SEQ ID NO: 303917 - DNA, 201 bp, Homo sapiens
attacaggcacgtgccaccacacccggctaattttttatatttttggtagagatgggttttcaccatgttggccaggctggtcttgaactcctggcctcargtgatcctcctgcctaggcctcccaaagtgctgggattacagatatgagccactgctcccagcagtaattttttttttataacttgtaacagaaatttgg

SEQ ID NO: 303918 - DNA, 201 bp, Homo sapiens
tgttccattcattacgctgctattctgaatgcatctcctaatttagtgagatctgagagccaccttagagattacgtagtccagtttttctccaccctgcyaagcttcacaaaatattaatgcctggacctcactcctagtgaatatgattgaatggatctgtgttggggaatggaggcagtcttcaaaaactggctacaa

SEQ ID NO: 303919 - DNA, 201 bp, Homo sapiens
gctattctgaatgcatctcctaatttagtgagatctgagagccaccttagagattacgtagtccagtttttctccaccctgctaagcttcacaaaatattratgcctggacctcactcctagtgaatatgattgaatggatctgtgttggggaatggaggcagtcttcaaaaactggctacaaggtttcttggttcagcca

SEQ ID NO: 303920 - DNA, 201 bp, Homo sapiens
tccttccccatgcaaatgaaagcattgtaacatgcctgagggccaccggctcagatgagttttctctacttcagaaagctattttccctttccagatttcyttctttttttttttttttttaatgtaaagccatttcccagccagtgcagtcttctgtggtcactacattcctcatggaatatttaaaattatttaaaatt

SEQ ID NO: 303921 - DNA, 201 bp, Homo sapiens
tgctggtatgtaaactgttcttagtgcattttatttatttatttattgagatggtgtcttgttctgtcacccaggctggagtgcaatggcacgatctcagytcactgcaacctctgcctcccaggttcaagtaattctcctgcctcagcctcctgagtagcttggattacaggtgcccaccaccacgcccagctaattttt

SEQ ID NO: 303922 - DNA, 201 bp, Homo sapiens
caatggcacgatctcagctcactgcaacctctgcctcccaggttcaagtaattctcctgcctcagcctcctgagtagcttggattacaggtgcccaccacyacgcccagctaatttttgtatttttagtagagacagggtttcaacatgttggtcaggctggtctcaaactcctgacctcaggtgatccccctaccttggc

SEQ ID NO: 303923 - DNA, 201 bp, Homo sapiens
ttgaacctgggaggcagaggttgcagtgagccaagatcgtgccagtgaactccagcctggcggcagagcaagactctgtctaaaaataaagtaaaataaartaaattaacagtgcatttaaaaataactaagaggataattggatttttgtaacacaaaggataaatgcttgaggtgatgggtacctcatttaccctgatg

SEQ ID NO: 303924 - DNA, 201 bp, Homo sapiens
cgcccagctaatttttgtatttttagtagagacagggtttcaacatgttggtcaggctggtctcaaactcctgacctcaggtgatccccctaccttggccycccaaagtgctgggattacagatgtgagccactgcacccggcccctagtgcatttattaatattcccttaccaccctctgattaaagaattaaggatacc

SEQ ID NO: 303925 - DNA, 201 bp, Homo sapiens
tactgagtactgacactagaggagtttgtttaaggatattcacatcagttaacaaatcaacgaaacgtttattaaacttctgttactcattcaacaaataygtaatgaatacctactataagtccaagtattccacatcatctcttttcatccttgcaaacattagcaggaactataatcccacaattttatgagatgtag

SEQ ID NO: 303926 - DNA, 201 bp, Homo sapiens
aggtgtgagccgccgcgtctggccaggttgtctttttattactgagttgccagtgtgctttacgtttcttcacatggtatatatatatatatatatatatatgtgtgtgtgtgtgtgtgtgtgtgtgtgtgtgtatatatataccctctccctcagagagtggagccccagttacctcatctttttgtctgtctttctccc

SEQ ID NO: 303927 - DNA, 201 bp, Homo sapiens
ggagagatgattccagtgggaagagctgaatgagaaaaggtgcaaaaccagaatgaccaagctgtgtccaggaaatcataaacagacctgctgctgagaasaaaagttctgttatctgagagtagaaaatatggctgaaaggtaaatggaaccggcttagcggagggccttaagttccaagctaaggattaggactttgtt

SEQ ID NO: 303928 - DNA, 201 bp, Homo sapiens
agcccctctccacctcgcgactctgggaatctgcgctccttggggtcgccgcgcccgcgagagacctcccgagcttctcaagtgggtccggatctagatcyaggaccagggacaggaaatcccctttctttcccaagagctcttccagacccgccttttcttctgtagggtctcggagcagatcgagctgactcccgttct

SEQ ID NO: 303929 - DNA, 201 bp, Homo sapiens
ttcttggagtttgtgtggtgttttctggtgattagaataggcaaaaaacgaacatggttatggcaaataggaagatcaggcaggctcagggctccagtcamcctagtgtgcgtcctggccgattggcaactcctagcaactgtctcagagcaaggggcaacgaggggtcggggcttccaccctggcacctgggttcactcg

SEQ ID NO: 303930 - DNA, 201 bp, Homo sapiens
ggtaaagaaaattcccatcctcaacccatctgcatcaaatgaagatgctgctgacagtagatattaaaagagatgttgaacacataaggtccaggtggccrcaatgctttccttttatcccttcctacatagatagatggaagggactcggcacaataaaaagaaggagcatgtagaaaaacatgggcgatttgagacctt

SEQ ID NO: 303931 - DNA, 201 bp, Homo sapiens
ggcagagcaggccagtaaaggtgaagcagctggaagccttttttctccaccaggaaaggaggatagagagcaagggaggttttaagtgggagatgctgcgygtgctttccccataaattctgagggcagtgcacagtattccaagttgtgtagcttctcacatgcaagctaggcccagaaccacttgagttcacaactatt

SEQ ID NO: 303932 - DNA, 201 bp, Homo sapiens
ggcactggagtgcagtggcatgatctcagcttaccaccatctccctctcccgggttcaagcaattctcctgcctcagcctcctgagtagctgggactgcargtgtgcaccacctcacccagtgaatttttgtatttttagtagagacggggtttcaccatgttcgccaggctggtcttgaactcctgacctcaggtgatcc

SEQ ID NO: 303933 - DNA, 201 bp, Homo sapiens
tgtgtgtgcaagggaatatgccttatattcatcctctattctatcacctgacaagaacgaaacagagttcaatggtctaaatttgcattcacgtgcagggytcctagaaatgatgatcctgcataattgttgtggaaatcatttgtcttctattggattcatgaaggcttaaacacatggtcaggggatcagactcactaa

SEQ ID NO: 303934 - DNA, 201 bp, Homo sapiens; identical to SEQ ID NO: 63423

SEQ ID NO: 303935 - DNA, 201 bp, Homo sapiens
tgatcctctggcctcagcctccagagtagttgggaccacaggtgcaaaccaccacacacacttggctaatttttaaaatttttgtggagatgggggtttcrctatgttgcccaagctggtcttgaactcctggcttcaagcgatcctcccaccttggcctcccaaaatgcttggattacagaagcgtgccaccacacctgg

SEQ ID NO: 303936 - DNA, 201 bp, Homo sapiens; identical to SEQ ID NO: 63425

SEQ ID NO: 303937 - DNA, 201 bp, Homo sapiens
tatgttgcccaagctggtcttgaactcctggcttcaagcgatcctcccaccttggcctcccaaaatgcttggattacagaagcgtgccaccacacctggcstcagatgaaatatcctgcatttactccatactagagaaaaatagagacgtgacatgtagcctgcatagcttttttgaattcttttacaatcactctgtac

SEQ ID NO: 303938 - DNA, 201 bp, Homo sapiens
cttcaagcgatcctcccaccttggcctcccaaaatgcttggattacagaagcgtgccaccacacctggcctcagatgaaatatcctgcatttactccatastagagaaaaatagagacgtgacatgtagcctgcatagcttttttgaattcttttacaatcactctgtaccagtacgtgttgtcaacaaaatgcagcaaaa

SEQ ID NO: 303939 - DNA, 201 bp, Homo sapiens
accttggcctcccaaaatgcttggattacagaagcgtgccaccacacctggcctcagatgaaatatcctgcatttactccatactagagaaaaatagagaygtgacatgtagcctgcatagcttttttgaattcttttacaatcactctgtaccagtacgtgttgtcaacaaaatgcagcaaaataaagagttgcatgata

SEQ ID NO: 303940 - DNA, 201 bp, Homo sapiens
gctaatggctcagggtaatctgcagaaatgaaaaaaactatattagaatggacaaaggtgagtctctttcaaaatattttttatataagttgttacatgtwtcagtttcgcaattaaaagtttaagatggatttatattggctccagtgaagaatatgtgttttattaattaatactgtgcttggttttgtcttattttat

SEQ ID NO: 303941 - DNA, 201 bp, Homo sapiens
gtcaggctggtctcaaactcctgacctcaggtgatccccctaccttggcctcccaaagtgctgggattacagatgtgagccactgcacccggcccctagtrcatttattaatattcccttaccaccctctgattaaagaattaaggataccaggagtcagcattttcttttttaagagacaggtctcaccctgtcacccag

SEQ ID NO: 303942 - DNA, 201 bp, Homo sapiens
gttagtcctaaccctaccatcagtgagaaatagagtcaaggtcaactacagaaataagagtctgatcaagtcaactgtgaaagtctctagttgtcactttyctcctctttggcaggaaaggacgggacaagatgattatgacatcccctttcagtgctaagggattcaataattctcatgttcatccctaaacatatttac

SEQ ID NO: 303943 - DNA, 201 bp, Homo sapiens
ataggcaaaaaacgaacatggttatggcaaataggaagatcaggcaggctcagggctccagtcaccctagtgtgcgtcctggccgattggcaactcctagmaactgtctcagagcaaggggcaacgaggggtcggggcttccaccctggcacctgggttcactcgatcctgcattgtacccactgcggaagggtgaagttc

SEQ ID NO: 303944 - DNA, 201 bp, Homo sapiens
  misc_feature (1)...(201): n = A,T,C or G
acataggctgtcagtcctcagtccttattctgtcctcagaaatcttccttgagtttcaaactgttttccaaaattgcatataacatgcacaactttttatnagatcatgatatattcagtatgcccagaggcttattaaaaggtagggttttatttttaagaattgtcatctcagccatatgcaataacgttcagagaact

SEQ ID NO: 303945 - DNA, 201 bp, Homo sapiens
caactcctagcaactgtctcagagcaaggggcaacgaggggtcggggcttccaccctggcacctgggttcactcgatcctgcattgtacccactgcggaarggtgaagttccaactcagccagacacagacccctgacctggagggcaccaaggagggtgccaaggagaggtggctcacctgtgctctgggagtgaggagc

SEQ ID NO: 303946 - DNA, 201 bp, Homo sapiens
gcgaaggctgggccactcccctcaaaggtttcatgcgggagaaggagtacttacaggttatgcactttgacaccctgctagatggtatgtttttgttgttrtttcttactctttgttgttaaggaaaaaaaaaaatctttcccagaagttttgcaggaacaggaagttagtctttagtttgcaaatcttattgcaaaactg

SEQ ID NO: 303947 - DNA, 201 bp, Homo sapiens; identical to SEQ ID NO: 63424

SEQ ID NO: 303948 - DNA, 201 bp, Homo sapiens; identical to SEQ ID NO: 63426

SEQ ID NO: 303949 - DNA, 201 bp, Homo sapiens
tccaggcgccggcttccctccccgccaccgcactgcacgcgccgacccccaacccccaattccccggcacttgggtcccaccctccccgggagggggcgtsgggaggaggagtaagagtggggcacggagggaagcaggagaaagaggctctgtgtggaattcccggggcagtcctcgccccgcagcccctctccacctcg

SEQ ID NO: 303950 - DNA, 201 bp, Homo sapiens
gtacctcatttaccctgatgtgattattatgcattgtattcctgtatcaaaatatcttatgcaccccataagcatatacactatgtacccaagaaagttamaaatttaaaattaaagaaaaaggtgaatgaggtattacccagattgtggctgattagtattaaaaaagacaaacacacagctgtcataagtaacttatta

SEQ ID NO: 303951 - DNA, 201 bp, Homo sapiens
gtggggaggaggagtaagagtggggcacggagggaagcaggagaaagaggctctgtgtggaattcccggggcagtcctcgccccgcagcccctctccaccycgcgactctgggaatctgcgctccttggggtcgccgcgcccgcgagagacctcccgagcttctcaagtgggtccggatctagatccaggaccagggacag

SEQ ID NO: 303952 - DNA, 201 bp, Homo sapiens
gagtctcgctctgtcgcccaggctggagcgtagtggcatgatctcgggtcactgcaacctccgcctcccgggttcaagcgattcttctgcctcagcctccygagtagctgggattacaggcaagtgccaccacgcccagctaatttttgtatttttagtagtgatggggtttcaccatattggccaggctactcttgaact

SEQ ID NO: 303953 - DNA, 201 bp, Homo sapiens
ctagagaggggctacaagcacccggtcctcctactacaccctctgggcggctggaccaaggatgacgatgtgcctctagactggcggatgaagcagcacgyggctgtgctcgaggaaggggtcctggatcccaagtcaaccattgttgccatctttccgtctcccatgttatatgctggccccacagaggtgagcaattcc

SEQ ID NO: 303954 - DNA, 201 bp, Homo sapiens
aaaatactagggtggtggaagtggttgcagaggtcagtgttaatggaaatcagaggtccttagcctgagatctaggacttcagggtgggctaacaaaaaaycttagaggcaaaaatgtttgtgttttgataagggaaggaaggagcattttcctgggttgagaatttatagcttttgatagattctgttttttcctttaat

SEQ ID NO: 303955 - DNA, 201 bp, Homo sapiens
gctatagattatttgctttgctggtttttgtgttttaaatacgtggaaccgtacaatgtgtactcttctgtgtttgtaagatgcatccttagtgttgtgcrtagctgtcctttgttcattctcattgccgtgtggtattccattgtgtaaagacatcacaatttatttacccagactaccactgatgggcagttgggtgtc

SEQ ID NO: 303956 - DNA, 201 bp, Homo sapiens
aggaatcctggcccagtgctccttacataccagtctgctctcctgatgtcttttccaatagaatctacaaggcctgatggtctacaaggaaggctgacttktatcttggtgtcttgattttgacacatgctgaacaccgactgcctgaagtaaaggtcattggacttagcagctagccatgagcaagaggttgattttgag

SEQ ID NO: 303957 - DNA, 201 bp, Homo sapiens
ttagaattgattacctcaagtcacacaggtcatttcgtggttgagccagaccttgagccaaggtagcccaggctccctaccctcacccttttatgcctcartgtctgactgagctatttagtgaagcacttctttgatctgtctctgtctttcttttctccctctaaaggactgcctctgaaggaaaaatccaggtcacca

SEQ ID NO: 303958 - DNA, 201 bp, Homo sapiens
gaaagcccaagaccagagtccagaatcttaggaatcctggcccagtgctccttacataccagtctgctctcctgatgtcttttccaatagaatctacaagrcctgatggtctacaaggaaggctgacttttatcttggtgtcttgattttgacacatgctgaacaccgactgcctgaagtaaaggtcattggacttagcag

SEQ ID NO: 303959 - DNA, 201 bp, Homo sapiens
taggcatggaataaatgcaaggttagggcttattttctgagaaataaacccttagtaggatgctagataaaacacaggacatccagctaaatttgaacttyagacaaacaagaaatacttttttgatataagtatgtctcaaatattgcatggggcatcctatgtttttatttgttaaatctggtcattttaactaggttt

SEQ ID NO: 303960 - DNA, 201 bp, Homo sapiens
taaaagactggaaatcatccaagtattcatcaaaaaagagctagttaaatatatattcatacaccggaacattatgcaagggtaaaatgaatgagaaaacyctctgtactgatgtggaaagatttgccaagacagatctgaaaaaggtgtgtaatagtgtggaaaggaggattaagcaaataaatgcctattttaaaattt

SEQ ID NO: 303961 - DNA, 201 bp, Homo sapiens
agttcagagattaaatactatgttagagtcattccttctaattaattttgaactgttttcgaaaaacgaagaacttgctggggagacaatgatcaagatcrtaacaaagttcccctagaagattaacagagcttggagtttactgtggatctctgcctgtgtggagaagaaacagtcaaactagaggaaacaaaactgtct

SEQ ID NO: 303962 - DNA, 201 bp, Homo sapiens
gttttctgtattttgggacttcatacaaatagaatcatatataatgtgtagtttttttggataaggcttctttgactcagcctaatgttttccattcattrtcatccatattccgtgtattaatagtccattccttttgattattgaatagtataaccattatataagtattctacactttgagttgggttattttctatt

SEQ ID NO: 303963 - DNA, 201 bp, Homo sapiens
tgctagatggtatgtttttgttgttgtttcttactctttgttgttaaggaaaaaaaaaaatctttcccagaagttttgcaggaacaggaagttagtctttrgtttgcaaatcttattgcaaaactgtttggatcatttacagtgtgctccattctattatgtttaagcttccatttttaggattttttggttgttctcaaa

SEQ ID NO: 303964 - DNA, 201 bp, Homo sapiens
gtttcttactctttgttgttaaggaaaaaaaaaaatctttcccagaagttttgcaggaacaggaagttagtctttagtttgcaaatcttattgcaaaactrtttggatcatttacagtgtgctccattctattatgtttaagcttccatttttaggattttttggttgttctcaaaggttgttcctttaaaactaaggaac

SEQ ID NO: 303965 - DNA, 201 bp, Homo sapiens
aaatggtttcatccactacactctaacaaaagagcattaaggcagctttctggccacgagctgaatggcttttagaaaaccaatctggtcaagctcagaarcatgtgttattgtgaagacttccggacccttctgtgatcatttccttcctagaactgcctgaacttatcaaataaacttatctatttcaagaccttcggg

SEQ ID NO: 303966 - DNA, 201 bp, Homo sapiens
gctgattatcagaagccagtggataggctgggtgcagtggcttacgcctgtaatcccaacactttgggaggctgaggcaggcggatcacttgaggtcaggrgttcgagaccagcctggccaacatggtgaaaccctgagtctactaaaaatacaaaaattagccgggtgtggtggcacacgcctgtaatcccagctactca

SEQ ID NO: 303967 - DNA, 201 bp, Homo sapiens
tttgggttcgttcagagggttgccccatactgccttctggtaaaatcttggcgccctaggcctaagcctgctcatcttgtgcctccttttcctcctcctcrgggcccattccagtggaacagaagtgctactttgggggtggactgaaacaagttgctgggcttccattggccattgccacttgcttgtcgttgtgaggag

SEQ ID NO: 303968 - DNA, 201 bp, Homo sapiens
ttccttaaagccccagattctgtgactatgactgatagcacagaaatgaatgtgtgtgtatatatatatatatatatatatatatatatatatatatatatgtatgtattctcctcttgtaggcattagtttttcttctctttgattctgttctctgcaccctttcatcatgaccttatcttgctgaatccaccatttcct

SEQ ID NO: 303969 - DNA, 201 bp, Homo sapiens
gttccttaaagccccagattctgtgactatgactgatagcacagaaatgaatgtgtgtgtatatatatatatatatatatatatatatatatatatatatatgtatgtattctcctcttgtaggcattagtttttcttctctttgattctgttctctgcaccctttcatcatgaccttatcttgctgaatccaccatttcc

SEQ ID NO: 303970 - DNA, 201 bp, Homo sapiens
cttctgaaaatgaggacattaaatctacattacctccaggttccttaaagccccagattctgtgactatgactgatagcacagaaatgaatgtgtgtgtayatatatatatatatatatatatatatatatatatatatatgtatgtattctcctcttgtaggcattagtttttcttctctttgattctgttctctgcacc

SEQ ID NO: 303971 - DNA, 201 bp, Homo sapiens
tcttctgaaaatgaggacattaaatctacattacctccaggttccttaaagccccagattctgtgactatgactgatagcacagaaatgaatgtgtgtgtmtatatatatatatatatatatatatatatatatatatatatgtatgtattctcctcttgtaggcattagtttttcttctctttgattctgttctctgcac

SEQ ID NO: 303972 - DNA, 201 bp, Homo sapiens
tgccaacatgtccagctaatttaaaaaaaatatgtgtgtatacacacacacacacacacacacacacacacatattttttggtagagatgaggtcttgctrtgttacccaggctggtcacaaactcttggcctgaagcaatcctcccatcttggcctcccaaaatgctgggattataggtgtaagccactgcacctggctg

SEQ ID NO: 303973 - DNA, 201 bp, Homo sapiens
caccctctgggcggctggaccaaggatgacgatgtgcctctagactggcggatgaagcagcacgcggctgtgctcgaggaaggggtcctggatcccaagtmaaccattgttgccatctttccgtctcccatgttatatgctggccccacagaggtgagcaattcccagagctgggctttgagactcaggaattcagactca

SEQ ID NO: 303974 - DNA, 201 bp, Homo sapiens
atgccaacatgtccagctaatttaaaaaaaatatgtgtgtatacacacacacacacacacacacacacacacatattttttggtagagatgaggtcttgcygtgttacccaggctggtcacaaactcttggcctgaagcaatcctcccatcttggcctcccaaaatgctgggattataggtgtaagccactgcacctggct

SEQ ID NO: 303975 - DNA, 201 bp, Homo sapiens
ttgctctatcacccaggctggagtacagtggagtgatcagggctcattgcagcctcaaactcctgggctcaggtgaccctcttgcctcagcctcctgagtygctgggactacaagtgcatgccaacatgtccagctaatttaaaaaaaatatgtgtgtatacacacacacacacacacacacacacacacatattttttgg

SEQ ID NO: 303976 - DNA, 201 bp, Homo sapiens
atgggggtttttcaacttgcaaaacctgttgattttcttttttcttttcttttttttcttttttcttttttttgagacagagtcttgctctgtcacccagrctggagtgcagtggcatgatctcagctcactgcaacctctgcctcccgggttcaagcgattctcctgagtagctaggactacaggtgcatgccaccatgc

SEQ ID NO: 303977 - DNA, 201 bp, Homo sapiens
aagtggcataaattggcaaatacatgttaccctcactatcacacgcatttctttctttatggtaacataaggtgaataattggaaaataaattttatttgytctcagactcaacctgtatgggtaatagtttttattgcctagccttacggctatgtcagtattcagcaaacgtgaacagaataatttgtttccactagct

SEQ ID NO: 303978 - DNA, 201 bp, Homo sapiens
agttctttcaaaagcctacccaagtgtttttgggagtccccaaggggtgcgtttcctgtgttcctgagtcagggccccagccatgtgccacttgctgtgtgattctgtgggtctgtctgtactcagaagtgcagatcatgctgggtcactccagccaccaaagttttggtgccagtagggcttttgcagtttatggactct

SEQ ID NO: 303979 - DNA, 201 bp, Homo sapiens
acgtgaacagaataatttgtttccactagctgcaatacttgaaccaagttgtaatattaatatgatttgtagataataaaaaagaaagtagaacaccagtrcatttttcacataaaaatttgacccagttcaaggtcgacgcttaaggatgttgtcaaccgatcaatgaggagtgcctagaaatcatgggattgtaaaagg

SEQ ID NO: 303980 - DNA, 201 bp, Homo sapiens
tgcagatcatgctgggtcactccagccaccaaagttttggtgccagtagggcttttgcagtttatggactcttcttcaagtgggaaaaattgtttccttcytctgtattaacctcaattgaagactgtctaggaggttgctttagttccacagtgttagagaattgagtgaggcaactcttgtaaggtgtatagatccctt

SEQ ID NO: 303981 - DNA, 201 bp, Homo sapiens
tcaattgaagactgtctaggaggttgctttagttccacagtgttagagaattgagtgaggcaactcttgtaaggtgtatagatccctttatcctcatgtgrctccagtgtggctctgtcaggagggttcaagatcagatgttttgctatttccatatcctttccccttccaagctgcaggacctgtgtctgaaactttctg

SEQ ID NO: 303982 - DNA, 201 bp, Homo sapiens
gatccctttatcctcatgtggctccagtgtggctctgtcaggagggttcaagatcagatgttttgctatttccatatcctttccccttccaagctgcaggrcctgtgtctgaaactttctgtaagattcttcttttccctgtgggaattatctgctggttccaccatctacctctgcaaacagagtccactggacatactt

SEQ ID NO: 303983 - DNA, 201 bp, Homo sapiens
tcacagtggatgagagtgtgagctgcgaagtcacactgtctaggtttgtatgtcagtgattagctatgaacctgggccaaattacttaaactctctgggcyttgttccttcatctgtataatggggatgttaataactgtacctacctacctcattggatgttgaaagtttaaaagaatgcctgattcaatagtcagtatt

SEQ ID NO: 303984 - DNA, 201 bp, Homo sapiens
aaaagaatgcctgattcaatagtcagtatttcatacatattagctattatgaacaaaccactctgcatacagttaaaagaatttgtcaggcatggtggctyatgaccgtagtcccagctactcagagcctaaggcgggaggatcacttgagcccaggagctagagtcccacctgggcaacatagggaaactttgtctctaa

SEQ ID NO: 303985 - DNA, 201 bp, Homo sapiens
tcttagagcctcaacttgagcattcatgagcataatgcagctcagccctggctttgaagttcttgaaaccatgcttaccaccatcagaataaaaagactaycaaacaggaggagttttaaatgtttacaataactgttagagtcaaaatacactgtcatgtatagccttggtcatagacaaaaattgtacattttggaact

SEQ ID NO: 303986 - DNA, 201 bp, Homo sapiens
agcctaaggcgggaggatcacttgagcccaggagctagagtcccacctgggcaacatagggaaactttgtctctaaaaataaatacataaataaaagaacytggagtcttgaagagactaagtgactttatccctagtcacatcaatttggaagtagcacagatacgatgttcgtcagctagccaacagatatacactgag

SEQ ID NO: 303987 - DNA, 201 bp, Homo sapiens
cccatcagtggttgtgaaactttcttttttattttctttttcttattttattttattttttgagacagagtctcgctctgttgcccaggctggagtgcagkggcgcgatctctgctcactgcaacctctgcctcctgggttcaagcaattcttctgcctcagcctaccaagtagctgagactacaggcgcttgccacgaag

SEQ ID NO: 303988 - DNA, 201 bp, Homo sapiens
ttagcaagacctgtgattcccagataagtgagattaccagtatcctaaaaaatatttaggaaagagggagcaggagggggaagaaaaggtgattttatgcygaaaccaccatgaataacatcaagaggactgctcgtttgggatcccatagattagtgggttttgttttgttttttgagacaggatcttgctctatcaccc

SEQ ID NO: 303989 - DNA, 201 bp, Homo sapiens
tctttcaaaagcctacccaagtgtttttgggagtccccaaggggtgcgtttcctgtgttcctgagtcagggccccagccatgtgccacttgctgtgtgattctgtgggtctgtctgtactcagaagtgcagatcatgctgggtcactccagccaccaaagttttggtgccagtagggcttttgcagtttatggactcttct

SEQ ID NO: 303990 - DNA, 201 bp, Homo sapiens
gcaggaataagagagggcaagtggttggaacaaggggtgggttccgaggatgtaccgtgtggctaacaggtatgtcatgttcatatatatatatatatatacaaattgcaaactgacatgtgacacaattttatggaaattagtgtaacgtattacatgcttgttttatcattagaaggaggctgggagatgtagtagaaa

SEQ ID NO: 303991 - DNA, 201 bp, Homo sapiens
agcaggaataagagagggcaagtggttggaacaaggggtgggttccgaggatgtaccgtgtggctaacaggtatgtcatgttcatatatatatatatatatacaaattgcaaactgacatgtgacacaattttatggaaattagtgtaacgtattacatgcttgttttatcattagaaggaggctgggagatgtagtagaa

SEQ ID NO: 303992 - DNA, 201 bp, Homo sapiens
acaactacttggatttgggtcttaatgcttcttgaaggaaatgtttggaaggggcattgtgcacatttgattcatgcttcaaggatggcacaccttatatstagttttcgtgcatcacatggctctttccacagatggcgtgatcaacatgagcatccccattgtactgcccgtctctgcagaggataagacacggctgga

SEQ ID NO: 303993 - DNA, 201 bp, Homo sapiens
gagcaggaataagagagggcaagtggttggaacaaggggtgggttccgaggatgtaccgtgtggctaacaggtatgtcatgttcatatatatatatatatatacaaattgcaaactgacatgtgacacaattttatggaaattagtgtaacgtattacatgcttgttttatcattagaaggaggctgggagatgtagtaga

SEQ ID NO: 303994 - DNA, 201 bp, Homo sapiens
tgagcaggaataagagagggcaagtggttggaacaaggggtgggttccgaggatgtaccgtgtggctaacaggtatgtcatgttcatatatatatatatatatacaaattgcaaactgacatgtgacacaattttatggaaattagtgtaacgtattacatgcttgttttatcattagaaggaggctgggagatgtagtag

SEQ ID NO: 303995 - DNA, 201 bp, Homo sapiens
tactttggaaggctgaggtgggagtatcacttgggcccaggagttggagatcagcctgggcaacaaggtgagaccctatctgtacaaaaaaaaaaaaaaaattaaccaggtatgatggtgtgcacctgtagtcccagctacttctagggctggggtgggaggatagctggatcctgggagttcaaggctgcagtgaggcct

SEQ ID NO: 303996 - DNA, 201 bp, Homo sapiens
ggtgtgagccgccgcgtctggccaggttgtctttttattactgagttgccagtgtgctttacgtttcttcacatggtatatatatatatatatatatatatgtgtgtgtgtgtgtgtgtgtgtgtgtgtgtgtatatatataccctctccctcagagagtggagccccagttacctcatctttttgtctgtctttctcccc

SEQ ID NO: 303997 - DNA, 201 bp, Homo sapiens
tgtagatgcacctctaaatatttgtgaaagcagagacgtaaaaggcctctataaaagggccagagctggggagattaaaggtaagagaattggctagtagmgtctaccagttacataggctgtcagtcctcagtccttattctgtcctcagaaatcttccttgagtttcaaactgttttccaaaattgcatataacatgca

SEQ ID NO: 303998 - DNA, 201 bp, Homo sapiens; identical to SEQ ID NO: 63421

SEQ ID NO: 303999 - DNA, 201 bp, Homo sapiens
tattgttagggcagctttctctgagaggttgccatttgtcatatcaatttccaaaagctgttataccttcatggacatttattctccgaatgatatttaartgccaacacaaattaccacatgatcaagtgaaatggactatactttaaagattatcagtgtagagctcactgcatttcattatatattttaaagggattc

SEQ ID NO: 304000 - DNA, 201 bp, Homo sapiens
attttcagctgagactgggaatagaaaagtgattgcttctaacctcagtgaaataaatcctcagtgagttaaaaaacggtggttcctctaaaaaaaaaaaattaaggtaaaaaacagaacataaaaattatcatcttaaccttcttgtaagtgtgcaactcagtaatgttaagcatattcacattgttgtgaaccaaatct

SEQ ID NO: 304001 - DNA, 201 bp, Homo sapiens
cactgcatttcattatatattttaaagggattcattgccttaaatatttgctctcaagatgtcaaggttaacatatatatttttttgcagtcaaagtttcmctctgttacccaggccggagtgcaatggtgcattcatggctcactgcagcctcctgggctcgaggggtccttttacctcagcctctccagttgctgggat

SEQ ID NO: 304002 - DNA, 201 bp, Homo sapiens
tcaaggttaacatatatatttttttgcagtcaaagtttccctctgttacccaggccggagtgcaatggtgcattcatggctcactgcagcctcctgggctygaggggtccttttacctcagcctctccagttgctgggattataggcatgagttgccatccctggctaatagtattttcttatttgttcacttgatttggt

SEQ ID NO: 304003 - DNA, 201 bp, Homo sapiens
tatacttcaataccagatggaaaatatttaaacttatagaaaaaaaacaaaggttgccatgtttttcttttctttctttctttttttttttttttttttttgagacagagtcttactctgttgcccaggctggagtgcagtggcgagaccccggctcactgcaacctccgcctcccaggttcaagtgattctcctgcctca

SEQ ID NO: 304004 - DNA, 201 bp, Homo sapiens
actgtatttttctttagactggagtccaaacaacaggaaatttcccaaccagatgtagctattgtgtatgatgtagcatttggctgacaaaagtaaacttrtttctaaattatcattgtacattttgttcctgagtcttttacatttatgatcctcttccaatgactgttggtcctcatttagtttcacaaagctggaaat

SEQ ID NO: 304005 - DNA, 201 bp, Homo sapiens
gtaaacttgtttctaaattatcattgtacattttgttcctgagtcttttacatttatgatcctcttccaatgactgttggtcctcatttagtttcacaaakctggaaattttttttcctacagtgtttataaaagattttaagttgatgaagaataaatcgatttaaactgaatgtacctggttggattgtgtatgattgt

SEQ ID NO: 304006 - DNA, 201 bp, Homo sapiens
gtcagtaagcaatccacagaaagcatgatttctagtgacaacgacagcatttctgaaggggttattctttgttagcctctctcccttttcctcaactagastatgcagtggatttaatcatcttccatcagcaacctccattaacatagtgctttacagtttgccccctgcagcaacccatggagatacatgtcatttatt

SEQ ID NO: 304007 - DNA, 201 bp, Homo sapiens
atcgtttttttgagatagaatctactcctggtgaagattctcttgaaatggcaacaaagtattcagaatattatgtaagcttagttgataaagcagtggcrgcctgtgagaggattgactccaattttgaaggaagttctaccatgcgtaaaatgctatcaaacagcatctcatgctacagagaaatctttcatgaaagaa

SEQ ID NO: 304008 - DNA, 201 bp, Homo sapiens
catcagcaacctccattaacatagtgctttacagtttgccccctgcagcaacccatggagatacatgtcatttattagcccatttttccagtgaggaaactgagtttagaaaagttgaatgacacacatagtaaaagggagaactgctgcctttgaatttagtgttctctgcaaaggacttagctgctctaattgcccgag

SEQ ID NO: 304009 - DNA, 201 bp, Homo sapiens
ctcaaagtctactgatttaaatgttaatcccatctaaaaagtacctctacagaaacatctagaataatgtttgactaaatatctgagtactgtggcctagytaagttgacatataacatcaaccatcacagtttctatgtgtattttttcagtagttttcctgtctcttcctttgtggtccagctgtcattggacatttct

SEQ ID NO: 304010 - DNA, 201 bp, Homo sapiens
aaaaatttaaaattaaagaaaaaggtgaatgaggtattacccagattgtggctgattagtattaaaaaagacaaacacacagctgtcataagtaacttatyatacaaaaaatgcatattctcattcccatagattcatatcaattatctgatttttttctttgttttcaattcagtgtattggtatgcagatagagcctaa

SEQ ID NO: 304011 - DNA, 201 bp, Homo sapiens
atgtgagtgtgtgtgtgtagaggagtgtttcagagttcttccttattcttgtcttcctttttgattgtaatcatctatagagggcttcaacttagccagcrggattttgttgacaatttggggctttccatattgaaaatacagctatatattttcttacttatggctagaagtcaaggatggctgtttgaccttttctgt

SEQ ID NO: 304012 - DNA, 201 bp, Homo sapiens
tgcagaaagacaaatagcatgttctctcactcatatgtggattctaaagatgaccgcatagaaatagagagtagaatagtggttaccagaggctggtaacratagaagggaagggaggatgaatacagttacataggaggaataagtcctggtgttccattgcacagtgaagtgcctatagtagctagaagagaggatgtt

SEQ ID NO: 304013 - DNA, 201 bp, Homo sapiens
aatgtagctttcagttattgcttgaattcattcactcctcttctattccatcttgggtcaggacatttcaattctttcctctctcttgtcttactcccccmtaatctcccactctttagctagagtgaattattcaacttttctttggaaacccctttattaagatacaatttaccgcaaagcctcttgccaccaccagcc

SEQ ID NO: 304014 - DNA, 201 bp, Homo sapiens
tgcctccggaccttattacctcctttcagaagtcagcactgactcctatgacacatgagcataactgagtgccccttctttgtcctcccagagtaatttgkacttgcccctttcatacctgtgacaggtgaagctgaaatgtcaatatgggggccactgatgagaggcagtgggtgcagtgatgagaagaatctggtttgc

SEQ ID NO: 304015 - DNA, 201 bp, Homo sapiens
gattgtttcttttgagtcttcctctccttggcctctttgagcctatttatcatagctttcttagtctttacgctagtggttgagcttatcctctcctttaygcattcttgtgtgtaattttgagcccaattccctatttgctacttcactgggctcctgaagcctgctccccattccttttggcgcatctagttctgcaaa

SEQ ID NO: 304016 - DNA, 201 bp, Homo sapiens
gaggagaaagtagatgtataggtatggatatttgaaaatgttcttgttgaattatctgactgagcacagagtttagaaaagaggccatgaaaacacaaccraaaaccttgcataattgccttctgtctaccgcagggtttctcagcctcagcactgttgacatattggactagataattcttcactgagagggcagttctg

SEQ ID NO: 304017 - DNA, 201 bp, Homo sapiens
ggctattttttatatttttagtagagacagggtttcaccatattggccaggctggtcttgaactcctgacttcatgatccacccacctcagcctctcaaartactgggattacaggagtgagccaccatgcccgaccatgtttttctttttcattagtttcaccattcttcaaccctggcttacccctaacatttgtgggg

SEQ ID NO: 304018 - DNA, 201 bp, Homo sapiens
taatcccagatactcgggaggctgaggcgggagaatcacttgaacccgggacgcagaggtttcagtgagtcgagatcatgccactaaaaaaaaaaaaaaaagaatcaaactattttggcctctccattttctggttgagaaattctttatattttaaatatatatttatttccaaatttaatattgaaaactagaatatag

SEQ ID NO: 304019 - DNA, 201 bp, Homo sapiens
aaattagctgggcgtggtggtgtgcgcctgtaatcccagatactcgggaggctgaggcgggagaatcacttgaacccgggacgcagaggtttcagtgagtygagatcatgccactaaaaaaaaaaaaaaaagaatcaaactattttggcctctccattttctggttgagaaattctttatattttaaatatatatttattt

SEQ ID NO: 304020 - DNA, 201 bp, Homo sapiens
actttaaagattatcagtgtagagctcactgcatttcattatatattttaaagggattcattgccttaaatatttgctctcaagatgtcaaggttaacatrtatatttttttgcagtcaaagtttccctctgttacccaggccggagtgcaatggtgcattcatggctcactgcagcctcctgggctcgaggggtcctttt

SEQ ID NO: 304021 - DNA, 201 bp, Homo sapiens
gctgagtgcagtggctcatgcctgcaatcctggcacttacggaggacaaggcggcttgagcctgggagtttgagaccagcctgtgcaacatagcaagaccycatccttacaaaaaaataaaaacattagctgggcatgatgatgtatacctgcagtctcagctactcgggaagctggtggtgggaggatcgcttgagcctg

SEQ ID NO: 304022 - DNA, 201 bp, Homo sapiens
aattaaccccagagaggagagttgagcttgtctctgtgttggtatatttttggctttaactgttcaggctctactcttttcaagcagagtatgaggaaacytgaggactacatttttgttttgttttgcttttcctgtattagaatttttattttctgtatggagtcttctctttaatgtttgtaggaaaagaactgccaa

SEQ ID NO: 304023 - DNA, 201 bp, Homo sapiens
tggactttctctcaagcactctgcaaagcacaaaccccagtgttatctcaaggctattgaaaaccaaagtacacagtgttttgtgatttagaatttcaccrtgaaacctctttttacattcttaatcatattgcttttcaggatcgtgagaatgcccgcaaaatacatgaatcagcagggctgccattctttgaaatattt

SEQ ID NO: 304024 - DNA, 201 bp, Homo sapiens
ggtgaatgaggtattacccagattgtggctgattagtattaaaaaagacaaacacacagctgtcataagtaacttattatacaaaaaatgcatattctcawtcccatagattcatatcaattatctgatttttttctttgttttcaattcagtgtattggtatgcagatagagcctaaacaggtaatgaaataagagactt

SEQ ID NO: 304025 - DNA, 201 bp, Homo sapiens
aaatgggaccagataagaaatttagtctgacaacatgagtagagaaacaaaatcatagctgtagctatgcacaaaaccataatcagagcttgcagccctgyccatcttgaaaatgcgcaaggaacataagtatcttcataaagaatggacccaaccaaatgctggaacaagaactcagagttcatgctctgtggctagtga

SEQ ID NO: 304026 - DNA, 201 bp, Homo sapiens
aggtgcagtggctcacacttgtaatcccagcactttgggaggccagggtgggcggatcacttgaagtcaggagtccgagaccagcctgaccaacatggagraaccccatctctactaaaaatacaaaattagccgggcatggtggtgcatgcctgtaatcccagctacttgggagcttgaggcaggagaatcgcttgaacc

SEQ ID NO: 304027 - DNA, 201 bp, Homo sapiens
aatacaaaattagccgggcatggtggtgcatgcctgtaatcccagctacttgggagcttgaggcaggagaatcgcttgaacccaggaagtggaggttgcaytgagccgaggtagcgccattgcactccagcctgcaacaagagcgatactccgtctcaaaaaaaataagaaaaagaaatttgaattaggcctcctgggcca

SEQ ID NO: 304028 - DNA, 201 bp, Homo sapiens; identical to SEQ ID NO: 272947

SEQ ID NO: 304029 - DNA, 201 bp, Homo sapiens; identical to SEQ ID NO: 272948

SEQ ID NO: 304030 - DNA, 201 bp, Homo sapiens; identical to SEQ ID NO: 272949

SEQ ID NO: 304031 - DNA, 201 bp, Homo sapiens; identical to SEQ ID NO: 272950

SEQ ID NO: 304032 - DNA, 201 bp, Homo sapiens; identical to SEQ ID NO: 272951

SEQ ID NO: 304033 - DNA, 201 bp, Homo sapiens; identical to SEQ ID NO: 272952

SEQ ID NO: 304034 - DNA, 201 bp, Homo sapiens
aagaagcccatttggtggaaagcaatagagcataacatgaaattgccttaggtacaaagctcactgatctattctagagtcttcgtcccacttgagacaakagcctagttctagtccagttccactccaattataaggacttgtccttctcttgatggtcaagaattactcatgttctgtttactattagataaaaattta

SEQ ID NO: 304035 - DNA, 201 bp, Homo sapiens; identical to SEQ ID NO: 272953

SEQ ID NO: 304036 - DNA, 201 bp, Homo sapiens; identical to SEQ ID NO: 272954

SEQ ID NO: 304037 - DNA, 201 bp, Homo sapiens; identical to SEQ ID NO: 272955

SEQ ID NO: 304038 - DNA, 201 bp, Homo sapiens
cccacctcagcctcccaagtagctgggactacagacatgcgccaccaaatccagctaatttttaggtggtttttttttttttttttttttttttttttttygtagagacgatttctcattatgttgtccaggctggtctcgaattcctgacctcaagtgatcctctcgcttcggcctcccaaagtgttgggattacaggcg

SEQ ID NO: 304039 - DNA, 201 bp, Homo sapiens; identical to SEQ ID NO: 272956

SEQ ID NO: 304040 - DNA, 201 bp, Homo sapiens; identical to SEQ ID NO: 272957

SEQ ID NO: 304041 - DNA, 201 bp, Homo sapiens; identical to SEQ ID NO: 272958

SEQ ID NO: 304042 - DNA, 201 bp, Homo sapiens
gtcctctatgttccctcccctcaccaccccgcaacaggccccggtgtgtgatgttcttctctgtgtgtccatgtgttcttattgttcacctcccacttackagtgagaatatgcagtgtttggttttctgttcctatgttagttttttgaaggtgatggcttccagcttcatccacgtccctggaaaggacatgatctcat

SEQ ID NO: 304043 - DNA, 201 bp, Homo sapiens
tggctcaaggagcaggaaaagcatctcctaatactcagagagtgtgggagaaatctgccaatttcttctcttttgttctccattctctagtgccccaggcwcctagaaatcctgccaaccaagcagtggtaatgactgcaatgtcagcaggtggtgacaagctccaatatctctgagggaggggaaccttcttccatggag

SEQ ID NO: 304044 - DNA, 201 bp, Homo sapiens; identical to SEQ ID NO: 54313

SEQ ID NO: 304045 - DNA, 201 bp, Homo sapiens
aaactgaaacaagaaaaattcttgaaaactggtagaaaaaaatgatacattatttacaggggaaaaacagtgtgaatgactgcagatttctcatcagaaaycacggaggctagaatgaagtagaacaacttaaagggctaaaagtaaaaacctgtcaacccagaattctatatttagcacaaatatccttcatgattaaat

SEQ ID NO: 304046 - DNA, 201 bp, Homo sapiens; identical to SEQ ID NO: 54314

SEQ ID NO: 304047 - DNA, 201 bp, Homo sapiens
aactataaataatggagagatatactatgttcagaactggaagaataccaggtactcaggagtctgagggaggagaagtgcttgagcccaggagctctggrctgtagttcactatgcagcttgggtgttggcactaagtttggcatcaatatggtgacctcctaggggtggggtactccaggttgtctaaggaggggtgga

SEQ ID NO: 304048 - DNA, 201 bp, Homo sapiens
taaaaaagaactcaattcaaaatacatttatataggtatgttaaaaatagaaaaatatatgccatgtgaacactaaccaaaaggaagcgagaatagttatrttactatcagacaaagtagacttcagagcaaagaaaattactggagataaagaagggcattataaaatgtgtgaatcataacctgatagaattgaaaaga

SEQ ID NO: 304049 - DNA, 201 bp, Homo sapiens; identical to SEQ ID NO: 272961

SEQ ID NO: 304050 - DNA, 201 bp, Homo sapiens; identical to SEQ ID NO: 272962

SEQ ID NO: 304051 - DNA, 201 bp, Homo sapiens
atatttggaaacatcaatactcctctctcagtgatggatggaagtagtaaacagaaaatcagcaaaaatatagaaaaattgaaccataccatcaacccaamcgtacctaataggtatttataaaatactccacccaacaatagcagaatacatactctttaaaatgtacatggcacagcacattcatcaaaacataatcca

SEQ ID NO: 304052 - DNA, 201 bp, Homo sapiens; identical to SEQ ID NO: 272963

SEQ ID NO: 304053 - DNA, 201 bp, Homo sapiens; identical to SEQ ID NO: 272965

SEQ ID NO: 304054 - DNA, 201 bp, Homo sapiens; identical to SEQ ID NO: 272964

SEQ ID NO: 304055 - DNA, 201 bp, Homo sapiens
taaggcaggcagatcacctgaggtcaggagttcgagagcagcctggcaaacatggtgaaaccctatctctacaaaaattagccgggtgtggtggcacatgmctgtagtcccagctactcagaaggatgaagcagaattgcttgaacctaggaggcggaggtggcagtgagctgagatcatgccactgcactccagcctggg

SEQ ID NO: 304056 - DNA, 201 bp, Homo sapiens; identical to SEQ ID NO: 272966

SEQ ID NO: 304057 - DNA, 201 bp, Homo sapiens; identical to SEQ ID NO: 272967

SEQ ID NO: 304058 - DNA, 201 bp, Homo sapiens; identical to SEQ ID NO: 272968

SEQ ID NO: 304059 - DNA, 201 bp, Homo sapiens; identical to SEQ ID NO: 272969

SEQ ID NO: 304060 - DNA, 201 bp, Homo sapiens; identical to SEQ ID NO: 272970

SEQ ID NO: 304061 - DNA, 201 bp, Homo sapiens; identical to SEQ ID NO: 272971

SEQ ID NO: 304062 - DNA, 201 bp, Homo sapiens; identical to SEQ ID NO: 272972

SEQ ID NO: 304063 - DNA, 201 bp, Homo sapiens
aaataaaatgcaccaggttcttaaccacttgtcagtcacagtaacttatgggtatgccatacgacattataactgattaaatagccaaattatatttgttrtatcatagggaatttaacatttattgataaatatgatacaagttaaattgtaaggccctgcacttgagtctctccctcaaaattgtgactggtacagcat

SEQ ID NO: 304064 - DNA, 201 bp, Homo sapiens; identical to SEQ ID NO: 272973

SEQ ID NO: 304065 - DNA, 201 bp, Homo sapiens; identical to SEQ ID NO: 272974

SEQ ID NO: 304066 - DNA, 201 bp, Homo sapiens; identical to SEQ ID NO: 272975

SEQ ID NO: 304067 - DNA, 201 bp, Homo sapiens; identical to SEQ ID NO: 272976

SEQ ID NO: 304068 - DNA, 201 bp, Homo sapiens; identical to SEQ ID NO: 272977

SEQ ID NO: 304069 - DNA, 201 bp, Homo sapiens; identical to SEQ ID NO: 272978

SEQ ID NO: 304070 - DNA, 201 bp, Homo sapiens; identical to SEQ ID NO: 272979

SEQ ID NO: 304071 - DNA, 201 bp, Homo sapiens; identical to SEQ ID NO: 272980

SEQ ID NO: 304072 - DNA, 201 bp, Homo sapiens; identical to SEQ ID NO: 272982

SEQ ID NO: 304073 - DNA, 201 bp, Homo sapiens; identical to SEQ ID NO: 272981

SEQ ID NO: 304074 - DNA, 201 bp, Homo sapiens; identical to SEQ ID NO: 272983

SEQ ID NO: 304075 - DNA, 201 bp, Homo sapiens; identical to SEQ ID NO: 272985

SEQ ID NO: 304076 - DNA, 201 bp, Homo sapiens; identical to SEQ ID NO: 272984

SEQ ID NO: 304077 - DNA, 201 bp, Homo sapiens; identical to SEQ ID NO: 272986

SEQ ID NO: 304078 - DNA, 201 bp, Homo sapiens
cggcgtgagggtttgcacagagtggtgggaaggagagaatgtatttgctgggtacgcagagcatttctgcactctcaagaaggctgcccgatttgtcaggkttgcgccccgagcccgcgagaagggcagggactttttgtgataagcgccttcccaaaggtagtgtctgttaaacgcagagccttagcgagtgctgctcgc

SEQ ID NO: 304079 - DNA, 201 bp, Homo sapiens
ccactgcgcccagccaagaacacctaatttaaggaatcctttcttcccaccaggtgtctagtgcattaaccttgattgcagagcaaactagctacactccrtttaataacaaaagtggaaaattcagcaccttggaggagaactgccataactattttaagagttactgatacagaaaacacacacacacaaaacccaaaa

SEQ ID NO: 304080 - DNA, 201 bp, Homo sapiens; identical to SEQ ID NO: 272987

SEQ ID NO: 304081 - DNA, 201 bp, Homo sapiens; identical to SEQ ID NO: 272988

SEQ ID NO: 304082 - DNA, 201 bp, Homo sapiens; identical to SEQ ID NO: 272989

SEQ ID NO: 304083 - DNA, 201 bp, Homo sapiens; identical to SEQ ID NO: 272990

SEQ ID NO: 304084 - DNA, 201 bp, Homo sapiens; identical to SEQ ID NO: 272991

SEQ ID NO: 304085 - DNA, 201 bp, Homo sapiens; identical to SEQ ID NO: 272992

SEQ ID NO: 304086 - DNA, 201 bp, Homo sapiens
aacatttattgataaatatgatacaagttaaattgtaaggccctgcacttgagtctctccctcaaaattgtgactggtacagcatggaggacccaaactcyagtgaagaataggctttatgaacaacaaattcagtaggtatcaaaagggtggttactagcaaaaggaagatagtttgatcctaaattgtgatgagaaatc

SEQ ID NO: 304087 - DNA, 201 bp, Homo sapiens; identical to SEQ ID NO: 272994

SEQ ID NO: 304088 - DNA, 201 bp, Homo sapiens; identical to SEQ ID NO: 272995

SEQ ID NO: 304089 - DNA, 201 bp, Homo sapiens; identical to SEQ ID NO: 272993

SEQ ID NO: 304090 - DNA, 201 bp, Homo sapiens
gctcagtaaagctccctcaactttgggaatgtttctattaattacccatagtaaattaaacaaaaaaatgtgttgtacttggctgggcatggtggctcctrcctgtaatcccagtgctttgggaggccaagctgggaggattgcttaagccgaggagtttgaggctgcagtgagctatgatccagacactgcactccaacc

SEQ ID NO: 304091 - DNA, 201 bp, Homo sapiens; identical to SEQ ID NO: 272996

SEQ ID NO: 304092 - DNA, 201 bp, Homo sapiens
tacccatagtaaattaaacaaaaaaatgtgttgtacttggctgggcatggtggctcctgcctgtaatcccagtgctttgggaggccaagctgggaggattkcttaagccgaggagtttgaggctgcagtgagctatgatccagacactgcactccaacctgggcaacagagcgagaccctgtctctaaaagttaaaaaaaa

SEQ ID NO: 304093 - DNA, 201 bp, Homo sapiens
agagggttttgtcatgttgtgcaggctggtcttgaacttgggctccagtgatcctcctgtgtcagccttccaaggtgctgggattacaggcatgcacccckggcctctgaagcattccttgagtcagatatgcttggtgttgtttactcaacctgagtcaccttttgcttccctgttcaccattacctactgccttaccct

SEQ ID NO: 304094 - DNA, 201 bp, Homo sapiens; identical to SEQ ID NO: 272997

SEQ ID NO: 304095 - DNA, 201 bp, Homo sapiens
ggactagtttctaatggacacatcaggatagggcaatcatataattatcatcagtaaaatggtttgaatcgtatgtcatacctttggaccacttgtctttyctccccccttcccttttttttcctctttaatcaggttaaatctatacctctcctatgtcctaggcatcctcttttctctctagtcaggttaaatcttgtt

SEQ ID NO: 304096 - DNA, 201 bp, Homo sapiens
tgatctgcctgcttcagcctcccaaagttgctgggattacaggtatgagccaccgcacccggcctatcagtgggtttttataaggactgagtgagggagtgtgtgtgtgtgtgtgtgtgtgtgtgtgtgtgtgtgtgtgtgtgtaaaatcacttaggacaagcctggcacgcagaaagcactatgtaagtgttagctgtta

SEQ ID NO: 304097 - DNA, 201 bp, Homo sapiens; identical to SEQ ID NO: 272999

SEQ ID NO: 304098 - DNA, 201 bp, Homo sapiens; identical to SEQ ID NO: 272998

SEQ ID NO: 304099 - DNA, 201 bp, Homo sapiens
ctatgttctaggcatcctcttttttcaagatgataatatattataggagaataaagacttcaactataattctgtgagctgagtactatgccagtgctaascaaagtgaattacgggaactaacagaatggacacagagtttagtgtacttgtgcttagaagataaaagacctcaaattattcttgttcattttagtttca

SEQ ID NO: 304100 - DNA, 201 bp, Homo sapiens
gatctgcctgcttcagcctcccaaagttgctgggattacaggtatgagccaccgcacccggcctatcagtgggtttttataaggactgagtgagggagtgtgtgtgtgtgtgtgtgtgtgtgtgtgtgtgtgtgtgtgtgtgtaaaatcacttaggacaagcctggcacgcagaaagcactatgtaagtgttagctgttat

SEQ ID NO: 304101 - DNA, 201 bp, Homo sapiens; identical to SEQ ID NO: 273001

SEQ ID NO: 304102 - DNA, 201 bp, Homo sapiens; identical to SEQ ID NO: 273000

SEQ ID NO: 304103 - DNA, 201 bp, Homo sapiens
tatactggcataattactgttatataattttacctatttgttgaagttctattctttctaaatcattgtcaagtgaattacttctaatgagcaatgaatagagtcaggtttactgtgtttacttattcaaagatttcagatttgtttttccttccaaaggcgttctatcctgaatctcatcatgaggcttccttgccttga

SEQ ID NO: 304104 - DNA, 201 bp, Homo sapiens
atctgcctgcttcagcctcccaaagttgctgggattacaggtatgagccaccgcacccggcctatcagtgggtttttataaggactgagtgagggagtgtgtgtgtgtgtgtgtgtgtgtgtgtgtgtgtgtgtgtgtgtgtaaaatcacttaggacaagcctggcacgcagaaagcactatgtaagtgttagctgttatt

SEQ ID NO: 304105 - DNA, 201 bp, Homo sapiens; identical to SEQ ID NO: 273003

SEQ ID NO: 304106 - DNA, 201 bp, Homo sapiens; identical to SEQ ID NO: 273004

SEQ ID NO: 304107 - DNA, 201 bp, Homo sapiens; identical to SEQ ID NO: 273002

SEQ ID NO: 304108 - DNA, 201 bp, Homo sapiens
ctgcaacctctgcctcctggattcaagtgattctcctgcctcagcctcccaagtaactgggattacaggtgcccgccaccacacccagctaatttttgtayttttttttagtagaaacaaggtttcaccatgttggccaggctggtcttgaactcctcacctcaggtgatccacctgcctcggcctcccaaagtgctggga

SEQ ID NO: 304109 - DNA, 201 bp, Homo sapiens; identical to SEQ ID NO: 273006

SEQ ID NO: 304110 - DNA, 201 bp, Homo sapiens; identical to SEQ ID NO: 273005

SEQ ID NO: 304111 - DNA, 201 bp, Homo sapiens; identical to SEQ ID NO: 273007

SEQ ID NO: 304112 - DNA, 201 bp, Homo sapiens
ttttaaattaggaatgtaggcatgcacgtatataaagccttaaatactaaacaggcacgggtgtattcaattccattctgattcctgtccatgaacttaaycatagttttcaacattcatgcatccctttcatcccatcctttaaagccttgtgattttggcatttcatggtcttactttcaactagattttaaagtttag

SEQ ID NO: 304113 - DNA, 201 bp, Homo sapiens; identical to SEQ ID NO: 273008

SEQ ID NO: 304114 - DNA, 201 bp, Homo sapiens; identical to SEQ ID NO: 273010

SEQ ID NO: 304115 - DNA, 201 bp, Homo sapiens; identical to SEQ ID NO: 273009

SEQ ID NO: 304116 - DNA, 201 bp, Homo sapiens; identical to SEQ ID NO: 273011

SEQ ID NO: 304117 - DNA, 201 bp, Homo sapiens; identical to SEQ ID NO: 273012

SEQ ID NO: 304118 - DNA, 201 bp, Homo sapiens; identical to SEQ ID NO: 273013

SEQ ID NO: 304119 - DNA, 201 bp, Homo sapiens; identical to SEQ ID NO: 273014

SEQ ID NO: 304120 - DNA, 201 bp, Homo sapiens; identical to SEQ ID NO: 273015

SEQ ID NO: 304121 - DNA, 201 bp, Homo sapiens; identical to SEQ ID NO: 273016

SEQ ID NO: 304122 - DNA, 201 bp, Homo sapiens; identical to SEQ ID NO: 273017

SEQ ID NO: 304123 - DNA, 201 bp, Homo sapiens; identical to SEQ ID NO: 273018

SEQ ID NO: 304124 - DNA, 201 bp, Homo sapiens
gctaaagtacagacacaaagccgcggcgtgagggtttgcacagagtggtgggaaggagagaatgtatttgctgggtacgcagagcatttctgcactctcargaaggctgcccgatttgtcaggtttgcgccccgagcccgcgagaagggcagggactttttgtgataagcgccttcccaaaggtagtgtctgttaaacgca

SEQ ID NO: 304125 - DNA, 201 bp, Homo sapiens; identical to SEQ ID NO: 273019

SEQ ID NO: 304126 - DNA, 201 bp, Homo sapiens
tctgcctgcttcagcctcccaaagttgctgggattacaggtatgagccaccgcacccggcctatcagtgggtttttataaggactgagtgagggagtgtgtgtgtgtgtgtgtgtgtgtgtgtgtgtgtgtgtgtgtgtgtaaaatcacttaggacaagcctggcacgcagaaagcactatgtaagtgttagctgttatta

SEQ ID NO: 304127 - DNA, 201 bp, Homo sapiens
ctgcctgcttcagcctcccaaagttgctgggattacaggtatgagccaccgcacccggcctatcagtgggtttttataaggactgagtgagggagtgtgtktgtgtgtgtgtgtgtgtgtgtgtgtgtgtgtgtgtgtgtaaaatcacttaggacaagcctggcacgcagaaagcactatgtaagtgttagctgttattat

SEQ ID NO: 304128 - DNA, 201 bp, Homo sapiens; identical to SEQ ID NO: 273020

SEQ ID NO: 304129 - DNA, 201 bp, Homo sapiens
atccttagagggaaatttatatttataacatgaaatattgacattaaaaaagaagaaagttctcacgtcactgatctttaagaagctaaaaagttaataayaataaaataaacccaaatcaagcagaaggaagaaaatttttaaaagctaggagcagaaatgaatgaaattgaaaacagaaatcaatagagaaaaattaat

SEQ ID NO: 304130 - DNA, 201 bp, Homo sapiens
gctacagagcaagactctatcaaaaaaaaaaaaaaaaaaaaggaaagaaagaaagagagagagaaagaacatttgacagacttcaacatccattcagattaaaaaaaaaaaattctcagcagacgagggtagaaggggatttcacaacctcataaaggtcatgtacaaaaagccaacatctaatatattatgtggtgaaag

SEQ ID NO: 304131 - DNA, 201 bp, Homo sapiens
gggggtgctgaagcaggaggatcacttgagcctaggaggtggaggctgcagtggtcattgtcactctactccagcctgggtgagagagcaagaccctgtcaaaaaaaaaaaaaaaaaaagccataacaatctatgtaacagaaaaatttgggaacagagcataatgagtacgaatacaggttctagaattagatagcccag

SEQ ID NO: 304132 - DNA, 201 bp, Homo sapiens
ataatggttcatatgattcagaagacatgatttaaaaaattaaaaaataatgattgaaattatccttttatgatatttttaaaagaacaaaggtaaccaaktgaattatactggcataattactgttatataattttacctatttgttgaagttctattctttctaaatcattgtcaagtgaattacttctaatgagcaat

SEQ ID NO: 304133 - DNA, 201 bp, Homo sapiens
ggaagaggttgcagtgagccaagatcacgccactacactccagcctgggagacagagtgagactccatctcataataaataaataaataaataaataaataaataaaataaataaaataatgaatccctccagaagtttctcaatttactgtccccagattccccatcagcagaatcactatctatggtagctatagcctt

SEQ ID NO: 304134 - DNA, 201 bp, Homo sapiens
gatgggaataacagccaatattaatgatggtctctgaactgagaaatatccataattttcatggatcgataaatacgttaaactttattatctttgggtcrtagggatgaaatcttacaggttttatataactatcataaatgttttatagactactgatcagtaagactcagccagaggggtgtattaagaatgggaatg

SEQ ID NO: 304135 - DNA, 201 bp, Homo sapiens
gttgcagtgagccaagatcacgccactacactccagcctgggagacagagtgagactccatctcataataaataaataaataaataaataaataaataaawtaaataaaataatgaatccctccagaagtttctcaatttactgtccccagattccccatcagcagaatcactatctatggtagctatagccttataaaat

SEQ ID NO: 304136 - DNA, 201 bp, Homo sapiens
ttgataaatttcctgtgttgggttcagaaacagattttgagaatgataattaaaatgaagtatcatggaccccatcttcctgtagaatgaggaggaaatgrggtaacactagagagacttttagttgtcttctctttttggcctatgagtgtgtgttcaggtgctgcaaatccttctgattgattcaactgaagaaatatg

SEQ ID NO: 304137 - DNA, 201 bp, Homo sapiens
ataaaataatgaatccctccagaagtttctcaatttactgtccccagattccccatcagcagaatcactatctatggtagctatagccttataaaatgtayttctctagtaataagacttgaaagttgaagttactctttgatccatggactgcagaatggatgatgtgttagtaggcatgtaaacaacattctgctgtac

SEQ ID NO: 304138 - DNA, 201 bp, Homo sapiens; identical to SEQ ID NO: 273021

SEQ ID NO: 304139 - DNA, 201 bp, Homo sapiens; identical to SEQ ID NO: 273022

SEQ ID NO: 304140 - DNA, 201 bp, Homo sapiens
tggagagtctcttgaaagtctgctgagcactgatagcctctgttttttgttgttgttgttgttgtttgtttttaatgaacattgtcctcgtctcataatctttccgttcttctcaaaggtctatctctctaaatagtctagtaatcccaaacctagcttcacatccattttttttttaaattaggaatgtaggcatgcacg

SEQ ID NO: 304141 - DNA, 201 bp, Homo sapiens; identical to SEQ ID NO: 273023

SEQ ID NO: 304142 - DNA, 201 bp, Homo sapiens
tactcctgaatttactttctagagagtggtatttaaaaaagaggtaaaatgttattattcttgataaaagtagtaaatgaaaacacaaatagagataaatmtatgtccttactgctctactctccccttagctaattctcagttaaacatgattcattcagcaccataagacaggggggaaaaaaacatgattcataagaa

SEQ ID NO: 304143 - DNA, 201 bp, Homo sapiens; identical to SEQ ID NO: 273024

SEQ ID NO: 304144 - DNA, 201 bp, Homo sapiens
acaggtgtctttctcaagaaaaaagaggcatcattcttaaatttgaagttggtttgttacttctatgagggaagtgttacaagccaacacactatttactrtgttaatagacaatggaattaacaataaattggattatgctgaataggtaaggagtttcttactcctgaatttactttctagagagtggtatttaaaaaa

SEQ ID NO: 304145 - DNA, 201 bp, Homo sapiens; identical to SEQ ID NO: 273025

SEQ ID NO: 304146 - DNA, 201 bp, Homo sapiens; identical to SEQ ID NO: 63445

SEQ ID NO: 304147 - DNA, 201 bp, Homo sapiens; identical to SEQ ID NO: 63446

SEQ ID NO: 304148 - DNA, 201 bp, Homo sapiens
ttaactaattacatctgcagtaaccctatatccacataagattacatccggaggaactgggagttaggacttcaacatatgaaactaaggggggcatggtscaacccatagcaaccacgtatctcattatacctccagacttcatttccaccatgtttttcacaattatttgctgctgttccctgctggacagttacattt

SEQ ID NO: 304149 - DNA, 201 bp, Homo sapiens
aacgaactttagctgactgatagagctaactgacaccataagttcaccctgtaatgtgagtgaggtttttttaaaaaaattcattcatcagataattattwaaaactatgtgctaggcataactatatgttggacactgtgatggtgtcaccttggctatgccctggtacccagatatttgccaaacatcagtctaggtat

SEQ ID NO: 304150 - DNA, 201 bp, Homo sapiens
tttgtcaccatccaaagctcaatcctatgtgacaaaattgtattcctcttaatatttaattgaggggagggaagatgactaggaaagaatttctaagaagstctccttaggtgggcaataataaaaaaaaacattgagaaacattggtatagaaagagcatttgggcataggaaagatcacacatgaaactactgaaatga

SEQ ID NO: 304151 - DNA, 201 bp, Homo sapiens
attggctgtgctctttcctttattatgtgtaggtgtataacagagaggaactgcaagtaattgctgacctttgcatcaaatatgacacactctgcatcagygatgaggtttatgaatggcttgtatattctggaaataagcacttaaaaataggtaccaactataacacagagtcacatatctaaatgtgtttgggcacat

SEQ ID NO: 304152 - DNA, 201 bp, Homo sapiens
gatccaaaccatatcaagctatctgcacatgtaagaagttacgtacttacctggctattcattgcagatgattgaggagaatccattatcatctacagacrattgattacataaaccatgatctatccaaacattgaaatgttatatgaccatattaagtttcctactggtgctataacaaattaccacaaacttagtgac

SEQ ID NO: 304153 - DNA, 201 bp, Homo sapiens
tatatagatttttatacctggtgatctttgcttatctcttgacttatttggctttcatgttgagttttatcctttttgagacctaattatttctttaaacrtaagaaaaattaggtcattttcccttttataagtgatcaactaatgacacctttttctttgcaaaaaagtgttcagattgctgcatattaatataaaagg

SEQ ID NO: 304154 - DNA, 201 bp, Homo sapiens
attacaataatttatccagttaaaacccaattctcttccagcctcacctctcctgagcatgggtaagaagcagggagcatcggccaggcgtggtagcgcaygcctgtaatcccagcactttgggaggccgaggcgggtagatcacctcaggtcaggagttctcaaccagcctaacatggtggaaccccatctctactaaat

SEQ ID NO: 304155 - DNA, 201 bp, Homo sapiens
gatggtagagggaagatccctagaaaggatcctgcttttacatcttcaaattacagacaaagccagcaggcagcatactcattattgagaacagtaggagyagtcgctgcactggcagcaggaacttctctagaccgtttggcatgatggaggaaacggcaaaaacatacagtcatgtcatctggaaactatgtaaggcaa

SEQ ID NO: 304156 - DNA, 201 bp, Homo sapiens
ttgtgctcaggggtgagtcctagagctgggctgggttcctgagtatttcataacaacccagctgccccatcaagattcattcccataaacaacagttcttwtgcaaatttgtttcagagagggtgtgggtaaccttttgagtcaggattgagatagtcttttttgattctgtaagtactttaaggctcggctaagtgcaaa

SEQ ID NO: 304157 - DNA, 201 bp, Homo sapiens
tagagctgggctgggttcctgagtatttcataacaacccagctgccccatcaagattcattcccataaacaacagttcttatgcaaatttgtttcagagarggtgtgggtaaccttttgagtcaggattgagatagtcttttttgattctgtaagtactttaaggctcggctaagtgcaaacagctcccacgtttgaggag

SEQ ID NO: 304158 - DNA, 201 bp, Homo sapiens; identical to SEQ ID NO: 63464

SEQ ID NO: 304159 - DNA, 201 bp, Homo sapiens
tctttttgtttccaagcaagccacctttaagtaacagctctttttcaatttgaattttcaggactccttctcagttcttcacatgagatttaatcatttasgtataactgattcctccattaacctatagagtttaatataggttcacaggaattcaactgttatttcctgagtgacttctttgccaataattttactcag

SEQ ID NO: 304160 - DNA, 201 bp, Homo sapiens
ttatatcttcattcttcatgcttagaaacctgtttatggaaaaagatggtctagttctgactggacattagatcctcaagaactggaaagtaaatttaatyccaaaaccaaagctattatactaaatactccacataacccacttggcaaggtaagcaagtctcatctccttatacagtcttctgacctatcattttctca

SEQ ID NO: 304161 - DNA, 201 bp, Homo sapiens
taattccaaaatcaataaaggggaaatttgagtcaccctacacacattcccagtcgaggtcaaacaaggcaacattatgcttctgtttcaattcacactayaagcaattgttctctgtacagtgattttgctgtttaaaatggcccccaagcctagtgctgaagtgctgtctagtattcctaagtgcaagaaggctgtgat

SEQ ID NO: 304162 - DNA, 201 bp, Homo sapiens
caaggagggggaaaggaaaaggaagaaaaaaaaggaaggaaggggagagagcctagaagagaacttagggagagctaatccaggagtcttcagaccccctrcttgcctcaggctgtaccttcataatcccttcacttctcctatgaaagtagttaccttggataaccactgctctcttgactgtcagtgtgagtagtgtct

SEQ ID NO: 304163 - DNA, 201 bp, Homo sapiens
cttgtaatagttcattatcatcttagcaaatttcagaaaagtaaggtgttatgattttcctataatttggtcttcaggtctgtctctctggaaagtggctrtaaactctagctgttccctgatggggctccaggggaggtcctggatgtttgcagtgtgcctttcatgggctacttgtttatcctggcagatggcctgatg

SEQ ID NO: 304164 - DNA, 201 bp, Homo sapiens
ggagatgaagtaagtatattaacattatcgtaatacccatattaatcaattatcatttgtcccacctttgaatctttcgcttatattctactcttttctcyttttatttttaattatgttttaagtataatgcatgtacagtaaagttcacaaatcttaaatgtacagctggataaattactgtgtaaatttctgtgcaac

SEQ ID NO: 304165 - DNA, 201 bp, Homo sapiens
ggaactgtgaggaggaagagaagtggaaattgtgtcaagggtgactaagccctgcttctggtataagaaagaccaacttatattcacaatggatgccaagrcaacatacagtcataagaattcattacatgaggtttggctcaaactgaaacactctccttcctttcacattagcttatttcttcatttgttgtgagagaa

SEQ ID NO: 304166 - DNA, 201 bp, Homo sapiens
gcaggctcccaagctctatgcttatatagaacctcttaaggtgttctagactctgagatttgggaagtgctttttctatattgagtctaaatgtgcagttyattttatgaaatgataaaaaaaattagcacagttgtcatcacttatatttttgcctttgaatcataaatccccaagatttccatatgaattattattttt

SEQ ID NO: 304167 - DNA, 201 bp, Homo sapiens
tagcaacagaaatcccatggcaaatgtttagcctgtccacccttgctgggaacttgacaaaattttcagcaggatttaaagcagctttttgcagccctggrcttgtctaatgctacttccactgcctgtgctctggatcttatttcctcacacactctcagaattggctcagtctatgctcttggaccttcaatctctact

SEQ ID NO: 304168 - DNA, 201 bp, Homo sapiens
gggtagtccaaaccatgtcaactataggattacaaactgggctgcaacttttgggtcttcgcacctccctttcctttgcctggaaacacttttcctccagrtatccacctgacttcagatatccttcacctccttcaggcctttgtccaatgtcagttttcatgaccatcacattgaaaatagttaacacctctccctcca

SEQ ID NO: 304169 - DNA, 201 bp, Homo sapiens
gctggaattataggcatgagccaccgcacccagctgattctcctatttttaataacaaaaatatgctacctccattctcacctcaaagcctaccacagtakcatgattaaatcatagcaaataacttcaaccccacttctgtgaaaaatataatgaaaaaacaagctaccaaaccagcacttccaactaggatcgtaccaa

SEQ ID NO: 304170 - DNA, 201 bp, Homo sapiens
tcaactataggattacaaactgggctgcaacttttgggtcttcgcacctccctttcctttgcctggaaacacttttcctccaggtatccacctgacttcaratatccttcacctccttcaggcctttgtccaatgtcagttttcatgaccatcacattgaaaatagttaacacctctccctccagcatttgctttgtcctt

SEQ ID NO: 304171 - DNA, 201 bp, Homo sapiens
cagatcacgaggtcaggagatcaagaccatcctggctaacgtggtgaaacccagtctctactaaaaatacaaaaaattagccaggcatggtggcacgtgcyggtagtcctgtgtccggaatttattccttcctgtgggttcttggtctcgctcgcttcaagaatgaagccacagacccttgtggtgagtgttacagctctt

SEQ ID NO: 304172 - DNA, 201 bp, Homo sapiens
tctaatagtctatcaatagtctaatcaatcaatagtctaataatttagggggcaatattcatacagtggaatatcatatggcaatgaaaattaacaaagtrcagctacacacaataacatgaatgaatttcatcaacactgttgtcatagggtttcttcacagtgccttcaaagaatgagctagagctctcagtagacagt

SEQ ID NO: 304173 - DNA, 201 bp, Homo sapiens
cccgtctgtactaaaaatacaaaaaattagccgggcgtggtggcgggcgcctgtagtcccagctactcgggaggctgaggcaggaaaatggcgtgaacccrggaggcggagcttgcagtgagccgagatcgggccactgcactccagcctgggcgacagagcaagactccgtctcaaaaaaaaaaaaaaccaaaagaatac

SEQ ID NO: 304174 - DNA, 201 bp, Homo sapiens
aatttctagcttacaatgaaaaattactagacataagaaaacacaagaaaatatgacctgtagcaaagaaaaaaagaagttaatagaaataggcctaaagktgacccagatctagaaattagcagacaaggactttaaagcaaacatttgaagtatgtttaagaaattagatgaaaacgtggtaataataagtgaacagag

SEQ ID NO: 304175 - DNA, 201 bp, Homo sapiens
cccagctactcgggaggctgaggcaggaaaatggcgtgaacccgggaggcggagcttgcagtgagccgagatcgggccactgcactccagcctgggcgacrgagcaagactccgtctcaaaaaaaaaaaaaaccaaaagaataccaaggctgttacgttgccttataaatgaagcttagcagaatccaacatttgtagtta

SEQ ID NO: 304176 - DNA, 201 bp, Homo sapiens
actcgggaggctgaggcaggaaaatggcgtgaacccgggaggcggagcttgcagtgagccgagatcgggccactgcactccagcctgggcgacagagcaagactccgtctcaaaaaaaaaaaaaaccaaaagaataccaaggctgttacgttgccttataaatgaagcttagcagaatccaacatttgtagttaaaacaga

SEQ ID NO: 304177 - DNA, 201 bp, Homo sapiens
cgtgaacccgggaggcggagcttgcagtgagccgagatcgggccactgcactccagcctgggcgacagagcaagactccgtctcaaaaaaaaaaaaaaccmaaagaataccaaggctgttacgttgccttataaatgaagcttagcagaatccaacatttgtagttaaaacagaaaggcagtctgttgcttttggagtcga

SEQ ID NO: 304178 - DNA, 201 bp, Homo sapiens
attacaggaacattctgttgttttcctctgccatctagtggcaaaagaaagtaattttcctggttttttgaatggatagccataccttaaaaagcatccarattgcgcagtagtgctagcggcttcgcggttcagtcctcctaactgacagccgccactggtgctgagctgctaggaagcccctgtcggcgagcttgttgg

SEQ ID NO: 304179 - DNA, 201 bp, Homo sapiens; identical to SEQ ID NO: 63465

SEQ ID NO: 304180 - DNA, 201 bp, Homo sapiens
gtctttcctgtatgtcatacaaggaacttacttgtgaaactcttagtacatcttacctaaaatgatgttcagagcatggcttaagatattttttgaaactractttttaaatattattattgttctctttactacattacaagccttaaaacagattagctttctagggtaggatgatactttttgtccttaggtgagaag

SEQ ID NO: 304181 - DNA, 201 bp, Homo sapiens
actgcaataggtttataccagcatcaccacaaacacgtgactaatgcatcatgccacaatgttacaacagctacaatggctccactaggcaagtaggaacwgttttttttttttgagatggagtctacctctgttacccaggctggggtgcagtggcgtgatctcggcttactgcaacctctgcctcccgggtgcaagcaa

SEQ ID NO: 304182 - DNA, 201 bp, Homo sapiens
tcacacctgtaatcccaaactttgagaggccaaggtaggaggatcccttgaggccaggagtttgagaccaacctgggcaacaccacaagaccctgtctctwtaaaatatacaaacaaacaacaacaaaaaaaatagtttggcacagtaggatatgcctatagtcccacctgctcaggagactgaggcaggaggatcacttg

SEQ ID NO: 304183 - DNA, 201 bp, Homo sapiens
gcagacagatgcagagaatggattcccagaggctagctttggatatccaaacatttcatagaatttatccagagatttctgaagtccattatcctcttctwcggtctctgattggccttacacagaaaggtgaaatcaaaagttctcagtggtcccagagtcattttgtttagtatttaggctcctggtgtctggatccac

SEQ ID NO: 304184 - DNA, 201 bp, Homo sapiens
aaatgatgtgaatataaatttgtgtaggaagaatacatttattagaatgcctccagtgatgagagattatatcatagaaagaaaacttgaaagaaagcaarctcacttatcaaaaatgtttacttggattttacgtaagcttatgatacatcagctagctgtaagtgtctgatagtgatgtacccatcatatatttattcc

SEQ ID NO: 304185 - DNA, 201 bp, Homo sapiens
ttttctttgactttcatgatcttgatacttttgaaaattatcaatgaattatttttaagaaagtacctcaatttaagtttgatgtttcctcatgcttagaytcaggctatgcacttcggcaggaaaccacagaagtgatgatactctatccttttcattgtatcaggtggcacatgatttcatttattcctattaccagtg

SEQ ID NO: 304186 - DNA, 201 bp, Homo sapiens
ccactgtgcatccctcaccttcccagtccctgagagaatacccttttcccggttcaggctttgacattttgtgccaggctgctacactacatcttcacccsacctgggctttatcacccatgccgacctgtcctgtcatcctcctggagaggtgcccccatctaggtctccaataccccataccaggccaccactgtcacc

SEQ ID NO: 304187 - DNA, 201 bp, Homo sapiens
tgggtgacagagcgagaccctgtctcaaaaaaaaaagacaccacaactccacccggagaagtaataaaatctcaaagaagcatgagcagccaacacaattwtatagcaggaaagaaaaagcaaaaaagctaggaaagaacataacagtttctttttaagatctgtgtttaaacaaagacacttaggaagtggtacaagtgc

SEQ ID NO: 304188 - DNA, 201 bp, Homo sapiens
cccagctactcaggaagctgaggcaggagaatcgcttgaacccgggaggcagaggttgtggtaagccgagatcgtgccactgctctctagcctgggcaacraagtgagactccgtctcaaaaaaacaaaacagaacagaacctttcttcttcaataataaattgaagacaattcacctactgtaactttttaccttataaa

SEQ ID NO: 304189 - DNA, 201 bp, Homo sapiens
ccagctactcaggaagctgaggcaggagaatcgcttgaacccgggaggcagaggttgtggtaagccgagatcgtgccactgctctctagcctgggcaacgragtgagactccgtctcaaaaaaacaaaacagaacagaacctttcttcttcaataataaattgaagacaattcacctactgtaactttttaccttataaac

SEQ ID NO: 304190 - DNA, 201 bp, Homo sapiens
gctgaggcaggagaattgcctgaatccaggagacagaggttgcagtgagctgagatcgtgtcactacactccagcctgggcaacaacagcaagacttcgtytcaaaaaaaaaaaagaaaagaaagaaaaaaaagatgttgatagatatgaagaagaaagataaaatagggaagaggaaggatataaagctccaggtgggag

SEQ ID NO: 304191 - DNA, 201 bp, Homo sapiens
agatatacagtgttaaatagggtaatctttgaaagcctccctgataaggtaacatttgaacaactaactgaaggggattaagcagccacatggttacctasagaaaaacccctttggacagagagaacaagcggaaaggcccagtggtagacagcctggctggcatgttaatatcagagaacagcacagagactggaatgg

SEQ ID NO: 304192 - DNA, 201 bp, Homo sapiens
taatttgaaaagaaccactagtatttaatgtatagaagaaagaagtaagatatctgcctcaatttgttttcagcaataaattataaaatttcctggatgaygataaccatcaatattagttgctttagggcattcaagaagatcaaagagtacaagtcaataaagttgaaacaatatgaaatgtggattgctgaaactgaa

SEQ ID NO: 304193 - DNA, 201 bp, Homo sapiens
ttaagctgggactgcagaacgaatatttatcctgatctatattgttaactttctttaaactctcataaccctttatcataccacttttatgaaagatgccrctatctgctttgtgttatgttattcttttacaactttgattcccttcactatgccagacaagatgtttaaggaaacatgttaatgaagttcacagtttca

SEQ ID NO: 304194 - DNA, 201 bp, Homo sapiens
cctaatcacttcctaaaggccccacctcctaataccatcaccttggggtttactattttaatatatgaatatgagagtgggcacaaacattcagtccactrtacttaacaacattggctttttccttggcccagtttgctgtcctggctcttgaagaaagatagaggaattactgtagatgttccagaaactcatttctag

SEQ ID NO: 304195 - DNA, 201 bp, Homo sapiens
ttgtgttatgttattcttttacaactttgattcccttcactatgccagacaagatgtttaaggaaacatgttaatgaagttcacagtttcatatacataawctcctttaatcctatacatagttttgtctcatacttcgatgttgttaatcctttgttgcttctttctctgcactctgttgggagtattataaggcttagc

SEQ ID NO: 304196 - DNA, 201 bp, Homo sapiens
tatgaattattatttttttaaaagaacaacatttgtactttatatgcttccaaaaggaatgtgagccttctcatattaaaagttttctatgcagtaatatrtaaatagaaatgattgtatctaaatcaaaaatcaatgatacatggccagtacagtgactcctgcctgtaatcccagcactttgggaggccaaggcgggag

SEQ ID NO: 304197 - DNA, 201 bp, Homo sapiens
aattctgcacattaatttgatcaccagagtgccagtgagcttactttgagaactattgcaaaaggtgtaacaaaacaggagaaatggttccatgactagatttttttttttttttttttacaaagatgagagccagccacagaggagggtcttaagcaaatcagataacctagcagtgaagatggtacatcggggctattt

SEQ ID NO: 304198 - DNA, 201 bp, Homo sapiens
tagaaactatagagtatagcatttgaaggtgggaagaaaacaagcatgctactaagatctctagcctgaactactcagcagtgatgagacctttaaccagrgtaaatatggagaggagcagatttgtatggaagggctgagcaaagggaattcctgcttctcatgctttaaacttgctgagtttgggtgtctgtgggacat

SEQ ID NO: 304199 - DNA, 201 bp, Homo sapiens
agaatttaaaaattatccaggcatgttggtgtgctcccatagtcccagctacttgggagactgagggggaggattgcttgaacccaggaggttgaggctgyagtgagctgtgatcacaccactgcacttcagcctgggcaacaaagcaagaccctgtcttaaaataataatagtaataatgtctgttgcggcattgtatat

SEQ ID NO: 304200 - DNA, 201 bp, Homo sapiens
tggtagctggacacatggaagagaatgaattttctcaaggggaatatataaacagagaaggcagccagagatttgcagggtgtgacaccttaatacaccawaatgttatcatgttttaaattgtatcagaggccacaattgcccatcttgttggtgacctctgtctcaagtaatttgaactgtttcccagtggaaaatcag

SEQ ID NO: 304201 - DNA, 201 bp, Homo sapiens
tttgtgccacgtactcaaaacacccttttgaagaaaacattagctccatttttgcaggtaaaaagatttagaaagttttaaatagcttccctgaagtcacmcagctagattctaaatagttctgtttccaaaaagcattgttttttatattacctaaagctgttatatgtaattctgacatgccatacaaatctaaagtta

SEQ ID NO: 304202 - DNA, 201 bp, Homo sapiens
ctcatgcctgtaatcccagcactttgggaggccaaggtgggcagatcacgaggtcaggagatcaagaccatcctggctaacgtggtgaaacccagtctctmctaaaaatacaaaaaattagccaggcatggtggcacgtgccggtagtcctgtgtccggaatttattccttcctgtgggttcttggtctcgctcgcttcaa

SEQ ID NO: 304203 - DNA, 201 bp, Homo sapiens
ctcaggaccccaagagccaacaattctgtagcaacagaaatcccatggcaaatgtttagcctgtccacccttgctgggaacttgacaaaattttcagcagratttaaagcagctttttgcagccctggacttgtctaatgctacttccactgcctgtgctctggatcttatttcctcacacactctcagaattggctcagt

SEQ ID NO: 304204 - DNA, 201 bp, Homo sapiens
actcacttatcaaaaatgtttacttggattttacgtaagcttatgatacatcagctagctgtaagtgtctgatagtgatgtacccatcatatatttattcstcttctcaatttttcttttatttaatagcatgtttttggcccagaggagcctctgctctcttagcggtagagcaaaattcctgaagacaatttcttcttc

SEQ ID NO: 304205 - DNA, 201 bp, Homo sapiens
ctaaaaatacaaaaaattagccaggcatggtggcacgtgccggtagtcctgtgtccggaatttattccttcctgtgggttcttggtctcgctcgcttcaakaatgaagccacagacccttgtggtgagtgttacagctcttaaagatggtgtgtctggagtttgttccttcagatgtgtccagagtttcttccttccagtg

SEQ ID NO: 304206 - DNA, 201 bp, Homo sapiens
tatgaagaaatgcttaatcgttttgcctggaatatccctttgagaatgtgatagtcccattctccaggtaaatctatctatgcatatatgaaattttatawgtaatttcaaatactcccactgcatgcttatttatagatctccctaagataccaaggagtccaattaagactacctggacaagtttgtctccgaggtctc

SEQ ID NO: 304207 - DNA, 201 bp, Homo sapiens
ccgcaccggataggtgagtggggcgggcgcgcggcgcggcgcggcgcttccgtgcggactgactagggccgtcccggcgtacggggcgagggaacggaggycgggctcctcttgccggagtcgctgcggggccgcctgcgggggtggctgcagggagtcggccctagattagcagtttgaggggaaggcgccgaggtgact

SEQ ID NO: 304208 - DNA, 201 bp, Homo sapiens
caggcatggtggcacgtgccggtagtcctgtgtccggaatttattccttcctgtgggttcttggtctcgctcgcttcaagaatgaagccacagacccttgyggtgagtgttacagctcttaaagatggtgtgtctggagtttgttccttcagatgtgtccagagtttcttccttccagtgggttcgtggtctcgctgactt

SEQ ID NO: 304209 - DNA, 201 bp, Homo sapiens
acaaacaaacaacaacaaaaaaaatagtttggcacagtaggatatgcctatagtcccacctgctcaggagactgaggcaggaggatcacttgagcctggayagttgaagctgcagtgagccatgatcacaccactgcattccagcctgggcaaccacgtctgagaaaaaaaaaaaaggcattccttcagtagtaggtggga

SEQ ID NO: 304210 - DNA, 201 bp, Homo sapiens
gcggcgcggcgcttccgtgcggactgactagggccgtcccggcgtacggggcgagggaacggaggtcgggctcctcttgccggagtcgctgcggggccgcmtgcgggggtggctgcagggagtcggccctagattagcagtttgaggggaaggcgccgaggtgactggcctccaggggggaatcccctagacccgggtcac

SEQ ID NO: 304211 - DNA, 201 bp, Homo sapiens
gacccttgtggtgagtgttacagctcttaaagatggtgtgtctggagtttgttccttcagatgtgtccagagtttcttccttccagtgggttcgtggtctygctgacttcaagaatgaagccacagaccctcgggttaatgttacagctcttaaaggtggtgcggacccaaagagtgagcagcagcaagatttattatgaa

SEQ ID NO: 304212 - DNA, 201 bp, Homo sapiens
ctcgggttaatgttacagctcttaaaggtggtgcggacccaaagagtgagcagcagcaagatttattatgaagtgtgaaaagaacaaagcttccacaccayggaaggggacccggacaggttgcccctgctggctcacgtggccggcctttattcccttatttggccctgcccacatcctgctgattggtccattttacag

SEQ ID NO: 304213 - DNA, 201 bp, Homo sapiens
tcttggccaaggctttccagatatatcccctcctacatatgtaaaagaagaattatcaaagattgcagcaatcgatagcctgaatcagtatacacgaggctttgtaagtatatcaagaccatatgggccatgagcttttattttatactggggtgtgtgtctgtgtgtgtgcatgtgcccttctgtcattcatatataagt

SEQ ID NO: 304214 - DNA, 201 bp, Homo sapiens
ccgtctcaaaaaaaaaaaaaaccaaaagaataccaaggctgttacgttgccttataaatgaagcttagcagaatccaacatttgtagttaaaacagaaagrcagtctgttgcttttggagtcgagtggcgcagaaatccttccttcgcttcgcccacgcgtggctccttggcggccacctgagggggactggggctgcagg

SEQ ID NO: 304215 - DNA, 201 bp, Homo sapiens
tagattttattttctgatttgaaatatgaagaaatgcttaatcgttttgcctggaatatccctttgagaatgtgatagtcccattctccaggtaaatctayctatgcatatatgaaattttatatgtaatttcaaatactcccactgcatgcttatttatagatctccctaagataccaaggagtccaattaagactacct

SEQ ID NO: 304216 - DNA, 201 bp, Homo sapiens
taagacacatgttcgtaaatacttttctttcattatatggctcagaatctggcaactttttaagagatacttgagcccactgaatgatatatagatcttayagtttttttaagtcaagccttaataataattaacattttttgagtgttcatctctcagtccctctatggccatgaaggtgggagatgtgactctgtttag

SEQ ID NO: 304217 - DNA, 201 bp, Homo sapiens
tgtcatgataaagtttctactttgattgcatttggagatttcctgtatatctctatttgtctagttgtctttttaaaatatttttaacataagtaatacastaaggtgagtcacaaaatcttcagctagccttacaatatcagacatgttaaccatagttatagctagttcctgtgaagtaatattagcagcagttaatgt

SEQ ID NO: 304218 - DNA, 201 bp, Homo sapiens
tgaatgatatatagatcttatagtttttttaagtcaagccttaataataattaacattttttgagtgttcatctctcagtccctctatggccatgaaggtrggagatgtgactctgtttagtctcaagtaaagaaatgcaaactgagataatgggtacaaatggagatgaagcaaagccctgtgatgttcaagttcctggt

SEQ ID NO: 304219 - DNA, 201 bp, Homo sapiens
gttttttttctgttcctactgcaggaaagcatttgttggtaatttattcagtttcctttgccatgactttctttgatgtttttttccttattaggttattygtttgtaagacagtaaacatgacttaattgaattaaattatatcttcattcttcatgcttagaaacctgtttatggaaaaagatggtctagttctgactg

SEQ ID NO: 304220 - DNA, 201 bp, Homo sapiens
tcctacggttcttcagctcagaagtcagaaatgggtcttaaagggctaaaatcaaggtgctggcattgctgtgttccttctgaaggctctaggagagtctrtcctctgcttccgtcaacacatttcctgtggcttcaaccctcctgcctccctttttcccttataagcacctttgagataacattgggcccaatggataat

SEQ ID NO: 304221 - DNA, 201 bp, Homo sapiens
tataattactgtactgagataaaaaagatttctagaatacatcataaagtaaaaaagaaaaactatttaaatattatttaatatttaatatttttaatatwtattatggaaatagggatttagttaccatcattctatggataatcaaaatgctgaaaaaaatagtatttttctagaaggcagttaaaagggcaaaagaac

SEQ ID NO: 304222 - DNA, 201 bp, Homo sapiens
aacattttcgggggatctgaccttttttttccagttgaaatgtattaacacaccttccacaatcattttataagagtcagcataacatagtggataagaamtgtgagatgtttaacctctcagtaactcggttctctcattataaaataggaataaaatcagtacctgtttcatatgaaggtcgtttctgagaattaaatg

SEQ ID NO: 304223 - DNA, 201 bp, Homo sapiens
cctccatatactcttttttttttcttgagatggagtctcgctctgtcacccaggctggaatgcagtggcatgatcccggctcactgcaacctccacctccygggtcagacgattctcctgccactgcttcctgagtagctgggactacaggcacttgccaccacgcttagctcatttttgtatttttagtagagacggggt

SEQ ID NO: 304224 - DNA, 201 bp, Homo sapiens
aatttaatgctcttgactaaattaaagccttatttttttaattaagaatattcttaaagctctctagtttaaaatgatgtgaatataaatttgtgtaggamgaatacatttattagaatgcctccagtgatgagagattatatcatagaaagaaaacttgaaagaaagcaaactcacttatcaaaaatgtttacttggatt

SEQ ID NO: 304225 - DNA, 201 bp, Homo sapiens
aaaaaaaaaaaaaaaaaaagagagagacaccaaaatgcattgcaagacaacaagacactgaaataacatgcccagcaacaggggaatgaatgagtaaaatrtggcacaaaaacaaccaaaaacatacgttgtaattaaaagtgaaatttttatgactcagaaaattcataaaatacttaagatacagtactttgttaagag

SEQ ID NO: 304226 - DNA, 201 bp, Homo sapiens
gaggctgcagtgagccatgatggtggcactgccacagcctgggtgacagagcgagaccctgtctcaaaaaaaaaagacaccacaactccacccggagaagwaataaaatctcaaagaagcatgagcagccaacacaattttatagcaggaaagaaaaagcaaaaaagctaggaaagaacataacagtttctttttaagatc

SEQ ID NO: 304227 - DNA, 201 bp, Homo sapiens
tacttaagatacagtactttgttaagagacaattaaaaatatttttaaatgacacatgattgcaactacaaatccccacttcatagatctaaaagacagtracatttgggccctccagcatccaggccccccatgaaaagggtgcccacttctgctctttcctggtcccgaagtgtggtatccatctgtttcccaagcctg

SEQ ID NO: 304228 - DNA, 201 bp, Homo sapiens
tgtgaaggacaatggcaacaccaaacaaaattacacatgtgtttgccccatgaaagcaatccatcttctaagaatttaccctaaagttgtgttttagtccrttcttgcacttaggtaaagaaatacctgagacttagtaatttataaagaaaagaggtttacttggctcatggttctacaggctgtacagaaagcatagtg

SEQ ID NO: 304229 - DNA, 201 bp, Homo sapiens
gttctacaggctgtacagaaagcatagtggcttctgcttctggagaggccttagaaaacttacaataatggtggaaggcaaagagggagtaggcatgtctyacagggctggagcaggagggagagaagtggggaggtgcaacacacttttaaacaaccgtatctcacaataactcactctcatgagaacagcatcaagggg

SEQ ID NO: 304230 - DNA, 201 bp, Homo sapiens
gcactttacttgcttatgagcagattacttcaagaaagcagaagcttagattcccagagatgagcatttattttccctttgtgtgtaccaacactctaagracaatacaagagcccccacttgtgcttctgaaaaacaagtggaaaaacttgtgggttgcatggaaagaacttcacaagtaaattacttgaggaatccaca

SEQ ID NO: 304231 - DNA, 201 bp, Homo sapiens
aaagtgttggcctaaaacccatagttcctgatggaggatacttcatcatcgctgatgtgtctttgctaggtttgtaaaggcttttattatttcaactatayggaaacttatgtgtgaaattatatcagaattatggagaaaagattggtgtcaaagccacagcagcattttatctgtggagaaggatggatttttgcaatg

SEQ ID NO: 304232 - DNA, 201 bp, Homo sapiens
aattacagccattctaaatatagttttaaatgttttaaaattttattacaatgaagttatatgccaatgaacttgaaaaactgaagtgttttatttatacyaaattgtataaagctggaaagagtaaaggaaattttcaattttatagcaaaacattgatcatattttttaactttacatccttcacataggagtttgttt

SEQ ID NO: 304233 - DNA, 201 bp, Homo sapiens
tcttcagctagccttacaatatcagacatgttaaccatagttatagctagttcctgtgaagtaatattagcagcagttaatgttgacagggcttatttttycatttaacaggtgtgagcataagacttaggttttcttaggctcttaagcagaactacagcccagttatttctgtttatcttctttgttagtctttttcta

SEQ ID NO: 304234 - DNA, 201 bp, Homo sapiens
cttcacaagtaaattacttgaggaatccacaaagcagtattgtgggtggcattgtcagaagagtgacagaatggtaatttaccagttattaccaatgtctmgcaaaatttacaaactcttgcattttagacctctagacctttgttacctgcattttcttagcccaaaatatcttcattccccttctctgcctggctacag

SEQ ID NO: 304235 - DNA, 201 bp, Homo sapiens
ctacagcatttatcacactgcattacagttgtcattgtatgtggctcatgtccctactagacattaaattttttgaagaattgcatcttattcatttttgkttcctctagaccttagtccttagcacctggtggttgctaatgaatatttgatgtatgaatgaatcaatgtctttattaaagatgttaaacaacttgaaaa

SEQ ID NO: 304236 - DNA, 201 bp, Homo sapiens; identical to SEQ ID NO: 63466

SEQ ID NO: 304237 - DNA, 201 bp, Homo sapiens
attcatttttggttcctctagaccttagtccttagcacctggtggttgctaatgaatatttgatgtatgaatgaatcaatgtctttattaaagatgttaawcaacttgaaaaccattatacagccaattcacattattcttgagttctgtatttgcaaatttgcctacttcctaaaatatatgtgtaattccaaaatcaat

SEQ ID NO: 304238 - DNA, 201 bp, Homo sapiens
tggcgtgatctcagctcactgcaacctctgcctcctgggctcaagccatcctgccacctgagtctcctgagtagctgggaccacaggcatgcaccaccacrcctagctaatttttaaattttttttagagacgaggttttgccacatttcccaggctggtcatgaattcctgagcttaatgagtgatccacctgcctcagc

SEQ ID NO: 304239 - DNA, 201 bp, Homo sapiens
gaaactgaatgccagagatatatcttgcccagaccttaaagcaaaattgaggcaagagcaaacaggagtatatatttgactttttcacaaatttaaaaaamggtataatatatgggagcaagagatgaaaaataagagtagcatttggaagatctaaacagatatcctgtatttataaataatgcataatattaatttatc

SEQ ID NO: 304240 - DNA, 201 bp, Homo sapiens
tcccggcgtacggggcgagggaacggaggtcgggctcctcttgccggagtcgctgcggggccgcctgcgggggtggctgcagggagtcggccctagattarcagtttgaggggaaggcgccgaggtgactggcctccaggggggaatcccctagacccgggtcaccgtcttggcgcttttactcttgatttcgctgtttgg

SEQ ID NO: 304241 - DNA, 201 bp, Homo sapiens
aaactgaatgccagagatatatcttgcccagaccttaaagcaaaattgaggcaagagcaaacaggagtatatatttgactttttcacaaatttaaaaaaargtataatatatgggagcaagagatgaaaaataagagtagcatttggaagatctaaacagatatcctgtatttataaataatgcataatattaatttatcc

SEQ ID NO: 304242 - DNA, 201 bp, Homo sapiens
ggcgggctgatcacgaggtcaggagatcaagatcatcctggataacacagtgaaaccccgtctctactaaaaatacaaaaaattaactgggcatggtggcrggcacttgtagtcccagctactagggaggctgaggcaggagaatggcgtgaacccgcgaggaagagcttgcagtgagccgagatcgcaccactgcactcc

SEQ ID NO: 304243 - DNA, 201 bp, Homo sapiens
tctcagttacttgggaggctgaggcatgagaatcacttgaacccaggaggcagaggttgcaatgagctgagattgctccactgcactccagcctgggtgayggagtcagactctgtctcaaaaaatataataacaataataataataataaaagaggaaccaactgtgaatctatataggacagtataaggaaaagagaaa

SEQ ID NO: 304244 - DNA, 201 bp, Homo sapiens
aaggatggagataagtgagcaaaaggaagtagaaaggaacaaataatttttaaaatattaggcagaaaaattattgatgcagaggaaaaataaaatatgtrgagttgccagaaaaaaataagagcagaacaaatggaacctgcatataataataattgtcacacaattattaacactgagatatacctcgcttgatatatt

SEQ ID NO: 304245 - DNA, 201 bp, Homo sapiens
actatagcttcggagcttctaaggcatcttatgcacttgtctcttccccactgttcaatctgaagcatgtactctgccctttagcaaaaatcacaactccrccaggtgtggtggctcatgcctgcaatcccagcactttgagaggccaaggcaagaggattgtgtgaagccaggagttcgagtccagcatgggcaaagcaa

SEQ ID NO: 304246 - DNA, 201 bp, Homo sapiens
atcccagcactttgagaggccaaggcaagaggattgtgtgaagccaggagttcgagtccagcatgggcaaagcaagaccctctctacaaatgaatgtttgaaaaaaaaaaaaattaaggccgggcatggaggctcacaccaataatcccagcactttgagaggccaagacaggaggatcacttgaacccaggagtttgaga

SEQ ID NO: 304247 - DNA, 201 bp, Homo sapiens
cttacatcagcagtcaatattggcagatagtgtggaagtagctggaagtttctagggaaagtggacacacctaactccacctcttagaaagactaaaaatmaaagaatgacaaaaacataccaagaaaatagaaattgaaagaaagcagtttgaattcagagcaaaataaaagtgataaaagtaaataaatttaaggcaaa

SEQ ID NO: 304248 - DNA, 201 bp, Homo sapiens
tttcctttctgatgaccttggcagtgtaagactgccacctctttaggtttctttatagccaataataatctcctaatggcttcctgatgtttgataggtgwtccctcggaagttgggaattccctttctctctatattgctgcatgggcatggaggactaggtaagcatacttaagagtctgtatatatatttaccttttt

SEQ ID NO: 304249 - DNA, 201 bp, Homo sapiens
accaataatcccagcactttgagaggccaagacaggaggatcacttgaacccaggagtttgagaccagcctgggcaacatagcaatattctatctctaccaaaaaaaaaaaaaattaagaacaaaattagccaggtgtggtgccacatacctgtagtcccagctactcaggaggctggggtgggaggatgacttcaacttg

SEQ ID NO: 304250 - DNA, 201 bp, Homo sapiens
ttcaccttttgagatcacaaattcatcatctcccactataatgacctattcttccagctcattgttgctgtcttgtgcacatgctctcccttttttttttctctctctctctctctctgtctctctctctcctccatctccttctcctcagctcttttcaaaatatcacttcttagccaggtgcagtggctcatgcctgta

SEQ ID NO: 304251 - DNA, 201 bp, Homo sapiens
atgggaaactccatgtctgggtgattcaagagacagaatcattatcttttccattgagctgtgatgaggagacctgagttggggagagggaggaaatggcttttttttttttttttttttttttttttttgcagttgcaggagtgaagacagagctcccatacaaagggaggggacccaaagagggtagctgttgctggct

SEQ ID NO: 304252 - DNA, 201 bp, Homo sapiens
ctggaagcaagccctattagcattcgatttgcccagcttttctcttttccagagcctccaaagtccgcttgcctgagggccatgactaaagcggtggcccttttttttttatcccgtttgtcccgttcctcctgatctctattataaaaaaccaacgttgccaagttcaatagggtttctaagttttgctccaggcctaag

SEQ ID NO: 304253 - DNA, 201 bp, Homo sapiens
acgaactttagctgactgatagagctaactgacaccataagttcaccctgtaatgtgagtgaggtttttttaaaaaaattcattcatcagataattatttraaactatgtgctaggcataactatatgttggacactgtgatggtgtcaccttggctatgccctggtacccagatatttgccaaacatcagtctaggtatt

SEQ ID NO: 304254 - DNA, 201 bp, Homo sapiens
acaatgaagttatatgccaatgaacttgaaaaactgaagtgttttatttatactaaattgtataaagctggaaagagtaaaggaaattttcaattttatarcaaaacattgatcatattttttaactttacatccttcacataggagtttgttttgttttgttttgttttgttttgttttgttttgtttgaggcagggtct

SEQ ID NO: 304255 - DNA, 201 bp, Homo sapiens
catctcttttcccaggtgacagcggcatggacatatgccccaggctttcctgctggggtccatccatgagcctgcaggtgccctcatggagccccagcccwgccctggaagcttggctgagagcttcctggaggaggagcttcggctcaatgctgagctgagccagctgcagttttcggagcctgtgggcatcatctacaa

SEQ ID NO: 304256 - DNA, 201 bp, Homo sapiens; identical to SEQ ID NO: 63484

SEQ ID NO: 304257 - DNA, 201 bp, Homo sapiens
gaggagtctgtaatcatcctactcggtattcctgagtgtgggaaagaagctaggctggggttagggggttgtagaattagcagggtggctgatcaaaccayctaaggcaagatggcgtgggtggttaaagcatagccttgagccagagagattgggctcaaccaaatccagctttattacttactaactgtaagaccttgg

SEQ ID NO: 304258 - DNA, 201 bp, Homo sapiens
tgatgtcagagaagtctgacatcagtctgaagtcggcccttggtggtcagccttatcgcttggtccaactccgctgtctttgtgcttaatgtagtatgacmccgtattttataaaatatctacatttcttaagcctctggctcttggggcgactttgggtagaacttacaagttcctcctttgggttctcttagtgttttg

SEQ ID NO: 304259 - DNA, 201 bp, Homo sapiens
gtggatgttctgtataagtaatggcaggctgcaaaggagaagtctcttatacccacggtggcagggggcctagcaatggtctttagctattgttaataccytcaggtgggtgagggattggggatggttgaagcttcctgatttgcaatccctttgggaaaatagtgaatgaacttttggaagggcgatgccctttaggga

SEQ ID NO: 304260 - DNA, 201 bp, Homo sapiens
cagatcagttaaagactactgagacagtcagggaaggacttcctaagttgggcctctgatttcttttctctcccacttcccctaggctagggtgagaaaayaggtttatcgagctgttgtgtcaaccttgagttcttatcttggagaagtcactcctgacccaggcagaaagttgagaggaaggaatgacaatggtccttg

SEQ ID NO: 304261 - DNA, 201 bp, Homo sapiens
agatccgcctagcagcccaagtgagcagagtcggagctaggacccaaagaggccgatagatggcgctcatggcccaacacagctccagcagcccgaggaamcaaaaaaaaaaaaaaaaaaacaagtgagccggttaaccccttccctcccgggctcaggacagaggggctggctggtgggtatgcctggagccctgcccca

SEQ ID NO: 304262 - DNA, 201 bp, Homo sapiens
gtatgagcccagtttgtcctgggtagccacctggacaacagatcagttaaagactactgagacagtcagggaaggacttcctaagttgggcctctgatttyttttctctcccacttcccctaggctagggtgagaaaataggtttatcgagctgttgtgtcaaccttgagttcttatcttggagaagtcactcctgaccca

SEQ ID NO: 304263 - DNA, 201 bp, Homo sapiens
aagttatggaacaatgaaagtagtatcttgccactcttttccccagccttgctgtttccaacacaggtgtctaaatgtcaaaggtgggctcaagacttctygagattctagagctggagcagccaatctgctaatgttggtgttgcatggggagatgcaaagcaaggtcccctgaaacactggcgttctccacagcaccct

SEQ ID NO: 304264 - DNA, 201 bp, Homo sapiens; identical to SEQ ID NO: 63486

SEQ ID NO: 304265 - DNA, 201 bp, Homo sapiens
tgaaaaaaaaaatgagttaacaggtggtaggttggatggagtatgtgattttccatagagaagagagttaaatgagttgctcaagagaaccttcttagagrtgaaacaggagtagaattcaaatcaattgacttccagcctgtggctcttgctatgagatcaggctttgaagttatggaacaatgaaagtagtatcttgcc

SEQ ID NO: 304266 - DNA, 201 bp, Homo sapiens; identical to SEQ ID NO: 63487

SEQ ID NO: 304267 - DNA, 201 bp, Homo sapiens
cagcctcccgggttcaggcagttctccctgcctcagcctcccgagtagctgggattacaggtgcccaccacaacgcccagctaattttttttttttgagasagagtttcactgttgttgcccgtgctggagtgcaatggcacgatcttggctcaccgcaacctccacctttcaggttcaaatgattctgcctcagcctcca

SEQ ID NO: 304268 - DNA, 201 bp, Homo sapiens
cctcagcctcccaaagtactgggattacaggcatgagctgttgcgcccggcaaatttatttatttatttatttatttatttatttatttatttattttttattttatttttttttgagatggagtcttgctcttttgcccaggcttgagtgcagtggcacgatcttggctcactgcaacctcagcctcccgggttcaggca

SEQ ID NO: 304269 - DNA, 201 bp, Homo sapiens; identical to SEQ ID NO: 63480

SEQ ID NO: 304270 - DNA, 201 bp, Homo sapiens
tgagggttgatggggcttctgtccatctcttttcccaggtgacagcggcatggacatatgccccaggctttcctgctggggtccatccatgagcctgcagktgccctcatggagccccagccctgccctggaagcttggctgagagcttcctggaggaggagcttcggctcaatgctgagctgagccagctgcagttttcg

SEQ ID NO: 304271 - DNA, 201 bp, Homo sapiens
ccacctgcctcagcctcccaaagtactgggattacaggcatgagctgttgcgcccggcaaatttatttatttatttatttatttatttatttatttatttattttttattttatttttttttgagatggagtcttgctcttttgcccaggcttgagtgcagtggcacgatcttggctcactgcaacctcagcctcccgggt

SEQ ID NO: 304272 - DNA, 201 bp, Homo sapiens; identical to SEQ ID NO: 63483

SEQ ID NO: 304273 - DNA, 201 bp, Homo sapiens
tgatccacctgcctcagcctcccaaagtactgggattacaggcatgagctgttgcgcccggcaaatttatttatttatttatttatttatttatttatttatttattttttattttatttttttttgagatggagtcttgctcttttgcccaggcttgagtgcagtggcacgatcttggctcactgcaacctcagcctccc

SEQ ID NO: 304274 - DNA, 201 bp, Homo sapiens
tggccaggttgatcttgaactcctgacctcgtgatccacctgcctcagcctcccaaagtactgggattacaggcatgagctgttgcgcccggcaaatttatttatttatttatttatttatttatttatttatttattttttattttatttttttttgagatggagtcttgctcttttgcccaggcttgagtgcagtggca

SEQ ID NO: 304275 - DNA, 201 bp, Homo sapiens
ttggccaggttgatcttgaactcctgacctcgtgatccacctgcctcagcctcccaaagtactgggattacaggcatgagctgttgcgcccggcaaatttatttatttatttatttatttatttatttatttatttattttttattttatttttttttgagatggagtcttgctcttttgcccaggcttgagtgcagtggc

SEQ ID NO: 304276 - DNA, 201 bp, Homo sapiens
gttggccaggttgatcttgaactcctgacctcgtgatccacctgcctcagcctcccaaagtactgggattacaggcatgagctgttgcgcccggcaaatttatttatttatttatttatttatttatttatttatttattttttattttatttttttttgagatggagtcttgctcttttgcccaggcttgagtgcagtgg

SEQ ID NO: 304277 - DNA, 201 bp, Homo sapiens; identical to SEQ ID NO: 63533

SEQ ID NO: 304278 - DNA, 201 bp, Homo sapiens; identical to SEQ ID NO: 63485

SEQ ID NO: 304279 - DNA, 201 bp, Homo sapiens
tgttggccaggttgatcttgaactcctgacctcgtgatccacctgcctcagcctcccaaagtactgggattacaggcatgagctgttgcgcccggcaaatttatttatttatttatttatttatttatttatttatttattttttattttatttttttttgagatggagtcttgctcttttgcccaggcttgagtgcagtg

SEQ ID NO: 304280 - DNA, 201 bp, Homo sapiens
gggccctggcaagcatggatccctcctactctgtggctgagggttgatggggcttctgtccatctcttttcccaggtgacagcggcatggacatatgcccyaggctttcctgctggggtccatccatgagcctgcaggtgccctcatggagccccagccctgccctggaagcttggctgagagcttcctggaggaggagct

SEQ ID NO: 304281 - DNA, 201 bp, Homo sapiens
gttagttgtttatttgccctcacagcagattatgagcttacagaaagcctggcctacattttactctttttggatttcttcctcatcaagagactgctgcrgtgcctgtcatgtaagagactcataagtattgaaaaaaaaaatgagttaacaggtggtaggttggatggagtatgtgattttccatagagaagagagtta

SEQ ID NO: 304282 - DNA, 201 bp, Homo sapiens
gcagaacaggtggtggccctgggagagggtcccaaggggcagaggttggggatgtctcagtaaagaggggcaggtcatgaatagagcctccacccccagcrgggggttcctgggcccgcccaagcactgggctaaaacgtggaaactgggcattgacaaagtacagcgggatgtgggcaattcggcctgtggaccagccct

SEQ ID NO: 304283 - DNA, 201 bp, Homo sapiens
ccaagggaacggttggcaagcggaagtggggctgcgctggcgcttcctcttccgggtcggcgctcctgcctccctgcagggagctgcttatgggacaccgmttcctgcgcggcctcttaacgctgctgctgccgccgccacccctgtatacccggcaccgcatgctcggtccagagtccgtcccgcccccaaaacgatccc

SEQ ID NO: 304284 - DNA, 201 bp, Homo sapiens
tacagtgtgtgcccaaggagccccactcattccaaagccggtgaggccctagggaaccactctgcagaccttcaggcttgtctcagccttgttaagagaargctgccaactctgacccctgctgtactccctctttctgcccaggctgcccctgccagagccatggcggggtcttcgggacgaggccctggaccaggtcag

SEQ ID NO: 304285 - DNA, 201 bp, Homo sapiens
aggctgcccctgccagagccatggcggggtcttcgggacgaggccctggaccaggtcagtgggatccctggctgcatcttcgtccatgcaagcggcttcaytggcggtcaccgcacccgagagggtgccttgagcatggcccgtgccaccttggcccagcgctcatacctcccacaaatctcctagtctaataaaaccttc

SEQ ID NO: 304286 - DNA, 201 bp, Homo sapiens
cctggaaaagacagactggtaactgagtggaaaacaaaaggaaaacttatttattcttagaggtgggaatgtggggagtggggcagaacaggtggtggccytgggagagggtcccaaggggcagaggttggggatgtctcagtaaagaggggcaggtcatgaatagagcctccacccccagcagggggttcctgggcccgc

SEQ ID NO: 304287 - DNA, 201 bp, Homo sapiens
gtgggtttgtttgtgcaggaaggctggtgagaagtccagacctaagggcccacatggcacttaccagggaaggagctcaaacacagggctgtttcgagtgygaaaaaggaggatgactggtttaccatcctgtacccttggctttcctgtaagaaatggatccagggataggggaggaactctgaaggcagagtcccagga

SEQ ID NO: 304288 - DNA, 201 bp, Homo sapiens
tccatccttgtcccactcaccgaaagacagctgaaggagtggtagccaggattttgctgccgtctggggaccagagcaggttggtcaccccacctcctcgraaccagggaagggggacacaggtctctgttgagacatcccatacctaggagagtggggcaggagataagggaaaactcaagcaccccatcatctcacagt

SEQ ID NO: 304289 - DNA, 201 bp, Homo sapiens; identical to SEQ ID NO: 63549

SEQ ID NO: 304290 - DNA, 201 bp, Homo sapiens; identical to SEQ ID NO: 63550

SEQ ID NO: 304291 - DNA, 201 bp, Homo sapiens
ggaggatcatagagctgtctggcgcagcgaggcctcccggcgccaccgagacgcgcagaggacggctagagcgttgctcgccgagagacttcctcttcgtyaagtcggccttcccaacatggcgcagtctattaacatcacggagctgaatctgccgcagctagaaatgctcaagaaccagctggaccaggtggggacggg

SEQ ID NO: 304292 - DNA, 201 bp, Homo sapiens
ctcgtgatccgcccgcctcggcctcccaaagtgctgggattacaggcgtgagccaccgcgcccggcctaaacccatgttttaactgagcatcaggttgggrtccaaaccaagaagagctgggcataggagttactttctcagtgctctgagagtagcacttttctacataccacaggtgtactgttatggaggcctatttt

SEQ ID NO: 304293 - DNA, 201 bp, Homo sapiens
tcctaccaactaagggaaatttcttcccttctattggaggttaatcctctgtcctgtttccagtctattactttcttctctgggattcttttttcttttctttttttttttttttgagacggagtctcccactgtcgcccaagctggagtgtagtggcacgatctcggctcactgcaacctctgtctcccaggttcaagcg

SEQ ID NO: 304294 - DNA, 201 bp, Homo sapiens
cggatagcagcatccacgggtgaagctgagagcagccgccccccactgggggcccaggccaagctggtaacaggtgtatgcccagggtgagacagcacttrggcacagccagaagagggtctggaggggaacacagaggatgtggagtcagaagatgacaagaagccatccccaaaattctatttctttgcctcctgctaa

SEQ ID NO: 304295 - DNA, 201 bp, Homo sapiens
ctcccaaagtgctgggattacaggcgtgagccaccgcgcccggcctaaacccatgttttaactgagcatcaggttggggtccaaaccaagaagagctgggyataggagttactttctcagtgctctgagagtagcacttttctacataccacaggtgtactgttatggaggcctattttgtagggtaattttgcataaagt

SEQ ID NO: 304296 - DNA, 201 bp, Homo sapiens
cttacgttggagccgctaaccttccccaggtgtttgtcttcattgctttcacagggaaagaattactcgtcccactgacgagttctgtatcctttccacargaacggctacctgctgccttctccctttctccttcactcccccaaaaagcggggagggggattgttttgattacttcagattaccctctcctcacaatga

SEQ ID NO: 304297 - DNA, 201 bp, Homo sapiens
aaggacttcttcaagaggaagatagattttctaaccaagcagatggagaaaatccaaccagctcttcaggagaagcacgccatgaaacagggtaagttttycctggggcacctcttgaacctatctccataataaggaacatggattgcagtgtgaaccacgggggtgtcccctttgctggagtaaaactatgtcttagtt

SEQ ID NO: 304298 - DNA, 201 bp, Homo sapiens
gaagaggcccttgcccagcgattccaggtataggccttggaggaggcattatggcttgaggattactgactgccaatcaacaggaactcctgcttcttctrccctaaaccctggagtgcagtggcagacaacctcaacctcttaggctcaagcagtcctcccacctcagcctcctgagtagctgggactacaggcacacac

SEQ ID NO: 304299 - DNA, 201 bp, Homo sapiens
gaaaggtgcatgtccctggaaggagcatctctaccacctggaatctgggctgtcccctccagtggccatcttctttgttatctacactgaccaggctggamagtggcgaatacagtgtgtgcccaaggagccccactcattccaaagccggtgaggccctagggaaccactctgcagaccttcaggcttgtctcagccttg

SEQ ID NO: 304300 - DNA, 201 bp, Homo sapiens
agtgcctttctctaggtccttgccctccctccatccttgtcccactcaccgaaagacagctgaaggagtggtagccaggattttgctgccgtctggggacyagagcaggttggtcaccccacctcctcgaaaccagggaagggggacacaggtctctgttgagacatcccatacctaggagagtggggcaggagataaggg

SEQ ID NO: 304301 - DNA, 201 bp, Homo sapiens
ctccatccttgtcccactcaccgaaagacagctgaaggagtggtagccaggattttgctgccgtctggggaccagagcaggttggtcaccccacctcctcraaaccagggaagggggacacaggtctctgttgagacatcccatacctaggagagtggggcaggagataagggaaaactcaagcaccccatcatctcacag

SEQ ID NO: 304302 - DNA, 201 bp, Homo sapiens
gaccttccttgttcaaaagttagcagtcccctccctacacgtgttggctttggtttgggctttgtgcagcagaatgagcatggattagaaatcaggtgatstgaattccagtcacagcacaacgagctgtctgagcttcagcgagctgctgaacttgccaattctcccttttctcatccagttaatgttgagagatcctca

SEQ ID NO: 304303 - DNA, 201 bp, Homo sapiens
gacggaggatcatagagctgtctggcgcagcgaggcctcccggcgccaccgagacgcgcagaggacggctagagcgttgctcgccgagagacttcctcttygttaagtcggccttcccaacatggcgcagtctattaacatcacggagctgaatctgccgcagctagaaatgctcaagaaccagctggaccaggtggggac

SEQ ID NO: 304304 - DNA, 201 bp, Homo sapiens
attgacccgctatcccggtcctctgtaggaagtggagttcttgtccacgtccattgctcagctcaaagtggtacagaccaagtatgtggaagccaaggacwgtctgaacgtgctgaacaagagcaacgagggtatggggtaggcgggtgagggtaacctaaagtggcgaacctgcttctctcgtcccacctcctaacccag

SEQ ID NO: 304305 - DNA, 201 bp, Homo sapiens
gccaagggaacggttggcaagcggaagtggggctgcgctggcgcttcctcttccgggtcggcgctcctgcctccctgcagggagctgcttatgggacaccrcttcctgcgcggcctcttaacgctgctgctgccgccgccacccctgtatacccggcaccgcatgctcggtccagagtccgtcccgcccccaaaacgatcc

SEQ ID NO: 304306 - DNA, 201 bp, Homo sapiens
taagttctaaaagttggacctacctcccttgacagagcttccaggagctaagtgcctttctctaggtccttgccctccctccatccttgtcccactcaccraaagacagctgaaggagtggtagccaggattttgctgccgtctggggaccagagcaggttggtcaccccacctcctcgaaaccagggaagggggacacag

SEQ ID NO: 304307 - DNA, 201 bp, Homo sapiens
gagcctccacccccagcagggggttcctgggcccgcccaagcactgggctaaaacgtggaaactgggcattgacaaagtacagcgggatgtgggcaattcrgcctgtggaccagccctgcagagaagggaaagaaaaggatcagagtctgggcccaaagaagggccacctggcagagccatacagcagccaaggccctcag

SEQ ID NO: 304308 - DNA, 201 bp, Homo sapiens; identical to SEQ ID NO: 63557

SEQ ID NO: 304309 - DNA, 201 bp, Homo sapiens
tgtatcctcccgtcattcttcgagtagctcagacttgttctgactccctgtagcttcctacagaagccagaaccactcaggccccacccgtcatcttctcygtgactgcaggctgggatctgtctgtcctctgctctcttccctcagtagagggtttttatggagtcacagaacaaaaatggttccatgccttccctttgc

SEQ ID NO: 304310 - DNA, 201 bp, Homo sapiens
ggcctactgattggctgcgcggggcggagccttcgggcgcgaaaaagggactgggctctctgcatgatatagggctctcaatcatgatttacgcttgcgtraagtactgtgtgggaggacctttaacctcccctctacaggctctgggaaggctgttgctccaggtgccggcccctcaaaggaatgcgcatgtgctgattc

SEQ ID NO: 304311 - DNA, 201 bp, Homo sapiens
agtttggatacccctccaggctaggttctccgccatcagaactgaccccagccctccagccctctctgctgacacatggcctgactggcctgtcatccttrgaggtgggacatccgaaggtggtgccaccctaggggcagaccaaggccaagggtggggcccatagcctgggttccagggggccactatcagcccagccag

SEQ ID NO: 304312 - DNA, 201 bp, Homo sapiens
gcccaggccggggggcatccttcccaccttagattaggtgaaaactcatcaggcaaactgtgtgcttcagacctcaggggccctgaaggagtatctccctycccccagggatggcccaccctctggggtgagaaagggatcacagaggtggcccgggggctgcggcttttgactctgtcctgggtggagagcttgggtttt

SEQ ID NO: 304313 - DNA, 201 bp, Homo sapiens
aaacttcatctataaatacatggaacttcatctataaatacaatactgttggattgtacaactgaaattggtgacttttttttgttttgaacatacatctktcgttgcatataacacaacgtgatgcatttcgtttaaattgtggtaaaagccacacatggtggctcacacctgtagtcccagcactttgggaggccaagg

SEQ ID NO: 304314 - DNA, 201 bp, Homo sapiens
ttgggcctgggaggtggaggttgcagcagtgagctgagatggtgccactgcactcaagcctgggtgacagagtgagactctgtctcaaaaaacaaacaaamaaaaaatgttcaatcttgcatcctccaagtgacactgtgcctattttgagacccagttcaaatgccaccacttcagaagtcttttttttcagccgggcac

SEQ ID NO: 304315 - DNA, 201 bp, Homo sapiens
tggaggttgcagcagtgagctgagatggtgccactgcactcaagcctgggtgacagagtgagactctgtctcaaaaaacaaacaaaaaaaaaatgttcaaycttgcatcctccaagtgacactgtgcctattttgagacccagttcaaatgccaccacttcagaagtcttttttttcagccgggcacagtggctcacgcct

SEQ ID NO: 304316 - DNA, 201 bp, Homo sapiens
ggaatcagagcccgctcacctgtgccgggagctcctcgtagtgcaggcggacccctgccagctgcagcagcttgtgcaggaaggcaggcggctgatgcacrtccaccggcggcgcctggcttgggtcccgcactgcctcatcacagtactccagtctggagagtgtagggtcagcccgtgccctggccaccccaggcctgg

SEQ ID NO: 304317 - DNA, 201 bp, Homo sapiens
ctctaggccttggggtccttgcctggctgcagaggctctgtgggcctgccctccctcagcttgttcagggatgcagaagagcctgggaggtgggcaaggasggagatcatggattcccattggacagacagggacaccaagggccggatgggcaaggcctgccggaggttcctgagcaagcagagcacttgctgggtctcc

SEQ ID NO: 304318 - DNA, 201 bp, Homo sapiens
ggtccatccgggaaggccaggctgcctgggatgaggtggcagctcaaggagaaaacctcctcctctcgggctttgccactccaagactggccctttaaacyggagaccatgatgtcaccatagacagcaagggacgggagggggactgcaggcctgaggatggactgcatctcccagcaggcttgggtgcaccacacccct

SEQ ID NO: 304319 - DNA, 201 bp, Homo sapiens
cccaggccaaatctgtgggcctagcgtagcttgctgcgactccttcctgtcagtgtcctggcatcaccctactttcctggtgcaaactcctaagccctcckctttccctatgcagcctcccttctagaatccaggcttcccgcccccggctagagcccatcccactctgctctctggcttcaaaagcttcggccttcaccc

SEQ ID NO: 304320 - DNA, 201 bp, Homo sapiens
gtgaagtggggagcccaggctgggtggtaccacaaggcaggggcaggctctctgaggggccagggataggatggaagcaacctggggtggacctttccccygaccctgaccctgaccctgactctggttcccacagctcctggagctatttgatagtgaggatccccgggagcgtgagtacctcaagaccatcctgcaccg

SEQ ID NO: 304321 - DNA, 201 bp, Homo sapiens
tccgagggccggccgagagggcgtgtgagccccgtttcctgtccgcaggacccctgcgtggagaataaccctgtactcatcggcttggcctcagtccacgwcttccttccccccgacctgctgctgcccaacacccactgaatgcctccgggcctgccccacgtccacacctttgcttatgcttgcctgagacctggagtg

SEQ ID NO: 304322 - DNA, 201 bp, Homo sapiens
aactcagtgcgcgatcttaagcgcgcatctgtggaaacaattaagtgagtaaacattcgcattttgcaaaatcttttaccatcctttatctcattgagccytcttaataatcgctcaaggtagggattattgccaccgctttacaggtaagaaaacagattaagatacgagaaagaccctgcctcaaaaacaaacaaaaat

SEQ ID NO: 304323 - DNA, 201 bp, Homo sapiens
agacctggagtgccctgccccacaccccataccatccatggcctggctcaggtgccgcctctgccaagaagccgctgtcaataaccaagctggaaatctcycttttcctgcccgtagacctcacagcttctagccttgttctccccactggattgcacctgcctagaaggcagggatgtgtcccattcactgctgggttcc

SEQ ID NO: 304324 - DNA, 201 bp, Homo sapiens
tggaaatctctcttttcctgcccgtagacctcacagcttctagccttgttctccccactggattgcacctgcctagaaggcagggatgtgtcccattcacygctgggttcccagcccctggcccagggcttgcacgaactaggcgttcaggtgatgattgcccaaggaatgaactgcttgctggggcagatgctgaaatca

SEQ ID NO: 304325 - DNA, 201 bp, Homo sapiens
ggcgctgagcagttcctgaagttgctggagctgcctcggggtcaggagcaggtgcagggagcccagctgtcccgccacctccaactgggggccaaggaggyagccatggagcctaggcccaccacccagctcctctaagagctaccacccgcctgccctcgccctgggaaagcaggatgctggctaccaaactaaactctg

SEQ ID NO: 304326 - DNA, 201 bp, Homo sapiens
cagaagagatccaaggcatggggagagggcctccttagcccctagacagttggatgagggccatagggtggaatgagtgggtgaggctgttactgaactcwcctttttgtctgtccccctcccccagctggtatatgagtttttcctgcgtttcttggagagcccagacttccagccctccgtggccaagagatatgtgga

SEQ ID NO: 304327 - DNA, 201 bp, Homo sapiens
atgggaagctgtttgatgagctcacagcctcctacaagctggaaaagcagcagtgagtgttgggggctgggcgtgggggaagggagaagagcagggaggartcagacccccatggctggagggaacccgaggactaccccaaactctgtctgatcagatgctgcaagactgtccatgctcctgccatcctatgcctgactg

SEQ ID NO: 304328 - DNA, 201 bp, Homo sapiens
tcgagaccatcctggctaacacggtgaaaccccgtctctactaaaaatacaaaaaaactagctgggcttggtggtgggcgcctgaagtcccagctattcgrgaggctgaggcaggagaatggtgtgaacccaggaggcggagcttgcagtgagccgagtttgtgccactgcactccagcctgggcaacagagcgagactcc

SEQ ID NO: 304329 - DNA, 201 bp, Homo sapiens; identical to SEQ ID NO: 63561

SEQ ID NO: 304330 - DNA, 201 bp, Homo sapiens
ccggccgagagggcgtgtgagccccgtttcctgtccgcaggacccctgcgtggagaataaccctgtactcatcggcttggcctcagtccacgacttccttccccccgacctgctgctgcccaacacccactgaatgcctccgggcctgccccacgtccacacctttgcttatgcttgcctgagacctggagtgccctgccc

SEQ ID NO: 304331 - DNA, 201 bp, Homo sapiens; identical to SEQ ID NO: 63558

SEQ ID NO: 304332 - DNA, 201 bp, Homo sapiens
catagctcctggactgaggccgggactctgaaacattagttgttattagctacaaaatgggtgagccatgatccctgtcctcctgcaccttggagttcatkagattccctgcctattaacattggggttgttttatttaaccgctgagtcttgatttcttcatccatgtgatggatttcttaagccccatctccctggata

SEQ ID NO: 304333 - DNA, 201 bp, Homo sapiens; identical to SEQ ID NO: 63559

SEQ ID NO: 304334 - DNA, 201 bp, Homo sapiens
cggatgaacccaggaggtggagtttacagtgagccgagatcatgccactgcactccagcctgggcaacggggagactgtgtctcaaaaaaaaaaagaaaasaaaacaaaaaaaaagaagactgcagcaaaggctcctgggctgcaggggcccttgtagaacttctgttttccaagccctttctcagtaacgtattacatat

SEQ ID NO: 304335 - DNA, 201 bp, Homo sapiens
tctcatctgtaatcccagcactttgggccaaggcgagaggatcacttgaggcaaggggttcaagaccagcctgacagtgagaccgcatcactacaaaaatktaaaaatttgccgggcatagtggtgtgctactgtagtccagctactcagaaggctgaggtgggaggatcgcttgagcctgcctgggaggttgaggttgca

SEQ ID NO: 304336 - DNA, 201 bp, Homo sapiens
gccgcctccgcttgccgcccgccggcgatccccgtccggctccgctgttcactagagcccccggctcgccccgccgcttctctaggcgccaggccgcgccyccggacgcccagccacgccccctacgctcactgtcattggctattgcaaagggcgaggcctactgattggctgcgcggggcggagccttcgggcgcgaaa

SEQ ID NO: 304337 - DNA, 201 bp, Homo sapiens
gggcgaggcctactgattggctgcgcggggcggagccttcgggcgcgaaaaagggactgggctctctgcatgatatagggctctcaatcatgatttacgcytgcgtaaagtactgtgtgggaggacctttaacctcccctctacaggctctgggaaggctgttgctccaggtgccggcccctcaaaggaatgcgcatgtgc

SEQ ID NO: 304338 - DNA, 201 bp, Homo sapiens
ggtaagaaaacagattaagatacgagaaagaccctgcctcaaaaacaaacaaaaataaataagggctctgaatccatcaccaaggaaggtcttttttcccytcctcaccccggaatgctcagagggagattaactgaccctcccttctctctgccgtcggtcaggccttaggcacctctctgaaataataatagcttttca

SEQ ID NO: 304339 - DNA, 201 bp, Homo sapiens
taggcacctctctgaaataataatagcttttcatatctctagtcctaaaatcaaagaatggattctgcctcctttaagcaggggggcattgtttttgtacrgcctttgagctaagtatggtttttatgtcttttaaatggttaggggaaaaatcaaaagaagaatgaacttttcatggcatgtgaaaaatcatatgaaatt

SEQ ID NO: 304340 - DNA, 201 bp, Homo sapiens
ttgtggtgagccaagtttgtgccactgcactccagcctggctgacagagcgagattctgtctcaaaaaaaaaaaagaagaaactgcttgtggaaggaatckagagctctgccttcttccatggcaggctgggggcagtactgtgctcaccaactgattattacattaataataatataccgggttgggttgctcactcctg

SEQ ID NO: 304341 - DNA, 201 bp, Homo sapiens
ggaaatctctcttttcctgcccgtagacctcacagcttctagccttgttctccccactggattgcacctgcctagaaggcagggatgtgtcccattcactsctgggttcccagcccctggcccagggcttgcacgaactaggcgttcaggtgatgattgcccaaggaatgaactgcttgctggggcagatgctgaaatcaa

SEQ ID NO: 304342 - DNA, 201 bp, Homo sapiens
aagtgtttgtcattctcttggttgactggcaagagagccttgagcttgggactcagtggcagaggtggctgggctgagaagggcatttcagtgtggggggrcggggatctcaatggggcctggtttgggatgttgggaagggagcgcagcctctgggttgggggagagttggatgagcgtgccgtgcaggtgagggtgggc

SEQ ID NO: 304343 - DNA, 201 bp, Homo sapiens
tctcatctgctctgctgttcaccatatgctcatgagggaggttctattaatatccccattcttaagggagaggagaccaaggctacgtgcctaaatgctgyggagcgaatgaatgaaaaagcattaagattcagaaatcataaaaagaaaaaagaggcttggaacagtggcttacacgtgtaatcccagcatttttgggag

SEQ ID NO: 304344 - DNA, 201 bp, Homo sapiens
gaggagacaggggctgtgggaatcagagcccgctcacctgtgccgggagctcctcgtagtgcaggcggacccctgccagctgcagcagcttgtgcaggaargcaggcggctgatgcacgtccaccggcggcgcctggcttgggtcccgcactgcctcatcacagtactccagtctggagagtgtagggtcagcccgtgccc

SEQ ID NO: 304345 - DNA, 201 bp, Homo sapiens; identical to SEQ ID NO: 63560

SEQ ID NO: 304346 - DNA, 201 bp, Homo sapiens
gtctcaaactcccaggctcaagtgattctgctgcctcggcctcccaaagtgcttggattacaggcgtgagccaccacactagccatattatggaacctttkgcaaaatttataaagatgagtttgttgactgtccccactccccgcgagatcagagttgtattcccagcacactgaatgtgatgcctggtacatcctaggc

SEQ ID NO: 304347 - DNA, 201 bp, Homo sapiens
tgtaaacatgtttggtaaactgaagtgtgatccagaatgtgatggaggactgttatcacttttccccttttgctagtggccttagatttcattagactcgytttgggatgcagccaggcttccccgcaccaacccagctaactaactcatgttctgctgcaagcatgtgcagacttcctcccgttcttatgggccataacc

SEQ ID NO: 304348 - DNA, 201 bp, Homo sapiens
cctcttccagtccttcctgtccctggagtacccccagggtgctccaactcaccagctgggtgggcctgggcagagagccggcgggaggccatgtcgctgcrcacagaggaggccaggtctacatcggagagggagagctcagagagggctgaggccacactgcttgtgaggccagccatggagaagaagaggtctgtgggt

SEQ ID NO: 304349 - DNA, 201 bp, Homo sapiens
ctactggacaactggattccagtcaagaggtcaggggaagtttggggtcaggattcctccccatagagagaaaatggggagggccaggctttgcccaggcsggggggcatccttcccaccttagattaggtgaaaactcatcaggcaaactgtgtgcttcagacctcaggggccctgaaggagtatctccctccccccagg

SEQ ID NO: 304350 - DNA, 201 bp, Homo sapiens
agcctcagtttctcctcccgtggagacagaaaccccttcccgctcagtttctggctctggtaaggaactgaagaggctagccggggtgcctctgacgcctgggagagggcaagattcccctggcctctctacgcccggtgcctgatcccccagcccgatcctgccgcagggagcctcaggtcgctgcgctcccaccctccg

SEQ ID NO: 304351 - DNA, 201 bp, Homo sapiens
ggagatagttcattacctggaaggagcaggctccattcagggaggcaggctgataggacagccattcagaaagtgcttatgggccaggcacggtggctcaygcctgtaatcccagcactttgggaggccaaggcgggtggatcatgaggtcaggaaatcgagaccaccctggctaacacagtgaaaccccatctctactaa

SEQ ID NO: 304352 - DNA, 201 bp, Homo sapiens
acaccagtccaccccagatcggcctgcccttacctctgcacacggacctcgacggccacaccacgttccccatcacccggagagtgctccaccctcacgayagtgtccaggaaggtcactttgatcctccgaagcactgaggagttggggaggggtctcaggtcaggtagagcagcaaaggggaggcagaatttcccatct

SEQ ID NO: 304353 - DNA, 201 bp, Homo sapiens
tcctgtaatcccagcactttgggaggctgaggcagaaggatcgcttgagcccaggagtttgagaccagcctgggcaacatagctgaatccctgtgtctacaaaaaaaaaaaaatgtttcaaaaaattagccgggcgtggtggtgtgtgcctttggtcatttgagcccaggagtttgaagttgcagtgaagctatgaatgca

SEQ ID NO: 304354 - DNA, 201 bp, Homo sapiens
ttcctacagaagccagaaccactcaggccccacccgtcatcttctctgtgactgcaggctgggatctgtctgtcctctgctctcttccctcagtagagggyttttatggagtcacagaacaaaaatggttccatgccttccctttgccggtggggtggtagtgagggagtctggactgtgagggagtctggactgtggggg

SEQ ID NO: 304355 - DNA, 201 bp, Homo sapiens
tcttgggaggaaatggggtgttgggaaccccatgggacattctgcaacgaagtcccaagccccactttaggtccagcagttattttttttttttttgagayggagtctcgctctgtctcccagcctggagtgcagtggcgcgatctcagcttgctgcaacttctgcctcctgggttcaagtgattctcctgcctcagcttc

SEQ ID NO: 304356 - DNA, 201 bp, Homo sapiens
gaaggtgattctccctgggcctcagctggagctcaggattctggaaggagggactggggccaggtcacctgagccctcttcctctcttctgcctcctcctyagcatcatcaatggctttgcgctgcccctgaagacggagcacaagcagttcctggttcgcgtcctgatccccctgcactctgtcaagtcgctgtctgtct

SEQ ID NO: 304357 - DNA, 201 bp, Homo sapiens
cgatctcagcttgctgcaacttctgcctcctgggttcaagtgattctcctgcctcagcttcctgagtagctggaattacaggcgtgcaccaccacgcctgsctaatttttctgtttttagtagagatggggtttcaccgtgttggtcaggttggtctcgaagttttgacctcatgatctgcccgcctcggcctcccaaagt

SEQ ID NO: 304358 - DNA, 201 bp, Homo sapiens
gctgcaacttctgcctcctgggttcaagtgattctcctgcctcagcttcctgagtagctggaattacaggcgtgcaccaccacgcctggctaatttttctrtttttagtagagatggggtttcaccgtgttggtcaggttggtctcgaagttttgacctcatgatctgcccgcctcggcctcccaaagtgctgggattaca

SEQ ID NO: 304359 - DNA, 201 bp, Homo sapiens
gaattacaggcgtgcaccaccacgcctggctaatttttctgtttttagtagagatggggtttcaccgtgttggtcaggttggtctcgaagttttgacctcrtgatctgcccgcctcggcctcccaaagtgctgggattacaggtgtgagccactgcgcccagccttcggtccagcagttctatatatatatatatatgtaa

SEQ ID NO: 304360 - DNA, 201 bp, Homo sapiens
ggtcccagttactcgggactgaggctgaggtgggaggattgcttgagcccaggaggcagaggttgcagtgagccaggatcgcgccactgcaaaaaaaaaawaaaaaaataaaataaagccgggtgcaatggctcactcctgtaatcccagcatttaggaggctgaggcgaatggatcgcttgagctcaggagtttgagacc

SEQ ID NO: 304361 - DNA, 201 bp, Homo sapiens
aggtccattcctgagccccagttcccagtgccatgtgtgtaccacagcagaagattagacaggactgagaggacacaaagatacttccccagacaagctcygtagaaaaccaactccagagacagtcattctccaacctagcctcggagtaggagctaaaggagtgagcaaaaaatcctcgcacagtaaaggggacgatat

SEQ ID NO: 304362 - DNA, 201 bp, Homo sapiens
tcccagttactcgggactgaggctgaggtgggaggattgcttgagcccaggaggcagaggttgcagtgagccaggatcgcgccactgcaaaaaaaaaatawaaaaataaaataaagccgggtgcaatggctcactcctgtaatcccagcatttaggaggctgaggcgaatggatcgcttgagctcaggagtttgagaccag

SEQ ID NO: 304363 - DNA, 201 bp, Homo sapiens; identical to SEQ ID NO: 63567

SEQ ID NO: 304364 - DNA, 201 bp, Homo sapiens
ggcaggtgagatagggaggggtggaggaagtaatctggcccagggcctcagagctgtgagatgatattgggtgccaggctgcaggtgaggcctgtgccatytggttccacattcagggccttcactatgccatcctgtaccaccatggagaacctgccggaaagaggggcccagccagctgcatcagcctgggcttggagg

SEQ ID NO: 304365 - DNA, 201 bp, Homo sapiens
tcaccccatagaaatgggccagcactttgcccgctgtctggcggaggagcggtagcgtgagcagcagcctgcccgcccgccgccgctcagcaccccctccrgggccagcccggccggcttcatactccagcagggcctcgtgcagagcttctcgcagctgctccacagcctcggcatcttcgatgtgcacagagtctgcaa

SEQ ID NO: 304366 - DNA, 201 bp, Homo sapiens; identical to SEQ ID NO: 63568

SEQ ID NO: 304367 - DNA, 201 bp, Homo sapiens
aacccgggaggcagaggttgcagtgagccgagattgtgccactgcactccagcctgggtgacacagtgagactccatctcgaaaaaaaaaaattagccggrcatggtggtgcatgtctgtaatcccagctgctccggaggctgaggcaggagaatcgcttgaacccgggaggcagaggctgcagtgagccaagatcgtgcc

SEQ ID NO: 304368 - DNA, 201 bp, Homo sapiens
ttgcagaaatctggccaacattccaattgcagggccccagcacagggctgggcaggtgagatagggaggggtggaggaagtaatctggcccagggcctcaragctgtgagatgatattgggtgccaggctgcaggtgaggcctgtgccatctggttccacattcagggccttcactatgccatcctgtaccaccatggaga

SEQ ID NO: 304369 - DNA, 201 bp, Homo sapiens
gaaaggatggtggggctgggccccggcaggaatgctgggagccaagcttcccgccatggggtttccagactaaatggcatcaggcagcacccagagagcargtacaaaggccacactgtgcgccacatgccatcggccaggcctcgccctctgtgctgcctctgtggggagcgcttcttcccttcctcttcagattgctgg

SEQ ID NO: 304370 - DNA, 201 bp, Homo sapiens
agtttggagcctgcacttggcttgctttttgacttctagcaagtcattgttcttccctaagcctcagttttcgttatctgcaaaatggggctgtgctaccrtcactgagttaacctgaagaccttacggagacacctcacctgtcagtgcctgccccagactcacctgaattggcaagggccaaggcctttagtagaacat

SEQ ID NO: 304371 - DNA, 201 bp, Homo sapiens; identical to SEQ ID NO: 63569

SEQ ID NO: 304372 - DNA, 201 bp, Homo sapiens; identical to SEQ ID NO: 63570

SEQ ID NO: 304373 - DNA, 201 bp, Homo sapiens; identical to SEQ ID NO: 63571

SEQ ID NO: 304374 - DNA, 201 bp, Homo sapiens; identical to SEQ ID NO: 63572

SEQ ID NO: 304375 - DNA, 201 bp, Homo sapiens; identical to SEQ ID NO: 63573

SEQ ID NO: 304376 - DNA, 201 bp, Homo sapiens
gctcaccctccttgagcatgcccacccgcaggcacttggtgaagcggcaggcctggcaggccttgcgtctccgcttggtgatctcacactcgttggaggcyggacagctgtactcgatgctccctgccaggaagaggcagggctccagtggcggcctcccggggctgggaggggacccagctgacaggagagccctgactc

SEQ ID NO: 304377 - DNA, 201 bp, Homo sapiens
gggaggagagggcgtggggcctgttcccaggggctgatggcattgccctggccctgccagcaggctgtggcactgcccagaccccagctccgccccagccmttggggctgaccccatgctaggcaggtcctgccagaacccccaccagtcccaccccttgcctcagtccatcatggcctcgagcatctccaagaacagctt

SEQ ID NO: 304378 - DNA, 201 bp, Homo sapiens
cattcataaccaaggagatggccgcaaaccacaagtgtttattgcagaaatctggccaacattccaattgcagggccccagcacagggctgggcaggtgaratagggaggggtggaggaagtaatctggcccagggcctcagagctgtgagatgatattgggtgccaggctgcaggtgaggcctgtgccatctggttccac

SEQ ID NO: 304379 - DNA, 201 bp, Homo sapiens
tccggttctcctggctatccaatagcatcgagtggagcatccccggaagtgaggcagcggaggacgacctttttccggttccggcctggcgagagtttgtkcggcgacatgaaactgcttacccacaatctgctgagctcgcatgtgcggggggtggggtcccgtggcttccccctgcgcctccaggtacccgccggcggc

SEQ ID NO: 304380 - DNA, 201 bp, Homo sapiens
ccttaccaaggagaggggagcaaatggttttgggcaagggctttggccattcatgtcaagctggttgtgggtttttcaaggtgccatagccacccccaaakatgtttgtttaaagcgtggggttttttaatctctgccacccttgtcaagggagtcttgtaaagttgccgagggtaggttcatctccaggtttcgggattc

SEQ ID NO: 304381 - DNA, 201 bp, Homo sapiens
caagttgaagtttgctgcctacctagagagggaatacaaagtccacatcaaccccaactcactcttcgacatccaggtgaagcggattcacgaatataaaygacagctcctcaactgcctccatgtcatcaccctgtacaaccgtgagtggcagccactctaccctgtctctcagtgctcccccgtgttcctgcggcatag

SEQ ID NO: 304382 - DNA, 201 bp, Homo sapiens
ctgccaccccacagtgatcccagctgcagacctctctgagcagatctccactgcgggcactgaagcctcaggcaccggcaacatgaagttcatgctcaacvgggctctgaccattggcaccatggacggggccaatgtggagatggcagaagaggcgggagaggaaaacttcttcatctttggcatgcgggtggaggatgt

SEQ ID NO: 304383 - DNA, 201 bp, Homo sapiens
tgagttaaaaagtatgagttcttaaggctcttgatacagattgccaaactgctttccagaaagtttctcccagtttacactcccacaacagcttcccagarttggcattaaacactgaaagaagtgtctcctgtgaggcttcactagaaagctggctgtcccatgggcaggagggagctgtgagatgttgtgagcatggtc

SEQ ID NO: 304384 - DNA, 201 bp, Homo sapiens
ggaccactgtgggggctgacaccataatgcagggagagttgcctgagagtcgcacaagggactagagagtcgcacgagggattagagattttgtggggagygctggtttctggttggaacggttaggttttgagactggcctgtggagcgctttgagccgtggtgggggcgctgagggtcagctgaagggttatctttttt

SEQ ID NO: 304385 - DNA, 201 bp, Homo sapiens
  misc_feature (1)...(201): n = A,T,C or G
ggtagttggagccaggcgcctttggaagcagcatgaccctctaggtccccggctgtccactgggacagggcaggcttggcccttgacctcatagaacttancctagccccctaaaggaatagcacatgcctatcctttcccctccaggtttaaagtcttcgcagattatgaagactacattaaatgccaggagaaagtcag

SEQ ID NO: 304386 - DNA, 201 bp, Homo sapiens
catcctgcagcttcaaagacttctatgagctggagcctcataagttccagaataagaccaacggcatcacccctcggcgctggctggttctgtgtaacccygggctggcagaggtcattgctgaggtgagaggccaccgtagggccagtagagtcaacatgggtccctgcagggatcagctgggtatggtcgtgtaggtgg

SEQ ID NO: 304387 - DNA, 201 bp, Homo sapiens
gctctgtcctggcaggtacaatgcccaggagtactacgatcgcattcctgagcttcggcaggtcattgagcagctgagcagtggcttcttctcccccaaayagcccgacctgttcaaggacattgtcaatatgctcatgcaccatgaccggtgagctggttggcccgggaatcactcaggtggggccgcagggcagatcga

SEQ ID NO: 304388 - DNA, 201 bp, Homo sapiens
gatcatcagactcgtcacagccatcggggatgtggtcaaccatgacccggcagtgggtgaccgcctccgtgtcatcttcctggagaactaccgagtctcastggccgagaaaggtgggtgctgccaacagggaccctagggaggctctgactagttcagtctcaggaagaggtatcagtcgtctcttcctgggatacttgt

SEQ ID NO: 304389 - DNA, 201 bp, Homo sapiens
acgccgtcaacggcgtggcgcgcatccactccgagatcctcaagaagaccatgtgagccccgctttccagatcccgcccctctctaggccccacccactcmacgcctctgtcacacagaagccccgcccttcaccgaccactctctggtctctgggccctggcgcctttcacaggtggcgtcattcttacaagcacagcag

SEQ ID NO: 304390 - DNA, 201 bp, Homo sapiens
gcctgtactgatactgctggcctttctccctgacctgccttgggtgcagatggaggaggccgatgactggcttcgctacggcaacccctgggagaaggccyggcccgagttcacgctacctgtgcacttctacggccatgtggagcacaccagccagggtgccaagtgggtggacacacaggtgaggatgaagctgggggt

SEQ ID NO: 304391 - DNA, 201 bp, Homo sapiens
ctgctgccaccccacagtgatcccagctgcagacctctctgagcagatctccactgcgggcactgaagcctcaggcaccggcaacatgaagttcatgctcwacggggctctgaccattggcaccatggacggggccaatgtggagatggcagaagaggcgggagaggaaaacttcttcatctttggcatgcgggtggagga

SEQ ID NO: 304392 - DNA, 201 bp, Homo sapiens
gaccatagcatggaatgtggtttggagcccagactgacccctccccctaccccaggtggccatccagctcaatgacacccacccctccctggccatccccragctgatgaggatcctggtggacctggaacggatggactgggacaaggtgggcttcagggcccctctgccccatctgatgctctctgcctcggggttccc

SEQ ID NO: 304393 - DNA, 201 bp, Homo sapiens
ctagagttaagcggcctccttaaccctctccttcacctaccaacaatcccggaaggacaactccaattccctgcaggtgaaaacgtgccacctggtcaggkgagtctttcccctggggctctagcccctcccctttctcccttctctctggcttcaggctggcctggaggagggggcagggcgctgtttctgggagtgggt

SEQ ID NO: 304394 - DNA, 201 bp, Homo sapiens
accgtgcactgtgagtgcctgtactgatactgctggcctttctccctgacctgccttgggtgcagatggaggaggccgatgactggcttcgctacggcaamccctgggagaaggcccggcccgagttcacgctacctgtgcacttctacggccatgtggagcacaccagccagggtgccaagtgggtggacacacaggtga

SEQ ID NO: 304395 - DNA, 201 bp, Homo sapiens
acaggggtgagtggtgaccctcgtccaacctcatcctgcagcttcaaagacttctatgagctggagcctcataagttccagaataagaccaacggcatcamccctcggcgctggctggttctgtgtaaccccgggctggcagaggtcattgctgaggtgagaggccaccgtagggccagtagagtcaacatgggtccctgc

SEQ ID NO: 304396 - DNA, 201 bp, Homo sapiens
aaaagggctcgcttagaggagtgaatgtacccctggcaccgtggtagcagacaattattgatgtttgctagttatggaaggcggggcagaattagtcaccktgaattagccctgtggtcaaccagagatgagacctttggatggacttgacctctgtgaccccttcagcctggccctgggttcccccagccctctcatgag

SEQ ID NO: 304397 - DNA, 201 bp, Homo sapiens
aggtaccatgcgtgtggagggcgactctgtgaccggacagtgtgtgctaggcctctccctccagcctcggcctgcctgccccatgtaatagataagggagyggagactgggagtgtgggagggtcagttgttcaggattcacaatccacaggctcagaacctgggcttccctcctcctcccgccccactccccccattcct

SEQ ID NO: 304398 - DNA, 201 bp, Homo sapiens
ggagtcttgtaaagttgccgagggtaggttcatctccaggtttcgggattcccatccgtcctggcgatcctgccagcagtgggtgggcagcctgagctccstcgggctcgcctgccagcctggagttcttcctgtgctccttgatcacctgagctgcctcagattccatttggtcctctccttcctggaaggcttcctttt

SEQ ID NO: 304399 - DNA, 201 bp, Homo sapiens
cgcctgccagcctggagttcttcctgtgctccttgatcacctgagctgcctcagattccatttggtcctctccttcctggaaggcttccttttatgttttkttttaatcccaaatgtctgaatgttttgcagtgtgtaggggtttgagccccttgttcattctccttcctttttcctcccgcttccctctccatgaagtga

SEQ ID NO: 304400 - DNA, 201 bp, Homo sapiens
agaactagacttgttttttaagaaaatatatattatatatagagagaattggtctcgtttaaacacgccgaacctcaccatatggagccagacattgggaygcacgcatgtgattgtgtgtgcacgcatgtgtgtgtgtgcacgcactgggctgggccaagcgactgaggattcgcttgggaacgggcaggtggtagtagg

SEQ ID NO: 304401 - DNA, 201 bp, Homo sapiens
atataaacgacagctcctcaactgcctccatgtcatcaccctgtacaaccgtgagtggcagccactctaccctgtctctcagtgctcccccgtgttcctgyggcatagtacatattgcccaaccaacatctcctttggacttgggactactcttgggacatggaattatccccatttcacagatgggcaaactgaggctaa

SEQ ID NO: 304402 - DNA, 201 bp, Homo sapiens
atgggggtggcgggcatgccgcccttcgggatgcctccagctcccccaccgcctccaccacagaactagacttgttttttaagaaaatatatattatatakagagagaattggtctcgtttaaacacgccgaacctcaccatatggagccagacattgggacgcacgcatgtgattgtgtgtgcacgcatgtgtgtgtgtg

SEQ ID NO: 304403 - DNA, 201 bp, Homo sapiens
catgatgcacccctggtacatcccctcctctcagctggcggccaagctgctccacatatatccttcgccggccttgccaaggcccccgccgtcggagcccrtgcgcagcccctctgcccagcccaggtgcagaatgagcctcgctcctaagtataggccactccttatcccagagctcaggcgtcgtcccagcctccaact

SEQ ID NO: 304404 - DNA, 201 bp, Homo sapiens
ggtaggcccactggatccctctcgtttctccacaggcatcaagagggagcccaataagttttttgtgcctcggactgtgatgattggagggaaggtgagargccaggctccagccctgggctcccgtcctttgatatatccaggttgaggtcagcccagctgagttgcaggatagggggtggggggccaggcagtagagct

SEQ ID NO: 304405 - DNA, 201 bp, Homo sapiens
gtgtgcgcctgtagtcccagctactcgggtggctgaagtgggagaactgcttgagcccaggagcctgggtgacagagccagacctcgtctcaaaaaaaaawtttaaaaaattagccagggtgctggtgcatgcctgtagtcccagctactctgaggcttcagtgggaggatcacttgagtccaggatttaaaggctgcagt

SEQ ID NO: 304406 - DNA, 201 bp, Homo sapiens
caagtgctgggcttacaggggtgagccactgcgcctggcctatttatttttatgtttttgagacagagtcactctgtcacctaggctggagtgcaatggcmtgattttggctcactgcaacctccgcctcccaggttcaagtgattctctcacctcagcctcccgagtagctgggattacaggcacccaccatcacgccca

SEQ ID NO: 304407 - DNA, 201 bp, Homo sapiens
tcgggctcgcctgccagcctggagttcttcctgtgctccttgatcacctgagctgcctcagattccatttggtcctctccttcctggaaggcttccttttwtgttttgttttaatcccaaatgtctgaatgttttgcagtgtgtaggggtttgagccccttgttcattctccttcctttttcctcccgcttccctctccat

SEQ ID NO: 304408 - DNA, 201 bp, Homo sapiens
tccccatgacctggctccactccacaccatgagatttatcaaaggaccatcttggcgacttgagtctgccctgaacatctcgacagcagcagcccagaaasggggacaggagaaaactggagccttccgaaaggaattcactcatcacacagcaagttagagggatcctaaaaccaaaccaaatctagacacagtggctca

SEQ ID NO: 304409 - DNA, 201 bp, Homo sapiens
  misc_feature (1)...(201): n = A,T,C or G
ctacctgtgcacttctacggccatgtggagcacaccagccagggtgccaagtgggtggacacacaggtgaggatgaagctgggggtcaggggagcccaganaaggggagggaagagaaggaagcccagagaggaagcaggacccagtgtattttacacctgaggatgctgaggctcagagaggttaagtgacttactcaaa

SEQ ID NO: 304410 - DNA, 201 bp, Homo sapiens
ggggatgggggttcctgggtctggttctagctctgggctctctgggcacagcgggtggcggccgcattcccaggggacgtagaccggctgcggcgcatgtygctggtggaggagggcgcagtgaagcgcatcaacatggcacacctgtgcatcgcggggtcgcacgccgtcaacggcgtggcgcgcatccactccgagatc

SEQ ID NO: 304411 - DNA, 201 bp, Homo sapiens
gcgtggcctggccggcgtggagaacgtgactgagctgaaaaagaacttcaaccggcacctgcatttcacactcgtaaaggaccgcaatgtggccaccccaygagactactactttgctctggcccataccgtgcgcgaccacctcgtggggcgctggatccgcacgcagcagcactactatgagaaggaccccaaggtgct

SEQ ID NO: 304412 - DNA, 201 bp, Homo sapiens
cctggtggacaggatggttcggcaaagcagcctgagttatttttgtggacggaatcggaacacgctggctccatatcgtgaaatttttattaatttttttytttttcctttgttacttctttatcttttcctttcttcagactccgtccaaggagatgctctccccggtcttctgctgcaatttagattcctttcccttct

SEQ ID NO: 304413 - DNA, 201 bp, Homo sapiens
aaccagaagatctccgggggctggcaggtgagcagccttggctctaacttgtggggtctagtcaggatggggaagacccccacttgtttatcatctctggmaaggtccgaaacagccccgcaagctctgtggaaagcatccttgctgctccccaccccccgacccaaagccagctggtgcccctgaaacaggtggtccgtg

SEQ ID NO: 304414 - DNA, 201 bp, Homo sapiens
ggcactgaagcctcaggcaccggcaacatgaagttcatgctcaacggggctctgaccattggcaccatggacggggccaatgtggagatggcagaagaggygggagaggaaaacttcttcatctttggcatgcgggtggaggatgtggataagcttgaccaaagagggtatgggggtcagggttcacgggcaaaagacacc

SEQ ID NO: 304415 - DNA, 201 bp, Homo sapiens
  misc_feature (1)...(201): n = A,T,C or G
tcgtggggcgctggatccgcacgcagcagcactactatgagaaggaccccaaggtgctgctggggagcctggggtgggggtatgggctgaaggcgctgccngggagctggcgatcttgacttaagtggctgcccctcgtcactctaggttcttgggggtggagaatccaggggtgccaggcacaaggggtgctgggacaat

SEQ ID NO: 304416 - DNA, 201 bp, Homo sapiens
aggtggttcactgcatcagggctcccagctgaaggctgaaatccctcctgcactgtgttccccaagcctcgcatccacctggaggagggacaccatcttawttgcatgagggtgctctgtgtgctaatggaggccctggctgtggaggtgaacacagcagagggagtcatccatgggtcacatctgaagtgagcctggaag

SEQ ID NO: 304417 - DNA, 201 bp, Homo sapiens
gcactgaagcctcaggcaccggcaacatgaagttcatgctcaacggggctctgaccattggcaccatggacggggccaatgtggagatggcagaagaggcrggagaggaaaacttcttcatctttggcatgcgggtggaggatgtggataagcttgaccaaagagggtatgggggtcagggttcacgggcaaaagacaccc

SEQ ID NO: 304418 - DNA, 201 bp, Homo sapiens
agcctgggtctgcagagtgcagggataaagccttgagtcccagccctgaggggagggaggcaattgccagggctggccagctcctgacaggattgcccccsgcaggtggtactggccatgccctacgatacgcccgtgcctggctatcgcaacaatgttgtcaacaccatgcgcctctggtctgccaaggctcccaatgac

SEQ ID NO: 304419 - DNA, 201 bp, Homo sapiens
gcctgggtctgcagagtgcagggataaagccttgagtcccagccctgaggggagggaggcaattgccagggctggccagctcctgacaggattgccccccrcaggtggtactggccatgccctacgatacgcccgtgcctggctatcgcaacaatgttgtcaacaccatgcgcctctggtctgccaaggctcccaatgact

SEQ ID NO: 304420 - DNA, 201 bp, Homo sapiens
gccacctaccaggtgtgtgtggggtggggcaagccgtggggactgggggattccactgctgacacttgaccctgaccactgtcaccctcactcctccagcygggcctggacatggaggagctggaggaaattgaggaggatgcggggctgggcaacgggggcctgggccggctggcaggtaagaagacagggccgtgaggg

SEQ ID NO: 304421 - DNA, 201 bp, Homo sapiens
ttattttattttattttaatgtatttttttttttgagacggagtctcgctctgtcacccaggctggagtgcagtggcgcgatcttggctcactgcaagctycgcctcccgggttcacaccattctcctgcctctacctcccgagtagctgggactacaggcacctgctgccacgcctggctaattttttgcatttttagta

SEQ ID NO: 304422 - DNA, 201 bp, Homo sapiens
gagtccctcctggccacacccaccgcagctttaggccatgcccccaccgccctgactcacgctgcctcatgctgtccccagttcttcgaagggaaggagcygcggctgaagcaggagtatttcgtggtggctgccaccctccaggacatcatccgtcgcttcaagtcttccaagttcggctgccgtgatcccgtgcgcacg

SEQ ID NO: 304423 - DNA, 201 bp, Homo sapiens
tggcaggcgcctgtagtcccagctgatcgggaggctgaggcaggagaatggtgtgaatccaggaggcggagcttgcagtgagccgagatcgcgccactgcrctccagcctgggtaacagagtgagactctgcctcaaaaaaaaaaaaaaaatccttgctccctgaaagccatgggcaaaagggaaatatgggcacagtagt

SEQ ID NO: 304424 - DNA, 201 bp, Homo sapiens
ctccccctaccccaggtggccatccagctcaatgacacccacccctccctggccatccccgagctgatgaggatcctggtggacctggaacggatggactrggacaaggtgggcttcagggcccctctgccccatctgatgctctctgcctcggggttcccttcccagtttgggagcgtgggaggatatgaatggagtgaa

SEQ ID NO: 304425 - DNA, 201 bp, Homo sapiens
atcacctgaggtcaggagttcgagaccagcctggccaacatggtgaaaccccgtctctactaaaaatacaaaaattagctgggcgtgatggcaggtgcctrtaatcccagctacttgggaggctgaagcaggagaatcacttgaacctgggaggcggaggttgcagtgagccgagatcacgccattgcacttcagcctggg

SEQ ID NO: 304426 - DNA, 201 bp, Homo sapiens
gtagccatcctcctggggctgactggagtgtggactgtaggatttcctgaggctgtggcctgttggtgagcccttccccgtctctgcctccaggaaaacamgttgaagtttgctgcctacctagagagggaatacaaagtccacatcaaccccaactcactcttcgacatccaggtgaagcggattcacgaatataaacga

SEQ ID NO: 304427 - DNA, 201 bp, Homo sapiens
cctgccttgggtgcagatggaggaggccgatgactggcttcgctacggcaacccctgggagaaggcccggcccgagttcacgctacctgtgcacttctacrgccatgtggagcacaccagccagggtgccaagtgggtggacacacaggtgaggatgaagctgggggtcaggggagcccagagaaggggagggaagagaag

SEQ ID NO: 304428 - DNA, 201 bp, Homo sapiens
cccttctaactttgtcaccatgatgggcatgggggtggcgggcatgccgcccttcgggatgcctccagctcccccaccgcctccaccacagaactagactkgttttttaagaaaatatatattatatatagagagaattggtctcgtttaaacacgccgaacctcaccatatggagccagacattgggacgcacgcatgtg

SEQ ID NO: 304429 - DNA, 201 bp, Homo sapiens
tgggtggatcacctgaggtcaggagttcgagaccagcctggccaacatggtgaaaccccgtctctactaaaaatacaaaaattagctgggcgtgatggcasgtgcctataatcccagctacttgggaggctgaagcaggagaatcacttgaacctgggaggcggaggttgcagtgagccgagatcacgccattgcacttca

SEQ ID NO: 304430 - DNA, 201 bp, Homo sapiens
cagactcgtcacagccatcggggatgtggtcaaccatgacccggcagtgggtgaccgcctccgtgtcatcttcctggagaactaccgagtctcactggccragaaaggtgggtgctgccaacagggaccctagggaggctctgactagttcagtctcaggaagaggtatcagtcgtctcttcctgggatacttgtacttga

SEQ ID NO: 304431 - DNA, 201 bp, Homo sapiens
ccaaggtgggtggatcacctgaggtcaggagttcgagaccagcctggccaacatggtgaaaccccgtctctactaaaaatacaaaaattagctgggcgtgrtggcaggtgcctataatcccagctacttgggaggctgaagcaggagaatcacttgaacctgggaggcggaggttgcagtgagccgagatcacgccattgc

SEQ ID NO: 304432 - DNA, 201 bp, Homo sapiens
agctatgcctggggccagcctaatctgagagtccccagctggtgtgagggtcttccctgagttgacttgtccccctgctgccaccccacagtgatcccagmtgcagacctctctgagcagatctccactgcgggcactgaagcctcaggcaccggcaacatgaagttcatgctcaacggggctctgaccattggcaccatg

SEQ ID NO: 304433 - DNA, 201 bp, Homo sapiens
ggcagggctttggtggccctggttgggatgaggcagaaggtggagatcctgccagcagagtgaaccagagcttccctttgacctgcagaacccaagagagyggacgcggatggtgatccggaacatagccacctctggcaagttctccagtgaccgcaccattgcccagtatgcccgggagatctggggtgtggagccttc

SEQ ID NO: 304434 - DNA, 201 bp, Homo sapiens
aggccaaggtgggtggatcacctgaggtcaggagttcgagaccagcctggccaacatggtgaaaccccgtctctactaaaaatacaaaaattagctgggcrtgatggcaggtgcctataatcccagctacttgggaggctgaagcaggagaatcacttgaacctgggaggcggaggttgcagtgagccgagatcacgccat

SEQ ID NO: 304435 - DNA, 201 bp, Homo sapiens
ccgtgttcctgcggcatagtacatattgcccaaccaacatctcctttggacttgggactactcttgggacatggaattatccccatttcacagatgggcaractgaggctaagagagcatagcaagtgattgttcgagtcaggcctacggtgtcccagcccagcctctgtcaggagctactacccagagggaaaggtaggc

SEQ ID NO: 304436 - DNA, 201 bp, Homo sapiens
cagcctcagggctctgttactgaggttcagccaagggctctggagaaacccaggattggtccaaggaaggaggccgggtttctagttagaaacttagacayaaataacctcgagtgagttcaggttgtaaaagtgcttcagggttcattaaacctgcatacacaacaccaaggaggggcggaggaagcagggaaacagatg

SEQ ID NO: 304437 - DNA, 201 bp, Homo sapiens
cctctcctcacgttcatttctgctgctgtagcagcactgtccccgtccctcaaggcctggcaaggcctggcaagaggaatgccagtggggaaaggtcagcytcagggctctgttactgaggttcagccaagggctctggagaaacccaggattggtccaaggaaggaggccgggtttctagttagaaacttagacataaat

SEQ ID NO: 304438 - DNA, 201 bp, Homo sapiens
atgttcctctcccatccagtccgcctcccctagggcaggccccctgggggctgccgcagccccgcctcgccttcctgggctcccgggagggggcgaggcgrgcaggacgcctgggttctctccccccacctcccataccagggagaaattcctccgaggtcccctcaggctctgggttcccaaaataaccctgcgggggaa

SEQ ID NO: 304439 - DNA, 201 bp, Homo sapiens
ccggcgtggagaacgtgactgagctgaaaaagaacttcaaccggcacctgcatttcacactcgtaaaggaccgcaatgtggccaccccacgagactactastttgctctggcccataccgtgcgcgaccacctcgtggggcgctggatccgcacgcagcagcactactatgagaaggaccccaaggtgctgctggggagcc

SEQ ID NO: 304440 - DNA, 201 bp, Homo sapiens
  misc_feature (1)...(201): n = A,T,C or G
ccctgaaacaggtggtccgtgtcccactcgatagcccagcagaccaggggcccacctcagagctcctgacttatacttggtgtagggtacaccggcccacngcccccaccctgccccaccgtgcactgtgagtgcctgtactgatactgctggcctttctccctgacctgccttgggtgcagatggaggaggccgatgact

SEQ ID NO: 304441 - DNA, 201 bp, Homo sapiens
cctcctggtagccatcctcctggggctgactggagtgtggactgtaggatttcctgaggctgtggcctgttggtgagcccttccccgtctctgcctccagkaaaacaagttgaagtttgctgcctacctagagagggaatacaaagtccacatcaaccccaactcactcttcgacatccaggtgaagcggattcacgaata

SEQ ID NO: 304442 - DNA, 201 bp, Homo sapiens
ctggggcggcagagatcaagtgtccggtggggtcactggtaaatgtcagcaacctgacacgcctcggtggggagtgggggaggggcgggcagacggcccasgaggggacccaggaaactgggagaccaggcactggcagcatcctagtttctggtgcctctgggtctccttgggattgaggcttgagggccaaggggaact

SEQ ID NO: 304443 - DNA, 201 bp, Homo sapiens
ccaccccacagtgatcccagctgcagacctctctgagcagatctccactgcgggcactgaagcctcaggcaccggcaacatgaagttcatgctcaacgggsctctgaccattggcaccatggacggggccaatgtggagatggcagaagaggcgggagaggaaaacttcttcatctttggcatgcgggtggaggatgtgga

SEQ ID NO: 304444 - DNA, 201 bp, Homo sapiens; identical to SEQ ID NO: 63618

SEQ ID NO: 304445 - DNA, 201 bp, Homo sapiens
caggcgtgggatgtgacagtgaggacctgtgcctacaccaaccacacggtgctgcccgaggccctggagcgctggccggtgcacctcttggagacgctgcygccgcggcacctccagatcatctacgagatcaaccagcgcttcctcaacgtgagtccggaggcttgggggatggtgtgggggtgaggggggacacccagt

SEQ ID NO: 304446 - DNA, 201 bp, Homo sapiens; identical to SEQ ID NO: 63620

SEQ ID NO: 304447 - DNA, 201 bp, Homo sapiens; identical to SEQ ID NO: 63621

SEQ ID NO: 304448 - DNA, 201 bp, Homo sapiens
gcaaagggaaggcatggaaccatttttgttctgtgactccataaaaaccctctactgagggaagagagcagaggacagacagatcccagcctgcagtcacrgagaagatgacgggtggggcctgagtggttctggcttctgtaggaagctacagggagtcagaacaagtctgagctactcgaagaatgacgggaggataca

SEQ ID NO: 304449 - DNA, 201 bp, Homo sapiens
aaaacccaagctctccacccaggacagagtcaaaagccgcagcccccgggccacctctgtgatccctttctcaccccagagggtgggccatccctgggggragggagatactccttcagggcccctgaggtctgaagcacacagtttgcctgatgagttttcacctaatctaaggtgggaaggatgccccccggcctgggc

SEQ ID NO: 304450 - DNA, 201 bp, Homo sapiens
ctggctgggctgatagtggccccctggaacccaggctatgggccccacccttggccttggtctgcccctagggtggcaccaccttcggatgtcccacctcyaaggatgacaggccagtcaggccatgtgtcagcagagagggctggagggctggggtcagttctgatggcggagaacctagcctggaggggtatccaaact

SEQ ID NO: 304451 - DNA, 201 bp, Homo sapiens
ctaatgggaaatggggagaagggaaggagacctcatagagtctcagcctactctgttctcattcttgcagctctctcttcccgtttcgatatttcttcagraagagcagccactcttgagccttccaaatgcagcgctggaaagaggatcatctcttgtagtgactcctcccgagccattcttcctccaactctatccttt

SEQ ID NO: 304452 - DNA, 201 bp, Homo sapiens
aggggtgtggtgcacccaagcctgctgggagatgcagtccatcctcaggcctgcagtccccctcccgtcccttgctgtctatggtgacatcatggtctccrgtttaaagggccagtcttggagtggcaaagcccgagaggaggaggttttctccttgagctgccacctcatcccaggcagcctggccttcccggatggacc

SEQ ID NO: 304453 - DNA, 201 bp, Homo sapiens
cggtgcaggatggtcttgaggtactcacgctcccggggatcctcactatcaaatagctccaggagctgtgggaaccagagtcagggtcagggtcagggtcrggggaaaggtccaccccaggttgcttccatcctatccctggcccctcagagagcctgcccctgccttgtggtaccacccagcctgggctccccacttcac

SEQ ID NO: 304454 - DNA, 201 bp, Homo sapiens
cactccaggtctcaggcaagcataagcaaaggtgtggacgtggggcaggcccggaggcattcagtgggtgttgggcagcagcaggtcggggggaaggaagwcgtggactgaggccaagccgatgagtacagggttattctccacgcaggggtcctgcggacaggaaacggggctcacacgccctctcggccggccctcgga

SEQ ID NO: 304455 - DNA, 201 bp, Homo sapiens
ggaacccagcagtgaatgggacacatccctgccttctaggcaggtgcaatccagtggggagaacaaggctagaagctgtgaggtctacgggcaggaaaagrgagatttccagcttggttattgacagcggcttcttggcagaggcggcacctgagccaggccatggatggtatggggtgtggggcagggcactccaggtct

SEQ ID NO: 304456 - DNA, 201 bp, Homo sapiens
tgatttcagcatctgccccagcaagcagttcattccttgggcaatcatcacctgaacgcctagttcgtgcaagccctgggccaggggctgggaacccagcrgtgaatgggacacatccctgccttctaggcaggtgcaatccagtggggagaacaaggctagaagctgtgaggtctacgggcaggaaaagagagatttcca

SEQ ID NO: 304457 - DNA, 201 bp, Homo sapiens
tccacatatctcttggccacggagggctggaagtctgggctctccaagaaacgcaggaaaaactcatataccagctgggggagggggacagacaaaaaggwgagttcagtaacagcctcacccactcattccaccctatggccctcatccaactgtctaggggctaaggaggccctctccccatgccttggatctcttctg

SEQ ID NO: 304458 - DNA, 201 bp, Homo sapiens
cagtcaggcataggatggcaggagcatggacagtcttgcagcatctgatcagacagagtttggggtagtcctcgggttccctccagccatgggggtctgaytcctccctgctcttctcccttcccccacgcccagcccccaacactcactgctgcttttccagcttgtaggaggctgtgagctcatcaaacagcttcccat

SEQ ID NO: 304459 - DNA, 201 bp, Homo sapiens; identical to SEQ ID NO: 63625

SEQ ID NO: 304460 - DNA, 201 bp, Homo sapiens
gggcagggcactccaggtctcaggcaagcataagcaaaggtgtggacgtggggcaggcccggaggcattcagtgggtgttgggcagcagcaggtcggggggaaggaagtcgtggactgaggccaagccgatgagtacagggttattctccacgcaggggtcctgcggacaggaaacggggctcacacgccctctcggccgg

SEQ ID NO: 304461 - DNA, 201 bp, Homo sapiens
caggtccctgttattccagggctaggggagcactccagctcagaacgttactctgtagcacaggatgcgaatcatccactgataccgtggccatgcaactstgaaacagacagcaacccccaaacccccggccctgccaccaagcacatctcaggagacctccactggtataatttcccttgtccctaagaatctccttcc

SEQ ID NO: 304462 - DNA, 201 bp, Homo sapiens
ggccaggaggcagtcatcccaggctgccacttgcaccgtgagtacctctgggaccggagggctaggagcagtggaggttctgggtgggagcaaagagctgvgtggacggtggggcaggcagcaccctaaagggccccacactgaggcacaggcaacgggagctggggcgaggcaaaccttggcagaggcgccgtctactgc

SEQ ID NO: 304463 - DNA, 201 bp, Homo sapiens
tggcctctgatatcactgatgtccagaaacaaggtaggtcctgggaaatttccatttattctcctttaataatcaccctttcccttgtagttctctgataygtagagcagcacagagctgagtctgggtgccctcagtgggtaatgtgccttgctcccgtggaggtgcttgttagccatcctctggtctgggggcctgtcc

SEQ ID NO: 304464 - DNA, 201 bp, Homo sapiens
  misc_feature (1)...(201): n = A,T,C or G
tcaaaccctggtcctctatctgctggtcctggcagtcactgaagcctggggccaggaggcagtcatcccaggctgccacttgcaccgtgagtacctctggnaccggagggctaggagcagtggaggttctgggtgggagcaaagagctgagtggacggtggggcaggcagcaccctaaagggccccacactgaggcacagg

SEQ ID NO: 304465 - DNA, 201 bp, Homo sapiens; identical to SEQ ID NO: 63622

SEQ ID NO: 304466 - DNA, 201 bp, Homo sapiens
tatccagggagatggggcttaagaaatccatcacatggatgaagaaatcaagactcagcggttaaataaaacaaccccaatgttaataggcagggaatctmatgaactccaaggtgcaggaggacagggatcatggctcacccattttgtagctaataacaactaatgtttcagagtcccggcctcagtccaggagctatg

SEQ ID NO: 304467 - DNA, 201 bp, Homo sapiens; identical to SEQ ID NO: 63623

SEQ ID NO: 304468 - DNA, 201 bp, Homo sapiens
atatgtaatacgttactgagaaagggcttggaaaacagaagttctacaagggcccctgcagcccaggagcctttgctgcagtcttctttttttttgttttsttttctttttttttttgagacacagtctccccgttgcccaggctggagtgcagtggcatgatctcggctcactgtaaactccacctcctgggttcatccg

SEQ ID NO: 304469 - DNA, 201 bp, Homo sapiens
tgcaacctcaacctcccaggcaggctcaagcgatcctcccacctcagccttctgagtagctggactacagtagcacaccactatgcccggcaaatttttamatttttgtagtgatgcggtctcactgtcaggctggtcttgaaccccttgcctcaagtgatcctctcgccttggcccaaagtgctgggattacagatgaga

SEQ ID NO: 304470 - DNA, 201 bp, Homo sapiens
ttgatttcagcatctgccccagcaagcagttcattccttgggcaatcatcacctgaacgcctagttcgtgcaagccctgggccaggggctgggaacccagsagtgaatgggacacatccctgccttctaggcaggtgcaatccagtggggagaacaaggctagaagctgtgaggtctacgggcaggaaaagagagatttcc

SEQ ID NO: 304471 - DNA, 201 bp, Homo sapiens
gcccaccctcacctgcacggcacgctcatccaactctcccccaacccagaggctgcgctcccttcccaacatcccaaaccaggccccattgagatccccgyccccccacactgaaatgcccttctcagcccagccacctctgccactgagtcccaagctcaaggctctcttgccagtcaaccaagagaatgacaaacactt

SEQ ID NO: 304472 - DNA, 201 bp, Homo sapiens; identical to SEQ ID NO: 63624

SEQ ID NO: 304473 - DNA, 201 bp, Homo sapiens
gcctaggatgtaccaggcatcacattcagtgtgctgggaatacaactctgatctcgcggggagtggggacagtcaacaaactcatctttataaattttgcmaaaggttccataatatggctagtgtggtggctcacgcctgtaatccaagcactttgggaggccgaggcagcagaatcacttgagcctgggagtttgagac

SEQ ID NO: 304474 - DNA, 201 bp, Homo sapiens
ggttatggcccataagaacgggaggaagtctgcacatgcttgcagcagaacatgagttagttagctgggttggtgcggggaagcctggctgcatcccaaarcgagtctaatgaaatctaaggccactagcaaaaggggaaaagtgataacagtcctccatcacattctggatcacacttcagtttaccaaacatgtttaca

SEQ ID NO: 304475 - DNA, 201 bp, Homo sapiens
cctggggggagggagatactccttcagggcccctgaggtctgaagcacacagtttgcctgatgagttttcacctaatctaaggtgggaaggatgccccccsgcctgggcaaagcctggccctccccattttctctctatggggaggaatcctgaccccaaacttcccctgacctcttgactggaatccagttgtccagtag

SEQ ID NO: 304476 - DNA, 201 bp, Homo sapiens
cccccacagtccagactccctcacagtccagactccctcactaccaccccaccggcaaagggaaggcatggaaccatttttgttctgtgactccataaaarccctctactgagggaagagagcagaggacagacagatcccagcctgcagtcacagagaagatgacgggtggggcctgagtggttctggcttctgtaggaa

SEQ ID NO: 304477 - DNA, 201 bp, Homo sapiens
agacagacagcgacttgacagagtgcagggggatcaggacgcgaaccaggaactgcttgtgctccgtcttcaggggcagcgcaaagccattgatgatgctraggaggaggcagaagagaggaagagggctcaggtgacctggccccagtccctccttccagaatcctgagctccagctgaggcccagggagaatcaccttc

SEQ ID NO: 304478 - DNA, 201 bp, Homo sapiens
actttgggaggccgaggcgggcagatcatgaggtcaaaacttcgagaccaacctgaccaacacggtgaaaccccatctctactaaaaacagaaaaattagscaggcgtggtggtgcacgcctgtaattccagctactcaggaagctgaggcaggagaatcacttgaacccaggaggcagaagttgcagcaagctgagatcg

SEQ ID NO: 304479 - DNA, 201 bp, Homo sapiens; identical to SEQ ID NO: 63681

SEQ ID NO: 304480 - DNA, 201 bp, Homo sapiens
cccaggaggggctctgcctgatcggtgagggcggggctgggctcttccagggtgggaacacaggtgaggccagggctgggctagggagctgccgactcctrcctgaccctgactccgacctgaccctgactcctcccacctgaccctgactcctcccacctgactctgactgactcccatctgaccctgactcctcccacc

SEQ ID NO: 304481 - DNA, 201 bp, Homo sapiens; identical to SEQ ID NO: 63637

SEQ ID NO: 304482 - DNA, 201 bp, Homo sapiens
gatcagcctggccaatagggtgaaactccgtctctactgaaaaaaaaaaaaaaaaaaaaaaattagccaggcatggtggtgggtgcctgtgatcccatctwctcgggaggctgaggcaggaaaatcacttgaacccaggaggcggaggttgtagtgagttgagatcgcgccattgcactccagcctggcgacaagagtgaa

SEQ ID NO: 304483 - DNA, 201 bp, Homo sapiens
tcccagatggagcctgaggctaagaagcttggttcttgttctcatccagggcttgagcccagtgctgagccgagtctgaccctctgtccgtgggtgcaccrgctgagtgcagctgtggccccaggctctgccgcagctccctggagagcaagccgcacccctggttgctgccccggctcccagcaaccctggagatctcag

SEQ ID NO: 304484 - DNA, 201 bp, Homo sapiens
gggacgaataaagcccctgctccctacagaggccagtattgggctgaggggtcccggcctttgaactcagcacggcggctgtgcctctgtgtagccctgcygacctccctgtcccccaggcctgacctctgtgagtatggggacgcctgcaccaaggcacactcagcacaggagctgcaggagtgggtccggcgcacgcag

SEQ ID NO: 304485 - DNA, 201 bp, Homo sapiens
aaggctagacttccacgcagctggcagagacccttgatggagtgcgtgtcacctgcaaccagcccctgatgtaccaggcccaggagaggaagacccagtayagctggacgtttgccgtccactctgaggtgagcggagaacagctccgactgggcggagggagccctggggaagtggtgacttcagcccgggcagacgtca

SEQ ID NO: 304486 - DNA, 201 bp, Homo sapiens
gcggggcaggagcccaccgtaggcagagccagaggctcccaggagcttggagcggggcaggagcccaccacaggcagagccagaggttcccaggagcttgkagcggggcaggagcccaccgcaggcagagccagaggctcccaggttcagtggacgggggcctccctgccacctgctgagggctaaagccatgtggcctct

SEQ ID NO: 304487 - DNA, 201 bp, Homo sapiens
gcctcagtttccccatctgtaagagggggctgcagtatttgcctcccagggctgaggtggggctcggcccctgaggtgtctggagcttggtgggggtgccstctccttgtcgggggtggcccagtcctcactgcgtcctgcgctcatccccgagcttggtgggggtgccgtctccttgtcgggggtggcccagtcctcact

SEQ ID NO: 304488 - DNA, 201 bp, Homo sapiens; identical to SEQ ID NO: 63639

SEQ ID NO: 304489 - DNA, 201 bp, Homo sapiens
cggcgagagggcatcgccggggtggccgtgtcctccatcaccaagagccagggtgaggctgggggctcgtgggtggggccgggagggtgggcgcagcggcmgcagggcctcacctcccatcccgcagggagcgagtggcgctatgtgctggtgagcaccgtccgcacctgtgccaagagcgacctggaccagcggcccacc

SEQ ID NO: 304490 - DNA, 201 bp, Homo sapiens
cctgaggtgtctggagcttggtgggggtgccgtctccttgtcgggggtggcccagtcctcactgcgtcctgcgctcatccccgagcttggtgggggtgccstctccttgtcgggggtggcccagtcctcactgcgtcctgcgctcatccccgagcttggtgggggtgccctctccttgtcgggggtggccgagtcctcact

SEQ ID NO: 304491 - DNA, 201 bp, Homo sapiens; identical to SEQ ID NO: 63642

SEQ ID NO: 304492 - DNA, 201 bp, Homo sapiens; identical to SEQ ID NO: 63644

SEQ ID NO: 304493 - DNA, 201 bp, Homo sapiens; identical to SEQ ID NO: 63645

SEQ ID NO: 304494 - DNA, 201 bp, Homo sapiens; identical to SEQ ID NO: 63647

SEQ ID NO: 304495 - DNA, 201 bp, Homo sapiens
ctcctctccaggagcccctgctacacgtggccctgctgaagcaggagccaggagccgacttctctctggtggctcccggcctcccgccaggccggctctaygcacggggtgagcgcttccgtgtgcccagctccactgccgacttccaggtgggagtgcgtgtgcaggccgcctcgttcggcacctttgagcaatgggtgg

SEQ ID NO: 304496 - DNA, 201 bp, Homo sapiens; identical to SEQ ID NO: 63648

SEQ ID NO: 304497 - DNA, 201 bp, Homo sapiens; identical to SEQ ID NO: 63649

SEQ ID NO: 304498 - DNA, 201 bp, Homo sapiens
ctggacgtgaggcagatccttgttgacgaggcaggcatggccacggaacctgaaaccctcatccccctggtgcagttcccacaggccgagaaggttggtcrgcggggggtgtgggcagcatgagcaggcgtccctggcacagtctcccacctggggtgccctgtgtgtgcagacgcgggtgtcgtgtggggctggggtccc

SEQ ID NO: 304499 - DNA, 201 bp, Homo sapiens; identical to SEQ ID NO: 63650

SEQ ID NO: 304500 - DNA, 201 bp, Homo sapiens; identical to SEQ ID NO: 63651

SEQ ID NO: 304501 - DNA, 201 bp, Homo sapiens; identical to SEQ ID NO: 63653

SEQ ID NO: 304502 - DNA, 201 bp, Homo sapiens; identical to SEQ ID NO: 63652

SEQ ID NO: 304503 - DNA, 201 bp, Homo sapiens
ccggaggccgccacaagctgaaccccagccagaacgtggcggtcagggaggctctggagaagcctttcacggtcattcagggcccaccaggtagggcccaygccgggggagccgcaggctgccttgggccacagggacccacagggtgggctacaatctcctattctctggctgcaggtacagggaagacgatcgtgggcc

SEQ ID NO: 304504 - DNA, 201 bp, Homo sapiens
ccctgcacttgggctacgctggccaggctgcctctcgggagggttggggggagccctgggcccccctcaccgtctggcctcctctccaggagcccctgctrcacgtggccctgctgaagcaggagccaggagccgacttctctctggtggctcccggcctcccgccaggccggctctacgcacggggtgagcgcttccgtg

SEQ ID NO: 304505 - DNA, 201 bp, Homo sapiens
ccctggggaggaccgtagagccccaggacatcgccgtcctcacgccctacaacgcgcaggcctctgagatcagcaaggcccttcggcgagagggcatcgcyggggtggccgtgtcctccatcaccaagagccagggtgaggctgggggctcgtgggtggggccgggagggtgggcgcagcggcagcagggcctcacctccc

SEQ ID NO: 304506 - DNA, 201 bp, Homo sapiens
gcaccgtccgcacctgtgccaagagcgacctggaccagcggcccaccaagagctggctcaagaagtttctgggcttcgttgtggaccccaaccaagtgaaygtggctgtcacgcgggcccaggaggggctctgcctgatcggtgagggcggggctgggctcttccagggtgggaacacaggtgaggccagggctgggctag

SEQ ID NO: 304507 - DNA, 201 bp, Homo sapiens
gggcaggagcccaccgcaggcagagccagaggctcccaggttcagtggacgggggcctccctgccacctgctgagggctaaagccatgtggcctctgaggwcccggataagggaggttcatgtttgggaactgcttgagccaggccttgtcccgggagcacaggagtgggtgggacgaataaagcccctgctccctacaga

SEQ ID NO: 304508 - DNA, 201 bp, Homo sapiens; identical to SEQ ID NO: 63658

SEQ ID NO: 304509 - DNA, 201 bp, Homo sapiens; identical to SEQ ID NO: 63659

SEQ ID NO: 304510 - DNA, 201 bp, Homo sapiens; identical to SEQ ID NO: 63711

SEQ ID NO: 304511 - DNA, 201 bp, Homo sapiens; identical to SEQ ID NO: 63712

SEQ ID NO: 304512 - DNA, 201 bp, Homo sapiens
ggggtccctgcatcttgtactgcggcccctccaacaagtcggtggatgtcctggcaggtgcgccggggtcggcggtgggggcctttggggagctggcacgyggggcaggactcacgtcccccaactaccctcaggactgctcctgagaaggatggagctgaagcccctccgtgtgtacagtgagcaggctgaggccagcga

SEQ ID NO: 304513 - DNA, 201 bp, Homo sapiens
acgtcccccaactaccctcaggactgctcctgagaaggatggagctgaagcccctccgtgtgtacagtgagcaggctgaggccagcgagttcccagtgccrcgtgtgggcagcaggaagctgctcaggaagagcccccgggaggggaggccgaaccagagcctcaggtgtgcctgctgtctttggggcttgggcggagtgg

SEQ ID NO: 304514 - DNA, 201 bp, Homo sapiens
cctgtaatcccagcactttgggagaccgaggcaggtggatcacctgaggtcgggagttcgagatcagcctggccaatagggtgaaactccgtctctactgaaaaaaaaaaaaaaaaaaaaaaattagccaggcatggtggtgggtgcctgtgatcccatcttctcgggaggctgaggcaggaaaatcacttgaacccagga

SEQ ID NO: 304515 - DNA, 201 bp, Homo sapiens
  misc_feature (1)...(201): n = A,T,C or G
aaccctcatccccctggtgcagttcccacaggccgagaaggttggtcggcggggggtgtgggcagcatgagcaggcgtccctggcacagtctcccacctgnggtgccctgtgtgtgcagacgcgggtgtcgtgtggggctggggtccctctgggtctaggggtgtcagggccaggcctgcctattcctccaggtggttctt

SEQ ID NO: 304516 - DNA, 201 bp, Homo sapiens
ctccttgtcgggggtggcccagtcctcactgcgtcctgcgctcatccccgagcttggtgggggtgccgtctccttgtcgggggtggcccagtcctcactgmgtcctgcgctcatccccgagcttggtgggggtgccctctccttgtcgggggtggccgagtcctcactgcgtccagcactcatccccggccctgctgcgtc

SEQ ID NO: 304517 - DNA, 201 bp, Homo sapiens
ctgactctgactgactcccatctgaccctgactcctcccacctgaccctgactcctcccacctgaccctgactgactcccacctgaccctgactcctcccrcctgaccctgactcctcccacctgaccctgactgactcccatctgactcccaccctcacaggagaccacctccttctgcgctgctgccccctctggcgta

SEQ ID NO: 304518 - DNA, 201 bp, Homo sapiens
tcatgcgctggaacttccaggggtcgatgagctggaacaaggcgctaggcagcaccagcgggttctggtcgcccagggccaggtgcttgggcaggacctcratgtagtaggagcacttacgcagcagctgcatgcgggcgtggtggcgcttgagcaggtgcggactcaggtccgaggtcaggaactcacgcagggcattgc

SEQ ID NO: 304519 - DNA, 201 bp, Homo sapiens
tgcagcccggaggccccccccgtggggagaagcggctggggggtccctgcatcttgtactgcggcccctccaacaagtcggtggatgtcctggcaggtgcrccggggtcggcggtgggggcctttggggagctggcacgcggggcaggactcacgtcccccaactaccctcaggactgctcctgagaaggatggagctgaa

SEQ ID NO: 304520 - DNA, 201 bp, Homo sapiens
catgtttgggaactgcttgagccaggccttgtcccgggagcacaggagtgggtgggacgaataaagcccctgctccctacagaggccagtattgggctgargggtcccggcctttgaactcagcacggcggctgtgcctctgtgtagccctgccgacctccctgtcccccaggcctgacctctgtgagtatggggacgcct

SEQ ID NO: 304521 - DNA, 201 bp, Homo sapiens; identical to SEQ ID NO: 63673

SEQ ID NO: 304522 - DNA, 201 bp, Homo sapiens
cggaaatcaaggcctttgacacccggctgcagagaggggagctcttctccagggaggacctggtctggtaagtggcaggggccagggggtggagctgcctrcagcatgggggccctggggtgacaagcagtgtccccggcaggtacaagaaggtcttgtgggaggctcggaagttcgagctggaccggcatgaggtcatcc

SEQ ID NO: 304523 - DNA, 201 bp, Homo sapiens
gggcaggagcccaccgtaggcagagccagaggctcccaggagcttggagtagcgcaggagcccaccacaggcagagccagaggctcccaggagcttggagyagggcaggagcccaccgtaggcagagccagaggttcccaggagcttggagtggggcaggagcccaccgtaggcagagccagaggctcccaggagcttgga

SEQ ID NO: 304524 - DNA, 201 bp, Homo sapiens
gcagaggatgcaccagtttctctatgaggaggaggcggctcagcagcagctggtggccaagtgagctgggggcaacaggagcagctggggtagcaggagcrgctggggcaatgggagcggctggggcaacgggagcggatgggggcgtggacttggcagcggggctggcagctgtggccccatgagctgacccaggccatc

SEQ ID NO: 304525 - DNA, 201 bp, Homo sapiens; identical to SEQ ID NO: 63674

SEQ ID NO: 304526 - DNA, 201 bp, Homo sapiens; identical to SEQ ID NO: 63678

SEQ ID NO: 304527 - DNA, 201 bp, Homo sapiens
cctgagcgaggggccctgggcattcccggtccattgggtgtagaaggagctgccgggagctgttggtgggcacagatgtccctctgtgcaggagcctctgyggagccacgtggaaggcgcgtgtcctgtgctcccgggcctggctggtttccagagcggtgctgccagtttagactctggccgagtgcctgcaatgtcaga

SEQ ID NO: 304528 - DNA, 201 bp, Homo sapiens
gggtggccgggtctgctgtcaggtgaggagctgggtgcctctgccggggccctggcccaaggagagtgtcacggggaaggctgcagcatggcccacccagsacttctggggatgagtcttgtttttcgtttttatagaaacacagatctttgtcctaaccacaaggttcccctttggtttatgtggtttcctctggttcct

SEQ ID NO: 304529 - DNA, 201 bp, Homo sapiens; identical to SEQ ID NO: 63680

SEQ ID NO: 304530 - DNA, 201 bp, Homo sapiens; identical to SEQ ID NO: 63636

SEQ ID NO: 304531 - DNA, 201 bp, Homo sapiens; identical to SEQ ID NO: 63683

SEQ ID NO: 304532 - DNA, 201 bp, Homo sapiens
ggtgaggaccgccttcagccgcctctcccctcccctgcctggaggttggggcaaggctgcaagtaccaccctctactcctgctgaggcctttctgaggacyagccccatcctgaggctgcctccaggctgccagccttcggtcaatatcagcacaaaaaggcacttgccactttggctactccagggattttaggggtttt

SEQ ID NO: 304533 - DNA, 201 bp, Homo sapiens; identical to SEQ ID NO: 63638

SEQ ID NO: 304534 - DNA, 201 bp, Homo sapiens
tctggtcgcccagggccaggtgcttgggcaggacctcgatgtagtaggagcacttacgcagcagctgcatgcgggcgtggtggcgcttgagcaggtgcggrctcaggtccgaggtcaggaactcacgcagggcattgcggcgctcggtgtaggtcttccacgcctctggttccagcagctgctggtcatctgcctcctcct

SEQ ID NO: 304535 - DNA, 201 bp, Homo sapiens
tgggggtgccgtctccttgtcgggggtggcccagtcctcactgcgtcctgcgctcatccccgagcttggtgggggtgccctctccttgtcgggggtggccsagtcctcactgcgtccagcactcatccccggccctgctgcgtcttcaggtcagtgcactgaggcaggagctgaggaggcgggacctaggccaggtgtctg

SEQ ID NO: 304536 - DNA, 201 bp, Homo sapiens
tcaggaagctgtccatgacggccgacacgtccgccagccgccgctccaccagcgcccagtcggccaggaagggccgtgggtctggcgaccggagcagggcrtccagctcagcacggccatggtcgagctgttccaacaggtccccgagcagcaggagctggatcttggtctgagctgtgcccaccttcttcatgcgctgga

SEQ ID NO: 304537 - DNA, 201 bp, Homo sapiens; identical to SEQ ID NO: 63640

SEQ ID NO: 304538 - DNA, 201 bp, Homo sapiens; identical to SEQ ID NO: 63641

SEQ ID NO: 304539 - DNA, 201 bp, Homo sapiens
gggaggttcatgtttgggaactgcttgagccaggccttgtcccgggagcacaggagtgggtgggacgaataaagcccctgctccctacagaggccagtatygggctgaggggtcccggcctttgaactcagcacggcggctgtgcctctgtgtagccctgccgacctccctgtcccccaggcctgacctctgtgagtatgg

SEQ ID NO: 304540 - DNA, 201 bp, Homo sapiens
cccaggagcttggagcggggcaggagcccaccgtaggcagagccagaggctcccaggagcttggagcggggcaggagcccaccacaggcagagccagaggytcccaggagcttggagcggggcaggagcccaccgcaggcagagccagaggctcccaggttcagtggacgggggcctccctgccacctgctgagggctaaa

SEQ ID NO: 304541 - DNA, 201 bp, Homo sapiens; identical to SEQ ID NO: 63643

SEQ ID NO: 304542 - DNA, 201 bp, Homo sapiens
tcctattctctggctgcaggtacagggaagacgatcgtgggcctccacatcgtattctggtttcataaatcaaaccaggagcaggtgcagcccggaggccscccccgtggggagaagcggctggggggtccctgcatcttgtactgcggcccctccaacaagtcggtggatgtcctggcaggtgcgccggggtcggcggtg

SEQ ID NO: 304543 - DNA, 201 bp, Homo sapiens; identical to SEQ ID NO: 63703

SEQ ID NO: 304544 - DNA, 201 bp, Homo sapiens; identical to SEQ ID NO: 63654

SEQ ID NO: 304545 - DNA, 201 bp, Homo sapiens; identical to SEQ ID NO: 63657

SEQ ID NO: 304546 - DNA, 201 bp, Homo sapiens
cctctggttcctgccaccaccacctccccaggccggggccttcccatccctgcccagtggggagtgggaggaagagcctgggacagtggccatacgtcccrggctgatttctggattgggggttctggggaccagggaggtgcaggtgtctgcagtgtcagaggagccgctgggctcgcccaggtgttgcctgaagccctc

SEQ ID NO: 304547 - DNA, 201 bp, Homo sapiens
cagggaggtgcaggtgtctgcagtgtcagaggagccgctgggctcgcccaggtgttgcctgaagccctccgtggcctcttgccccttggactcctgacagsagggacaccagtgtttgctgctcacctctgacagccagacaagggctgtgctcaggggcagctcggctgggcacacagtaggtgctttagcggacagcac

SEQ ID NO: 304548 - DNA, 201 bp, Homo sapiens
gcggggccaggtgctgccagctgccccaggataccccgggtggctcggcccactcctcagcctggcatcggcaggggtggggctggtcccaccgtcttgcrcacccagcctgacctgactgcgtgccccctgcagggcggcagttccgggtcgtggtgctcagcactgtgcacacctgccagagcctgctcagccctgggg

SEQ ID NO: 304549 - DNA, 201 bp, Homo sapiens; identical to SEQ ID NO: 63660

SEQ ID NO: 304550 - DNA, 201 bp, Homo sapiens
cagaggagccgctgggctcgcccaggtgttgcctgaagccctccgtggcctcttgccccttggactcctgacagcagggacaccagtgtttgctgctcacytctgacagccagacaagggctgtgctcaggggcagctcggctgggcacacagtaggtgctttagcggacagcactgaggcccccagcaagaagcccatga

SEQ ID NO: 304551 - DNA, 201 bp, Homo sapiens; identical to SEQ ID NO: 63663

SEQ ID NO: 304552 - DNA, 201 bp, Homo sapiens
acatgtccatggcgtcctggctgaatctggctgagattgcgcaggtcgtcgagaaggtgcaggaggcctacaacacctggcccagctgctggggcggccgygagcagaggtgcatctgtgtcgtttcccacggtgcccaggtgagcccggccagcccgggacagcccccgaccgcacccctgctgggggagggggagctct

SEQ ID NO: 304553 - DNA, 201 bp, Homo sapiens
cccaggagcttggagtagggcaggagcccaccgtaggcagagccagaggctcccaggagcttggagtagcgcaggagcccaccacaggcagagccagaggytcccaggagcttggagcagggcaggagcccaccgtaggcagagccagaggttcccaggagcttggagtggggcaggagcccaccgtaggcagagccagag

SEQ ID NO: 304554 - DNA, 201 bp, Homo sapiens
cagctggacgtttgccgtccactctgaggtgagcggagaacagctccgactgggcggagggagccctggggaagtggtgacttcagcccgggcagacgtcracagcctgggtcatggagctaataccgaggcactgccgctcagcacctgcgtgacctgcagcaggtcccttagcctctctgcctcagtctcctcacctag

SEQ ID NO: 304555 - DNA, 201 bp, Homo sapiens
gagcagggcaggagcccaccgtaggcagagccagaggttcccaggagcttggagtggggcaggagcccaccgtaggcagagccagaggctcccaggagctkggagcggggcaggagcccaccacaggcagagccagaggctcccaggagcttggagcggggcaggagcccaccgtaggcagagccagaggttcccaggagc

SEQ ID NO: 304556 - DNA, 201 bp, Homo sapiens
gggcaggagcccaccacaggcagagccagaggttcccaggagcttggagtagggcaggagcccaccgtaggcagagccagaggttcccaggagcttggagyggggcaggagcccaccacaggcagagccagaggttcccaggagcttggagcagggcaggagcccaccacaggcagagccagaggttcccaggagcttgga

SEQ ID NO: 304557 - DNA, 201 bp, Homo sapiens
ggagctggatcttggtctgagctgtgcccaccttcttcatgcgctggaacttccaggggtcgatgagctggaacaaggcgctaggcagcaccagcgggttytggtcgcccagggccaggtgcttgggcaggacctcgatgtagtaggagcacttacgcagcagctgcatgcgggcgtggtggcgcttgagcaggtgcggac

SEQ ID NO: 304558 - DNA, 201 bp, Homo sapiens; identical to SEQ ID NO: 63665

SEQ ID NO: 304559 - DNA, 201 bp, Homo sapiens
agatgtgcgggatcttggtggcactgacatcagacaccaggcggtgcttgacgtgtagccgccccggcaccatcatggtcaggaagctgtccatgacggcygacacgtccgccagccgccgctccaccagcgcccagtcggccaggaagggccgtgggtctggcgaccggagcagggcatccagctcagcacggccatggt

SEQ ID NO: 304560 - DNA, 201 bp, Homo sapiens
ggctgcagtatttgcctcccagggctgaggtggggctcggcccctgaggtgtctggagcttggtgggggtgccgtctccttgtcgggggtggcccagtccycactgcgtcctgcgctcatccccgagcttggtgggggtgccgtctccttgtcgggggtggcccagtcctcactgcgtcctgcgctcatccccgagcttgg

SEQ ID NO: 304561 - DNA, 201 bp, Homo sapiens
gtgtggggctggggtccctctgggtctaggggtgtcagggccaggcctgcctattcctccaggtggttcttctcggagaccacaagcagctgcggcctgtrgtcaagaatgagcggctgcaaaacctgggtctggaccggtctctgttcgagcggtaccacgaggacgcacatatgctggacactcagtaccgcatggtga

SEQ ID NO: 304562 - DNA, 201 bp, Homo sapiens
agtatttgcctcccagggctgaggtggggctcggcccctgaggtgtctggagcttggtgggggtgccgtctccttgtcgggggtggcccagtcctcactgmgtcctgcgctcatccccgagcttggtgggggtgccgtctccttgtcgggggtggcccagtcctcactgcgtcctgcgctcatccccgagcttggtggggg

SEQ ID NO: 304563 - DNA, 201 bp, Homo sapiens
ctgccccacgggacatccacaggggccccaggagggttcagccacccccatgtagcacaggaagaaactgaggatggcagaggccgggtggcctgcttgcrttctatccaggaagtggcagggccaggacctgaaccctgcacttgggctacgctggccaggctgcctctcgggagggttggggggagccctgggcccccc

SEQ ID NO: 304564 - DNA, 201 bp, Homo sapiens
ctcccagggctgaggtggggctcggcccctgaggtgtctggagcttggtgggggtgccgtctccttgtcgggggtggcccagtcctcactgcgtcctgcgytcatccccgagcttggtgggggtgccgtctccttgtcgggggtggcccagtcctcactgcgtcctgcgctcatccccgagcttggtgggggtgccctctc

SEQ ID NO: 304565 - DNA, 201 bp, Homo sapiens
cgggccagaatcgaaactgagagctcctgggcaggctcggcagggcaggcagctccaggagggtgagcgcgggggtcccagggtggaggggcgggggcgcrggggtccaggggcggctccaggagggtgagcgcgggggtcccagggtggcggggccgggggcggaggggggggtccgggagggtgagtgcagccgggggc

SEQ ID NO: 304566 - DNA, 201 bp, Homo sapiens; identical to SEQ ID NO: 63667

SEQ ID NO: 304567 - DNA, 201 bp, Homo sapiens
ttcccacaggccgagaaggttggtcggcggggggtgtgggcagcatgagcaggcgtccctggcacagtctcccacctggggtgccctgtgtgtgcagacgygggtgtcgtgtggggctggggtccctctgggtctaggggtgtcagggccaggcctgcctattcctccaggtggttcttctcggagaccacaagcagctgc

SEQ ID NO: 304568 - DNA, 201 bp, Homo sapiens
gttgagatcgcgccattgcactccagcctggcgacaagagtgaaactccgtctcaaaaaccaaaacaaaaacaaggattcaccagggtctggcacctggaragtgggtggtgaggcctcaagctgcccacactgccccacgggacatccacaggggccccaggagggttcagccacccccatgtagcacaggaagaaactg

SEQ ID NO: 304569 - DNA, 201 bp, Homo sapiens
gcaagctgaagacgtggcagggcctgaggaggccgcccagtgtcctgggccacgctggcaaggagagctgccctgtcatctttggccacgtgcagggccaygagcggagcctgctggtgtccacggacgaagggaatgagaactccaaggccaacctggaggaggtggctgaggtggtgagtgtctggtgcctgtgagtca

SEQ ID NO: 304570 - DNA, 201 bp, Homo sapiens
gagatcgcgccattgcactccagcctggcgacaagagtgaaactccgtctcaaaaaccaaaacaaaaacaaggattcaccagggtctggcacctggagagkgggtggtgaggcctcaagctgcccacactgccccacgggacatccacaggggccccaggagggttcagccacccccatgtagcacaggaagaaactgagg

SEQ ID NO: 304571 - DNA, 201 bp, Homo sapiens
gtggagcggacggccgagcagacggccctgatggccaagtacaagggccctgccctggccctggagttcaaccgcagcagcgtggcctcgggccccatctygccaaccaactatcggcagaggatgcaccagtttctctatgaggaggaggcggctcagcagcagctggtggccaagtgagctgggggcaacaggagcagc

SEQ ID NO: 304572 - DNA, 201 bp, Homo sapiens
accaactatcggcagaggatgcaccagtttctctatgaggaggaggcggctcagcagcagctggtggccaagtgagctgggggcaacaggagcagctgggstagcaggagcagctggggcaatgggagcggctggggcaacgggagcggatgggggcgtggacttggcagcggggctggcagctgtggccccatgagctga

SEQ ID NO: 304573 - DNA, 201 bp, Homo sapiens; identical to SEQ ID NO: 63669

SEQ ID NO: 304574 - DNA, 201 bp, Homo sapiens
ccaactatcggcagaggatgcaccagtttctctatgaggaggaggcggctcagcagcagctggtggccaagtgagctgggggcaacaggagcagctggggyagcaggagcagctggggcaatgggagcggctggggcaacgggagcggatgggggcgtggacttggcagcggggctggcagctgtggccccatgagctgac

SEQ ID NO: 304575 - DNA, 201 bp, Homo sapiens; identical to SEQ ID NO: 63670

SEQ ID NO: 304576 - DNA, 201 bp, Homo sapiens; identical to SEQ ID NO: 63671

SEQ ID NO: 304577 - DNA, 201 bp, Homo sapiens; identical to SEQ ID NO: 63672

SEQ ID NO: 304578 - DNA, 201 bp, Homo sapiens
tgaggccagggctgggctagggagctgccgactcctgcctgaccctgactccgacctgaccctgactcctcccacctgaccctgactcctcccacctgacyctgactgactcccatctgaccctgactcctcccacctgaccctgactcctcccacctgaccctgactgactcccacctgaccctgactcctcccacctga

SEQ ID NO: 304579 - DNA, 201 bp, Homo sapiens
tcgggggtggcccagtcctcactgcgtcctgcgctcatccccgagcttggtgggggtgccgtctccttgtcgggggtggcccagtcctcactgcgtcctgygctcatccccgagcttggtgggggtgccctctccttgtcgggggtggccgagtcctcactgcgtccagcactcatccccggccctgctgcgtcttcaggt

SEQ ID NO: 304580 - DNA, 201 bp, Homo sapiens
ctgactcctcccacctgaccctgactcctcccacctgactctgactgactcccatctgaccctgactcctcccacctgaccctgactcctcccacctgacyctgactgactcccacctgaccctgactcctcccacctgaccctgactccgacctgaccctgactcctcccacctgaccctgactcctcccacctgactct

SEQ ID NO: 304581 - DNA, 201 bp, Homo sapiens
actcctcagcctggcatcggcaggggtggggctggtcccaccgtcttgcgcacccagcctgacctgactgcgtgccccctgcagggcggcagttccgggtygtggtgctcagcactgtgcacacctgccagagcctgctcagccctggggcactggcccctgagttcttcaccgacgcccgcgtgctcaacaccgtcctga

SEQ ID NO: 304582 - DNA, 201 bp, Homo sapiens
aggttcctggagcggcagacctacaacatccccggaggccgccacaagctgaaccccagccagaacgtggcggtcagggaggctctggagaagcctttcayggtcattcagggcccaccaggtagggcccacgccgggggagccgcaggctgccttgggccacagggacccacagggtgggctacaatctcctattctctg

SEQ ID NO: 304583 - DNA, 201 bp, Homo sapiens; identical to SEQ ID NO: 63677

SEQ ID NO: 304584 - DNA, 201 bp, Homo sapiens; identical to SEQ ID NO: 63679

SEQ ID NO: 304585 - DNA, 201 bp, Homo sapiens
tgcgctcatccccgagcttggtgggggtgccgtctccttgtcgggggtggcccagtcctcactgcgtcctgcgctcatccccgagcttggtgggggtgccstctccttgtcgggggtggccgagtcctcactgcgtccagcactcatccccggccctgctgcgtcttcaggtcagtgcactgaggcaggagctgaggaggc

SEQ ID NO: 304586 - DNA, 201 bp, Homo sapiens; identical to SEQ ID NO: 63732

SEQ ID NO: 304587 - DNA, 201 bp, Homo sapiens
tggagcggacggccgagcagacggccctgatggccaagtacaagggccctgccctggccctggagttcaaccgcagcagcgtggcctcgggccccatctcrccaaccaactatcggcagaggatgcaccagtttctctatgaggaggaggcggctcagcagcagctggtggccaagtgagctgggggcaacaggagcagct

SEQ ID NO: 304588 - DNA, 201 bp, Homo sapiens; identical to SEQ ID NO: 63733

SEQ ID NO: 304589 - DNA, 201 bp, Homo sapiens
aaatgagcccatcagcgggtaggagcccttcccccgccgtcccctccccaggctcgtgaacggcgcctgatgcccgcccggggcgcgagctctcgaggtcrcagtgacctcagcacctgcttggaggaaaacggcgcgggaaccccgcttccttcccctcagctggagccagacctcaaacaaaaccccaatcgatgcaca

SEQ ID NO: 304590 - DNA, 201 bp, Homo sapiens
caccaccgcccagctaattttttgtatttttagtagagatggggtttcaccgtgttagccaggatggtttcaatctcctgaccttgtgatccacccgcctyggcctcccaaagtgctgggattacaggcatgagccaccgcacccggccatccaggttttttagggctcatgtgtttttgagttgttttctttatcacagt

SEQ ID NO: 304591 - DNA, 201 bp, Homo sapiens
cgtgtctgttagggagagaatttccattgctttgaatcagctttttaaaagaacccttgactctgttttccatgatttggggctttctcgttcgcacaggsgtttgttcctttcctcgtgagtgccacagctggaaccaccgtgtacggagcatttgaccccctcttagctgtcgctgacatttgcaaaaagtataagatc

SEQ ID NO: 304592 - DNA, 201 bp, Homo sapiens
atattttgtcaattatacgctatgacaaagtcttcgccctcatgcagcctgctgtgttctcgtagtggacacacagtgaactaatattagaaatagtgtcwtgtggtgatgagattagggtggtagtcagctactttacaggatggtcataaaaatatctctgtgtggaggtgatatgtgagcagagacctacattgaatg

SEQ ID NO: 304593 - DNA, 201 bp, Homo sapiens
aagtgcaaagactcagaagggagaacaagtttagcaagctcacagaagaccaggaaagccaacgcaccaggtagacagagtgaggggaacaaagacagaaratgaggtaggggaggttgccagccactgaggactgtcttaataatctgtgtcctccaagcccagcagaggcttgtccctgaaaccctgtgatctgttagg

SEQ ID NO: 304594 - DNA, 201 bp, Homo sapiens
  misc_feature (1)...(201): n = A,T,C or G
attttttttacagagtcatttttctctcaagaagggagctgcagccttagggattggaacagacagcgtgattctgattaaatgtgatgagaggtgagcangcatcggcaactcttgttggttagcaatttgcaaattccacacaagtagtgccttttggtctgaaaataggagaggaccacggggcagcaagtccacctc

SEQ ID NO: 304595 - DNA, 201 bp, Homo sapiens
gactgagatggggtgtgacagtggcacctgtcctgtccctatgtgccctctggggtagcgcctttgagtctgaggattcagtttaaagatagtcaataggkttttcttctgagtccaaggaggactcaggtcagtggaaataaggaatgttgcttgcatgtgaaatgaggttgataataaataaagtaactgcgtgttgct

SEQ ID NO: 304596 - DNA, 201 bp, Homo sapiens
  misc_feature (1)...(201): n = A,T,C or G
ttaaaaagaggatccaagcctcaatctcccaggtttaatgagaacatagaattctgcatccagtcactatttatttctctgggttataggctctgctttanaaaagtttaaattgctgaataaatattatatacagagatacagtgagcgtttccaaagcatttgtcttcctaggtactgagggttggcatgaaacaccca

SEQ ID NO: 304597 - DNA, 201 bp, Homo sapiens
atttttgccctgtcttttgtaatcatcagccatttgtcactgatattattatgaatgttggcatgcctggcggatgtcatggtatgaccgattctcagaaygactacaaaaaaggacttctagcagcatgagtataaaggagaagttacctgtctgaatggctgtgggttgcagtagcattttagcttgcgaaaatattga

SEQ ID NO: 304598 - DNA, 201 bp, Homo sapiens
gtgtctgttagggagagaatttccattgctttgaatcagctttttaaaagaacccttgactctgttttccatgatttggggctttctcgttcgcacagggstttgttcctttcctcgtgagtgccacagctggaaccaccgtgtacggagcatttgaccccctcttagctgtcgctgacatttgcaaaaagtataagatct

SEQ ID NO: 304599 - DNA, 201 bp, Homo sapiens
gtgaaagtgcacagtgtgttggagaaagttcaaacccgtttggttggaggatgccatggtttaacagctgtggccaggtcatgggtggaaagtgcagaagycttggccagcccagggcccgcccgcagagccaggtcagaatctgcgggggttctttccacgaaacatagatccctgagctgggagtcactgctgtgtggc

SEQ ID NO: 304600 - DNA, 201 bp, Homo sapiens
ggtttaacagctgtggccaggtcatgggtggaaagtgcagaagtcttggccagcccagggcccgcccgcagagccaggtcagaatctgcgggggttctttycacgaaacatagatccctgagctgggagtcactgctgtgtggctgccattatgcgtggagagcattagattccttggggcgacaaaacccatggaaaacc

SEQ ID NO: 304601 - DNA, 201 bp, Homo sapiens
actttatattccatgggtggttgtttttcttccatgaaatgagcctctcaccctagattttgaggcattatcttaagattttcctttatccatctcccatygagatccaaagtgaccagaatatgcagaaataataagatccttagaattcaaaatagtatttttaaaacatccttctttccctgtgaacctgatagaaaa

SEQ ID NO: 304602 - DNA, 201 bp, Homo sapiens
atgaatgaatcgggtctttcccagcttctcattttttcccaaggccatcacacccgagaggtgggaactggatgagcccacgtccattgtacggccagacrgggcagcaatccatggctctctggaggcagctgccacgggttattctactgtaatactttccttcctcctttatgccactcatgaaactccactgccagg

SEQ ID NO: 304603 - DNA, 201 bp, Homo sapiens
ccccaggccagtgagcgctctctgactgtctggctgacacctgcccttcatcaaatgaatgaatcgggtctttcccagcttctcattttttcccaaggccrtcacacccgagaggtgggaactggatgagcccacgtccattgtacggccagacagggcagcaatccatggctctctggaggcagctgccacgggttattc

SEQ ID NO: 304604 - DNA, 201 bp, Homo sapiens
gggcgcgagctctcgaggtcgcagtgacctcagcacctgcttggaggaaaacggcgcgggaaccccgcttccttcccctcagctggagccagacctcaaamaaaaccccaatcgatgcacacagaaaactcctctgggccacgcttcccgcctcgccgaggtctccccagtctgcccctcgctgacgctggcgcgcagcgg

SEQ ID NO: 304605 - DNA, 201 bp, Homo sapiens
cctctcgaaggtcagtgctccaagctcctctgatacatgtgtgtattgagcctttcatgtgcacatcttctttatgacatatgcctgtggccttaggagayagcctacctgggtacatgggcccattcccgtctgtggactcctacagagccaggacatatagagcctgatatatgcagacatttttcttctttttttttt

SEQ ID NO: 304606 - DNA, 201 bp, Homo sapiens
tgtatgttttgaaaaaggaaatagttctgtagctattgtaatgattgtaaattatttatctgagttacagaggtaaaatgtggccattactacatttcagrttcacctatgaaattgctccagtatttgtgcttttggaatatgtcacactaaagaaaatgagagaaatcattggctggccagggggctctggcgatggga

SEQ ID NO: 304607 - DNA, 201 bp, Homo sapiens
cgtgttgctgtgcactttaggtggcgccatatctaacatgtatgccatgatgatcgcacgctttaagatgttcccagaagtcaaggagaaaggaatggctrctcttcccaggctcattgccttcacgtctgaacatgtatgtgtttcttttccttgcaagtttaaggttatgttccataaagcccgagtttaaggagtgat

SEQ ID NO: 304608 - DNA, 201 bp, Homo sapiens
actatgaggatgtgacgccacacacatgccttggacacagggaggggcagcaagtgggctgtgccaatgtttaccaaacaagaatcaaaagggctggtctrttgatcacctcttgtgtttctggttctttatcttcttattttaattttttttattcttgatcattatctggttctgtcagcttttatagtcctacactga

SEQ ID NO: 304609 - DNA, 201 bp, Homo sapiens
gggcccttcggtgtaaactctgaaggttagtgccagaaggaggtggtcaacttcctaagtggcctggggtcaagatcattttcacctagaaagacaccagrctatagaaatctaggcaatgacaaactgctaccattttcctcatatgattttttttcaggcagcttggggtgggggattactgatgtcccgaaaacacaa

SEQ ID NO: 304610 - DNA, 201 bp, Homo sapiens
ctgtgtggctgccattatgcgtggagagcattagattccttggggcgacaaaacccatggaaaacctttgctgcaggagccgtagtgggctttgagcagargtgcaatgtgatctcacctgtgttctggcattaactctgcattagagaggagacgggagccagggacagactagaagctattaagctcttaggaacgtcc

SEQ ID NO: 304611 - DNA, 201 bp, Homo sapiens
accaaagactattatttgagagcaaagcttagaacgttcatcagggaacacagagtttcctcttattgccgcaattcttgaaactgtactgtaactaaacktttcaaatggaataaccatatatgaagtcctaaaaatgagggggctgctggtgttccactctgagcagaatcccctttagccacccatttaactgaggat

SEQ ID NO: 304612 - DNA, 201 bp, Homo sapiens
cactgagaaaagactgaactatccgatatcattagtgacctgggcctcaggactggaaatcctggtagaccttgctggctgattcaggaagaggattaccyggcaacttcaaaaatgagaatgtctgtgtgtcctgagccagcagaagctatgggttgttcctctgggcctcctacttaaattagaactagggaatctttt

SEQ ID NO: 304613 - DNA, 201 bp, Homo sapiens
aaagtaaaaataaaaccttatcagcctgagcaaagaggaatgaagcacactcccagaatgtggtgagcccagaaaattaaagttggccttgggagaagagrtctctgtgggacaataatgacatcatcctggcgccatattgccactgtccaggaaagagaaatttacctccaggccagttgcgcatttccatcccctccc

SEQ ID NO: 304614 - DNA, 201 bp, Homo sapiens
agcactttcttaggatacgtcttcccctttctcttcttccctccttccttctccagcctctttaagaacaactaaattctcaaacaagatcattttgctcyccacaagggacatttggcaatatctatagatgcttttgattgtctgggggagagggtgctatgggcatctggtgggtagaaaccagggatgctgctcaac

SEQ ID NO: 304615 - DNA, 201 bp, Homo sapiens
caaataggcccccacgtagagataaacaccacagccagacatggaagacagctgttttcctctcccatcaggcattcttactgacaaagctgagtttatcmgaattagacatctagccatagaacatgatggaatgtatagaatggccatgtgtacgtgcatgcacggtgtcaccaagctcacaaatgacagagatgaaat

SEQ ID NO: 304616 - DNA, 201 bp, Homo sapiens
tattcaaaggtttggaataaaaaggtttctctgaactctcctttcattgccaaacattttgctccaaatcaggcttgttttaactgaattaagaggatgamttaataagaagcttctgtgcacagcagagggtcatggtaatcgttctatagggaacaacacaatacggtcacaagtctgcaaaacgtgccagaaatgata

SEQ ID NO: 304617 - DNA, 201 bp, Homo sapiens
cgccgagttttacccccgtgcacttacacaccgtctcccaaatgtacgcgcgcacacacacatgcagacacacatgcatacgctctctctctctctctctcacacacacacacacacacacacacacacacacacacacacacacactgactttagaaacagcgggccttcctatcagaccagagatcctaatgcacctgt

SEQ ID NO: 304618 - DNA, 201 bp, Homo sapiens
  misc_feature (1)...(201): n = A,T,C or G
ctgcaatattttttatttattcaatacaataaattcccctcgtgcattatgtcagtagttggagctcttgactgtagggatatagaaaaaataaacatttnggaaggcctttttgaaataattttctctctgcttaatgttataatcataacacttgtaaatgtatgttttgaaaaaggaaatagttctgtagctattgta

SEQ ID NO: 304619 - DNA, 201 bp, Homo sapiens
ttgacttcctgattgaagaaatagaacgccttggacaagatttataataaccttgctcaccaagctgttccacttctctaggtagacaattaagttgtcayaaactgtgtgaatgtatttgtagtttgttccaaagtaaatctatttctatattgtggtgtcaaagtagagtttaaaaattaaacaaaaaagacattgctc

SEQ ID NO: 304620 - DNA, 201 bp, Homo sapiens
ttattttttgacatttcaagggataacctctagttacaaagctttttatttccccctaatctcccaaaatacctaatcacctccttttatgtagattctgwgtttccctctgaatttagctgtaggtgatccctccttttttcagcaaggaaaactcactaactaacagtgtgcaggacttgcttagacttaattgtagct

SEQ ID NO: 304621 - DNA, 201 bp, Homo sapiens
gccgagttttacccccgtgcacttacacaccgtctcccaaatgtacgcgcgcacacacacatgcagacacacatgcatacgctctctctctctctctctcacacacacacacacacacacacacacacacacacacacacacacactgactttagaaacagcgggccttcctatcagaccagagatcctaatgcacctgtt

SEQ ID NO: 304622 - DNA, 201 bp, Homo sapiens
aggcaaaccttttgcttttgaattaaaaacctcttcaaagggcttccagcaagagtagaatccactgcagttccccttagtgactgagatggggtgtgacrgtggcacctgtcctgtccctatgtgccctctggggtagcgcctttgagtctgaggattcagtttaaagatagtcaataggtttttcttctgagtccaagg

SEQ ID NO: 304623 - DNA, 201 bp, Homo sapiens
ccaaaacactaactggaaagtcaaggacaaggtggcaggcagctgatagtctatcacttattattcctcttatcacttgcaggatcttgaatgtgttagaytgttctaattctctgatcccaagaaaacttggaggtaactctttcaagagaaaacaataaggttctgactgttgagctaaaaactaaagacgctgcttgc

SEQ ID NO: 304624 - DNA, 201 bp, Homo sapiens
ccagctaatttttatattttttggtcaggacagggttgggacggggtttcaccatgttggccaggctggtctcgaacgcctgaccttaagtgatcggctcrcctcggcctcccaaagtgctgggattacaggcatgagccaccaagcctagccaacagtttagaatttctcatttaattattctgcttttacatttttcag

SEQ ID NO: 304625 - DNA, 201 bp, Homo sapiens
ggaaatctgggataccatgaggtcctttatgcttggtggagtggatatacatttggctctaaggtgtgtaaatagcctacttaaagaggtaacatgctcartcccataagaaaaagcaaataacttggtcagcaggagggaagtataccaggataagaccagtgaatgggttcttccacaagtctgtgtaaaaaggtagga

SEQ ID NO: 304626 - DNA, 201 bp, Homo sapiens
agctaatttttatattttttggtcaggacagggttgggacggggtttcaccatgttggccaggctggtctcgaacgcctgaccttaagtgatcggctcacstcggcctcccaaagtgctgggattacaggcatgagccaccaagcctagccaacagtttagaatttctcatttaattattctgcttttacatttttcagaa

SEQ ID NO: 304627 - DNA, 201 bp, Homo sapiens
cgatctcctgacctggtgatctgccggcctcagcctcccaaagtgctgggataacaggcgtggagccaccatgcccggcccagatttcaagcttttaaccrtagtcaactgcctctctgaacctcggtttcctaatctgcactgtaagtgcaaaataactctcttgtagggtcgggaggaggagcagggatcgcacagtta

SEQ ID NO: 304628 - DNA, 201 bp, Homo sapiens
ccgagttttacccccgtgcacttacacaccgtctcccaaatgtacgcgcgcacacacacatgcagacacacatgcatacgctctctctctctctctctcacacacacacacacacacacacacacacacacacacacacacacactgactttagaaacagcgggccttcctatcagaccagagatcctaatgcacctgttc

SEQ ID NO: 304629 - DNA, 201 bp, Homo sapiens
aatgacatatttataatcacattttaaataatagcctcaggagagtgtggatgtcaatccatttagagagttttagaggaatctagaagttaattagatargccttgcgatggactaatcagtcgattgagtatatctttctgtatcttgttgataaaacagtgatgttgactgtatgtggccttattttaaatcacaact

SEQ ID NO: 304630 - DNA, 201 bp, Homo sapiens
gctgagaataagcacatagctgcccgactatccggagcctcaggcccaaaggttccacttcagagacagagatgctaattgatccaacctgctgtccttcktggagaagacagtggggcccagtgccctggtgaaccaaccctgctgtactccaggatgctttatcttttgagttacagatcctagattataaactgctgc

SEQ ID NO: 304631 - DNA, 201 bp, Homo sapiens
aatataaacaaacaactagcaggttttttttactgctattgcgtttgaatgctacactaggtagaacaacatcctcaaatatgttttagggtgaggttacrtgcttttattatttactagccaatgctgatagcagtaattggggtcactggaccgctcaatccagggggcttccagaaaaccacatggacattttgcata

SEQ ID NO: 304632 - DNA, 201 bp, Homo sapiens
cgagttttacccccgtgcacttacacaccgtctcccaaatgtacgcgcgcacacacacatgcagacacacatgcatacgctctctctctctctctctcacacacacacacacacacacacacacacacacacacacacacacactgactttagaaacagcgggccttcctatcagaccagagatcctaatgcacctgttcc

SEQ ID NO: 304633 - DNA, 201 bp, Homo sapiens
cttcaacaattttttccccaagtcagtctatgcagtttctgtagtcactacgcagtctgtgcaatttgaaaattcacctgcatccattaactctccttgcyatcttgataggatagttttgcctagcactgactagttaaaaagcaaatataaacaaacaactagcaggttttttttactgctattgcgtttgaatgctac

SEQ ID NO: 304634 - DNA, 201 bp, Homo sapiens
ccccgtgcacttacacaccgtctcccaaatgtacgcgcgcacacacacatgcagacacacatgcatacgctctctctctctctctctcacacacacacacwcacacacacacacacacacacacacacacacactgactttagaaacagcgggccttcctatcagaccagagatcctaatgcacctgttccactttggttt

SEQ ID NO: 304635 - DNA, 201 bp, Homo sapiens
aataaaagcaagagccccatgaaggcaccagggaaggggatgaaaagagcaaatcacagccactgtgttacttattcttttacttacttgtggaaacacckcaagtatctagacatctagccgcaaaaacttccattttgtttttcaatctaaacctttgtgagtttttttttgaaaaacgaaatgataatcattattaaa

SEQ ID NO: 304636 - DNA, 201 bp, Homo sapiens
gtcatagtatgtgtgctaagtaaatgcttttggagaaagtcaatgggaagaataaatattactagaattatacacaaaaaatcacccaaaatatccttctyttataacctgaaaataatgctaagtgattcaattgtgcacattggaaaacaaatcctaaaagagaaaaatatcattaatcattatagttaaagttctttt

SEQ ID NO: 304637 - DNA, 201 bp, Homo sapiens
ccgtgcacttacacaccgtctcccaaatgtacgcgcgcacacacacatgcagacacacatgcatacgctctctctctctctctctcacacacacacacacwcacacacacacacacacacacacacacacactgactttagaaacagcgggccttcctatcagaccagagatcctaatgcacctgttccactttggtttgc

SEQ ID NO: 304638 - DNA, 201 bp, Homo sapiens
gggaggccgaggcgggtggatcatttgaggtcaggagtttgagaccagcctggccaatgtggtgaaaccccgtctctactaaaaatacacaaaaaaattasccgggtgtggtggtgcatgcctgtggtcccagcttcttgggaggctgaggcaggagaattgcttgaacccaggagatagaggtggcagtgagcggagatc

SEQ ID NO: 304639 - DNA, 201 bp, Homo sapiens
tcctagcagcattgtatgagagtatgttggaaaaaaattttaactgtgctattagctatatggcatctttgactctatattgataattcacatcatctgtrtgacatgagtttaagactgagagcctggccctaatggtttaagtgacattgaagtgtttgggttcagaagccaaggagaaaggtgtggacaatcatttgt

SEQ ID NO: 304640 - DNA, 201 bp, Homo sapiens
acagaaggttgatgctagttcttgaggcatcttccaaatagtattcttttattaggtcatttgaattaattagagaaagtaaaaataaaaccttatcagcytgagcaaagaggaatgaagcacactcccagaatgtggtgagcccagaaaattaaagttggccttgggagaagagatctctgtgggacaataatgacatca

SEQ ID NO: 304641 - DNA, 201 bp, Homo sapiens
tttgcagagatcattagatttggtgctagtggtggtggtgctggctggggaagagtaggacttaaatgtggtcctgaatcttttaccaaaccatcagacaragggaattaagcgtcagtagatgaggcagccctagtgtgagtgttgccaggacataaagagcagtttggaccgacttttggcctcttcccaactgatcat

SEQ ID NO: 304642 - DNA, 201 bp, Homo sapiens
ctaggtgggaagaggcagtgtcgtcagaaggagatagttacagggtggaactgcatggcatgaagtacacatttgaactttgagaagacctagaaagcttsatgcaacaggcaggaattgagctggatttttaaaattaggagtgagctggacaagtggagggaaaggcaagggcagttacagaagattgaataccagcag

SEQ ID NO: 304643 - DNA, 201 bp, Homo sapiens
ttattattcctcttatcacttgcaggatcttgaatgtgttagactgttctaattctctgatcccaagaaaacttggaggtaactctttcaagagaaaacartaaggttctgactgttgagctaaaaactaaagacgctgcttgctgttgggttctttgactcaggggagagtcccaggagaaagtcaccatgctgatatgg

SEQ ID NO: 304644 - DNA, 201 bp, Homo sapiens
gaagagatttggaaatgattagatgactgcatcagaaggacctaccgactggcaatttgatgttaccgttgaggctgtggggagctggtttagtaacaccrggtggtagagatttgacagcaaaatcagaacatctgacttgggttcaataaaaggaatacttctaaaaattaagctgtccaacaataggaataagttaat

SEQ ID NO: 304645 - DNA, 201 bp, Homo sapiens
ggacacctgacctatgggggcaggtctcacaattccttggagagagccctgccttgatttgctgggcagccctaggaagcagcctgtaggggccacaggaygggagcaaatgtcactaggggaatatttctgccagaaatcgagagagcctgttgatctgacctgtcaaactatctccctccctattttcacatcatcatc

SEQ ID NO: 304646 - DNA, 201 bp, Homo sapiens
  misc_feature (1)...(201): n = A,T,C or G
tccagtctccaaagccgatggcatctccgggctctggcttttggtctttcgggtcggaagatggctctggggattccgagaatcccggcacaggtaggaangagaacgggggcctgcggcgggcgagttttgcggtggtctggggtttgcggaactacggagaagacgaaggaggtttttccacctgcaacaggaaacttc

SEQ ID NO: 304647 - DNA, 201 bp, Homo sapiens
ttcggagctcatttaaagccgtcctgcatcttcttgaacccttgaccctaaccatcctggacaggtgagctcttaaaagtgagtcctgcctttgaagctgyaggttaagaggtaatacgatccccatcgctagttccttctgggctctagacctcagacattattttcaattcatcatttagtgtagcttccttctggctt

SEQ ID NO: 304648 - DNA, 201 bp, Homo sapiens; identical to SEQ ID NO: 63739

SEQ ID NO: 304649 - DNA, 201 bp, Homo sapiens
ttgcccccattcttttttttaaaattgattcttactgttttctttctctaagatatgcaatgtctcttacttcttttttcttattaatttttaccaatatraatctaataagtagtcagtagaatttcctaaattttctcttctctcttgtagggattgatgcagaattgcaaccaaatgcatgcctcctacctctttcag

SEQ ID NO: 304650 - DNA, 201 bp, Homo sapiens
ccattactacatttcaggttcacctatgaaattgctccagtatttgtgcttttggaatatgtcacactaaagaaaatgagagaaatcattggctggccagrgggctctggcgatgggatattttctcccggtacatgatatttcaactttctttgtgttttttcttctaatatgcaatgccttgttgtaaacctagggaag

SEQ ID NO: 304651 - DNA, 201 bp, Homo sapiens
tcattaggctaccagagcccctttcattttacacatgaagacactgagaaaagactgaactatccgatatcattagtgacctgggcctcaggactggaaaycctggtagaccttgctggctgattcaggaagaggattacccggcaacttcaaaaatgagaatgtctgtgtgtcctgagccagcagaagctatgggttgtt

SEQ ID NO: 304652 - DNA, 201 bp, Homo sapiens
ctttttaaaagaacccttgactctgttttccatgatttggggctttctcgttcgcacaggggtttgttcctttcctcgtgagtgccacagctggaaccacygtgtacggagcatttgaccccctcttagctgtcgctgacatttgcaaaaagtataagatctggatgcatgtggatgtaagtatcccttagggactggcca

SEQ ID NO: 304653 - DNA, 201 bp, Homo sapiens
ttagcattaatcttttaacctttgatttgcattcatctgaaaagctagagatgattgtccttaataattagtgccattcttctgtatttttgcttggattrcccatgaaaactaaatgagactttaatttactgagtaaagctctgtcattattttatcagttctaaagggcaagcgtgatttattatacaaataaaacta

SEQ ID NO: 304654 - DNA, 201 bp, Homo sapiens
ggcaggagaattgcttgaacccaggagatagaggtggcagtgagcggagatcgtgccactgcactccagcctgggcgacagagtgagaccctgtctcaagaaaaaaaaaaaaaagttgattagcagcttacaccagtaacagctgatttatgttaatccaaatgcaaggcactgaatgagttgaaatgaaaaaaaaaaagc

SEQ ID NO: 304655 - DNA, 201 bp, Homo sapiens
ctgtgatagaaggcatggtctccattttgaaccgggtttctgaccatatgaaactcaaagaagtctaaaagtttctctgatgtctatctaccatttgcagmaatgaagatcagatattatatatttacaaactccagtggtaaatatatgtggatagactgtatgtacagttagacatgatttaagtttttgcttcttcct

SEQ ID NO: 304656 - DNA, 201 bp, Homo sapiens
actaaaaatacaaaaaaattagccagacaaggtggtaggcaactgtaatcccagctactcaggaggctgaggcaggagaatcacttgaaccgaggaggcaraggttgcagtgagaagagatcgcatcactgcactccagcctgggcaacagagccacactccattctcaaaaaaaacaaaaacataagactgttccttcat

SEQ ID NO: 304657 - DNA, 201 bp, Homo sapiens
atgcatcagattaaccttgcaaaagatttcatcaatttgttctcctagcagcattgtatgagagtatgttggaaaaaaattttaactgtgctattagctayatggcatctttgactctatattgataattcacatcatctgtgtgacatgagtttaagactgagagcctggccctaatggtttaagtgacattgaagtgtt

SEQ ID NO: 304658 - DNA, 201 bp, Homo sapiens
tggtgggcacctgtaatcccagctacttgggaggctgaggcaggaaaatcacttgaacccgggaggcagaggttgcagtgagccaagattgcaccactgcmctccagcctgggagacagagcgagattccgtctcaagaaaagaacaaattaatatgctctagcaccttcttccactcattctccctgctctcttccattc

SEQ ID NO: 304659 - DNA, 201 bp, Homo sapiens
ttatgaaaatcaggaaatgtgacatagatagaatactattattaaatgtacataccttattcgtttcttcagttgtcccaatagtatccattatagctatytttcccagtccgggatcacacgtggcatttagttgtcatgtctctttggtcccctttaatctgcaatgtttcctctgcctgcctttgtctctcatgacat

SEQ ID NO: 304660 - DNA, 201 bp, Homo sapiens
gaggatgaagcaagatgatacatgggaagggtagtgcactgcgcatggctctcggtgagcccctcacagatgacactgtcgttagaaggagctgagcccarccaggagacgagacagagggagcagggagagcagagtcggggccagtgatttccttaagagggatgtgcccttcctcccaaagtgccaaagcaacactca

SEQ ID NO: 304661 - DNA, 201 bp, Homo sapiens
ggtatgcagtggtatttcattgtggttttcatttgcatttccctgatgattagtggtgttgaggatttttttttcatgtgcttagtggacatttgtatacwgtttttggagaaatgcttactcaggtcttttggattggttttgttattgttgttgttgagttttaggacttctttattctagatattaatcctttatcag

SEQ ID NO: 304662 - DNA, 201 bp, Homo sapiens
aggcaggagaatcacttgaacccgggaagcaaaggttgcagtgagctgagatcgcaccactgcacttcaggtgacagggcgagactccatcacacagacamacacacacacacacacacacacacacacacacacacacaagaaaagaaagggattgacatgaattttgttcgaagatttcacaatgccacttgaggtaag

SEQ ID NO: 304663 - DNA, 201 bp, Homo sapiens
tgtctcttcccttctggctgtaagagacttagcttgcctctgagctccttctctttggggtcgcccagggctctgccaaatgcacaaaaaacccccccccyttttttggtgggggaggtcatgcatctttacaaaccttgatctaattaagctttctcctctagttcctaggtatcacggtaatgactgtccactttgtca

SEQ ID NO: 304664 - DNA, 201 bp, Homo sapiens
ggtgtgagccaccatgcctggccaaccccttcttaattagcagtcacaggggctaactttgggtgacagttcaaagtgaaacacggttctcagttaaaacaaaaaaaaaagttataataaatctttgtttgtttggactaggttcttttagagttgaaaattaaaaagcattttaattttattaaatatacttaaaaaatg

SEQ ID NO: 304665 - DNA, 201 bp, Homo sapiens
ttctcttcctgctgtttcattggtatgtgaaattgcaggtcggtttattcaaaggtttggaataaaaaggtttctctgaactctcctttcattgccaaacrttttgctccaaatcaggcttgttttaactgaattaagaggatgacttaataagaagcttctgtgcacagcagagggtcatggtaatcgttctatagggaa

SEQ ID NO: 304666 - DNA, 201 bp, Homo sapiens
gcttatcttcatatatcacctgacactcaaacttacattttggtaacaatcctctgaactgtttatttccaatgtttttacatttactgtggggggaaaaygcccccaaacgtcttgctaacccatttagcttggggccaatactagattcatcccatcctcccaaaacactaactggaaagtcaaggacaaggtggcagg

SEQ ID NO: 304667 - DNA, 201 bp, Homo sapiens
gctcagaaccaggatatcatctcactaaggccttctgtagggaaaacagcatcacttttgcttgtcatgttgtacagtaatgagactgcggctgttcagctttttttttttttttttttttttgagacggggtctctttctctgtcgcctaggctgaagtgcagtgatgtgatcttggctcactgcaacctccacctcctg

SEQ ID NO: 304668 - DNA, 201 bp, Homo sapiens
gtaacaatcctctgaactgtttatttccaatgtttttacatttactgtggggggaaaatgcccccaaacgtcttgctaacccatttagcttggggccaatrctagattcatcccatcctcccaaaacactaactggaaagtcaaggacaaggtggcaggcagctgatagtctatcacttattattcctcttatcacttgca

SEQ ID NO: 304669 - DNA, 201 bp, Homo sapiens
tatgcgaatgcaggactgaagctctgaccactcttgagagaggaatatgacatttgaaagattggttatttaaattcacctcaaaattgcaatatgtgggttttttttttttttagattttagcatataaaaatgatagcaatgagctgccttaaaagctatgatttccaaagggagctcaaactccctaacagctaaatg

SEQ ID NO: 304670 - DNA, 201 bp, Homo sapiens
aattaaaaacctcttcaaagggcttccagcaagagtagaatccactgcagttccccttagtgactgagatggggtgtgacagtggcacctgtcctgtcccyatgtgccctctggggtagcgcctttgagtctgaggattcagtttaaagatagtcaataggtttttcttctgagtccaaggaggactcaggtcagtggaaa

SEQ ID NO: 304671 - DNA, 201 bp, Homo sapiens
gctttatgtaaattgactgagacttgatcaggccatgtggtctgaggatctaaaaataacaattttgctctaccttcttttcctgatactgtaaactcagwctactttttttttttttttttttttttgagtcagagtctagccctgtcgcccaggctggagtgctgtggcgtgatctctggagtgcagtggtgcagtctc

SEQ ID NO: 304672 - DNA, 201 bp, Homo sapiens
aacagaaggttgatgctagttcttgaggcatcttccaaatagtattcttttattaggtcatttgaattaattagagaaagtaaaaataaaaccttatcagsctgagcaaagaggaatgaagcacactcccagaatgtggtgagcccagaaaattaaagttggccttgggagaagagatctctgtgggacaataatgacatc

SEQ ID NO: 304673 - DNA, 201 bp, Homo sapiens
tcagacaaacacaggttgaaatgtttggttttatcatgtactagttgtgtgacactggacaagttacttaatctcgctatgcctcagttttctgatctggsaaaggaaagtcatattaatgctcctctcataagactgttgggagggttcaattagacaccatcactgaagagattagcatagtggccagcccaagactgc

SEQ ID NO: 304674 - DNA, 201 bp, Homo sapiens
cagtatgtggtgaaaagtttcgatagatcaaccaaagtgattgatttccattatcctaatgagcttctccaagaatataattgggaattggcagaccaacmacaaaatttggaggaaattttgatgcattgccaaacaactctaaaatatgcaattaaaacaggtattgtctcatcgaaaataataaagctcttttttcgt

SEQ ID NO: 304675 - DNA, 201 bp, Homo sapiens
ggtcataaagaccttgctgataaaacagtttgcagtaaagaggccagccaaaatccaccaaaaccaagatggtgatgagagtgacctctggtcgtcctcaytactacactcccatctgcaccgtgacagtttacaaatgccacggcaatgtcaggaagttactctatgtggtctaaaaaggggaggcatgaataatccacc

SEQ ID NO: 304676 - DNA, 201 bp, Homo sapiens
acacaagaaaagaaagggattgacatgaattttgttcgaagatttcacaatgccacttgaggtaaggagggagacctgaggacagtatcacattaggtagraggatgggaggataggaaaggctaccctttttggggatagcccaaaaaatgatatgtaaggcacctcacatgccacagctacacttctcacatcaattct

SEQ ID NO: 304677 - DNA, 201 bp, Homo sapiens
tccattacacactttcattcactcttcatgatccacaatcatagaaataattgttgtccacagagtgctcaaaatgactgaagacatactcactactgatrttcacatttgtcactgaagatcattcttggatctcttttcatgttaaacttaacctggtacacatcattcctttcatttgacacttatttagggtataag

SEQ ID NO: 304678 - DNA, 201 bp, Homo sapiens
aatatgtggtcaacaaattcaacaaatattttgtcaattatacgctatgacaaagtcttcgccctcatgcagcctgctgtgttctcgtagtggacacacastgaactaatattagaaatagtgtcttgtggtgatgagattagggtggtagtcagctactttacaggatggtcataaaaatatctctgtgtggaggtgata

SEQ ID NO: 304679 - DNA, 201 bp, Homo sapiens
actgagatttgaagagaaaactggagtttaaaaatgtgaagaataaatgtttagatgactttaaaactttcttaatctgtagttgatctgttatgggtgargagcctggagttgagggaagaatcacctagagggccgtggcccgctggcctaggcagtcttccttgctagccttggtagctggcgttctccagtgaaccc

SEQ ID NO: 304680 - DNA, 201 bp, Homo sapiens
tttttttgcttttttttttttttttgtattttttagtagagatggggtttcactgttagccaggatggtcttgatctcctgatctcgtgatccacccaccycggcctcccaaagtgctaggattataggcgtgcaccaccatgcccagcctcatctttctttttctaattagacatgataacatgagtatttttccacatg

SEQ ID NO: 304681 - DNA, 201 bp, Homo sapiens
agaagttaaacaaagccacagagatcatactgaaagaatctggggccttaaaaaataagcaagatttaacaaagtgaagcaaagggagatggtgttccagkaagaggaaacagcatgatgagacccaggagtatgagaatagaattctctgagaacaaaagttaatctggcctgatgaaatgggtaaagaaaagcgaagag

SEQ ID NO: 304682 - DNA, 201 bp, Homo sapiens
gaaggaacgcataagttgatgttcattcgagtgcaagatccttatgttgtcatgggccagcactgggtctaagccagggctataacaatgatctagccctrgcttagatcattttggctttataataattattcagaccaaattaatgctcttttttttttctttttgagacagagtcttgctctgtcgcccaggcaggag

SEQ ID NO: 304683 - DNA, 201 bp, Homo sapiens
acacaaagtcagccattcatctgcccaggtcttgattaccctcgctttttacgttgtctctaatcatcctgatacacgatggctgacacttcattacggcmataaaaataagtatgaatgaatttccaggggtggggaggactttgtggatcgaagttgatgtgtagcctttaaaagatttgctagcaaataaaaaatgtg

SEQ ID NO: 304684 - DNA, 201 bp, Homo sapiens
ttaataaggggaggagattaaatagagagattggacagccacttattagtaagggtgtagaaatgattcctttattgaggaggaatagagtaaacgagctytaaattcccttacaaatccaagactttatgatgctctgacagcatttgtttattggcatccaaggaataatgctgttccataagatggtaataagagttc

SEQ ID NO: 304685 - DNA, 201 bp, Homo sapiens
tttctccgagtattgttatcaacagtttggggttggactttaccctcctgcggccacttacgttgtaaagacgatgaagcaaattattcaaagcaaatctrtatttctttttccttccagagggaaaatgattccatctgatcttgaaagaaggattcttgaagccaaacagaaagtaagtttctgccgggagctttatcc

SEQ ID NO: 304686 - DNA, 201 bp, Homo sapiens
gttgttttctttatcacagtaggaataggtctgatccattcagcattccacactctctgaggtggtcttccttagtattgatggcacgaaggtgtgagctkgcatggcctgaggaataatggtacaaagtttctgtgaccatgaaaccaaataaaagtgagtgttgcaaattttcaccttattggtcttcaagtgaatttt

SEQ ID NO: 304687 - DNA, 201 bp, Homo sapiens
  misc_feature (1)...(201): n = A,T,C or G
gccatcttctctcagcagcccaggctttggaggaacagactagaaatgaaaggaaaaaaggaaaacagaaaacaaacagccagtggaatggatcttgtctntatatggaactaattgcaaatatatatattttttttacagagtcatttttctctcaagaagggagctgcagccttagggattggaacagacagcgtgatt

SEQ ID NO: 304688 - DNA, 201 bp, Homo sapiens
gtgttacttattcttttacttacttgtggaaacaccgcaagtatctagacatctagccgcaaaaacttccattttgtttttcaatctaaacctttgtgagtttttttttgaaaaacgaaatgataatcattattaaagtaataagctaagtcctacaatctagatcaaaggtgaggaaaattgtactctcacagcaaagct

SEQ ID NO: 304689 - DNA, 201 bp, Homo sapiens
gcaggatcttgaatgtgttagactgttctaattctctgatcccaagaaaacttggaggtaactctttcaagagaaaacaataaggttctgactgttgagcwaaaaactaaagacgctgcttgctgttgggttctttgactcaggggagagtcccaggagaaagtcaccatgctgatatggtctgtcccacaggtggctcca

SEQ ID NO: 304690 - DNA, 201 bp, Homo sapiens
aaggaagtagcctggacttatatttaatacagactctttgaaagtctgtgttattaagtgcaatagaggatttaattggtgaaattttcgcatattagaattttttttttttaagacagggtctcactctgttgcccaggctggagtacagtggtgccatctcggctcactgcaacctccacctctcaggttcaagtgatt

SEQ ID NO: 304691 - DNA, 201 bp, Homo sapiens
tgtgttagactgttctaattctctgatcccaagaaaacttggaggtaactctttcaagagaaaacaataaggttctgactgttgagctaaaaactaaagaygctgcttgctgttgggttctttgactcaggggagagtcccaggagaaagtcaccatgctgatatggtctgtcccacaggtggctccagtgattaaagcca

SEQ ID NO: 304692 - DNA, 201 bp, Homo sapiens
taggaacattctccatttctgaatggaccaggtagttcagtactcagactgcaggtatacaagggaagagagaaggccctgcccttcaacgggtagaaatrccctacaatataacatagagaaatgccctataatataaccacaggatccagccatctgaaattttcataagcttccccctacattatttctcctaggcta

SEQ ID NO: 304693 - DNA, 201 bp, Homo sapiens
aatcagaaataaactctttcatctgtcccgcagaatttcatgaaggagtaaccttccattctaggctttgtctaatggccaagcattagacaaagcattaraaagcagttcctttctcaaaactgcctgctgagaataagcacatagctgcccgactatccggagcctcaggcccaaaggttccacttcagagacagagat

SEQ ID NO: 304694 - DNA, 201 bp, Homo sapiens
gggagagcattgaagagaaaatagcgctgaaaaagcctttggaaacagccttgtgttgagaaagtgccagacggggctaagacagagacggcaggatgacsgtcagtctccagggaaatcgcttcctccgcactcttagcctgcttaatgagctgtgtccttctcttacctaggggactaccgggtttgaagcgcatgttg

SEQ ID NO: 304695 - DNA, 201 bp, Homo sapiens
aggggaactaagcaggcattctggggggtctctggtgatgctttttatctgcaggaagagagtagctcagccctcctgttattaatgacttccatgattaytcctatgaatagcagaggcacattttcctcttgagtagtcaaactaattgcctggggaatggaggctctggaagaaaaggagttccgtgtagaaagcagt

SEQ ID NO: 304696 - DNA, 201 bp, Homo sapiens; identical to SEQ ID NO: 63744

SEQ ID NO: 304697 - DNA, 201 bp, Homo sapiens
gcccaagctcttcttggggaggcatcaggaacccatcagcctccttgagccgattacctgggggagcagtctccaaagaagtgaatttctgaacccatttsatatctccagggcagcttgttcttaaacctgcttcagatgtcacaagtcactgggctatgttgggcccccttagctgagatgatgtgatcttgtatgaaa

SEQ ID NO: 304698 - DNA, 201 bp, Homo sapiens
tttatgtagattctgtgtttccctctgaatttagctgtaggtgatccctccttttttcagcaaggaaaactcactaactaacagtgtgcaggacttgcttrgacttaattgtagctttccaggagcctacatttatgtttaaatgtaagcaggctggataggtcaaagattttatttttaattttgaccagattcttaact

SEQ ID NO: 304699 - DNA, 201 bp, Homo sapiens
aggaagggccttccaaagcggccgccttcccttcccattcactggctgcctcctttgtgaactaatgactgtaattattacctcccagagctcttttgttrtctccaaccccaagccccggagagggggaatgggctctttagtgaaatgaaagtcattacaaagcaaattaccgtctagggagggacagccttcaggaaa

SEQ ID NO: 304700 - DNA, 201 bp, Homo sapiens
taaatgataaagtacttgaactagatatggatggaaatactggaagaaccacactaataatatttcacaaaaccaaagagtttccaaaatattttaatcaygacaaaaccagaatagtaggatattctcccaaagaaggggaacatttaaatataaatatatgctctggttgtgatttttatttatcagttgatttttata

SEQ ID NO: 304701 - DNA, 201 bp, Homo sapiens
acatttgaaagattggttatttaaattcacctcaaaattgcaatatgtgggttttttttttttttagattttagcatataaaaatgatagcaatgagctgycttaaaagctatgatttccaaagggagctcaaactccctaacagctaaatgataaagtacttgaactagatatggatggaaatactggaagaaccacact

SEQ ID NO: 304702 - DNA, 201 bp, Homo sapiens
ccacttattagtaagggtgtagaaatgattcctttattgaggaggaatagagtaaacgagctctaaattcccttacaaatccaagactttatgatgctctracagcatttgtttattggcatccaaggaataatgctgttccataagatggtaataagagttccccaataagagagttctcagttttaaaaaggctgggat

SEQ ID NO: 304703 - DNA, 201 bp, Homo sapiens
gaggaaacagcatgatgagacccaggagtatgagaatagaattctctgagaacaaaagttaatctggcctgatgaaatgggtaaagaaaagcgaagagacscaagacctaaggcgtagctggggctcaccccaggggctgcaggagccgtaccctgtatttggaatttgggctggaggcaaaagaaaactgtcagtgattt

SEQ ID NO: 304704 - DNA, 201 bp, Homo sapiens
aaaaaccgagaaggatatgagatggtgtttgatgggaaggtatgtatttggatttctacaatctcagaaagtttagtcaattccaaccctcatcactgatrtgatgtaaatgatgtgctgtccaggtaagtgggacgattacagaggggagcagtggatgacggggtagctattccaagctggaataaagacgaaactctc

SEQ ID NO: 304705 - DNA, 201 bp, Homo sapiens
tgctgttattactcattaagtcctttagtcttctctccaggggtagttatctgaccatgaactgcctttgcttctagttcctcaattccagtcgtaaatgyatctgacaaccagtgtcagagccagagaaagaccagaagctgagctagactattcgttggcccagatgagatccccaggccagtgagcgctctctgactg

SEQ ID NO: 304706 - DNA, 201 bp, Homo sapiens
tagctaaaccttttcttttctcccgttgtggattgaaagtatgattgaattggataaaaatgtgggttttctcatattctttcaatgcatccaaattgtgrccccgatctggaaaggctctttttaatatgctgtgttttcatgctggagccttacagtgcacacagaccacacacttctaaaactacaaagtcccgaaaa

SEQ ID NO: 304707 - DNA, 201 bp, Homo sapiens
gtgagaccagataggagggaaaaatatgatccaacatatatagatagaacatctgcaatctagtgaaaagaattttagaggcttcaagttgaagctgtgargaaaggagaccaaccctggtgtgttcctagaaagcaagaaatggtcagtgaaaatggaccgtatccttcccatagtgactaactgtggcatatcctctgt

SEQ ID NO: 304708 - DNA, 201 bp, Homo sapiens
ggtacactgtaacagaagtaggtgtgtcttgctttgaggaaacccactatatgaaaaagccaagcttgactggaaagataaattgatgagtcatttttcawtaatcttgatataaaatttgccctttttactttaaaaaagccttctctttgggtagaatccctttaattagctaaaccttttcttttctcccgttgtgga

SEQ ID NO: 304709 - DNA, 201 bp, Homo sapiens
ctgtgctgtaaagaaagcagctgccccactttctgtaatcagaaaatccaagcattttgatgtgagaccagataggagggaaaaatatgatccaacatatrtagatagaacatctgcaatctagtgaaaagaattttagaggcttcaagttgaagctgtgaagaaaggagaccaaccctggtgtgttcctagaaagcaaga

SEQ ID NO: 304710 - DNA, 201 bp, Homo sapiens
tggttgacggttttcaatgggctatggaagggtggcagagccaacagtcccagagaaactctccccagggaatccaggtatctcacggacattttcaacaytagaaacacatcttccaccatcaagttgtttcttcaatcatgtttatcttgggtgaagcaaaaagaaataacaaatggaaaatgtaaaaaaatccctgtt

SEQ ID NO: 304711 - DNA, 201 bp, Homo sapiens
tggccttgcttactctcctgattctactcacactttttggaagttccttcatgggctgcacattgactatcccctaggtttctttcttctttctttctttcttttttcttcttcttttttttttttttttttttttgagacggagtcttactctgtcgcctaggctggagtgcagtggcgcaatcagctcactgcaacctc

SEQ ID NO: 304712 - DNA, 201 bp, Homo sapiens
caccgggtccctcccacaacacttgggaattatgggagctacaagatgagatttgagtggggacacagagccaaaccacatcagtcccattgggtacagtrtgggaaagaaattggaagatgcacaagtggatgtggaggcactcactgctccaggtaagagacaggacattgacttagcaagacttaacagcaggagagt

SEQ ID NO: 304713 - DNA, 201 bp, Homo sapiens
attcttctggaacgcatcccctgaaatggatatttttattcattttaatagtactttatttatcttattttgttgacattgagtactatttgccaagcacyatggtaagcgcttcatttctgggtctcatttatcctcctgcagccctataaggtagatgctattatgggtatcttcaagttgccaacgaggacgctgaag

SEQ ID NO: 304714 - DNA, 201 bp, Homo sapiens
atcccagcactttgggaggctgagggtggtggatcacctgaggtcaggagatcgagcccattctggctaacacggtgaaaccacgtctctactaaaaaatmcaaaaaaaaaaaaaaaaaaaaaaaattagccaggcgtggtggcgggcgcctgtagtctcagctactcgggaggctgaggcaggagaatggcgtgaacccg

SEQ ID NO: 304715 - DNA, 201 bp, Homo sapiens
gattttgaatcagcactgaatgccagtatggataacctattgtcctttccatccaggagcatacaatcttttgggggagataagacagaagaaacacatagacatacaaagaacagaattagaaaacatgctgagctcagcgagagagagaacattttggattgggaaagaagaggtgcctgcacctaaaaccaattatgt

SEQ ID NO: 304716 - DNA, 201 bp, Homo sapiens
atcccaagaacttgaacagctcctgagaatgaagaatgaacagcccttgatcttgaagatctgttttccaggctccaaaatctaaactgggctctatctayatctgccttcctgggccaaacatttataagcatcagtgagagaagattgcctggatttgtttactttgtggtcctgaattttcagacaagcgcaaattcc

SEQ ID NO: 304717 - DNA, 201 bp, Homo sapiens
acaccaaatacaatctatataaaaattggtatgcttggtgtgtaaatacaactcgacaagccacccctaaacccctcctatggacattctggaactgcccraacataggcttttattctcatcacaaccacacctggaaactgctggaaggtgaaatgtcactgtgttgagtcaggacgtttcaatactttcccccaccat

SEQ ID NO: 304718 - DNA, 201 bp, Homo sapiens
atcccgcccgctcctctgctattctcggctaggactggcgcttcccgctggctcggagcccgacactgtggggcaagggtggcgagagcacccatccccctggggcgtcaggttggcagatctcagcaggcgggtgccaatcttttctccccgccccctagtttgccttggttccgaactcctgccctttgcgcggcctgc

SEQ ID NO: 304719 - DNA, 201 bp, Homo sapiens
ttagataatgattagcaattagttggagcacatagtccttcagtacctgcaaattttaaaatctggtgtatttcttttctggaagagattctgattcttgstagataaaatgtagtattgcaactaagtgtgttagacattcattttcagtgtattttcaaaatatgctgagcaggtatgtttgcagaagcaaaattaaag

SEQ ID NO: 304720 - DNA, 201 bp, Homo sapiens
gaggaaatctaaaggaaggataattattaccacagattttgacaaaagtcagtgctcctttctcattttctttaatacccactgtgcccataagctgattyttggagggcttttcagcccactgagctaaatggagatcattttattttttttccctttaccatactttatctggtgcatttatgggttataagtttctct

SEQ ID NO: 304721 - DNA, 201 bp, Homo sapiens
  misc_feature (1)...(201): n = A,T,C or G
aagctgcagatttttattaaataaaatcttttcttgtccaacagattattactattatttttttgtccatctgcctgttgtcttggtgttgtttctgagcngtgactctggatgtattgatgttaaagagtgtgttctggatttcttctcctagatcggtcgcttggttatcggacagaatggaatcctctccacccctgc

SEQ ID NO: 304722 - DNA, 201 bp, Homo sapiens
gtttggaccactctgaaagagtatactttgaggtgccttccaaagtgaatttgatgtacaccacgtagcctataaggaatttttacgattttataggttcmatcagctgttgtaacagacactcaaaacaacagtggattaaacaagatgtttttctgtcttgtggaatattgtgggtcagcaggccaagactagcatgat

SEQ ID NO: 304723 - DNA, 201 bp, Homo sapiens
tctgcctgttgtcttggtgttgtttctgagcggtgactctggatgtattgatgttaaagagtgtgttctggatttcttctcctagatcggtcgcttggttrtcggacagaatggaatcctctccacccctgctgtatcctgcatcattagaaaaatcaaagccattggtgggatcattctgacagccagtcacaacccagg

SEQ ID NO: 304724 - DNA, 201 bp, Homo sapiens
cctgcatcattagaaaaatcaaagccattggtgggatcattctgacagccagtcacaacccagggggccccaatggagattttggaatcaaattcaatatytctaatggaggtgagtttgctgtcattttgaggacaggtaagtttacattcagtaggacaaatcaatacctggagccttgggagaccagggttttggttc

SEQ ID NO: 304725 - DNA, 201 bp, Homo sapiens
aaggcaggatataaccaatatattaggggagctacaacaaaaattgttcggagattgacatatgagagccaagaggtaactgaagggaaccaggtgctccytgggaggtggttggtagtggagtggttgacggttttcaatgggctatggaagggtggcagagccaacagtcccagagaaactctccccagggaatccagg

SEQ ID NO: 304726 - DNA, 201 bp, Homo sapiens
tcgcgctcgctcttctggcctggaggcccgacggaggtcgccgggctggggaaagtggccacgggacccggcagacctgctcgcctgactcccggggcgcsgggaggtgcgggcgcggagcctcccaaggtcacgcccgactctccgtctctagccgctgccttccctctccccgtcccccgcccctcccgaggcgtctga

SEQ ID NO: 304727 - DNA, 201 bp, Homo sapiens
ggtctgaaaagatgaagagaggaaggaaaaacaccacgtgcctcctgcatacccagcatggtgctagatactctaacaattccaagaagaataagaccagygggaagtgcagtagggcaggcacataaagaattcaacataggataatgtgagagcatgattatagagcaattgtgtacagttctattcagaaatcagaaa

SEQ ID NO: 304728 - DNA, 201 bp, Homo sapiens
aggggagctacaacaaaaattgttcggagattgacatatgagagccaagaggtaactgaagggaaccaggtgctccttgggaggtggttggtagtggagtrgttgacggttttcaatgggctatggaagggtggcagagccaacagtcccagagaaactctccccagggaatccaggtatctcacggacattttcaacact

SEQ ID NO: 304729 - DNA, 201 bp, Homo sapiens
taaaaagcagcctactgacagcatccaccctggtggttaccatttcctggggaaggcaggatataaccaatatattaggggagctacaacaaaaattgttyggagattgacatatgagagccaagaggtaactgaagggaaccaggtgctccttgggaggtggttggtagtggagtggttgacggttttcaatgggctatg

SEQ ID NO: 304730 - DNA, 201 bp, Homo sapiens
gtgttaatgttatgtctcgaggtatttcctgcacatgggccaggcccatttgtcatttgaaggggctcccttgccagtggcctactttctgcttgtgagcytgttattcctgctggtcttgtgcagagcagccccggaacacagcggcattcttgacagagggcagttggcagctaccagtgcctgtctactttcggatgc

SEQ ID NO: 304731 - DNA, 201 bp, Homo sapiens
gtgtccattgtacatgcagaaaggagccccagaatctaagaaagagggagaactgtgggaacttagatgtcaactcctctcttttctgtcagcagattatrgcagagtgacagcatgtaagtggcattatacttatacgtttctctcgtatgttctaatttctaaaggagagaaaaatagatgaggcattcccagacttag

SEQ ID NO: 304732 - DNA, 201 bp, Homo sapiens
aataacctaagaaaataccaagccctgttttcaattaaaaggaatatttaaagtttactccctgccatgtttgactattagatgtttggagaacaatgagrtacccattttggtggggaggcgtgagttttaaggaaggaagtcgtgggaaaggaaggcaggcaggggaggccatttgaggatggactcttagtgcctggc

SEQ ID NO: 304733 - DNA, 201 bp, Homo sapiens
ccaagtgaagttgtttgtgcagtggaagaccaagaggacaggactgcagacacagcaggtcagctgagcctcccagccagtcaactggggcccggccattstttgggcagactgtcttaacaactgactttgggccaacccctgtttggggagtacaactcatagtctaggatacggcgtgatcacagggagtggtagaag

SEQ ID NO: 304734 - DNA, 201 bp, Homo sapiens
ctgaagaatgtggaagaagtggtaggaatgtgtaattcaggcacaccctacagactttctcagatttgccctctgaaggtttgctaaataatacatttaartgataattgactaaatatggtagctgcctatttgttagagctgttggcagcccaagcaatattttcaagtcttttcaaggtaagcttagaggtgagagcc

SEQ ID NO: 304735 - DNA, 201 bp, Homo sapiens
tcattgctaagtggaaggcctgacagttcctggggccagcctcctggggactggagtggtctggagaaggctttctgaggagctcaccttcctttccaagygaagttgtttgtgcagtggaagaccaagaggacaggactgcagacacagcaggtcagctgagcctcccagccagtcaactggggcccggccattctttgg

SEQ ID NO: 304736 - DNA, 201 bp, Homo sapiens
acatcactaatcatcagggaaatgaaaatcaaaaccacaatgagctgtcacctcacacctgttaggatggctgttctcaaaaagacaaaagataacaagtrttgggaaggatgtggagaaaagggaaccatcagacactattggtgggaatataaattggtatagctattttggaataaccaaaatatggaggttcctcaa

SEQ ID NO: 304737 - DNA, 201 bp, Homo sapiens
tcctttaagagacatcattaaggtttgtttaaccaaaccttaatggttaaagaacagtgtcttggagttgctggatccatgagtaggtccaatttgaaggstttgatccttttttgccaaattgatgtccagaaggattgtgccagcgtccactcccaccagctctttggtggaatcccgtttcccttttattctcctggc

SEQ ID NO: 304738 - DNA, 201 bp, Homo sapiens
cctgggaagcaattataagctttcagcctcaaccatgcagactaactggctctacttccttcactattgcagtttctagttctgttcgtaattgttgcacragactttgtgctattgcaactacttggaatgccagttccaggcagagtgccctctgttgtagacaccttgtgctttgggaagttgtctgtgattagggga

SEQ ID NO: 304739 - DNA, 201 bp, Homo sapiens
attggaacattctgaatttgggatttttggatttgggatgcacaaccattgtaatgcaaacattccaaaatccggaacaatctaaaatctgaaacatttctggtaccaaacatttcggataagggatactcaatctgtaatacaaggggattgcataaaggcatgattatcaggaggcaaggaacatggggatcatgttag

SEQ ID NO: 304740 - DNA, 201 bp, Homo sapiens
accattagatctcatgagacccattcactatcatgagaacagcacagaaaagacccacccccatgattcaatcatctcccaccgggtccctcccacaacayttgggaattatgggagctacaagatgagatttgagtggggacacagagccaaaccacatcagtcccattgggtacagtatgggaaagaaattggaagatg

SEQ ID NO: 304741 - DNA, 201 bp, Homo sapiens
accaaaaatagaaagagaaagtgttggagtaaattgattggttgattcattcacacagtctttcataattagttatttaccgtattccttgtgctatgctrgtcaccagacttaattacaaggataaataagagatgcccgtaagaagcacacagttagtggggagaaaggctcacaaacagatggttgagactcgaggag

SEQ ID NO: 304742 - DNA, 201 bp, Homo sapiens
aaaacaaattaagagcccaaaataagctataaaaagtagtcgtcttttggctgactggttttcaacataatagatgtgttttgtgaattgtgttaatgttrtgtctcgaggtatttcctgcacatgggccaggcccatttgtcatttgaaggggctcccttgccagtggcctactttctgcttgtgagcctgttattcctg

SEQ ID NO: 304743 - DNA, 201 bp, Homo sapiens
ggtgtggctcggccaagggtctggatgtggaggcaccgagtccagaataccagcgccaaaagggattctccagtggcttgtgttcccagcccctgttcccrattctcaggtctgatgaatctgcaagccctacctacgtgagaagattcatctaacctattttctgcttgatactatttcgaattcttttctgattcttcc

SEQ ID NO: 304744 - DNA, 201 bp, Homo sapiens
taaactttttaaggaaagtccaactttttatatccctaaagccttgctctcactgaagccttgattgaggccaagagagaatgccttgctgctgcccccaygagccactgcccatctaaggaattcccacagatgcccacatttacccacatgctttaaaagctcttgtttattgagtctttgctgttcacctggctgcat

SEQ ID NO: 304745 - DNA, 201 bp, Homo sapiens
cctttgggagtcacttgggatctatttcctcttaattttcttcaagtttaaacaaatttgatcatccaaaggagccatacatagcccaatgatgagaaacrtgagctttggctttaaaactggtgttgaagcctgcctttccaatttattgtgagtcctggagcaactcgtgtaacttctttaatcctcagtttccttatc

SEQ ID NO: 304746 - DNA, 201 bp, Homo sapiens
attacatctgcaaagaccctatttccaaataaggtcacatccccaggttcctgggttaagacttcaatgtatctttttttttttttttttttggagggggygggagtagtgcaccattcaaccatgacatctatactctgtccaccaaatgcaggtgggttttgtacagacaccaaagcacatatactttgcacttgggca

SEQ ID NO: 304747 - DNA, 201 bp, Homo sapiens
ttcatgtttgcagtggtacttgggaagagcaaatgtgggaatggatcaaaagtaccatgggatgtagaaagcactctgtagctcagtaacaatcatcggtwttgatttcacactatctgcaggttcctgtagtctaaaaagcagcctactgacagcatccaccctggtggttaccatttcctggggaaggcaggatataac

SEQ ID NO: 304748 - DNA, 201 bp, Homo sapiens
cctgtctttaaaggttctagtgctaatgtatcatacaggagtgataacttaaagaaatacagcattaacactttgcaaatttcttttaatttttagtttcwtatgaaaagtccttcatgtttgcacattttgcattgattcattcctcaaatatttattgaactttgattttatcctggatactgagttagactctgggac

SEQ ID NO: 304749 - DNA, 201 bp, Homo sapiens
tttttaagcacttagcagtttcctagggctgctatctgctgtaacaaactgtgtggcttaaaacaatggatatttattctcttgcacttctggcagcttaraagtctgaaatcgaggtgacagcaggaccatgctccctctgaaggctctaggggagactctttccttgcctcttcctagcttctggtggtggctagcaat

SEQ ID NO: 304750 - DNA, 201 bp, Homo sapiens
ttcttcatgtttgcagtggtacttgggaagagcaaatgtgggaatggatcaaaagtaccatgggatgtagaaagcactctgtagctcagtaacaatcatcrgttttgatttcacactatctgcaggttcctgtagtctaaaaagcagcctactgacagcatccaccctggtggttaccatttcctggggaaggcaggatat

SEQ ID NO: 304751 - DNA, 201 bp, Homo sapiens
cgatgggaaaccaggttgatgatgaacttggtatcacttagagatatgtaagttatgatctggtcaggtctagaggctagcaatattttttccctgtcctrtctttaaaggttctagtgctaatgtatcatacaggagtgataacttaaagaaatacagcattaacactttgcaaatttcttttaatttttagtttcatat

SEQ ID NO: 304752 - DNA, 201 bp, Homo sapiens
tccattaatgcttgttattattgctgctggatggaggcaagaatgaatgaatgggcaggatcatgataactctggacctcagcttcttcatgtttgcagtkgtacttgggaagagcaaatgtgggaatggatcaaaagtaccatgggatgtagaaagcactctgtagctcagtaacaatcatcggttttgatttcacacta

SEQ ID NO: 304753 - DNA, 201 bp, Homo sapiens
aattacttatggttatttgattaatgtctgttggctgtatatgccatgaggacagagatcttatgtgtcttatcctgcattgtgtccctcgagcctcccgyagagcccagcatagaacaggtgctcagtaaacgcttgttgaatgagttcatgaacactattcacttggcaccttccatttagacagattcctgctattgg

SEQ ID NO: 304754 - DNA, 201 bp, Homo sapiens
tcagttcatagtagtgggttggaagtgaagactttgagattttgcttcaaatttcagtttcataattaattgtacaatatcatgtatactgcttaacttayctaaaactgttttctcaccagtaaagtgggattaattccaatatatgctatatcagagaattttatgaggatagaatgaaataatgtacatacaaaggtt

SEQ ID NO: 304755 - DNA, 201 bp, Homo sapiens
tgtgtggccttgtcgtgtcatctacgccagtgtctgccatagtacctttccattaatgcttgttattattgctgctggatggaggcaagaatgaatgaatkggcaggatcatgataactctggacctcagcttcttcatgtttgcagtggtacttgggaagagcaaatgtgggaatggatcaaaagtaccatgggatgtag

SEQ ID NO: 304756 - DNA, 201 bp, Homo sapiens
gcaacttccatgctagtcactggttaaccaagaactctttcaaaaagtgttagaggctgcaagtgagaaagcacccaggagaggcgggcaggagggtactkgcaatagatgggagttatgtgtcatggtcactttgaagaaaatgtttaatttaaatgataaaacacattttatctcccactgctacaaaattaattggga

SEQ ID NO: 304757 - DNA, 201 bp, Homo sapiens
aatactttcccccaccatggccgctaatgtgctgtgtggccttgtcgtgtcatctacgccagtgtctgccatagtacctttccattaatgcttgttattaytgctgctggatggaggcaagaatgaatgaatgggcaggatcatgataactctggacctcagcttcttcatgtttgcagtggtacttgggaagagcaaatg

SEQ ID NO: 304758 - DNA, 201 bp, Homo sapiens
tagagataataactcctgtaagactatagtatgaggcggctctgctaaacctctgcatcgtgaaaaaccgtgttggctggattaagcaaatgagaaggaayattgtaccagaacgcattgatcttgataatctaacaattcgtgcagcccactggtttccaggaaggtgggcatcaggacattgatgtttttgctctgcaa

SEQ ID NO: 304759 - DNA, 201 bp, Homo sapiens
caagttgcccaggctgatctcgaactcatgggctcaagcgatctgcctgcctcggccttgcctcccaaagtgctgggattacaagtgtgagccatcgtgcygggcagagtatttttatttttaagtgaataaaacaaaatacaaaccattacaaaggaagcaaaattatattgaagtataatcaaaatattaaaaaaccag

SEQ ID NO: 304760 - DNA, 201 bp, Homo sapiens
cctacatttataataaaaggaggtgctaaatttcagttagatgttagtgaaaataaagattgttttgtttattttgtcattcatattcatggatcccattraattctacccaaggacctcttgaggtaggggaaggggatgtaagcatcccaagttaagaaccccacactaaacaatgatccttttttagcatcaggtgat

SEQ ID NO: 304761 - DNA, 201 bp, Homo sapiens
atcatgaggataatcacaagctctttctctctctctctcttcaaaaaaagaaaatttttgtgtaatatttctgagataaacatttaaacagccaggctgcrtagccatagatcgctgttgtgaacgagtgcagctgggcttatttaactgaactcctgatcttcttatttatagaggagttaatttttagcaaccacgccc

SEQ ID NO: 304762 - DNA, 201 bp, Homo sapiens
acccttaaagtttttacctagaactatttgccaagggaagtctctcatgttatgtttgtggaattgatttctttgaaccaaagtattagactttagactaytgttaaagtttgttctcatttattaacacattcaacaaatacctagtaccaatcatggttttagcttctccttggtatatttcatgtccaaagagagaat

SEQ ID NO: 304763 - DNA, 201 bp, Homo sapiens
gggaataactgttaaggatccctcattctgacccgaggtcagaactaaattattagaagcccctcttgaacaggaataggagtcattgaaatgaaacccayacatttaatttcagacatccatacttgctaacaatggcacgatgattaggttctgattatgatagaatgactggtatttcctgagctgggtgagttctag

SEQ ID NO: 304764 - DNA, 201 bp, Homo sapiens
atgggaaagaaattggaagatgcacaagtggatgtggaggcactcactgctccaggtaagagacaggacattgacttagcaagacttaacagcaggagagwggagagaaaagggggccatggagagagatttagcggggaaaagtcattgaggcctgctcatggactgggcatggggaaaatgcagaggaagatgtcagga

SEQ ID NO: 304765 - DNA, 201 bp, Homo sapiens
atctcccaccgggtccctcccacaacacttgggaattatgggagctacaagatgagatttgagtggggacacagagccaaaccacatcagtcccattgggwacagtatgggaaagaaattggaagatgcacaagtggatgtggaggcactcactgctccaggtaagagacaggacattgacttagcaagacttaacagcag

SEQ ID NO: 304766 - DNA, 201 bp, Homo sapiens
ggaacacttttgtatgccaggcactgtgcacagtggttgggggtacaggatgagtaagacaaagtccttgtgcttagggtgctcatgctggtggaggagayaggcactccatgggtagttacaacagggtgcgaattctattacagtcagtccttgacttaccatggaatgatgaattacagttgtccaactttacagtgg

SEQ ID NO: 304767 - DNA, 201 bp, Homo sapiens
cattgcggaacacttttgtatgccaggcactgtgcacagtggttgggggtacaggatgagtaagacaaagtccttgtgcttagggtgctcatgctggtggrggagacaggcactccatgggtagttacaacagggtgcgaattctattacagtcagtccttgacttaccatggaatgatgaattacagttgtccaacttta

SEQ ID NO: 304768 - DNA, 201 bp, Homo sapiens
taaagagaagattctgatgattctatgattattatgattattccaaatactgaggccattggaaggcagagggaggggataagaagatgggcctagggagrgtctttgtgcctcttaccaccctcactttttggctgtcctatcctgcctctgtccacacattatcccttggactttttctgtcaggcagaggttcacagt

SEQ ID NO: 304769 - DNA, 201 bp, Homo sapiens
atgaagcaaaagggaaatcagtgtagaaaactcagatggaatcagggataagactggcacctgtcatgaaagcccagcttcctctctgggctgggccacayagttcactctaaccgctttgtggtcaaatccatgagaaaatcacttaccccacagtttgccatagacagctcctccatatgtagaagtggtattcgaaag

SEQ ID NO: 304770 - DNA, 201 bp, Homo sapiens
ttgaaacccaaatgctaagccagtgcccacctcgactgtgtgaaattgtcccctgacttcagaggccagaaaatggatctgggatggtataactgggtggrgacagggaaaggccttttgatttagcaataaaactattaggttataccacctccatggggactttgaaaaatgcattctgtggaacaagatgaagtgctt

SEQ ID NO: 304771 - DNA, 201 bp, Homo sapiens
aacgtttaaacctgctttggtgaggcatttaggagctgtacaaaatgggaaggtttgttaaaatataaaccgacaaaatggccaaatacccggccctgacygaggaagagagtcctgtcagctctaaaccatagaacttgaaacccaaatgctaagccagtgcccacctcgactgtgtgaaattgtcccctgacttcagag

SEQ ID NO: 304772 - DNA, 201 bp, Homo sapiens; identical to SEQ ID NO: 63768

SEQ ID NO: 304773 - DNA, 201 bp, Homo sapiens; identical to SEQ ID NO: 63769

SEQ ID NO: 304774 - DNA, 201 bp, Homo sapiens
ctggcataactgtttaaagggagttactgtattttatactgttcaagcacattgacctgtagagaggagcttaagagacagttcttgctgaggcagagtcyggcattctgctttctgcagcctaccgcagtggcctggggatacagttctcttccattctggtaaacgtttaaacctgctttggtgaggcatttaggagct

SEQ ID NO: 304775 - DNA, 201 bp, Homo sapiens; identical to SEQ ID NO: 63771

SEQ ID NO: 304776 - DNA, 201 bp, Homo sapiens
tgtaacttgattacatctgcaaagaccctatttccaaataaggtcacatccccaggttcctgggttaagacttcaatgtatctttttttttttttttttttggagggggcgggagtagtgcaccattcaaccatgacatctatactctgtccaccaaatgcaggtgggttttgtacagacaccaaagcacatatactttgc

SEQ ID NO: 304777 - DNA, 201 bp, Homo sapiens
ttcgtgagggtaagcaatcagatttctttttttataaacatatttgaacttatatatccaaattagtatcgtaccctgccaaatcgccactctgggaaccrtgcacgcactccagtgatgcgtgtagtgctcaaagcatttgaaactcctctatgggaattatctttcagccagtcagtttatgggtcacctaggaaaacc

SEQ ID NO: 304778 - DNA, 201 bp, Homo sapiens
agtcattgaggcctgctcatggactgggcatggggaaaatgcagaggaagatgtcaggagcaactcctagttgttcactttacatgaaagactgtagtgtygatccactgaaatagaaactgctggaactaggtattgggggaaataacatgtgtttgtttttggatttgtggagtttgaggagccttggagacctggaag

SEQ ID NO: 304779 - DNA, 201 bp, Homo sapiens
acatttctccagaatagcttcttcattttcgtgagggtaagcaatcagatttctttttttataaacatatttgaacttatatatccaaattagtatcgtamcctgccaaatcgccactctgggaaccatgcacgcactccagtgatgcgtgtagtgctcaaagcatttgaaactcctctatgggaattatctttcagccag

SEQ ID NO: 304780 - DNA, 201 bp, Homo sapiens
ctccaggtaagagacaggacattgacttagcaagacttaacagcaggagagtggagagaaaagggggccatggagagagatttagcggggaaaagtcattkaggcctgctcatggactgggcatggggaaaatgcagaggaagatgtcaggagcaactcctagttgttcactttacatgaaagactgtagtgttgatccac

SEQ ID NO: 304781 - DNA, 201 bp, Homo sapiens
gccaaggcaggcagatcacctgaggtcgggagttcaagaccagcctgaccaacatggagaaaccccatctctactaaaaatacaaaattagccgggcgtgrtggcgcatgcctgtaatcccagtcactagagaggctgaggcaggagaattgcttgaacctgggagccagagattgtggtgagccaagatcgcagcattgc

SEQ ID NO: 304782 - DNA, 201 bp, Homo sapiens
aatggacctcaaacacatgacccagaggttaagggtctcatgttctcagagcaaactagtgggactttgcaaacttcgccttatagtggaggaactccackgtctcccgcttgaagtgaaccacccttttctgaactttcatgagatccatctgcaaacactgctgaaggaacatgtttctggctatagcagttcacattt

SEQ ID NO: 304783 - DNA, 201 bp, Homo sapiens
agtgactctatgaactttgaaacatttgaattctatagcttaattgagcacagagtgctttatttctgtatttttccaggcgataggagagacaatttctyaaaaacgtttccttgacctttcagagtgggccaaatcccctgattattggctcttgtggcaccatgtacctcttctttgttgtacttgttgcagctgtga

SEQ ID NO: 304784 - DNA, 201 bp, Homo sapiens
ctgcacctaaaaccaattatgtcttgaagagcggatagtgtgcgatagaagatggggctacccttcaggaaggggacctgccgagagaagtgagaaagagrgaataggcaggactcttttttagagccggacacttagtcactaaacaatctttgttacataaaatacttaaatcagcttgcttgggactttttctttctt

SEQ ID NO: 304785 - DNA, 201 bp, Homo sapiens
tgctcatgaaattttgtagaagaaaaagaaaaacgttctccctttctgagatagagggtttgttttgtttttgtaaacaagataacagggaagagtgctcyactgttttggaaagagtgactcattcaataaatatttattgagcacctattaggttctcggtactacggatacaacagtgaattgaacaaagtttctgct

SEQ ID NO: 304786 - DNA, 201 bp, Homo sapiens
tagaagcttttctagggcaaggattatgttcttttggtatagttttgcatattgacaaacaccatgcctggcatgtgtcgttgcttaaaatgttgctctcrtaattctgccctcagaaagaacttcaccgagagactgggaggctgccagcagagactatgctggagtgtggtgtattatgtgggcagagaggctttggta

SEQ ID NO: 304787 - DNA, 201 bp, Homo sapiens
aaatagggttatcaggctcatcccttatgcccactcctgggacattagctaagaaagaattcttggtgtgaagaggtgaacccattcaggccagccctcayatggggcctgggacaccattattaactgtccattaaatattttttaaagaaacatagaaaagaaagagtgaataaaggattggtaagtctacggtttctg

SEQ ID NO: 304788 - DNA, 201 bp, Homo sapiens
aaaacatcattcttctcttctttatagattgattatagatgcagtctgtatccaaaatgtggatttaaatagcttaaacagcagccctgaacattttactrcggatgcttcttctaaaatattaaactccatgatctgaattaattctttcttcttccgccttctctgaatccacatataatagcccattgtgcacaaggt

SEQ ID NO: 304789 - DNA, 201 bp, Homo sapiens
aaagggtcccaatatactatgacattttgcatatagattataagtattattctattataaatttatcttgggataataagatgtgtaatcaacattgatcraatatttaacaataatttttttctctcttggactctagggtagggaaaacttttcatctaccctcctaggttatatactgggggcttgcaaattaaatgt

SEQ ID NO: 304790 - DNA, 201 bp, Homo sapiens
cggacacttagtcactaaacaatctttgttacataaaatacttaaatcagcttgcttgggactttttctttcttggcttcactaatgctcttggtgaaacmtctttttcctttttcttttttaatcaaatctaatgctcatgaaattttgtagaagaaaaagaaaaacgttctccctttctgagatagagggtttgttttg

SEQ ID NO: 304791 - DNA, 201 bp, Homo sapiens
ggccctgtcccatgtatcagtctccggccaggttataaggtagttaagtgactgcatctcttctccttttattccctctacccaatatttttaagtaaatrtgctgatcttggtcctatagtactctactgtcaccctttagtgaagaaaagaagatcaaaatcaagcattctctcagctttgcaattgagttgcaattca

SEQ ID NO: 304792 - DNA, 201 bp, Homo sapiens
ctgaacccttttagtgatgcaattcggggattcctgtgacactgcaaaccacagaaagtcttctgctggtgaactaaaaccttccatccttgaaacttctycccttgggtcctagctggcctctggactcccatagaatggatctacttccttactcagacaaaagcgattctgtcattttaaaccattcaacagatgtgt

SEQ ID NO: 304793 - DNA, 201 bp, Homo sapiens
atgtgtaatcaacattgatcaaatatttaacaataatttttttctctcttggactctagggtagggaaaacttttcatctaccctcctaggttatatactrggggcttgcaaattaaatgtaaaagacaaatgagcaacaaaaagacatttgtgggagtttacagaaaaatgtgacaggaggcagttagacttgggggcct

SEQ ID NO: 304794 - DNA, 201 bp, Homo sapiens
ttttttaaagctatttatccagttatccaaacgccatttaaaaagtaatctactcttttcccacagccttgcagtgagacctttgtcatactcaagcctcwtgtgtgcttggatctctttccagatgcactcttgttctattaagctaccagactatttgaattattgaaattttgtaatggtcatgttcttctgctgttt

SEQ ID NO: 304795 - DNA, 201 bp, Homo sapiens
tttctgggagggttttggagtcagaaaagggacacagaattatgatttagaaagataaactagatgggtttgagtaggtcagatggatccagccagggtcragtaagagagaatcatgtgggacagaggcaggggagattgagttaggagctgttgcagtggtccaggcatctttaagggaaggagggtaatagagcagtg

SEQ ID NO: 304796 - DNA, 201 bp, Homo sapiens
ctgagagtttgtaaaaggaccccaaacagaagaattttgggaaataccaatctataccatgctgggttgataggaccatctatattatacaagaatcttckcagatttaagtttcttctttttaaactgccattaagggcatgcagggaaggtgaaattttgttttaatatccatgtataccatatggcttattttggcaa

SEQ ID NO: 304797 - DNA, 201 bp, Homo sapiens; identical to SEQ ID NO: 63774

SEQ ID NO: 304798 - DNA, 201 bp, Homo sapiens; identical to SEQ ID NO: 63780

SEQ ID NO: 304799 - DNA, 201 bp, Homo sapiens
actttacatgaaagactgtagtgttgatccactgaaatagaaactgctggaactaggtattgggggaaataacatgtgtttgtttttggatttgtggagtktgaggagccttggagacctggaagtaggcagtcagacgtacgggtttggagctaagcatctgtgtttagaggaagtgatggaaaagcttctctctatgtc

SEQ ID NO: 304800 - DNA, 201 bp, Homo sapiens
catggctcactggagcctcgaattctcaggctcaagtgatcctcccacctgagcctcagcctgggactacaggcatgcaccactacacctggctaattttytgtatttttgtaaagatgaggttttgccatgttgcccaagctggtctccagcttctgagctcaagcaatccacccaccttggcttctcaaagtgtcagaa

SEQ ID NO: 304801 - DNA, 201 bp, Homo sapiens
ttggagaacaacatgtaacacaacaggtatgtctttaaatagcagaagtgcactcaagatacccatactttgagaagcacgtggggactaagactgagcargggcctgtggtcactgggtgaaatggtggcagaattgcccatgctgtttaaatttcactcttgtcttctttgtctccctggaagttctatatacaacagt

SEQ ID NO: 304802 - DNA, 201 bp, Homo sapiens
gacatagccagttattctgctgactttgaagctgtgctcacagttgggatccacctttgaaaaatggctcctgagtgtgttaagtaagtaatggctagccragggcttcagttgggaggactgcggagaagacttttctcccctggggtcctcaaaggggaaagaaatcacaagggggcagcatagggagttgtttggaaa

SEQ ID NO: 304803 - DNA, 201 bp, Homo sapiens
ttttaaatgactggctcaaaataatttttatgtcacagtggtgtagtctggacccctttagactttagaagagctttcagcagattgatttgagtgagctrcacttctaagaaagtgaagcaggaaagtttgaactgatccctttattctcctccaagttcccttgaggcccacacagacatagccagttattctgctgac

SEQ ID NO: 304804 - DNA, 201 bp, Homo sapiens
gaaaaataaaacccagtaaaggggacagcattagaggatgggctgctctttttagtgcagcaattgggatgtctgataaacctcatgagagcagagacctraatgaagtgaaggagtgagccatgcagatatccgtgaaaagacttccagacagaggaagagttagatggaaaggataaacacatataatcatttaatgtt

SEQ ID NO: 304805 - DNA, 201 bp, Homo sapiens
cagtagaaaatgtactactcctggctctgctattgagtcatttagtcaaatcacttcatctctttgggtatcagttttctcatctgtaaaatgggcagttmaaccagattagtagttttttttttttttttaatattgaaagcatttattaagcaacagaattctctcttttttttttttttctttaagcgagaagtagat

SEQ ID NO: 304806 - DNA, 201 bp, Homo sapiens
ccaagccctaaggggaaatgtggtagtttcagcaggtggagttgattctccttttccaggtataatggatcagtggagatttagataagaaaaagtagcaktcagcagtagaaaatgtactactcctggctctgctattgagtcatttagtcaaatcacttcatctctttgggtatcagttttctcatctgtaaaatgggc

SEQ ID NO: 304807 - DNA, 201 bp, Homo sapiens
ctaggccatcagcactttgtggggactgcccaagccctaaggggaaatgtggtagtttcagcaggtggagttgattctccttttccaggtataatggatcrgtggagatttagataagaaaaagtagcattcagcagtagaaaatgtactactcctggctctgctattgagtcatttagtcaaatcacttcatctctttgg

SEQ ID NO: 304808 - DNA, 201 bp, Homo sapiens
agttcacatttcttgaaaaggaaataaaagaacactgagcaggaaggggaaggttttgagactcttgggtagttggagttaggtggagacaccttgctacyttaactttaaaccttatatccctggggcagggatgacttggcagagaaacaccttcaagtcacttttttttttgagacactgtcttgctctgttgcccta

SEQ ID NO: 304809 - DNA, 201 bp, Homo sapiens
attataaccatttttaagtatatagtttagtaatgttgtacatattcatattgttgtccaacgtatctctaaaacttttttcccccaaaactaaaactctrtacccattgaacagcacctccctgcttctcccttttcacaatccctggtaccacctttctccttcctgtgtctgtgaatttgaccattgtaggtacctca

SEQ ID NO: 304810 - DNA, 201 bp, Homo sapiens
tttcagaataagcagcactcttagtttttttagtctaactttaagtgtaacataatgctattataaccatttttaagtatatagtttagtaatgttgtacrtattcatattgttgtccaacgtatctctaaaacttttttcccccaaaactaaaactctgtacccattgaacagcacctccctgcttctcccttttcacaa

SEQ ID NO: 304811 - DNA, 201 bp, Homo sapiens
gggtttaaggagataataaatgtaaaatgtttaaacactgtggctggcatataggattaacttttcagaataagcagcactcttagtttttttagtctaaytttaagtgtaacataatgctattataaccatttttaagtatatagtttagtaatgttgtacatattcatattgttgtccaacgtatctctaaaacttttt

SEQ ID NO: 304812 - DNA, 201 bp, Homo sapiens
aggcaaatactgcatgatttcacttgtatgtgggatctaaaaaaagtgaatctcatagaaacagagcagaaaggggcttactagggggtagtgaatggggraaatggagagatattggtccaaagggtacaaaatttcagttatgtaggatgtagcagttctagagatggaatgtacaacatgatggctataatgaataac

SEQ ID NO: 304813 - DNA, 201 bp, Homo sapiens
tggatttgtggagtttgaggagccttggagacctggaagtaggcagtcagacgtacgggtttggagctaagcatctgtgtttagaggaagtgatggaaaakcttctctctatgtcttcctcaggtcatgttggccccccttatttccattgctctgaaagtgtcccagctgcaggagaggacgggacgcactgcacccact

SEQ ID NO: 304814 - DNA, 201 bp, Homo sapiens
tgtgacaaatgctgtatgacaaatttcacttagcataatgtcctcaaggttcatccatcttgtggcatatggcaggacccccccccccccacacacacacrcacttttaaggctgaataatattccactgtatgtatacacaatattttgtttatccattcacttgatgatagacgttagcgttctttccaccctttgact

SEQ ID NO: 304815 - DNA, 201 bp, Homo sapiens
aagttggggaagtgttgtggtatattagccccttcttggtgattcacagcatacaatgcaatgcaccataaaggctccaagatttcggacatggtggcctrcacctgtggtcccagctactcaggaagctgaggcaggaagatcacttgagcgtaggagttctgggctatagtgtgctatgcctgtcgggtgtctgcacta

SEQ ID NO: 304816 - DNA, 201 bp, Homo sapiens
tctctgttgctcaagagtgaattgaaatggctactacattgtgtgagtccagagggcttaatctgcatggtgtcatagccatttgggggctaaaccgacargtgtgaggattgtaaactggcagggagctcaaaatgagctgattggtgaaacttcatggtgatctcgtaggttgcagcagagaacaatacaggcccagtc

SEQ ID NO: 304817 - DNA, 201 bp, Homo sapiens
acattgttgtgcagcatatctctagaaagttttcatcttgccaaactgaaagtctatgtccattgaacaactccccatctttccctcttctgagcccctgmcaaccaccattgtattttgtgtttctatggtgttgacttctttaaatacctcatgtaagtggaatcatacagcatttgtcttttgtgacaaatgctgtat

SEQ ID NO: 304818 - DNA, 201 bp, Homo sapiens
agaccagatggcttcccaggatcaatgggggcaagccattaactatcatctagttaatagaggaaattgcattttacagtgggatgggttctagagttcgrgtggaagatgaaacttcagtcaaaatcatccttaaagtcccataggaaagtaccacattggagaacaacatgtaacacaacaggtatgtctttaaatagc

SEQ ID NO: 304819 - DNA, 201 bp, Homo sapiens
cagtttcagaatctgaatgcctctcatgtaaaagttgctgataaagcactcaaatatgaaattattatgaagcatacacatttttaagataaaatgtgacrtgccataaattttttctttgaggagagctgcaaagggaacagtattaagatgcttttaatcttttgagagggaacgaatggaacattatttctccacata

SEQ ID NO: 304820 - DNA, 201 bp, Homo sapiens
ggctctgctaaacctctgcatcgtgaaaaaccgtgttggctggattaagcaaatgagaaggaatattgtaccagaacgcattgatcttgataatctaacarttcgtgcagcccactggtttccaggaaggtgggcatcaggacattgatgtttttgctctgcaaattcctcagtgggaccagaaatacatttttagtgttt

SEQ ID NO: 304821 - DNA, 201 bp, Homo sapiens
ggtgaaatggtggcagaattgcccatgctgtttaaatttcactcttgtcttctttgtctccctggaagttctatatacaacagttacatttgtgcaagatraatacttgtatgatgtgactacactgcacattcttgatgctactcagagtgcacatatgagaatcatctcaatcatgattcatcacctgcaacttggagc

SEQ ID NO: 304822 - DNA, 201 bp, Homo sapiens
ttttttcttttaacacctaattaaaatcctgtgaaactcatttggaaacccctggcatagtggttttgagcaaagttaaagagatcttgttttaaattctwttcctgccacttaataactgtgtgtccctgggtaagttgttacaattttatgaatcttggtttccttgtctgtcaaatggcagagtaatacctacttcat

SEQ ID NO: 304823 - DNA, 201 bp, Homo sapiens
cctgtccccactacataactatgtataactatatatatagggagggagttacataactctgtgtgtgtgtgtgtgtgtgtgtgtgtgtgtgtgtgtgtgtktaaagagaggggatatagttgtatatttacatatgtagaccagtcactagccataggagtgttcacattgtcgcattgtcctggctgggaatgcacactc

SEQ ID NO: 304824 - DNA, 201 bp, Homo sapiens; identical to SEQ ID NO: 63775

SEQ ID NO: 304825 - DNA, 201 bp, Homo sapiens; identical to SEQ ID NO: 63779

SEQ ID NO: 304826 - DNA, 201 bp, Homo sapiens; identical to SEQ ID NO: 63776

SEQ ID NO: 304827 - DNA, 201 bp, Homo sapiens
gactgagcggcactgggagtgccggggccaccattcggctgtacatcgatagctatgagaaggacgttgccaagattaaccaggacccccaggtaacgccyagccctgtgccctggttagttctttctgttcaagggaatgatagtttcccattgagcctgtgtttcaatgcccatttctcaaatgactcaacaaggtacc

SEQ ID NO: 304828 - DNA, 201 bp, Homo sapiens
cataatttgccagccttcagtctcccagcatttggggaaaaaaatctctgcttatcttttccagggcttgcgcctcattttcacagatggttctcgaatcrtcttccgactgagcggcactgggagtgccggggccaccattcggctgtacatcgatagctatgagaaggacgttgccaagattaaccaggacccccaggt

SEQ ID NO: 304829 - DNA, 201 bp, Homo sapiens
ttttagtagtttggataacatttattgagtgtctactatatggccaggcattgtgagaagcatttcacacatacctttcctcatttactttcagaaccttytaaaggaggcttcactctctgcattttatggaaactctggcttacaaggaccccatcgaaaaggatgttccctctttgtggccaccttctttcatgtcct

SEQ ID NO: 304830 - DNA, 201 bp, Homo sapiens
atctgtaaaatgggcagttcaaccagattagtagttttttttttttttttaatattgaaagcatttattaagcaacagaattctctcttttttttttttttctttaagcgagaagtagatgtggggaggggttgttgcatttttaaagattcctgtattaggccgggtgcggtggctcacgcctgtaatcccaacactttg

SEQ ID NO: 304831 - DNA, 201 bp, Homo sapiens
tcataatttgccagccttcagtctcccagcatttggggaaaaaaatctctgcttatcttttccagggcttgcgcctcattttcacagatggttctcgaatygtcttccgactgagcggcactgggagtgccggggccaccattcggctgtacatcgatagctatgagaaggacgttgccaagattaaccaggacccccagg

SEQ ID NO: 304832 - DNA, 201 bp, Homo sapiens
catctgtaaaatgggcagttcaaccagattagtagttttttttttttttttaatattgaaagcatttattaagcaacagaattctctcttttttttttttttctttaagcgagaagtagatgtggggaggggttgttgcatttttaaagattcctgtattaggccgggtgcggtggctcacgcctgtaatcccaacacttt

SEQ ID NO: 304833 - DNA, 201 bp, Homo sapiens
gtcaaatcacttcatctctttgggtatcagttttctcatctgtaaaatgggcagttcaaccagattagtagttttttttttttttttaatattgaaagcayttattaagcaacagaattctctcttttttttttttttctttaagcgagaagtagatgtggggaggggttgttgcatttttaaagattcctgtattaggcc

SEQ ID NO: 304834 - DNA, 201 bp, Homo sapiens
aggagcttacagcagagtgggaattttaggtgcccagatggaaatttgtccatttgggagtagtgtggggtgggaaggaaagaattagttaagactaaaaraaaaagttcttaaaacttcatcaccctttagccattgccctattgctcttctctcagccaacctttgtaaaagctttctgcattcactatttctcattct

SEQ ID NO: 304835 - DNA, 201 bp, Homo sapiens
tattgagtcatttagtcaaatcacttcatctctttgggtatcagttttctcatctgtaaaatgggcagttcaaccagattagtagttttttttttttttttaatattgaaagcatttattaagcaacagaattctctcttttttttttttttctttaagcgagaagtagatgtggggaggggttgttgcatttttaaagat

SEQ ID NO: 304836 - DNA, 201 bp, Homo sapiens
tcattcattcattcatttattcagtcagtcattcaacagatcctgttgaataccatgttcagagaaatgtgtggactaaaaggatgatgcagacccaagasttgtccttaaggagcttacagcagagtgggaattttaggtgcccagatggaaatttgtccatttgggagtagtgtggggtgggaaggaaagaattagtta

SEQ ID NO: 304837 - DNA, 201 bp, Homo sapiens
aatattattcacaatagtcaagatatggaaccagcctaagtgcccatctacagatgaatgaagacattgtggtgtgtgtgtgtgtgtgtgtgtgtgtgtgtgtgtgtataccacaatggaaaattattctgccttaaaacaacaaaaaccaaaatcttgccaatcttgccatttgcaataacatggatgaacctggaggac

SEQ ID NO: 304838 - DNA, 201 bp, Homo sapiens
caatattattcacaatagtcaagatatggaaccagcctaagtgcccatctacagatgaatgaagacattgtggtgtgtgtgtgtgtgtgtgtgtgtgtgtgtgtgtgtataccacaatggaaaattattctgccttaaaacaacaaaaaccaaaatcttgccaatcttgccatttgcaataacatggatgaacctggagga

SEQ ID NO: 304839 - DNA, 201 bp, Homo sapiens
tgtttacatagcatttgctgaaggacatttctccaaagaaaacatacaaatggccaacaggcgtatgaaaaggtggtccacatcactaatcatcagggaartgaaaatcaaaaccacaatgagctgtcacctcacacctgttaggatggctgttctcaaaaagacaaaagataacaagtgttgggaaggatgtggagaaaa

SEQ ID NO: 304840 - DNA, 201 bp, Homo sapiens
tcaatattattcacaatagtcaagatatggaaccagcctaagtgcccatctacagatgaatgaagacattgtggtgtgtgtgtgtgtgtgtgtgtgtgtgtgtgtgtgtataccacaatggaaaattattctgccttaaaacaacaaaaaccaaaatcttgccaatcttgccatttgcaataacatggatgaacctggagg

SEQ ID NO: 304841 - DNA, 201 bp, Homo sapiens
gagtcctcaggcaacttctgtcccagccttcttccctcaggttgggaaatatctaccccagagttcccacacatttttccccaagtgagaagataattgaygtccagagataccgctggggaggaaaaagagagggcagcagagagaaggatgggcttggcacttcacacggacctcgctttgggtccatcagggattggc

SEQ ID NO: 304842 - DNA, 201 bp, Homo sapiens
ccagctcatcgctcgcatcgctgccgccaacggggtaagggatgcgcggccccgcgccgctgtgcaccctggcgcgtgtgcgacgtgcggcccgcggcgcyctccctcgctcggggccggccgcttccgcgcgctgccgcctcggtttccacctcccgctcctccctctccttcgcgctcgctcttctggcctggaggccc

SEQ ID NO: 304843 - DNA, 201 bp, Homo sapiens
gatgtggacagaattgttagtgcttcccttactgtgtgccgggtaccctaggctgcaggctgggtcaggctttctcctggcttctcatgaacacttacgcmccagggttctctcacctctgcttctgttgcctgttgtcacagagtaaactcatctctcacaattcataatagaataaagagcaggatgaagattctgtta

SEQ ID NO: 304844 - DNA, 201 bp, Homo sapiens
ttataagcattttaaatgtgtccattgggtggacatgatcataacattggatttggattcagagaaatggattagaattttatttcttccccttactagaytggggagccatttagcttttctctgtactcagttttgtcatctgtagaaatgggaataacagtccagctgttgagaggattaaatgaataatgagtctga

SEQ ID NO: 304845 - DNA, 201 bp, Homo sapiens
ccacagcccagctggggtacaaggtaaggtggggaagtgggcagagagaattcttgcgcatccacagcctctcctgtcttaagtgctaataaaaccctagktcatccagcctctctcaattggagactttaaaaataatctggtcagggatgaaatgaagtcaatttttatgtcagccataaagagtgaggctttaaaagt

SEQ ID NO: 304846 - DNA, 201 bp, Homo sapiens
gccgggtaccctaggctgcaggctgggtcaggctttctcctggcttctcatgaacacttacgcaccagggttctctcacctctgcttctgttgcctgttgkcacagagtaaactcatctctcacaattcataatagaataaagagcaggatgaagattctgttacaacctcccagtttacttttttccaattgacccagat

SEQ ID NO: 304847 - DNA, 201 bp, Homo sapiens
  misc_feature (1)...(201): n = A,T,C or G
tcagcaaatgacaaagtttacactgtggagaaggccgataactttgaatacagcgacccagtggatggaagcatttcaagaaatcaggtagaaacagaccngtgtgtaagtgagagagagacctcagagcttcatctctgacatctcaagggaaaaattaaaaagttcctgttggctatttttcttttgctgctgtgtttt

SEQ ID NO: 304848 - DNA, 201 bp, Homo sapiens
ccgtgagaaagatggactgtgggctgtccttgcctggctctccatcctagccacccgcaagcagagtgtggaggacattctcaaagatcattggcaaaagyatggccggaatttcttcaccaggtgagccacagcccagctggggtacaaggtaaggtggggaagtgggcagagagaattcttgcgcatccacagcctctc

SEQ ID NO: 304849 - DNA, 201 bp, Homo sapiens
gtacaggaaccatggctgggaggcctcaggaaatgtacaatcatggcagaacaatgaagaggcagccggcaccttcttcacatggctgcaggagagagagwgtgaagggggaagtgctatatacttttaaacaaccagatctcatgagaactcacttactatcaccagaacagcaagggggaactttgtcccccatgatcc

SEQ ID NO: 304850 - DNA, 201 bp, Homo sapiens
aagaactacctgagactgggtaatttatgaagaaaagaggtttaattgactcacagttctgcaggctgtacaggaaccatggctgggaggcctcaggaaaygtacaatcatggcagaacaatgaagaggcagccggcaccttcttcacatggctgcaggagagagagagtgaagggggaagtgctatatacttttaaacaa

SEQ ID NO: 304851 - DNA, 201 bp, Homo sapiens
cactgccagccagtcaactttccaaaaacatattggtttatattctttttgcttacaaatttccatagttccccagcactttcaaaataaagtttagcacrgttcacaaggctccatagacttgccccaactatttctccagtctcatccctgtcactgcaacctcttcagagccgcagctctgtaaacacaccttcagga

SEQ ID NO: 304852 - DNA, 201 bp, Homo sapiens
caagggctaacctaatctggctagtacacttttgagtcccaattctagattccaaggagagaaaacatgagtggtccagctttagtcaggggtctaccccwtttgctcatggcctggagtcagggtcctggagtagacacctggcctcaggccttcactctcatggaatagttgggggacagttctcagagaagagaggag

SEQ ID NO: 304853 - DNA, 201 bp, Homo sapiens
acttacgcagggcttgcaaagcactagaaccagctggtgctaagctctttacatttgtaaactcctgtctcttaatacaacaaatctatgcagtagctacyactttcaatccctgtttcaaaggtgagaaaatagaggcacaaagagcctacatcccttgcccacggtcccctagtcagaaaatggtactcggcctgtctc

SEQ ID NO: 304854 - DNA, 201 bp, Homo sapiens
tgtgcacagtggttgggggtacaggatgagtaagacaaagtccttgtgcttagggtgctcatgctggtggaggagacaggcactccatgggtagttacaayagggtgcgaattctattacagtcagtccttgacttaccatggaatgatgaattacagttgtccaactttacagtggtgtaaaagtgatacacattcagta

SEQ ID NO: 304855 - DNA, 201 bp, Homo sapiens
agtaagcaaaattgatcctgagtagcttaagtactggttacggtgtttggtgtttgtatgccaggtctaccccttatggttttaggatagtggttctggtraatagttgattaggtccacttgctccagaaatctccgtgaataagatttgatggggtgctttccatccctgaaacatttactgaatgttttcttattgct

SEQ ID NO: 304856 - DNA, 201 bp, Homo sapiens
tgaacatgggattctgtagagctctaagccatctggcccttgtaattcttctgaccttgtaccttcttccaattttaatgtaatttctccttttctttagrgaacatttcctaactctactaaaatgcacatagccaatggcccgtcccaattgttgggtatgaaacacgcctgcttgttttcagattcagagcagtgcta

SEQ ID NO: 304857 - DNA, 201 bp, Homo sapiens
ggaagtcaaggaaaagtaaatcccagctctgcagtgcctctggcatctgccaggagggagaagaggtgtaaaggtgtgtataggagacagtggcctaagcycgagagctgccctctgtgctgtaaagaaagcagctgccccactttctgtaatcagaaaatccaagcattttgatgtgagaccagataggagggaaaaata

SEQ ID NO: 304858 - DNA, 201 bp, Homo sapiens; identical to SEQ ID NO: 63773

SEQ ID NO: 304859 - DNA, 201 bp, Homo sapiens
gtccaactttttatatccctaaagccttgctctcactgaagccttgattgaggccaagagagaatgccttgctgctgcccccatgagccactgcccatctmaggaattcccacagatgcccacatttacccacatgctttaaaagctcttgtttattgagtctttgctgttcacctggctgcatattacattacaaggcaa

SEQ ID NO: 304860 - DNA, 201 bp, Homo sapiens
tttttttagaaggaggggagtattgtattttgttttcatgtcctagtcagaaaatgaaatggtctctaggctaggttgcaaatccttagactcaagaactrtaattttttttattgtcctgaatattctaaaaagtaacataaattttaagagaattgtaatttaaaatcttagcagggtcaactgagctctggattcttc

SEQ ID NO: 304861 - DNA, 201 bp, Homo sapiens
aggagccatacatagcccaatgatgagaaacgtgagctttggctttaaaactggtgttgaagcctgcctttccaatttattgtgagtcctggagcaactcrtgtaacttctttaatcctcagtttccttatcagtaaaatgggaatagtgagaatacctacaccactgagttgttattaagcctgcatgaaaacctacatg

SEQ ID NO: 304862 - DNA, 201 bp, Homo sapiens
ttcaatattattcacaatagtcaagatatggaaccagcctaagtgcccatctacagatgaatgaagacattgtggtgtgtgtgtgtgtgtgtgtgtgtgtgtgtgtgtgtataccacaatggaaaattattctgccttaaaacaacaaaaaccaaaatcttgccaatcttgccatttgcaataacatggatgaacctggag

SEQ ID NO: 304863 - DNA, 201 bp, Homo sapiens
attcaatattattcacaatagtcaagatatggaaccagcctaagtgcccatctacagatgaatgaagacattgtggtgtgtgtgtgtgtgtgtgtgtgtgkgtgtgtgtgtataccacaatggaaaattattctgccttaaaacaacaaaaaccaaaatcttgccaatcttgccatttgcaataacatggatgaacctgga

SEQ ID NO: 304864 - DNA, 201 bp, Homo sapiens
ggttgcataaggaggggtgaaccggcccaagttggaaacagagcaggtcaaaactcccatgccgatgagtagtgggattgcacctgtgaatacccactgcrcttcagcctggtgacatagcaagaccccatctctaaaaaaagaaaaggaaagaaaaaaagagggtgctgagaagacttgcagtaaaggtgcctgtttaca

SEQ ID NO: 304865 - DNA, 201 bp, Homo sapiens
cgtagctaagcccccatcagctggatgcagagagggtgacggaaggcaggctcacaaggtgcagctgctgccatttatcaaggatttaaccctccaatgawcaagtatggatgaaattacatccccaaatagacccctcataatttgccagccttcagtctcccagcatttggggaaaaaaatctctgcttatcttttcca

SEQ ID NO: 304866 - DNA, 201 bp, Homo sapiens
ccaccgtagctaagcccccatcagctggatgcagagagggtgacggaaggcaggctcacaaggtgcagctgctgccatttatcaaggatttaaccctccartgaacaagtatggatgaaattacatccccaaatagacccctcataatttgccagccttcagtctcccagcatttggggaaaaaaatctctgcttatcttt

SEQ ID NO: 304867 - DNA, 201 bp, Homo sapiens
gggcagggtagaggaatagtctacccagactgcctgtcactcagaccagccactctgctgcaaaaggagttggcttatctttttttttttttttttttttttaagcacttagcagtttcctagggctgctatctgctgtaacaaactgtgtggcttaaaacaatggatatttattctcttgcacttctggcagcttagaag

SEQ ID NO: 304868 - DNA, 201 bp, Homo sapiens
ttgcctggctctccatcctagccacccgcaagcagagtgtggaggacattctcaaagatcattggcaaaagtatggccggaatttcttcaccaggtgagcyacagcccagctggggtacaaggtaaggtggggaagtgggcagagagaattcttgcgcatccacagcctctcctgtcttaagtgctaataaaaccctaggt

SEQ ID NO: 304869 - DNA, 201 bp, Homo sapiens
cacctcccagtccaccacgcggtcccgagggtaaacgaccaataatgtacaatacagggtactgtatttaataaattacacgagatcttccaacattttawtataaattaggctttgtgttcaatgattttccctaactttaggctaaggtaagtgttgtgggcccatttaaggtaggctaggccaggccatgatgtttgg

SEQ ID NO: 304870 - DNA, 201 bp, Homo sapiens
aaaagagttagagaggtgtcagcattgtttgaataaatatgttgtttcccaaggtgattgttttgaaagagataatgctaattgagatgaatgtactcaactggcataactgtttaaagggagttactgtattttatactgttcaagcacattgacctgtagagaggagcttaagagacagttcttgctgaggcagagtct

SEQ ID NO: 304871 - DNA, 201 bp, Homo sapiens
gaagtacaggggtacttcgggagctttattctcagggtgcctaacttggttctgtggtgtaggagatcagattttctttctggctttctgcccattctaayttgcatagctactgagtacatttccctgtaggcaaagcccacaggggaagattgtagcaccccatgtctggggatagcctagacagaatacgccagtaga

SEQ ID NO: 304872 - DNA, 201 bp, Homo sapiens
gatactgagttagactctgggacacatggtgaacaaggccttctcatagagggctccatgaattacaggtgtgcaaagcaatagaaggtgaagtacagggrtacttcgggagctttattctcagggtgcctaacttggttctgtggtgtaggagatcagattttctttctggctttctgcccattctaatttgcatagcta

SEQ ID NO: 304873 - DNA, 201 bp, Homo sapiens
taaaagagttagagaggtgtcagcattgtttgaataaatatgttgtttcccaaggtgattgttttgaaagagataatgctaattgagatgaatgtactcaactggcataactgtttaaagggagttactgtattttatactgttcaagcacattgacctgtagagaggagcttaagagacagttcttgctgaggcagagtc

SEQ ID NO: 304874 - DNA, 201 bp, Homo sapiens
gggaagaaatgcacttttacaaaagaaaagaagtttgcttgcaaagaggtgcaaaggagtctaacttcaggactggtccaccgagtaaaacaaaccactarcatctgcagaacaatcttggaatattactaacattatacattagtctgtttgtatacattatacattagtctgtttgtgctggaggagcagcagctttct

SEQ ID NO: 304875 - DNA, 201 bp, Homo sapiens
ttgaatgagttcatgaacactattcacttggcaccttccatttagacagattcctgctattggaaaagaaagaactttaaaaggtatctgatgtaaattcytgtatgatgctggaaccatagtgactggtcactgctttctggctgaaccacccacctcaatggagaatccacacctcacctcttgccgtagtctgggacc

SEQ ID NO: 304876 - DNA, 201 bp, Homo sapiens
ttttggatattcacaatgatattagcatttgaagattccagaacattctgccataaagaatcctgttagtacagttttgcctaaatatagtttaccactayatataataattatgatgatatgatacaatatcatcaccacaataatgattattattattatcatttcgtagtatgtacagtaacttctttttccacagac

SEQ ID NO: 304877 - DNA, 201 bp, Homo sapiens
ttgtgggtgtttaaatcagagattacaaggccactgcttagtccttttctacttcatataatgggcatggtgccatgctattctgagggatactacatgartgcccaatgagcctatgaggtggtcttctcccatgaaactccccacagggtcatctagttcaggcctggcttcagtcattctttatgaatgaagatgtct

SEQ ID NO: 304878 - DNA, 201 bp, Homo sapiens
atgattttccaccaatcttagaattatgtatgactctgagcaatgctaaatgggacccttgattacaataacgattgcccttttccgtccctcacatggcyacgctaacagtcctgctgtgatgtaactttgatttcatgcctttgaagggtggctagtgctacaaagattgctttgtatgagaccccaactggctggaag

SEQ ID NO: 304879 - DNA, 201 bp, Homo sapiens
ctcttatgattttccaccaatcttagaattatgtatgactctgagcaatgctaaatgggacccttgattacaataacgattgcccttttccgtccctcacrtggccacgctaacagtcctgctgtgatgtaactttgatttcatgcctttgaagggtggctagtgctacaaagattgctttgtatgagaccccaactggct

SEQ ID NO: 304880 - DNA, 201 bp, Homo sapiens
aataactgttaaggatccctcattctgacccgaggtcagaactaaattattagaagcccctcttgaacaggaataggagtcattgaaatgaaacccacacrtttaatttcagacatccatacttgctaacaatggcacgatgattaggttctgattatgatagaatgactggtatttcctgagctgggtgagttctagatg

SEQ ID NO: 304881 - DNA, 201 bp, Homo sapiens
ttcctgttgtttctcatgccattcttctccccagaatgcatccacctcacccctgaatcctcacatactttaaggagttttattttctgattctgcatacwtttattccatgctgtatatagttgtgggaccgtatgtaaagaagatcctctgtgaagaactcggtgcccctgcgaactcggcagttaactgcgttcctct

SEQ ID NO: 304882 - DNA, 201 bp, Homo sapiens
tccgcggctttgcacggagcatgcccacgagtggtgctctggaccggtaggtgtctccattcccttggccttcctgtcttaggtcgtcccagtcttcaccrtacccttcactgtgcctggaacacgtgtccttccctttcagcatgggcatctgatgcatagagtgtgctgagcgattcttgtgtgaggggatggttggct

SEQ ID NO: 304883 - DNA, 201 bp, Homo sapiens
acaaggccactgcttagtccttttctacttcatataatgggcatggtgccatgctattctgagggatactacatgaatgcccaatgagcctatgaggtggycttctcccatgaaactccccacagggtcatctagttcaggcctggcttcagtcattctttatgaatgaagatgtctttgaaggcagcaactgtgtcaaaa

SEQ ID NO: 304884 - DNA, 201 bp, Homo sapiens
aattttcttcaagtttaaacaaatttgatcatccaaaggagccatacatagcccaatgatgagaaacgtgagctttggctttaaaactggtgttgaagccwgcctttccaatttattgtgagtcctggagcaactcgtgtaacttctttaatcctcagtttccttatcagtaaaatgggaatagtgagaatacctacacca

SEQ ID NO: 304885 - DNA, 201 bp, Homo sapiens
aaaaaaaattttgacatacagtgtggttgtgttgtatcctactgctctaatattaggaaaggggctgggatgctaggtcagctgggaccctctttttctcrcttgcattcatctctttttctctcttactctcaccacttttctacctcatgttgagtagcgccatgaagacccctccttcatcactctgcctgcagttat

SEQ ID NO: 304886 - DNA, 201 bp, Homo sapiens
aagcatttcacacatacctttcctcatttactttcagaaccttctaaaggaggcttcactctctgcattttatggaaactctggcttacaaggaccccatygaaaaggatgttccctctttgtggccaccttctttcatgtcctttacagccggacatcctattttggccagaccatataattgaaaatgatcttaataat

SEQ ID NO: 304887 - DNA, 201 bp, Homo sapiens
gaccccatcgaaaaggatgttccctctttgtggccaccttctttcatgtcctttacagccggacatcctattttggccagaccatataattgaaaatgatyttaataatgagacagacagaaaataacctcaccatttctctcctcttcttcttcttcttttttttttttttttttttttttttttttgagacagagcctt

SEQ ID NO: 304888 - DNA, 201 bp, Homo sapiens
aattgtggattcggtagaagcttatgctacaatgctgagaagcatctttgatttcagtgcactgaaagaactactttctgggccaaaccgactgaagatcygtattgatgctatgcatggaggtatacaatcatttcttttcaattcccatctcttgaggataggaagttgccctcttctgtgtgtatcatgatgcttcaa

SEQ ID NO: 304889 - DNA, 201 bp, Homo sapiens
gtgacagtgaaatgcttctcatttgactgtacctgaatatgaagagccatgcgcaaatcttccttaacatgatattttcttttagaaaaatcctgctactytgctgactgaatgatgaaatggtagatgtgctagtgaagaggaactgatgagctttggattctttgtatttccatgtgagctgcacgaagtaacccactg

SEQ ID NO: 304890 - DNA, 201 bp, Homo sapiens
ctaaaagagttagagaggtgtcagcattgtttgaataaatatgttgtttcccaaggtgattgttttgaaagagataatgctaattgagatgaatgtactcaactggcataactgtttaaagggagttactgtattttatactgttcaagcacattgacctgtagagaggagcttaagagacagttcttgctgaggcagagt

SEQ ID NO: 304891 - DNA, 201 bp, Homo sapiens
gcctcggcctcacaaagtgctgggattacaggcgtgagccaccacacccggcccaagtcactttttaacatgctgtaacccccactttaaaaaaaaaaaaaccactttttaattatggtggggccgggcatggtggcttaccgcacttgagtgggtcacttgagcccaggagttccaaaccagcttggacaacatggtgaa

SEQ ID NO: 304892 - DNA, 201 bp, Homo sapiens
ggactacaggcgtgcaccaccatacccagctaatttttgtatttttagtagaaacgaggtttcaccatgttggccaggatggtctggatctcttgacctcrtcatccgcccgcctcggcctcacaaagtgctgggattacaggcgtgagccaccacacccggcccaagtcactttttaacatgctgtaacccccactttaa

SEQ ID NO: 304893 - DNA, 201 bp, Homo sapiens
tttggaagttccttcatgggctgcacattgactatcccctaggtttctttcttctttctttctttcttttttcttcttcttttttttttttttttttttttgagacggagtcttactctgtcgcctaggctggagtgcagtggcgcaatcagctcactgcaacctctgcctcccaggttcaagcaattcgcctgccttagc

SEQ ID NO: 304894 - DNA, 201 bp, Homo sapiens
ttttggaagttccttcatgggctgcacattgactatcccctaggtttctttcttctttctttctttcttttttcttcttcttttttttttttttttttttttgagacggagtcttactctgtcgcctaggctggagtgcagtggcgcaatcagctcactgcaacctctgcctcccaggttcaagcaattcgcctgccttag

SEQ ID NO: 304895 - DNA, 201 bp, Homo sapiens
tgcttactctcctgattctactcacactttttggaagttccttcatgggctgcacattgactatcccctaggtttctttcttctttctttctttcttttttcttcttcttttttttttttttttttttttgagacggagtcttactctgtcgcctaggctggagtgcagtggcgcaatcagctcactgcaacctctgcctc

SEQ ID NO: 304896 - DNA, 201 bp, Homo sapiens
tttgtggggaggagagcttcgggaccggtaagtcacactcctgtgctagcattttcctccctgtaaccactatttccagtaaaagcttagactgctaaggyagcactgaaataccaacggtagccgatgtgtcctaaatcaaggcacaaattatttataacaaccctgatgaaatgtgcacatttgaaaaggggtgagcac

SEQ ID NO: 304897 - DNA, 201 bp, Homo sapiens
attcctgttgtttctcatgccattcttctccccagaatgcatccacctcacccctgaatcctcacatactttaaggagttttattttctgattctgcatayatttattccatgctgtatatagttgtgggaccgtatgtaaagaagatcctctgtgaagaactcggtgcccctgcgaactcggcagttaactgcgttcctc

SEQ ID NO: 304898 - DNA, 201 bp, Homo sapiens
ttgcttactctcctgattctactcacactttttggaagttccttcatgggctgcacattgactatcccctaggtttctttcttctttctttctttcttttttcttcttcttttttttttttttttttttttgagacggagtcttactctgtcgcctaggctggagtgcagtggcgcaatcagctcactgcaacctctgcct

SEQ ID NO: 304899 - DNA, 201 bp, Homo sapiens
cttgcttactctcctgattctactcacactttttggaagttccttcatgggctgcacattgactatcccctaggtttctttcttctttctttctttcttttttcttcttcttttttttttttttttttttttgagacggagtcttactctgtcgcctaggctggagtgcagtggcgcaatcagctcactgcaacctctgcc

SEQ ID NO: 304900 - DNA, 201 bp, Homo sapiens
ccaccgtaaccatttttaggtgtatggttcagtgatggtaacaaaacattgttgtgcagcatatctctagaaagttttcatcttgccaaactgaaagtctrtgtccattgaacaactccccatctttccctcttctgagcccctgccaaccaccattgtattttgtgtttctatggtgttgacttctttaaatacctcatg

SEQ ID NO: 304901 - DNA, 201 bp, Homo sapiens
ctggaaataaggcaaacattctgggaagcaaatctcgctcaaacagtgaatggaacttatcaggtaacttttcatgttcaaagggaaaggaatttttttttaagtcactcagaggttttaaatagtttaaagatacctagagagaaataaaagacgtgttagaagggaaggggaaccactaatcagtgtgggtgaagccag

SEQ ID NO: 304902 - DNA, 201 bp, Homo sapiens
tgatgaaaatactctctcagcatttcagagatgcgtgttcttggtagttatataaaatgtcactgtaaacatatgtaactggcttctcctgttgtttgttkttggtggtgggttttttattttcttttttttttgagacggagtcttgccctgttgcccaggctggagtgcagtggtgcaatctcagctcactgtaacctc

SEQ ID NO: 304903 - DNA, 201 bp, Homo sapiens
atgatttgttggcttatctatctctccttctgcaccaaaagtttcttggcaacttgagtcttcctgaggtgtacagtgcctggtgaaatgaatacaacacrtcggtctatataggacatattgggtagatggatgggtgaacagatggacagccaactgacgcgtgctaaaggttgtacactctctgaggcagaggcagct

SEQ ID NO: 304904 - DNA, 201 bp, Homo sapiens
aaggtttcctggaagaagtggcatccaactcagttcttatgaaagaaagatctagagtgatgaaaaatcaagcaatggtcattctcatggagtcggtggcygtggcaaaggcatgaaggcttaaaaatggatgtcacattagggaaacgagaggcctgggctggctggataatggggcatgtgaggagggcattgggtaag

SEQ ID NO: 304905 - DNA, 201 bp, Homo sapiens
ggaggctgaggcacgagaattgcttgaacctggaaggcagaggttgcagagattgcacaactgcactccagcctgggagacagagtgactctgcctccccmcaaaaaaaaaaaaaaaaaaaaaaaaaaaaagaccctgaaacaagaggaacccaggcagcgtctcctggttgtctcagcacatctgtttcattttcctctc

SEQ ID NO: 304906 - DNA, 201 bp, Homo sapiens
tgaccaacatggtgaaaccccatctctataaaagtctctataaaaatacaaaaaattagtcgggtgtggtggcacatgcctgtaatcgcagctactcaggrggctgaggcaggagactagcttgaatccggaaggcggaagttgtagtgagcggagatcacaccactgccccccagcctgggcgacaaagcaagactccgt

SEQ ID NO: 304907 - DNA, 201 bp, Homo sapiens
atcctatgtgatatatttcatcatctgtacacttaattttaagagagtatgttttaaaatgcctacttaaaaaaccattctctcacctcaagtgatgaggrgttacctttccagttgaattggggtgacaccagctgggtgaggtgtggctcggccaagggtctggatgtggaggcaccgagtccagaataccagcgccaa

SEQ ID NO: 304908 - DNA, 201 bp, Homo sapiens
atgcatgcctggggaataggcaggaactgggcagattactttcttcaaagaatgtgcaatgtttggggagacgaagtgggtaaaaaactaaccccggggtygggcgcggtggctcacacctgtaatcccaacactttgagaggccaaggcaggtggatcatggggtcaggagttcaagaccagcctgaccaacatggtgaa

SEQ ID NO: 304909 - DNA, 201 bp, Homo sapiens
agagagggcagctatcactgtgaaccagaaccacgagggttttctcagacatgtaggtatatgagaatccctgaaacctatacacatacatctgcctggtyggagaagcctttctgcctgcaactgaacccttttagtgatgcaattcggggattcctgtgacactgcaaaccacagaaagtcttctgctggtgaactaaa

SEQ ID NO: 304910 - DNA, 201 bp, Homo sapiens
aggttgggccttcccccatccagtaggctggtaggggatttgggtgcatgtgtccccgatctccttgccacagaccagatatggaaggctatgacctgtgraaccaacttttctaggtcattctgaagtgtcctgtctcctctgtctcctgcttctgctccctggacagttccatgacctctcacagagacatgcctggca

SEQ ID NO: 304911 - DNA, 201 bp, Homo sapiens
tcctctgggaagccatcctctacatgcaagcagacttggtgggctccttctggtgaccccagactatgtgcccagtgccagggcaagggctgatgcagagyagccttggtgacacagtgggcagctcagtgcccaagccacacgtgctcccaagcttaacctcagatacttgggagaacatgggaaggagggagggaactg

SEQ ID NO: 304912 - DNA, 201 bp, Homo sapiens
tccaaagtggttttgtcctagatgtcctctcaggctcaacggccacatgtgtgcttgagatcttgctgtgctatttctcctggtagtgggagtctgagtgrcatccatgctccacagggcacaaggtctgtgctgtggttaataggcagctcctggtgaccatggggtgtcagagaagcagtgttctggctgctgaaagtc

SEQ ID NO: 304913 - DNA, 201 bp, Homo sapiens
atctttgctttgtgaactgttctgtgcgtcatccccatgtgatacttcctggggttgagccacagtgagggcagctgcccccgggatgggccatgtggggrttttcaactttctaaaaggcatatggcctccaggcctccctccagctcagtccttccctctcccttcacacaggcctgagcaggtcacccccggcttccc

SEQ ID NO: 304914 - DNA, 201 bp, Homo sapiens
gcaactgggctgcacactgcttggggtgaaactactccctcagctctatgcctctggcactctgtgggatttcccacagaccactggatttcctgccccasaggctgccttgagaagcattaaaggaagctttcatattaaaagcatctctgaagatatttggagaaaagtaagggtcctgcctagaagaaaggtgaagtg

SEQ ID NO: 304915 - DNA, 201 bp, Homo sapiens
gaaggacctggaacaggagtcaggtatttgggagggagaaaaaagagatgccaatcctggccacccttggttcttcaagtaacttctttgggaagtcttaytttctcactatgaatatggcaaactctccagaagatgcagtagacagaagcaacagcagaaccagaaatggactcttgtgccaaatggccttgtggcatc

SEQ ID NO: 304916 - DNA, 201 bp, Homo sapiens
cttcttcctcccactgaggaccatggtaataccgtgactgctgaaagctcagcatatccaagaggccagcctcacagacttgtagcactgatctttgtatsagattttgtgggctcagtgctttattttctgcacagaatattctgttccctaagtgtcccatgtgctctttcaactccagcctttgtatgtttactttcc

SEQ ID NO: 304917 - DNA, 201 bp, Homo sapiens
ggcacagatgcagggggtggtaaatatctcaaacagacctgggatgatgggggcagagcctggaacaaaggggagcttggactctgcttgaggaggttccmtggccttctgcccttggttccgcccaggacccacggcaaattcctctgtacacgaggcctgtcttatgtatttatttacacataagctatgggcacacag

SEQ ID NO: 304918 - DNA, 201 bp, Homo sapiens
  misc_feature (1)...(201): n = A,T,C or G
aggagggcagttcacttggcccatggacacactacagtatgggatgtccatccaggtttctgatgggcggatgcaggtggcacacccactctgacccctcnctgacacaaggctttcttatctctctacagggaatgggccctgtcttggtttcaggaagcctaagcagccttaccagtggctgtcctaccaggaggtgag

SEQ ID NO: 304919 - DNA, 201 bp, Homo sapiens; identical to SEQ ID NO: 63803

SEQ ID NO: 304920 - DNA, 201 bp, Homo sapiens
ttcactcaccggccaaaggccttgcagccgccatgcaacctcctgatgcagtcagaagaagtagaggtgagcaggataggagacgttccactgcggaaagyagggggcagaggacaggcatcttggaagtagaagccagacttgtggcttatttgacctcacatggcccagagaaggtgtctcccctggcagtcagccact

SEQ ID NO: 304921 - DNA, 201 bp, Homo sapiens; identical to SEQ ID NO: 63804

SEQ ID NO: 304922 - DNA, 201 bp, Homo sapiens
cactgcggaaagtagggggcagaggacaggcatcttggaagtagaagccagacttgtggcttatttgacctcacatggcccagagaaggtgtctcccctgscagtcagccacttagctctgcagcagccttgggcagggtctcctaccaggcactccttctgcctctcccaggaactgcctctgggtagagcctgacctgg

SEQ ID NO: 304923 - DNA, 201 bp, Homo sapiens
aggtacagaacccttgagccaagctggctgtgtatttgctgtgccaacacggcctcacttagtggccgagaggaggatgccgcaggcccctggggcctgcwtctctttcagccattctccagtgcttctcacagagaccttccctctctctaccccagggcatctgccatgtctccctgatgggcccactgtacccacttg

SEQ ID NO: 304924 - DNA, 201 bp, Homo sapiens
cagattggtggggttaggggagtgctgtggatgagatgctgctttgagcccttggggttgtccttcaggatgcccaggggtggttcctcatcatttgctcrgctgcctcgggagatccgtggtaggtgtggttattcctgggcctacttcctttgtgtagctcctaattcatgtgaatcttggggcctgggacaggcagaa

SEQ ID NO: 304925 - DNA, 201 bp, Homo sapiens
aagggactgatcaagactcagctctgctacaaagctctgcttttccctccaactcatggactgttgtaggggctgagactcccccgtgggactcctcctgsccacgcacccctgtcccagccttagctttgctgcagaccattctagatactgactgcagatcctgcctcataaacaggcagaaatgtcactgggagagac

SEQ ID NO: 304926 - DNA, 201 bp, Homo sapiens
agtgtgtaataaaaagagcacctgctttctaaggtgtggtaaagattgggtgtgatgacccagagaagtcactaaggacagctgtttttggttaagcttgkgactatatcacatctggagaggtcagcaaggacagagccctgtgaactgtgcagggaccagcagagggaacagcgtggagctatttgagattttcagtag

SEQ ID NO: 304927 - DNA, 201 bp, Homo sapiens
cctggctccccattaccctcaacctcaagtccagattctgccttgatctgcagcctctctggcctcctccccaaccattgcgatctggagctccatgaatygcctacagttccccaaatgcacctgtgcctcctgccggtgcatttgcatgtggtgctgcctatgcagggttgctattccctcctcctcactctgtccggc

SEQ ID NO: 304928 - DNA, 201 bp, Homo sapiens
ctgtggttttgagttcggctgtttgctttctggttctcacagatgttttttttccttagacctgctgttccaagaggtggcaggctctggcccagcccagsgtagctcaaatagtgcttgaagaagaggtggagctgtgatactggagagtttgggtttgggcaccctggggaagggtgacagggtagaaggggaggaggc

SEQ ID NO: 304929 - DNA, 201 bp, Homo sapiens
cccccacctgccccactagcactgactgctcatccagaagcctagtccacccagctgctgcatcctgagcatgtgcccagccgtgccaagagcactttaarcccaacatgctcacactcggattgccatcatacaggtggcatgtgcactttgcttagcctctccctggggctcagactccctgtctgtaatgtgtggggt

SEQ ID NO: 304930 - DNA, 201 bp, Homo sapiens
ggcttcctcacgacccctccctgcccgtccttcagccagagtacaagatttctgtaaggtagggttcacctggctcctctgctctgcccagggctgctgtrtctccactgtttccagacccctcccctccacctcacaggagtcagcttcaccactgcacttcttaggcggctacaaggacccctgctcgatcccgcctcc

SEQ ID NO: 304931 - DNA, 201 bp, Homo sapiens
tatgtgtgagaggaccaaatgtgttcaaaggctacttgaaagatccagacaggacgaaggaggccctggacagcgatggctggcttcacactggagacatyggaaaatggctgccggtgtgtatgtttggaaccacggagctccaaacatttggcagtgggagggtgtgtggtccgggtcactgaggcaggagtcttctcc

SEQ ID NO: 304932 - DNA, 201 bp, Homo sapiens
ttcttggggcaggtagtggctgcttccacagaggccgagcttcccaatgcaaaaagcaagaggctgaggctggtctatggtgcttattggatagaataacycagacaattgctggggcattttaagttatgtatccaccctccttgagactccacctggcccccagcctttctctggtggcagaagagactcctgagttaa

SEQ ID NO: 304933 - DNA, 201 bp, Homo sapiens
attcaggggaatttgtcagagatagggaggccaagatccaagtggaggaagccagactagcagagtttgtggaagaactgcaatgggggatgagtcttcarggtcttgtgcctgagcaatgtgggttgtgggagaggattctggagaaggttttatttggatggtagaggatccctccatttagctgctgagtcaagagga

SEQ ID NO: 304934 - DNA, 201 bp, Homo sapiens
gaggggtgtttttatgggattaactattgcaaacaggctgacttggctgttgtttcactgagcacctaccatgtgtcaagcaccctgtctatgattctccraactttccttccatcctcccacaacactgtgttgtgttctccccattgcctaggtgaggccctgagactcagcgaggttcagtggtgaagcaacttgtaa

SEQ ID NO: 304935 - DNA, 201 bp, Homo sapiens
gccctgtaatcatgtgaaatagtaactcatttgctcatgaaatcaaagcttaagctatgattgaaattttaaacttagacatttttgatttttggagataygttacatttgagatgagcaagaagaaaacctactatggatagtaggtcccttgatctccacaggcaacagtgtggctttgaccttgggtagtcaggtcag

SEQ ID NO: 304936 - DNA, 201 bp, Homo sapiens
ggatagcaatgtggccgctacgggtctatacccgcaaaaagcgggagggtcagaggctcaatctcaccccgacgccagacctaggctctccagcgaaggcsgaggccccgccaggtacaggctcaaggctcgcccaccgtaagctcagccgagctgcctccgggacgggaccgagggcgggcgggggtgctaggcctcggg

SEQ ID NO: 304937 - DNA, 201 bp, Homo sapiens
aggtagccatctgttctgggctgtgtctgtcctgttgcctgctggagaggccagcaatgagtcctgggccagcccagatctcacctgtgtgttgaatactmaacaaggagacaagtaaaataagtccagcatgagtcagatgctaggtctggcttggggaagcatgccctcagtgccataaacacctagaggacaatggga

SEQ ID NO: 304938 - DNA, 201 bp, Homo sapiens
tgttgtacaacctcaggccttctttctgatcccagccctagcatccaggtaggacccagttgttggatgttgaccttggatgaaacccagatggactggayaccatctcagacatcacaaaatttggcagctcttctttcttcccacaggccagtcttggtgggtgtgtgcggatgattgttactggagcagccccagcat

SEQ ID NO: 304939 - DNA, 201 bp, Homo sapiens
atgaaaagtagattcagtggttgaaaataggtcagaaatctttaccctaaactatataaccttatctactaagtgtctgtgataaaaatagcacttctcaygcctataatcccagcactttgggaggccgaggtgggtggatcacgaggtcaggagatcaagaccatcctggctaacacgatgaaaccccgtctctactaa

SEQ ID NO: 304940 - DNA, 201 bp, Homo sapiens
  misc_feature (1)...(201): n = A,T,C or G
agtagggggcagaggacaggcatcttggaagtagaagccagacttgtggcttatttgacctcacatggcccagagaaggtgtctcccctggcagtcagccncttagctctgcagcagccttgggcagggtctcctaccaggcactccttctgcctctcccaggaactgcctctgggtagagcctgacctgggccttgcact

SEQ ID NO: 304941 - DNA, 201 bp, Homo sapiens
ccagcatattatggacacgactaaagaaagaatgttgaaagatgataattgctttatactgcagcaaggctgtgagatctttaactgaaggaccatttctrattcacttctgtatccccaggacctaccacagtgcttaatacagattaaggtgttcagtaaatattgattcaatgactcaaaacccgaggtaaaaccagg

SEQ ID NO: 304942 - DNA, 201 bp, Homo sapiens
caagcaaaaataaactggtttgtggttggattcccatagttcacggatagcaccacaaagatgctcagtgggttactccataagaaaacatcattcaaaargatttactttgggctccagtgaatctcaaacccacaaactggctgttttcccaaaagatttattcagaaatctctttgacatttgttttcccatggaagt

SEQ ID NO: 304943 - DNA, 201 bp, Homo sapiens
cacgtagactgagttgcttgaagttttatgcccagtgcggctctggctgatagcagatgctaaagaaatgttaaggaaaatccccttggtcctttttcttrtgttgcatagcattaagactgcaatacctgaaggtatatttcctctctcactgtaatttattccattcttgtcatccaagcaaaaataaactggtttgtg

SEQ ID NO: 304944 - DNA, 201 bp, Homo sapiens
acagatccttttgtgtatattataaaatatataccaaatctgtttttccttttgctgtggaagatgtctttatataatattgagacttcccttgcaaatgrgagacgggactctggtcaggtatagtgtgtaggcctagccccatgtattaggaactcataaactcagaaatccaaggattaaacattttatgtctccttc

SEQ ID NO: 304945 - DNA, 201 bp, Homo sapiens
actttgataaacctctttaaaatgccccaagaaaactttttaagtccatagacaaagaaatactgcctaatggcataattacattcctaaaatctttaagygtgccgaagtttaaccactaaaacctcctttcttgcattatgtatttagatgcaccctgtattggggtgtcaacaatttcttataattaaaggccagata

SEQ ID NO: 304946 - DNA, 201 bp, Homo sapiens
tgactgtcaggtgtgacggcagaaggttctggcctcttcctgggaaaagcccttctaggtagccagcttctggggtgcactctgtacatcccaactccccsagggcctgccctacagtgtttcagaccagatatcaggtcctgtgacccaggacccctccctaacctgcccgtcaggtctcttgccttatctgactcttgt

SEQ ID NO: 304947 - DNA, 201 bp, Homo sapiens
ttttacaataaccatatctgattttgaaacacttgatgatacacatctttagccaaaatttccagctatttaagatgatacctatctttagccataaatgrtaccataaagatgatgcccatctttaggcaagatttccagctatttaaattggatatcctagaaataccctcaaaaacaatcttcccatttctcttggag

SEQ ID NO: 304948 - DNA, 201 bp, Homo sapiens
ttcccagagctgccagagcagtggccctggaaaatatggaagcagctgtcagccatggcccagggcctgagcgtatgattctcaggaaaagtgggcaggayatctgactgtcaggtgtgacggcagaaggttctggcctcttcctgggaaaagcccttctaggtagccagcttctggggtgcactctgtacatcccaactc

SEQ ID NO: 304949 - DNA, 201 bp, Homo sapiens
aacattaggcatctccctttttcttttcccaacaaaaactttgcttattaaaaaatggaaattccagtttcatgaagtgtgtggcataaagagagaataargactctcatacctttttttaaaaagttcacaattggacagtttggctttatgagaaaataattattataaaaaatgaacatgtgtttttatcattgattc

SEQ ID NO: 304950 - DNA, 201 bp, Homo sapiens
atagtgctcatacagtcagataggtcttcaccttcacatcatgaggactggagtatctgtcagggctgatctgcggtctttgccctgcccccacttcgctytcactcagggtcagggcctggagttgggagattagaggtagagagggaggagcctgcattccttcacccctgggcactgtgctgagcacttctgctgccc

SEQ ID NO: 304951 - DNA, 201 bp, Homo sapiens
gttatggtggggccagttgtcctcttggtagtcggtgagggacagtgcagagccatagtgctcatacagtcagataggtcttcaccttcacatcatgaggrctggagtatctgtcagggctgatctgcggtctttgccctgcccccacttcgctttcactcagggtcagggcctggagttgggagattagaggtagagagg

SEQ ID NO: 304952 - DNA, 201 bp, Homo sapiens
tagcttaaggaagtaaatgtcccaagaaggccagctagtcacctacccagagtcttctccagagtgattttccctggtgaatctactgtggtctataactyggcctctgctttattatgcagaagctgaattggatggatatgctaggagtgggttgttcctccaggatggtctcataactgacccagctcaaggaagctt

SEQ ID NO: 304953 - DNA, 201 bp, Homo sapiens
gctcctgtggcctagacttgtcttttacttattagcaggtgccaccatgagtctagctgtctaccttatgatcagaatgagtgtccaattcaaaatacgcmgtgatcatacttgtgtgctcagccacatgttagccatggaaatagtagtgaaaatgctatggaagtagccacccacacccctaagcctcacagatcttgc

SEQ ID NO: 304954 - DNA, 201 bp, Homo sapiens
ctgtctcctgcttctgctccctggacagttccatgacctctcacagagacatgcctggcaccttggcttcatgaagatactgtgtggcccaaacgaatacyagtttcctttagccccagaggctgacaagacatatctcccttggatttcaggagatctgtggagcatccaccaacccacctgttggttcaaaatcaactc

SEQ ID NO: 304955 - DNA, 201 bp, Homo sapiens
tggctgctgaaagtcagccaaaaaaaaaaaaaaaggatagaagcctgaccttggcatggagccttggttgaagaaggagccccagccctggaagctagtgrtcccgcacatggggctctgggctgcccttatccccacctcccactcgagggcacttgtggcagcaggagtgtgggcaccaggcagaggacacacgtgccc

SEQ ID NO: 304956 - DNA, 201 bp, Homo sapiens
cacccttccctggtggcctagcaggtgactgctggagtctttgataccctgtttgaaatgggctgagccttgtcttgttcctggctccagacactgggtgmcctcctgcacctcccagtgccctgcataagagtggccagatgcagatggatagtgtgcattgggaggtccagtgtgagggcttggcacctcccagagctg

SEQ ID NO: 304957 - DNA, 201 bp, Homo sapiens
ttccttgctctcccagttctcttcccctgatgcaacctgctaatgctctgtcctggccgtgagcagatgtgtagagatactcaccacgctttcactcatayccaccacataccctgttgtgcaccttgccttttgctcttgacagtgcaccttggcgatcataagcatgttttgccttgtaggggagggtgcaggttgagg

SEQ ID NO: 304958 - DNA, 201 bp, Homo sapiens
tcaaataacttcaaaaattgatatacccatggttttgtgtgtacctttatttagaaagtaatccttaataacttgtttttcaaaggtcagggtttaattcmgtcattttgtgtttaaggactactagagtctgagaaacaacggcaactgctaatttataaggctgtacttaaaggtaaatctaaaatcaaaaaagctttg

SEQ ID NO: 304959 - DNA, 201 bp, Homo sapiens
tccttgaaagcactggccaatcagaactttccactcgaaaacagtcgggagctgcctgtggttttgagttcggctgtttgctttctggttctcacagatgttttttttccttagacctgctgttccaagaggtggcaggctctggcccagcccagcgtagctcaaatagtgcttgaagaagaggtggagctgtgatactgg

SEQ ID NO: 304960 - DNA, 201 bp, Homo sapiens
accatgtaccaggtgttccgccgtgggcttagcatctcaggtgagaagggttgtggggggggtgtggaggggctgtgtggcaggggtggagtgggtgcaakggtgggtatgcaagcatgataccagggccatggcaggtgagctatccccaggttcagtggagagaagctactcctggcctttctcccaccagtcagagaa

SEQ ID NO: 304961 - DNA, 201 bp, Homo sapiens
tctgggattggtgcaggagtaaggcctactgagctgtttattctgattttgtgtgtggtgtgtgtgtgtgtgggtatgtgtgtgtgtgtatgtgtatgtgygtgtgtgagagaaagagacagagacagagggacagaaagagagagagagagaacttttgagcatttaaaaacagcattttcttctttcaggactgtggcc

SEQ ID NO: 304962 - DNA, 201 bp, Homo sapiens
ttttggtttaacctattttcattttgcaatgtttcttccatttctgggcctaaggcaccccaggctctagacctcccaaatgtcatttaagaagtctgaatttttttcacaacagcccccaaagggagaggggggagcataaaggcctggcttgtaaactagagactgcctgccagcatattatggacacgactaaagaaa

SEQ ID NO: 304963 - DNA, 201 bp, Homo sapiens
aggagaacgtagttctcaaagggcctctaaaatggccctttaagaaacagtaccctggcccctatgaacctgcctctcctttacacgtcaggtccaattcrtagcctgcttccttcattctaaaatactataagcaaggccatgtagtatctagaatctataaaaatccaatatactgatattataaacatttttccatct

SEQ ID NO: 304964 - DNA, 201 bp, Homo sapiens
acagagcctcagagggggctgaccctctttctggatcccacctccatccccccgaacttacgtagtgctttcctcagcagccaccgaggcctccagttccstctccaaagatgatgggttccttccagtgggtgcaaagtgagagccccagtgattggtgttcatagtgggtcagtgtgaacaacgcccaatggcctgcct

SEQ ID NO: 304965 - DNA, 201 bp, Homo sapiens
cctgggaggcagaggttgcagtgagcagagattgtgccattgcactccagcctgggtgatagatcgagactccatctcaaaaaaaaaaaaaaaaaaaaaamaaagaattcctcctggggatctccttcccctgttgaagagtccttgttttcccatcacttccccacatctgtgtgcaggtggccgacagggctgaatttc

SEQ ID NO: 304966 - DNA, 201 bp, Homo sapiens
cccctcttcctgtttaccctccaggaccattttctctttattgttttatgattctcttgtcgtcttcctgtcagtgtttctttcctttctgtctcccatgmccgtcgcctgcagaaagtgatctttccgagacaggacgatgtgctcatctccttcctgcctctggctcacatgtttgagagagtaatccaggtaagacac

SEQ ID NO: 304967 - DNA, 201 bp, Homo sapiens
caggcagaggacacacgtgccctccattattgaaagtcctctctgtgcactgcagggtcttcttgtgtaccagcacttttttcttcccatttctttctccmtgtttaccatcaacactgtgagaataactgaagtttccttatccaaaaaaagggtgctactccagattccgccactactgttttcgaaaagcacaaaacc

SEQ ID NO: 304968 - DNA, 201 bp, Homo sapiens
tggggtgacacaggacatcctggcctccaaggcctcaggccctgcccagtagcagctgaccccccactatgccctactggatctaggccccaggccctccytcctgcctccctatgtgctccccactctactggtaatgcctatgcattgtacccctccctggcactggcagctgacctacactggcagcccccacctgcc

SEQ ID NO: 304969 - DNA, 201 bp, Homo sapiens
ggaggcggccatttgcatatttcccattcatcctggccttgaaaaggaggcctgagttcccagtgctcctgcccgctgagggctgggccgctccagtctartgttaactctgtggacactgtaggctctcacaggccaacagcagaacttgaccgcttgctgccggagggagagcagcttaaggctgcagctgctgtgccg

SEQ ID NO: 304970 - DNA, 201 bp, Homo sapiens
atgaccatctcagtggctgctttggaatcttaaactctgggattggtgcaggagtaaggcctactgagctgtttattctgattttgtgtgtggtgtgtgtrtgtgtgggtatgtgtgtgtgtgtatgtgtatgtgcgtgtgtgagagaaagagacagagacagagggacagaaagagagagagagagaacttttgagcatt

SEQ ID NO: 304971 - DNA, 201 bp, Homo sapiens
ttacttgccagatgagaggtggtaattggagtgttgccagggagtatcagcctcagttgcgggctgtgggttagcacatgttggcacaatcatcagttgtwctttacccaaaagtgttgtttcctctacctccattttgaaatgtgttcttgtcttgtaatttttctcatatggtttgattcaggatctgaagaaagccat

SEQ ID NO: 304972 - DNA, 201 bp, Homo sapiens
catgaaatgacctgctggtgctcttgacaaagactggtcccgggcgcggtggctcacgcctgtaatcccagcactttgggaggccgaggcgggcggatcaygaggtcaggagatcgagaccatcccggctaaaacggtgaaaccccgtctctactaaaaatacaaaaaattagccgggcgtagtggcgggcgcctgtagtc

SEQ ID NO: 304973 - DNA, 201 bp, Homo sapiens
gaataaagtagaattactgttgcaggtgtctcttgaggacaacctcaagcctcagaggatttttttttatttgtttgttttctttttcttttttttttttycttgatataacctgggctgccattcacaggcaggagtttctgttctcattagagcaaccccacttttaccatcacttttcactccaaatactgaaatgac

SEQ ID NO: 304974 - DNA, 201 bp, Homo sapiens
tgggaggccgaggtgggtggatcacgaggtcaggagatcaagaccatcctggctaacacgatgaaaccccgtctctactaataatacaaaaaattagccasgtgtggtggcacatgtctgtagtcccagctactcgggaggctgaggcgggagaatggcgtgaacccaggaggtggagcttgcagtgagtggagatcacgc

SEQ ID NO: 304975 - DNA, 201 bp, Homo sapiens
ggttcacaccattctcctgcctcagcctcccaagtagctgggactacaggtgcccgccaccacacctggctaattttttttgtatttttagtagagacggrgtttcaccgtgttagacaggatggtcttaatctcctgacttcgtgatccgcccacctcggcctcccaaagtgctgggattacaggcgtgagccaccgtgc

SEQ ID NO: 304976 - DNA, 201 bp, Homo sapiens
aaagtgctgggattacaggcataagccaccatgccctgcctgatatcaaatatattctgtactatcattgcatttctataaatattatgaaattattttcraagaaatgctttaaaaatcaaaataggcctggcatggtggttcacgcctgtaatcccaacactttgggagaccgaggcaggaggatcacttgagcccaga

SEQ ID NO: 304977 - DNA, 201 bp, Homo sapiens
actgagtgaaggggaaagcttggagacaggagggagaatgccttagttcctgtggctttgccagcagttgctcatgtaaccttgagcagagcctcatcccygtctgtggcttcaccttgactcacttatagaacaggagaacaagccttcatagcattccttgcccatggcccccagcttttagccaaaaccactttgcct

SEQ ID NO: 304978 - DNA, 201 bp, Homo sapiens
aggggcgccacttccctgcaatcatatcaagctcgttgatgttgaggaactgaactactgggcctgcaaaggagagggagaggtaaacaaggatttagccrttcatgcctgtggctgctacatgtagtgagtaaaaacaagaacagtagggatggaatgattttccttttgccttgtgtataaagtcattttaaactactg

SEQ ID NO: 304979 - DNA, 201 bp, Homo sapiens
ctttttgaggttgccgctgcctttgagacattgatatcacaggagaacgtagttctcaaagggcctctaaaatggccctttaagaaacagtaccctggccmctatgaacctgcctctcctttacacgtcaggtccaattcatagcctgcttccttcattctaaaatactataagcaaggccatgtagtatctagaatctat

SEQ ID NO: 304980 - DNA, 201 bp, Homo sapiens
gctctaaaactccctcatggaaagtaaatttgcatgggtacttaggaataaagcaaaagagacagaaaaaaacattaatggtggttatgtctgggttgtgrcattgtgaatctgtaaacactgttgaggtttttcccttttttattcatccttaacacactggaagaatctggtctaaatttggtgagtaatccatgggct

SEQ ID NO: 304981 - DNA, 201 bp, Homo sapiens
acatcagcatggcctaaccacttctaaaggcagacactcctgcatggtgtattcatgcaaacaggtggggctctggaggggaatagcttatggagccaaartaaaacacagagtagattttaaaatgtttatctttaattcattattatccagatgaaaagtagattcagtggttgaaaataggtcagaaatctttaccct

SEQ ID NO: 304982 - DNA, 201 bp, Homo sapiens
tctctctctcatttcttctctctttcatctcacctctctctctgtcctcaccactcccattcccctccccctcttcctgtttaccctccaggaccattttytctttattgttttatgattctcttgtcgtcttcctgtcagtgtttctttcctttctgtctcccatgcccgtcgcctgcagaaagtgatctttccgagaca

SEQ ID NO: 304983 - DNA, 201 bp, Homo sapiens
tttctttttatagggaacccaaaaggtgcgatgctcacccatgggaacgtggtggctgatttctcaggctttctgaaagtgacagaggtgaataaagtagmattactgttgcaggtgtctcttgaggacaacctcaagcctcagaggatttttttttatttgtttgttttctttttctttttttttttttcttgatataac

SEQ ID NO: 304984 - DNA, 201 bp, Homo sapiens
ccgcagaatgccaggtactgacgttggagagcggggccggagagggctggttcgctctgcggccgggcccctcccccgcccgggagcttggcggttccgayaccgcggtcagtgcggggcaagccccagacccggccggccaggctgcagggcagggagtaaggctcggttgcgagtgcgcgccgcgccctcccccttgag

SEQ ID NO: 304985 - DNA, 201 bp, Homo sapiens
cccctgctcgatcccgcctccgcgcttacctccctcaaccccccatacacccacacctggagtctcaccacaggcccttttatctgccagttctaccaccygcaccggctacttcccctctctgagcctggggtcctccagagtataataccactaaaggatctccacctccaccccaacccccatgtgcagattcagcct

SEQ ID NO: 304986 - DNA, 201 bp, Homo sapiens
aaccatcagtgacatatgagtgggcttctgcagcattcaggggaatttgtcagagatagggaggccaagatccaagtggaggaagccagactagcagagtytgtggaagaactgcaatgggggatgagtcttcagggtcttgtgcctgagcaatgtgggttgtgggagaggattctggagaaggttttatttggatggtag

SEQ ID NO: 304987 - DNA, 201 bp, Homo sapiens
gctggccctggtggggcgagacaaagttgcccgtctaaagaatggtttggcatgctcctggctatagatgcctagggcaagcatagacttgcacactttgrcttagttcaggcctgtgagatcctccccttaccccactctgggctcccattaggacagagaactgacttgaggtctagggccaccccaggggtttggaga

SEQ ID NO: 304988 - DNA, 201 bp, Homo sapiens
ttgcttctgccaccccaccacattggagccaacatatttcccaccagggcccctttcttcctgttctctcccatgctggattgccctaaatcagcagaggscatgctgaggtgggaggaagttccagtttccttagccttagctaccacttggtattctgaactggtctgtgctggagaaaaagatgtcggatattccagg

SEQ ID NO: 304989 - DNA, 201 bp, Homo sapiens
acctgggaggcggagcttgcagtgagccgagatcccgccactgtactccagcctgggcaacagaacgagactccgtctcaaaaagaaagaaaaaaaaaaamcaaaaacaaggtttcttctttttgccacttaaaatatcttatatttctagatttccaggtctatgtggaaatcatcacacttgggccaataaatgggtta

SEQ ID NO: 304990 - DNA, 201 bp, Homo sapiens
aggacaggaaagaacaagtcccattactcagtggaaggaacaggcctagagaggagagagacctggccatgatcccacaaccaggctagggcctttctgtycccatctctcaggggaagccaagccatgctcagaggaaaacagaaaaatacttggctaagctagaatcagtcacagctccagtactggtttttgaattaa

SEQ ID NO: 304991 - DNA, 201 bp, Homo sapiens
gtcagagtcctggctgaggatgagaggagtctaaagggggcatgtgttgacagtttctgggaagagagcccctctgggacagagactgtgagcctcggggsctgcgctgtggagggagcaggaaggttggcaactggattggcttggtggggttttcagaatgggatccttggggaggcccaagaggtgaggcacttgaca

SEQ ID NO: 304992 - DNA, 201 bp, Homo sapiens
gtgctgagggaaggtcctttctcactggcatcatttctctctggtaaacagctctcactcccctgctttctgcccctgcctggcctttgtgttggagactrgggaaagagtgtgaggtttggcgtctgagagccttggtttgagtcctacctccactgcttgctgggggactgtgagccactcatttaacttctctgccac

SEQ ID NO: 304993 - DNA, 201 bp, Homo sapiens
gccatctgttctgggctgtgtctgtcctgttgcctgctggagaggccagcaatgagtcctgggccagcccagatctcacctgtgtgttgaatactaaacamggagacaagtaaaataagtccagcatgagtcagatgctaggtctggcttggggaagcatgccctcagtgccataaacacctagaggacaatgggagcaga

SEQ ID NO: 304994 - DNA, 201 bp, Homo sapiens
aaaaaaaaaaaaaaaaaaaaaaaaagaattcctcctggggatctccttcccctgttgaagagtccttgttttcccatcacttccccacatctgtgtgcagrtggccgacagggctgaatttctggggtccggacttctccagcacaattgtaaagcatgcactgatcagtttattggtgtttttgcacaaaatcggccaga

SEQ ID NO: 304995 - DNA, 201 bp, Homo sapiens
tgtcctgttgcctgctggagaggccagcaatgagtcctgggccagcccagatctcacctgtgtgttgaatactaaacaaggagacaagtaaaataagtccmgcatgagtcagatgctaggtctggcttggggaagcatgccctcagtgccataaacacctagaggacaatgggagcagaggatcagagcttctgcctgcct

SEQ ID NO: 304996 - DNA, 201 bp, Homo sapiens
atcaaaacaaagcaagaatatttgtgtcccatttctgccaaggagcaggcaggaagggctgcccagccctcttggatctccagcctggcctgagcctgggrcctttccaggtgccaaatgcagcagagaagtcctttgccatcagagttggctgctggactcaggagaccaggcccactcaggcccagggagtagtacaga

SEQ ID NO: 304997 - DNA, 201 bp, Homo sapiens
ttagtgttcacaccccagttaggtttcctcagcttctttttctttttcctgagcgctcatctgcccacctttctgagcgcagcacacaggagcatgcaggygtgcccaacacatgctcacacccacatacagcatacatatgggcctggctggttggggagcccaggcatcttgggccctggctggccacactgggtctcc

SEQ ID NO: 304998 - DNA, 201 bp, Homo sapiens
gcttcatggctgccttcatgagcactcttgatttaggtggtgtccttccttgggttgcctgctgcctgctccacttcagcttctgtctttggtgtactctkgattgtctcccctcatgggcgattgtcattttgccctggcaaactggtctcgtggataagatttcttgcaccccaccattcccaccactgctctctaaga

SEQ ID NO: 304999 - DNA, 201 bp, Homo sapiens
atgtctgggaatgttttaaaattccatatgccattagacatgtataaaatggcattcatatccacaagaaaactaaaggacatgaacttttctcatcatgytggagaagaaaaggacttatctaaccaagtggaattgaataactactgctgttgtacgtgttttggcttgaactgaatggcggctttagaattttttttt

SEQ ID NO: 305000 - DNA, 201 bp, Homo sapiens
atatacagtcatttagctgagcatgtaagtgcccatcatccccagaactgtggctactcagaggtgggctttctggggaaaatgttcaccatgacctattygttttgtgctatttggttcaagacctgaatgaatgtagcaggagtgctgagttaccatgtatgaagtgcccagcacagtgccaacattagtgggtgttga

SEQ ID NO: 305001 - DNA, 201 bp, Homo sapiens
tctgttctaactgaggatgcccatgaaagcccaggcatatacagtcatttagctgagcatgtaagtgcccatcatccccagaactgtggctactcagaggkgggctttctggggaaaatgttcaccatgacctattcgttttgtgctatttggttcaagacctgaatgaatgtagcaggagtgctgagttaccatgtatga

SEQ ID NO: 305002 - DNA, 201 bp, Homo sapiens
cctctgaaaaaaagataatatgtgggtgtaacatagcccagtttgggaaattgggtctcttgaatgatagttaggatgttttatccttgtgagttcatatrccttgtcttcccagcaaagaaaatacagtgcttttaaaaaacataactttcagtctatgtgtttttagcactctttttctaattcatctatattcactca

SEQ ID NO: 305003 - DNA, 201 bp, Homo sapiens
gacatttggcccatgattctggtggaatcattccaggaagatttcattcttagcatgtggtggaaaaaatctgtggagattcctagaataagtcagtactytgaagtccctattcaggccaagaaggcctgggaggtggtgagagcttgtggtctgtctgtacccagtgatggctgaggggtgggcatgtggtttgctgtt

SEQ ID NO: 305004 - DNA, 201 bp, Homo sapiens
tggtccaaggatggcttgagtcatggctgggctccagtaaggagaagagataagcccccacccctggcctctgccttaggagaagtggggctggccctggkggggcgagacaaagttgcccgtctaaagaatggtttggcatgctcctggctatagatgcctagggcaagcatagacttgcacactttggcttagttcagg

SEQ ID NO: 305005 - DNA, 201 bp, Homo sapiens
gctggggagggcagacatcatgtccagtgcttttccagactgtaggaagctgagccatcctgctcaagctctgtgtggtggaagcagaatgtatagggctygaaacataggctgtgatttactatcccagacctcccactccaaagctatggctgttgcctgggcagagctgggggagtgagcagggctctggcctgatat

SEQ ID NO: 305006 - DNA, 201 bp, Homo sapiens
gaaagcacaagaggacacacacagcacaggcacaaccctctgcatttctatagcatgctgtccaccctctctctgcaccactggggcctcagcacagcctrtgaggtgagcaggattgtcaccaagcctgcttgctccaaagggacaccatcagcaagtagaagcaccagggcctgtgccctgctgtcataattcccaggc

SEQ ID NO: 305007 - DNA, 201 bp, Homo sapiens
tgtgaaagggcaatgcagatgctctgcaggctggggctggtgtgccatgagcaaggctgtcaggcaaagcacacaagcagaaatgatatcctctgtgcttrgagctgacagaggagcacacacatcaacagtggcaggaataatcaaggaaggcttcctgggggaggcagaaagcacaagaggacacacacagcacaggca

SEQ ID NO: 305008 - DNA, 201 bp, Homo sapiens
tcagagtcctggctgaggatgagaggagtctaaagggggcatgtgttgacagtttctgggaagagagcccctctgggacagagactgtgagcctcgggggstgcgctgtggagggagcaggaaggttggcaactggattggcttggtggggttttcagaatgggatccttggggaggcccaagaggtgaggcacttgacag

SEQ ID NO: 305009 - DNA, 201 bp, Homo sapiens
gccaagttcactttggaaaactccattgagctttacacttatttgggcacttttccatgtgtgtgttatacttgaggagaaagttgtgttttttttttttkttttttttttaatagttgactatgaaggtatggcagggagcaagattagcagctggtggagccaagggctttgggggaggtttgttgctcttctggagat

SEQ ID NO: 305010 - DNA, 201 bp, Homo sapiens
  misc_feature (1)...(201): n = A,T,C or G
cagacttgtggcttatttgacctcacatggcccagagaaggtgtctcccctggcagtcagccacttagctctgcagcagccttgggcagggtctcctaccnggcactccttctgcctctcccaggaactgcctctgggtagagcctgacctgggccttgcactgggcctctagtttgcctgcttctcgggtaggagggcct

SEQ ID NO: 305011 - DNA, 201 bp, Homo sapiens
ttgaaagatccagacaggacgaaggaggccctggacagcgatggctggcttcacactggagacatcggaaaatggctgccggtgtgtatgtttggaaccayggagctccaaacatttggcagtgggagggtgtgtggtccgggtcactgaggcaggagtcttctccaaatcccccctgacaatgagtcattcaggagcacc

SEQ ID NO: 305012 - DNA, 201 bp, Homo sapiens
tactttaaaatgaatgtgaagaatgggaaaatatatttttgcatgaaaacagactacttacaaatgtgcttaatatctcaggaaaaaaagaatgaataacygtatataaaattggtaaactataaattggctgtatttccttgccggttttaattttaaggaagcatttacatgaaaagaaaaaaggatcctagtagtctg

SEQ ID NO: 305013 - DNA, 201 bp, Homo sapiens
gacagagacagagggacagaaagagagagagagagaacttttgagcatttaaaaacagcattttcttctttcaggactgtggccaagagaatcaccaggcycctgtggtaagcgaattcacctgcagatctttattgagcgagatggcgtgcagggcctgtcctcacagagtccctcactgtgcacagaacagcacctctg

SEQ ID NO: 305014 - DNA, 201 bp, Homo sapiens
tttacatttctacttaaccatataaatgacattatatacctctccttataaatctatatttccagtactgtattttttagtagtttctgcttgtcactgcyggcttttcaaagatactcaccccaagttcccatactgaacatagactcttgtcccaattatacaatgttctccacatgctgttaggaatgcagacaagcc

SEQ ID NO: 305015 - DNA, 201 bp, Homo sapiens
ataacctagacccactgacgctgcgacctaacactccgcttcctatgctgccctgtctctctcttctttctgcaccttccccctccctctctctctccctstctctctcatttcttctctctttcatctcacctctctctctgtcctcaccactcccattcccctccccctcttcctgtttaccctccaggaccattttct

SEQ ID NO: 305016 - DNA, 201 bp, Homo sapiens
gattgataaaagtaagactcagacctaaagatttgagagcctttagcaggaagacgaacactctagctgcattatgaaacttccagagaatgtcagtcacyggtaactattataacccacctttgagtatttaaaagcagaaacaagcagccagaatcccccagctgggtggcccagaactgtccccaaacccacttccac

SEQ ID NO: 305017 - DNA, 201 bp, Homo sapiens
ccacatacagcatacatatgggcctggctggttggggagcccaggcatcttgggccctggctggccacactgggtctccctaacacactcctcttctcacscctgcagcccccgcagcctgatgacctctccattgtgtgtttcacaagcggcacgacaggtaagcagaggcacgcagatccccagccatggctacctgca

SEQ ID NO: 305018 - DNA, 201 bp, Homo sapiens
cagggcacgtaggggcgccacttccctgcaatcatatcaagctcgttgatgttgaggaactgaactactgggcctgcaaaggagagggagaggtaaacaargatttagccattcatgcctgtggctgctacatgtagtgagtaaaaacaagaacagtagggatggaatgattttccttttgccttgtgtataaagtcattt

SEQ ID NO: 305019 - DNA, 201 bp, Homo sapiens
gccaggaaatgcccacttgagtgtccaggacttctgtgggccgagggcccagggaaggacctggaacaggagtcaggtatttgggagggagaaaaaagagmtgccaatcctggccacccttggttcttcaagtaacttctttgggaagtcttattttctcactatgaatatggcaaactctccagaagatgcagtagacag

SEQ ID NO: 305020 - DNA, 201 bp, Homo sapiens
ccctgccactggcaactggtccccagcctccagcctccagcttctcaggttatgctgattgtctgacactcgtaagaggcactttgctctcagaaaatacyaggggcttacactgtggctcctgagttggcttcctgagtcaagctgtccctggtcagacttcacacgaaggttccttccacagggctcagctgccaagaa

SEQ ID NO: 305021 - DNA, 201 bp, Homo sapiens
agagagagaacttttgagcatttaaaaacagcattttcttctttcaggactgtggccaagagaatcaccaggctcctgtggtaagcgaattcacctgcagrtctttattgagcgagatggcgtgcagggcctgtcctcacagagtccctcactgtgcacagaacagcacctctgtgttaataagcaactcctgtgtgcaag

SEQ ID NO: 305022 - DNA, 201 bp, Homo sapiens
gatccaggattctgacatgcagaaagggagtaggaaaagaaaaggcattccaggccaagggacctgtgtgagggaagattggcaataggactgaatgaagktgaaggaccaattctgctgggccagtgaggttgccagaggtgggctctgcaggcctaggataacaggccaaacagcattggctttattctgtgcagcggt

SEQ ID NO: 305023 - DNA, 201 bp, Homo sapiens
gggaaaagcaggtgtaaactccttgcaggcagggccaggttacccttcactggagaaccctgtgtgctgagaaccagtgcagcctggaatagaaggaggtrctccagaagtgtttgttgaatgaatgaatgaatcaactagtgaacccacagcttctgggtgaccagttttgtggaagagagtcttctctgagggctgctg

SEQ ID NO: 305024 - DNA, 201 bp, Homo sapiens
cgtgatcttggctcactgcaacctctgcctcctgggttcaagtgattctcctgcctcagcctcccatgtagctgggattacaggtgcctgccaccacaccyggctaatttttttgtatttttggtagagacggggtttcaccacattggccaggctgttctcaaactcctgacctcaggtgatctaggtgatccacccatc

SEQ ID NO: 305025 - DNA, 201 bp, Homo sapiens
tgtgctgagggaaggtcctttctcactggcatcatttctctctggtaaacagctctcactcccctgctttctgcccctgcctggcctttgtgttggagacyggggaaagagtgtgaggtttggcgtctgagagccttggtttgagtcctacctccactgcttgctgggggactgtgagccactcatttaacttctctgcca

SEQ ID NO: 305026 - DNA, 201 bp, Homo sapiens
tagcaggtgactgctggagtctttgataccctgtttgaaatgggctgagccttgtcttgttcctggctccagacactgggtgacctcctgcacctcccagwgccctgcataagagtggccagatgcagatggatagtgtgcattgggaggtccagtgtgagggcttggcacctcccagagctgagtcagcagagtcatggg

SEQ ID NO: 305027 - DNA, 201 bp, Homo sapiens
cacgatctttgggaagatcatccgcaaggaaataccagccaaaatcatttttgaggatgaccgggtaggtactgggcaccacctctctcgcctgctgaggkgggtatcgtccgcggatcctcgggtttctcgcggagggagaggaggggtcgcgagtgtagcggcgacgggaggggacctggctgccctggtccagcgggc

SEQ ID NO: 305028 - DNA, 201 bp, Homo sapiens
gacctgcacgggtcaaacccatgttgtgcaagggtcagttgtatttacttggggatacctttttaaagtgagacattatttctgaaacttagaaacttcarggcattaatttttaattcaatatatttgtacaaatcacagagttcaaagattagagcgagtacttaatggtaaaataccgtcttatatgcaataacatta

SEQ ID NO: 305029 - DNA, 201 bp, Homo sapiens
tccagcgggcccccagccagcggacagggcccgggcactccgaggcggcctgccggcgcgtgccggcgctccggttactcgttatctgccccgggcgcggrccaggccgccgggcgccctgagtgccgcaccgcggggcctgggcgcgtgtcggggcgcactggggcccccgcgtggaagcccgccggttccccggctgcc

SEQ ID NO: 305030 - DNA, 201 bp, Homo sapiens
ttcttgaaattagtaatgataaatacctaatcttaatgagtctccagttgtagattatgctctgttgggattaagagtttccaaatatttgctcaaagggktgtgtttcaatgagagttttaagatttgatatttcagcttgacagtttgttatttaatggcaagaagtaataaattgcctgtgcctaagaaacttttttt

SEQ ID NO: 305031 - DNA, 201 bp, Homo sapiens
ggcgccctgagtgccgcaccgcggggcctgggcgcgtgtcggggcgcactggggcccccgcgtggaagcccgccggttccccggctgcctcggaccttgcstgtatcaggaatctcgaaatctcgccagcgctctgcctgacagagagaaacccgatcgcgccctgactcaggcccaatctccgcgatctcccgcgcacag

SEQ ID NO: 305032 - DNA, 201 bp, Homo sapiens
aaatacttgttgaaataagttttatcctaccaatatactaaaagtttgatttatttatttatttctcttttccctagtgccttgctttccatgacatttcycctcaagcaccaacacattttctggtgatacccaagaaacatatatcccagatttctgtggcagaagatgatgatgaaagtgtaagtacatttctaacat

SEQ ID NO: 305033 - DNA, 201 bp, Homo sapiens
gcatgccatcacgcctggcttatttgtatttttagtagagatggggtttctccatgttggtcaggttagtctcgaactcccaacctcacgtgatccacccrcctcagccttccaaagtgctgggattacaggtgtcagccaccacgcccagccccagaatacaaatttttaacatttagtataattagacagtcatggcat

SEQ ID NO: 305034 - DNA, 201 bp, Homo sapiens
cttccgagcctctcctctggccgccgcgcgggagagaggccgagatggcagatgagattgccaaggctcaggtcgctcggcctggtggcgacacgatcttygggaagatcatccgcaaggaaataccagccaaaatcatttttgaggatgaccgggtaggtactgggcaccacctctctcgcctgctgaggtgggtatcgt

SEQ ID NO: 305035 - DNA, 201 bp, Homo sapiens
taaacggatgggaactggtaaaatcgcgaggagccgcagagcccaattactggccagaagagaacggaaatcacctggacgccatgttagttaggggcacmgtcacttccggcgcagggatcgtctgctaggcggactaggtttgtatatagtggatggcgtcggcacccgcgttttgttacctcctgtttagggtatagg

SEQ ID NO: 305036 - DNA, 201 bp, Homo sapiens
attagggaagaaagctggcaacatacaaatagactccatgtgtaaatagagacaaattgactgtagatagaaccaaaaaacaaacaggatgacacagagcragactaggtatttgccacaggatcctgcaagtcccgacaatgcaatagatctggtagtgttcaaaggaaaatccataatggtcataaggaagtcataaag

SEQ ID NO: 305037 - DNA, 201 bp, Homo sapiens
ccagcttcttggacacttaatgattgttggcaagaaatgtgctgctgatctgggcctgaataagggttatcgaatggtggtgaatgaaggttcagatggtrgacagtctgtctatcacgttcatctccatgttcttggaggtcggcaaatgcattggcctcctggttaagcacgttttggggataattttctcttctttag

SEQ ID NO: 305038 - DNA, 201 bp, Homo sapiens
atttttttcttttttttttttttttgagacggagtttcgttcttgttgcccaggctggagtgcaatggcacgatctcggctcaccgcaacctctgcctccygggtacaagcgattcccctgccctcctgagtagctgggattacaggcatgccatcacgcctggcttatttgtatttttagtagagatggggtttctccat

SEQ ID NO: 305039 - DNA, 201 bp, Homo sapiens
tgagagctttttagaatgttgaagttaaccctcccaacttttttctctcataatgggaaagcataagcagtgaaatgggagttaaagttcttttctcttgscaaccttctcccctttaacttttattagggaagaaagctggcaacatacaaatagactccatgtgtaaatagagacaaattgactgtagatagaaccaaa

SEQ ID NO: 305040 - DNA, 201 bp, Homo sapiens
ttgttacctcctgtttagggtataggatcgtctgtaaaagaacctttattttaacgtttcccagttgcgactatctctttggaaatgtgcataaataaaarccaagtcctaacagctgcagcgggcattgattggaacactgactcctaaaaattttatgcgtatattctctcatttatttccatagaaggtgaggttaaa

SEQ ID NO: 305041 - DNA, 201 bp, Homo sapiens
tgaagaggttttgagtgacatctggtgcactggtgtgctaggtagcagtcttgaaagtccggggttccaatgggaggaggagcatgggaggaagactagtmtaaaagcccaccccagactgggttagtgtactatgccttcctactgatggtcccttgcaaccatcccccattgacccaagaaagaggagaggttcgacac

SEQ ID NO: 305042 - DNA, 201 bp, Homo sapiens
agcagtgaaggggctgaggccacatggtggagggcctggaagccaagcacagggccttggctttggtgccacaggccattgctggcttctgagcagaagcrtcagggacaggaggaggctgtgctttggttttctcccatcatctcagaaaccccagggaaggaaggttcttgatccctcaggttaatggtagcagaaagg

SEQ ID NO: 305043 - DNA, 201 bp, Homo sapiens
gttaggctgtcatatcattagattgagccacttactggtgaactgtgatactgcagccatggactatgacagatgcatctcttattagaatcagcttccaygaaaatatctagtgtgttaccttggagtgggtgcatttaagcctctttaccagggcatgtgtgttccatgcctcatctctgaccatgagtggaagctgcc

SEQ ID NO: 305044 - DNA, 201 bp, Homo sapiens
gatgctggtggctctacatctccatccacagaggacccgctaacagtcactgcatgcaaagaaaggggcagctttctcacagagctaaagccaaagcttaycgccatctgtgaaggcggtggggagagcagtaggcagacctggcttccgaaggcctggcaggaagctgccttatgagataggaaacttatgcctagtcct

SEQ ID NO: 305045 - DNA, 201 bp, Homo sapiens
acctcggcatcccgtcaatggctgtgcggatttggggtaccgtgcagcctctgctggggtctcagagatctgagaactcaaatcagcgccagagcaccaaycaccctgtgtcacactctcctagatgccggacccaccatcagccccgtgagacaggaggaggtgcagttcctggggctaatgctcggcaccacagaagca

SEQ ID NO: 305046 - DNA, 201 bp, Homo sapiens
gatgggtacctccacctcggcatcccgtcaatggctgtgcggatttggggtaccgtgcagcctctgctggggtctcagagatctgagaactcaaatcagcrccagagcaccaaccaccctgtgtcacactctcctagatgccggacccaccatcagccccgtgagacaggaggaggtgcagttcctggggctaatgctcgg

SEQ ID NO: 305047 - DNA, 201 bp, Homo sapiens
aacactcagcatttcctttgaaaaatatctttgaggctcacgcctgtaatcctagcactttgggaggccgaggtgggcggatcacttgaagtcaggagttsgagaccagcctggccaatatggcaaaaccccgtctctactaaaaataccaaaattagccagggatggtagcaggcgcctgtgatcccagctactcgggag

SEQ ID NO: 305048 - DNA, 201 bp, Homo sapiens
tcctagcactttgggaggccgaggtgggcggatcacttgaagtcaggagttcgagaccagcctggccaatatggcaaaaccccgtctctactaaaaatacmaaaattagccagggatggtagcaggcgcctgtgatcccagctactcgggaggcttaggcaggagaattgcttgaacccaggaggcagatgttgcagtgag

SEQ ID NO: 305049 - DNA, 201 bp, Homo sapiens; identical to SEQ ID NO: 63819

SEQ ID NO: 305050 - DNA, 201 bp, Homo sapiens
gttgcagtgagccgaaatcatgccactgtactacagcctgtgcgacagagcaagacacaatctcaaaaaaaaaaaatatgtatatatatatatatatatatatatacacacatgtatctttgaaataccccttgcccagtcttgagttgtgcaagcactgattgtctttctgtcttcctttccgtctatgtcctgctaccc

SEQ ID NO: 305051 - DNA, 201 bp, Homo sapiens
ggatctactaccttcggacttacatcaatgaggccctcaaaggtacgacgggcccgcccttccccagcgtgcacctttccctgttggaaacatctgctatytgcaggagtgtgatacagcgtccttgggccacagtaagaagagaacgataaggcttcttgctcctgtgggggttaagctttgctttagggccgcactctg

SEQ ID NO: 305052 - DNA, 201 bp, Homo sapiens
ttcgccttccactccttcggggacctagttgggatctggttcaccttcagtgacttggaggaagtgatcaaggagcttccccaccaggaatcaagagcgtyacaactccagaccctcagtgatgcccacagaaaagcctatgagatttaccacgaaagctatgcttttcagggtgagtacacattgacctgatggtgaccc

SEQ ID NO: 305053 - DNA, 201 bp, Homo sapiens
cctgtaacatctgaggagagtttgattttaattttttaaaaacaagagaagttttggtctattggtttgacatttctgtaaatgcctcagaatgagtggtrtatgttctccaggttcataattaccttaaaaacaaaatcttgaagctgcagctcctgcttggtcaagtgtcagcttccctgcaggaagaagccacttgcc

SEQ ID NO: 305054 - DNA, 201 bp, Homo sapiens
ctagagtaaagtcatttggatgatttcttcaggtccataggaaatgaatcccccagtggtttccacagtcagagcctcctgccctcgctcacctgctgttygtgtctctggttggtttcaggcggaaaactctctgttgtcctgcgagctgaagatatcccggagctcctgctagaaccacccatatctgcgcttgcccag

SEQ ID NO: 305055 - DNA, 201 bp, Homo sapiens
tgacccaaatgcctcttaaaagtccataacctctcaataatgttacactggcaattaaatttcaacatgagtttttgtagggacaaaccacatccaaaccrtagcacacctggaccccatcccagcaatgggttggctccacagggcccctgaagtttatccatagataccatttaataatgcttatctgaactcaccttt

SEQ ID NO: 305056 - DNA, 201 bp, Homo sapiens
catgcattcaggatcacctgtacatgctgcacacaagtgtattagtcaggttctacaggagaggcttttcactcagagtgcctggaaaatgctccatctayaggttaagaagccaaagttcccaggctcacaagtaatctcagcactttgggaggctgaggcaggaggattgcttgagaccaggagttcaagaccagcctg

SEQ ID NO: 305057 - DNA, 201 bp, Homo sapiens
ttgctagggaagttgggaaagctggcagtcacaagcctcacctagctcccatgcagccagcaaggccagtctcactcctgctgtgccctgccaacagtgcrcagggcagagatctcaccccaggccacaagccttctctctgagaaagcaaacagggctttcaggccttgcccctccccacctgcccacactgttggctgt

SEQ ID NO: 305058 - DNA, 201 bp, Homo sapiens
catgcaccatcccttagggtgggacaaaagctggagacaataattgacttccagaccttcaactagagttctctttgtcactcacctctgatatttccagkgcagccctgttcagggtcattcagtgccaacacctctttgtacctttcctcttccagtacttgactgtcctgagccatatcctccttctattgttccatc

SEQ ID NO: 305059 - DNA, 201 bp, Homo sapiens
gggccaacacaggcttacattaaacggacagccaggggcccctactcaggaggatgtggttggagaacccgctgaatgcaggggcggtgggtggggagtgrttcagaaatgactaacgtagttttctccttcagaattctagaccttataggggagacagagcggcccctgaacaactctcacatgagaatgtggcaggag

SEQ ID NO: 305060 - DNA, 201 bp, Homo sapiens
ttttgaagcaaatcccagacatccatagatggtggcctcttaactaagcttcttaagtagcacaggctctggatgtgagcagtggccttgttcctgatccyaacaccgtgcctggctctaagaggtgccctgtaagcctgtgatgaaagaagaggtgaaggtgggggttggtggggagggtagactatgttattgaaaatt

SEQ ID NO: 305061 - DNA, 201 bp, Homo sapiens
tcttttggtagcttttagttgctcagaggaggaaaaagttactgtgagtaaaatgaccaaactccaagccccgcaaaaaaggtaatttaaagtgaagtcaracagcatgtcagccctgagacgttttccttgatactgaaatggctagaaataagaagaggaaattacatttgcttccattttaatgataacagctaatat

SEQ ID NO: 305062 - DNA, 201 bp, Homo sapiens
agagatgggctttcaccatgttggtcaggcttgtctcaaactcctgacctcaggtaatccacctgcctcggcctcccaaagtgctggaattacaggcttgrgccaccgcgccagcctttaactataatttttaaaagaaaaattaaaataatctgggaagtgaacagctttgggcccccttgggcagctgggcagtctgga

SEQ ID NO: 305063 - DNA, 201 bp, Homo sapiens
ctaaaatctttcagctagagtaaagtcatttggatgatttcttcaggtccataggaaatgaatcccccagtggtttccacagtcagagcctcctgccctcvctcacctgctgttcgtgtctctggttggtttcaggcggaaaactctctgttgtcctgcgagctgaagatatcccggagctcctgctagaaccacccatat

SEQ ID NO: 305064 - DNA, 201 bp, Homo sapiens
ttaaaataatctgggaagtgaacagctttgggcccccttgggcagctgggcagtctggaagccatgggaaccaccgccggtctccgtagttctgcagcatygccctggtgctgtagagatgttgtgctgctcattggcgtctgtgcgttgatgggggccccaggagtcagggtctggtcttcagattttccatttcaaaca

SEQ ID NO: 305065 - DNA, 201 bp, Homo sapiens
ctggcagaaaagtaagatcaacagatgatctgttggtctctcagggtgtatgtcacttttaggaccacaaccttgaattgaggagctggcagtgggttggstgcatggaggtcctgactcctggtgtcaagctctcctctgctccctttgggatgttcccagcctacaggctcgatggtatagaccttcgagggtatgtcg

SEQ ID NO: 305066 - DNA, 201 bp, Homo sapiens
gccctggtgctgtagagatgttgtgctgctcattggcgtctgtgcgttgatgggggccccaggagtcagggtctggtcttcagattttccatttcaaacaygatggaaccaagactgataaggttctggagggacaactcccaggctgattgcacggccagaatggcacctaaattagtttacagagggcgataactgcta

SEQ ID NO: 305067 - DNA, 201 bp, Homo sapiens
ataaggggagaaacaaaaaagcgtacttctgagaggctgttagtcttgacagtgcttaggttctaatgaccctatttaactactattttcaggacacggtsgatttcctctctcttgatttgtcttatgaatgccaaaatgaggcaagtctgcggcagaagctgagtaaattgcaggtaatttgagcccttttccacatta

SEQ ID NO: 305068 - DNA, 201 bp, Homo sapiens
ggggttggtggggagggtagactatgttattgaaaattgtagatctttctccttcagagtctagagttgactcctttaattaactgagatacttagaggtsatttccaaagccagagtaagtgccacagcttctcatcttgaaactctgtccctgttatcaagatgctttccaggaggcttcagttcacttgctggtcctt

SEQ ID NO: 305069 - DNA, 201 bp, Homo sapiens
gtggcctcttaactaagcttcttaagtagcacaggctctggatgtgagcagtggccttgttcctgatcctaacaccgtgcctggctctaagaggtgccctrtaagcctgtgatgaaagaagaggtgaaggtgggggttggtggggagggtagactatgttattgaaaattgtagatctttctccttcagagtctagagttg

SEQ ID NO: 305070 - DNA, 201 bp, Homo sapiens
aagaaaaaaatctttgagcctttttgtctcataagtcactctcaggatttgcagcagacgttgatgctggcacatctaacctagggcttcccatggaaagyatgactgatgcaacagctgatctggcttcttcccaggtgaccatttaccactgggacctaccacagacgctccaagatgtaggaggctgggagaatgaga

SEQ ID NO: 305071 - DNA, 201 bp, Homo sapiens
cagcatgtcttgttctctgactggcagcctggcccttcagcctgaccagcagcaggaccacgagaccacggactcctctcctgcctctgcctatcagagartctgggaagcatttgccaatcagtccagggcggaaagggatgccttcctgcaggatactttccctgaaggcttcctctggggtgcctccacaggagcctt

SEQ ID NO: 305072 - DNA, 201 bp, Homo sapiens; identical to SEQ ID NO: 63823

SEQ ID NO: 305073 - DNA, 201 bp, Homo sapiens
atcatggtggatggcagaatgagagcgtggtggatgccttcctggactatgcggccttctgcttctccacatttggggaccgtgtgaagctgtgggtgacyttccatgagccgtgggtgatgagctacgcaggctatggcaccggccagcaccctcccggcatctctgacccaggagtggcctcttttaaggtacttccca

SEQ ID NO: 305074 - DNA, 201 bp, Homo sapiens
agccaaagttcccaggctcacaagtaatctcagcactttgggaggctgaggcaggaggattgcttgagaccaggagttcaagaccagcctgggcaatatartgagactttgtctttacaaaaaatttaaaaattatctaggcatggtgacgcacacctatattcccaactacttgggaggctgaggtgagaggattgcttg

SEQ ID NO: 305075 - DNA, 201 bp, Homo sapiens; identical to SEQ ID NO: 63826

SEQ ID NO: 305076 - DNA, 201 bp, Homo sapiens
tctgtgcccatttcctcaatatgaagggtgaaacatcctccctggaaggagacagcatagacaggaaagccagctgttgctgcaagccagatgcctaactygacaacattctagggacagaggtttgaatctatggtggggttgtaaataatatcttactgagtgactcaagtgccaaagtttgcaaatgatatgctttaa

SEQ ID NO: 305077 - DNA, 201 bp, Homo sapiens
atgccttcctggactatgcggccttctgcttctccacatttggggaccgtgtgaagctgtgggtgaccttccatgagccgtgggtgatgagctacgcaggstatggcaccggccagcaccctcccggcatctctgacccaggagtggcctcttttaaggtacttcccaaccctgcagctcctactaattggaggagaaagg

SEQ ID NO: 305078 - DNA, 201 bp, Homo sapiens
ggggtgagaggtgtggtgtgaggaagcgcaggaagcggcagtcactgcccacgggaacatgcccaccgctccaaggctggcgggaatcaagtgtgaattcycaacatagtctttgagtcctgcccctagacgcccccatatagtccagctgaggattaaaaatccagctcccaggccgggtgcggtggctgacgcctgtaa

SEQ ID NO: 305079 - DNA, 201 bp, Homo sapiens
tgaaaatctctttgatgattccttaagagtagactacttcaatcaatatatcaatgaggtgctcaagggtaagaacaatggatgtgccagtgattggaagktgggtggtacttctccaagtcttcaaagtttcgtttaataagacaaagaaagtctcctagagaaatggagccaaagaaagcataatagtggggagtcctt

SEQ ID NO: 305080 - DNA, 201 bp, Homo sapiens
tgtaggaggctgggagaatgagaccatcgtgcagcggtttaaggagtatgcagatgtgctcttccagaggctgggagacaaggtgaagttttggatcacgytgaatgagccctttgtcattgcttaccagggctatggctacggaacagcagctccaggtaagtcccagccctggctcataggctctttgaatcatggcat

SEQ ID NO: 305081 - DNA, 201 bp, Homo sapiens
actcattagtgcccctaatttgccaactcaatgagtttaagaacagcatctttcagtcatggaatttcacccaaggaagtagagacattactaggaagccractgggcaaggtggctcacgcctgtaatcccagcactttgggaggctaaggcaggctgataacctgaggtcaggagttctagaccagcctggccaacatg

SEQ ID NO: 305082 - DNA, 201 bp, Homo sapiens
aatcgtgagaactgagaaattcaaactcaaatactcaatttgcaaattatttcccctgctactttgaagatcttgaagctattattattattattattatwattattattattagagttggagaaaagaggcatgcctaaacaaaccccaagaggagcagagaaacttggaaagggcagaaaacggaaatacaaattacac

SEQ ID NO: 305083 - DNA, 201 bp, Homo sapiens; identical to SEQ ID NO: 63815

SEQ ID NO: 305084 - DNA, 201 bp, Homo sapiens
gagaactgagaaattcaaactcaaatactcaatttgcaaattatttcccctgctactttgaagatcttgaagctattattattattattattattattatwattattagagttggagaaaagaggcatgcctaaacaaaccccaagaggagcagagaaacttggaaagggcagaaaacggaaatacaaattacacaagata

SEQ ID NO: 305085 - DNA, 201 bp, Homo sapiens; identical to SEQ ID NO: 63816

SEQ ID NO: 305086 - DNA, 201 bp, Homo sapiens
cacccgggttccagtgattcccctgcctcagcctccaagtagctgggattacaggcgcgtacctccacgcctggctaattttttttttttttttttgtatwttagcagagacggggtttcatcatgttggccagaatggtctcggctaattttgtgtttttagtagagacagggtttctccatgttggtcaggctggtctc

SEQ ID NO: 305087 - DNA, 201 bp, Homo sapiens
gaggctcatcgatacactgctggccgccagcatccagccccaggtatggtgggtcctggcaaggccttgggaaagtccacatgcaggaaccagcagggctsggggagcacatttatcatgtaaacaaaatgctggtttcaaatttagcttttgttgttattgttgtttttgagacgtagtctcgctctgtcacccaggctg

SEQ ID NO: 305088 - DNA, 201 bp, Homo sapiens
gcctggcactgccccctacattgttggccacaatctaataaaggctcatgctgaggcctggcatctgtacaacgatgtgtaccgcgccagtcaaggtggcrtgatttccatcaccatcagcagtgactgggctgaacccagagatccctctaaccaggaggatgtggaggcagccaggagatatgttcaggtctgtttttc

SEQ ID NO: 305089 - DNA, 201 bp, Homo sapiens
cacaaatgtaaatgacaattatccagtttcaattatacaggctgagaatccttcatctgaaaattcaaaatccaaaatactccaaaatctgaaactttttragcatgactggcatgacaacacaaatggaaaattcaacacctgaccccatgtgacaggtcgcagtcaaaacacagttaaagctttgtttcatgcacacaa

SEQ ID NO: 305090 - DNA, 201 bp, Homo sapiens
cagtttcccctactcactgccaagtgcctggggttcggagagctcccccgccccagccctatgacgttctcttctcaaagcatggctctccctgaagcccygccctcaatggcttcttccacccaggctgccagaatttacagagagtgagaagaggaggatcaacggcacctatgacttttttgggttcaatcactacac

SEQ ID NO: 305091 - DNA, 201 bp, Homo sapiens
gcttcctgcaccgcctgaaggacctcttctccttccctgccagtttcccctactcactgccaagtgcctggggttcggagagctcccccgccccagccctrtgacgttctcttctcaaagcatggctctccctgaagccctgccctcaatggcttcttccacccaggctgccagaatttacagagagtgagaagaggagga

SEQ ID NO: 305092 - DNA, 201 bp, Homo sapiens
cgcgcgcgcgcgcgtgggtgcgtgtgtgtgtggtccttcaggtttcagaggctcttgtagagacctagggaagccaggtttatggtctggcgggaggagcygcaggtgcttcctgcaccgcctgaaggacctcttctccttccctgccagtttcccctactcactgccaagtgcctggggttcggagagctcccccgcccc

SEQ ID NO: 305093 - DNA, 201 bp, Homo sapiens
tcaataaattggagtcattgttattattagctatgttttacaaataatgaattataagaagaataaagtatggtactaacactgaagacaatattcaaggkcaatctaatacagagaacagtagcattgttcctgttttaaccatgaaagagcaagaatcactcacctcagaaggggtaataataataattttcccatctg

SEQ ID NO: 305094 - DNA, 201 bp, Homo sapiens
cttggctgcaggcctcaacaagtctcggtaagggcctggtgcccgcagtggtgagggcatgggcgtcggggtcacagaggcatgtctcgggcaagttaccmtgactgagcttctttgcttgctgggaagttacatgtgatcatatatgtaaagcttagcccagcacctggcactgctatatgcttgacagaggggtttgct

SEQ ID NO: 305095 - DNA, 201 bp, Homo sapiens
ccagtacttgactgtcctgagccatatcctccttctattgttccatcctctcaatccacttcaaatcagcagttcagatcaacagacccgcagcagcagcygtacctcaggctttgtgtggcagtgtagacttgcaatagacagacatgggttaccactgcttcctgaccacacttggagtcagccaagaaggactggctg

SEQ ID NO: 305096 - DNA, 201 bp, Homo sapiens
cctggctaattttgtatttttagtagagacggggtttccccatgttggtcagtctggtctcgaacttctgacctcgtgatccacctgcctcggcctcccaragtgctgggattacaggcatgagccaccacacccagcccccgtttcttttagtctcagtttcctcctgtgtaggatgaggataaatcattgtagtaccca

SEQ ID NO: 305097 - DNA, 201 bp, Homo sapiens
agcggccactccccaacggcacacagctgtctgagggcctgagaacagcctcaagcccagaaatgaagagctgcggcacactccagggttctcggttctgyaggaggcacacgaggaggtcccccatccacttatcagaaaaagctgtgctcccagggagttctccgcttggcagaagacaggctgggggcctccgaggct

SEQ ID NO: 305098 - DNA, 201 bp, Homo sapiens
gggcaacccgctcggcctctcgagcttctgactccccatctgtaaagaaagtcacaggtggctatgagaaagtaaagactatgcctggctccttttaaagyggttactattggtatcttttggtagcttttagttgctcagaggaggaaaaagttactgtgagtaaaatgaccaaactccaagccccgcaaaaaaggtaat

SEQ ID NO: 305099 - DNA, 201 bp, Homo sapiens
atacaaaaattaaccaagtatagtggcacgaacctgtaatcccagctccttgggaggctgaggcacaacaatcgcttgaacccgggaggtggaggttgcartgagccgagatggcgccactgcactccagcccaggggacagagagagacttgtctcaaaaaaaaataaagaaaaagaaaaagaagtccaagggtttggaa

SEQ ID NO: 305100 - DNA, 201 bp, Homo sapiens
cataggaaatgaatcccccagtggtttccacagtcagagcctcctgccctcgctcacctgctgttcgtgtctctggttggtttcaggcggaaaactctctrttgtcctgcgagctgaagatatcccggagctcctgctagaaccacccatatctgcgcttgcccaggtgacagcagcccaaaaatatacctgtaacatctg

SEQ ID NO: 305101 - DNA, 201 bp, Homo sapiens
tttgcatcaggaaggaaaggcaagggtttctctctggattggttcccactttgggctccgtggaagagtctgccaactgtggcactataactctctcgggrgaaacaccatgggccttggtttgccaaactcttcacaagagaacttgacaaagatagtcaaattaataaatgcaacgaagggcttaattttctggtctgc

SEQ ID NO: 305102 - DNA, 201 bp, Homo sapiens
gtgtgtgtgcgcgcgcgcgcgcgtgggtgcgtgtgtgtgtggtccttcaggtttcagaggctcttgtagagacctagggaagccaggtttatggtctggckggaggagccgcaggtgcttcctgcaccgcctgaaggacctcttctccttccctgccagtttcccctactcactgccaagtgcctggggttcggagagctc

SEQ ID NO: 305103 - DNA, 201 bp, Homo sapiens
aacagacctcaatgacactgcaaggatctactaccttcggacttacatcaatgaggccctcaaaggtacgacgggcccgcccttccccagcgtgcaccttyccctgttggaaacatctgctatctgcaggagtgtgatacagcgtccttgggccacagtaagaagagaacgataaggcttcttgctcctgtgggggttaag

SEQ ID NO: 305104 - DNA, 201 bp, Homo sapiens
gagttcaagaccagcctggccaacatggtgaaatcctgtctctactaaaatacaaaaattagccagatatgttggtgggcgcctgtaatcccatctacttrggaggctgaggcaagagaatcacttcatcctgggaggcggaggttgtagtgagccgagattatgccactgcactccagcctgggcagcctgggtgacaaa

SEQ ID NO: 305105 - DNA, 201 bp, Homo sapiens
ttgctgtgcccacctgtaacgcctgggctgtctcccccaccctacccgcagttcatgggaggctggtttgcacatcctattttcaagaatggagattacartgaggtgatgaagacgcggatccgtgacaggagcttggctgcaggcctcaacaagtctcggtaagggcctggtgcccgcagtggtgagggcatgggcgtc

SEQ ID NO: 305106 - DNA, 201 bp, Homo sapiens
actaccaggtttctctcttaggcttggtcactgctgtgtgacttacttgcttcattccctggagtcccaactattctcctgtgacaaggtctatctgatgrtgcccacgttttctcctgcaccttccgagtgctggcagtattcctataaccctggagagctgccttcctgtgggcctttccaaggatgtctggccactgg

SEQ ID NO: 305107 - DNA, 201 bp, Homo sapiens
cacgtatccccgcacatgataaggatggcctaggcctcattagagaaaataggtcaaacggttccccactctggggctgtgaaagcccattaagagttatrctttgcccggaaagtcaggaaagccttgcatttcagccctccccagaaagttctgtttgctccttgggcactttgatgaggaagtgcagccgctcagtgg

SEQ ID NO: 305108 - DNA, 201 bp, Homo sapiens
gatttggggtaccgtgcagcctctgctggggtctcagagatctgagaactcaaatcagcgccagagcaccaaccaccctgtgtcacactctcctagatgcyggacccaccatcagccccgtgagacaggaggaggtgcagttcctggggctaatgctcggcaccacagaagcacagacagctttgtacgttctcttttctc

SEQ ID NO: 305109 - DNA, 201 bp, Homo sapiens
aagctgtgtgcaaggagaagttactcataatcaccaggaatccaggctcctttgttgttgctttgtcacctttaacaaggtttctacctcatggttcaggrtggatgcttgagctcctgccattatgtcagaaatccaagcagcatgaagaaaggaagcagtagccaggactgatattcaactggtccacatcagtgtact

SEQ ID NO: 305110 - DNA, 201 bp, Homo sapiens
agcttgttaaggtgaatatttacatagatcctctgcttgcttgtgtagaaatctgccgagaattgagattctggggttcattctgagttttaaaaaggcarctcatcaatgggggtgatggttccataacgataagcgtccacttaacaccactgaactatacatttaatggttatgatggtaatttttttttttgagatg

SEQ ID NO: 305111 - DNA, 201 bp, Homo sapiens
tcataggctctttgaatcatggcattcttagcacatcaagagttgaaatccagatggcacaggacgaggcaaccaagaaagccccatggcagaaaccctgyctcttgctcagggctgtagaggtttccctcctggcattgcattgttaaacatgaatttcacatctcaattcctcaaggtgggttcatttctttgctctgt

SEQ ID NO: 305112 - DNA, 201 bp, Homo sapiens
ccttcggggacctagttgggatctggttcaccttcagtgacttggaggaagtgatcaaggagcttccccaccaggaatcaagagcgtcacaactccagacyctcagtgatgcccacagaaaagcctatgagatttaccacgaaagctatgcttttcagggtgagtacacattgacctgatggtgacccctcggcaaccttc

SEQ ID NO: 305113 - DNA, 201 bp, Homo sapiens
acagcagagaccggctgagttgtgtctggggagatttccattgcaagcatccctagagaacatcggatgttaggcagtctttcctagaagggatacaaggkttagcttgttaaggtgaatatttacatagatcctctgcttgcttgtgtagaaatctgccgagaattgagattctggggttcattctgagttttaaaaagg

SEQ ID NO: 305114 - DNA, 201 bp, Homo sapiens
tgggttcaatcactacaccactgtcctcgcctacaacctcaactatgccactgccatctcttcttttgatgcagacaggtaagtccaccaacagggagccyggagccatctctggaaaaggcagaaaggtgcccttggctgtgctctctgaggcctgcccagcctcaaaacagggcctccaacgccgaatgtgccggggtt

SEQ ID NO: 305115 - DNA, 201 bp, Homo sapiens
tcccagcgggaagaaacagacctcaatgacactgcaaggatctactaccttcggacttacatcaatgaggccctcaaaggtacgacgggcccgcccttccmcagcgtgcacctttccctgttggaaacatctgctatctgcaggagtgtgatacagcgtccttgggccacagtaagaagagaacgataaggcttcttgctc

SEQ ID NO: 305116 - DNA, 201 bp, Homo sapiens
atgctggtggctctacatctccatccacagaggacccgctaacagtcactgcatgcaaagaaaggggcagctttctcacagagctaaagccaaagcttacygccatctgtgaaggcggtggggagagcagtaggcagacctggcttccgaaggcctggcaggaagctgccttatgagataggaaacttatgcctagtcctc

SEQ ID NO: 305117 - DNA, 201 bp, Homo sapiens
gacttgttgacattggtttggatttcttgacattgttgacttgttgacattgttagtatcagtcttaacttgttgtttatgttgttaacttgttaactttrttattgacttgttaacatcattgatgttagtgtcaacattgttatttgttgatgacttgatgttaacattagtgctgatgttgtcaatattgacaatgtc

SEQ ID NO: 305118 - DNA, 201 bp, Homo sapiens; identical to SEQ ID NO: 63822

SEQ ID NO: 305119 - DNA, 201 bp, Homo sapiens
ccgcccttccccagcgtgcacctttccctgttggaaacatctgctatctgcaggagtgtgatacagcgtccttgggccacagtaagaagagaacgataagscttcttgctcctgtgggggttaagctttgctttagggccgcactctgagtttttttccttcctatgtctaagctcagcaagcaagcccagtggcctgatg

SEQ ID NO: 305120 - DNA, 201 bp, Homo sapiens
tatattttgatacatgtatacaatgtgtgatgatgaaatcagaataattagtatattcatcacctcaaacattcatcatttctttgtgttgggaaaattcsgagtcctcttttctagctttttgcaaatatacactaaattcttttgtatcattattttttattcattttttatttttttgagacagagtctagctctgtt

SEQ ID NO: 305121 - DNA, 201 bp, Homo sapiens
cattgttatttgttgatgacttgatgttaacattagtgctgatgttgtcaatattgacaatgtcaatgttgttgttgtctttattgacttgttgacattgwtgttgacttgttattggttcattagtcctgttgttgtcattgttattattactaatcactgtatttccttcttactttttcacaaggtggctcacttggt

SEQ ID NO: 305122 - DNA, 201 bp, Homo sapiens
gattacaggcatgtgtcaccatgcccagctaatttttgtatttttagtagaaatggggtttcatcatgttggccaggctggtctcgaactcgtgacctcargtaatccgcccgcctcagcctcccaaagtgctgggattacagatgtgagccactgcacccagcctaaattattgttaactacattcactctacagtgcca

SEQ ID NO: 305123 - DNA, 201 bp, Homo sapiens
ggctgtggcttcacaaaagaaaactcaagaagccgtaataaaatgggttccctgaaaagccagtgattacaagtgacaccagctcggagattctctcagcrcttggtggtgctttgcctgaaggggagggccaacacaggcttacattaaacggacagccaggggcccctactcaggaggatgtggttggagaacccgctg

SEQ ID NO: 305124 - DNA, 201 bp, Homo sapiens
atcaccatcagcagtgactgggctgaacccagagatccctctaaccaggaggatgtggaggcagccaggagatatgttcaggtctgtttttcctctgggcrcttgttcttactcttgtccatctttccttccagcctaatggaaacagattgtgaatcaaagatttagggtgtggtggctcatgtctataatcccagcact

SEQ ID NO: 305125 - DNA, 201 bp, Homo sapiens
cccgcagtggtgagggcatgggcgtcggggtcacagaggcatgtctcgggcaagttaccatgactgagcttctttgcttgctgggaagttacatgtgatcrtatatgtaaagcttagcccagcacctggcactgctatatgcttgacagaggggtttgctattatggttattatattgtggaacagccaggaaatctgttc

SEQ ID NO: 305126 - DNA, 201 bp, Homo sapiens; identical to SEQ ID NO: 63836

SEQ ID NO: 305127 - DNA, 201 bp, Homo sapiens; identical to SEQ ID NO: 63837

SEQ ID NO: 305128 - DNA, 201 bp, Homo sapiens; identical to SEQ ID NO: 63838

SEQ ID NO: 305129 - DNA, 201 bp, Homo sapiens
tttgcctatggtctccagtagcattgcttagctaagttagaatctctggaatctggaagaagtgactgactcctagctggggtcttttgcagccagtaggyttcccagagggaatgagacttccttccctaacatggggcaaaaggtaggctctgggtccctatcaaggggatgcttctgacctataggcaaaccatttta

SEQ ID NO: 305130 - DNA, 201 bp, Homo sapiens; identical to SEQ ID NO: 63839

SEQ ID NO: 305131 - DNA, 201 bp, Homo sapiens; identical to SEQ ID NO: 63840

SEQ ID NO: 305132 - DNA, 201 bp, Homo sapiens
gcctgctgatgccaggctccttttcccgctgcctgtttccccgcttcgctctacagctgctgaagttcccgttgggcccatgtccccgttatgagcagctrcagaacgagacccggcagacaccagagtatcagaatgagagttctcggaatgcagtgagtgggggcagaggtgcagctcaccacgctgtcttttccccag

SEQ ID NO: 305133 - DNA, 201 bp, Homo sapiens
ccagagctcctttctgctgagtctcactttttgtgcctgagcttcctttcctgtgccctgaagcatccacaccgcctgccatgtctactggttccagcccmtctgcctctctcccctctccctccctcacacacacaggcaccttcccactagggaagagagctgccccctggagaggctggcctaggcctggggcgctaa

SEQ ID NO: 305134 - DNA, 201 bp, Homo sapiens
cagacctgacactggagaccgtctggaatgtctatgacacactcttctgtgaggtgagcccactagggtgcccactgtgatcattcttttccctctcagcmggcccaggtcaccaggacggtagaacacagtgcctgataccgtcacgcccctggggaggtccagggaggctgtgcttgtgaaacacgggaacttccctca

SEQ ID NO: 305135 - DNA, 201 bp, Homo sapiens
gcgctccctagcgtgctgtgtcaggcaaggagctggatttcttctctgttcggttcctgcgggtgtggggaacaatgctgacgggcagcccctctcccccrcagcacgacactaccctggttgccctgcaaatggcactggatgtctacaatggtgaacaagccccctacgcctcctgccacatatttgaactgtaccagg

SEQ ID NO: 305136 - DNA, 201 bp, Homo sapiens
tgtctacaatggtgaacaagccccctacgcctcctgccacatatttgaactgtaccaggaagattctgggtgagtggagctagcagtgtcctctggagggrggccctcgggaggtggctcggggcagcccaaggaccccatgatgggcaggctgagcagctcccatgttgcctcctgtcgaccctcaggaatttctcagtg

SEQ ID NO: 305137 - DNA, 201 bp, Homo sapiens
aatctaccgtcagctcttgcctgaccgaatgaaaagcttcctagttctttctggttctattcttgtccctaccagtctttcaacacagcagagttaacttyttttatttttttgagatggagttttgctcttgttgcccaggctggagtgcagtggcgcaatctcggctcactgcaacctccgcctcccgggtgtaagtga

SEQ ID NO: 305138 - DNA, 201 bp, Homo sapiens
gactgctttataccttctccccacttctcaccctcgggtgatgtctcacttgtatcaccgagaaaataagagccaagagagaattggctcgttctcccacyaccaggttacttcctgggggaagccaccgcttagggtggcctctccacccgcacttgggttctctcctcatctctgcaaggagctctgacgcctctgctt

SEQ ID NO: 305139 - DNA, 201 bp, Homo sapiens
cgatctcggctcattgcagcctccacctcccaggttcaagcgattctcccgcctcagcctcctaagtagctgggactacaagtgcctgccaccacgcccarctaatttttatatttttagtagagatggggtttcactatgttggccaggctggtctcaaactcctgacctctggtgatctgcccgcctcagccttccaaa

SEQ ID NO: 305140 - DNA, 201 bp, Homo sapiens
gtctacaatggtgaacaagccccctacgcctcctgccacatatttgaactgtaccaggaagattctgggtgagtggagctagcagtgtcctctggaggggrgccctcgggaggtggctcggggcagcccaaggaccccatgatgggcaggctgagcagctcccatgttgcctcctgtcgaccctcaggaatttctcagtgg

SEQ ID NO: 305141 - DNA, 201 bp, Homo sapiens
gtgaccaaaacttcccaccacacacacacacatacatacaaggctccacttcagggtgaccaaaacttccccaacacacacacacacacacacacacacamgacttgtgttgctatcgctgcaggtttatgtgcgaagcacagactttgaccggactctcatgagtgctgaggccaacctggctggactcttccctcccaa

SEQ ID NO: 305142 - DNA, 201 bp, Homo sapiens
gtgttgctcaggctggagtgcagtgacatggtcttggctcactgcaacctccacctcctaggttcaagcgattctcctgtctcagcctcccaagtagctgrgattacaggtgtgtgccaccatgcctggctaatttttgtatttttagtagagacaggatttcatcatgttggccaggctggtcttgaactcctgacctca

SEQ ID NO: 305143 - DNA, 201 bp, Homo sapiens
ttgttctcttaaggcccagctctgtcctgagcttgtccttccccagtttcctcctcccttttcatgagccactatctctgaataagctcttcaaaaaaaawttttttttttgagacagagtcttgctgtgttgctcaggctggagtgcagtgacatggtcttggctcactgcaacctccacctcctaggttcaagcgattc

SEQ ID NO: 305144 - DNA, 201 bp, Homo sapiens
ctggtgagtgtgcctgctccttgagtcttcgccccaccccaggaatgggggaagctgttcctctgattaccactgtcagcctcagccgtatcaagaatccmtagacattgttattgttctcttaaggcccagctctgtcctgagcttgtccttccccagtttcctcctcccttttcatgagccactatctctgaataagct

SEQ ID NO: 305145 - DNA, 201 bp, Homo sapiens; identical to SEQ ID NO: 63842

SEQ ID NO: 305146 - DNA, 201 bp, Homo sapiens
agccagcctttcctcaggatgagctgcagaatgagcgacgtctagagcagtctacaaaacttggggtcctactaaactgccttttcccatatgggtgctgrctttgaccagatttcataaccttaatctctgtgcccatgatattgctgtgcatgactggccacttaatgaaagacttctgggatcagattaattgactcc

SEQ ID NO: 305147 - DNA, 201 bp, Homo sapiens
atggtgaacaagccccctacgcctcctgccacatatttgaactgtaccaggaagattctgggtgagtggagctagcagtgtcctctggaggggggccctcrggaggtggctcggggcagcccaaggaccccatgatgggcaggctgagcagctcccatgttgcctcctgtcgaccctcaggaatttctcagtggagatgta

SEQ ID NO: 305148 - DNA, 201 bp, Homo sapiens; identical to SEQ ID NO: 63843

SEQ ID NO: 305149 - DNA, 201 bp, Homo sapiens
gggaactgggccaggccctgcggcagcgctatcacggcttcctaaacacctcttatcaccggcaagaggtaaggttgggagctccagaggcaaggggaacraggtatgctgccctcatcttttgccctcagggagcctaaggctgaggctgggcactttggcctccttcttgtatttttggtcacaactacaggaaaagac

SEQ ID NO: 305150 - DNA, 201 bp, Homo sapiens
ggtgagtctgccttgagacagggaagtggttgaatggttaagactcatccctaaagaagcctttggttatcttttttccccagttgtccccaccacatacrttgctttcacttctcttttcccttcctacctgtaccttggctttgcctatggtctccagtagcattgcttagctaagttagaatctctggaatctggaag

SEQ ID NO: 305151 - DNA, 201 bp, Homo sapiens
atgcatcaccatgcccagctgattttgtattttcagtagagatgaggtttctccatgttggtcaggctggtctcaaactcccaacctcaggtgatccgccygccttagtctcccaaattgctgggattacaggcatgagccaccgcggccgactgagttaacttttaaaaaatgtaaaccagttcatactactgtcctctc

SEQ ID NO: 305152 - DNA, 201 bp, Homo sapiens
tagattacaacggtgatggcgggcaagcggtccggctggagccgggcggctctcctccagctccttctcggcgtgaacctggtggtgatgccgcccacccrggcccggagtctgcgcttcgttaccttggtaatgagagatgggctcaccaaagacttccctgaagctaaaagggcaaaggccagctggtggaggtcgagg

SEQ ID NO: 305153 - DNA, 201 bp, Homo sapiens
gacactaccctggttgccctgcaaatggcactggatgtctacaatggtgaacaagccccctacgcctcctgccacatatttgaactgtaccaggaagattytgggtgagtggagctagcagtgtcctctggaggggggccctcgggaggtggctcggggcagcccaaggaccccatgatgggcaggctgagcagctcccat

SEQ ID NO: 305154 - DNA, 201 bp, Homo sapiens
caccgcctgccatgtctactggttccagcccctctgcctctctcccctctccctccctcacacacacaggcaccttcccactagggaagagagctgccccstggagaggctggcctaggcctggggcgctaacctgcctgctgcgatacacagcaaacgcacgggctgcgcctgccgccctgggcctcaccccaaaccatg

SEQ ID NO: 305155 - DNA, 201 bp, Homo sapiens; identical to SEQ ID NO: 63835

SEQ ID NO: 305156 - DNA, 201 bp, Homo sapiens
ctgtgcccatgatattgctgtgcatgactggccacttaatgaaagacttctgggatcagattaattgactccagcaaagcgtgaacctggaaagcaacagrgcctaaaccccatggggcttgaagccaccccttccctctagaccctcttaacccttgggtttgcccacaggaggggatgctacagcactgggaactgggc

SEQ ID NO: 305157 - DNA, 201 bp, Homo sapiens
tggttatttcagtttttgactaattatccaggttgggaatggcatagttatgaaaaaaaagttaataataaacagaaaactttgttttcttatcgttgttrtagcttttctttcttttttttgttgaaatcccgcaaacttaaagatctcctactgtctttaccacacaattacagtggaatatactattaaaatacttaa

SEQ ID NO: 305158 - DNA, 201 bp, Homo sapiens
gaatggtggcagtgcatgctttctttatattaataaggttgttataatttaggacagaaaagtaaaaactgggtcaaaaaaaaaacaggttaaatacatcrcattgccttacacgaagaaagagggcttagtaaaattttaaaaaaataagtgaatagctggtttactaaatgcttcagaggagatgttgctgcataacaa

SEQ ID NO: 305159 - DNA, 201 bp, Homo sapiens
tgcatattaactctgtatttgtttatgcttatgataaggcttaatagccttttgtgaatgagaagcctcttgaatttaagactttgtcagaaaagcaaagrtagtgttgtaagtcactctaatttgtttaaagtttggataagttattgtcatgtattgaattctaagtcttactttaggcttctttctgaataacaatat

SEQ ID NO: 305160 - DNA, 201 bp, Homo sapiens
tatgtaatgaatgaacctttttagattagatgggaagctctagaaattcaaggtacatatctgttttacctacagtatacttaatgcctatcataagtttmaaattaatatggatttgagctttgattaaaaactcagtattaattagctgccatctaacaatatttttttctagaaaatactgtctaacatatctcttga

SEQ ID NO: 305161 - DNA, 201 bp, Homo sapiens
aatgtttttactttgccatcatatactccttccatctttaacataataacccatagttacaagatttattagggtaggcgtgttttaggagcttaattccrttccacagttggaaacagatattaagaatccacagttcttaaaacattttcctcatgcttttttatacctttctaggatgatctttgcctaacagcattt

SEQ ID NO: 305162 - DNA, 201 bp, Homo sapiens
tttttcctaatctatacaaaatatgaatctgtccatttttcttacaatacaggatgatgaaaacaataactcgtcttcacaaagctatggtgtttcttgartatttcacaagtaattcttgggtttggaatactgagaatgtcaatatgttaatgaatcaactaaaccctgaagataaaaaggcaagcaagtattttctgt

SEQ ID NO: 305163 - DNA, 201 bp, Homo sapiens; identical to SEQ ID NO: 63850

SEQ ID NO: 305164 - DNA, 201 bp, Homo sapiens
gctggtcatagtagctcatgcctgtatcccaatactttggaggctgaggtggaagaatggctcgaggccaggagttcaagaccagcctgggcaatgtagcragacccatctccacaaaaataagaaaaaatcagacaggcatggtgacatgtgcctgtagtcctagctactcaggaggctgaggtgggaggatcagttgag

SEQ ID NO: 305165 - DNA, 201 bp, Homo sapiens; identical to SEQ ID NO: 63852

SEQ ID NO: 305166 - DNA, 201 bp, Homo sapiens; identical to SEQ ID NO: 63853

SEQ ID NO: 305167 - DNA, 201 bp, Homo sapiens
ttagccacttaggtgatatatagtggtataacaaaatgattttagtatacattacctagtacataaaatgtttatttaaaaatagtaaaaaaaaaaaaaaagtaatcctattggaaaatagattagagagatgaacagtttacagaaaatgattcccaagtatttgaaaagatactcagctttactcagtggaaatgcaga

SEQ ID NO: 305168 - DNA, 201 bp, Homo sapiens
gtcagagtctcagtctgaaggtcaatggagtagaaattggattgaggtaaaacacagttaggttaactagcctggcagagagatactagatgttactcacktgggtgcagaatggcttcaggtttgggctctcaggtacagatgcaaagggaaaaaggcaaggcatagaagtgttcctctcaaattatcccttattttcgg

SEQ ID NO: 305169 - DNA, 201 bp, Homo sapiens
atctctactaaaaatacaaaaattagctggacgtggtggtgggtgcctgtaatcccagctacttgggtggttgaggtaggagaattgcttgaacctgggargtggaggttgcagtgagccgagatcacaccactgcactccagcctggctgacagaacaagactccatctcaaaaaaaaaaagacaaagcagcattggata

SEQ ID NO: 305170 - DNA, 201 bp, Homo sapiens
cccgggaggtcaaggctgcagtgagatgtgatcacgtcattgcactccagcttgaacaatagagtgagagtctctcaaaaaaaaaaaaaaaaaaaaccccmaaaaaaaacttttttatttatattctgtcttacatttttgctgttgaaaagtcggtagttggctcttcctttataggtgatatgttattcctggctcgtc

SEQ ID NO: 305171 - DNA, 201 bp, Homo sapiens
ctccctcaattaaggaagaaaaaaaaatgcatccatgattttaagaactcaacccaattatttcattaaaaaaattatttctagtgtgttttcatagggtsttggatactattaaattaaaagagaaactatggcacaggactttttttctctcctggagttactccttgttcctggtgacccaaaacttgtcctgtcctc

SEQ ID NO: 305172 - DNA, 201 bp, Homo sapiens
ataagccttaatttttgaaaaaggaaaaaggaacccactgttattaggagcttgactacactaaataatttgtacactttgggtttgcattttggctctttttttgttgcttatagatttctttcaggtgaggttttcttttttgagataggttctcaccctgttgcataggctggactcaaactcttcgcctcatgcact

SEQ ID NO: 305173 - DNA, 201 bp, Homo sapiens
aataagccttaatttttgaaaaaggaaaaaggaacccactgttattaggagcttgactacactaaataatttgtacactttgggtttgcattttggctctttttttgttgcttatagatttctttcaggtgaggttttcttttttgagataggttctcaccctgttgcataggctggactcaaactcttcgcctcatgcac

SEQ ID NO: 305174 - DNA, 201 bp, Homo sapiens
aaaatgttgacttttaggcattctaaaactccagttcacaggcttttttacaaagcctgagtatattgtataaacctagcttcatctctttgaaaaccacytatacttgtttgcctaccctggtctcatttgctattcttctttttgtcacatagttccttgactgatcctgtctgctcgtgccttccccatctcccattt

SEQ ID NO: 305175 - DNA, 201 bp, Homo sapiens
caataagccttaatttttgaaaaaggaaaaaggaacccactgttattaggagcttgactacactaaataatttgtacactttgggtttgcattttggctctttttttgttgcttatagatttctttcaggtgaggttttcttttttgagataggttctcaccctgttgcataggctggactcaaactcttcgcctcatgca

SEQ ID NO: 305176 - DNA, 201 bp, Homo sapiens
tcaataagccttaatttttgaaaaaggaaaaaggaacccactgttattaggagcttgactacactaaataatttgtacactttgggtttgcattttggctctttttttgttgcttatagatttctttcaggtgaggttttcttttttgagataggttctcaccctgttgcataggctggactcaaactcttcgcctcatgc

SEQ ID NO: 305177 - DNA, 201 bp, Homo sapiens
gaaggctggtttagtaatccttgagcttctcatgagcattatttccctagctgtgttgggacatttatgaagagcagggcttagatagaatttagtgggtyttttttttgttttttacctcaggacatttgtaatctttgatatgctaatatacatctttaatctggttgggataaagcatatagtttcctagcaccattt

SEQ ID NO: 305178 - DNA, 201 bp, Homo sapiens
ccatacctccatccacttccttctttattttgaagcaaatccctagacttttttttttttttttaaccagttgttaccatgcagtgtgataagtataataatagacatgttaatccaagtgaggtgcaaatttgttcatataaatatattttgagacttgagcattatactgttctgggcacgagaaattagatatagtaa

SEQ ID NO: 305179 - DNA, 201 bp, Homo sapiens
tttaagagttactaacttgtggtcagtcttgcttcatccatacctccatccacttccttctttattttgaagcaaatccctagacttttttttttttttttaaccagttgttaccatgcagtgtgataagtataataatagacatgttaatccaagtgaggtgcaaatttgttcatataaatatattttgagacttgagca

SEQ ID NO: 305180 - DNA, 201 bp, Homo sapiens
agtaaacgttattctaactcctatcactaccggtaagttttgtagggaattattttggaggaagtggaaggtggaatgaatgggcccacagtcccctgggrctgggcgagacccgtggaggctccaggggtccgtagagctcttcgctctcaccgacccgggccacacccgccaagctggtagttctccgaacggatccct

SEQ ID NO: 305181 - DNA, 201 bp, Homo sapiens
aatgagccgggcatggtggcacacgcctgtaatctcagctgcttgggaggttgaggcagaagaatcacttgaacctgggacgtggaggttgcagtgagccmagatcatgccattgcactccagcctgggcgacaagagcgaaactccgtctcaaaaaaaaaaaaaaaaaaaagtgagaggagaagtgaagataataaatgg

SEQ ID NO: 305182 - DNA, 201 bp, Homo sapiens
cttcttcctacacattggttctatagttcctctcattaatgggtttgcaacaggcttagagtttcagttcagtaagacaaaatggaagtgctggatttagrtatagctgatcaacttaaacacttataaattcaccattgttttcggttcccaatttgaagagtggagacagaagtcaagaaaataagcttttcttattca

SEQ ID NO: 305183 - DNA, 201 bp, Homo sapiens
attcccaataagacgtgtccaactgtccagatagtggtgacattttcagcttgatatggtaacatggttgtgatcttgacatagcataagtatgtgtgccrtctcatgtgcaattctttatagacccagtctggttcttctccagtgtttccttttggagttgtacctgattttattaccagttttcatctaaatccactg

SEQ ID NO: 305184 - DNA, 201 bp, Homo sapiens
attttctgtggagcagatttttgtccattgtatgcagttagtaaaagctgaggccttgtagtggagactgctgttgtttcctcctgtcgtgagtcatacarctttagaactgggtaggacctttcagatcatctattttaaccccttcactttctctgaacttctcttctagcgctgtgcactcaattctcattcatgatg

SEQ ID NO: 305185 - DNA, 201 bp, Homo sapiens
ttaggggaattagacttcttatatagcagctgatggcttcaagggggaagtcttttagcaagtaaggtggaggctgcgttgccttttctgagctacccatrgaagtcatgcagcatcacttttgcctcattcttctagttacaagtgagtcacaaatcttcttaaattttttttcatatgttcataattttattttggtgc

SEQ ID NO: 305186 - DNA, 201 bp, Homo sapiens
ttttgcctcattcttctagttacaagtgagtcacaaatcttcttaaattttttttcatatgttcataattttattttggtgcctgacatagcacatttttwaaaaatacttcaagttctagggtacgtgtgcacaacgtgcagatttgttacatatgtatacttgtgccatgttggtgtgctgcacccattaacttgtcat

SEQ ID NO: 305187 - DNA, 201 bp, Homo sapiens
cttgaatactatgtaggacttagattggatatgtttggcctcttattatgattaattggtttcatctttgtctttgcagaccaagaaacatcatggtgtayaattgtacaacaggcagcactaatcctttccactggggtgaagttggtatgattttacctgtgtttttgaatgttagaataaatcttaaagaaccaagtt

SEQ ID NO: 305188 - DNA, 201 bp, Homo sapiens
ccagatgatcaagagtggtgccaatcattgttaaagaaaagttgttttgtttttttaaatgaatagagttgactatgtggcaaacgaatatttctgtattstttgcttcagcagtgctgaagagttggaattataaatataacacagtatgttattaattcacaggaaatcttagcaaatgcagctgtgaattaaaatgta

SEQ ID NO: 305189 - DNA, 201 bp, Homo sapiens
aaagttcaattggtctgttctgtattggatagatgtacaaagaagaacactcttgaacttgtctttaagaagccctcttactagtaggagaggcaagcttytaaactttgtattatggaaaattgacagcaataatacacacatcaccaactttaagagttactaacttgtggtcagtcttgcttcatccatacctccatc

SEQ ID NO: 305190 - DNA, 201 bp, Homo sapiens
ttgagcccgggaggtcaaggctgcagtgagatgtgatcacgtcattgcactccagcttgaacaatagagtgagagtctctcaaaaaaaaaaaaaaaaaaaaccccaaaaaaaaacttttttatttatattctgtcttacatttttgctgttgaaaagtcggtagttggctcttcctttataggtgatatgttattcctggc

SEQ ID NO: 305191 - DNA, 201 bp, Homo sapiens
cacagttctctatttaaaccccatgttgagatactcttttgttcatttagtttttatttagatttctccctctctctctctctctatatatatatatatatataaaatatgtatatatgtataccaatatctgtgctttcagattttctccttatgatcttctttctgcctgaaatatattcagcatacctagaatatgtt

SEQ ID NO: 305192 - DNA, 201 bp, Homo sapiens
catcacacccggcacagttctctatttaaaccccatgttgagatactcttttgttcatttagtttttatttagatttctccctctctctctctctctatayatatatatatatataaaatatgtatatatgtataccaatatctgtgctttcagattttctccttatgatcttctttctgcctgaaatatattcagcatac

SEQ ID NO: 305193 - DNA, 201 bp, Homo sapiens
ccatcacacccggcacagttctctatttaaaccccatgttgagatactcttttgttcatttagtttttatttagatttctccctctctctctctctctatmtatatatatatatataaaatatgtatatatgtataccaatatctgtgctttcagattttctccttatgatcttctttctgcctgaaatatattcagcata

SEQ ID NO: 305194 - DNA, 201 bp, Homo sapiens
cagcatatgcctactgtaatcgcaagcatattgatgaagtagtctatccaccacctgtggatcccaagaagctgattgattctttagagtatgtttgtttraaatttatatacatttactttgatcccaaaagaggccaaggcgggcggatcatgaggtcaggagttcaagagcagccaggccaacatagtgaaaccccat

SEQ ID NO: 305195 - DNA, 201 bp, Homo sapiens
agccatcacacccggcacagttctctatttaaaccccatgttgagatactcttttgttcatttagtttttatttagatttctccctctctctctctctctmtatatatatatatatataaaatatgtatatatgtataccaatatctgtgctttcagattttctccttatgatcttctttctgcctgaaatatattcagca

SEQ ID NO: 305196 - DNA, 201 bp, Homo sapiens
gaaactctgtctcaaaaaaacaaaaaacaaaaaaaaaacctttggattcaagtccctccctcttctcctcaccccaccccatatacatgtgcgcgcgcgcrcgcacacacacacacacacacacacacacacatacatttatctcttttcttcaaaaatttttgcatatcccctgcattcttattgtatagattaatatct

SEQ ID NO: 305197 - DNA, 201 bp, Homo sapiens
aaagaaatctagctaacataattttaagataactcatgggtttgttctgtaaactcgttctagtaataaggcttactagctaaagtttctcctgagtttargcaggtttttttttcctcatgtatcaactatccctttcatttttcaaatctcatctccatggtggaatttttcctaagttgggtagcaatttcccttcaa

SEQ ID NO: 305198 - DNA, 201 bp, Homo sapiens
gcagatgtaaattcatgaatggtggcagtgcatgctttctttatattaataaggttgttataatttaggacagaaaagtaaaaactgggtcaaaaaaaaaacaggttaaatacatcacattgccttacacgaagaaagagggcttagtaaaattttaaaaaaataagtgaatagctggtttactaaatgcttcagaggaga

SEQ ID NO: 305199 - DNA, 201 bp, Homo sapiens
aatagcaagtgctcccatcagtagtaatgaagaattaatgttaatgctcatgtattacttacaggatagacaagttcacttaaaaatgaaaaaaaaaaaaataccctcccctaagcatgattttttaatccaaactaaaacttgttgaatatataaagagctgaaattcacagaatatggtttacatatattaaacatggt

SEQ ID NO: 305200 - DNA, 201 bp, Homo sapiens
atttctgtaattcctggtactttgtcctagtttccttcaaatcatttgtgtcagtttgtagtatcaacaacagtgtattactttgccatttttgtcactartattgagtatttaaatcttttcgtttgtttgtttttatttttttaattgacaaaggtatatatatttttcatttacaacatgttttgaaatatgtatata

SEQ ID NO: 305201 - DNA, 201 bp, Homo sapiens
aagttaagactctaaatgtccactattcttaaaaaaatctaatgagtatgcatttcaaataatggttctgaattcagagcattctttttgacagtgtgtcwaaaaatacagtttttataatgttaatctaattgtatagtctcatgccaattaaaatggtgtagacttggtataggtttcaaagctacttgaaatgtaaaa

SEQ ID NO: 305202 - DNA, 201 bp, Homo sapiens
tggatagatgtacaaagaagaacactcttgaacttgtctttaagaagccctcttactagtaggagaggcaagcttctaaactttgtattatggaaaattgmcagcaataatacacacatcaccaactttaagagttactaacttgtggtcagtcttgcttcatccatacctccatccacttccttctttattttgaagcaa

SEQ ID NO: 305203 - DNA, 201 bp, Homo sapiens
gatactatttgcctatgttaactgtggctttcagtgtcctacagagtgttaaaagaattctcttcttcttctcagtttaaaaatcttggataactaatacrtgtttattggaagaagttgccatgaatttaaacatgcaacagggaagaggcaaaaagtggagtagaagaaaacttagtcttaacaactaatagtgtttgt

SEQ ID NO: 305204 - DNA, 201 bp, Homo sapiens
gtagagactcttaagtgggaactgacattattttagaatgaaagtagaacttaaacaagtggcgatagagagaaagaacattcagggataaggtgagggtratcacatggataaagcgtgcggttaggaaatctaattttggcgctatagaataagttatatctaaatctgtatctctctatctttatcttttagactact

SEQ ID NO: 305205 - DNA, 201 bp, Homo sapiens
ggctccgcgtgctcgcgggagggtagcggcaaagggaggcctagtgattgcaggattccgggtctggggaggaagaaagtggtgggaaataggtgatgctyagaaaagggtgctgagggagaaggcgcggggccggggagtgtggttggcctattagaagtaaggattgatagggcctgggtggagatcagctgggagtga

SEQ ID NO: 305206 - DNA, 201 bp, Homo sapiens
ttggtattagggatggattgataactttaatggaccaagtggtctctttattgcggtaagtaaaccttttgatttatttaatattctatacatttttctgytttttgtatatctttaaatatatatacactatggcttatatatcttaaggtgttgtttttaatttcaacaaaggcagggaaaggaattcttcgaacaata

SEQ ID NO: 305207 - DNA, 201 bp, Homo sapiens
tattatggaaaattgacagcaataatacacacatcaccaactttaagagttactaacttgtggtcagtcttgcttcatccatacctccatccacttccttytttattttgaagcaaatccctagacttttttttttttttttaaccagttgttaccatgcagtgtgataagtataataatagacatgttaatccaagtgag

SEQ ID NO: 305208 - DNA, 201 bp, Homo sapiens
gggtgttaaaaagtacttttttagtcattccttaggttccttttcctctgcttgccccataaggattgatattcttcaagtttcaggcttaggccttgttwtctcactaggtccagtgagatggttactcagccttcctctgttttatgtgagatgaatggatgtcctttaaattagatttggatttagtttcatatagtt

SEQ ID NO: 305209 - DNA, 201 bp, Homo sapiens
tttaacttgagtcaaaagataaggtgtgttttgaacaaaatagctagctacgactgctaggtgctatttcctaaagcagctcaagaacagtgaaaataaaygtaaattacctttcacagtcctgtcgtccccttccccaagtgtgtgggaatgctaatgctgcagcttttctcatattgcagtggtgcagctacttttcaa

SEQ ID NO: 305210 - DNA, 201 bp, Homo sapiens
aacttaaagtataataataataaaattaaaaaaatttgaaaataaatatcaaaatgcacaataagaaaataaaatgagtctcttgttggcagcaaaaaaawatatatatttagtgcttgtgaagtttttggtggcattatgctaagttgtgggaattgtttttttttccctaggaggaaaattgtgtaagtcattatagta

SEQ ID NO: 305211 - DNA, 201 bp, Homo sapiens
actctgtctcaaaaaaacaaaaaacaaaaaaaaaacctttggattcaagtccctccctcttctcctcaccccaccccatatacatgtgcgcgcgcgcgcgsacacacacacacacacacacacacacacatacatttatctcttttcttcaaaaatttttgcatatcccctgcattcttattgtatagattaatatctaaa

SEQ ID NO: 305212 - DNA, 201 bp, Homo sapiens
gtatatgttttggtgaggcagaaagctggacagacaccacaagagcgagtggaagaagtccttagtggcaaggtaagtatggaaaatgagcactcagaacraagaaaaaagcgtgtgcttgtgtatataattattgtagtcgtcaatagcttggtatatttcttcagtattctgaaaaaattagtaaaacaaaaaaactta

SEQ ID NO: 305213 - DNA, 201 bp, Homo sapiens
aactctgtctcaaaaaaacaaaaaacaaaaaaaaaacctttggattcaagtccctccctcttctcctcaccccaccccatatacatgtgcgcgcgcgcgcrcacacacacacacacacacacacacacacatacatttatctcttttcttcaaaaatttttgcatatcccctgcattcttattgtatagattaatatctaa

SEQ ID NO: 305214 - DNA, 201 bp, Homo sapiens
gtgccatgcttatggaacagcatcattatatgaaacagttgtatagtggcctaagaactaatgaacgtctttagattccttactaccgagaagtgccttgkggggaagtattggggaaaataggatatagacagttaaatattggtaaatcagtgcttgtgtaggcaaacaaagtggccattatatctacttcaatgggta

SEQ ID NO: 305215 - DNA, 201 bp, Homo sapiens
aacctgggacgtggaggttgcagtgagccaagatcatgccattgcactccagcctgggcgacaagagcgaaactccgtctcaaaaaaaaaaaaaaaaaaaagtgagaggagaagtgaagataataaatggagtaacttaagtagttcatcatgggatctggcataagggaaggtactagctggtataagggaaggtactag

SEQ ID NO: 305216 - DNA, 201 bp, Homo sapiens
gcttaatagccttttgtgaatgagaagcctcttgaatttaagactttgtcagaaaagcaaaggtagtgttgtaagtcactctaatttgtttaaagtttggrtaagttattgtcatgtattgaattctaagtcttactttaggcttctttctgaataacaatatttaaattgctttgacgcttatttttcctacaggatatt

SEQ ID NO: 305217 - DNA, 201 bp, Homo sapiens
tgatcgtcccacctcagcctccctagtagctggtactagaggcatatgccaacacacctgtctaatttttgtgttttttgtagagacagggtttcactaasagttactctttataactacttgttaagttaacctacaaataaaaaatggcatgaagcttttactgttggggggaagttttcagatgttactacaacatta

SEQ ID NO: 305218 - DNA, 201 bp, Homo sapiens
tggtgtagacttggtataggtttcaaagctacttgaaatgtaaaatgttgtctttaaaatgttttaaagataaataactaaaaggaggatattgaatgctctaacaaagaaatgataagtgtttaagatgatagatgtgccagtcaccctgatttaattactatacattgtacgcatcaaaacaccgctatgtatctcata

SEQ ID NO: 305219 - DNA, 201 bp, Homo sapiens
atggtgtagacttggtataggtttcaaagctacttgaaatgtaaaatgttgtctttaaaatgttttaaagataaataactaaaaggaggatattgaatgctctaacaaagaaatgataagtgtttaagatgatagatgtgccagtcaccctgatttaattactatacattgtacgcatcaaaacaccgctatgtatctcat

SEQ ID NO: 305220 - DNA, 201 bp, Homo sapiens
gtatgaaagaatgatggtgaatccttaaactaatgcttatttgccatgtttttcttaggatcaaaatggtttcaatcccagaatactatgaaggcaagaaygtcctcctcacaggagctaccggttttctagggaaggtgcttctggaaaagttgctgaggtcttgtcctaaggtgaattcagtatatgttttggtgaggc

SEQ ID NO: 305221 - DNA, 201 bp, Homo sapiens
aatggtgtagacttggtataggtttcaaagctacttgaaatgtaaaatgttgtctttaaaatgttttaaagataaataactaaaaggaggatattgaatgctctaacaaagaaatgataagtgtttaagatgatagatgtgccagtcaccctgatttaattactatacattgtacgcatcaaaacaccgctatgtatctca

SEQ ID NO: 305222 - DNA, 201 bp, Homo sapiens
agcctcttgaatttaagactttgtcagaaaagcaaaggtagtgttgtaagtcactctaatttgtttaaagtttggataagttattgtcatgtattgaattmtaagtcttactttaggcttctttctgaataacaatatttaaattgctttgacgcttatttttcctacaggatattatgtaagtcattccttcaagatgaa

SEQ ID NO: 305223 - DNA, 201 bp, Homo sapiens
gatgcttcattgataacttttctgcatatatacttttgcttttgtggaattatttacttcaagtaaattccaagaagggaatatatagattattttggggwcttgcatatgccttgtaacagatgtaccagttttattataatatccctttgaattttgtagggtagccttagaaaagtgtttggattgattgctacaaag

SEQ ID NO: 305224 - DNA, 201 bp, Homo sapiens
tcttattagtgatattaggggctctctttttcagggaatcaatcttagcaaccaagaagtaccaatggagacccatgactgcctgtttaatagcaaggctstaatttatcaaaggattcccctcaccaccccccagccatggagtatatatatagaggggcctttaattattagagaatcagaggaatcatagtcttttaa

SEQ ID NO: 305225 - DNA, 201 bp, Homo sapiens
ttagtggggacaagcattcaactgaaatgagctaatactcaggaaaatgtgggtaggctagtctgaacttggggtaggagagaaatagtcttatttcagtycctacttggtaagagccaccttggtaggtgtgttcctatcttggaaatgactggattgtcactgatggaaactgaaactgtatgtactgaaaggtggtat

SEQ ID NO: 305226 - DNA, 201 bp, Homo sapiens
ataagcttttcttattcaaagaatgattcccaaaccaataggatttgccctaggatcagtacagacttattacagtctcctaaacagagaggaaagagttscgtaaattcatctagcttttagtttaatttcacttagcccatagggattctgagaggaaacgatattaatgtgattcctatttcatctaggcactgtagc

SEQ ID NO: 305227 - DNA, 201 bp, Homo sapiens
gtccagtgagatggttactcagccttcctctgttttatgtgagatgaatggatgtcctttaaattagatttggatttagtttcatatagttaggatcttgkgtccttattattgctgttacctggataaactcttttctactcccagggcttcagttactacctgtatgtggttagtaaaatctatgttgatagtccagct

SEQ ID NO: 305228 - DNA, 201 bp, Homo sapiens
gttgagcttttttttctttttaaatttttctttgaagtgatttccatgtcttcatttagtgaaggattctaattacaaagactttctcattttgtaccccyctcccaaaagcctgtcttaccgaagatacatttatgactccatataaccaaaacaatgagaacattatttttgtttagtactaaatgacttctgatataa

SEQ ID NO: 305229 - DNA, 201 bp, Homo sapiens
gattgaggtaaaacacagttaggttaactagcctggcagagagatactagatgttactcacgtgggtgcagaatggcttcaggtttgggctctcaggtacrgatgcaaagggaaaaaggcaaggcatagaagtgttcctctcaaattatcccttattttcggtgacctagaaactctgtcaccatcctcagggacatgtaa

SEQ ID NO: 305230 - DNA, 201 bp, Homo sapiens
taattctgtatatcagcagaactctgtttaggtggtattaaatgcatttgctgctgctttcaaaaaaaatttgttttccttttggatttataaattgttcmtccaagatgcagaaatagtcttattccctgctgatttggtacacttaatgattaaatgttataattttaatactaatgtctatattatagggggaaactt

SEQ ID NO: 305231 - DNA, 201 bp, Homo sapiens
ctgtttaggctttggtagggcagatgtcttgataactgaaggaagtacatcattctgggttttttttagggttgaactcatcccaggctctaatttctcarttgttagagggaaaactgcttaatatctttccctgtcttacatgcatatgtacacctatggaaaactttctggtgcctggtacctagtaggcccttaata

SEQ ID NO: 305232 - DNA, 201 bp, Homo sapiens
gatctggcctctccttcaataaatttaaagagtgatcagagaggttgacttgcctaaggtctgttggttatggcaatcccaacagcgttgtttctcattayctgatttttggtaagtctattgtgcttatttattttgtttgtcttttcattctggatctcagtatttggagaaggaagtatattaactttagcatggtaa

SEQ ID NO: 305233 - DNA, 201 bp, Homo sapiens
tagtaggttactctagagattacaatgtcctttaatttagcaaggtctaatataaattgatacttttatccttctctgatagtgaaggatcagcatgtatmtgttattgttgttattaggttggtgcaaaagtaattgtggttttggccataatgcatgttttaattctatatatatattaagccacacaagccagtattt

SEQ ID NO: 305234 - DNA, 201 bp, Homo sapiens
gcattgtaatggaagggctatgagctttggaattacatacattagttctaatcttgaccatatcattcatttactggtgagtttgtataagttattaacckccttaagcctcagcttcctgatttataaaattgaagtaacatttctcaaaagattatttttttttccttcaggaaatttaagtgatgtctcagtttgact

SEQ ID NO: 305235 - DNA, 201 bp, Homo sapiens
attcattagtgtgaaatggtcagtaaagtcgattttttcccccatagttctggcttttattatttccttcatagacaaaagaaagagttcacatagctttrtgaagcttagcatgttttcatgaaaaacatacgtagatattggctaatggtagtatagtcttcattgacttaacgaggaaagttatatgctttgaaaggt

SEQ ID NO: 305236 - DNA, 201 bp, Homo sapiens
aaatggtgtagacttggtataggtttcaaagctacttgaaatgtaaaatgttgtctttaaaatgttttaaagataaataactaaaaggaggatattgaatgctctaacaaagaaatgataagtgtttaagatgatagatgtgccagtcaccctgatttaattactatacattgtacgcatcaaaacaccgctatgtatctc

SEQ ID NO: 305237 - DNA, 201 bp, Homo sapiens
ttttagtcaatttgttttgaatgtgatttgatactatttgcctatgttaactgtggctttcagtgtcctacagagtgttaaaagaattctcttcttcttcycagtttaaaaatcttggataactaatacatgtttattggaagaagttgccatgaatttaaacatgcaacagggaagaggcaaaaagtggagtagaagaaa

SEQ ID NO: 305238 - DNA, 201 bp, Homo sapiens
gcactcagaacaaagaaaaaagcgtgtgcttgtgtatataattattgtagtcgtcaatagcttggtatatttcttcagtattctgaaaaaattagtaaaamaaaaaaacttagtaagttcctacaggatggcaagaaactggatatgacttgtgaatcacaaggagaaaaagttttcctctgtgactggcaaaattgtata

SEQ ID NO: 305239 - DNA, 201 bp, Homo sapiens
tgcacccttattctgagggtcagtgtagtgggatcacataggggttttaacttgataactaatgaagttgagccccttttcatgtgctgtcatttcgatcyttttttttttttttttttttgagttagagtcttgctctgtcggccaggctggagtgcagtggcacggtcttggctcactgcaacctccgtatcccgggct

SEQ ID NO: 305240 - DNA, 201 bp, Homo sapiens
cttaaagtataataataataaaattaaaaaaatttgaaaataaatatcaaaatgcacaataagaaaataaaatgagtctcttgttggcagcaaaaaaaaawatatatttagtgcttgtgaagtttttggtggcattatgctaagttgtgggaattgtttttttttccctaggaggaaaattgtgtaagtcattatagtagt

SEQ ID NO: 305241 - DNA, 201 bp, Homo sapiens
gacttttctccctcttgttttggctgcctctggaaatggccctcagggaaatcctggtaaagtctaattgcctttagattttaactacctgattttttttkttttgttttttgaaatgcaagatctcacatatttattattgaacccagccaactggcaccttcatagcacatacagagagaaaaaatatattcccaataa

SEQ ID NO: 305242 - DNA, 201 bp, Homo sapiens
ttagagtcccgttaattatttgtttcatacataagtaaccatctaatgtttttaatacattttccatctaataaagaaatggaatgaatttaagtaataaagattagtaaaagaaggaaaacataggttgagcatcacattaaaaatttttagactatttctgaaatattacagatcagactgacagctgaaggaccatac

SEQ ID NO: 305243 - DNA, 201 bp, Homo sapiens
taatgggctttccttttagaaatacagatttttaaaaatatatatcttgaaaaaggctataggtcatgtcatccttttgcattcagcctctggcatatctrtatttctgaagcctggcattaatgtgttgttttgttcatgaagatattattgtatcaaacaagcatttgttggccattttacagtgtgtcagtaacaata

SEQ ID NO: 305244 - DNA, 201 bp, Homo sapiens
agattggatatgtttggcctcttattatgattaattggtttcatctttgtctttgcagaccaagaaacatcatggtgtataattgtacaacaggcagcacyaatcctttccactggggtgaagttggtatgattttacctgtgtttttgaatgttagaataaatcttaaagaaccaagttccctgaagttttaatgttaga

SEQ ID NO: 305245 - DNA, 201 bp, Homo sapiens
tgacatgtgggctatttgtgccacttggctatcgtgagcagtgctgctatagattgagtatccctaatccaaaaaatctgaaattcagaatgctccaaaaktcaaaacttttgaccgggtgtggtggctcatgccagtaatcctagcactttgggaggccaaagtgggtggatcacttgaggtcaggagttcaagaccagc

SEQ ID NO: 305246 - DNA, 201 bp, Homo sapiens
tgtatgcattgctaaacaatacagagcattgttttgaatgtgttagagctttttgtagtgacataatacatgaattcttctgcaccttgtttttatttttyctttcattatggttgttttcttaatatgtcttttctgctgttttagaggaatttgggtagagaagataagtcagctcatgtatttcttactctaactttt

SEQ ID NO: 305247 - DNA, 201 bp, Homo sapiens
tagcctggcagagagatactagatgttactcacgtgggtgcagaatggcttcaggtttgggctctcaggtacagatgcaaagggaaaaaggcaaggcatasaagtgttcctctcaaattatcccttattttcggtgacctagaaactctgtcaccatcctcagggacatgtaacagaatatcctttgtgtacttttcccaa

SEQ ID NO: 305248 - DNA, 201 bp, Homo sapiens
tgggtgtcagtcagtctaaagcccagataccatgataccctgggctatcagataccctgggctaagatttttgcctgagctgtttgaccaaaatatcatcyaagaaaataatttccataatatgttttctagaacagtaattgtacattggttacaggggtgggtcagggagaggcatacaattactagtttgttgagaga

SEQ ID NO: 305249 - DNA, 201 bp, Homo sapiens; identical to SEQ ID NO: 63868

SEQ ID NO: 305250 - DNA, 201 bp, Homo sapiens
gtagggacagtagatggattgctgtgtttgggagaaaataacctcactctgtcttgtacctttgccagatagagagtgttttttgtgatatcacttaaagyagataggcaacacgctccataggttataaattattttattatttaattatattttcttagaaattatcgtaaaattttatgtattaatatcttaagatac

SEQ ID NO: 305251 - DNA, 201 bp, Homo sapiens
tagttcaggtaagtttcagctggccagctgaactgtttcctagttgcctacacatagggaacactgcttgtttctttctgtgatgatcattgcataagtgkttttagagtctttagagattggttaccggctgcagggaaagaaactattattgcatgtttttttgctcagtgtcacttagtccgatagcaacactagtaa

SEQ ID NO: 305252 - DNA, 201 bp, Homo sapiens
tggatattattcattctaagccgagatctgtttccttttaaacatatttccataatgtcttttaaaaattatgaacatttgaaagtcagcatctactctgycctgtcttcttactgatttctaggtcgggtattcaatggatcgggaaaacccattgacagaggtcctgttgtactggccgaagacttccttgatatcatg

SEQ ID NO: 305253 - DNA, 201 bp, Homo sapiens
ttcttactgatttctaggtcgggtattcaatggatcgggaaaacccattgacagaggtcctgttgtactggccgaagacttccttgatatcatgggtaggkacagtagatggattgctgtgtttgggagaaaataacctcactctgtcttgtacctttgccagatagagagtgttttttgtgatatcacttaaagtagata

SEQ ID NO: 305254 - DNA, 201 bp, Homo sapiens
tagcttggctttcatcagaaataaatgttaaggatttttcttctcccagcactgatgaagttattgttatttaggtaaacatggaaactgcccggttcttyaaatctgactttgaagaaaatggctcaatggacaatgtctgcctctttttgaacttggctaatgacccaacgtaagtaacagagctatttctttctgtgg

SEQ ID NO: 305255 - DNA, 201 bp, Homo sapiens
tgaacttggctaatgacccaacgtaagtaacagagctatttctttctgtggcccagactcgggatcaaaagtgtgtcttaaggttggggaggtaaaatgtsgtaataacagcatttggacctaacaatgaggtaaccctgtatttaaagtccagccctgcttcttggtagttatctggcactgggcaaattacttaggttc

SEQ ID NO: 305256 - DNA, 201 bp, Homo sapiens
cggtagagccttcgctgacgtggtcaggcctttcgtggatggaggtcaggccagtagccagagggagatgtggcttggtgtttggtggaggggctgctccrcagaaggacacctagatatcagagaacgctagagctgaaaagtaccttgcaggtcatccagtccaaccctatcattttacaggtgagaagcctaaggttc

SEQ ID NO: 305257 - DNA, 201 bp, Homo sapiens
tgccaaattgccctgaaagtttctaaatgcttatcttgctttctgtgtgatcattgcatgttgataacagttggtctgcagaccgtgctgtgaggagcacygctgtagcacgctcctttgaagatgtcagagtagcacttagaagttggatttcataatgctttagggttctagttgattgtaggtgaacatgcacaccta

SEQ ID NO: 305258 - DNA, 201 bp, Homo sapiens
ggtcatgtgatagcactgcagtgtgaagaaaaaggaaaacatttgattcggtggattgctgagatgtgccttttacagtaactgggaattgttcgaattasaaaatgtatgttgggacttatctgagctgaagtagctacttcaggaaatcggcagatgttgcattcttatgcaaaccttggcaataaatttatacctacg

SEQ ID NO: 305259 - DNA, 201 bp, Homo sapiens
tagggttctagttgattgtaggtgaacatgcacacctatagtctggtatccatgtctctaagggaaagatcgtttatcaccattcttattttgtgcagtgsaatggactcctgactttgtgaccttcagaaattgtttaatttttctgacccttgattccaactgttaattggaggtagcaccttcctcatagggttgctg

SEQ ID NO: 305260 - DNA, 201 bp, Homo sapiens
atgttgcattcttatgcaaaccttggcaataaatttatacctacgaattacaaattctcttttattaattgcgtttgtatgcattgcctttctttgggtaraacagatagacattagtggtgcctctcaaaaaaggttataaaggtgcagtagtcagtttccatataattaatcattcagtgtcaattcagagaatatcaa

SEQ ID NO: 305261 - DNA, 201 bp, Homo sapiens
acactgttctaaatgtaaagaatttttgaaaagaatttatggtctctacttaatgtaagttactcagtctaattggggatgttttttatgtgtgtgcaccrgtaatttaacatggccatgttcagtgccacatgaggagtacaagtgggaaactccacaaaactgagagacagatttttttaaccaagggctggttaaaaa

SEQ ID NO: 305262 - DNA, 201 bp, Homo sapiens
tagaaacacataggtctgtttatttaatctgttgtggtttgtcttcatagtattttccttgattagaattttccagcaaataaagagagatacacattatstggaaaaaaatcagtcactggcatgagattttcttacccctttcttctctatttttcttccccaataatcatttgtaataaaagaataagagtttgcctt

SEQ ID NO: 305263 - DNA, 201 bp, Homo sapiens
aagtatctgggactacagacggacaccactacgtccagctaattttttttaatttttattttttatttttggtagagatgggatttccccatgttgcccargctggtctacaactcctgagctcaagagatccgcccgccatggcctctcaaagtgctgggattacaggtgtgagctgctgtgcccagcctaaagcttcac

SEQ ID NO: 305264 - DNA, 201 bp, Homo sapiens
agcttgcagacctgctcatccgttattctttagtgacttggattttgctcttaggaattgctttgcttagaaagtatcaacttgaattgtttttaatatgrttataaaattgtcatttctattatcttaaattctggtgtcggcagagcgccagaattaagaatcttcttaacactttcctttattgtgtcttaaaacaga

SEQ ID NO: 305265 - DNA, 201 bp, Homo sapiens
tattttttatttttggtagagatgggatttccccatgttgcccaggctggtctacaactcctgagctcaagagatccgcccgccatggcctctcaaagtgctgggattacaggtgtgagctgctgtgcccagcctaaagcttcacactgaacctttagaagtcagagatcctttttgtgtccccactgcctagcacagtgc

SEQ ID NO: 305266 - DNA, 201 bp, Homo sapiens
tcatgccgatgtatctaaccagctagtatgtacattcttctaagaatggtgtttgaaaatatggatacgtttctgctgtcttacacctcttgtctttcacscttaccacttctctcttccccatccacatggaattttagtgtaggcttgatgtggaatacataatcattcattagaaccaaagcagccttttcccataag

SEQ ID NO: 305267 - DNA, 201 bp, Homo sapiens
tcaatggtccactagtgatcttagatcatgttaaggtaataccactatctgttttggtctatttatgtagttaaaaatgtggcattaagtcctatttagtrtactttaaatttttgttatgatttttaagccatactttagactgggtgtcagtcagtctaaagcccagataccatgataccctgggctatcagataccct

SEQ ID NO: 305268 - DNA, 201 bp, Homo sapiens; identical to SEQ ID NO: 63870

SEQ ID NO: 305269 - DNA, 201 bp, Homo sapiens
cttctggtgaaggtgggacggtgtcaggaggcagtctactcacagatgggcatctctggtcgttggaataatcttcctaaaccaagaaacttgcctccctctaacttcacggaggggtatccttgggctgtcccctacggctctcccaggtgtttaccctctaccattctgaagatagttggccacttctaagtcttcagt

SEQ ID NO: 305270 - DNA, 201 bp, Homo sapiens
tatatttatatttatgtatgtgtatatatataaacatgcttagcttgcttatcaaatttggcctgtaggcatgaacccttgatctaaaggttgacaatttratttattatcatatttctttgctcattatatcaaaagtagtatacattcatgggttttacattataagggctgtttaacagacaaataaaatgtaaatgc

SEQ ID NO: 305271 - DNA, 201 bp, Homo sapiens
gcatttcggccatcgatgggatgaacagtattgctagggggcagaaaattcctatcttctctgctgctgggctaccacacaatgaggtgaggactgggatyggtttgctatgaagtttagcagacaagaatttctataatgcatcactgttactgagaaaccgaataaagggttttcaaaataaatactcagtgttattgt

SEQ ID NO: 305272 - DNA, 201 bp, Homo sapiens
gctaccacacaatgaggtgaggactgggatcggtttgctatgaagtttagcagacaagaatttctataatgcatcactgttactgagaaaccgaataaagsgttttcaaaataaatactcagtgttattgtttgtataatccagttacctcacatctttatttctgcacatgtcttcttgcttacccttgcatatctttgc

SEQ ID NO: 305273 - DNA, 201 bp, Homo sapiens
ggaaaagactcaattctccccaattaacacaatcagggaagagtaattaaaaatgaggatttggttcagtaataagcagatataacagtggaacaaaattyagggccctgaaatcaactcttcacacatgagaattcgacttggtaaatcaacattacaaggccatgggggacactgtgctgctcagaatattgttagggc

SEQ ID NO: 305274 - DNA, 201 bp, Homo sapiens
tcgggacagaggagacaagatggcgctgcgggcgatgcgggggattgtcaacggggccgcacccgagctacccgtgcccaccggtgggccggcggtgggakctcgggagcaggcgctggcagtcagtcggaactacctctcccagcctcgcctcagtgagtatcagagagtaatacgtctccggtctttgctccctagcct

SEQ ID NO: 305275 - DNA, 201 bp, Homo sapiens
ttaatttttgtaaattgattgtaattttttgtgaattgattgatgttatcatttaaggggacatgtaattatagttattgtgtgtgtgtgtgtgtgtgtgtgttgagacagggtctcactctgttgcctaggctggagtgcagtggtgtgagctcaggtcactgcaacctccacatctcaggctcaagcgatcctcccacc

SEQ ID NO: 305276 - DNA, 201 bp, Homo sapiens
aaaataatgatgcatctttcaataaattatgttgataaaataagtattaacatgccaaatgtcatgttaatatcaggtcaagtgaaaaacaaattgcggartgattagtacgttgccatttatgtaaatcaccaaacttcattttttggagacatgtctttttaaagagtaaaaatggattagaggaatatatatcttgtt

SEQ ID NO: 305277 - DNA, 201 bp, Homo sapiens
cttaatttttgtaaattgattgtaattttttgtgaattgattgatgttatcatttaaggggacatgtaattatagttattgtgtgtgtgtgtgtgtgtgtgtgttgagacagggtctcactctgttgcctaggctggagtgcagtggtgtgagctcaggtcactgcaacctccacatctcaggctcaagcgatcctcccac

SEQ ID NO: 305278 - DNA, 201 bp, Homo sapiens
tcttaatttttgtaaattgattgtaattttttgtgaattgattgatgttatcatttaaggggacatgtaattatagttattgtgtgtgtgtgtgtgtgtgkgtgttgagacagggtctcactctgttgcctaggctggagtgcagtggtgtgagctcaggtcactgcaacctccacatctcaggctcaagcgatcctccca

SEQ ID NO: 305279 - DNA, 201 bp, Homo sapiens
ttttgccatattttttattctactcaaaagttttaattgcttctgagtaaatattgattaacctcttaatttttgtgggttttttttttttttttttttttgagatggagtctcgctctgtcacccaggctggagtgcagagtggcgcgatctaggctcgctgcaacctccgccttccagattcgagcaattctcctgcgt

SEQ ID NO: 305280 - DNA, 201 bp, Homo sapiens
ttcctacctgcctgccccaccccagtgttgagaaaccatacaactgagaaatttgggacatttataaataactgttaataccttacttaagaatttgtaawataacaactgctttactctcctcaattcatttaaaactttaaaaggggaattgtactgttatttccagaatcatttctttttgtgttttctttttggtct

SEQ ID NO: 305281 - DNA, 201 bp, Homo sapiens
ctttgtttgctagtatatgtgacagtgatgtttgctgtaaggacttaaactacctgagggtattgaaagctctcagcaaaaacctgtgtctgtgaagagtrgagggttccatattcagacacaacatgggagagacagagcatgtgtagtaatttggggggcttgtaaaatgtcggatattgatcctttatttttttctct

SEQ ID NO: 305282 - DNA, 201 bp, Homo sapiens
ctctgtaaatgattttttcctcctacctcaaaaatctggctttcatttgtttcctctctctctccttcctacctgcctgccccaccccagtgttgagaaascatacaactgagaaatttgggacatttataaataactgttaataccttacttaagaatttgtaaaataacaactgctttactctcctcaattcatttaaa

SEQ ID NO: 305283 - DNA, 201 bp, Homo sapiens
tttgaccccctggcctttctttccattgcctactccgtccttcagaagctcttttccctagtttttatgacaccatttaattgtggctttttaccttgcasgctatacaatttctccaatttcctttgtgacttttgtcacttctgcgtaacattaaggattccctttcctcatctacttagctaaatgctgcgtcctcta

SEQ ID NO: 305284 - DNA, 201 bp, Homo sapiens
ttgttttctatattctttgtgaaataaacttttggactcatttttaaaatataaattttttaaatattagtaagtatattattgaaacagctcaaaaaatrtttgggctcaattgtgttaagtgctgagcccagtacagaaaatataatggtggacaacgagaacggggtctcccctagttgagcatagtatagtggagat

SEQ ID NO: 305285 - DNA, 201 bp, Homo sapiens
agtttcattgaatgttacattgggttgtagttataggtgagggaagactggtaaatcatttttatgtagttgtagaaaaatctatttagactatgagattkatagtgatttgattttagattttggcttttgtttttaacataaaacatataggatcaaggaacagataatctcaggcaaattatatcagaatagaagaag

SEQ ID NO: 305286 - DNA, 201 bp, Homo sapiens
cctatttagtaacattttattcttcccctgtcaaccacatctggagcacacagttgattacacacacagcctagaaagcaatcatcatttctaggtggtgrgaacatgtttatctgtacttttctgtagcctcaaaactataaaatatgcatgcagaggaaaagcaatacatttaattcccatgttttcatggatttaaga

SEQ ID NO: 305287 - DNA, 201 bp, Homo sapiens
ataggtctgtttatttaatctgttgtggtttgtcttcatagtattttccttgattagaattttccagcaaataaagagagatacacattatctggaaaaawatcagtcactggcatgagattttcttacccctttcttctctatttttcttccccaataatcatttgtaataaaagaataagagtttgcctttctatctaa

SEQ ID NO: 305288 - DNA, 201 bp, Homo sapiens
gggacagtagatggattgctgtgtttgggagaaaataacctcactctgtcttgtacctttgccagatagagagtgttttttgtgatatcacttaaagtagwtaggcaacacgctccataggttataaattattttattatttaattatattttcttagaaattatcgtaaaattttatgtattaatatcttaagatactgt

SEQ ID NO: 305289 - DNA, 201 bp, Homo sapiens
tcaagtttcatatttgaaaaataactgattttttttgtagtaaagagatgctttatgtagttctggtcttctggtgctttttcttttcttttaatttgatrtgatatctaatttcattcatgaataatgcggcaacttgttgaaattttcctttttggaaatacattaggtcagccaatcaaccctcaatgtcgaatctac

SEQ ID NO: 305290 - DNA, 201 bp, Homo sapiens
ggtcttctggtgctttttcttttcttttaatttgatatgatatctaatttcattcatgaataatgcggcaacttgttgaaattttcctttttggaaatacrttaggtcagccaatcaaccctcaatgtcgaatctacccagaggaaatgattcagactggcatttcggccatcgatgggatgaacagtattgctagggggc

SEQ ID NO: 305291 - DNA, 201 bp, Homo sapiens; identical to SEQ ID NO: 63871

SEQ ID NO: 305292 - DNA, 201 bp, Homo sapiens
ctgcacaacagacaggtactggacgggagcagtgctgggaagcttgcagacctgctcatccgttattctttagtgacttggattttgctcttaggaattgstttgcttagaaagtatcaacttgaattgtttttaatatggttataaaattgtcatttctattatcttaaattctggtgtcggcagagcgccagaattaag

SEQ ID NO: 305293 - DNA, 201 bp, Homo sapiens
gagcagtacattcctatatcccagatgactgaacattttgagagcttctctctgctgatgggtgcctttcttctctttagtatgcgtgctatgctattggraaggatgtgcaagccatgaaagctgtcgttggagaagaagcccttacctcagatgatcttctctacttggaatttctgcagaagtttgagaggaacttca

SEQ ID NO: 305294 - DNA, 201 bp, Homo sapiens
tggtagttatctggcactgggcaaattacttaggttctgaagctcataagatgtgacagctgatacttgtctcatggagttgttttgcatattaaatgagwtcatacttataaattacctaatacacaatcaactctctgtaaatgattttttcctcctacctcaaaaatctggctttcatttgtttcctctctctctcct

SEQ ID NO: 305295 - DNA, 201 bp, Homo sapiens
caggtactggacgggagcagtgctgggaagcttgcagacctgctcatccgttattctttagtgacttggattttgctcttaggaattgctttgcttagaargtatcaacttgaattgtttttaatatggttataaaattgtcatttctattatcttaaattctggtgtcggcagagcgccagaattaagaatcttcttaac

SEQ ID NO: 305296 - DNA, 201 bp, Homo sapiens
tcttactaccttttcttgccaggaagagacagtaggattcatctaggagacaaatgcagcggttgtctttgatttaagttgtaataatgagtttcaaatgkttttttattaccagtaaaacttgagttttgtacttaaatatagtattttttccctctcattctacccaagatttatccacctatcaatgtgctgccctca

SEQ ID NO: 305297 - DNA, 201 bp, Homo sapiens
tacttcgtttttgtcaacttggtagaagtgattagaggttaagatttaaatggttagcctgtttatcatactgtcactatctccatggattaagaaatgaytgtaaaagggagtaaataattcaagctgtttattcagttactctctcgggaagttctgtttctgtccagactattaatttttaaacctttttgtaattcc

SEQ ID NO: 305298 - DNA, 201 bp, Homo sapiens
aatgcaataaaattgagttattagaaaagtgaaattttaactatatatataatttacaaatgcagattttagaattgttagattcaacaggcataaaattrttctgccaaattgccctgaaagtttctaaatgcttatcttgctttctgtgtgatcattgcatgttgataacagttggtctgcagaccgtgctgtgaggag

SEQ ID NO: 305299 - DNA, 201 bp, Homo sapiens
tatctgctgtagtacacgaatatgccttggctgtttgcttgagctttttctatcccgtgctcttcgtgctcttcatgttctttggaagtaagtatcttggyatgctgtgagtactgggtactatgctaaaaaagaaaaccagatagaaaggaaactataaaatcaatgtaggagaactagatagtagtagtaacattttaa

SEQ ID NO: 305300 - DNA, 201 bp, Homo sapiens
gatttgtcagatttttactttgccaagctgtgatagttgaaaaacaaccaaacccaccatgtactatatttcatccttttatacagaaaaggatattttartacaaaaattaagaaaaactgtagtctcagaatttaaatatatatagctttaaaataatgtaatgagtatttcacagttgttttcttcttgctttagact

SEQ ID NO: 305301 - DNA, 201 bp, Homo sapiens
ggctggtctcgaactgctgacctcaagtgatccacccacctcagcctcccaaagtgctgggattacaggcatgagccaccacgcctggctgcttatagatwttttttttgtcatgcttagaaatcatccaagattatgacaaaaagaaaacatgactttttttttttttttacttttgtggtgttttatattgaaatattt

SEQ ID NO: 305302 - DNA, 201 bp, Homo sapiens
gaattcaggtccctcccataatcctaatcttgtggcctttctttagtcttacaaaggtggtttcagttcccaacaaggaagggggtcaattttggggaggsactatttacatcaaagttgaactatgaatttctcccagagttagattggcctctgctcaggaatgagcaaggatggccagcctgtgaggctagaagcatg

SEQ ID NO: 305303 - DNA, 201 bp, Homo sapiens
cctctcttactgaaacatcttggttccttttgtgtctttctttttcttccctgatttcctctactttgaggctgtccctcaaagtttagttttcagttctyacttctctcatcatttctgatgaagagatagatgctcttgtggcttcctctgtcacttttacacagaattggaccattgtaagttgggcatcgtcttgtg

SEQ ID NO: 305304 - DNA, 201 bp, Homo sapiens
atgcacgagtgtaagaatctctagtctattttgaataattttgtgaaagtcagtttattgtgctttatgatttcatcacttacaaaaggtagacaggtacmtgtcctgttgccctcgaatgtttagcagttcaatttaatgaatgcctgcttggtttctttgtctatcaggtactacattaagtgctgggattttaaagaa

SEQ ID NO: 305305 - DNA, 201 bp, Homo sapiens
gacaatgtaacatgtgacaggatgctcagtgtagtgggaccgcagagaggatgagatgagaggtggtggtaaaggaaacttcagagggtgagttggaggcrgtttagcgattagagggcaggttgtagaatctgatagtctttgttttgaattctagttctgctgttggagaattatttgatttgggacaagttaaatcac

SEQ ID NO: 305306 - DNA, 201 bp, Homo sapiens
gttccaatacctacagtcaaccagtatttgtacttcttatttgctcctacccttatctaccgtgacagctatcccaggtaatggtactgtgaaccagaaaygtggtaaacaccaaaagtgtggcatgagtgaggtgggataggtaaacaggggccagttcatgtagggacatagaaaatatagaatgagttttcattttct

SEQ ID NO: 305307 - DNA, 201 bp, Homo sapiens
ccttcgcctcctgggttcaagtgattttcctgcctcagcctcctgagtagatgggattacaggtgcttgccaccacgccgggctaaatgttttttgggtakttttagcctagtgtaccttaaatatgctccaaacacttaatattagcctacagttgggcaaaattattgaacacagactattttacaataaagtgttcat

SEQ ID NO: 305308 - DNA, 201 bp, Homo sapiens
cagattaataatctggtgtcagttaagcacctttgatctaaatgtaagatagggtaccaggtttgttaatagggagcttgaagttggtgtgcataagatacccaaatagaaaaaatcctttgttataaataggagctaagtgagttatagtaaccaaatagagaccgatggggttgggggagcccttgctttagaatggag

SEQ ID NO: 305309 - DNA, 201 bp, Homo sapiens
tgaaagtcagtttattgtgctttatgatttcatcacttacaaaaggtagacaggtacctgtcctgttgccctcgaatgtttagcagttcaatttaatgaaygcctgcttggtttctttgtctatcaggtactacattaagtgctgggattttaaagaagttgtgttttctgttctcatgctaactgagaacactatatgca

SEQ ID NO: 305310 - DNA, 201 bp, Homo sapiens
agtgctgtccactcttctgtcccagttcctgaggtagcttttataatctcctgttgtatatcaactgagaattataatctacatgaaatcctctaatattmctaccagaaattatctcttgatttaaaacaagataatatgatgttgtaacaatttagtggtaataaggcagattatcttcttgcatatacaggcagccta

SEQ ID NO: 305311 - DNA, 201 bp, Homo sapiens
aatcaaattgaaagggaaaacacctgtacaacctggccaatcagacagcctcacatatctttttcttcatagtatcttttaactaggatattcctcttctaaaaaaaaaaaaaacaaagtcttggctgggcacagtggctcacacctgtaatcccagcactttgggaggctgaggtgggcggatcacttgaggccaggagt

SEQ ID NO: 305312 - DNA, 201 bp, Homo sapiens; identical to SEQ ID NO: 63877

SEQ ID NO: 305313 - DNA, 201 bp, Homo sapiens
tgcatacctataatcctagctacttgggaggctaaggcaagagaattgcttgaacctgggaggtggaggttgcggtgagctagtatcatgccgttgccctctagcctgggcaataagagtgaaactccgtctcaaaaaaaaaaaaaaaagtttcaaggaagaactcattttttgtcaagtggtgaaagcagctagctgaat

SEQ ID NO: 305314 - DNA, 201 bp, Homo sapiens
atctgaatctagaagtagattccctgtcaaggaagtagaaataacaactcgaaaaaaaatcatgaaatcatttcaagtggggataaatagttctacaaacmagaattcttcagtaccctcaggaaattgtggagggcgaagaacacttttttaaaaaaacattataatccaatacctgggtgtaagttgacttaaaatcca

SEQ ID NO: 305315 - DNA, 201 bp, Homo sapiens
catacctataatcctagctacttgggaggctaaggcaagagaattgcttgaacctgggaggtggaggttgcggtgagctagtatcatgccgttgccctctagcctgggcaataagagtgaaactccgtctcaaaaaaaaaaaaaaaagtttcaaggaagaactcattttttgtcaagtggtgaaagcagctagctgaataa

SEQ ID NO: 305316 - DNA, 201 bp, Homo sapiens
tggtggcagacacttgtagttccagctactcaggaggctgagataggaggatcgcttgagccagggaggttgaggctgcagtggagctgtgtttgtgccaytgcactccagcctggatgcaaaggagaccagatctcaaaataaaattttaaaactcaaattgtagcttaaaaaatgacagcgtggtaatcatggattgaa

SEQ ID NO: 305317 - DNA, 201 bp, Homo sapiens
tgccaaaacagacggctggtcagaaatgattgtatacctgggttgcgtgggatatctgctgctgccacttgtaatcctcatcatgacaatgttgggtaagrcatttcaaacatagatacagttacagtagttgaaggaatgtcagatgacatgactgttgtagatgcaacttcatcaagatggtaaactaaatagacatct

SEQ ID NO: 305318 - DNA, 201 bp, Homo sapiens
aagtatatcatctctggaatgggtaaactggaataataacttatattttacaaaataatcccagctaaataaaatgatgtgatataattagttgcttggtrtgtgagctatttggaaagactgttaatattgttaatcttatttttaggtgtgctgattctcttccttactttttttgcctttttgcactgctggctcaat

SEQ ID NO: 305319 - DNA, 201 bp, Homo sapiens
tgacagagtgagatcctgtctcaaaaaaagcccccaaaactctacccatattttattaaaagggcagagatcaattaatcccactgcttttaaaattatartggtaccatgattcagtgtgaaaataagaaactgtctctaaatctgtgacaataataaagctcagtatgcaccatacatacacaggagttatacagagca

SEQ ID NO: 305320 - DNA, 201 bp, Homo sapiens
atttatcctgcttggaattctttgactttatcctagaatttgtgtctctcaacagttctggccaattctcagctataatcacctcaaatattatctctctrtatagagctctgattagatgcattttgtaccttctcattcttcatgtcttttttccaagtgacatactgtgaaaagaaatgtccaatagaagattaaatt

SEQ ID NO: 305321 - DNA, 201 bp, Homo sapiens
ttgagtagctgggattacaggcatgtgccaccacgccagctaattttgtatttttagtagacagggcttctccatgttggtcaggctggtctcaaactgcygacctcaggtgatccacctgccttggcttcccacagtgctgggattacaggcgtgagccaccacgcctggcactaagtagattatttatcctgcttggaa

SEQ ID NO: 305322 - DNA, 201 bp, Homo sapiens
tatatgacctagccttcttcccagtcatcaattctgccattatcgataattgaagacattccactgtctcctggcttccattgatgttaagtcaggtatgygttgtaattgcagtacttgcgtagttgatattctttctgggtgcttttagtttttttttttaacccctgcgtcagacagtttcactgtgatatatctaag

SEQ ID NO: 305323 - DNA, 201 bp, Homo sapiens
attagtttaaaggattattggctggatatttcaccctttgttgttttctgggatgtcacattatataatgtagagattgtgttttatttcaaatatatatkatccatattgattttgaggaccacttcattgtttcctgactattccggctttgcccttgaacctacaattttaaaaaattgattatcttttgcaactttg

SEQ ID NO: 305324 - DNA, 201 bp, Homo sapiens; identical to SEQ ID NO: 63875

SEQ ID NO: 305325 - DNA, 201 bp, Homo sapiens; identical to SEQ ID NO: 63876

SEQ ID NO: 305326 - DNA, 201 bp, Homo sapiens; identical to SEQ ID NO: 63879

SEQ ID NO: 305327 - DNA, 201 bp, Homo sapiens
tcaggaggctgagataggaggatcgcttgagccagggaggttgaggctgcagtggagctgtgtttgtgccactgcactccagcctggatgcaaaggagacyagatctcaaaataaaattttaaaactcaaattgtagcttaaaaaatgacagcgtggtaatcatggattgaattatgtactttttttgaaaattaaatttg

SEQ ID NO: 305328 - DNA, 201 bp, Homo sapiens
aagtagagacagacagatttccttctgttttggtttctttcttatacactgaggatgtagccttatgtgtggtccctagttttacgtggcagtatcctgtyagacttcccattttgggcaggccctagactttgccattctgtaaagtattgtcctctgtgtactattctgcaaaaatactgtaccctgtgttgcttcaag

SEQ ID NO: 305329 - DNA, 201 bp, Homo sapiens
gaattctgtacggccttgattgatactgtaatcttccagggaggaattgcacttatgtctgccagtagcctggagacccgacttgggttagctttagaacrtatttatctcatatttttcagaccacatagatagtgtgaatttagattgcaaacactagtgagggggttatgatttcttggggcaaattttccctctctg

SEQ ID NO: 305330 - DNA, 201 bp, Homo sapiens
gttacaggcttgagccaccatgcttggccttttgccactatttcttattttcctcctgtctttccgaccataccttgatttcttaaatatatttattgcatttttttgtctattatagagatatatgagtacctagtactatgccaggtgcagaggactcagaagtgaacaagagatgtattatctttacagtctgggagc

SEQ ID NO: 305331 - DNA, 201 bp, Homo sapiens
gtgagaccttgtctctacaaaacacttaaaaaaaaattagctgggtgtggtggcacacatctatggtcccagctagcggggcggctgatgcaggaggatcrcttgagatcaagtgttagaggctgcagtgagctgtgattgtgccactgcagtccaacctagatgacagagtgagatcctgtctcaaaaaaagcccccaaa

SEQ ID NO: 305332 - DNA, 201 bp, Homo sapiens
ttgttttaatttttcctcttctcagggatttgagagcacctccagaacaaggaaagatttttattgcaaggcgctctctcttagagtgagtatttttagtwgtttttaaatatgtttgatttttaaaaaactattctgatagaatcattgcttagtatatggacatgtaatgagttctgtatctgtataaatcattagtgg

SEQ ID NO: 305333 - DNA, 201 bp, Homo sapiens
tacgctttggtgacaggatgttctataaggtagtatatacttagacttagctttctttttacattttattaacttcttcattattagtattttgacattgytggctaatgtcaccagcctttcacacaaacattgtgaaataattttcttttctacaagttttgccagtattttctgaaattcggttacagatataactag

SEQ ID NO: 305334 - DNA, 201 bp, Homo sapiens
tttttttttttttttttgagacagagtttcactcctgtgacccaggctggagagcagtggtatgatctcagctcactgcaacctctgcctccctgcttcargtgattctcctgcctcagcctcccgagtggctgggattacaggcacacaccaccacgcctggctaatttttgtatttttaatagagatggggtttcacca

SEQ ID NO: 305335 - DNA, 201 bp, Homo sapiens
atacctgtatatttctttctttcttttttttttttttttttttttttgagacagagtttcactcctgtgacccaggctggagagcagtggtatgatctcakctcactgcaacctctgcctccctgcttcaagtgattctcctgcctcagcctcccgagtggctgggattacaggcacacaccaccacgcctggctaatttt

SEQ ID NO: 305336 - DNA, 201 bp, Homo sapiens; identical to SEQ ID NO: 63878

SEQ ID NO: 305337 - DNA, 201 bp, Homo sapiens
ctttgttattatcagacctagtttttcagttatcatccaaggccaggggcatagtatttgtactttcatctaatgtgttggaaatcagtactgtttgagtycaaggaggatgctgtcacagaaaatttattaaagaacatatttgcttaacattaagagatctaccctgtcctccttccatcatcctgtaggcatatttgt

SEQ ID NO: 305338 - DNA, 201 bp, Homo sapiens
ccataatcagtaatttctaggtaattttcccaaatgggagaactttatacacagttgacctacgaacagcacgggtttgaactgtgcatgtctatttataygcagaattttttcaatcaatgtgtttagcactctgtatccatgggttctacatctgcaagcaaaggctgattgggatctagagtattccaggatgcaaaa

SEQ ID NO: 305339 - DNA, 201 bp, Homo sapiens
cataatcagtaatttctaggtaattttcccaaatgggagaactttatacacagttgacctacgaacagcacgggtttgaactgtgcatgtctatttatacrcagaattttttcaatcaatgtgtttagcactctgtatccatgggttctacatctgcaagcaaaggctgattgggatctagagtattccaggatgcaaaac

SEQ ID NO: 305340 - DNA, 201 bp, Homo sapiens
cagttctggccaattctcagctataatcacctcaaatattatctctctgtatagagctctgattagatgcattttgtaccttctcattcttcatgtctttyttccaagtgacatactgtgaaaagaaatgtccaatagaagattaaattatatttctaccataaaaacagagtaatagggcagtgaaaataatatacaaga

SEQ ID NO: 305341 - DNA, 201 bp, Homo sapiens
ggttcatttggcccactttccttctggctttccaggttcatgccacactggctttatttttgttactggaaagcttcattttctttcctctcttggctttyaggagtttcctccacctctaatgctgtattctctccctccctccaactcttatacctgcctcagatatcagcccacatatcacttcctctggaaatcacc

SEQ ID NO: 305342 - DNA, 201 bp, Homo sapiens
tcaggcgcccgggtcacgggcagccttttaaaccctgcacgctggtttggtgttccgcaaatctcgtggcatctctcaagtcagtagtaaagaaagttagsaattagaagacgttttattctttaaaaagcgaaaccaaaaatgcactcaggaagtcagctttttaatgatttagagaaaatgtgtgaagggaaggatggt

SEQ ID NO: 305343 - DNA, 201 bp, Homo sapiens
ttctataatagtgatgttctccataggagcggttggggaagtcacaaatcttgtgactttgggtacagtaaactattatagaaaggcaagctgtgcctacrttttagcagaattcaggtccctcccataatcctaatcttgtggcctttctttagtcttacaaaggtggtttcagttcccaacaaggaagggggtcaattt

SEQ ID NO: 305344 - DNA, 201 bp, Homo sapiens
ttattgttaagattgaaaagtgattgactctttcaagaaatactcctaaacctaaccatactatggacataaaggtgacttttcaagtgacttttgtatcrctttgtggagaacaaagtgaagctgaaatgtaggtattataagacacggtcaatgagagttttttagaaaacaatcaggatttaaaaatgagtttgaatt

SEQ ID NO: 305345 - DNA, 201 bp, Homo sapiens
ataggacttgaagtcttactgtatgtattgtcattgactgatgacctacctgtgtgaatgattttggacaaatcttacagcttgtcagtgcttaggttacyttttatgcaaagccaaggatagcaaatatgaaagcactttctgcgtatgtagcactgtgttcatcaaggtattatcttttttttttttttttgagatgga

SEQ ID NO: 305346 - DNA, 201 bp, Homo sapiens
ctactgccttagtttaggcctctatcatctctcacctgtattaccacatcacccttctaattgatctctccacctccagttgcatcgcctccagtacagtmtcctaaatcataactcccctctacttaacatccttcactggctcctcactgtctataaacatacgaatcagtctaggcaatgtagtaagaccctgtctct

SEQ ID NO: 305347 - DNA, 201 bp, Homo sapiens
cagtgggcccaggaggacaaaagtggctctaaatttgacacatgcacattgaagcaagtcaaaggacttgatatgaagcatagaagcacataatgccaaayagcaagcagtaattggtatacatttggtgattgggcagtatttccttcttttactgctgctaaggtggtggaaattagttaaattcattgtgaaatggca

SEQ ID NO: 305348 - DNA, 201 bp, Homo sapiens
ctgtggaagcagcctaggtagaaaggcacagctccccaggactgctgagtggggcctgattgcactccacatttccgtttttgctaaagatatcactatartagtatggtacaacaatggatctctcttacttgttccgaagattatgtagggtaaagtacatttttgttttatttttttgtagagaatgggggggtctca

SEQ ID NO: 305349 - DNA, 201 bp, Homo sapiens
ggaccctccagtgggcccaggaggacaaaagtggctctaaatttgacacatgcacattgaagcaagtcaaaggacttgatatgaagcatagaagcacatartgccaaatagcaagcagtaattggtatacatttggtgattgggcagtatttccttcttttactgctgctaaggtggtggaaattagttaaattcattgtg

SEQ ID NO: 305350 - DNA, 201 bp, Homo sapiens
cgattgttagggagaaccctgtggaagcagcctaggtagaaaggcacagctccccaggactgctgagtggggcctgattgcactccacatttccgtttttkctaaagatatcactataatagtatggtacaacaatggatctctcttacttgttccgaagattatgtagggtaaagtacatttttgttttatttttttgta

SEQ ID NO: 305351 - DNA, 201 bp, Homo sapiens
actgggagagggctttcaatccacagaggtatgcatttgcaaagactttttaagacagtatagtgttgtgtgtgtggtgttttgtttgcttttagagaggrtgacgggtaggtagtacagatggatttgtggttggttttcatggataggagtatagagcaaattggaaaggccagaagtaagtaagaagataaggctcca

SEQ ID NO: 305352 - DNA, 201 bp, Homo sapiens
ccctttccaccactgaatctaagggtgatgtggcaaagttctttacctggagtaggcactcagtatttgtgatacagatttatgggctcttttgaaagctrtattaatgggaacacggaggcaggctaaagttgacatgtctttccaagttcatttgtttctcaaatcatttctttttgttttgctttcttaagataagtt

SEQ ID NO: 305353 - DNA, 201 bp, Homo sapiens
agtaagtatgtgctattttcttttaatgcaaacatctactcagtatagttcaatggtgaaaatggactgcggcaaatatgcttgagttcacaccctggtgycactttctattggctgtgtgttacattgggaaagttacttaaccatttgaaggaggatggggatttctttgtctttacatataaattataacatacatgc

SEQ ID NO: 305354 - DNA, 201 bp, Homo sapiens
agtttggcctttgagataagaagactgggagagggctttcaatccacagaggtatgcatttgcaaagactttttaagacagtatagtgttgtgtgtgtggkgttttgtttgcttttagagagggtgacgggtaggtagtacagatggatttgtggttggttttcatggataggagtatagagcaaattggaaaggccagaa

SEQ ID NO: 305355 - DNA, 201 bp, Homo sapiens
ttgctctctgattataggacaatgtaacatgtgacaggatgctcagtgtagtgggaccgcagagaggatgagatgagaggtggtggtaaaggaaacttcakagggtgagttggaggcggtttagcgattagagggcaggttgtagaatctgatagtctttgttttgaattctagttctgctgttggagaattatttgattt

SEQ ID NO: 305356 - DNA, 201 bp, Homo sapiens
ctagtcagtgcctacacgttagctaattctgttcttgccacaagtagatgaagaaaacatttattaaaagaactgcaacttgaaaattggttattagtcaytgcttagtattccttagtcatctttatgagtgtaatcacataggttggctgtcctttttttttcttcaatgctgcatgactaggggtcaggagacaagga

SEQ ID NO: 305357 - DNA, 201 bp, Homo sapiens
tggtatgcacgtcagcactgtcctctgaaaaatgtgagtcaccaacctggttggagtgcaaaagaacctgtttattctctgtttgtgagagttggtgggcratgttgaggagcacagtagtggagattatgatgaattagtgttaaagagagggaaatgaggagtaaaagcattagtttatcatctgatcttattgtactt

SEQ ID NO: 305358 - DNA, 201 bp, Homo sapiens; identical to SEQ ID NO: 63880

SEQ ID NO: 305359 - DNA, 201 bp, Homo sapiens
atgtagagttttagatagaattttgtttggtaacatttttaatgctaaattgctcagataattatttaagccattcatcagttgctgttatcctgtggaayaagaaaataagatctgctgacttgtcatcctgcgtaaggatccagattgcctttttctctcccatctcatctatcactggcattttctgtctcttaccag

SEQ ID NO: 305360 - DNA, 201 bp, Homo sapiens
ttttagttgttgcttagccttattggttgacatttactaacatggaaggacttgagatgataggtatgtgaacattgttcagagccatgaacttggcttgytttttcacatactaattcctcttgtgggtttttacaaataattttttttaaatgcaagttaggaatctttccggtcatttataatttgtgtcatgttcct

SEQ ID NO: 305361 - DNA, 201 bp, Homo sapiens
tccaaaatagctactccttcttatgttcccaccagcaatgtatgagggttccaatttctccatatcctcaccaagacttattatctgtcttttgatgatasccttccagccaacagattaataatctggtgtcagttaagcacctttgatctaaatgtaagatagggtaccaggtttgttaatagggagcttgaagttggt

SEQ ID NO: 305362 - DNA, 201 bp, Homo sapiens
gtaaatgtatgtttaactttttgaggagctgctgtacttttccaaaatagctactccttcttatgttcccaccagcaatgtatgagggttccaatttctcyatatcctcaccaagacttattatctgtcttttgatgatacccttccagccaacagattaataatctggtgtcagttaagcacctttgatctaaatgtaag

SEQ ID NO: 305363 - DNA, 201 bp, Homo sapiens
tttgtgtagaagcttatggaatatatgttttcagttctcttgggtatatacgtaagagttgagttgctgagtcatggtaaatgtatgtttaactttttgargagctgctgtacttttccaaaatagctactccttcttatgttcccaccagcaatgtatgagggttccaatttctccatatcctcaccaagacttattatc

SEQ ID NO: 305364 - DNA, 201 bp, Homo sapiens
tgatacagtttgcttatctgtcagttgatatttattttgggggggttatttacaatgattggctattatgaatgatgctgctatgaacatttgtgtagaarcttatggaatatatgttttcagttctcttgggtatatacgtaagagttgagttgctgagtcatggtaaatgtatgtttaactttttgaggagctgctgta

SEQ ID NO: 305365 - DNA, 201 bp, Homo sapiens
gtgtgtggctgcttgcacttagcataatgttttccatgtttgtttggttttttgatttgaggtggactcttgctctgctgtccaggctggagtgcaggggytattcacaggcatgattatagcacatgcagcctcgatctcctggcctcaagtgatcttcctgcctcagcctcctgagcagtatgttttaatatgtatcag

SEQ ID NO: 305366 - DNA, 201 bp, Homo sapiens
ccctcccgagtagctgggattacaggcatgtgctaccacgcctggctaatttttgtattttaatagagttggggcttcaacatgttggccaggctggtctygaactctggcaagtgatttggttgccccgacctcccaaagtgctggttttataggcatgagccaccatgtcaggcctccattccttttaattttttagta

SEQ ID NO: 305367 - DNA, 201 bp, Homo sapiens
ctgcctcaccctcccgagtagctgggattacaggcatgtgctaccacgcctggctaatttttgtattttaatagagttggggcttcaacatgttggccagsctggtcttgaactctggcaagtgatttggttgccccgacctcccaaagtgctggttttataggcatgagccaccatgtcaggcctccattccttttaatt

SEQ ID NO: 305368 - DNA, 201 bp, Homo sapiens
aatcaggatttaaaaatgagtttgaatttctaggcaataaactagtcagtgcctacacgttagctaattctgttcttgccacaagtagatgaagaaaacayttattaaaagaactgcaacttgaaaattggttattagtcactgcttagtattccttagtcatctttatgagtgtaatcacataggttggctgtccttttt

SEQ ID NO: 305369 - DNA, 201 bp, Homo sapiens
cataattaacatcgttgtaattactgtgtgtacatttactagttttgttcttagtattttcatgtataaatttccttctagttattttgaccatgctgtcrtgttttatggttgcaccacagtttacgcagttacctttgtatttgtttgttttcaactttatgatttagacagtgctactaggtagctgtatccatcaac

SEQ ID NO: 305370 - DNA, 201 bp, Homo sapiens
aggggggatgttccaaggatttaagttaaaactttttaaagaatattgtacttgtctgctttatatattaataaaattatgaaatcttttagcttggtcayttaggaggattagaaggagaaagtaatgaatgaaataagggaaaagctgaaagaatggtggaccctggtttagctcgtattaatatgtgtattgtgcagg

SEQ ID NO: 305371 - DNA, 201 bp, Homo sapiens
ccacgcctggctgcttatagatattttttttgtcatgcttagaaatcatccaagattatgacaaaaagaaaacatgactttttttttttttttacttttgkggtgttttatattgaaatatttgatccatatgaaatttatttttgagtgatgcattcatcattggggatctaattttttagttttccaaaatggctagtt

SEQ ID NO: 305372 - DNA, 201 bp, Homo sapiens
agaccagatctcaaaataaaattttaaaactcaaattgtagcttaaaaaatgacagcgtggtaatcatggattgaattatgtactttttttgaaaattaartttggagataatggtatagtatattaacatatttttaaattgtacctatttcttctgaaaaatcatcttttgtacataagaacgattgctgtttgaatat

SEQ ID NO: 305373 - DNA, 201 bp, Homo sapiens
ctttttaatatttaagtggctgccacctgtttaaaccacttttttctttttttcagcctgcttgatttcctcttccttgaagtagaattcaatttgaagctttttttttttctttttaaaagttgggcggtgtcagtgaatgacttgttaaggaagtctgtgcgttgtctgggtgtgagaatgggttttggaaggagctct

SEQ ID NO: 305374 - DNA, 201 bp, Homo sapiens
atcgtttagaaatgcacgtgttttagtgaatcacatgcttagaatgcatctgaggtttcgcagtcttttaggataaagacctactgagtgagcacactctmtctctggttcatttggcccactttccttctggctttccaggttcatgccacactggctttatttttgttactggaaagcttcattttctttcctctcttg

SEQ ID NO: 305375 - DNA, 201 bp, Homo sapiens
ttttatggttgcaccacagtttacgcagttacctttgtatttgtttgttttcaactttatgatttagacagtgctactaggtagctgtatccatcaacttwaaagtcatgtttttttcttcccgtaggtcgaattgacataaaacagttgatagcaaagaagataaagttgacagcagaggcagaggcaagtaactccctc

SEQ ID NO: 305376 - DNA, 201 bp, Homo sapiens
atgcagaagttactagatcatggtaaggacttaggatgtttgaaggggtttaagttgtgaagtgacttgatctaacttatcttgagtgcaatggtgtgatygaggttcactgcaacctccacctccgggttcaagcgattcttctgcctcagcctcctgagtagctgggactacaggtgcctgccaccacacctggctaat

SEQ ID NO: 305377 - DNA, 201 bp, Homo sapiens
aaaaggtcattggtcaattaatgttagatggtgttattggtatattctcttgtctgtgggattagatttcttataatacttgaagtacttatatcttgttktaatttttcctcttctcagggatttgagagcacctccagaacaaggaaagatttttattgcaaggcgctctctcttagagtgagtatttttagttgtttt

SEQ ID NO: 305378 - DNA, 201 bp, Homo sapiens
gaattctccttccgtgatttagggacttagtgataacccagtttgtttcccttgcctgcattctcacgcattagaaacttcatgcttgtttgttccttccrgttcttgggacagaaaagttattttaattgaaactttctgtcactgtatatgatcattctctttatgtcccaagtttttaaaaagattctaaattcttct

SEQ ID NO: 305379 - DNA, 201 bp, Homo sapiens
ctctttaattctttattgtaaatgggtattgatagagttttatatgtctagtaacaaagcaattagacaataagtcctttctcgttaattaatttggtggwcatctattggtatctgctgtgttttagagaccattcattcagtcacgtaacctaccaataattgctgaggtcccccgctggatgctggggctatagcagt

SEQ ID NO: 305380 - DNA, 201 bp, Homo sapiens
tggtgcaatcttggcttactgcaacctccacctcccaggctcaagtgatcctcctgcctcaccctcccgagtagctgggattacaggcatgtgctaccacrcctggctaatttttgtattttaatagagttggggcttcaacatgttggccaggctggtcttgaactctggcaagtgatttggttgccccgacctcccaaa

SEQ ID NO: 305381 - DNA, 201 bp, Homo sapiens
atcatttgagcctaggagttggaatccagcctgggcaacatagtgagaccccatctcttaaaaaaaaatggtcttaactactggaagatttgcagacttcaaaaaaaaataggacttgaagtcttactgtatgtattgtcattgactgatgacctacctgtgtgaatgattttggacaaatcttacagcttgtcagtgctt

SEQ ID NO: 305382 - DNA, 201 bp, Homo sapiens
ttctgcgtatgtagcactgtgttcatcaaggtattatcttttttttttttttttgagatggagttttgctcttgttgcccaggctggagtgcaatggcacratctcggctcaccacaacctccacctcccaggttcaagcgattctcctccctcagcctcccaagtagctgggattacaggcatgcgccaccctcctggct

SEQ ID NO: 305383 - DNA, 201 bp, Homo sapiens
cctcctgcctcaccctcccgagtagctgggattacaggcatgtgctaccacgcctggctaatttttgtattttaatagagttggggcttcaacatgttggycaggctggtcttgaactctggcaagtgatttggttgccccgacctcccaaagtgctggttttataggcatgagccaccatgtcaggcctccattcctttt

SEQ ID NO: 305384 - DNA, 201 bp, Homo sapiens
acctagagtctagctctagagtccttgctcttaatcatataatggctgggcatggtggctcacgcctgtaatcccagcactttgggagaccaaggcaggtrgatcacgaggtcaggagttcaagaccagcctggccaagatggtgaaaccccgtctctactaaaaatacaaaaattagccgggtgccatggcaagtgccta

SEQ ID NO: 305385 - DNA, 201 bp, Homo sapiens
ttatgaaatcttttagcttggtcacttaggaggattagaaggagaaagtaatgaatgaaataagggaaaagctgaaagaatggtggaccctggtttagctmgtattaatatgtgtattgtgcaggtgacataagggttgcagagttgtgcaagacttgttccctgatgttaagggaagtattggcctgaacaaaggtaatg

SEQ ID NO: 305386 - DNA, 201 bp, Homo sapiens
ttaaatgtccaaaattacatagcagggatttgaacctagagtctagctctagagtccttgctcttaatcatataatggctgggcatggtggctcacgcctrtaatcccagcactttgggagaccaaggcaggtggatcacgaggtcaggagttcaagaccagcctggccaagatggtgaaaccccgtctctactaaaaata

SEQ ID NO: 305387 - DNA, 201 bp, Homo sapiens
agttgtttgagaccagcctggccaacagggtgaaaccccatctctaccaaaaatacaacaattagctggacgtggtcgtgcacgcctgtcgtccgcctgtygtcccagctgctcaggagactgaggcatgagaatcgcttgaacctgggaggcagaggttgtagtgagccaagatcatgccactgcactccagcctgggca

SEQ ID NO: 305388 - DNA, 201 bp, Homo sapiens
gttgagtaatatagttcccagatggccgggcacggtggctcactcctgtaatcccagcactttgggaggccgaggcaggcagattgcttgaggtcaggagytcaagactagcctgaccaacatgataaaaccctgtctctactaaaaatacaaaaatcagctgggcgtggtggtgggtgcctgtaatctaaactactcagg

SEQ ID NO: 305389 - DNA, 201 bp, Homo sapiens
gagggcgaggcgggtggatcacttgaggtcagttgtttgagaccagcctggccaacagggtgaaaccccatctctaccaaaaatacaacaattagctggaygtggtcgtgcacgcctgtcgtccgcctgtcgtcccagctgctcaggagactgaggcatgagaatcgcttgaacctgggaggcagaggttgtagtgagcca

SEQ ID NO: 305390 - DNA, 201 bp, Homo sapiens
tcaaacactatagaaagttattaagtaatacttcctcaagtaacatttttttttacatgtgggatcatatttgagatctcttctgcaatttgtttcttctrtactttgtaagtctcagatatcttttcatttagtatatgtaattctttaaaatacctgtgtagtatttctgctgtacggatgcttggcggtttatttaac

SEQ ID NO: 305391 - DNA, 201 bp, Homo sapiens
ttcttaatcaaactagtgatttgtcttttgactttgcttatgtatgtgtgctttgccatgttttgtttttatatatcaaatattcttttaattgttataatttttttttgtttgtttttgtttttatttttgtttttgttttttgagatggagtctcgctctgttgcccaggctggagtggagtgcaatggcgtgatcttg

SEQ ID NO: 305392 - DNA, 201 bp, Homo sapiens
tcttaatcaaactagtgatttgtcttttgactttgcttatgtatgtgtgctttgccatgttttgtttttatatatcaaatattcttttaattgttataatttttttttgtttgtttttgtttttatttttgtttttgttttttgagatggagtctcgctctgttgcccaggctggagtggagtgcaatggcgtgatcttgg

SEQ ID NO: 305393 - DNA, 201 bp, Homo sapiens
tgcactttgagtagctgaggtggaaggattgcttgagaccgggaattcaagaccagtctgggcaacatatcaagaccccatctttacaaaagtaaaaaaarttaggtgggcatggtaacatgtgcctgtagccgaagctactcaggaggctgaggtgggaggattgcttgagcccaggagttagaggtcgcagtgagctag

SEQ ID NO: 305394 - DNA, 201 bp, Homo sapiens
gaaattggtggtggtgataagggacagatagaaataatgacagagggttagtaagtccgtgctggttaagaaaactggaaaaccaaaatgatgacttctawcagaagagaaactgtctctttccctgtctttctctttagcgatgaaaccttcgctagaaattcccctacagacttctcgtgtctcattggccagagttag

SEQ ID NO: 305395 - DNA, 201 bp, Homo sapiens
tgttgcccaggctggagtgcaatggtgctatctctgctcaccgcaacctccgcctcccaggtccaagcgattctcttgcctcaccctcccaggtagctggrattataggcatgcgccaccacgcctggctaattttgtatttttagtagagacggggtttccccatgttggtcaggctggtctcgaactcctgacctccgg

SEQ ID NO: 305396 - DNA, 201 bp, Homo sapiens
cctcccaggtagctgggattataggcatgcgccaccacgcctggctaattttgtatttttagtagagacggggtttccccatgttggtcaggctggtctcraactcctgacctccggtgatctgcctgcctcggcctcccaaagtactgggattacaggtgtgagccaccgtgcctggccacacattgtatgtttatagga

SEQ ID NO: 305397 - DNA, 201 bp, Homo sapiens
taatcccaacagtttcagaggccaaggcatgaggattgctggaggccaggagttcaagaccagcctgggcaacatagcgaggctctgcctttacaaaaaawttttttttaattaggtgggtgtggtggcatgtgagtgtggtggcatgtgcctgtagtcctaggtacttgggaggctgaggcgggaggatcccttgagcct

SEQ ID NO: 305398 - DNA, 201 bp, Homo sapiens
cagccatgaactcacattcttggacataatctttgtcatcctttgcaatcatttctggttgaggaatggcatttttttttattcttggcacgttggcatakatcctctgagactttcttttgaaccattgtatttttaaaaacatttattgtagagatagggtcttgctacattgcccatgatggtttcaaacccctaggc

SEQ ID NO: 305399 - DNA, 201 bp, Homo sapiens
tcagctcactgcaagctccgcctcctgggttcatgccattctcctgcctcagcctcccgagtagctgggactacaggcgcctgcccccatgcccagctaattttttttttttttgtatttttcgtagagatggggtttcactgtattagccaggatggtcttgatctcctgacttcatgatctgcccacctcagcctccca

SEQ ID NO: 305400 - DNA, 201 bp, Homo sapiens
tacgaacagcacgggtttgaactgtgcatgtctatttatacgcagaattttttcaatcaatgtgtttagcactctgtatccatgggttctacatctgcaarcaaaggctgattgggatctagagtattccaggatgcaaaacacacatataagaatggcagatttttcatatctgtgggttccacggggccaactgtgggc

SEQ ID NO: 305401 - DNA, 201 bp, Homo sapiens
ttggactggttaattctttgtttggagtggcattcttctgcattgtagcataaactgttcagcagcatcctggcctctaacaactagataccagtggcacmactccctctcctccaattgtcacagcactggtgcagtagcttgcaccggtagtcccagctattctggaggctgaggtgggaggatcacttgagccccagg

SEQ ID NO: 305402 - DNA, 201 bp, Homo sapiens
cctgggttcatgccattctcctgcctcagcctcccgagtagctgggactacaggcgcctgcccccatgcccagctaattttttttttttttgtatttttcrtagagatggggtttcactgtattagccaggatggtcttgatctcctgacttcatgatctgcccacctcagcctcccaaagtgctgggattacaggcatga

SEQ ID NO: 305403 - DNA, 201 bp, Homo sapiens
aacaaggatttgaaaattgaggattgtttagttaacaaataggtgcggaaccttctgagacaggttgtctttggcatttcatctcttttcataaagaaacwgttttgtttttcctacctaaatttaattaaacttaaatatcaacagctggatcccaccaggaatgtaaacattgctgcttgagttggcataatgaggttt

SEQ ID NO: 305404 - DNA, 201 bp, Homo sapiens
ctctactaaaaatacaaaatttagccgggcgtggtggcgggcgtctgtaattgctgctactcaggaggctgaggcatgaggatcgcttgaacctaggaggygggggttgcagtgagcagagatcatgccactgcactccagagagagactctgtctccaaaaaaaaaaaaaaagactgactaataaggtcaggtgtggtgg

SEQ ID NO: 305405 - DNA, 201 bp, Homo sapiens
ttataacatacatgcatacctcttttaacactaatgccgggcacagtggctcacgcctgtaatcccagcactttggaaagctgaggcaggtggaacacctsaggtcaggagttcaagattagcctggccaacatggttatttaaccatttgtctctactaaaaatacaaaatttagccgggcgtggtggcgggcgtctgta

SEQ ID NO: 305406 - DNA, 201 bp, Homo sapiens
tcattttttgtcaagtggtgaaagcagctagctgaataatattcaggactgtcaaccaaatgggaggtcagaagctcacccagtcggctgcaaccatggcrgagccagaggggctcaaggggcctgtgctataccaaggctgcagttccttgcaatgctctagatgaccctgggcagtctattcttgagccccttcatagt

SEQ ID NO: 305407 - DNA, 201 bp, Homo sapiens
agttcagaggtagcaggtccatagctgatactggctccatggtccttaaggaccctggtttggttccttccagttccctgcctcaccatttgtaattgccygttgggttcttcttaccctctgcacagacaaaaccaatggactgagacagtggtaaagcagtagagaaggagtttaatgcaaagctagccaagtggaagg

SEQ ID NO: 305408 - DNA, 201 bp, Homo sapiens
ggtgcatacctataatcctagctacttgggaggctaaggcaagagaattgcttgaacctgggaggtggaggttgcggtgagctagtatcatgccgttgccmtctagcctgggcaataagagtgaaactccgtctcaaaaaaaaaaaaaaaagtttcaaggaagaactcattttttgtcaagtggtgaaagcagctagctga

SEQ ID NO: 305409 - DNA, 201 bp, Homo sapiens
ctcaagtgtcatgtctgaaaataagagtttctcaccatgttttttcagtcattcaagtaacgccttctaaataagtttttggtccggtcatggtagctcaygcctgtaatcccagcactttgagaggttgaggctggcggatcacatgagttcgagaccagcctgaccaacatggtgaaaccccatctttactaaaaatac

SEQ ID NO: 305410 - DNA, 201 bp, Homo sapiens
tgtggtggtgcatacctataatcctagctacttgggaggctaaggcaagagaattgcttgaacctgggaggtggaggttgcggtgagctagtatcatgccrttgccctctagcctgggcaataagagtgaaactccgtctcaaaaaaaaaaaaaaaagtttcaaggaagaactcattttttgtcaagtggtgaaagcagct

SEQ ID NO: 305411 - DNA, 201 bp, Homo sapiens
atgggctgggtgtggtggtgcatacctataatcctagctacttgggaggctaaggcaagagaattgcttgaacctgggaggtggaggttgcggtgagctartatcatgccgttgccctctagcctgggcaataagagtgaaactccgtctcaaaaaaaaaaaaaaaagtttcaaggaagaactcattttttgtcaagtggt

SEQ ID NO: 305412 - DNA, 201 bp, Homo sapiens
caattagtgctttgtttctccatcataagagattgtttaaggatttgttatgcaactttttatctgatgactaacttataattttggctaagaaaataacaatatttaacgtatagacacatgctagtttgtttgtttgtttgtttgtttttgagacagagtctctgtcgcccaggctagagtgcagtggcacgatctcgg

SEQ ID NO: 305413 - DNA, 201 bp, Homo sapiens
aaatacaatattgtcaagaaaagagagcatggcattaagaggcatctgactgagcttcaggcctcagaaaaatccaacaagtcttcatgcttcattccttygcctggaataatgtttctagcatttgttcaccataatttttctttattatttgagactcagttcaaatattgactcctgcaaaagcctcctacacccctc

SEQ ID NO: 305414 - DNA, 201 bp, Homo sapiens
aattagtgctttgtttctccatcataagagattgtttaaggatttgttatgcaactttttatctgatgactaacttataattttggctaagaaaataacaatatttaacgtatagacacatgctagtttgtttgtttgtttgtttgtttttgagacagagtctctgtcgcccaggctagagtgcagtggcacgatctcggc

SEQ ID NO: 305415 - DNA, 201 bp, Homo sapiens
atcttgctgcttctacagttttctgaacattgcagttgaaatgatgtcctcgctactctatattcctaactacttagtttatacccctactatatactctrtatgtattagactgtgcattgttctgaatgagtcatcacatgccatttggtgaactttaggtgatttgacttagaagttttaaaattgtcaattatttgc

SEQ ID NO: 305416 - DNA, 201 bp, Homo sapiens
tacatattttagggcacttgatggacatctgtgtctctattggggcacaatggcaagaaaaagttgaaaacttgaggctagattataaagcattttttctygacttttatgccctccttcatgtagctctttctatctgaaatttcctctttctccattcacaaatcaaaataatgtatatccttcaaattctaggtcaaa

SEQ ID NO: 305417 - DNA, 201 bp, Homo sapiens
tttcactgcattagccaggatggtctcaatctcctgacctcgtgatcctcctgccttggcctcccaaagtgctgggattacaggctgggattaccacaccyggctggcacgtgctagttttaaacatctattcttgcaagtttagtgactaattttttttttttttttttttgagacagagtctcgctctgttgcccaggc

SEQ ID NO: 305418 - DNA, 201 bp, Homo sapiens
aagaactctgtgaaaagttagatgtgtagatagaggagctcttattaagtaaggaaaagtgtgaagaagttcgtcaagcattgagcaaaccttttagtctraagggaagaggagtgagggaagtgataacatgagtgtgttgaaattagtggtttgaactgactgaatctcttaaggtcgcctcgaggtctaacatgcttg

SEQ ID NO: 305419 - DNA, 201 bp, Homo sapiens
gaggctgaggcaggagaatcgcttgaacccaggaggcagaggttgcagtgagccgagatcatggcattgcgctccagcctgggagacaagagtgaaactctgtctcaaaaaaataaattaaaaaaaagactcaagtgtcatgtctgaaaataagagtttctcaccatgttttttcagtcattcaagtaacgccttctaaat

SEQ ID NO: 305420 - DNA, 201 bp, Homo sapiens
aggctgaggcaggagaatcgcttgaacccaggaggcagaggttgcagtgagccgagatcatggcattgcgctccagcctgggagacaagagtgaaactctgtctcaaaaaaataaattaaaaaaaagactcaagtgtcatgtctgaaaataagagtttctcaccatgttttttcagtcattcaagtaacgccttctaaata

SEQ ID NO: 305421 - DNA, 201 bp, Homo sapiens
tcagaagttcaaagtccaattatcttagatatcttaagtttgaagactgtatttatcttagggcttttagaaaatttgtttctaaagaacatatattgttratatatatatatatatatattgtaaagcagatggttagaagcagatctctaactagcagaactattacatccatgacttcagcgtattaacgttgtggtg

SEQ ID NO: 305422 - DNA, 201 bp, Homo sapiens
acacctggctaattttttgtatttttagtagagacgaggtttcaccgtgctaggctagccaggatggtctcgatctcctgacctggtgatctgcccacctyggcctcccaaagtgctgggattacagatgtattccaccatgcccggccctgttttagcttttgatgtaaggtttcctctagagtagcttgatggttgagg

SEQ ID NO: 305423 - DNA, 201 bp, Homo sapiens
ttcatgtgatagaagtcagaaggcagaagtggactgtttcttgtactatatttcttaatattccctcttacaaagggagtaacaataataagcagttactygttattgtcatcactgctaggatctgtgaaaggaggagattcaggaaatgtaagcgtccacagagcagagttctttcttccttgtgccccagtggcagca

SEQ ID NO: 305424 - DNA, 201 bp, Homo sapiens
cctgttgccctcgaatgtttagcagttcaatttaatgaatgcctgcttggtttctttgtctatcaggtactacattaagtgctgggattttaaagaagttktgttttctgttctcatgctaactgagaacactatatgcaaaatgcatgagcaaggggaacagtgacttaattagataccttaaaaatgttctttggccag

SEQ ID NO: 305425 - DNA, 201 bp, Homo sapiens
gtaccctgtgttgcttcaaggttgctaggatttgtcgagaatccttacgtttcttatatgtcccctaggattctagtttcattttcttttcttttctttctttttttttttttttttgcctctgaatttgtactagcttggcaataagttttaaaaggttttcgttttttaatattttacccagcatcttagtggtctcaa

SEQ ID NO: 305426 - DNA, 201 bp, Homo sapiens
acttatttactctaagcagtcatgtgcccagatagaaatcagggattctagtactaagaaagggggtaggcactgatagggttgacaaataacagtttctrctatggctgtccatttttctttgctgtcccaatctactggtcaaatttcacctttttgctatgcaagtgtgactatacatttttctgatattttcctttc

SEQ ID NO: 305427 - DNA, 201 bp, Homo sapiens
caaagagagactgggaaacttatttactctaagcagtcatgtgcccagatagaaatcagggattctagtactaagaaagggggtaggcactgatagggttracaaataacagtttctactatggctgtccatttttctttgctgtcccaatctactggtcaaatttcacctttttgctatgcaagtgtgactatacatttt

SEQ ID NO: 305428 - DNA, 201 bp, Homo sapiens
ctgtgaggctagaagcatgatggagtcagacatggtagacgtttctcactgtcgtagtctttgcaaaggcagtttcacattcataggctgtggtcctcctyattgcccacatggctctagtcattttgtctgagttccaagtggccaaattgagggaaggaaaggagtgggggtaaggaacaggtatctgtgtctgttaag

SEQ ID NO: 305429 - DNA, 201 bp, Homo sapiens
aagagattgtttaaggatttgttatgcaactttttatctgatgactaacttataattttggctaagaaaataacaatatttaacgtatagacacatgctaktttgtttgtttgtttgtttgtttttgagacagagtctctgtcgcccaggctagagtgcagtggcacgatctcggctcactgcaacctccgcctcctgggt

SEQ ID NO: 305430 - DNA, 201 bp, Homo sapiens
acgaaaaagattctcagtcagaataccgccgttagtcaggttaaacaccaggaaattacattactgtaacttaatatacagaaaagaatatttcagaacasagaaattagaatgaaatgaattttagaatatttttagcatcacctccccaaaaccctgtacccattagcagttattccctttttgccataaccccgcgcc

SEQ ID NO: 305431 - DNA, 201 bp, Homo sapiens
ccatttgttgaaaagaagaatctttccgcatttttcttggcacccttttcgaaaatcaattattaataatcataaaggtgaatgtttatttctggactctmagttcttttacattgatcatctatgtgtctatctctaaaattgggaagtgtgagttttccagctttgttattttttttttcatgatttgtatggctattc

SEQ ID NO: 305432 - DNA, 201 bp, Homo sapiens
ttgtttattaattgtaatttcttttctttttttttttttttttttttttttgagacagagtttcactgtgtcgcccaggctggagtgcagtagcacgatcyctgatcactgcaacctctgcctcccgggttcaagtgattctcctgcctaaccctccccagcagctgagattacaggcatgtgccaccatgcccggctaat

SEQ ID NO: 305433 - DNA, 201 bp, Homo sapiens
ttaatatgtatcagtacttcatttttttttttgtggctgaataatatttcattgtataggtatgatacagtttgcttatctgtcagttgatatttattttgggggggttatttacaatgattggctattatgaatgatgctgctatgaacatttgtgtagaagcttatggaatatatgttttcagttctcttgggtatata

SEQ ID NO: 305434 - DNA, 201 bp, Homo sapiens
ttacagatgtaagccaccatgcctggcctatttgtctttttaatgttgagttgtaagagttctttatgtattctggatacaagtccctaatcagatttgcraatttttttttttcccattctatgggttgtcgttttactttcttgatggtgttctttgtagcacaaaagtgacttaaattttgatagaatctatcaatat

SEQ ID NO: 305435 - DNA, 201 bp, Homo sapiens
ttccagtaaccctccctcaccagccccaggacttatttgaatgaactctgtatctgtccctaaaatagaatatgtgttacatacttgagtgtcttcctcamtagctgcaaagttattgagttcaaggattgtgttttatagccaatcacagtctctctcatattgtctggtacatagttgatgctctataaatatatattt

SEQ ID NO: 305436 - DNA, 201 bp, Homo sapiens
gtcttggaactcctggcctcaaatgatccaccccacctcggcctcccaaagtgcagggattacaggcatgagccaccgcacccagccaattgcaatgtttytgaacaagatatagtaggactactgttctgatctgaaagttcaggatggcatatagagtttagagacagtgagaatagacagggagctattgtaatattt

SEQ ID NO: 305437 - DNA, 201 bp, Homo sapiens
aatgttggtaatgttttctgtcatcaccttccctttcttttcttctcttgcattcctcttccagtaaccctccctcaccagccccaggacttatttgaatsaactctgtatctgtccctaaaatagaatatgtgttacatacttgagtgtcttcctcactagctgcaaagttattgagttcaaggattgtgttttatagcc

SEQ ID NO: 305438 - DNA, 201 bp, Homo sapiens
gaggtgggaagatcatttgagcccagcaggtggaggttgcaatgagctgagatggcgccactgcactccagcctgggtgatagagccagactttgtcttcaaaaaaaaaaaaaaaaaattgttgcaacatattctgtttgcttcttatatagcatttcaaatattgttttttcacatcagtaccttatgctattgtccagc

SEQ ID NO: 305439 - DNA, 201 bp, Homo sapiens
gaccagaataaaaaaatatataaacagttgttgctcactgtgattattaaataacagcagatacctgaggtccctcatcttctgataaattatgttttgayacctgtatatttctttctttcttttttttttttttttttttttttgagacagagtttcactcctgtgacccaggctggagagcagtggtatgatctcagc

SEQ ID NO: 305440 - DNA, 201 bp, Homo sapiens
tggctagttgatgcatgagaagttagaggttttcactaaattttggtaaagggtaaattgattaaattgcttcaggaaatcctaaagcagcagatttgagrgtgatattcctttgccctgaaaagtttaactgatggagaaaattagaagtttcattacttttatttttaaaatggtttatttgaatagaccataatcagt

SEQ ID NO: 305441 - DNA, 201 bp, Homo sapiens
agagattcaaatctgctgccatgttagctgtctttgctgtatctgctgtagtacacgaatatgccttggctgtttgcttgagctttttctatcccgtgctsttcgtgctcttcatgttctttggaagtaagtatcttggtatgctgtgagtactgggtactatgctaaaaaagaaaaccagatagaaaggaaactataaaa

SEQ ID NO: 305442 - DNA, 201 bp, Homo sapiens
ttaggcccggccgacgccccaactgaccccagccccctctgcccacagacacggtccgctctttcctgaagcgcagcaagctcggccggtacaacgaggargagcgggctcagcaggaggccgaggccgcccagcgcctggccgaggagaaggcccaggccagctccatccccgtgggcagccgctgtgaggtgcgggcgg

SEQ ID NO: 305443 - DNA, 201 bp, Homo sapiens
tgtgcatttgtgtgtaagtccatgcgtgctgcttgctgagctgcccatgccagcttctagagtggagccatgtgagggtcctctgaccacacccacccctrtcctttcctgcagtgtgaatgggaaacgctacttcgaatgccaggccaagtatggcgcctttgtcaagccagcagtcgtgacggtgggggacttcccgga

SEQ ID NO: 305444 - DNA, 201 bp, Homo sapiens
ttctctttataaatatcacccatattcattgtttaaaataacagaacttcaaatttgtgaaaattctcaacagaaattctcagtgacgcttcatccggagrtaaaggccattcctattttgccatgttagcccagtggcttaggccagacacctcagggtgttccttgggcccgctctctccctcacccccacatccactc

SEQ ID NO: 305445 - DNA, 201 bp, Homo sapiens
ctacaggcgcccgccaccacacccggctaattttttgtatttttagtagagacggggcttcaccgtgttagccaggatggtctcgatctcctgacctcgtkatccaccctcctcagcctactaaagtgctgggattacaggcgtgagccaccgcacccggccagtatgtcgtcttttgagaagtgtgtgttcatgtccttt

SEQ ID NO: 305446 - DNA, 201 bp, Homo sapiens; identical to SEQ ID NO: 63904

SEQ ID NO: 305447 - DNA, 201 bp, Homo sapiens
cccgggaggctgaggcaggagaatcacttgaatttgcagtgaggcagaggtttccgtgagctgagatcacaccaccacactccagcctgggtgacagagcragactccgtcaaaaaaaaaaaaaaaacccaaagtctccagcagtcccttgtgtcttccactctccctctggctcgctccaccccacccgcaccacccact

SEQ ID NO: 305448 - DNA, 201 bp, Homo sapiens
cctatcctttcctgcagtgtgaatgggaaacgctacttcgaatgccaggccaagtatggcgcctttgtcaagccagcagtcgtgacggtgggggacttccyggaggaggactacgggttggacgagatatgacacctaaggaattcccctgcttcagctcctagctcagccactgactgcccctcctgtgtgtgcccatgg

SEQ ID NO: 305449 - DNA, 201 bp, Homo sapiens; identical to SEQ ID NO: 63906

SEQ ID NO: 305450 - DNA, 201 bp, Homo sapiens; identical to SEQ ID NO: 63907

SEQ ID NO: 305451 - DNA, 201 bp, Homo sapiens
gccgggtccagcgaaaaatccgacggtccagagggcgggggcaagaggcgaggggctggattgcggccccgtgcgtcctgactggggggtcttttggaggmaaagggacgtggcgatggtcattgatgcaaggggcggggcctccgtggcctccttcttctcaccctgcctcctcctcacagtgtaaactggagttgctgg

SEQ ID NO: 305452 - DNA, 201 bp, Homo sapiens
cctcgtgggtggagcgtcatcctgttaggcccggccgacgccccaactgaccccagccccctctgcccacagacacggtccgctctttcctgaagcgcagmaagctcggccggtacaacgaggaggagcgggctcagcaggaggccgaggccgcccagcgcctggccgaggagaaggcccaggccagctccatccccgtgg

SEQ ID NO: 305453 - DNA, 201 bp, Homo sapiens
atttcttctatgtccagaagcttcacagggatttctcttctgttggcaggtctcacagatttcaagcctggctactggattggtgtccgctatgatgagcmactggggaaaaatgatggcaggtaacaagaattcccactcaggtgtctgtgtgtgcatttgtgtgtaagtccatgcgtgctgcttgctgagctgcccatg

SEQ ID NO: 305454 - DNA, 201 bp, Homo sapiens
gccggaggagggcggaggaggaaggcggatgatgaaggcagatgtgcgctgaaggggtgagagaccatgggtcctgtagtgaggggtgcaggcggcacccyttccatttacgattgtggagttggggggcctaggagtcctgggagaggctaaggctgtggtgggagacctggggcttgggtgacagccctttgtcacctg

SEQ ID NO: 305455 - DNA, 201 bp, Homo sapiens; identical to SEQ ID NO: 63911

SEQ ID NO: 305456 - DNA, 201 bp, Homo sapiens; identical to SEQ ID NO: 63912

SEQ ID NO: 305457 - DNA, 201 bp, Homo sapiens; identical to SEQ ID NO: 63913

SEQ ID NO: 305458 - DNA, 201 bp, Homo sapiens
aagacaggccacttctgtggccaaacactgtggaagctggggaggaccctgacctggctcaggtgttcacaggccccctctggctgtgtgtggggaacagrtggtggaggacaggaagagtagggagaccaggaaggggctgctgtgagagtcctgatgaggggacgaggtctggagctgtgggtcaggcctctgctgggt

SEQ ID NO: 305459 - DNA, 201 bp, Homo sapiens
agtgggaggcgcaggcggagtgatctgtccagcgagggaggaagcagaagccagaggcacgcggcctgtgcgcttcgaagcgtggggcagtgtcagtcgcrgtggggaaacgggcggcgtgaccaaggcaggagtgagggaacacagggggctgtgtgagcccagaggaagcacctggaggctgggagcatctgaaggaaa

SEQ ID NO: 305460 - DNA, 201 bp, Homo sapiens
caggcggagtgatctgtccagcgagggaggaagcagaagccagaggcacgcggcctgtgcgcttcgaagcgtggggcagtgtcagtcgcagtggggaaacrggcggcgtgaccaaggcaggagtgagggaacacagggggctgtgtgagcccagaggaagcacctggaggctgggagcatctgaaggaaaggaggcagcag

SEQ ID NO: 305461 - DNA, 201 bp, Homo sapiens
aatgaatgaatgaatagtgggggcagaacaggaagagatgctctggggcctgaggttggggccagcttaggagagtcccagaggcccatcgaggagatgcrctgtgcacagggctgtgggcaaggcctgagctctgccggttggactctgtgactttggggcccttggcgatgttgatgccagcaagcggggaacttctgg

SEQ ID NO: 305462 - DNA, 201 bp, Homo sapiens
gggcccctgggagctcggaaaccaatgaatgaatgaatagtgggggcagaacaggaagagatgctctggggcctgaggttggggccagcttaggagagtcycagaggcccatcgaggagatgcgctgtgcacagggctgtgggcaaggcctgagctctgccggttggactctgtgactttggggcccttggcgatgttgat

SEQ ID NO: 305463 - DNA, 201 bp, Homo sapiens
tggggcttgggtgacagccctttgtcacctggaagagagagttcctccgtgaacgtgggcccctcgtgggtggagcgtcatcctgttaggcccggccgacrccccaactgaccccagccccctctgcccacagacacggtccgctctttcctgaagcgcagcaagctcggccggtacaacgaggaggagcgggctcagcag

SEQ ID NO: 305464 - DNA, 201 bp, Homo sapiens
ccttggtgagtatgaggacgtgtcccgggtggagaagtacacgatctcacaagaagcctacgaccagaggcaaggtacgggcaggtgggcgtcgaggggtkcgtgggggccagagggagtatgtgcaggtatgagggcgggcaggttagacagggcccctgcagggaggccagtggtgtagacggggggccgagagcttgg

SEQ ID NO: 305465 - DNA, 201 bp, Homo sapiens
tggagacactgaagtccctgcacccagcacccaggcctccctggccagaccctgatccccacggagcccctcccctcacacaggtcattgaccacagtggygcccgccttggtgagtatgaggacgtgtcccgggtggagaagtacacgatctcacaagaagcctacgaccagaggcaaggtacgggcaggtgggcgtcga

SEQ ID NO: 305466 - DNA, 201 bp, Homo sapiens
ccatccccgtgggcagccgctgtgaggtgcgggcggcgggacaatcccctcgccggggcaccgtcatgtatgtaggtgcgtggctcgcgggcccggtcccrggctccagggctccaaggccgggaggaaatgttgggggcacagtggagcctcggagaccacgctctgcctaggggcgcggggttgggggggactcgaaac

SEQ ID NO: 305467 - DNA, 201 bp, Homo sapiens
agccagggggaactccaggcagggcaaattgggccctggatgttgagaagctgggtaacaagtactgagagaacaaaagcttgtgggtcagcaggccccasaaagatgtgactgcagacaggatcggccctgggagagaccgaggctccaggtgactcctatagcaaggcagtgagggggcgggtctggggctccagttca

SEQ ID NO: 305468 - DNA, 201 bp, Homo sapiens
accagagccctagaccctcggcctgtgctgcccccatcacaacccatcactctgccctgagcttcccctctcccagccatcaccagtctgaactgtcactrtctggggacttgtgtctcctccaccagactgtgagctccatgagggcagaaactggaactgattcaatcaccactgtgcccctagcatcgcccacctcaa

SEQ ID NO: 305469 - DNA, 201 bp, Homo sapiens
cgcaggtgtcccaggcgctgatccgctccttcagctccaccgcccggaaccgctttcagaaccgagtgcgcgagaaacagaagctcttccaggtggggggkcggggggggtggggatccgacgcgccagccgggagcgcgccgagccggggcaggcggggcgcgctctaaggagcagccagcacccctttctcatcagaca

SEQ ID NO: 305470 - DNA, 201 bp, Homo sapiens
tcccaggcgctgatccgctccttcagctccaccgcccggaaccgctttcagaaccgagtgcgcgagaaacagaagctcttccaggtggggggtcggggggsgtggggatccgacgcgccagccgggagcgcgccgagccggggcaggcggggcgcgctctaaggagcagccagcacccctttctcatcagacacccccaca

SEQ ID NO: 305471 - DNA, 201 bp, Homo sapiens
ggataccacacctgacccccatgactgcatctctgtgatccacctgatgttcatcccatttccccacatttccttcttccctgttcctcaccctgatcacrcttgatttattgatggcagttccaccaggcctaatcgccacacaccagcaaaggcaggctatgctatagtacaagccactagcccgcctcttagaacctt

SEQ ID NO: 305472 - DNA, 201 bp, Homo sapiens
tcataacttccaaaatctattttcttcctcacacctgacgcatatactttctgctccctggctccttcagctgttctcactttttgttaagtcccacaatkaccattgttcctggcccggacttcaatccagcctcccacattattccggataccacacctgacccccatgactgcatctctgtgatccacctgatgttca

SEQ ID NO: 305473 - DNA, 201 bp, Homo sapiens
aaagcttgtgggtcagcaggccccacaaagatgtgactgcagacaggatcggccctgggagagaccgaggctccaggtgactcctatagcaaggcagtgarggggcgggtctggggctccagttcaggaatacatagtcagctgcagccactggggagaggagggtggagagtgaggacagggaaccccaagagcaccagc

SEQ ID NO: 305474 - DNA, 201 bp, Homo sapiens
gaacaaaagcttgtgggtcagcaggccccacaaagatgtgactgcagacaggatcggccctgggagagaccgaggctccaggtgactcctatagcaaggcrgtgagggggcgggtctggggctccagttcaggaatacatagtcagctgcagccactggggagaggagggtggagagtgaggacagggaaccccaagagca

SEQ ID NO: 305475 - DNA, 201 bp, Homo sapiens
agtcggggagaaagctcccagcccggtctagatcaaagccagggggctttacaataggagtccaatctgggaagggagctggagtccgaactagagctggrgtccaggctgggaaccagggagcctgaaggccttaaaagcctgggatgtccagggaggggattaggtctcattctgtctccaacgcttcccctttctagg

SEQ ID NO: 305476 - DNA, 201 bp, Homo sapiens
gcacctgggtctggcacggtctggagcttggccgcctgggtagcaaccgtgaagggtgtgccagggcgtgcagggactggagtcatcctcccagaactgaragagggccctcggggcatggaggcatcacaagtgctaggcttggcacaggtacaggggagaggttacggagtgggtgtgtgcagggcctggtgggaatgg

SEQ ID NO: 305477 - DNA, 201 bp, Homo sapiens
acctgggtctggcacggtctggagcttggccgcctgggtagcaaccgtgaagggtgtgccagggcgtgcagggactggagtcatcctcccagaactgagaragggccctcggggcatggaggcatcacaagtgctaggcttggcacaggtacaggggagaggttacggagtgggtgtgtgcagggcctggtgggaatgggg

SEQ ID NO: 305478 - DNA, 201 bp, Homo sapiens
cgttgacaacatcctgtaccgagtgacaatgacgctgtgtctgggcggtgagcgcagggcccgtctgggctgcgggggaggcggggctggacccagagtargaggtggctggtttctgggcaggactgaccaggatctgggttgggggttggcgtttaggaagggggtcgagtactgagctggagtcaggcctgcagggag

SEQ ID NO: 305479 - DNA, 201 bp, Homo sapiens
gaaagatcctgccttagccctcacgttacagatacggaaacaggctcggaggtgcaatctctggctgtgtagacagaacagggagttggaacacggccttmtgcgtttcctcactctcacataccagcgggcagggagagatccggggaggagttgcacttgcccccggcggaaatctccaaaaatctgcaaaaatgtatt

SEQ ID NO: 305480 - DNA, 201 bp, Homo sapiens
ttcaggaatacatagtcagctgcagccactggggagaggagggtggagagtgaggacagggaaccccaagagcaccagcccctttgccctcacccagggayggctggcaaaataggaggaaggggactgcagctcagagctggtatgaagggctgaggggtggggtcctcccaggcacccataccccaatatgggggtcct

SEQ ID NO: 305481 - DNA, 201 bp, Homo sapiens
cactggggcacctgggtctggcacggtctggagcttggccgcctgggtagcaaccgtgaagggtgtgccagggcgtgcagggactggagtcatcctcccaraactgagagagggccctcggggcatggaggcatcacaagtgctaggcttggcacaggtacaggggagaggttacggagtgggtgtgtgcagggcctggtg

SEQ ID NO: 305482 - DNA, 201 bp, Homo sapiens
gctgggaaccagggagcctgaaggccttaaaagcctgggatgtccagggaggggattaggtctcattctgtctccaacgcttcccctttctaggcactgtytacagcttgtactcccttggctgggcctccttccccaggaattaagaccaagaagcctggggggcctgagagacttgaacaagtgtcaataaacgctggc

SEQ ID NO: 305483 - DNA, 201 bp, Homo sapiens
agtcaggcctgcagggaggggagtaactagggtttgggctcttgtcccaggacgggggctgggttagtggtggggctgaggcccagggaggagtcggggasaaagctcccagcccggtctagatcaaagccagggggctttacaataggagtccaatctgggaagggagctggagtccgaactagagctggggtccaggct

SEQ ID NO: 305484 - DNA, 201 bp, Homo sapiens
caggctgggaaccagggagcctgaaggccttaaaagcctgggatgtccagggaggggattaggtctcattctgtctccaacgcttcccctttctaggcacygtctacagcttgtactcccttggctgggcctccttccccaggaattaagaccaagaagcctggggggcctgagagacttgaacaagtgtcaataaacgct

SEQ ID NO: 305485 - DNA, 201 bp, Homo sapiens
gcttagaccctagagtttttgagggggcacctgggctcccctcactcgggatccgttactcctcacagagcccgactctcaggctcttccgtggtccgggractggacagacatggcgtgcacagcctgggactcttggagcggcgcctcgcagaccctgggccccgcccctctcggcccgggccccatccccgccgccgg

SEQ ID NO: 305486 - DNA, 201 bp, Homo sapiens
cccaaaatcacaggtattcttataccacattataacagcaaatgtcacaaaatactatattcattcatgattacttcaaaattgtatttttttttttttttgagacagtgtttttgctctgttgcccaggttggagtgcactggcacaatctcggctcactacaacctccgcctcctgggtttaagcgattcttttgcctc

SEQ ID NO: 305487 - DNA, 201 bp, Homo sapiens
cacgatctcggctcactgcaacctcttctgcctgctgggttcaagcaattctcctgtctcagcctcactagtagctgggattacaggcacccgccaccatrcccagctaattttttgtatttttttttttttttagtaaagacaaggtttcaccatgttgatcaggctgatcttgaactcctgacctcaggtgatccaccc

SEQ ID NO: 305488 - DNA, 201 bp, Homo sapiens
caggaggagaagggtcaggggagactccctggaggaggagacagctgatttgagaagtcaggtaggcaaagaatgtttcaggcagaaggaacaacaagatsaaaggcccagaggcagacgatctcataccactgctcaaaactatcagtgtgggccaggcatagtggctcacacctgtaatctcagcactttggaaggctg

SEQ ID NO: 305489 - DNA, 201 bp, Homo sapiens
tctcaacattttgggaggccaagccgggcagatcatttgaggtcagaagttggagagcagtctgaccaacatggtaaaaccttgtctaaaatacaaaaaaattagcagggcatggtggcaggcgcctgtaatctcagctgttcgggaggctgaggcaacagaattgcttgaatcttggaggcggagtttgcagtgagccta

SEQ ID NO: 305490 - DNA, 201 bp, Homo sapiens
ggagaatcgcttgaaccgagtagacgcaggttgcagtgagccaagttcgtgccactgcactccagcctgggcgacagagtgagactccgtctctctctctmtatatatattttaagggtagggatttttgtgttttgtgcagcgtgctttctcaacccgtaaagtgcctgatggctggatacggtgggtcacgccggtaat

SEQ ID NO: 305491 - DNA, 201 bp, Homo sapiens
cggagggaataacactgtctttccacaggtcacagactgggatgagcaacgggctgaaggcacgtttcccgggaagatctgaactggctgcatctcccttwcctctgtcctccatccttctcccaggatggtgaagggggacctggtacccagtgatccccaccccaggatcctaaatcatgacttacctgctaataaaaa

SEQ ID NO: 305492 - DNA, 201 bp, Homo sapiens
gaccccagcttccctgagaacgggttgaggcttccggctggcggcgtccggcctccctggaccccggggccctgttctgttcatcgtaagagctaacaatkatacggttcttccttgatgccaggcaacatcccaaacaactttaattaatttatttaactctcccaccagccctatgagatagggcctgcgattatcccc

SEQ ID NO: 305493 - DNA, 201 bp, Homo sapiens
ctcagggcccctggggcccctgctgacacccactcctttcgcctccaggattcagcaccatggcggaagacatggagaccaaaatcaagaactacaagacygccccttttgacagccgcttccccaaccagaaccagactagaaactgctggcagaactacctgggtaagcaggacctttccctggccacatacctcgagt

SEQ ID NO: 305494 - DNA, 201 bp, Homo sapiens
gattccccggcctctagaatagaggttggcacacagcaggtacctgtggatattggttgaacaaacaggtgggcaaagtgaggaagataagaagtccatcygttcagtttccccactgcggagggaataacactgtctttccacaggtcacagactgggatgagcaacgggctgaaggcacgtttcccgggaagatctgaa

SEQ ID NO: 305495 - DNA, 201 bp, Homo sapiens
ctttgggaggccgaggtgggcagatcaagaccagcctggccaacatggcgaaaccctgtctctactaaaaatacaaaaattagctgggcatggtggcaggygcctgtaatcccagctacttgagaggctgaggcaggagaatcacttgaacccaggaggaggtagaggttgcagtgagctgagatcgcaccactgcactcc

SEQ ID NO: 305496 - DNA, 201 bp, Homo sapiens
ctagcacacagaaagaatgctaagacacaggaaaagtaagttgcagaacaatctatatagtaggagtcaatttgcaaggatggagtttttatggtgtggtrtgtgtatgtaaataaagtaggcacataccgctggcacttattatgggccagctatgttgttagacctttttttttttttttttttgagatggagtcttgc

SEQ ID NO: 305497 - DNA, 201 bp, Homo sapiens
gcttggtaggctgccgaggctgccacaacgtgtgtggggagggtgtccaggtggggcctctgctgaccctaaccccttatcgcctgcagaaggagccaaaktaggcttctgtttccctgatctggcactccaaggggacacgccgacagcgacagcagagacatgctggaaaggtggctgcgggctgggacccctaagtgc

SEQ ID NO: 305498 - DNA, 201 bp, Homo sapiens
accccaaccctgccgcgacctcgacactcagatgtgtggattcgccctgcccctcatctctgtgtatgttgagaggcaggaacttgttcacacccagcccrttgttccgtgcctgccctcttccattgatcctgggtagtctggcttgctcagggcccctggggcccctgctgacacccactcctttcgcctccaggattc

SEQ ID NO: 305499 - DNA, 201 bp, Homo sapiens
agctgtgactacaggtgcatgccaccatgcctggctaagttttgtattttttgtagagacagggttttgccacattcaccaggctggtctcaaactcctgrgctcaagcgatcctcccacctttgcctcccaaagtgctggaattataggcgtgagccaccatgcccggcttattttttattttttgtagagatgggggtc

SEQ ID NO: 305500 - DNA, 201 bp, Homo sapiens
gcctcctgaatagctgggactacaggcatgagccaccacacctggcccaatttttgtattttttttgtagaaatggggtttcgccttgttgcccagactgktctcgaactcctgagctcaaagcagtctgcctgcctcagcctcccaaagcgctgggattataggcatgagctaccgcacccagctgaatctttcaaaata

SEQ ID NO: 305501 - DNA, 201 bp, Homo sapiens
cacagtaagacagtcctttcagccctgatctgaccaaatctgtcgtcaatatttaatagctctttgctatgcccctgccctttgtttaaaaaaaaaaaaaagtttttaaagacaaggtctcatgatgttgcccaggctagactcgaactcctgggctcaagtgttcctcctgtctcagcctcctgagtagcttggactaca

SEQ ID NO: 305502 - DNA, 201 bp, Homo sapiens
gggctcaagtgttcctcctgtctcagcctcctgagtagcttggactacaggcatgtgccactgtgcctgtctctctctctctctctctctctctctctctytttgtcgccctctcgctctctcttgctctctttctctctcgctctctctttctcactctttctctctttctttcctttctttcttttctttcttgagcct

SEQ ID NO: 305503 - DNA, 201 bp, Homo sapiens
aataaaaactcattggaaaagtgagactatgcgtgtgaacgggccaggcagtggcaagaagctgggctggaatcagtgccctgaccagggaggggcttgartgagtattttctctgttttgtttttatttatttaatttaatttaattttttttttttttatgatggagtctcgttcttcacgcaggctggagtgcaatgg

SEQ ID NO: 305504 - DNA, 201 bp, Homo sapiens
taaaaccctcaggtcctcccttcctgcagctccttctacctcagacactgtgctgagggccccagccggtcagatctttctagtcatctagacccaggctsatggccacccctcagagaggccctccatgctggcccattccaaacgcttgcattattcctaggaaagggatgtactggtacagcatgagggtgtttgtga

SEQ ID NO: 305505 - DNA, 201 bp, Homo sapiens
gatgaatgcatggatgggcgatagagttaagagtcggggcctcagctcctggaggtccttgctctgccggacacacttatctttgaaattctgacttccasgtcgtctctacggacttcctcggtgatacccactcgtccatcttcgatgctaaggccggcattgcgctcaatgacaatttcgtgaagctcatttcatggt

SEQ ID NO: 305506 - DNA, 201 bp, Homo sapiens
gctggccgcccatccagacagggcccccagtagcagaaggagggagcaggagccgaccagacgtgcaagatgcatattgctgggaaggtcgggaaggatgsagagaggagccagggaagccacgctgctatttatcctctctccctctcgccctcttctccacccctcatgactcaattacccctgtgaggcactgagttg

SEQ ID NO: 305507 - DNA, 201 bp, Homo sapiens
ctcagccctcggttgatcccttcaatgaccttctcaatggggtcatcgctggccgcccatccagacagggcccccagtagcagaaggagggagcaggagcygaccagacgtgcaagatgcatattgctgggaaggtcgggaaggatgcagagaggagccagggaagccacgctgctatttatcctctctccctctcgccct

SEQ ID NO: 305508 - DNA, 201 bp, Homo sapiens
ccatgtaaaagtgatgttcatggcgcttcgcgtgaggtgagctttgccctccctgtgatgcacaaaacaaggacacttggaaccttgccggggacgtgctsaccacttcgcaggcgagagctcagggaagcctcaccaccacctgagaaggccagagtgtgcccgcagtttacagagcggccaacagaggttaagagaggg

SEQ ID NO: 305509 - DNA, 201 bp, Homo sapiens
cactgttgatgccatccagggccttgcccacctctctctctgcattgctcagccctcggttgatcccttcaatgaccttctcaatggggtcatcgctggcygcccatccagacagggcccccagtagcagaaggagggagcaggagccgaccagacgtgcaagatgcatattgctgggaaggtcgggaaggatgcagagag

SEQ ID NO: 305510 - DNA, 201 bp, Homo sapiens
aatttaaaaattagcttggcatggtggtgtgcgcctgtagtcccagctactcgggaggccaaggcaggaggatggccggagccaggaagatcaaggctgcrgtgagctctgattgcaccactgcactccagcctgggcgacagaggaagaccctgtctcaaaacaaacaaaccccacaaacattgattgaaccccccattg

SEQ ID NO: 305511 - DNA, 201 bp, Homo sapiens
gaacccaggggtgctgggcttccatgtaaaagtgatgttcatggcgcttcgcgtgaggtgagctttgccctccctgtgatgcacaaaacaaggacacttgsaaccttgccggggacgtgctgaccacttcgcaggcgagagctcagggaagcctcaccaccacctgagaaggccagagtgtgcccgcagtttacagagcgg

SEQ ID NO: 305512 - DNA, 201 bp, Homo sapiens
gtccagcctcaggccacaaggtctgtggcaacagggagaggtcagggagacagacaggccagctggcccccggctcccagccccaccaccccccaggtgcmtttgatttggtgccaaaaacttggactcccactacccccttccagcccttctccaccccctgctgtctccctttcctcaggaatctgtgtaggatcagac

SEQ ID NO: 305513 - DNA, 201 bp, Homo sapiens
aacccaggaggcagaggttgcaatgagcccagatagcgccactgcactccagcctgggcgaaagagctggattccatctcaaaatatatatatatatatawgtatatatgggttagggaacggattgggagagggagctgaaaaagcagttaaaggggctggtgaggtcatcttggcaagagatgcccatggccagcacag

SEQ ID NO: 305514 - DNA, 201 bp, Homo sapiens
gaacccaggaggcagaggttgcaatgagcccagatagcgccactgcactccagcctgggcgaaagagctggattccatctcaaaatatatatatatatatatgtatatatgggttagggaacggattgggagagggagctgaaaaagcagttaaaggggctggtgaggtcatcttggcaagagatgcccatggccagcaca

SEQ ID NO: 305515 - DNA, 201 bp, Homo sapiens
agttgggggagtttagaattttatttttggctgacattcacctttctaatgtaaactattagcgactcctggctctgtggctgcctggggcttttacacayacacacccacaggcccacacacatgcaaatacacacaggcacactagtgaaccctgtctgggcccaggcagggtctgcagcctccccagcgcccctcccc

SEQ ID NO: 305516 - DNA, 201 bp, Homo sapiens
gccagagtgtgcccgcagtttacagagcggccaacagaggttaagagagggcaaactacttccttagtctctcaacaagggcggcgcgcccgcgcgcgcgcacacacacacacacacactcactcactcactctagccggaggaaccaggtcttccggtgggctgcctccattcccacactgttccctcacttcccaaggg

SEQ ID NO: 305517 - DNA, 201 bp, Homo sapiens
ggccagagtgtgcccgcagtttacagagcggccaacagaggttaagagagggcaaactacttccttagtctctcaacaagggcggcgcgcccgcgcgcgcgcacacacacacacacacactcactcactcactctagccggaggaaccaggtcttccggtgggctgcctccattcccacactgttccctcacttcccaagg

SEQ ID NO: 305518 - DNA, 201 bp, Homo sapiens
gtcacgaggggccaggagccagcaacagattctgggcagcaaagacagtttgttctctttcactttggtggtcatgcaacccattccctcccttcccccgyatagtgaccagagcaccgcccccacctgagcctaaggctgaagtagagccccagccacaaccagagcccacaccagtcagggaggaaataaagccaccac

SEQ ID NO: 305519 - DNA, 201 bp, Homo sapiens
gaaggccagagtgtgcccgcagtttacagagcggccaacagaggttaagagagggcaaactacttccttagtctctcaacaagggcggcgcgcccgcgcgygcgcacacacacacacacacactcactcactcactctagccggaggaaccaggtcttccggtgggctgcctccattcccacactgttccctcacttccca

SEQ ID NO: 305520 - DNA, 201 bp, Homo sapiens
ggctccttgagggagcctcctctccattacccccttctctcccatcccttcctgtctgtccctggccagatttggacgcatcggtcgcctggtcctgcgckcctgcatggagaagggtgttaaggtggtggctgtgaatgatccattcattgacccggaatacatggtcagtagctggcagagggcaggaacagcagggtg

SEQ ID NO: 305521 - DNA, 201 bp, Homo sapiens
tggagtgctgattaaaaacaggatttctgggcctccatacagacccactgagtccgatttttctaggaagagccctcctcaggtgatttttttttttttttgagacagagtctcactctgtcgcccaggctggagtgcagtggcgcaatctcggctcactgcaccctccgcctcccaggttcaagagattctcttgcctca

SEQ ID NO: 305522 - DNA, 201 bp, Homo sapiens
cacacacacacactcactcactcactctagccggaggaaccaggtcttccggtgggctgcctccattcccacactgttccctcacttcccaagggcgggggccgcaggggtaggtggggctggggctttggtccaggagaccctggaagacacaggagcagacaggcttaccagcctcatgagacttgaacccctgccctg

SEQ ID NO: 305523 - DNA, 201 bp, Homo sapiens
ttctctgtctccttccagccctcactgagaccatggtgggccccctggccaaatctcccagcctcatttccggcctgccctgcagcatggtggactccctkgccaaacctcccagcctcatttccggcctgccctgcagcattgtcgactccctggccaaacttccctgcctcacttcccgcctggttggccccgtgatgg

SEQ ID NO: 305524 - DNA, 201 bp, Homo sapiens
caaacttctctgcctccttcccaacctgaccggcagcatggtggatcccctggccaaacttctctgtctccttccagccctcactgagaccatggtgggcyccctggccaaatctcccagcctcatttccggcctgccctgcagcatggtggactccctggccaaacctcccagcctcatttccggcctgccctgcagcat

SEQ ID NO: 305525 - DNA, 201 bp, Homo sapiens
gccaaacttctctgcctccttcccaacctgaccggcagcatggtggatcccctggccaaacttctctgtctccttccagccctcactgagaccatggtggrccccctggccaaatctcccagcctcatttccggcctgccctgcagcatggtggactccctggccaaacctcccagcctcatttccggcctgccctgcagc

SEQ ID NO: 305526 - DNA, 201 bp, Homo sapiens
agctggggggatgatggtgccagaagcccctgacacctgcgcttcctccccaggaccacatctctgcaggtgctcaacgtgtggtcatctccgcgccctcrccggatgcaccaatgttcgtcatgggtgtcaatgaaaatgactataaccctggctccatgaacattgtgaggtaatgtgggcagtgacatcctgcaatgt

SEQ ID NO: 305527 - DNA, 201 bp, Homo sapiens
ctgtctgtccctggccagatttggacgcatcggtcgcctggtcctgcgcgcctgcatggagaagggtgttaaggtggtggctgtgaatgatccattcattracccggaatacatggtcagtagctggcagagggcaggaacagcagggtgggactggggtgggaaagggactcagggaagctgtatggaaggctctcagct

SEQ ID NO: 305528 - DNA, 201 bp, Homo sapiens
ccaggcgcaggtgtttttaagtgcagtctgggagcaggagtgtgtgtggagaggtgggagccaatgtgagcttccatgggtttcacagagtatgatacacrgtactctctaagcttccctgaggataagaaatgcctggagtgcttattttattttttatttttttttgggagatggagtttcgctcttgttgcccaggct

SEQ ID NO: 305529 - DNA, 201 bp, Homo sapiens
tagtgaccagagcaccgcccccacctgagcctaaggctgaagtagagccccagccacaaccagagcccacaccagtcagggaggaaataaagccaccaccrccaccactgcctcctcaccccgctactcctcctcctaagatggtgtctgtggcccgggagctgactgtgggcatcaatgggtgagtctactccagcccct

SEQ ID NO: 305530 - DNA, 201 bp, Homo sapiens
cacccctaaaatgattaagaagcactaatctaaaaagatgcctcactgtactgaagaatgctttttctttatattttttttagggacggggtatcactctyttgcccagtctggagtgcagtggtgtaatcatagctcaccgcatccttgacctcccgggctcaagtggtcctcccacctcggcctcccaagtagtgggca

SEQ ID NO: 305531 - DNA, 201 bp, Homo sapiens
actacacctggctaatttttgtatttttagtagagatggagtttcaccatgttggccaggctggtctcaaactcctgacctcaggtggtctacctgcctcrgcctcccaaagtgctgggattacatgtgtgagccactgcacccagccaaaatcagccccttttgaatcctggttttgttgaggttatatttttcacctcc

SEQ ID NO: 305532 - DNA, 201 bp, Homo sapiens
cctccttcccaacctgaccggcagcatggtggatcccctggccaaacttctctgtctccttccagccctcactgagaccatggtgggccccctggccaaayctcccagcctcatttccggcctgccctgcagcatggtggactccctggccaaacctcccagcctcatttccggcctgccctgcagcattgtcgactccct

SEQ ID NO: 305533 - DNA, 201 bp, Homo sapiens
actgtactgaagaatgctttttctttatattttttttagggacggggtatcactcttttgcccagtctggagtgcagtggtgtaatcatagctcaccgcakccttgacctcccgggctcaagtggtcctcccacctcggcctcccaagtagtgggcaccagccaccacacctggcaaattttttgtagagatgaggtcttg

SEQ ID NO: 305534 - DNA, 201 bp, Homo sapiens
ccgtggaacggtgatgcatagcgtgctgacgtcccatgcctctacggggatgggatgcgatggtgtcaggcctctggcttgggcgccgcccctcggcgacrtcactgggtactgtgacgtcactgggtgctgtgacatcagggcaattagcccaggacccacagccctggcgctccgcacgcacctcggtaacatcacagc

SEQ ID NO: 305535 - DNA, 201 bp, Homo sapiens
gactggagagtcagtgaaaattgaagaaagctgcttaacccaagtttgaaatcatgacactagaaacaactccagcaccatagttatcacgcagacttcamcgtggccaccaccattaccgccacttggagtcatccctcttccccacctagctgccccctccgtccacggtcccgactcaggtcttgccttctctggtca

SEQ ID NO: 305536 - DNA, 201 bp, Homo sapiens
tctcaccctcatcctgacgtttcataaaaccaagtctgcgtgcataccccaagaggggtaagggtggaggggtggctctgcgactcacctcacagtgtccrtgcacaccttggctgtttcagcaacgcgtcctgcaccaccaactgtttggctcccctcgccaaagtcatccacgagcgatttgggatcgtggaagggttg

SEQ ID NO: 305537 - DNA, 201 bp, Homo sapiens
agaagcccctgacacctgcgcttcctccccaggaccacatctctgcaggtgctcaacgtgtggtcatctccgcgccctcaccggatgcaccaatgttcgtyatgggtgtcaatgaaaatgactataaccctggctccatgaacattgtgaggtaatgtgggcagtgacatcctgcaatgtgtggaagggagggtagactcg

SEQ ID NO: 305538 - DNA, 201 bp, Homo sapiens
tagcgactcctggctctgtggctgcctggggcttttacacatacacacccacaggcccacacacatgcaaatacacacaggcacactagtgaaccctgtcygggcccaggcagggtctgcagcctccccagcgcccctccccacagatctaatctcagcccttctccttgtacttactgggggtagggtgagtgataaagg

SEQ ID NO: 305539 - DNA, 201 bp, Homo sapiens
ctctggcttgggcgccgcccctcggcgacgtcactgggtactgtgacgtcactgggtgctgtgacatcagggcaattagcccaggacccacagccctggcsctccgcacgcacctcggtaacatcacagcaggtccaggccaatgataaccttataagaggccatgtcgaagcgcgacatcgtcctcaccaatgtcaccgt

SEQ ID NO: 305540 - DNA, 201 bp, Homo sapiens
gctgttcctttagtctggaatgcttcccttgccaggtgaccatacagtctgtccttacttcctccaagtctctggaggaacctccctcttcagcaaggcamcccctcaaaatatgttctttttgtggccatattcctcacctgaaatttcatttcatagtcactgttggccccagtggtgtgtgcactccaagaaaacagg

SEQ ID NO: 305541 - DNA, 201 bp, Homo sapiens
cgcatcggtcgcctggtcctgcgcgcctgcatggagaagggtgttaaggtggtggctgtgaatgatccattcattgacccggaatacatggtcagtagctrgcagagggcaggaacagcagggtgggactggggtgggaaagggactcagggaagctgtatggaaggctctcagctgtaatgtgagaccttcaccaaagag

SEQ ID NO: 305542 - DNA, 201 bp, Homo sapiens
gagaaggccagagtgtgcccgcagtttacagagcggccaacagaggttaagagagggcaaactacttccttagtctctcaacaagggcggcgcgcccgcgmgcgcgcacacacacacacacacactcactcactcactctagccggaggaaccaggtcttccggtgggctgcctccattcccacactgttccctcacttcc

SEQ ID NO: 305543 - DNA, 201 bp, Homo sapiens
tgcagaagtcacttaaaacactgtgcaaccctcaggcaaggctggaccctggcctgcacacatcccctcctgtggtctgtggtggtggccccaccagcctycacacctaggccaccaacttagtcctggaaaaaagaggcatgggagcttaggagcatgaaggcctcatcttggtccttctcttccccaagaccacagtcc

SEQ ID NO: 305544 - DNA, 201 bp, Homo sapiens
tgagaccatggtgggccccctggccaaatctcccagcctcatttccggcctgccctgcagcatggtggactccctggccaaacctcccagcctcatttccrgcctgccctgcagcattgtcgactccctggccaaacttccctgcctcacttcccgcctggttggccccgtgatggaccccatgatggatcagtttgtctg

SEQ ID NO: 305545 - DNA, 201 bp, Homo sapiens
ccgcccgcacctcacagcggctgcccacggggatggagctggcctgggccttctcctcggccaggcgctgggcggcctcggcctcctgctgagcccgctcytcctcgttgtaccggccgagcttgctgcgcttcaggaaagagcggaccgtgtctgtgggcagagggggctggggtcagttggggcgtcggccgggcctaa

SEQ ID NO: 305546 - DNA, 201 bp, Homo sapiens
cactcgccctctcgtagtgccggaactgtgattaccagcaggaggccgacaacagctgcatctatgtcaacaagatcacgcacgaagtggagtgagtggcrggccctgagctgggggcgggggtgttggctctggaggctgggtctgagcgtaattttgcacccccgcgtccctgcagcgaactgacccagattatcgccg

SEQ ID NO: 305547 - DNA, 201 bp, Homo sapiens; identical to SEQ ID NO: 63964

SEQ ID NO: 305548 - DNA, 201 bp, Homo sapiens
ccatgggcacacacaggaggggcagtcagtggctgagctaggagctgaagcaggggaattccttaggtgtcatatctcgtccaacccgtagtcctcctccrggaagtcccccaccgtcacgactgctggcttgacaaaggcgccatacttggcctggcattcgaagtagcgtttcccattcacactgcaggaaaggatagg

SEQ ID NO: 305549 - DNA, 201 bp, Homo sapiens
tggagcccgacgggacttacgagccgggcttcgtgggtattcgcttctgccaggaatggtgaggcggagggagcgggtgatgttagaaggcgggcgaggartggctccaggactaacccctggcacctccccctccccacagtaacaacatgctgtaccccaaggaagacaaggagaaccgcattctgctctacgcggtga

SEQ ID NO: 305550 - DNA, 201 bp, Homo sapiens
ccagcaactccagtttacactgtgaggaggaggcagggtgagaagaaggaggccacggaggccccgccccttgcatcaatgaccatcgccacgtccctttkcctccaaaagaccccccagtcaggacgcacggggccgcaatccagcccctcgcctcttgcccccgccctctggaccgtcggatttttcgctggacccggc

SEQ ID NO: 305551 - DNA, 201 bp, Homo sapiens
caggtgacaaagggctgtcacccaagccccaggtctcccaccacagccttagcctctcccaggactcctaggccccccaactccacaatcgtaaatggaargggtgccgcctgcacccctcactacaggacccatggtctctcaccccttcagcgcacatctgccttcatcatccgccttcctcctccgccctcctccggc

SEQ ID NO: 305552 - DNA, 201 bp, Homo sapiens
catgggcagctcagcaagcagcacgcatggacttacacacaaatgcacacacagacacctgagtgggaattcttgttacctgccatcatttttccccagtkgctcatcatagcggacaccaatccagtagccaggcttgaaatctgtgagacctgccaacagaagagaaatccctgtgaagcttctggacatagaagaaat

SEQ ID NO: 305553 - DNA, 201 bp, Homo sapiens; identical to SEQ ID NO: 63958

SEQ ID NO: 305554 - DNA, 201 bp, Homo sapiens; identical to SEQ ID NO: 63959

SEQ ID NO: 305555 - DNA, 201 bp, Homo sapiens; identical to SEQ ID NO: 63960

SEQ ID NO: 305556 - DNA, 201 bp, Homo sapiens
acccagcagaggcctgacccacagctccagacctcgtcccctcatcaggactctcacagcagccccttcctggtctccctactcttcctgtcctccaccayctgttccccacacacagccagagggggcctgtgaacacctgagccaggtcagggtcctccccagcttccacagtgtttggccacagaagtggcctgtctt

SEQ ID NO: 305557 - DNA, 201 bp, Homo sapiens
agggtgtgaagcctccggtgaccgagcccctaccctctcaggtgcggccacaaggaggctgtgttcttccagtcacacagtgcgcgggccgaggtaagtgscgcgagggctttctaagtatctggggcttgtttggtcctttctgggggcggggatatcaatgtgggtgaccctgcgcttcttggaactctgccgggccct

SEQ ID NO: 305558 - DNA, 201 bp, Homo sapiens
ggcacttgaggtgccttgtcagcatgcgctgcagagggaaggccttagggcagagcgggcagcccagcgtccctgggcccctgggagcagaggtcaggttkccctgtgtgggctgctggagggatgcaggagttattagcctctctggctggaccccatccaccctttgttactctgcaaatgagtatttacagagtgtcc

SEQ ID NO: 305559 - DNA, 201 bp, Homo sapiens
ccagaagttccccgcttgctggcatcaacatcgccaagggccccaaagtcacagagtccaaccggcagagctcaggccttgcccacagccctgtgcacagygcatctcctcgatgggcctctgggactctcctaagctggccccaacctcaggccccagagcatctcttcctgttctgcccccactattcattcattcatt

SEQ ID NO: 305560 - DNA, 201 bp, Homo sapiens
atcaacatcgccaagggccccaaagtcacagagtccaaccggcagagctcaggccttgcccacagccctgtgcacagcgcatctcctcgatgggcctctgrgactctcctaagctggccccaacctcaggccccagagcatctcttcctgttctgcccccactattcattcattcattggtttccgagctcccaggggccc

SEQ ID NO: 305561 - DNA, 201 bp, Homo sapiens
ctgctgagcccgctcctcctcgttgtaccggccgagcttgctgcgcttcaggaaagagcggaccgtgtctgtgggcagagggggctggggtcagttggggygtcggccgggcctaacaggatgacgctccacccacgaggggcccacgttcacggaggaactctctcttccaggtgacaaagggctgtcacccaagcccca

SEQ ID NO: 305562 - DNA, 201 bp, Homo sapiens
ccaagctctcggccccccgtctacaccactggcctccctgcaggggccctgtctaacctgcccgccctcatacctgcacatactccctctggcccccacgmacccctcgacgcccacctgcccgtaccttgcctctggtcgtaggcttcttgtgagatcgtgtacttctccacccgggacacgtcctcatactcaccaagg

SEQ ID NO: 305563 - DNA, 201 bp, Homo sapiens
tcgacgcccacctgcccgtaccttgcctctggtcgtaggcttcttgtgagatcgtgtacttctccacccgggacacgtcctcatactcaccaaggcgggcrccactgtggtcaatgacctgtgtgaggggaggggctccgtggggatcagggtctggccagggaggcctgggtgctgggtgcagggacttcagtgtctcca

SEQ ID NO: 305564 - DNA, 201 bp, Homo sapiens
gtgttcttccagtcacacagtgcgcgggccgaggtaagtggcgcgagggctttctaagtatctggggcttgtttggtcctttctgggggcggggatatcartgtgggtgaccctgcgcttcttggaactctgccgggcccttacctattggtgaagttctcttgcctgttcttttggggtaaggcgctgctgggtccaaat

SEQ ID NO: 305565 - DNA, 201 bp, Homo sapiens
tgcgcttcttggaactctgccgggcccttacctattggtgaagttctcttgcctgttcttttggggtaaggcgctgctgggtccaaatccttcctaaccatgcatcatttctgccaggacgccatgcgcctttactacgtgtgcacagccccacactgcggccaccgctggaccgagtgacctcctctctcccccgagtgt

SEQ ID NO: 305566 - DNA, 201 bp, Homo sapiens
gtttcgagtcccccccaaccccgcgcccctaggcagagcgtggtctccgaggctccactgtgcccccaacatttcctcccggccttggagccctggagccygggaccgggcccgcgagccacgcacctacatacatgacggtgccccggcgaggggattgtcccgccgcccgcacctcacagcggctgcccacggggatgg

SEQ ID NO: 305567 - DNA, 201 bp, Homo sapiens
gagtggatgtgggggtgagggagagagcgggcccaaggaacaccctgaggtgtctggcctaagccactgggctaacatggcaaaataggaatggcctttayctccggatgaagcgtcactgagaatttctgttgagaattttcacaaatttgaagttctgttattttaaacaatgaatatgggtgatatttataaagagaa

SEQ ID NO: 305568 - DNA, 201 bp, Homo sapiens
tccgggaagtcccccaccgtcacgactgctggcttgacaaaggcgccatacttggcctggcattcgaagtagcgtttcccattcacactgcaggaaaggayaggggtgggtgtggtcagaggaccctcacatggctccactctagaagctggcatgggcagctcagcaagcagcacgcatggacttacacacaaatgcaca

SEQ ID NO: 305569 - DNA, 201 bp, Homo sapiens
aaaggacatgaacacacacttctcaaaagacgacatactggccgggtgcggtggctcacgcctgtaatcccagcactttagtaggctgaggagggtggatmacgaggtcaggagatcgagaccatcctggctaacacggtgaagccccgtctctactaaaaatacaaaaaattagccgggtgtggtggcgggcgcctgtag

SEQ ID NO: 305570 - DNA, 201 bp, Homo sapiens
agtgggtggtgcgggtggggtggagcgagccagagggagagtggaagacacaagggactgctggagactttgggttttttttttttttttgacggagtctygctctgtcacccaggctggagtgtggtggtgtgatctcagctcacggaaacctctgcctcactgcaaattcaagtgattctcctgcctcagcctcccggg

SEQ ID NO: 305571 - DNA, 201 bp, Homo sapiens; identical to SEQ ID NO: 63956

SEQ ID NO: 305572 - DNA, 201 bp, Homo sapiens; identical to SEQ ID NO: 63957

SEQ ID NO: 305573 - DNA, 201 bp, Homo sapiens
taagcgtagctggccggctgtccatgcaccttagcaaggtgagcttccagggagcagcgctgcgtaaacgctttcccgcaagcactgcagcggaagggcckgatccctgcacagatgggcgcagaggggagggctggacagagagggcaatgggctctggactaaagcgcccccaccctgctttccagtgttgagcatttc

SEQ ID NO: 305574 - DNA, 201 bp, Homo sapiens
ccacggggatggagctggcctgggccttctcctcggccaggcgctgggcggcctcggcctcctgctgagcccgctcctcctcgttgtaccggccgagcttkctgcgcttcaggaaagagcggaccgtgtctgtgggcagagggggctggggtcagttggggcgtcggccgggcctaacaggatgacgctccacccacgagg

SEQ ID NO: 305575 - DNA, 201 bp, Homo sapiens
ggcacaggtggcggcgcacggggctgtggcacttgaggtgccttgtcagcatgcgctgcagagggaaggccttagggcagagcgggcagcccagcgtcccwgggcccctgggagcagaggtcaggttgccctgtgtgggctgctggagggatgcaggagttattagcctctctggctggaccccatccaccctttgttact

SEQ ID NO: 305576 - DNA, 201 bp, Homo sapiens
gccctgagctgggggcgggggtgttggctctggaggctgggtctgagcgtaattttgcacccccgcgtccctgcagcgaactgacccagattatcgccgaygtgtcccaggaccccacgttgccgcggaccgaggaccacccgtgccaaaagtgagcgttcagctggtactggggaggtaaagtgaggctcgtctcctcac

SEQ ID NO: 305577 - DNA, 201 bp, Homo sapiens
ctaagctgattccgattgcctatttctaatagaggcggggtatgggttgcagcggcggggaggggcagtttccccggtaagggcagtttctgcaggaaggrcagttcatagagcaaaggacaaggaagttagatttttgaagaggaactcattctgtctaacattaccaacactttcgctcccggggctctgacatctcgc

SEQ ID NO: 305578 - DNA, 201 bp, Homo sapiens
cgcgtcgccatggagcccgacgggacttacgagccgggcttcgtgggtattcgcttctgccaggaatggtgaggcggagggagcgggtgatgttagaaggygggcgaggaatggctccaggactaacccctggcacctccccctccccacagtaacaacatgctgtaccccaaggaagacaaggagaaccgcattctgctc

SEQ ID NO: 305579 - DNA, 201 bp, Homo sapiens; identical to SEQ ID NO: 63953

SEQ ID NO: 305580 - DNA, 201 bp, Homo sapiens
ggtgatgttagaaggcgggcgaggaatggctccaggactaacccctggcacctccccctccccacagtaacaacatgctgtaccccaaggaagacaaggaraaccgcattctgctctacgcggtgagcgccggggtcttccccggcaggtccacctgttcccagcgtggccccgccctgccccctgcctctgtgatcggac

SEQ ID NO: 305581 - DNA, 201 bp, Homo sapiens
gcctgctgtgaggattaaaggaaaccagcccagtaactgttggctgtataatccttaataatgtgacacgccacgtgctggtgtcacggcatggagtctcrctgtgtcacccaggctggagtgcagtggtgtgaacacagctcactgcagcttctacctcccaaggctcaagtgatcctaccacctagccttccaagtagc

SEQ ID NO: 305582 - DNA, 201 bp, Homo sapiens
tccaggactaacccctggcacctccccctccccacagtaacaacatgctgtaccccaaggaagacaaggagaaccgcattctgctctacgcggtgagcgcyggggtcttccccggcaggtccacctgttcccagcgtggccccgccctgccccctgcctctgtgatcggactccctgttcgccctccgctgcacctcaagt

SEQ ID NO: 305583 - DNA, 201 bp, Homo sapiens
cgggacttacgagccgggcttcgtgggtattcgcttctgccaggaatggtgaggcggagggagcgggtgatgttagaaggcgggcgaggaatggctccagractaacccctggcacctccccctccccacagtaacaacatgctgtaccccaaggaagacaaggagaaccgcattctgctctacgcggtgagcgccggggt

SEQ ID NO: 305584 - DNA, 201 bp, Homo sapiens
aggcggcggggagccagcacgtgtgcgcagctccgccctcttttggcgaagcacctaggcctggcccctcccgcgacctgtagcgcggcggagcaagcgcrgaaggctgggagggctgcgcgggctgcgcgtcgccatggagcccgacgggacttacgagccgggcttcgtgggtattcgcttctgccaggaatggtgagg

SEQ ID NO: 305585 - DNA, 201 bp, Homo sapiens
tttccttcagatgctcccagcctccaggtgcttcctctgggctcacacagccccctgtgttccctcactcctgccttggtcacgccgcccgtttccccacygcgactgacactgccccacgcttcgaagcgcacaggccgcgtgcctctggcttctgcttcctccctcgctggacagatcactccgcctgcgcctcccact

SEQ ID NO: 305586 - DNA, 201 bp, Homo sapiens
cgagcccctaccctctcaggtgcggccacaaggaggctgtgttcttccagtcacacagtgcgcgggccgaggtaagtggcgcgagggctttctaagtatckggggcttgtttggtcctttctgggggcggggatatcaatgtgggtgaccctgcgcttcttggaactctgccgggcccttacctattggtgaagttctctt

SEQ ID NO: 305587 - DNA, 201 bp, Homo sapiens
ctgctgcctcctttccttcagatgctcccagcctccaggtgcttcctctgggctcacacagccccctgtgttccctcactcctgccttggtcacgccgccygtttccccactgcgactgacactgccccacgcttcgaagcgcacaggccgcgtgcctctggcttctgcttcctccctcgctggacagatcactccgcctg

SEQ ID NO: 305588 - DNA, 201 bp, Homo sapiens
aagctcggctgtctgtaccggatgcccgcgcctgcgctgcaccgcccttcgcggagcgcggagccaaatgcctacatcccacaatcccccgcaacgccggsaggggcgagacctcagcttccagctctgggcaagaccaggctcagattgtcgcgtagttttctgggaaatgccgtttgcgttccaggatgcttatgccac

SEQ ID NO: 305589 - DNA, 201 bp, Homo sapiens
tgggatataggcatctccccggagctggtcaggcagatggccccagttggggggctgtggacgccgactcctgaccaggaaggcgcggggcatgccctccrgaaggctctccacacacaggggctgcttccacctgctgtcagacctcagccccaggatgactatccctggtgggaaaggaggggaagcctctgaggaacc

SEQ ID NO: 305590 - DNA, 201 bp, Homo sapiens
tgcgcagctccgccctcttttggcgaagcacctaggcctggcccctcccgcgacctgtagcgcggcggagcaagcgcggaaggctgggagggctgcgcggrctgcgcgtcgccatggagcccgacgggacttacgagccgggcttcgtgggtattcgcttctgccaggaatggtgaggcggagggagcgggtgatgttaga

SEQ ID NO: 305591 - DNA, 201 bp, Homo sapiens
gacctatcaggtctgccacatccacgctggccttcatgaactcctgcgggtcaggttgaggcttaagtaagcacagggggacagggagccccattcctgarctcccttcccttccctggcccctctcaccccaatgaagtcatagatgccgccttcccaggtgggaaagaaagtggccaagaacagcatctgagaacagaa

SEQ ID NO: 305592 - DNA, 201 bp, Homo sapiens
accatgaaatgagcttcacgaaattgtcattgagcgcaatgccggccttagcatcgaagatggacgagtgggtatcaccgaggaagtccgtagagacgacstggaagtcagaatttcaaagataagtgtgtccggcagagcaaggacctccaggagctgaggccccgactcttaactctatcgcccatccatgcattcatc

SEQ ID NO: 305593 - DNA, 201 bp, Homo sapiens
tacagggccaaagtgctgagggccagcagccccgttaccactgctcgggccagtagagctgcccaactgcccagcgagcagaggtggacgaaggtcctgcrggaaaatgtcacaataaggaagggagactagataacccaccccactttggacccagccctaaaccccacccaactcactccataacaaaggccttgtaga

SEQ ID NO: 305594 - DNA, 201 bp, Homo sapiens
ccactggcagtgactggctgtccttcagctcacacggcagtgcacaccccactgccgccccctatccctgagtcgcgccttggcccccctgcaggcaccgygcagggcctggtggtgaacacgggcgaccgcaccatcattgggcgcatcgcatcgctggcgtcgggggtggaaaacgagaagacacccatcgctatcgag

SEQ ID NO: 305595 - DNA, 201 bp, Homo sapiens
gtgtgcccagggctcttccctgacttccccgtttccggtcaggcttctgccagctctacctgaatgagaaggactacccgcctggctatgccttcgacgtrgaggccatgaactttccatctagcggcctctgctttgcgggacttgtatccatgattgacccaccccgggccaccgtccctgatgctgtgctcaagtgtc

SEQ ID NO: 305596 - DNA, 201 bp, Homo sapiens
cagctctcagagcccgcaccgagctctcggccccgcccctctcctcagccccgccccgttccctcgtccacagccccgccccgttcccccgtccacagccycgcctctcccccccgcccacagctgtccatccatacgctggaggacccgcgggacccgcgacacttgctggtgatgaagggcgcccccgagcgcgtgctg

SEQ ID NO: 305597 - DNA, 201 bp, Homo sapiens
caccgagctctcggccccgcccctctcctcagccccgccccgttccctcgtccacagccccgccccgttcccccgtccacagcctcgcctctcccccccgyccacagctgtccatccatacgctggaggacccgcgggacccgcgacacttgctggtgatgaagggcgcccccgagcgcgtgctggagcgctgcagctcca

SEQ ID NO: 305598 - DNA, 201 bp, Homo sapiens
acactcttgggcacagagtgacagacaagacctgtgtgtgcaatgacagccagtgcaggacacatgggtggcaggcaggtgaacagacctaaatggacatacctacagccatgcacacacaggcggacactcaggtaggcccgggccgacccatgcacacacatgactcagatacagatactcagacagagatggaaacag

SEQ ID NO: 305599 - DNA, 201 bp, Homo sapiens
tccttccccccacccccacactctgatgcaaggcagagagagcatttaggggttcacggccctgggaccctatgcccggtgggctgcagaggctctccgcygggactcaggctggactcaggctgtttccgtttgcccctggcctgcagacattcgggcagcgcctgtaccagcagtacacctgctacaccgtgttcttca

SEQ ID NO: 305600 - DNA, 201 bp, Homo sapiens
cactcttgggcacagagtgacagacaagacctgtgtgtgcaatgacagccagtgcaggacacatgggtggcaggcaggtgaacagacctaaatggacatacctacagccatgcacacacaggcggacactcaggtaggcccgggccgacccatgcacacacatgactcagatacagatactcagacagagatggaaacaga

SEQ ID NO: 305601 - DNA, 201 bp, Homo sapiens
gattaaatgagctaatgcacgtgcaacactcggcacctggagcagtcagtgatccccacagttagctggtattaggagttgtgttgccaggcatggtggcrcatgcttgtaattccagctacttgggaggctaaggcaggagaatctcctgaacctgggattcggaagttgcagtgagctgagattgcaccactgcactcc

SEQ ID NO: 305602 - DNA, 201 bp, Homo sapiens
ctgcccctctgtcccagggcctctctgcgagcctggctgctgagctgctgctgcgggatgggcccaacgcactgcggccaccacggggcaccccagagtaygtcaagttcgcgaggcagctggccgggggcctgcagtgcctcatgtgggttgccgccgccatctgcctcatcgcctttgccatccaggctagtgaggggg

SEQ ID NO: 305603 - DNA, 201 bp, Homo sapiens
actcttgggcacagagtgacagacaagacctgtgtgtgcaatgacagccagtgcaggacacatgggtggcaggcaggtgaacagacctaaatggacatacctacagccatgcacacacaggcggacactcaggtaggcccgggccgacccatgcacacacatgactcagatacagatactcagacagagatggaaacagaa

SEQ ID NO: 305604 - DNA, 201 bp, Homo sapiens
gtgtatgtgggagagcacgactgcctaccagactgatgttggagtctatgctcatctggatgtacttccagtcaaactcaatgccccgggctccgacccayaggggaatgcagctgaggaaggcaaaggatgggattctccagtactcagacaccttcagcaccaggctttgagcccctgccctccagcacccccgtggaa

SEQ ID NO: 305605 - DNA, 201 bp, Homo sapiens
ctcctacttccagattggtgggtgcccgtgggccggggagcctggaggtggggggctctgcgctgggctgctcgcctgccccaggccctgccttgggctcyggctggttctggacctcagtgtctgcatttggtcctgggtctccgttgtcctccgtgtccctctctgtttgtgacagtctctctggttctgctgtgtccc

SEQ ID NO: 305606 - DNA, 201 bp, Homo sapiens
tccctctctctcccaggctggtgggaccaggaactctactattagagggacgactgccttcaagcatccctgcaactgccacagcaggtgggggcagggcwcgtgggaccctctggacagccaccaagatatctgagcaaccaagagtcccagccccaccagtatctgcttctgtagcccacggcaccccaaacttggagg

SEQ ID NO: 305607 - DNA, 201 bp, Homo sapiens
cccctaaacagacacggacaaataaaccccctcagatagaccccatggcagacagacagaaaagaaccacagatacagtcacgaatgcagccagaggcgcrgctgtgttgacaggtatttattcggtaacatttacacagtgctttctctgggccagacacaccatcatttccttaattttgtactcataaccacactatg

SEQ ID NO: 305608 - DNA, 201 bp, Homo sapiens
attcagataatgtgagtgaaggggtcagcacaaggtcaggcatccataggtgtttggtgcaaggggcctggttattttacccatttcctggccctgctaaraaagggtgtgcccagggctcttccctgacttccccgtttccggtcaggcttctgccagctctacctgaatgagaaggactacccgcctggctatgccttc

SEQ ID NO: 305609 - DNA, 201 bp, Homo sapiens
gtgaccaccccatcaccgccaaggccattgcagccagtgtgggcatcatctcggaaggcagcgagacagtggaggacatcgctgcccgcctccgtgtgccygtagaccaggttaatcgcaagtaagcccccccagacctccccggggttctccccacatctggcacagaccgaggtcccagcgaggtcctcccatctcctc

SEQ ID NO: 305610 - DNA, 201 bp, Homo sapiens
gcccgggccgacccatgcacacacatgactcagatacagatactcagacagagatggaaacagaacaggtatctggccaaacttgaatcacagacacgtgyccctaaacagacacggacaaataaaccccctcagatagaccccatggcagacagacagaaaagaaccacagatacagtcacgaatgcagccagaggcgca

SEQ ID NO: 305611 - DNA, 201 bp, Homo sapiens
tggtgcatggagcttcctagtaggtggggaaaagcatggggaaaaccaagaaaaccagggcaccagggagcaggtcggtggcctcaggcaggcagcttccrgcccctctgaataaccccaccccttccctgtccccagctgtacctggcaatcgctctcattgctgtggttgtcgtcaccggctgctttggctactaccag

SEQ ID NO: 305612 - DNA, 201 bp, Homo sapiens
tcaagaacctggaggcggtggagacattgggctccacttcggtgatctgctcggacaagacagggactctcactcagaaccgcatgactgtgtcccatctktggtttgacaaccacatccacacagctgacaccacggaagaccagtcaggtgtgggggagggagggcacaggcgccagggcaggatctggtggatggtgg

SEQ ID NO: 305613 - DNA, 201 bp, Homo sapiens
tcccaaaagtctgcgagatacccttcaactccaccaacaagttccaggtgcgcagccggccccgcccacggcctgggcccgcccacctcgggccccgcccmaggccacacccacatcagcgggccacgaggggcttcgctccttgccccttctctccgcagccaaaccccaccccatctcccgctccgcctatggccccgt

SEQ ID NO: 305614 - DNA, 201 bp, Homo sapiens
gctgagggccagcagccccgttaccactgctcgggccagtagagctgcccaactgcccagcgagcagaggtggacgaaggtcctgcaggaaaatgtcacartaaggaagggagactagataacccaccccactttggacccagccctaaaccccacccaactcactccataacaaaggccttgtagacactgaggaacatc

SEQ ID NO: 305615 - DNA, 201 bp, Homo sapiens
aaacgagaagacacccatcgctatcgagatcgagcattttgtggacatcatcgcgggcctggccattctcttcggtgccacattttttattgtggccatgkgcattggctacaccttcctgcgggccatggtcttcttcatggccatcgtggtggcctatgtgcctgaggggctgctggccactgtcacagtgagtggggg

SEQ ID NO: 305616 - DNA, 201 bp, Homo sapiens
gactgatcttcgacaacctgaagaagtctattgcctacacattgaccaagaacatcccagagctgacaccctacctcatctacatcaccgtcagcgtgccyctgcccctcgggtgcatcaccatcctcttcatcgaactctgcactgacattgtaagtccacagcccagggtacccatccacagggtgcccagagacactt

SEQ ID NO: 305617 - DNA, 201 bp, Homo sapiens
ccgtgtgcccgtagaccaggttaatcgcaagtaagcccccccagacctccccggggttctccccacatctggcacagaccgaggtcccagcgaggtcctcycatctcctccccagggatgcccgtgcctgtgtgatcaatggcatgcagctgaaggacatggacccatcggaactggtcgaggccctgcgcacccaccccg

SEQ ID NO: 305618 - DNA, 201 bp, Homo sapiens
ccttcccagggcaacttgccttgtgtgcggcccacttgttcctccacgtgtgactgagttcagccagagcatcccggacccccagactccctgccagttcgggggggcaagggcctttcccaccatctccagctccaaactcctgcttctgatgatcgcaactgcagatgggtgtctctgccctgacactaatgcatcatc

SEQ ID NO: 305619 - DNA, 201 bp, Homo sapiens
agatgaaaggtggggacagagtgcccgccgacatccgcatcctggcggcccagggctgcaaggtggacaactcctcgctgacaggggagtctgagccacaracccgctcacccgagtgcacgcacgagagccctctggagacccgcaacatcgccttcttctccaccatgtgccttgagggtctgtgaagcccccgcctgc

SEQ ID NO: 305620 - DNA, 201 bp, Homo sapiens
cccagggctcttccctgacttccccgtttccggtcaggcttctgccagctctacctgaatgagaaggactacccgcctggctatgccttcgacgtagaggscatgaactttccatctagcggcctctgctttgcgggacttgtatccatgattgacccaccccgggccaccgtccctgatgctgtgctcaagtgtcgcacc

SEQ ID NO: 305621 - DNA, 201 bp, Homo sapiens
ccaccttcacccttccccgcagctctcagagcccgcaccgagctctcggccccgcccctctcctcagccccgccccgttccctcgtccacagccccgcccygttcccccgtccacagcctcgcctctcccccccgcccacagctgtccatccatacgctggaggacccgcgggacccgcgacacttgctggtgatgaaggg

SEQ ID NO: 305622 - DNA, 201 bp, Homo sapiens
tggggagcacctcgctctccaaatccgcccccagcccaactccgcaccctaattctgttcattccctgcgtccaggactccaaatctgcacctagccccgmcttaacgcttaccttctaccaaggacccctccacacaaggcctccatcttccaccttcacccttccccgcagctctcagagcccgcaccgagctctcggc

SEQ ID NO: 305623 - DNA, 201 bp, Homo sapiens
atggggagcacctcgctctccaaatccgcccccagcccaactccgcaccctaattctgttcattccctgcgtccaggactccaaatctgcacctagccccrccttaacgcttaccttctaccaaggacccctccacacaaggcctccatcttccaccttcacccttccccgcagctctcagagcccgcaccgagctctcgg

SEQ ID NO: 305624 - DNA, 201 bp, Homo sapiens
gcccctcgggtgcatcaccatcctcttcatcgaactctgcactgacattgtaagtccacagcccagggtacccatccacagggtgcccagagacacttgcytgcagatggacaggagggacagagaccaccacagacactcttgggcacagagtgacagacaagacctgtgtgtgcaatgacagccagtgcaggacacatg

SEQ ID NO: 305625 - DNA, 201 bp, Homo sapiens
cccgcccctctcctcagccccgccccgttccctcgtccacagccccgccccgttcccccgtccacagcctcgcctctcccccccgcccacagctgtccatmcatacgctggaggacccgcgggacccgcgacacttgctggtgatgaagggcgcccccgagcgcgtgctggagcgctgcagctccatccttatcaagggcc

SEQ ID NO: 305626 - DNA, 201 bp, Homo sapiens
gagggaagggtcatccgggggctgggtccctcagggttgggtggaacccaattccacccaggtctggggagggggcccgcgatatgagcctaggaggaggsggctcggttctggtccgggagagccgccgtgcgggacccagcctggacgcctggtctgcagggcagacgtttgaccagtcctcggagacgtggcgggcgc

SEQ ID NO: 305627 - DNA, 201 bp, Homo sapiens
ctctctcacctcttacaggtctctgctcagatatcaccttctcaataagcccttccctgggtacacttaaaatcgagtcaccgtttccttcaccaagcttratatgtttttttccactttctaacacactatataattcgtttctttattttctgtcaccctcactagaatgtcagctcctcaaggacagggatttttgtc

SEQ ID NO: 305628 - DNA, 201 bp, Homo sapiens
aaaatgcattggtttatgatactgaaaaattctggggaattaagcttcaggtctagccagatccaggagctcagtgtcattaggaattttcctttctccakgtctcagctctgctgttctctttgctggctttatttgcaggcactcccttcacttggggacacacacacccctgctccagcagctcaaacttaactccca

SEQ ID NO: 305629 - DNA, 201 bp, Homo sapiens
tgcccgtgggccggggagcctggaggtggggggctctgcgctgggctgctcgcctgccccaggccctgccttgggctccggctggttctggacctcagtgyctgcatttggtcctgggtctccgttgtcctccgtgtccctctctgtttgtgacagtctctctggttctgctgtgtccctgctctctctctgaccttgctc

SEQ ID NO: 305630 - DNA, 201 bp, Homo sapiens
ctttccttgttcactcctctgcagttatggtgtcctccctgctgttcctccgacagttcgggcctgtcctcacctcagggcctttgcacctgctgttctcyctgccaggagcactcttctcccagctttccacgtggctgactctctcacctcttacaggtctctgctcagatatcaccttctcaataagcccttccctgg

SEQ ID NO: 305631 - DNA, 201 bp, Homo sapiens
ctcttgagacccctccccaccatgtccaccctgctctagacaagttacagactccaaaatggggcatggcctgacacgatgatgctctggggcaggggatkggggggacacacatcccttctgtgttcctgccagcacacaacccgaacttaatcacgaagaaccagcagcaaagccacactgagcgaagtctacaaaatc

SEQ ID NO: 305632 - DNA, 201 bp, Homo sapiens
ttgcagtagcactggattgggtcactcatttatccctgagccagtcactggggctgggggatggaagaccttgattggccaggtctgggcttacttacccratcttagccagggacctcactgcaactgatggtgtaggggagaggagtggttccccaaacacaaaacaagggtgggaaagccaaggccaggcaggcaatg

SEQ ID NO: 305633 - DNA, 201 bp, Homo sapiens
agacaccaagcctaggagtgcacattgacaacggcgacatacagggccaaagtgctgagggccagcagccccgttaccactgctcgggccagtagagctgyccaactgcccagcgagcagaggtggacgaaggtcctgcaggaaaatgtcacaataaggaagggagactagataacccaccccactttggacccagcccta

SEQ ID NO: 305634 - DNA, 201 bp, Homo sapiens
agccagtgtgggcatcatctcggaaggcagcgagacagtggaggacatcgctgcccgcctccgtgtgcccgtagaccaggttaatcgcaagtaagcccccmcagacctccccggggttctccccacatctggcacagaccgaggtcccagcgaggtcctcccatctcctccccagggatgcccgtgcctgtgtgatcaatg

SEQ ID NO: 305635 - DNA, 201 bp, Homo sapiens
gacactcttgggcacagagtgacagacaagacctgtgtgtgcaatgacagccagtgcaggacacatgggtggcaggcaggtgaacagacctaaatggacatacctacagccatgcacacacaggcggacactcaggtaggcccgggccgacccatgcacacacatgactcagatacagatactcagacagagatggaaaca

SEQ ID NO: 305636 - DNA, 201 bp, Homo sapiens
tgcccagtaactgctgcctccactggcctctctcctgctatcttctaggacagggggcttcagcctccctgtctctctcctgcatgactgccacctccccrtgactgccacctccccagggcacactgcttctctgtctcccactgtcactaccctctcccaggtcacatcctccactggcagtgactggctgtccttcag

SEQ ID NO: 305637 - DNA, 201 bp, Homo sapiens
cccaactcccatcagatcctgactgtggtttagaacagccggcaaatgccagcgggtgccagtgccagatggtgacatgccaaaaaaacctttctaactgrccaataactccccccacggccccctccacatttcactaaaggggtggtgctgagaggcccgggccactccagtgttcagtgtgtagaacacctccctgct

SEQ ID NO: 305638 - DNA, 201 bp, Homo sapiens
acacaaggcctccatcttccaccttcacccttccccgcagctctcagagcccgcaccgagctctcggccccgcccctctcctcagccccgccccgttcccycgtccacagccccgccccgttcccccgtccacagcctcgcctctcccccccgcccacagctgtccatccatacgctggaggacccgcgggacccgcgaca

SEQ ID NO: 305639 - DNA, 201 bp, Homo sapiens
cacccttccccgcagctctcagagcccgcaccgagctctcggccccgcccctctcctcagccccgccccgttccctcgtccacagccccgccccgttcccycgtccacagcctcgcctctcccccccgcccacagctgtccatccatacgctggaggacccgcgggacccgcgacacttgctggtgatgaagggcgccccc

SEQ ID NO: 305640 - DNA, 201 bp, Homo sapiens
agagcccgcaccgagctctcggccccgcccctctcctcagccccgccccgttccctcgtccacagccccgccccgttcccccgtccacagcctcgcctctyccccccgcccacagctgtccatccatacgctggaggacccgcgggacccgcgacacttgctggtgatgaagggcgcccccgagcgcgtgctggagcgctg

SEQ ID NO: 305641 - DNA, 201 bp, Homo sapiens
actgaaacgtttgagcagctgcacccacctttgatcctcaacacttggcctctaagcccttgaccctccatagcaaccagcactgacctctgagcccctgrccctgcctaagtggcacccccagcactgagtctcctttctccctctctctcccaggctggtgggaccaggaactctactattagagggacgactgccttc

SEQ ID NO: 305642 - DNA, 201 bp, Homo sapiens
gagacccaggtggacacggtattgggagacagttcccaagagagagaaatggaggcagcaacaactttccaaatactgtttacttcactaaaacctggagygaggcagggaaaaggtacatcaatgtctgagacaccaagcctaggagtgcacattgacaacggcgacatacagggccaaagtgctgagggccagcagccc

SEQ ID NO: 305643 - DNA, 201 bp, Homo sapiens
tccccggggttctccccacatctggcacagaccgaggtcccagcgaggtcctcccatctcctccccagggatgcccgtgcctgtgtgatcaatggcatgcwgctgaaggacatggacccatcggaactggtcgaggccctgcgcacccaccccgagatggtgtttgcgcgcaccagcccccagcagaagctggtgatcgtg

SEQ ID NO: 305644 - DNA, 201 bp, Homo sapiens
tgtctgagacaccaagcctaggagtgcacattgacaacggcgacatacagggccaaagtgctgagggccagcagccccgttaccactgctcgggccagtaragctgcccaactgcccagcgagcagaggtggacgaaggtcctgcaggaaaatgtcacaataaggaagggagactagataacccaccccactttggaccca

SEQ ID NO: 305645 - DNA, 201 bp, Homo sapiens
gggcccaggctgtccaggctggtgtggctgtgccgtccctgcaggtcctgcctgctaacctcagtcctgttcctgctcacaagtgggggaagggggacccraagtggaggggacaagggcccagccaaaccctcagtcccagttccttccactcctggccagttcccatctgtgtccctggcatatgaaaaggccgagagt

SEQ ID NO: 305646 - DNA, 201 bp, Homo sapiens
ccaggccttggggaggagtatggccgccagcagaaatgtgtatgtgggagagcacgactgcctaccagactgatgttggagtctatgctcatctggatgtrcttccagtcaaactcaatgccccgggctccgacccataggggaatgcagctgaggaaggcaaaggatgggattctccagtactcagacaccttcagcacc

SEQ ID NO: 305647 - DNA, 201 bp, Homo sapiens
ccatgaactttccatctagcggcctctgctttgcgggacttgtatccatgattgacccaccccgggccaccgtccctgatgctgtgctcaagtgtcgcacygcaggcatccgggtatgccactgtggggaggaacaagtggagtgaggacagaggatggcagcaggatttgggttgaagaaccccatgacaaacccacctg

SEQ ID NO: 305648 - DNA, 201 bp, Homo sapiens
tgtcccagggcctctctgcgagcctggctgctgagctgctgctgcgggatgggcccaacgcactgcggccaccacggggcaccccagagtacgtcaagttygcgaggcagctggccgggggcctgcagtgcctcatgtgggttgccgccgccatctgcctcatcgcctttgccatccaggctagtgagggggacctcacca

SEQ ID NO: 305649 - DNA, 201 bp, Homo sapiens
cacagagtgacagacaagacctgtgtgtgcaatgacagccagtgcaggacacatgggtggcaggcaggtgaacagacctaaatggacatacctacagccaygcacacacaggcggacactcaggtaggcccgggccgacccatgcacacacatgactcagatacagatactcagacagagatggaaacagaacaggtatct

SEQ ID NO: 305650 - DNA, 201 bp, Homo sapiens
gtccttttttttttttttttttttttttttgcgacggagtctcgctttgttgcccaggctggagtgtaatggcgccatctcagctcactgccacctccgcytcccgggttcaagagatctcagcctcccgagtagctgggattacaggcgcccgccaccacgtccggctgatttttgtatttttggtagagacggggtttc

SEQ ID NO: 305651 - DNA, 201 bp, Homo sapiens
cgggtgtggtggtgcacacctgtagtcccagctactccggaggctgaagtgggaggatcccttgaacccaggaggcagaggttgcagtgagctaaaattgygccactgcactccagcctgggtgacacatcgaaactccatcttaaaataaaataaaataatttggccgggtgcggtggctcacacctatactcccagcac

SEQ ID NO: 305652 - DNA, 201 bp, Homo sapiens
tcattctggacttgtgatttagtttgctggggatgcgaagtgtggaatctcgaataggtctctggagacttgccgtacagatgtaaggaggactttgaagrggaggaagattctagaaaggctcggctgttggcctcccagggtttacaaagatgtggctccacccagaacccatggccatccctcactctgttccctcca

SEQ ID NO: 305653 - DNA, 201 bp, Homo sapiens; identical to SEQ ID NO: 64012

SEQ ID NO: 305654 - DNA, 201 bp, Homo sapiens; identical to SEQ ID NO: 64013

SEQ ID NO: 305655 - DNA, 201 bp, Homo sapiens
ccaggctggagtgtaatggcgccatctcagctcactgccacctccgcctcccgggttcaagagatctcagcctcccgagtagctgggattacaggcgcccrccaccacgtccggctgatttttgtatttttggtagagacggggtttcaccatgttggccaggctagtcttgaactcctgacctcaggtcatctgcccgct

SEQ ID NO: 305656 - DNA, 201 bp, Homo sapiens; identical to SEQ ID NO: 64014

SEQ ID NO: 305657 - DNA, 201 bp, Homo sapiens; identical to SEQ ID NO: 64007

SEQ ID NO: 305658 - DNA, 201 bp, Homo sapiens; identical to SEQ ID NO: 64008

SEQ ID NO: 305659 - DNA, 201 bp, Homo sapiens; identical to SEQ ID NO: 64009

SEQ ID NO: 305660 - DNA, 201 bp, Homo sapiens
tacaaaaagttaaaataaatagaaaagttacccaggcatggttgcactccagcctgggtgacagagcaagatcctgtctcaaaataaataaataaataccttttttttttttttgagacggagtctccgcctcctgggtttacgccattctcctgcctcagcctcccgagtagctgggactacaggcgcccaccaccacat

SEQ ID NO: 305661 - DNA, 201 bp, Homo sapiens; identical to SEQ ID NO: 64010

SEQ ID NO: 305662 - DNA, 201 bp, Homo sapiens
tgcccaggatgatcttgaactcctggctcaagtgtcctgctgcctgggcctcccaaagtgctgggattacaggcgtgagccattgtgcccgcccacccccmtcccacactgcttcttcttcttcttttttcttttttttttcagacagagtttcactcatgtcacccaggccggagtgcaatggcacgatctcggctcact

SEQ ID NO: 305663 - DNA, 201 bp, Homo sapiens
gcccggagcgctgcgtgagctggggctggagggacagcgacctgggccgggtgctgaggcgaggctggagacgccggagcacggcgcggcggaacaggatrtacacccaggggtccaggatctggttccaggtggccacgcgcaagtagatgagcagctccttctccgtggtgcgggacagctgcccggcggggctcatgg

SEQ ID NO: 305664 - DNA, 201 bp, Homo sapiens
gagaccccagatccccggatcccagacgtcggggtggccgcctaatcgccggatctcagagacccagccctcagatcccggggtgccacactcccaggggycccctttgcacgctctgcgcaaaagatgggcaggtcttaggactagcggacccctagatattccagaaaatcctctgcgcagacctagcttggagcggac

SEQ ID NO: 305665 - DNA, 201 bp, Homo sapiens
gagacgccggagcacggcgcggcggaacaggatatacacccaggggtccaggatctggttccaggtggccacgcgcaagtagatgagcagctccttctccrtggtgcgggacagctgcccggcggggctcatggcaggcgggtttcgcagcactgtctgggcgatgaagacctgcaaaggggagagctgtcagcctgggcc

SEQ ID NO: 305666 - DNA, 201 bp, Homo sapiens
agctccagaactcagactagttctggaaaccagctcagctccgggacccagaccactgcaagaattcagctcagccctggagctcatcttagctccagaacccagtccagtcctgagaccaggctcagctctgaggctcagtccagctctggaacccagttcagttctgggattcagtttggctctgaaacccagaccggc

SEQ ID NO: 305667 - DNA, 201 bp, Homo sapiens; identical to SEQ ID NO: 64011

SEQ ID NO: 305668 - DNA, 201 bp, Homo sapiens
aggtggccacgcgcaagtagatgagcagctccttctccgtggtgcgggacagctgcccggcggggctcatggcaggcgggtttcgcagcactgtctgggcratgaagacctgcaaaggggagagctgtcagcctgggcccccgcctccagccccgcccgccccggtccctgcccggggtcccttgagatccagggtccact

SEQ ID NO: 305669 - DNA, 201 bp, Homo sapiens
gcggctgctgctgcacattggcatcatcgacatcctgcagtcctacaggtgggtgcccgggtctgcagtcctacaggtggacgccccgggtctgcagtccyacaggtgggcgcccgggtctgcagccccacaggtgggcgcccgggtctgcagccccacaggtgggcgcctgggtctgcagtcccacaggtggatgggcgc

SEQ ID NO: 305670 - DNA, 201 bp, Homo sapiens
ttgtagagagggcgagcgccaggcagtggttaagggggagccccagagttggtcccgccgatgtccccctcccagctccgcgcttcaggtgctgtgtggcygtcacttccccgggcttcagcgtcccgtctgtgaagtggggtgatgaccgtgtgtgctaggggctgagcctgggatgagttggcgctcgtgcttggtgat

SEQ ID NO: 305671 - DNA, 201 bp, Homo sapiens
ccattcatcttatcaggggctctgggagcaccggggacagataaagttgccagctccagactgagcatggtggtggggtgggagagcgggggagtgggggkgtgggggtggggggccggggagggctggaaggtcagggtctggcatctctgcccatccctgaaatccacagaaatctgaccccagctggccatatactgc

SEQ ID NO: 305672 - DNA, 201 bp, Homo sapiens
gctgcacattggcatcatcgacatcctgcagtcctacaggtgggtgcccgggtctgcagtcctacaggtggacgccccgggtctgcagtcccacaggtggrcgcccgggtctgcagccccacaggtgggcgcccgggtctgcagccccacaggtgggcgcctgggtctgcagtcccacaggtggatgggcgcccccaggac

SEQ ID NO: 305673 - DNA, 201 bp, Homo sapiens; identical to SEQ ID NO: 64026

SEQ ID NO: 305674 - DNA, 201 bp, Homo sapiens
atcgacatcctgcagtcctacaggtgggtgcccgggtctgcagtcctacaggtggacgccccgggtctgcagtcccacaggtgggcgcccgggtctgcagycccacaggtgggcgcccgggtctgcagccccacaggtgggcgcctgggtctgcagtcccacaggtggatgggcgcccccaggacacccatgcacagaggc

SEQ ID NO: 305675 - DNA, 201 bp, Homo sapiens
gtgggggtggggggccggggagggctggaaggtcagggtctggcatctctgcccatccctgaaatccacagaaatctgaccccagctggccatatactgcytctgaatgtttaaaattcagagttgcctcactcctccaacgccatccctcctgatgttagcgctggtgagtttaggttgtgcctggctgggccacagaga

SEQ ID NO: 305676 - DNA, 201 bp, Homo sapiens; identical to SEQ ID NO: 64028

SEQ ID NO: 305677 - DNA, 201 bp, Homo sapiens
caggtacaagcaattatcctgcctcagcctcctgagtagctgagattacaggcgcctgccaccatgcctggctaattttgagttttttgtttgtttgtttkttgagacagagtctcgttctgtcgcccaggctggagtgcagtggcacaatctcggctcgctgcaagttccgcctcccgggttcacgccattctcctgcct

SEQ ID NO: 305678 - DNA, 201 bp, Homo sapiens
atgaggggaggaaaagggttacatctcaagatgcctccaccgccccggctgtgcacacagggtgccctgtcgcccccttttcctctccccgagccttcccscaggacacactggtggggctgcgggctgggcggggggcacggctgtctcatgccccctttagctgcttcctggacctccagccgggtaggtggcggcagc

SEQ ID NO: 305679 - DNA, 201 bp, Homo sapiens
gtctgcagtcctacaggtggacgccccgggtctgcagtcccacaggtgggcgcccgggtctgcagccccacaggtgggcgcccgggtctgcagccccacaggtgggcgcctgggtctgcagtcccacaggtggatgggcgcccccaggacacccatgcacagaggcgcttgcccgtggaaacagccgcaccagcagctctc

SEQ ID NO: 305680 - DNA, 201 bp, Homo sapiens
cggtgccgggtgacagttaactcccgcgctgggcaggggacgtgtgggcatggtgccgggtgacagttaactcccgcgctgggcaggggacgtgtgggcayggtgccgggtgacagttaactcccgcgctgggcaggggacgtgtgggcatggtgccgggtgacagttaactcccgcgctgggcaggggacgtgtgggcat

SEQ ID NO: 305681 - DNA, 201 bp, Homo sapiens; identical to SEQ ID NO: 64033

SEQ ID NO: 305682 - DNA, 201 bp, Homo sapiens
tttcaccgtgttagccaggatggtctcgatttcctgatgtcgtgatctgcctgtctcggcctcctggagtgttggaattataggcgtgagccaccgcgccyggcctcttcattttttttttttttttttttttttgagatggagtctcgctctgtcacccaggctggagtgcattggcgtgatcttggcttactgcaagct

SEQ ID NO: 305683 - DNA, 201 bp, Homo sapiens
ctcctgggctcaagtgatcctcccacctcagcctcccaagtagctgggaccacagatgggcatcaccatgcctgtttttgttttctttcttttttttttttagtacagatgaggcctcgctctgttgcccaggctggtcttgaactcctgggctcaaatgatcctcctcagcctcccaaggtgttgggattacagagtgct

SEQ ID NO: 305684 - DNA, 201 bp, Homo sapiens
tgggtcgggacacacgctcgcgctcgcggtccgcgggtcgccggggccgaaggcggcagagtcagagcgggagccgaagtcggagcaggagccatgggcgrcgaaaccgacggcgccgggaggacgagggacggcgcagacggaggcggcggagccgggagcgcaggtggggtcgctgcgggagcagcgctggggatccgg

SEQ ID NO: 305685 - DNA, 201 bp, Homo sapiens
gtggtgacttgagcccaaggagggactggggcattcccaggccctgggcctgatgtgacctcatgtttccggcgtcctctggtccccaaacatattcacasatcagagtgtgtgtggcgctggggacccaactcacgcctcaagcccctggctcttccagcattttccaaaggtggttcccctcacttgttggggtgtttt

SEQ ID NO: 305686 - DNA, 201 bp, Homo sapiens
agggcaaatacgcaggtatgccagctgcctgtcgcccatctgtggagccttccctgagttccacctgacagcttctgcttatgactcatggggcagagctrgcgttgtggccccacccagcttcaggggtgctgggagcaccttttagccacgcgcgtcagcaccccggtgcgatcaggtgtccgctcctaaggagagcag

SEQ ID NO: 305687 - DNA, 201 bp, Homo sapiens
acgtcggagcagccgcggtacaggtgggcgaggcatccgcagtgcatgtgggcggggcatccgctgtgcgtgggggcggggcattcactgcatgtgggcgkggcatccgctgtgcatgtgggtggagcatcgtatgtacggtggatgtacatacactgcatgtgggtgcgcgggggcggagcatccaatgtgtgggaggga

SEQ ID NO: 305688 - DNA, 201 bp, Homo sapiens
gtggggacaggtagggttcggaggggactcgaggttgccggtgcttctctgattggacagctgaggtcacagtcccccctggtaaggggggtagctccagsaaggcccacagctcaggacagccaggaaggagaaggcggaggtgggatgcagggtggggctcagccctgcccagtggtcagcagagggtggagaggaggc

SEQ ID NO: 305689 - DNA, 201 bp, Homo sapiens
gcagtggcctggacagatctccctccagcctcagagtccaccccacacggctctctcaccctgcaccatcactcccagccaggccatggcagaagcagcgmatgcaggaggaaggaccctcgctgttctgagctgccaaggttggcagggctgttgctgactccgcaaaatccagcctgtgttgaccgacgtgtgataact

SEQ ID NO: 305690 - DNA, 201 bp, Homo sapiens
ggagcggctgctgctgcacattggcatcatcgacatcctgcagtcctacaggtgggtgcccgggtctgcagtcctacaggtggacgccccgggtctgcagycccacaggtgggcgcccgggtctgcagccccacaggtgggcgcccgggtctgcagccccacaggtgggcgcctgggtctgcagtcccacaggtggatggg

SEQ ID NO: 305691 - DNA, 201 bp, Homo sapiens
gcgcacacagtcgtctggacaggatggcaggtgagacccaacccccttccttccctgggtctcaccagctcctcctgcacagctcccagctccgtttcccrccccccagcccctctgctctctgcccattctctcctggggacagatttaagattgtagcactcggccctagcaccgcacacaatcttccagccactttgt

SEQ ID NO: 305692 - DNA, 201 bp, Homo sapiens
ggagtgcagtggtgcgatctcggctcactgtaagctccgcctcctgggttcacgccattctcctgcctcagcttcccgagtagctgggactacaggtgccygccaccacgcccggctaattttttgtatttttagtagagacggggtttcaccgtgtcagccaggatggtctcgatctcctgacctcgtgatctgcctgtc

SEQ ID NO: 305693 - DNA, 201 bp, Homo sapiens
cctcggcctcccaaagtgctgggattacaggcatgagccaccgtgcctggcccaataaaactttctttagtgggctgtgttcggcccctggactgtggtawaccagcccctgctttagacagtctttgtaggaccttatgagttccatataatcagcgagactcctgtctttttacctgtgccgaagttgtctaggagaaa

SEQ ID NO: 305694 - DNA, 201 bp, Homo sapiens
gatcacctgagcctgggaggctgaggctgcactgagctgtgatcgtgccactgcatgcctgggtgacagcagaatcgtatctcaaaaaaaaaaaaaaaaaagggtcagtgggattgtggtgtctcttgttgcaagtcagcagggcccaggcggaggctgaggacactggggacggaaagttccccattctctcccgccctg

SEQ ID NO: 305695 - DNA, 201 bp, Homo sapiens
ttggcatgtattgtgtatatccatgttattggcatgtattgtgcatatccgtgttattggcatgtattgtgtatatccatgttattggcatgcattgggtwactccatgttattggcatgtgctgtgtaggtccatgtgtggttttttttgggacagagtctcactctgtggcccaggctggagggcaatggtgcgatctc

SEQ ID NO: 305696 - DNA, 201 bp, Homo sapiens
tgatcgagctgtccaacccgggcgccagtggctccctcttctacgtcaccagcgacgacgagttcatcatcaagaccgtcatgcacaaggaggccgagttyctgcagaagctgctccctggctactacatggtgcgtggcccgccctgcggggcagatggctcctcggtcaacccccttctcccggctggcgggagcagat

SEQ ID NO: 305697 - DNA, 201 bp, Homo sapiens
ccagtggcccccaccctcatcacatcctcccagcgcactcagtccatgtcttcacttgtgtgtagccttgagaccagccccacgcggagttacacacgccrggcctggggcgccagaaggtgggccgggggctgggcccaggactcccagaggtcaccggtttcctgtctgatacccagcttgtctcttctgcaggtttgg

SEQ ID NO: 305698 - DNA, 201 bp, Homo sapiens
agcagattacagtgcaggtggagcctgcgtgcagcgtggagattgtggtccccaaagaggaggacgcagggtgagcacggcctcggcgggaggtcggggcrcccacctgctgcgggcccagaggagccaagagcaccccgaggtttcatcatgaagcagttctttcttactaggttgtattcacagatggtggattttccc

SEQ ID NO: 305699 - DNA, 201 bp, Homo sapiens
tccactcctctgcctttaccttcatgctacagccatgtctcgtcttgaacaaatgataacatgttcacagttaaaaaaaaaaaaagtaatcagacttgcartgagtaaaaagtgagtcccacctcaccctctccatctctgtggagataatgactgtcaccccaggtgtttctctggcccatacacttggggctcagatta

SEQ ID NO: 305700 - DNA, 201 bp, Homo sapiens
gagggaggagcatatgtacaggtgggcagggctgccagggggcaggtaggcaggcgggtaggcaaggcaggtagactgagcaggcgggccactctctttcygggtgtcacgtgtttgctgtatctctgcaggcggcgcacacagtcgtctggacaggatggcaggtgagacccaacccccttccttccctgggtctcacca

SEQ ID NO: 305701 - DNA, 201 bp, Homo sapiens
cctcacccatcaaatgggatgactgcttgctctgcaggccacagtgagggcccatgtgcgtccagtgagggtctggctcctgtccccgtggagcctgcgtyggctccgtgttagcgaaagaatgatatgcacggctcttcctctgcctgggttagctccgtcgtccccgtcccaccccggcagcttcgaggcatggagcca

SEQ ID NO: 305702 - DNA, 201 bp, Homo sapiens
gagtgcagtggtgccatgttggctcactgcaacctctgcctttcgggttcaagtgattctcctgcctcagcctcccgagtagctgggattacaggcacgcrccaccacgcctggctaattttgtatttttagtagagacggggtttctccatgttagtcaggctggtcttgaactcccgacctcaggtaatccgcccacct

SEQ ID NO: 305703 - DNA, 201 bp, Homo sapiens
gcgcactcagtccatgtcttcacttgtgtgtagccttgagaccagccccacgcggagttacacacgccaggcctggggcgccagaaggtgggccgggggcygggcccaggactcccagaggtcaccggtttcctgtctgatacccagcttgtctcttctgcaggtttggctcagaagaaggcggccccaacagaggtgagt

SEQ ID NO: 305704 - DNA, 201 bp, Homo sapiens
ccagccgccctccacgacttgccctcttcccccggcagaacctcaaccagaacccgcggacgctgctgcccaagttctatgggctgtactgcgtgcagtcrgggggcaagaacatccgcgtcgtggtcatgaacaacatcctgccccgcgtggtcaagatgcacctcaagttcgacctcaagggctccacctacaagcggc

SEQ ID NO: 305705 - DNA, 201 bp, Homo sapiens
gggatccccgctgtgaacggccgcggggagcggctgctgctgcacattggcatcatcgacatcctgcagtcctacaggtgggtgcccgggtctgcagtccyacaggtggacgccccgggtctgcagtcccacaggtgggcgcccgggtctgcagccccacaggtgggcgcccgggtctgcagccccacaggtgggcgcctg

SEQ ID NO: 305706 - DNA, 201 bp, Homo sapiens
cactttcggaggctgaggtgggaggatggtttgagccctggaggtggaggctgcagtgagctgtgatcgcaccgttgcactccagcctgggcgacagagcragaccctgtctcaagaaaatacatgtgtgtgtgcgtgtgtgtgtatgtgtttgtgtgtgcatatacatacatgtatgtattttaggatacagcattgcgt

SEQ ID NO: 305707 - DNA, 201 bp, Homo sapiens
ccaggctggtctcaaactcctgacctcaggtgatccgcccgcctcggcctcccacagtgctaggattacaggcatgagccatcgcactgggccctttccaytttttaaaaatggaaaaaccattcttagctcacagccctacaaaaataggtggtggccggattcggcccaggggctggagttcacctagcctgcccaggc

SEQ ID NO: 305708 - DNA, 201 bp, Homo sapiens
gctctgaggtggccgtgggctaagtgtctcagggcctgtgttggcccaaggaagccagtccctggcagggggcctggggtgggccctcgccccgcccaccytcacctgtcctcttgctcttgcagtaatttctatgcagcccccgacccagagccgagctccacttctgctccggctgcccccgaaggcgctgcccacccc

SEQ ID NO: 305709 - DNA, 201 bp, Homo sapiens
agtcagctcggcctcaggctccagtccttgctggctagcctcaggcaagtctctcgccctctctgagcctctctttccgcatctgtaaaatgcagcgaccygtcatcagttcctggggctgttgggcagaccggaagccagtgctgtctgtgtgtccggcagcttggggcccgctgacccgcctcctctgcttccagtact

SEQ ID NO: 305710 - DNA, 201 bp, Homo sapiens
ggcctcagacgaggagggcgcacctgccagccaggcctcggacgaggaggacgcgcccgccaccgacatctactttgtaagtgccccgggctcctcctgcygccggctcgtcaaccggactctctctcacacacgctccaccgtgtgcacaccgcatacacacacctgcacacaggcacgtgagtgtgccctgtcgaccca

SEQ ID NO: 305711 - DNA, 201 bp, Homo sapiens
aagcaggcatccttggggcgtggtgagaggcatcttgggtcccggggactcaccctcgggggtcccccgtcaggcttcaccagcaccagtgttcaggagcygccctctcttcctcctgtggccacacgccttgggggccgtccccgggcagggctgggtgggcaccggcccctgcctggctccccatccccaccttgccaa

SEQ ID NO: 305712 - DNA, 201 bp, Homo sapiens
cagggctgggtgggcaccggcccctgcctggctccccatccccaccttgccaacaccccctatgagccgtgggccccagaaccagcagcctgcgggcagcrtctgtcagctgccacggaggcccaaggggcccaagggtgactcagagggttccagagaggagggggatgggccaccagatggtaccccacaaaagaccag

SEQ ID NO: 305713 - DNA, 201 bp, Homo sapiens
gactggaactctgtagacaagtgcggttggcgttctggttgtcacgacagcacggtccccggggccgggagcctgtggttctccgatcctgccctcacccrcggtggtcggttccttgtgcctttctttggtggttgctgactgtgcgtgcgtttggtttatctcagtctgtaggaagcgcccgaggctgcgctcttccag

SEQ ID NO: 305714 - DNA, 201 bp, Homo sapiens
gtgatctgcctgtctcagcctcccgtagtgctgggattagaggcgtgagctaccgcctcagcctcccgaagtgctgggattccaggcgtgagccccggcayccaacctgcgccatcaccacttctaaaagctccgggtggccttttcccaagcctgcctggtcatcccgagaactttgtatcagggaagactggaactctg

SEQ ID NO: 305715 - DNA, 201 bp, Homo sapiens
cagtgcatgtgggcggggcatccgctgtgcgtgggggcggggcattcactgcatgtgggcggggcatccgctgtgcatgtgggtggagcatcgtatgtacrgtggatgtacatacactgcatgtgggtgcgcgggggcggagcatccaatgtgtgggagggaggagcatatgtacaggtgggcagggctgccagggggcag

SEQ ID NO: 305716 - DNA, 201 bp, Homo sapiens
cctcaccatgtgggccttgtcatcagagcaggcgagggtgtccactcaccaaacagttggtatagtcttctgcagcctggtgccaaagtgactgacccatyttcagacttaagggttagaacaaggcactgggacgtgggtgccactggggaccagcgtagagtcggacctcctagctctagccatggctttattgtttca

SEQ ID NO: 305717 - DNA, 201 bp, Homo sapiens
gacttccgcttcaagacctatgcacctgtcgccttccgctacttccgggagctctttgggatccggccagatgattacttggtaagcatatttgctgttaygggcttccaggcttgaaacagaacatgttcagggtctcggagggtctgtgggtcaggcatttgggggcagcctccctgggttcctcgtgtagggttatgg

SEQ ID NO: 305718 - DNA, 201 bp, Homo sapiens
gtgtctggcgtctctcactgagtgtagcgtcctcagggttcattcgcactggggcccgtgtcagagccttgctcctgttcatggctgagtcgtgttctggygcgtggggcgcccgtgctgcacttgtcctttgctgcgtcatggacgctcgggtgcttcacactcctggccattgtgaattgtgctgctgaggacacgtgt

SEQ ID NO: 305719 - DNA, 201 bp, Homo sapiens
aatgcagggaacatggctgagcagcgtcggctgtggagggagggcaggggcaggggtcagggctgcaggcgtgtccctggggctgatagcggtgggatggrgtctggccagtggagggtccatggggtctcctagcaaacgcagtggcgctccttaaatgacggtgccaggcggggctgttctccttggttggcctctgtg

SEQ ID NO: 305720 - DNA, 201 bp, Homo sapiens
gtgggggcggtctcgggaaggccggggcttgggatgcggctgtgcccactgtgtgggccgatggcctgtggtggagtttggtctgagctgtggcctgggcrtgtctgagcctctcccaggctgtcctgtctctgtgatgccccagaacggtcagctccatccctgcccctgccccactcccacggctgatctgtctctgtg

SEQ ID NO: 305721 - DNA, 201 bp, Homo sapiens
ttgtatttagacagtccgggcgcggtggctcacgcctgtcatcccagcactttgggaggccaaagtgagtggatcacctgaggtcaggagcgagaccagcstggccaacatggtgaaacgccatctctataaaaatagaaaaattagctgagaatagtggcggatccctttaatcccagctactcgggaggctgagacggg

SEQ ID NO: 305722 - DNA, 201 bp, Homo sapiens
cacctcctcgcaccctgctcttccgcgccctcctgcacgcgcgcccacctgccagcccaccgatgagaggagctgggtgtactccccgctccactatagcrcccaggcccccccggcctccgacggcgagagcgacacagtaagtgcagcccaggtgcacccgccggtcccgtgggctccaaggttctactgagcgtggtc

SEQ ID NO: 305723 - DNA, 201 bp, Homo sapiens; identical to SEQ ID NO: 64022

SEQ ID NO: 305724 - DNA, 201 bp, Homo sapiens; identical to SEQ ID NO: 64025

SEQ ID NO: 305725 - DNA, 201 bp, Homo sapiens
gtcaccggtttcctgtctgatacccagcttgtctcttctgcaggtttggctcagaagaaggcggccccaacagaggtgagtgtctggagcggacgaagggyctggggtccccaccctgacctgctgcctccctactcgcggagaagctgtgtggcctggggcagctcactacacctctctgggccccaaatgccgtccagt

SEQ ID NO: 305726 - DNA, 201 bp, Homo sapiens; identical to SEQ ID NO: 64027

SEQ ID NO: 305727 - DNA, 201 bp, Homo sapiens
agggcagtggcgctgtcacagctcacagcagccttgacctcctgggctcaagtgatcctcccacctcagcctcccaagtagctgggaccacagatgggcaycaccatgcctgtttttgttttctttcttttttttttttagtacagatgaggcctcgctctgttgcccaggctggtcttgaactcctgggctcaaatgatc

SEQ ID NO: 305728 - DNA, 201 bp, Homo sapiens
ggtgggccctcgccccgcccaccttcacctgtcctcttgctcttgcagtaatttctatgcagcccccgacccagagccgagctccacttctgctccggctkcccccgaaggcgctgcccaccccgctgaggcccagagctcgggagatgcccgcctcgccgccccaccggacctcgtcctccccctgcacggatgccgacg

SEQ ID NO: 305729 - DNA, 201 bp, Homo sapiens
gcaccctgctcttccgcgccctcctgcacgcgcgcccacctgccagcccaccgatgagaggagctgggtgtactccccgctccactatagcgcccaggccyccccggcctccgacggcgagagcgacacagtaagtgcagcccaggtgcacccgccggtcccgtgggctccaaggttctactgagcgtggtccccagctac

SEQ ID NO: 305730 - DNA, 201 bp, Homo sapiens
tttaccatgttggccaggctggtctcgaactcctgacctcaggtatctgcccacctcggcctcccaaagttctgggattacaggcgtgagccaccacgccyggccttaatctttgtatttttagtagagatagggtttcgccatattggccaggctggtcttgaactcctgacctcaagtgatccacctgccttggcctcc

SEQ ID NO: 305731 - DNA, 201 bp, Homo sapiens
cagcccacttcccagatggtttgttctcaccctgcaccccctgggaaggagggctgggcacgggcaccaggccttagggcctgttgtgggggcacctcctsgctgcttcataactaactcccctgctctgtctccagtggcgcctctggggtccccatgcacccacctggccctggagaagggagggacgggccgcgtgcc

SEQ ID NO: 305732 - DNA, 201 bp, Homo sapiens
gctcatctcaggagtgtgagaattctcttgggggcctccggtgctgagcaggcggcagccccctagcctctgtccaggctgtggtgtgagtgtggccgtgygccacagcgggaggacgggctagtgtgcgtgttgctgtccacagggcccctgagcttgagtggggacaggtagggttcggaggggactcgaggttgccgg

SEQ ID NO: 305733 - DNA, 201 bp, Homo sapiens
gccagatccctagcgagcgggaggaggcccagtacgacctgcggggggcccgcagctaccccacgctggaggacgaaggtgaggggcagagggcagagtgygcttgtgggcgctacagggggtgccagcagcagccccgtgggtggggtgccgcctcatcctgagtgcccatcgctcagccaccccctccggatctgcagg

SEQ ID NO: 305734 - DNA, 201 bp, Homo sapiens
gctagccaacaggactgggagggctgagtgacgtggtgcggcagttgcagccgagccctgtcctggctgtgtggcccgagggagggtggcttcatcccccrgcctgatgtcgacagctcagcagccgcaggacaggcagccccggggaccaccaggagggggttggcaggtgccgggtcccaagctgcagctggtcacgat

SEQ ID NO: 305735 - DNA, 201 bp, Homo sapiens
gcctcagacgaggagggcgcacctgccagccaggcctcggacgaggaggacgcgcccgccaccgacatctactttgtaagtgccccgggctcctcctgccrccggctcgtcaaccggactctctctcacacacgctccaccgtgtgcacaccgcatacacacacctgcacacaggcacgtgagtgtgccctgtcgacccac

SEQ ID NO: 305736 - DNA, 201 bp, Homo sapiens
agggtgccaggccgaggcccacctgccctgcagcctacagcaggccccaccccagtgtgggatccagaagcgctcaagcttttatggccttaacctaaaaygtggccggacacagtggctcacgcctgggatcccagctctttgggaggcaggcagatggcttgagcccagggtttcaagaccagcaggggcaacattgtg

SEQ ID NO: 305737 - DNA, 201 bp, Homo sapiens; identical to SEQ ID NO: 64030

SEQ ID NO: 305738 - DNA, 201 bp, Homo sapiens
gatgaccgtgtgtgctaggggctgagcctgggatgagttggcgctcgtgcttggtgattgtcgtgccggttggccacccctttccggcctctccaccatcrgtgcctccaggcccctgctgaggcccatgcccgtggtttctggagtcaccgctcactgttagaagcgatggcgacaccttccagaaagctcagctacagc

SEQ ID NO: 305739 - DNA, 201 bp, Homo sapiens
atgcgtgcccagcgcagcacgtcaagccacatccagggcgccccttgggcccctccaaccctgcaggtcctgactgctcagcacatctgacccaagcctgygcttcttcctgatgccccatcttggtagccaactcactgtgtgcctgagcccaggtcccaggtcacgtcctctccagtgctccccctccacagctgagga

SEQ ID NO: 305740 - DNA, 201 bp, Homo sapiens
tgggggcggggcattcactgcatgtgggcggggcatccgctgtgcatgtgggtggagcatcgtatgtacggtggatgtacatacactgcatgtgggtgcgygggggcggagcatccaatgtgtgggagggaggagcatatgtacaggtgggcagggctgccagggggcaggtaggcaggcgggtaggcaaggcaggtagac

SEQ ID NO: 305741 - DNA, 201 bp, Homo sapiens
gcagctggatcaggtgctcacaggcgcctcctggccacgcgccgtcggggagtgggccgtggggggcgaaggcagaggcgagtgtgccaggcggggggccragtgatggtgcagccttttatttctagatctgcctgtttttcgagaaacccaggtttttctccaaaacattgtgatttctagagttgaccgaacccaaac

SEQ ID NO: 305742 - DNA, 201 bp, Homo sapiens
attaggtggcagctggatcaggtgctcacaggcgcctcctggccacgcgccgtcggggagtgggccgtggggggcgaaggcagaggcgagtgtgccaggcrgggggccgagtgatggtgcagccttttatttctagatctgcctgtttttcgagaaacccaggtttttctccaaaacattgtgatttctagagttgaccga

SEQ ID NO: 305743 - DNA, 201 bp, Homo sapiens
agtactccctgtgcaatgagccgctgatcgagctgtccaacccgggcgccagtggctccctcttctacgtcaccagcgacgacgagttcatcatcaagacygtcatgcacaaggaggccgagttcctgcagaagctgctccctggctactacatggtgcgtggcccgccctgcggggcagatggctcctcggtcaaccccc

SEQ ID NO: 305744 - DNA, 201 bp, Homo sapiens
ggccaggcccggcggccgggacactgagtcacttgtgtcagggcctcggctgccaggtgcaggcactgcctggagggtgggcagggtctgtggcacccacrccggtcggggctgccatttgctcatatgcccccagagcccgctacaccccaggccctgctggcaccacagtcaccaagggacccaggtggacagtccccg

SEQ ID NO: 305745 - DNA, 201 bp, Homo sapiens
ctcactgtgtgcctgagcccaggtcccaggtcacgtcctctccagtgctccccctccacagctgaggacccctctggatctcccagatccagcccagcccscctgccccagctccattcaccggtgctgctgcgcccctactgagtagcgagtaggtctgggagagcaaccgtgaacgagacgccaggtctgtgctcccac

SEQ ID NO: 305746 - DNA, 201 bp, Homo sapiens
cctcatcctgagtgcccatcgctcagccaccccctccggatctgcagggccgcctgcccagggagtgggggctgctgggaccgccccagggaagagcccakggggagctgagtatagaaggctccaccaggtggggtggtgacagctcccgccttctctcacggccactgtcatctgaggtgcaccaggatgccatcgaag

SEQ ID NO: 305747 - DNA, 201 bp, Homo sapiens
ctccaacatgggggaggtgtgggactgcccgggagaggaagcgggggctccagcgtggggggggtgtgggactgcccgggaggggaagcaggggctccagygtgggggaggtgtgggactgcccgggaggggaagcgggggctggctgtgctctgcacaggatgttcctgctgtgcccgggctgatcccagctctccagac

SEQ ID NO: 305748 - DNA, 201 bp, Homo sapiens
gagggcagagtgcgcttgtgggcgctacagggggtgccagcagcagccccgtgggtggggtgccgcctcatcctgagtgcccatcgctcagccaccccctycggatctgcagggccgcctgcccagggagtgggggctgctgggaccgccccagggaagagcccagggggagctgagtatagaaggctccaccaggtgggg

SEQ ID NO: 305749 - DNA, 201 bp, Homo sapiens
ctgcagagacagagtcagcactggtcggggtggtgggggctccaacatgggggaggtgtgggactgcccgggagaggaagcgggggctccagcgtgggggrggtgtgggactgcccgggaggggaagcaggggctccagtgtgggggaggtgtgggactgcccgggaggggaagcgggggctggctgtgctctgcacagga

SEQ ID NO: 305750 - DNA, 201 bp, Homo sapiens
gttaactcccgcgctgggcaggggacgtgtgggcatggtgccgggtgacagttaactcccgcgctgggcaggggacgtgtgggcatggtgccgggtgacarttaactccccagtctgtacctgagaccccgtggccctacctgggcatgcagtgtgcgtgtgtgtgcatgtgtgtgtccaggcacacgtgtgtgtaggggg

SEQ ID NO: 305751 - DNA, 201 bp, Homo sapiens
gaggggcaggcactgtgccaggtcccagtgtgtctcatagagacagtcgggtgggcaggacagggaactcgggctcgcagtccctccccaggcagaccccrgttttccaccaagaggttgtggtgcttcctggcctcagggaccggtaggggtctggtgggccacagggacgtggggtatatgtgggcggcggccctgtct

SEQ ID NO: 305752 - DNA, 201 bp, Homo sapiens
ggctgtgggtgctgctccaggcaccgaagcatctgctctgcctctcctgtgctgggggccgggcctgctgcagagacagagtcagcactggtcggggtggygggggctccaacatgggggaggtgtgggactgcccgggagaggaagcgggggctccagcgtggggggggtgtgggactgcccgggaggggaagcaggggc

SEQ ID NO: 305753 - DNA, 201 bp, Homo sapiens
tgggggccctgcccgggctgggccgcacatagaaggggttgaagcctgcaggcatccctggccagctcattagatgggagtcactggtctgcaggatcccrggaggggcaggcactgtgccaggtcccagtgtgtctcatagagacagtcgggtgggcaggacagggaactcgggctcgcagtccctccccaggcagaccc

SEQ ID NO: 305754 - DNA, 201 bp, Homo sapiens
atgatctcagcccactgcaacgtctgcctcccgggttcaagccaatcttcttcttcagcttccagagtagctgggattataggtgtgcaccactatgcccrgctaatttttgtgtttttagtagggacagggttttaccatgttggccaggctgctctcgaactgccgaccttaggctatccacctgcctcggcctcccaa

SEQ ID NO: 305755 - DNA, 201 bp, Homo sapiens
aggtgggagggaccctggggaaggcccagagcgccgtggggcaggagggactctgcgggaggccgagagccccctgggcagggcagtaaactcagagcccytgtgcccccctcagaccgggcctcatccggaggtagggtagtcgggatatttgctctgcacagcggtagagcacgggtctggagccaccgccagagcctg

SEQ ID NO: 305756 - DNA, 201 bp, Homo sapiens
cccgcctcagcctcccaaagtgctgggattacaggtgtgagccaccgcgcccagcctcttttaaatttttaaaacttttttgtagaggtgaggtctcactrtgttgtccagggtgcgagggtctcgaacccttggtcccaagcagccctcctgcctccacctcccaaagtgctggggttacaggcatgcgcccccatggtg

SEQ ID NO: 305757 - DNA, 201 bp, Homo sapiens
tccgtccaccgccccagcttctatgccgagcgctttttcaagttcatgagcaacacggtctttcggaagaactcctgtaagccacctgagccccgcaaggygggagggaccctggggaaggcccagagcgccgtggggcaggagggactctgcgggaggccgagagccccctgggcagggcagtaaactcagagcccctgt

SEQ ID NO: 305758 - DNA, 201 bp, Homo sapiens
ctggaaggattttggcctgggccctggagctggtggctggggtggcgaggactgaggacagagcaggactgggagcccaggcactgtggcaggtgtgtgcygatgtggggtgagcaggcagtggggacccccaaagcaggtggaggctccgggagcctgggcagggtggtcccagggcctggtgtgggctgagcctgcctt

SEQ ID NO: 305759 - DNA, 201 bp, Homo sapiens
tccctgccaggagcacctgccaccctgagttttgacagccacgactgcttgaggccatggcccagtgtcctggggggtgcacagtggcccctgagtgaggyggcctggcatgggcttggctgatgtcagctgccactccgggtgctctctccacaggttcatcaagaaactggagcacacctggaaggccctcgtccacga

SEQ ID NO: 305760 - DNA, 201 bp, Homo sapiens
aagctgagctgaggccccaggcccgtccaggttgggagcaagtccaccgggtcagagagggcagctgggctgagccacccctcgtcttccatgggggattygcctcttttatgttctcctgtctcttccttcctccctctgcctctcttgcacctcctcgcaccctgctcttccgcgccctcctgcacgcgcgcccacctg

SEQ ID NO: 305761 - DNA, 201 bp, Homo sapiens
cagcagggcccaggcggaggctgaggacactggggacggaaagttccccattctctcccgccctggccgcctcccgggatgcaggtcaggcactgtgaccrccacagcctgggtgtcccagtggagaggcctcgggggccggccctcctgggttcacacccagcgccattgcatgccagccggggatgtgcagcctcggtg

SEQ ID NO: 305762 - DNA, 201 bp, Homo sapiens
ctgcctgccttggcctcccaaagtgctgggattacaggtgtgagccaccgtgctcagctggggctctagaatgtttaaaaacagtcaccccctcggtactrtggacattgggaccagatggttctctggggtggggccgtcctgggccctgcagggtactgagcagagagcctccacccactccctgccaggagcacctgc

SEQ ID NO: 305763 - DNA, 201 bp, Homo sapiens
cctccccagtagctgggattactggcacgcgccagcacgcccggctaatttttgtatttttagtagagatggggtttcaccatgttggccaggctggtctygaactcctgatctcaggtgatctgcctgccttggcctcccaaagtgctgggattacaggtgtgagccaccgtgctcagctggggctctagaatgtttaaa

SEQ ID NO: 305764 - DNA, 201 bp, Homo sapiens
gggctcgcagtccctccccaggcagaccccagttttccaccaagaggttgtggtgcttcctggcctcagggaccggtaggggtctggtgggccacagggaygtggggtatatgtgggcggcggccctgtctgggctttgctatgagcccccagcaaccccaagcaccaacccccacccttccctgcagccctgaagtcctc

SEQ ID NO: 305765 - DNA, 201 bp, Homo sapiens
ggccaggtgtgcacccacagcatctggggagccagcccggtgttggtgacccccgaatccttctgctcatctcaggagtgtgagaattctcttgggggccyccggtgctgagcaggcggcagccccctagcctctgtccaggctgtggtgtgagtgtggccgtgtgccacagcgggaggacgggctagtgtgcgtgttgct

SEQ ID NO: 305766 - DNA, 201 bp, Homo sapiens
ggggtgcagggcagcgtggggagcagccgggggccctgacactctggtctccctgcagaccacctcctccaccctgaagggtgccatccagctgggcatcrgctacaccgtgggccacctgagctccaagcccgaacgcgacgtgctcatgcaggacttctacgtggtggagagcatcttcttccccaggtgggccgggcc

SEQ ID NO: 305767 - DNA, 201 bp, Homo sapiens
aggtccaggcaggagcttccagaataagccttgagcgggtcaggatggcagctggcagaggcctctggggatgtcttaaaccttgccaaggcccggaaccygctgcccagggcagataggagcgctgtctcggctctgacgaggctggccagggtgtcctgtgctgccgccgcatgtccctggggttgtccttgtcccctg

SEQ ID NO: 305768 - DNA, 201 bp, Homo sapiens
gacttttgcgtctgtaagtcatgactgttcggccagttttagtaattttttttaagtatatttcctcttcattatcctcatcaatgatctaacctccagcmcttcctccactttatctggcatccaaattgcctggaagggggaagtcatgaacacccagattttaccacccccaccaccccgcccagtttctggtgtgtg

SEQ ID NO: 305769 - DNA, 201 bp, Homo sapiens
ccccagctactgggataggcagggactgaggcccggggcgggagggcacaggtggcccagagctccaccctgggctctctggctctgaggtggccgtgggstaagtgtctcagggcctgtgttggcccaaggaagccagtccctggcagggggcctggggtgggccctcgccccgcccaccttcacctgtcctcttgctct

SEQ ID NO: 305770 - DNA, 201 bp, Homo sapiens
aagggacatagccatgcaagggccctggggcaggaccacacctgctgagggaacagcaaggagcccgtgtggccaagcagcgcggaggggaagggaggggkggtggggaggggaagagagcagtggaggggaagacagcggggagggagagtggagaggggacggggccaggctgcacagggccctctgggctgtctggat

SEQ ID NO: 305771 - DNA, 201 bp, Homo sapiens; identical to SEQ ID NO: 64034

SEQ ID NO: 305772 - DNA, 201 bp, Homo sapiens; identical to SEQ ID NO: 64037

SEQ ID NO: 305773 - DNA, 201 bp, Homo sapiens; identical to SEQ ID NO: 64058

SEQ ID NO: 305774 - DNA, 201 bp, Homo sapiens; identical to SEQ ID NO: 64038

SEQ ID NO: 305775 - DNA, 201 bp, Homo sapiens; identical to SEQ ID NO: 64039

SEQ ID NO: 305776 - DNA, 201 bp, Homo sapiens; identical to SEQ ID NO: 64040

SEQ ID NO: 305777 - DNA, 201 bp, Homo sapiens; identical to SEQ ID NO: 64041

SEQ ID NO: 305778 - DNA, 201 bp, Homo sapiens; identical to SEQ ID NO: 64042

SEQ ID NO: 305779 - DNA, 201 bp, Homo sapiens
cgctaacatgaattttttctgttgtcattttgcttcttggaaggattttcaaaatggctgcagctcctcaagcaccggggcggggatctctccgtaagacragacctctggttgtgaagacgtcgttgaacaacccatacatcatccgctggagcgctctggagagcgaggatatgcacttcatcctacagacgcttgagg

SEQ ID NO: 305780 - DNA, 201 bp, Homo sapiens; identical to SEQ ID NO: 64044

SEQ ID NO: 305781 - DNA, 201 bp, Homo sapiens; identical to SEQ ID NO: 64045

SEQ ID NO: 305782 - DNA, 201 bp, Homo sapiens; identical to SEQ ID NO: 64046

SEQ ID NO: 305783 - DNA, 201 bp, Homo sapiens; identical to SEQ ID NO: 64047

SEQ ID NO: 305784 - DNA, 201 bp, Homo sapiens
tgggactgctagtctgaattggcccacagctgaattctgccctttcttatttttttcagttgaaggatttctgtataggatttctgttggatctgttctarctacacagaataagctcttcgtgtcaggaagagcagcatcttttggaatttggcggcattcttgtgttgtagttttgtgtgggagtgtgggattttgcac

SEQ ID NO: 305785 - DNA, 201 bp, Homo sapiens
agcagctctgtgaagactttctgcatctctgtgccagccccttgctgcccccacgtttgttaaagctgctcacatagatgctttttctgctttcttctgamacctgggcgggggtgggagggtaaaggagatgaacacacacgcatggcccaccatgttcggcgggaggtctgagaggactcggggtggctgcggacactt

SEQ ID NO: 305786 - DNA, 201 bp, Homo sapiens
atagtgatcatgaaacatatctttctgcagatgacctgagaattaatttatggcacttagaaatcacagatagaagctttagtatccttcctcagagggayactggcgtcttcccgagggtgctctttagatagtaatttctctcgtccctttatacacctgtatctcggagtctagtcttgtaaataccatcgctgcaca

SEQ ID NO: 305787 - DNA, 201 bp, Homo sapiens
ggtccctgccgtcctccctctgctgtccagtggcttgagctggggttccatgtcgtatgttggttttcttagttgtttcagcttgaagggtgaaactgggmctgctagtctgaattggcccacagctgaattctgccctttcttatttttttcagttgaaggatttctgtataggatttctgttggatctgttctaactac

SEQ ID NO: 305788 - DNA, 201 bp, Homo sapiens
tccagaaaatacggcaggctgcatttggcagacctgctccagagaacacggcaggctgcgtttggcagacctgcttcagaaaatacggcaggctgcattcrgcagacctgctccagaaaacacagcaggctacattcgacaggctgaattcggcagacctgctccagaaaatacggcaggctgcattcggcaggcctgctt

SEQ ID NO: 305789 - DNA, 201 bp, Homo sapiens
ctccagaaaacacggcaggctgcattcggcagacctgctccagaaaacacggcaggctgcattcggcagacctgctccagaaaatacggcaggctgcattyggcagacctgctccagagaacacggcaggctgcgtttggcagacctgcttcagaaaatacggcaggctgcattcagcagacctgctccagaaaacacagc

SEQ ID NO: 305790 - DNA, 201 bp, Homo sapiens
cctgctccagaaaacacggcaggctgcattcggcagacctgctccagaaaacacggcaggctgcattcggcagacctgctccagaaaatacggcaggctgyatttggcagacctgctccagagaacacggcaggctgcgtttggcagacctgcttcagaaaatacggcaggctgcattcagcagacctgctccagaaaaca

SEQ ID NO: 305791 - DNA, 201 bp, Homo sapiens
gccggtggagacccaccaggtccacgagtacctgcgcagcaagctctgctctctctatgagaacgactgcatctttgacaagtttgagtgttgctggaacrgttcggataggtaaggcctgcgtggagatgagctgtcgccccaagcttgctggtttccgagagtgcaaggtcagtgagggaggcgagctgtcctccagcg

SEQ ID NO: 305792 - DNA, 201 bp, Homo sapiens
gcattcggcagacctgctccagaaaacacggcaggctgcattcggcagacctgctccagaaaacacggcaggctgcattcggcagacctgctccagaaaayacggcaggctgcatttggcagacctgctccagagaacacggcaggctgcgtttggcagacctgcttcagaaaatacggcaggctgcattcagcagacctg

SEQ ID NO: 305793 - DNA, 201 bp, Homo sapiens
ttaatgaaacttcccagcaccgacagttacaggagtttctcttttaaaagactcagtccattataattaagtttgaaaatcactgacagagctagaatacmattaattatgtaattttatacaccctctgggtataaatgacatagatttagacctttttaatccaatacataatattttagtttcatttaagcaagttag

SEQ ID NO: 305794 - DNA, 201 bp, Homo sapiens
gctgcattcggcagacctgctccagaaaacacggcaggctgcattcggcagacctgctccagaaaacacggcaggctgcattcggcagacctgctccagaraatacggcaggctgcatttggcagacctgctccagagaacacggcaggctgcgtttggcagacctgcttcagaaaatacggcaggctgcattcagcagac

SEQ ID NO: 305795 - DNA, 201 bp, Homo sapiens
cttcatcatacacatgagacgatcaagtatcaggaagatgaagttacttggtgaaggtctcagagctaataggtgctatacccattatttgcatgcagacmttctgagtccagagcccatacttaagtttttaaccaggctgcctttttatgtggctcattttatcctttttgatggctgcatagtattcccttagttatt

SEQ ID NO: 305796 - DNA, 201 bp, Homo sapiens
tgtggagatgaaggtgtgtgctgatcccccatccccatgtggagatgaaggggtgtgttgatcccctgtccccctgtggagatggtgtgtgctgatccccrtccccctgtggagatgaaggtgtgtgctgatcccccatctccctgtgaagatgaaggggtgtgctgatcccccgtgcccctgtggacatggaggcgtgtg

SEQ ID NO: 305797 - DNA, 201 bp, Homo sapiens
agcagccagagacagtatgtgcacacatgggcctgactgtgttccactaacacttgccttaaatacggcaggctgcattcggcagacctgctccagaaaayacggcaggctgcattcggcagacctgctccagaaaacacggcaggctgcattcggcagacctgctccagaaaacacggcaggctgcattcggcagacctg

SEQ ID NO: 305798 - DNA, 201 bp, Homo sapiens
ctctacccagatggtgcagaagcagccagagacagtatgtgcacacatgggcctgactgtgttccactaacacttgccttaaatacggcaggctgcattcrgcagacctgctccagaaaacacggcaggctgcattcggcagacctgctccagaaaacacggcaggctgcattcggcagacctgctccagaaaacacggca

SEQ ID NO: 305799 - DNA, 201 bp, Homo sapiens
cctggtctttttcactctccctctagcttcccagagttgctcatgattttgaagatggcatatgtcttcccaagcatgtttctccacttctgtaacagacwtgttctgtacgtacgtaagcagcacctcactctgggcacctgtgcagcctgcttcacttgtgcagcactgtgcggttgtctgtgctggctcatttatctc

SEQ ID NO: 305800 - DNA, 201 bp, Homo sapiens
ttcctttagcatatgtactaaagtgttaaacacctaagatattagatattggttatagagcaagaatgaaagtactggcgtccttgattttgaattatgamatatttaatacttaatagaaaatttcacttagggcatacagaagattcagaggttaatatagatgtacctgcaaacccaccacccagaggttatcccttc

SEQ ID NO: 305801 - DNA, 201 bp, Homo sapiens
gcccacagctgaattctgccctttcttatttttttcagttgaaggatttctgtataggatttctgttggatctgttctaactacacagaataagctcttcrtgtcaggaagagcagcatcttttggaatttggcggcattcttgtgttgtagttttgtgtgggagtgtgggattttgcacagatggtactagcttggtttt

SEQ ID NO: 305802 - DNA, 201 bp, Homo sapiens
cctgacagctagggagggtggacaccagttcatctgcctactagcctagggtccgatttgctagtgcctccggtagggcgctagttttccttataaccacytcctgggctgctaggccacctcagttcctggtggccaggtggagaccatcaggaaggggcagtggcctcgcgagcagcacctggtctgtggttatgtgcc

SEQ ID NO: 305803 - DNA, 201 bp, Homo sapiens
ctgttggatctgttctaactacacagaataagctcttcgtgtcaggaagagcagcatcttttggaatttggcggcattcttgtgttgtagttttgtgtggsagtgtgggattttgcacagatggtactagcttggttttcctatttatatgattaagtatgtactatcttgctattaagggctttctgtataacattaata

SEQ ID NO: 305804 - DNA, 201 bp, Homo sapiens
ccggcaccttgcctctgcccagcgtgtagaggagagaagtgattgggtgggtaatggtaggaaacgaactcgttgccagagtaggggtgcgttgaaatggktgaacttgccgagtcagggtagcagagcgctggctacagcgagttcatgaaggactgggaggagagggtgtggtgaccacgagtccaaagagctgcctag

SEQ ID NO: 305805 - DNA, 201 bp, Homo sapiens
gtatgcacacagctctgccaggtgccgcagagcaggaaacaaatggccttgcccggcaccttgcctctgcccagcgtgtagaggagagaagtgattgggtsggtaatggtaggaaacgaactcgttgccagagtaggggtgcgttgaaatgggtgaacttgccgagtcagggtagcagagcgctggctacagcgagttcat

SEQ ID NO: 305806 - DNA, 201 bp, Homo sapiens
gcatctgtgtctgcttgtagaaaatttcttacttccagctgagcgcagtggctcacgcgtgtaattcagtactctgggaggctgaggcaggaggatcgctygagcccaggagttcgtgaccagcctggacaacatagtgagaccctggctccacaaaacattaaaaaaggtagacaatttcccacttttcttgtctgtcag

SEQ ID NO: 305807 - DNA, 201 bp, Homo sapiens
accatctttctttccagagtggcaacacagtgcaggggggtccctgtcttagcagtgacttgctggtgtgcagaggggtcactctcttagcagtgacttgygggtgtgcagggggttcaccaccttaccagtgacttgcagggggtccctgtcttaacagtgacttgcgggtgtgcaggggggttcgctgtcttagcagtg

SEQ ID NO: 305808 - DNA, 201 bp, Homo sapiens
tcacttctattagtttatgtctggtttttgaacagaatggactttttgcctttgggtgagcttctttgaaaagacacagaaacgtgtgtatatgtgtgtgygtgtgcatctgtgtctgcttgtagaaaatttcttacttccagctgagcgcagtggctcacgcgtgtaattcagtactctgggaggctgaggcaggaggat

SEQ ID NO: 305809 - DNA, 201 bp, Homo sapiens
atggtgttgcagccgccaagagggtgaagctgctgcccatcaagcgaccccagctcccagttagaagctgcagcaaggttcacaggcgtccacgtgtgcgkcttagaatcgaaggagcgtggaggattcggaaggctagtgagtgagcaccagattgtggaaggtgcagggcctgagattcaggagtcaggtccatagagg

SEQ ID NO: 305810 - DNA, 201 bp, Homo sapiens
tgtgcgcggcctgggtctgccatcagccatgcggggcctctgagcctgggaacggggccttggatgcttctgccttgctttctctgttgtgtttctagaamtcgtcagctgggaggtgggccaccgaaactgatcctctgattgtcttatccttcctgtcatccatgtctttctttccactctgccctttggaggagatct

SEQ ID NO: 305811 - DNA, 201 bp, Homo sapiens
gtatgttaaaccaaccttgcattcctaggatatggtatacttctcatatttcaaaaatattgtttgttcctgtagcagagaaatttttagttctttctgasttctgtattttagaataatttgccacaaacttttttttagtgcttaagtgactagaaagtagtatgcagaattttctattttgtcacattttatccagtc

SEQ ID NO: 305812 - DNA, 201 bp, Homo sapiens
ccatgtggtctttgtcctttaatgttattagtatggtgtattacattgatttgtttttgtatgttaaaccaaccttgcattcctaggatatggtatacttmtcatatttcaaaaatattgtttgttcctgtagcagagaaatttttagttctttctgagttctgtattttagaataatttgccacaaacttttttttagtg

SEQ ID NO: 305813 - DNA, 201 bp, Homo sapiens
ccacggccacagtgggagccagaagccgtgtgacagatccagcaagtgtgactccttactctccaccgccagcttagaatcaagccttgaagtagatgctygttcaagaatctgcttgtgataaaggcattttcaaatgggaaacaatgtatcacaacaggaaactcagtagagcgagctgtaaagggagcctggccctgc

SEQ ID NO: 305814 - DNA, 201 bp, Homo sapiens
agtgacttcctctgatggggaagccgccagtcaatcccaccagactgagccgctgctcatgtgcagcggcgcccccagtgcctcggtggaatgtgcccacrgaccgtgtgcagcagccttttcgcctgttctctttcctgaggttgagtgtgtttttaagaattcgtatttctactagaattcctgcgatgaggatgagtg

SEQ ID NO: 305815 - DNA, 201 bp, Homo sapiens
caagcatgagccatggcatgtggccgccacttgccttttttcattaagagtctataattggagatcttacagggaactgggctttctgctcagccatactygagctcatttgacccccggccactgccccttgagatgtaagtactactgtgttgccttcatcatacacatgagacgatcaagtatcaggaagatgaagtt

SEQ ID NO: 305816 - DNA, 201 bp, Homo sapiens
tgtggcgctgtgggctcctggatggaagcaggagatgggaaataaacatggatcgctgaatgcagtttctcttctctgagttcgtctttttttttttttttcccctgctttgaagttttagacaaggtcagtcagacactaggtatttgccagcagccagggtcagtgctgggccatggaagggaagcggcccgcttcttt

SEQ ID NO: 305817 - DNA, 201 bp, Homo sapiens
aggaatgccctgcacgtcagactcagtgcagcgacgcggggcaggcgaggcgctcagcttctgcccgtggaggcttcggtggaaggaatgccctgcacatyggactctgcagcagtgcgggtgtgggtagcttcttgggatgtcttctcctgatacttgatcagattggaaatatcaaggaacatctgtttagacttgaaa

SEQ ID NO: 305818 - DNA, 201 bp, Homo sapiens
agtccattcactctcaaaaacacgcccgtcttcctacctggaaacttctgttgagggatgcgatgaaggggagtgaggcgtttcagtgctgcctcagcccratcctgattctccgtgtggcagcgccttcttgtgttctaggtcgccccacagaaccagttatgtgcttacgcctgtgtctctgtctgtgctgttcccttc

SEQ ID NO: 305819 - DNA, 201 bp, Homo sapiens
cttgatatatttcaaatattgcaaaatacccttagattacatatccccaagaacatctaaaagcgttcccagtaacatttgcttagtccattcactctcamaaacacgcccgtcttcctacctggaaacttctgttgagggatgcgatgaaggggagtgaggcgtttcagtgctgcctcagcccaatcctgattctccgtg

SEQ ID NO: 305820 - DNA, 201 bp, Homo sapiens
gggggttcactgtcttagtgacttgcgggtgtgcggggggttcactgtcttagtgacttgcgggtgtgcgggggggttcacttagtgactttcgggtgtgwgggggttcactgtcttagcagtgacttgcgggtgtgtgtgggaggttcactgtcttagcagtgacttgcgggggttccctgtcttagcagtgacttgcag

SEQ ID NO: 305821 - DNA, 201 bp, Homo sapiens
gggtgtgcggggggttcactgtcttagtgacttgcgggtgtgcggggggttcactgtcttagtgacttgcgggtgtgcgggggggttcacttagtgacttkcgggtgtgtgggggttcactgtcttagcagtgacttgcgggtgtgtgtgggaggttcactgtcttagcagtgacttgcgggggttccctgtcttagcagt

SEQ ID NO: 305822 - DNA, 201 bp, Homo sapiens
tcagaaaacctagagaatcagaaagatcagaagacctagtgttgaggccaagcccttccagagtctctctgaaggggccacttcctacttgaacttgaaaatgatttgttctctgatttttaaacagaagctgaaaacattttattttgtttttcagtttttgaagagcctgaagatcccagcagtaggtccttcttctca

SEQ ID NO: 305823 - DNA, 201 bp, Homo sapiens
agctcatcctttgtgaagtgtgcgggtgaatattcagttttgtggccatctgaattggataattctagaacctttccatcacccctaaaagaaacccactrgcagtccctcccattccctccaccctctgccctctggtaaccactgattactttgtttctgtggatttgcctgttcacgtgtcatgtaaatggagtcatg

SEQ ID NO: 305824 - DNA, 201 bp, Homo sapiens
tttctctatgttggccaggctggtcttgaactcctgacctcgtgatccgcctgcctcggcctctcaaagtgctgggattacaggcatgagctactgcgccyggccattatctgtcaatttttttcttaaaaaaaattggaaagtagccaaaaagaaaacaaagtccctttaggtttaaataggaaaatgaatttagtaatt

SEQ ID NO: 305825 - DNA, 201 bp, Homo sapiens
tttgccaaattgcctctcgcagcagtttcctgagaaagcatttgtttgttttggctctttgcatattcgaaaacatttttactgctccctcagatttgatygaaaacttgactaggtctagcatttcaggttgaaaattgttttctcccagaattttgagggtagtttgaggtttcatccaccatgtttcctgcaacctgt

SEQ ID NO: 305826 - DNA, 201 bp, Homo sapiens
gagttcatccgttgccatttgatgagggctctgggagtcaaaaggcttccctgaacaaggaacccttgagctcagatgcaaatgagggatgggcctggacygggatgggggatgggaggagcctgcaaaggggagagagggtgggaggacttgacatgggagaagaacaggctggggcaatggggtgtgaaagcaaaggga

SEQ ID NO: 305827 - DNA, 201 bp, Homo sapiens
tgtgttgcccaggatggtcttgaactcctggactcaagtgatcctcccacctcggcctcccaaaatgctgggaatacaagcatgagccatggcatgtggcygccacttgccttttttcattaagagtctataattggagatcttacagggaactgggctttctgctcagccatactcgagctcatttgacccccggccact

SEQ ID NO: 305828 - DNA, 201 bp, Homo sapiens
ctccagatgcatacctagaagtggagtcgaagagtcggaaatcaagttcgttcttttttttttttttttccctgagtttcatctgagatttttttgagccrggattttttagctttaaaaaatatgtatggtcatttgatattcaaatttatagtactgaaattttctctacactgtgctttgttcattaaaacagctctc

SEQ ID NO: 305829 - DNA, 201 bp, Homo sapiens
cacatgagacgatcaagtatcaggaagatgaagttacttggtgaaggtctcagagctaataggtgctatacccattatttgcatgcagacattctgagtcyagagcccatacttaagtttttaaccaggctgcctttttatgtggctcattttatcctttttgatggctgcatagtattcccttagttatttagtccactg

SEQ ID NO: 305830 - DNA, 201 bp, Homo sapiens
agtgacttgcggttgtgtgtgggggggttcactgtcttagcagtgacttgcgggggggtccctgtcttagcagtgacttgcaggtatgcgggggttcactrtcttagtgacttgcaggtgtgcgggggttcactgtcttagtgacttccagttgtgcggggggttcacttagcagtgacttgcgggtgtgtggggggttca

SEQ ID NO: 305831 - DNA, 201 bp, Homo sapiens; identical to SEQ ID NO: 64073

SEQ ID NO: 305832 - DNA, 201 bp, Homo sapiens; identical to SEQ ID NO: 64070

SEQ ID NO: 305833 - DNA, 201 bp, Homo sapiens
attgatcattcctgatttctgaaagtaactgggttgtgggggagggtggcgtgcgctgtgcaccccaggggtggggtctgagtccttgctgccgctccccycactgaggagtgctgctgtctgctcttgttttgaacagcgccatcatgaccgggtcctataacaacttcttcaggatgtttgatagagacacgcggaggg

SEQ ID NO: 305834 - DNA, 201 bp, Homo sapiens
ttgtctcacttggtaatgatgtcatcattatcagtggtggtaactgtatccagacaatgacatggaacttctactgtctagaatattacattgtacagaarccaacaaaagttattgcatagaatattaacaacatttttattactattatataagaatcagatttattttaaaagttaacattaggtatgcattataaaa

SEQ ID NO: 305835 - DNA, 201 bp, Homo sapiens
aaaagagttaacattaatcatcatagaaatggtattaatgagcaaagatatgaccggcctcacacctgtaatcccagcactttgggaggccaaggcaggargatcccttgagcccaggaggtcaaggctgctgtgagctgtgatcacaccactgcattccagcctgggaacagagtggaccctgtctcaaataagcaaaga

SEQ ID NO: 305836 - DNA, 201 bp, Homo sapiens
tcccaggccagggattcccgtgtgaggccagcgaacagtgccagccgcgggagcttgctgtgtagatgttggtggaaatccttcactaacacgattaaaaygcctttgcagacctgtcagaattgcattctagccacttttggagggagctgtttgagtcacttcagctttagggcccatttcttcttagtaggttgttta

SEQ ID NO: 305837 - DNA, 201 bp, Homo sapiens
tgtctgtgaaattggttcatagcctgtccctgctcttgagtgtttatccaaatagatccatgggttgccttttatcagacagaggccgatggggaattgcrgctctgccgtggccgcgcttctccagctccctgcaactttgtcagaccctagagatctgttcagtgtcacaggtcacatttcttagatgttgacttcgtt

SEQ ID NO: 305838 - DNA, 201 bp, Homo sapiens
tttttctgctttcttctgacacctgggcgggggtgggagggtaaaggagatgaacacacacgcatggcccaccatgttcggcgggaggtctgagaggactyggggtggctgcggacactttgcggatttgatgggacccggatgttgaatgaggattgcacagccagacagccagctggcagcagtgccacggcaggtgga

SEQ ID NO: 305839 - DNA, 201 bp, Homo sapiens
tattttgtttttcagtttttgaagagcctgaagatcccagcagtaggtccttcttctcagaaataatttcatccatatccgatgtaaaattcagtcatagkgggcggtacatgatgaccagagactacctgtcggtgaaggtgtgggacctcaacatggagagcaggccggtggagacccaccaggtccacgagtacctgc

SEQ ID NO: 305840 - DNA, 201 bp, Homo sapiens
ctgttttctctgatttgggatggtaagaaatccttttgtgaataataagtatatcgttaatatttcttcacagtttgatacatttataattttgcatttttatctcagaagtagaatatcacacaatgctacttaagaaccatataccttggccaggcacagtggctcacgcctgtaatcccagcaatttgggaggccgag

SEQ ID NO: 305841 - DNA, 201 bp, Homo sapiens
cttttttcattaagagtctataattggagatcttacagggaactgggctttctgctcagccatactcgagctcatttgacccccggccactgccccttgaratgtaagtactactgtgttgccttcatcatacacatgagacgatcaagtatcaggaagatgaagttacttggtgaaggtctcagagctaataggtgctat

SEQ ID NO: 305842 - DNA, 201 bp, Homo sapiens
atggaaaataagtgaacgggataaaagagcagaaggttataacctgaaagacgaagatggaagacttcgagacccatttaggatcacggcgctacgggtayacgttgcctttgctttatccaatgctgttgagaagttaagaataaacgtttcagtctgctgtctggagagtgctgcgcggtggagtactgtgaggtctgc

SEQ ID NO: 305843 - DNA, 201 bp, Homo sapiens
gatagccttagggaagatgcctcatccctgcctaacagattttaggttagaaaatggaatttctcttgtttttgtgaatcgttgcttaacctaaataatartagtctcaaatataaaacaaaccctgataaaagtcaagcatctcgttctaaaagatactgggtattatagagtgttaagtgcttttttaagatgaagttg

SEQ ID NO: 305844 - DNA, 201 bp, Homo sapiens
atttctcttgtttttgtgaatcgttgcttaacctaaataatagtagtctcaaatataaaacaaaccctgataaaagtcaagcatctcgttctaaaagataytgggtattatagagtgttaagtgcttttttaagatgaagttgttatgtgagtgacagatttatacaggagcaagtccctactgaagttgttcagccagct

SEQ ID NO: 305845 - DNA, 201 bp, Homo sapiens
gcattcggcagacctgctccagaaaacacggcaggctgcattcggcagacctgctccagaaaacacggcaggctgcattcggcagacctgctccagaaaayacggcaggctgcattcggcagacctgctccagaaaacacggcaggctgcattcggcagacctgctccagaaaacacggcaggctgcattcggcagacctg

SEQ ID NO: 305846 - DNA, 201 bp, Homo sapiens
catccgtggaaatgacaacagcgtgaaaacggcagatgatgtacaaggattatgatgaaaatagtcttgacctcacggaccctctgagaggttcttgaccrttgcaccctcaagggcccacagaccgcactttgagaactgctgcttgaatgcaagctattagcagtaggagtgtcaaggacagggcagacttcaggatta

SEQ ID NO: 305847 - DNA, 201 bp, Homo sapiens
cctaaagtttgagatgtgcttttccccttttgataccagctctcagagtgatgatcgtttctgtataggcaagggaaatacttgtcactgccttcttgctrgtttgactgactctgaaatacttaaagatagttgtatttgttgttgcatgtctagatctgccacgggggagaggccagagaggctttgctgacgtgcagg

SEQ ID NO: 305848 - DNA, 201 bp, Homo sapiens
atccgtggaaatgacaacagcgtgaaaacggcagatgatgtacaaggattatgatgaaaatagtcttgacctcacggaccctctgagaggttcttgaccgytgcaccctcaagggcccacagaccgcactttgagaactgctgcttgaatgcaagctattagcagtaggagtgtcaaggacagggcagacttcaggattaa

SEQ ID NO: 305849 - DNA, 201 bp, Homo sapiens
agtgtagggacctcacacaggtggaatgacacagtgtagggacctcacgcgggtggagtgacacagtgtagggacctcaggcaggtggaatgacacagtgkagggacctcacgtgggtggagtgacacagtgtagggacctcacgcgggtggaatgacacagtgtttgtggggacctcacgtgggtggaaggacataatga

SEQ ID NO: 305850 - DNA, 201 bp, Homo sapiens
ggtggaattacacagtgtttgtagggacctcacgtgggtggaatgacacagtgtttgtagggacctgacgtgggtggaatgacacagtatagggacctcasgcgggtggaatgacacagtgtttgtagggacctgacgtgggtggaatgacacagtgtagggacctcacacaggtggaatgacacagtgtagggacctcac

SEQ ID NO: 305851 - DNA, 201 bp, Homo sapiens
gtttgtagggacctcaggcgggtggaatgacacaatgtagggatctcacgtgggtggaatgacagtgtttgtagggacctcaggcgggtggaatgacacagtgtttgtagggacctcaggcgggtaggatgacacagtgtagggacctcacgcgggtggaatgacagtgtttatagggacctcaggccggtggaatgacac

SEQ ID NO: 305852 - DNA, 201 bp, Homo sapiens
tgtttgtagggacctcaggcgggtggaatgacacaatgtagggatctcacgtgggtggaatgacagtgtttgtagggacctcaggcgggtggaatgacacagtgtttgtagggacctcaggcgggtaggatgacacagtgtagggacctcacgcgggtggaatgacagtgtttatagggacctcaggccggtggaatgaca

SEQ ID NO: 305853 - DNA, 201 bp, Homo sapiens
aacctccgcttcccaggttcaaacggttctcctgcctcagcctcccgaggtgtgattacagggatgccaccatgcccggctaattttttttttttttttttgtatttttagtagagttggggtttcaccatgttggccaggctggtctcgaactcctgagctcaagtgatccgcccacctcggcctcccaaagtgctggga

SEQ ID NO: 305854 - DNA, 201 bp, Homo sapiens
tccacgagggctgtgtgcgggcatcgggagggaccggcgtgtttccagatctggcttctactctgtttgcagactgacctgccagcctgtagcatctcacrgatgttgactgaagacatgaggttcccgggttctcatggcacagctggcagcatgagcctctcgttggcctgggttccccacgggtggacacttgaggcc

SEQ ID NO: 305855 - DNA, 201 bp, Homo sapiens
cttagcagtgacttgcgggtgtgcagggggttcaccaccttaccagtgacttgcagggggtccctgtcttaacagtgacttgcgggtgtgcaggggggttygctgtcttagcagtgacttgcgggtgtgcgggggggttcactgtcttagcagtgacttgcgggtgtgcagggggtttcactgtcttagcagtgacttgcg

SEQ ID NO: 305856 - DNA, 201 bp, Homo sapiens
ttgcaacttgtaaatatgtgatttgaagtttcttcagtgaaacacaacagatagctccagaaaggcaggtatcttgtcggtttctgctcactattttcaaytgagtaactgtgaattaggtgaaaattagaaggcactgtagaaatagtggaatgatacaaagtacagaaccagccatagaaatgtatggtattcaataat

SEQ ID NO: 305857 - DNA, 201 bp, Homo sapiens
agagaaaaaaagattctctaagcttaccctgtccgatacagtagctactagctgtatgtggttgtttaaagtaaattaaaaattctgctctttggttctaytaaccacgtttcaagtgctcaaatagccatgtgtggctagtggttcctgtcgatggtgcagaacattttcatctttccagaaacttacattggacactgt

SEQ ID NO: 305858 - DNA, 201 bp, Homo sapiens
ctcccatgggctcagccacaggtatttcttaagagtctcacctcctcaggtgacttttccagcctgtcttcctggctcatcccactgccttgcctgggctsaacggctgatgctttgctccatttcagttcccactttccttctcctcccttgacttgatacttcctactcccccttgcttcccagggtcccttcccctcc

SEQ ID NO: 305859 - DNA, 201 bp, Homo sapiens
gctttaatataggttttgtgttgaggacctaagacaacactaagagtgaaccctgtatgagtccacaatcctgaacagttgctttgggtggtagctagcarttccttctcaccagggattggtcatgtatttaatggcagactctcccttcccctaccttccccgcttccccacattttcccctgggtgtcctaaaggctt

SEQ ID NO: 305860 - DNA, 201 bp, Homo sapiens
cagctgaacatttttacagatatccttttattagtttgaggaagttcccttctattcccagtttgccgagatttttatcatgcttctagtcccagtttgcygagatttttatcatgcttctagtcccagtttgctgagatttttatcatgcttctagtcccagtttgctgagatttttatcatgaattgatgttggatttt

SEQ ID NO: 305861 - DNA, 201 bp, Homo sapiens
gccaggcatcggaagaacttcaaatataaatctactacaggaatatgaactgatggcctgaaaaagactgcatttattttggataacaaaataatttcttsgccaggtgcagtggctcatgcctgtaatctcagcactttggaagggcgaggcaggtggatggattgagcccaggagtttgagaccaccctgggcagcatg

SEQ ID NO: 305862 - DNA, 201 bp, Homo sapiens
tgtctgtggccactgaatcaccattcattttttcaattacaattcatatgtccaggatgagagagactcctcgtccatgctgatccaaataaaggttgctrgtctctctcacctcagctccatttgcagtggggatgaagatctgtgggaaaatgaaagggttttctttttcagttacatcaagaagatggaaagtaagtt

SEQ ID NO: 305863 - DNA, 201 bp, Homo sapiens
aatagccagctaaaagacagaaaggtgtattttagagaccaatttagttcagtagacagtctttataacttagctatggttttttaactaaaatgactgakcttagggctaagcccattaactaatagggcaaagaaagtattctctctacctggactccacaaggatagctcttataaagaagcaagcctattttacctg

SEQ ID NO: 305864 - DNA, 201 bp, Homo sapiens
gattcattcctttggcctatttctaatttgcaacctgctgtattctactttctatgaaactagtgtgtattatctcttatatccctctaaattttcttgayggttaatagtatgtttccctttgatcaccaccagcaagcttcgggggtcagactgactctgaaagtagcagatatttgaagttctcttgaaggaacatgg

SEQ ID NO: 305865 - DNA, 201 bp, Homo sapiens
tgcaatgttgtttatttggaacattccacagtaatttaagattgttgtttgtatgactttgccattttttgtgaacatttgctgcttctggggcctaaacrttctatgtgtaaatgtagatgtagctagaaggtagagtactcagttcttcagaaattaagcatcacatttttacgttgaatcttggttttgcctctcaga

SEQ ID NO: 305866 - DNA, 201 bp, Homo sapiens
agtcagcttttggtaaaccgtgatagcaaacaactccaaaattttagtggcttatttgttctcgtttactgtgtgaatctgctgtgttctgctctgtaccygcttattctgataacctaggctaaaggagagaggaaggtgtgatagcaggacctgtgtcatggctcttaaaacttctgcttgaggccaggtgcggtggct

SEQ ID NO: 305867 - DNA, 201 bp, Homo sapiens
acaaaaagtacaaaaattagccaggtatggtggcaggcacctgtggttccagctatttgtgaagctgaagtgggaggatctgagccctgggagattgagartacagtgagcactgattacaccactgcactccagcctaggcagaactagaccctatctcagaaaaaaaaagaaaaaaaaaaattctggccaggcagggta

SEQ ID NO: 305868 - DNA, 201 bp, Homo sapiens
cgaggcagttttgtagcagagtaactctgctgcttttgctgcttgtagcaatagcgtttggctcctgcagtgcatggaaaccagcagcacctagcagccarcatcttctgggtggttttatagtggagtgcttccagtgagacaccacccatgaatagcttttcatgacgctctaaaggacagatttccagcaagttctgc

SEQ ID NO: 305869 - DNA, 201 bp, Homo sapiens
tcagaaattaagcatcacatttttacgttgaatcttggttttgcctctcagatttctttgatcagcttagccagtgatttttcctacctaagcatgcaagwaaaaggatcaaaggggatagaataaataaatccctgtgaattttcaaaagctagagtttgtaccccctgtagtattgccatttatcgccagtttttgttt

SEQ ID NO: 305870 - DNA, 201 bp, Homo sapiens
tttaggattaaaggggtatttttaaattccattttttaatttgatgacttactagcagtgctctttgttgttgttttttttttaagtggttgcttaagggyttatggtatacatgatagaatttcatgtgtagtataagaaccttaatatattaccacttttttctgggttcttgctatcgtcattatacattttacttct

SEQ ID NO: 305871 - DNA, 201 bp, Homo sapiens
tagtttctttcagctttaaaatattatgacctttaagatctaaaattaaatgttgaaatgtaaaatttaaaggcttattgaaagaatgttaataacttttwaaaaaagtattggtttaagattagattctcctaactaaaaggatcctaaaaattaagagtaagatatttagaactttgtactaagtgtaaagtcttagta

SEQ ID NO: 305872 - DNA, 201 bp, Homo sapiens
gatcttggttcatcgcaacctccacctcccaggttcaagcgattctcctgcctcacctcccgagtaactgggattacaggcatatgccaccatgcctggcwaattatatatatatatatatatatatatatatatatatatatatatatatatattttttttttttttagtagagatggggtttctccatgttggtcaggc

SEQ ID NO: 305873 - DNA, 201 bp, Homo sapiens
ctttacatgtttattgcccttttatttgttacttttttctatttttctattgggtggtttacttttttttttaaatattagaattagtaatcctttatctrtcctatgtcttttttaaattttttttatttttatttatttatttatttatttatttttttgagatgagccttgctgtcacccaggctggagtgcagtggc

SEQ ID NO: 305874 - DNA, 201 bp, Homo sapiens
acctcccgagtaactgggattacaggcatatgccaccatgcctggctaattatatatatatatatatatatatatatatatatatatatatatatatatattttttttttttttagtagagatggggtttctccatgttggtcaggctgatctcaaactcctgacctcaggggatccgcctgcctgggcctcccaaagtgc

SEQ ID NO: 305875 - DNA, 201 bp, Homo sapiens
aggcaggagaatcgcttgaacccgggaggcagaggttgtggtgaattgagatcgtgccattgcactccagcctgggcaacaagagtgaaactctgtctcaaaaaaaaaaaaaaaaaaaaagtaacagaagtatggccatagactgcctttcataagtatttgtgttgcaggtacatgtagcccatcttggctggagatggt

SEQ ID NO: 305876 - DNA, 201 bp, Homo sapiens
caaaggattttagataccattcttaatttaattattttatggccctttctctttaggtctgtattagtttgtgagggctgccataacaaagtatgacagaytggatggcttaaacatctgacagttttggaggctaggagtttgagatcaaggagatcaaggtgttggcagggttgatttatttgaggccccttcccttgg

SEQ ID NO: 305877 - DNA, 201 bp, Homo sapiens
ggcaggagaatcgcttgaacccgggaggcagaggttgtggtgaattgagatcgtgccattgcactccagcctgggcaacaagagtgaaactctgtctcaaaaaaaaaaaaaaaaaaaaagtaacagaagtatggccatagactgcctttcataagtatttgtgttgcaggtacatgtagcccatcttggctggagatggtc

SEQ ID NO: 305878 - DNA, 201 bp, Homo sapiens
agtgtcaggtgttagtaattccaaggtttttagttctcacagtgtatatttgcctctattacactgatgcaaatgcatctttcatgtctgatcagctactrtttggtcattcacttttatgcttcctattctagtacatgcagtgctgaaatgaatgggaaaaaccactttcccacatgaatgctctactgcacttttatc

SEQ ID NO: 305879 - DNA, 201 bp, Homo sapiens; identical to SEQ ID NO: 64091

SEQ ID NO: 305880 - DNA, 201 bp, Homo sapiens
taatgcagtttttttccaggttaatcaatcagtcagtgaattaattaattctttaccctttcttgctttctttcttttctctcttcctccattcctttctstctctctcctggcttccctcctttcagtagaattctttctctaataaaattacacagaaataacacaatctattttattacattgtttatttcagaaaat

SEQ ID NO: 305881 - DNA, 201 bp, Homo sapiens
atatagcacttgatccgttaaaactattacatgcaatgtcagagtttgtatgttgtagatgtctttcatgtcactccttctctgggccctgcccccatcayaaacttgaataaatttgtgaaatatctttttaatatttacttttttccccaaaagtcacagtacattaaattgaatgcatttatattcttatgtcacatt

SEQ ID NO: 305882 - DNA, 201 bp, Homo sapiens
gaatattaaccttaaaaaggaagacttggtagcacagaatatctgtgtctcagggggaaaaaagccagtaggcatgttctgtgacacctcaaaaaactgtaaaaggtggaaagtagtacaatttccaagaattagttagctcttcaaggagagtgagttccccaccattggtgttactgaaggaaaaagaagggcaaccac

SEQ ID NO: 305883 - DNA, 201 bp, Homo sapiens
tccccctccccgctccctgaacagagagattttgcctttcaaggtctcagtctgaggatttttgcttgatataggacctgtattcttttctcattctgttmctgtgatatttttagaagtatccattttccttctaatatgcccattctgcccgtctttgaagtacctatatctttaaatgatgcctgtattcaccagtct

SEQ ID NO: 305884 - DNA, 201 bp, Homo sapiens
cctgtggtgaatttctggccagttggatgacagaaatacagggcttgctaaaagttaaagtatcttggcagttctggaaagagaccatctaaaccaccagscaatgctacctcagcaatattaccaataaccagttgttcactaagaaccggtcagggcgcggtgtggaccataggtatctttgctattctggactgttag

SEQ ID NO: 305885 - DNA, 201 bp, Homo sapiens
aagtaacaaagcaggtagagaaataatgttttcttagttagcctaataatgtatctttcaaggggatggataagattccagttaaactatttactgttagcaatatttttttgtaagctatttttgtaaatccacagtgtgccttctaggttttttttctcttactctcaaaactgaaataggcttggtacagtggctcat

SEQ ID NO: 305886 - DNA, 201 bp, Homo sapiens
agcgaattctaaaaagagctaagagatttgttttcactttaatcgctgtgatcattggcctaattacagtcactgcactggccactactgccggaatggcrttacatcaatctattcaaacgggtcattttgttaatgattggcaagccaattccacccaaatgtggaattctcaacaaggcattgatcaaaaattggcta

SEQ ID NO: 305887 - DNA, 201 bp, Homo sapiens
ctttcttgaggataaaatcaagcataaacaaatacaaaatttgtgttatgtccaaattgttcccaatatgtcaattgtgttgtaacaaattcaaatttcaragttagtgtaatagcagaactaatgagttggtataacttttatggagaataatttggaaaaaatatacaaaattttaaatgtacatgcccttttaaaaat

SEQ ID NO: 305888 - DNA, 201 bp, Homo sapiens
ttctctgtaatatatggtgtcaaaggcaccagaaacactcagcagatttcacaaccaggttttaattccttttctttggtttcaggaatgtgggaagcagrtgggctatggatcaagccaagtataacctaattaatgaatattttctggtgggagttactgaagaacttgaagattttatcatgttattggaggcagcat

SEQ ID NO: 305889 - DNA, 201 bp, Homo sapiens
agtgggaggaggaaataagcaacaggcagcttcctttcttgacagatggaaaataaagggcctgtgcacagctcggcgaactgctccgtggacctcccagyggggctgctttctgaggtgatggtctcctcgctccttagccagcctggtggagccagctactgacgttggaaaggagttggaggatggaggtttgtggcc

SEQ ID NO: 305890 - DNA, 201 bp, Homo sapiens
ttctatatggtctttcattctgaatactaattagtacttgaacatatataaagctcaagtgttgttttttttagaaatacagttgtgaagtggttatgcarataaattcaatttaaatttcttgtcatgtaaaatgtgtagaaggacttactgaggttactttcagtcttgtttttttctcagatagcgatgaaccatttt

SEQ ID NO: 305891 - DNA, 201 bp, Homo sapiens
gtagagttgtaaattctgccctatttttgttctaagactttgatgattagggctatctgcgtctttcagtttctaaggtgtgatgtaaaaggacattatcktaagttttcagtgataaaaaatatactattttaaatataggcaggaatattagagctttgagtgaaattgaattactggattaaaatcaataaaatcctt

SEQ ID NO: 305892 - DNA, 201 bp, Homo sapiens
gtgaacactgtagcgagttgcactcttgtgctccgggcagcaaaggaccttgtaattgccagctgagggaggctggccgggtagtgcgggaacgcgagtgmaaagcttcatcggagtacggaaatgagggtccggagatttaaattcttctttagtggcgctaaactgatgaattggggcttgagaatagggatgcctatg

SEQ ID NO: 305893 - DNA, 201 bp, Homo sapiens
aaactcctgtgatcccccatcagaatattttgaaagtggaagagtctgctggcgggaagggagaagagtgggaggaggaaataagcaacaggcagcttccyttcttgacagatggaaaataaagggcctgtgcacagctcggcgaactgctccgtggacctcccagcggggctgctttctgaggtgatggtctcctcgctc

SEQ ID NO: 305894 - DNA, 201 bp, Homo sapiens; identical to SEQ ID NO: 64114

SEQ ID NO: 305895 - DNA, 201 bp, Homo sapiens
ttaattatttaattattaaattatgtttcttgtgcccttgtattatgtttcttgtgcctggggtttgttgagcttcttggatctgtgagtttacagttttyattacatttaaacatttttggctattatttcttcacgttagtttttctatgctgcttctcctctcaggaactcaaaatacacttacattagaccacatga

SEQ ID NO: 305896 - DNA, 201 bp, Homo sapiens
tcgctctattgtactgaaataaagcccggttaattcagaaatcaattgcaccaccaggtggggcacactctggccccaaacagatggggttgaaaactccyctcaaaatgcagtcttgttaaattaaaaacttgatccaggagtggaacaaatagggagccatgaatggaatggagtcaggtccactcaggcggattcttt

SEQ ID NO: 305897 - DNA, 201 bp, Homo sapiens
ccaccgctccatgggacagcctgaccccctccatctctgctcctcacactgggtggtgctggagggagagggacctgtggctgtgtctgccagtcccaaaygccagcagctgcacagtcctgctataattgctaatatctgtttcttctcctttccaggccttggaaagtgttccaggaatggactttctgcagtatgatg

SEQ ID NO: 305898 - DNA, 201 bp, Homo sapiens
ccgaagtaggcattccgcggagagagagcgagagagaagaccgaactcagtggggagcgtgtgttgctggtctccggagacagaagcgcttagcatcgcgygttctcttggaagtcgtacaggaagccctggcaatgtcagatgaggggtattctaatttgagctatgggcatctggatacgaattcttttgggggctcat

SEQ ID NO: 305899 - DNA, 201 bp, Homo sapiens
ggggtttgaactgcctggtcaccctgaatgaagcccctgtctagcccaccgccttgggtgcagctcccagtgtgactgcagactccagcaatggaggcctktccctgcacaggtggctctgtgctgtcggcagccctgctccctgggcgtcttccttcctctctctttccaggacctgttttctctccagattgaggaatt

SEQ ID NO: 305900 - DNA, 201 bp, Homo sapiens
atttctctactaagaacagaaagagagtaagtagaagacagccatttttgttgtagggtaggagaaagggaggaaaggatgagacgctgggaagcggcttstaggtaatgaaaacaccatgctcaaaggtctggtgagggagaatacagtatgtgaaataagctaaacaagtgatgccaattctccacttgtacctttctg

SEQ ID NO: 305901 - DNA, 201 bp, Homo sapiens
ttgttatgaggctgagaagtcccgcaatctgctgtctgcaagctggaggcacaagaaagctggtggtgcagttccattccaaacccaaaagcctgaaaacygggggagccaatgatgtaagtcctggttcaagtctgaaggcctaaacaccaggagttccaatgtccaagctcaggagaatgtggatgtcacagctcatgc

SEQ ID NO: 305902 - DNA, 201 bp, Homo sapiens
aaatacacccaggagctacacttaaactctcacaacagcatcatcttcttattacccacttagataagaaaccagggtcaagtccagctgtattagtcagrgttctccagagaaacagaaccaataggatatatatatatagctctatagaatgagatttgttatgaggctgagaagtcccgcaatctgctgtctgcaagc

SEQ ID NO: 305903 - DNA, 201 bp, Homo sapiens
atatttccaaatggatggaagaactgaggattgatagttctctaggagtttctagttttctaaccatgtctctttcccctccttcaatcaattgctcctcyccttccttctcctgtcgctaaagctcctttcagtcgctagtaagttgaattctttaagcccagtatagttttcatcctgtttccattagaagcccagagg

SEQ ID NO: 305904 - DNA, 201 bp, Homo sapiens
ttaaacctattaaagcaactgttaaatttaatttaaatgttttagatctgcataaaatggtcatatttccaaatggatggaagaactgaggattgatagtyctctaggagtttctagttttctaaccatgtctctttcccctccttcaatcaattgctcctctccttccttctcctgtcgctaaagctcctttcagtcgct

SEQ ID NO: 305905 - DNA, 201 bp, Homo sapiens
ttcctcttatcaagatccacagtagttccacattaagtagtggagatttgaataatattggatcagaatccaggaaggaggtccttgccacccacgattgraatgtgaacttcatgtgttacaactttattaccttttcttattttaatatatgacaaagactgaaatctctggcatggagtcagtggcaaattttacttt

SEQ ID NO: 305906 - DNA, 201 bp, Homo sapiens
aaaatcaagtttgaaaccagacatcataattgatgatacagagtgccctttagaaatttgataaaagcttaatgtagcaaagactgtataagacaacaacraaaggtgaatgctacaaccaaaattgtggggccagccttttgtgagtagtttttgtgagcaaaacacctggtatagattgaatgtgggaaaagcttttaa

SEQ ID NO: 305907 - DNA, 201 bp, Homo sapiens
gcttcaggtatttgagattaaattaagaaaatacagtagtcccctccttatccatggggaatatgttctaagaccccccagtagatgcctgaaaccacagstagtactgaactctatgtgcagtgtcagttaatctgataaaagtgactgtgtgggtggggagggaagggtagcacatacagcatgaatgcactggcaaag

SEQ ID NO: 305908 - DNA, 201 bp, Homo sapiens
gagacaatgatatctattgcaatattgagaccagcagatgtagtctgccccagccacagtagtaggggctgtgtctgcacagctggagctggtggggatayatattgctactcttagtgactcaagttccttaccttccagtctacacaatgatttggttcaaaaataggcctcccatttctgatataccacattagatgt

SEQ ID NO: 305909 - DNA, 201 bp, Homo sapiens
tgtcttttcctgagccctccaaactgtcccggcctctgtctgttacccagttccaacatcacttccacattttcaggaagcaaaaatgatttcactttcayatgatctctatagcagtgccctactcctggtaacaattttctgtatcagtctgtttttacactgctgtaaagaatacctgagactgggtaatttataaaa

SEQ ID NO: 305910 - DNA, 201 bp, Homo sapiens
tttcccatcttcaatttggacatctggtgctaccatagcaaatttttgtttcactaccttgtctcgtaaggtgagaacagtcactttatggacattcagcygtacagtcacctggcttgctggcacatatgtaacaattggggttgggaggatccagtgcacaaggcacaagaaacttctttcttggatttgcttgtttat

SEQ ID NO: 305911 - DNA, 201 bp, Homo sapiens
tggtctatttttcctgataagatcttcaatctttccaatactgtcaacccagcaatcactgcattagtagtagcaatagcaggaataatattccctgccaytgatttgatatcaaatctactcttcatattcatactgaaaatatgcatcctgaggtttgtagcagaggtaacaaaatccattgcatatgggtcatcctta

SEQ ID NO: 305912 - DNA, 201 bp, Homo sapiens
agaggtacctaatttagctagagcaggacaggaggatgatggtagggaaaatgactagaaaaatttatccagatgaggaagtcaaagcttcagaaggtgartaaacatattcaaggacacttacaaatggataaagtcgaagtttaagtgtgttggtcttaggagtagaattgagtatgactctatagtatgcttactact

SEQ ID NO: 305913 - DNA, 201 bp, Homo sapiens
attgaaggggaccgtcagttattccattcattctggcaaattttctttttagctttggttgcagcaggaagagagagacgtctggggggctttttgcctgktggaagggcatcactcgtccacagctggagcccctgggatgacccatcccaaggtcccagcctaagtctgaggttccagggctggtcgcaggccgtcctt

SEQ ID NO: 305914 - DNA, 201 bp, Homo sapiens
tatttaaattcctttatgccaaatggacataccctgttcctttgtcccttctcctttttttttttttttaaagtgaaaacatttatcctccatgttttaayttcagcaaatacttaacagtgtgcctatcataggccaaattctgaatgctagccaggtgtatagataagaaagattgtgcattcatttattcagagttat

SEQ ID NO: 305915 - DNA, 201 bp, Homo sapiens
cctgtcaagatgtactgggcatcttggttaaggttgagcctgaggcttcctgtaccaagttgcctgctaagtgcatggtagcgctgacagcctggggtgargatggccactgccacaccccttgcaagatactgtgaagcacgctcaccaaccctgcccctctccaccctgcgcccaaccctccactgaagtggagtggac

SEQ ID NO: 305916 - DNA, 201 bp, Homo sapiens
ctcatgggaacgtgaactctattgtgaattgcgcttgcgaggagggatctaggtggtgctccttaagaaaatctaatcccaggtggaacagtttttatccygaaaccattcccgcccaccccctgtggaaaaattgtcttccacaaaacccgtccctcttgccaaaaaggtttttacagtataccaagtgaaatctcaggt

SEQ ID NO: 305917 - DNA, 201 bp, Homo sapiens
tgttatggatattttcaaaatatacataagtagaatagtaaaatatatccctacgtatttatcaccaggctacagaaattactgacccatgtctaatcttyttccatctgtacctttccccactgcagtatattttagacatgattccattaattcataaatattcctcaagggaattatcaaaacatagttggtgaacta

SEQ ID NO: 305918 - DNA, 201 bp, Homo sapiens
tctatttttaaatctgtcaacagtctcaactgtgtaatcttagttttcagtaaaataaaatggtaaaaatctatcttcttatttgcaaattaaagtaaaarttatttttttaaaaaattttatttgtaatttttgtgggtatatagtgggtataaaataattttaaattgtagcatataactaagaaaggtactcagattt

SEQ ID NO: 305919 - DNA, 201 bp, Homo sapiens
ggcctcccagagtgctgggattacaggcgtgagccaccgcccccggccttaaagtggtaaattttttagtttgcataatactttgacttttgttgacttawaattccttatagtgaataacagtataccaccacagtgagcaatgatgagcttaatgagggacaggaatggaaaaattacagttttactggtttagaagtt

SEQ ID NO: 305920 - DNA, 201 bp, Homo sapiens
gctctgcttcccaggttcacaccattatcctgcctcagcctcctagtagctgggactacaggtgccccaccacgcccagctaatttttcgtatttttagtrgagacagggtttcaccgtgttagccaagatcgtcttgatttcctgacctcgtgatctgcccgcctcagcctcccaaagtgctgggattacaggcatgagc

SEQ ID NO: 305921 - DNA, 201 bp, Homo sapiens
ctccccagtagttggattacaggcgcctgccaccacgtccagctgatttttgtatttttagtagagacagggttttcactatgttggccagactggtctcraactcctgacctcaggtgatccaccagcctcggcctcccagagtgctgggattacaggcgtgagccaccgcccccggccttaaagtggtaaattttttag

SEQ ID NO: 305922 - DNA, 201 bp, Homo sapiens
gagctggatataccttaaatttccaataaatgaaaccttaatccagtctgttgctgagtctgagctgttattaaagaaataaatttgaaacagcaagtggkttgagaatttttgaatttaattatttaaatctacttagggcaactctcacgcgctatttcagtttcccatggagaacatgaattctgggaaaggtatccc

SEQ ID NO: 305923 - DNA, 201 bp, Homo sapiens
gacaaaagagatgccagctgagggtgaagagaatctaaaatttttattagaagagagagacaatgatatctattgcaatattgagaccagcagatgtagtytgccccagccacagtagtaggggctgtgtctgcacagctggagctggtggggatacatattgctactcttagtgactcaagttccttaccttccagtcta

SEQ ID NO: 305924 - DNA, 201 bp, Homo sapiens
cgagagcattttagagtgttatttgaccagtatataagagatatttgctgtaataaaagttacactgggcttggaatctgaagactttggtctgtgatctrgccatttttacttcctagctacgggtaagttgccttcttcacagcctggtaatgaagagcaaatgagaaaaatgatgacaacactttgtaaactgtaaag

SEQ ID NO: 305925 - DNA, 201 bp, Homo sapiens
cattttaacttgaaaaaatgatatttcacaatgggattgcctttccctgctgcagagcctcagcctgcgccaccatctaagagcttagagtatttgatatrtcaatagggatcccacatcacattgtatcataccacaggactcactttatggcaaagggggtgcaccggaagaaatacagccaatggtcctatctcatat

SEQ ID NO: 305926 - DNA, 201 bp, Homo sapiens
agactgcgagagcattttagagtgttatttgaccagtatataagagatatttgctgtaataaaagttacactgggcttggaatctgaagactttggtctgygatctagccatttttacttcctagctacgggtaagttgccttcttcacagcctggtaatgaagagcaaatgagaaaaatgatgacaacactttgtaaact

SEQ ID NO: 305927 - DNA, 201 bp, Homo sapiens
ctactctccctgtggcagctgcgaaggtgatctacactcaccgcttgaagcacagtcgccaacaacaaccgtagcccaaacgccggcaccagacacccacycggcccagccgccatcgctaccattttccgcaggtttctggctgcctagaaggacccctaagctaggggcgtccactccagagcctgatccaaaacagaa

SEQ ID NO: 305928 - DNA, 201 bp, Homo sapiens
ctgctgctcaatctctgattgtcagcagcagagaacaattaccaacatgatactatcttttgaggtcaaaaagaagccacttggtggcaaattagctacayggctagaaggagcaccgattcattttaacttgaaaaaatgatatttcacaatgggattgcctttccctgctgcagagcctcagcctgcgccaccatctaa

SEQ ID NO: 305929 - DNA, 201 bp, Homo sapiens
cagaggttacacacattttgaaaagcaactcttggcatgctttgtgactgtacctgttagtcatccaatggtgatgaagccagaactgcccatcatgaacytcttactgtcagaccaaatacattataaggttggtgggtgaccagaagtaattcttataagatgaaaagggtacatttgggactggacacgagcagggcc

SEQ ID NO: 305930 - DNA, 201 bp, Homo sapiens
aatttgcaacctgctgtattctactttctatgaaactagtgtgtattatctcttatatccctctaaattttcttgacggttaatagtatgtttccctttgrtcaccaccagcaagcttcgggggtcagactgactctgaaagtagcagatatttgaagttctcttgaaggaacatgggattttattaaggattttaagaat

SEQ ID NO: 305931 - DNA, 201 bp, Homo sapiens
ggcatgtgcgctgtgccaggcaaggttctgattgggaaagaacaagcccttgagatattagatggtgacatctgacttgatgcacttaaatatcttgagtytccagattcccttaaactctctgggcctgcagaagtggcctactcctgtctgctaaaggctagcattactcctctcttgcttgaagaatatgcaggggcc

SEQ ID NO: 305932 - DNA, 201 bp, Homo sapiens
ggagcgggagtgggtggagcagagtagatcctggcacagggttgcagtgatgatgtggaatggtatgctggtgaaaggggatgcactagtaggtgaatgtrccaggcactggagaaatacggggaaatagtaatgataagagcaatgacaacggttggatattactggaggcaattaatgcattggataagaaggcaattc

SEQ ID NO: 305933 - DNA, 201 bp, Homo sapiens; identical to SEQ ID NO: 64094

SEQ ID NO: 305934 - DNA, 201 bp, Homo sapiens
ataatggtagcaaagacttataggtaatgctgggtatttaatttaaaaaatctataaatatttatggaataaaacttctttccaggtgcagttttgggctytaagacttcagagagaaaaagtcatggttcctgctcttgggaggctctcattgtgtctgggggagcaggcaggcacccaacagcctgaatcaaactccat

SEQ ID NO: 305935 - DNA, 201 bp, Homo sapiens
gccatctgggcatcccttaggccaatcaagttgacacatttggttaaccatcacaccagcaaatggcaagattaggttggactcccgatcttgagaatggratgctccaagtcagtgaactcaccccagcctgatctggagcatatcaaggcattgtctccttgctacagagtgggacaggaatcccataggggcagtatg

SEQ ID NO: 305936 - DNA, 201 bp, Homo sapiens
atataaccatttccattctaaaagcttcataatttctcttagtatgtgagttattaatgcttcccctaaagataaattatcccagaactcttccatttttstctagttcacattctctgacatatagctatatctgcactgtttcccctccctcacctaccaataggcctttaacaggaggcagctatcatcattcattga

SEQ ID NO: 305937 - DNA, 201 bp, Homo sapiens
gctgtggccctgccaatggctagtcaaatagagtccacaagcactgtttgaattgctagcaaatggtcatgcggctcgtacgtggttacgtgtcagctgarctgaaacaaacgaggtgacagaaacacaataagggaagctcggttatgctgccgcccactcccctctgcccagactggttcaagccgccaccctggactg

SEQ ID NO: 305938 - DNA, 201 bp, Homo sapiens
gagaccttacaactaataccacagaaattcaaaggatcattagaggctactatgagcaactatatgccaataaattggaaaacccagaagaaatgagaagycttgcagtagtgtagacattatccagcttcctgggcttttttcactttgtgttgaagggtacacattggatgagatatcattcatcctcaggagagggtt

SEQ ID NO: 305939 - DNA, 201 bp, Homo sapiens
accgtttaaaaataagtctcacctaactcttaggagaggcccaggccccctgaactatcccgatctgctcagaagctgagctgtaaaaccataaaacagamcctctcctttctctactgggtaggattgccagataaaatagaaggccccgagttaaatgtgaatttcagatagaccacaaatatgttttagtacaaacat

SEQ ID NO: 305940 - DNA, 201 bp, Homo sapiens
gctgatgctttgctccatttcagttcccactttccttctcctcccttgacttgatacttcctactcccccttgcttcccagggtcccttcccctcccatgytgatcacttgagaggagaggtaggtgactgggtttcacagccccaccttggggcaggttggaggtccttctgttggaggatgtatttggaagtgttctga

SEQ ID NO: 305941 - DNA, 201 bp, Homo sapiens
acatctctccaacatactgattttaattcctttggatatacccagaagtgagattgctggatcacgtggtagttccattgttagttttggtacatatttarcagaggagttcaggcagatgaattggcttgtgcttgtaggtgcacacagagcttgatggagtggagagtgtggccttcagatgggagcaggctccacttc

SEQ ID NO: 305942 - DNA, 201 bp, Homo sapiens
gccttctcctcccatgggctcagccacaggtatttcttaagagtctcacctcctcaggtgacttttccagcctgtcttcctggctcatcccactgccttgyctgggctgaacggctgatgctttgctccatttcagttcccactttccttctcctcccttgacttgatacttcctactcccccttgcttcccagggtccct

SEQ ID NO: 305943 - DNA, 201 bp, Homo sapiens
atcgagcctccccttgaagtagttttaaggtaatacaaattgagataatgcagataattataaaatatgaagtttggacacatgattgggtaagatacgtkgcttgcctggatgctgtgttcagctagacagctgtgatttacaggtgaattacaaaaaccaacaacaacaacaaaacaaaactacagctctgagattcct

SEQ ID NO: 305944 - DNA, 201 bp, Homo sapiens
acagttgctttgggtggtagctagcaattccttctcaccagggattggtcatgtatttaatggcagactctcccttcccctaccttccccgcttccccacrttttcccctgggtgtcctaaaggcttggcacccttaacagtgccttctcctcccatgggctcagccacaggtatttcttaagagtctcacctcctcaggt

SEQ ID NO: 305945 - DNA, 201 bp, Homo sapiens
tctcctactcaccacgccttgctccttgctgtagagctgcacccactatgaggagggagaacctttttctgacttgaacaagggagtcacatggccttgcwtggaggctgacagtgtgcgtatggcgtgagtgggagggatggggctgcattcttctttttcttagaacacagaggtgttgtttgggcaagtggtagccta

SEQ ID NO: 305946 - DNA, 201 bp, Homo sapiens
ggctttaatataggttttgtgttgaggacctaagacaacactaagagtgaaccctgtatgagtccacaatcctgaacagttgctttgggtggtagctagcmattccttctcaccagggattggtcatgtatttaatggcagactctcccttcccctaccttccccgcttccccacattttcccctgggtgtcctaaaggct

SEQ ID NO: 305947 - DNA, 201 bp, Homo sapiens
tgatgaatgccccttttaagacataaattactttaaaaatatttatttacactatcatcagtgagaccaacaaataccaacaggtcattcacttttttggrtacaggacagtgggaccttgccactaggattagaaagtttctatgaagctttagggctgagagagtccagaataactatgtacaatgtctccagcaagat

SEQ ID NO: 305948 - DNA, 201 bp, Homo sapiens
aatcctgatgccatagtgtggctacttcaaggagatagtattcataatattgacctcttcttaaaattatttaaataggcaccccagtgcttcaggtaagmgccatgaatcttgagcaaatttgactcatgaggtaacttcagagaaccattttagctggtatgtgtgtgtaaggtggggcaggggtagggttgggtatta

SEQ ID NO: 305949 - DNA, 201 bp, Homo sapiens
agatcgtgttctaacaggtcaacagtagtttattttctgctagtagaaatgggtttttattcttctacctgagctttgttgagaaatagctgaaatgattraccagagttaaaggtgaggtctgaccacagacttcctatataaactagctcctatagaaactagctggttggcaaaagagtaaaaccagcaaacctcgtt

SEQ ID NO: 305950 - DNA, 201 bp, Homo sapiens
atctcagtggggaaaaataggatcagtataaaatatatattcaatgagaaaagagtcaagttttttagcatcaggacaaaatatatatcagaatagaaagkccagatgataggaacattagagtacatatgctatctcaagagtctgaaatccacttgagcccaggagtttgagaccagcctatgcaacatagtgagacat

SEQ ID NO: 305951 - DNA, 201 bp, Homo sapiens
atgtgtgccgtttgagggaaggagacacaaggtaggctaaatattagaatgatgttcctgggagagcaaatagtatgtgcaaagggtttggagaagatggkataggcagaaaagcacatcccaagaagaagagcaatatatatggaacattcagaagagagaaacaatgtaggttgtgagtacttcatgatactgatatta

SEQ ID NO: 305952 - DNA, 201 bp, Homo sapiens
tgaggtgaaaatcacttcacagtcaaataatcattgtcaaatgtacttttctgtgttatttagtgtattcataatgtgcaaccaaaactaacagctctttytagtttcaaaattttttcatcacactccagaaacaccctatactccattaggtaatcattccctaacctccccctaagcaggtcccctcataacttttaa

SEQ ID NO: 305953 - DNA, 201 bp, Homo sapiens; identical to SEQ ID NO: 64089

SEQ ID NO: 305954 - DNA, 201 bp, Homo sapiens; identical to SEQ ID NO: 64090

SEQ ID NO: 305955 - DNA, 201 bp, Homo sapiens
ggttcaagtctgaaggcctaaacaccaggagttccaatgtccaagctcaggagaatgtggatgtcacagctcatgcagaacaagggaattcaccattctgyctttttgttcgatctgatcacccaacagattgaatgatgtgcccacctgtgttggtaaggtggtgagggagtgagggagatttttgttttgttttgtttt

SEQ ID NO: 305956 - DNA, 201 bp, Homo sapiens
atgttgaagaaggaatcagtgcctttctcagtaagtgaatgacagaaagcccttacatcttttgagtgggccagcgtttgggtggcagggctgcttggatkgggagcgatgtgacagggctcttggacaaactgctccttggcttagggatggtttattttgaacattcattcattcacttattcaaccagtgtttattaa

SEQ ID NO: 305957 - DNA, 201 bp, Homo sapiens
tttaacatttggtttaactgacaggcttgcagaggtggttttcagaattgtcggtaacagatatgtacagtattcccaaggccgtagccttttttttttttaaaggaagatagtaattcaaacttgtttttttttaaatttttttaatgtttacatttcagtagatacaaatagcagttcagaatatggctactcctgtcc

SEQ ID NO: 305958 - DNA, 201 bp, Homo sapiens
catgggccaggcataaaaagcatgtcagctggctaaaagattgcaaaatccagaagatgatctcgatgtgtctgttcaatttagcaagggtatctactagkggatcctcttttaaatatggaggcccaaatcagaagcttgtagaggggagctattcttccaagattccagatgtgtctgtgagacaacacgttatggggc

SEQ ID NO: 305959 - DNA, 201 bp, Homo sapiens
agttaatctgataaaagtgactgtgtgggtggggagggaagggtagcacatacagcatgaatgcactggcaaaggaacaataatgtcctgagtgggacagkgtggtgtacgatttcatcacactactcaaaatagtgtgcaatttaaaacttttgaattctttatttctggaatttttcacttaatattttcagactgtgg

SEQ ID NO: 305960 - DNA, 201 bp, Homo sapiens
gaaatccacatgtaacttttgactttctaaaaaacttaactactgatagcctactgttgactggaagactcaccgataacattaacagccacttaacacawattttgtgtgtatgttatgtgtattctgtactgtattgttacaataaagtagctagagaaaaggttattaagaaaatcacaaggaatagaaaatgtattc

SEQ ID NO: 305961 - DNA, 201 bp, Homo sapiens
ttctaaggtgtaagggaaggatggtctcttctggagaactttggtttaatccctgaataccttcccccaggagtacaacatggatatttcctcagactgcsagagcattttagagtgttatttgaccagtatataagagatatttgctgtaataaaagttacactgggcttggaatctgaagactttggtctgtgatctag

SEQ ID NO: 305962 - DNA, 201 bp, Homo sapiens
tggatgcatctgtctgttcctcctgcccttggacatcagactccaggttcttcagcctttggactcttggacatacactagtggtttttcgagggttctcrggccttcgaccacagactgacgtctgcactgtcggcttccccacttttgaggcttttggtctcagactgagccattactggcttcttcttcctctgcttg

SEQ ID NO: 305963 - DNA, 201 bp, Homo sapiens
taattattttgagaagacggcccaattaaaagctatacactccctctatgtgagtgtttatacatagagctgtatatataatacatatttgtaagtgtgtrtatatatatatgtgtatgtatgtgtctataaatatataggcttagcaatttcattacatgggataaattgttggaaaaaatacccaggagctggtcccct

SEQ ID NO: 305964 - DNA, 201 bp, Homo sapiens
cctacagaggttttcatttaaaagcctgttcttaaaattacattaatctttcaggcttaaaattgcctttcaggtttaaaattttacttcttagttctaamctcagttataagtccctggttagggttcttctgaaacctcaatttggatttaaggatacattttctttctatgcccttttctttctgaagcacacatttt

SEQ ID NO: 305965 - DNA, 201 bp, Homo sapiens
gtgacctttccaacaaaatctggatcttagtctggggatatagtaggtattctttcttggccattccgttttagttctaagggtggtggttgcgccttatyatgttctagagttctccttacttcttagtagccaatctctggttattccagtactctgtttagttataataatgattctttatgttgaattttccctgtt

SEQ ID NO: 305966 - DNA, 201 bp, Homo sapiens
cctcgtgggtgggcaccatgcaatcggctgccagcccagctggaacaaagcaggaggaagaaggataagctggcttgctgaggcttctggcattcctcttyctcttgtgctggatgcatctgtctgttcctcctgcccttggacatcagactccaggttcttcagcctttggactcttggacatacactagtggtttttcg

SEQ ID NO: 305967 - DNA, 201 bp, Homo sapiens
gaaaatctgtgtcaggagaagatggcaaggagggaagagtggtcttctggtcacagcaggactcggggtggtgctgggccacagatgtgtgcccacctcaytggagtgcagggcttgtggtgggagctggtgggcatagcagcatttacactgtacaaagtagacactcttctgcaaaccttcctcccataactccctgcc

SEQ ID NO: 305968 - DNA, 201 bp, Homo sapiens
cagcatcagagaacaggtttctggagggtccttgaactaaaatgtgatgagaaaatctgtgtcaggagaagatggcaaggagggaagagtggtcttctggycacagcaggactcggggtggtgctgggccacagatgtgtgcccacctcactggagtgcagggcttgtggtgggagctggtgggcatagcagcatttacac

SEQ ID NO: 305969 - DNA, 201 bp, Homo sapiens
tgcttttaaaatttgttgttaattataaatttattacttgcttattgtggaaattttgaagagaacccaaaatataaagaagcaaaatgaagaaaattatwtagctgatatattgtaatatacatttttttgtgatttttaaaaatatttcttttccagggcggaatcgtgttttctttatggttctattaacaattttct

SEQ ID NO: 305970 - DNA, 201 bp, Homo sapiens
gagcagtactcatggagacaatgaaaaatgggaggtccttcattcagttggtgcctttgttcattcaaaagcatttattagtaggcatctttgatgtgcamagatcaagggagtgggtggtggttggtggtagatggctatagagttgggtaacatagggtgtttacatttgagacataattcagtaggcaatactgtatt

SEQ ID NO: 305971 - DNA, 201 bp, Homo sapiens
gctaccccatgaggtaggtactattttattcccattttacagatgaagaaatggaggcacatcagggttatagaaatgctgagtgacacagctatttaacrgtggagccagcagaacacatcggggagggttagctttgcctgggagtttgggagtccagtttcaatcaattggtgagcagtactcatggagacaatgaaa

SEQ ID NO: 305972 - DNA, 201 bp, Homo sapiens
atctgtgtttcatttcacaagggctagatatagggaaatcggtgaaagactagactaaaaataacatgtaattcagtaatatctagttttgcagttacttytaaatgcatttaaaagattcctcatgtagagtgatatcctaatatccttgcattgttttctgagatgccggtttttagtatttcttatttttggtgttat

SEQ ID NO: 305973 - DNA, 201 bp, Homo sapiens
tggtgatgataataatagtagctaacactatgtaatattaggcactacgcacatttcatctgttaactcatttaatctccataagacccacctgaggtagrtactttattatttctattgaagtaacataaggtcacattttggtaagtggtagaaccaggtttcaaatccacgcactctggctttgctctctgtgctctt

SEQ ID NO: 305974 - DNA, 201 bp, Homo sapiens
tgttcattcatttatttattcattgcttcactcagcaagtacttatgaggggagcacaaggtgctgggcattcgtctaggtgctgaacaagccaggcaagscttccgctctcatggagtgcacattctagcagggcccaggtgccagatttaatcagaagtttcgctcgggctttaagggccagtggaagcaattatttat

SEQ ID NO: 305975 - DNA, 201 bp, Homo sapiens
cttttacataattttatcacttttacataaattttatcacttaatctgcaaaacatattattgttacttccatcttattggggggaaatagctgaaataastgaggtaattcactcaaactcctctggtcagaagacttgggatcagcccaaggcatttgattttgatggcacattcaatctaccatgactcctctgctgc

SEQ ID NO: 305976 - DNA, 201 bp, Homo sapiens
acctcgttagctcttgttttctaactggctgagctgtgtggtccagttgctatttttaatcatgcccattatctgttataatcccttgcctccagcccttygtgtctatataactgttccctaagttacatatcatagttcatatccattttcaaaatgagttcacagattatatctcattaaaatcatacttcctaataa

SEQ ID NO: 305977 - DNA, 201 bp, Homo sapiens
ctagcatgtccagcttagagttgaattcagtgctccctgaaagtgtcagaccctctgctggagctaggaataggtcatatggtccctgtcatcaggatcaygttgcatacatatgaccgtgaagccaggtaggaacatctgtgattctaggacacagtgatcggggccatgacacagttctcctgggagggagcctggtgg

SEQ ID NO: 305978 - DNA, 201 bp, Homo sapiens
atcaggaagagaggtcacaagattttgttgtagcccctctgtttattccaaaacagcagccaatgaccttttaatatgagttgtgtcatggtaattctctktttaaatctttcagtggcctccctcctgactctgtataaagtaatgcttgtaacagtatagaagacccacacagtctgcactcactccacctcaccccca

SEQ ID NO: 305979 - DNA, 201 bp, Homo sapiens
tccagtggagtcaccctgttttttttttagaaaactgagactctcactttgtgaattcactgtgctctctgggatttcagtgctgtagttcaaccaccaayccccctgtcctgaactccagtacttctgatgctattaattggttcctcaacaattgtggccttttccatcattgcccaccatagtatatactttttcttt

SEQ ID NO: 305980 - DNA, 201 bp, Homo sapiens
aattgccttcaaacattgccaaatatcacctgagggtcagaatagcttccagctgagaacccgtgggatatcaacactgtcagtttttccttcaagtgacrggcataatttattcattttgagaaaatatcaccaaatactcaaattcaaatagctatagtttgggatatggtaggtgcatggatatataaggttttattt

SEQ ID NO: 305981 - DNA, 201 bp, Homo sapiens
gaagacattttcaagtatgagcagttattcaaatatgaactaagcgggtgatacccattcccttccccagtgaccaagactggagggcttgagaactccargttcccagcatgatgcttggcgtttgaatgctactttcttccccttcctcacttcctcctgccctttgatttttaatatgaaaacattttaatatgaaaa

SEQ ID NO: 305982 - DNA, 201 bp, Homo sapiens
cagtactggctttgaagatggaagtgacaccagcctagtgagacccatttggacttctgatctcaagaactgtaaggttatacattcgttttgctgtgagrcactaaatttctggtaatttgttatagcagccatagaaaacaaatctggtagtagggaggtgggtggtagcaggggttattgcagcttcactgcatattt

SEQ ID NO: 305983 - DNA, 201 bp, Homo sapiens
gaagctctggcttcaaatcccgttcttctgtggccatagctccgaatgctggtaggggagataaagttggctcagattgattatcatccttattatctctrtaatctgtgtttcatttcacaagggctagatatagggaaatcggtgaaagactagactaaaaataacatgtaattcagtaatatctagttttgcagttac

SEQ ID NO: 305984 - DNA, 201 bp, Homo sapiens
gatccatctgagtcacactgagcctcccatttagtaacttaggactctggagtccgggtggcctaggcgtcatgccaaactcactactgctaatagtaatrctattataatggcttttatacttaaatctcctttcttccaggagccccaaggtctttaacaaatgcaagaattacactactctccaaaaaatagaaactg

SEQ ID NO: 305985 - DNA, 201 bp, Homo sapiens
gcattgttttctgagatgccggtttttagtatttcttatttttggtgttatgttttgctgtattccagcagagctcttagagactgggggtgggggtgggkgtcataaatcttattttgtccaaagcttactgttttagctattcatgttaaattaagaaaaggcttagtgggttaaaattcacctggttttactgttaaa

SEQ ID NO: 305986 - DNA, 201 bp, Homo sapiens
tttactgttaaactgattttgactttaagagaagccaaggttatggctgtggtttagtttgctagtaaatatcaagtggaaaataaagatactttaataaraactgtatttcctcagaatgtgttgagttttcagtttttaaaaataattttacgtatttatttgttctattcaatcattttaataggagaagtaggagaa

SEQ ID NO: 305987 - DNA, 201 bp, Homo sapiens
ggcagtcattaaatcttaaagctccaacataatccttgacttcatctcctgcatcctggtgcaaggggtgggctcccaaggccttgagcagccctgccccyatggctttgcagggtacagcccacatggctgctctcatgggttggaattgagtgtacctgtagtttttccaggcaaagcgtgcaagccgatggtgagcca

SEQ ID NO: 305988 - DNA, 201 bp, Homo sapiens
gttactattgatgtcagcaacctcaacagtttttgtttcaaaagaaacatgttggaagatcaaaggcacaggttgccagggaaagtgcactgcagttttayctgaaagctaatatggttgcctaccatgacagcatcatgaaccctgactataatgtggcatatttttgacagtttatattggttatgaatgctttagata

SEQ ID NO: 305989 - DNA, 201 bp, Homo sapiens
ttttgattccaagattgtcccacattcagaggaaagagtaatagagaacctgcaggcaaagccaggatttttctgaaggaacaattctgtgtttgattcartgcctgaaaaggaatcagttaagtcctcaaagttctttaaaacagagcatggcctagatccttttagctggaaagatagcttaaaacaaatgtttccact

SEQ ID NO: 305990 - DNA, 201 bp, Homo sapiens
gcactctacagtgttgtgcctccaaggactttgctcatgcttcttccctttgcctggaaggtttctttgtcacccagaaggcactttttttttttttttttaaagacaaagtctcactcccagcactctgggaggccgaggcaggtggatcacgaggtcaggagatcgaaaccatcctggctaacacggtgaaaccccatc

SEQ ID NO: 305991 - DNA, 201 bp, Homo sapiens
gaagggtggggagctaaataaataatcttcatccaaaaataaaacctagagtatataaagaaattggacactttttggcttcttttggttttcttgtaatygaaataaaaacaaaaacaaaaaaatggccagtgcagtggcttacacctgtagtcccagcactttgggaggccaaggtgggcggattgcctgagtccagga

SEQ ID NO: 305992 - DNA, 201 bp, Homo sapiens
atattttctcaaaaatgaatgaagtgaacttgtcgctgtaaggaaaatagttgacagtattagttgccaattataaaattcaaaaaaacttgtatctgccrctatgaacataacagtttcccaatacttagacttctctgagattggtggtgttataatgaatgtgattttttaaattgtataatttttattatacaattc

SEQ ID NO: 305993 - DNA, 201 bp, Homo sapiens
ttgatctctaatttctgtggctgaggtttggtgataagcaagaatggaaacccatgggatcattgcaggtgacatgatcagaaagtggtaggcccataaartaggtttaaaatggtgccttggccatcttggtgattgaaaagcctcctctctcaggagaaagtggccagtgggactgatttgtttgattcagatcatctc

SEQ ID NO: 305994 - DNA, 201 bp, Homo sapiens
aagaatcagtacagtcttgagggagttagtgagtcctcactctctgaggactacgttagttacaatgagatcaggttgttatgaagcaagattgcctctcrtgtttgcgctattttctgcatatgtcagtttctcttctattcctccatcattttttgatacagcatgaagcccttaccagaagacaacagatgtggctgc

SEQ ID NO: 305995 - DNA, 201 bp, Homo sapiens
ataccacattgcttttcatcttactttattaagttgtcagcatcataggggacactaataaccacacatacaatgtaaaactgcaattatgataaatatartgagacatgtagtataagatagatgaatgtatattttttaaaagatagccgggcgtaggggctcatgcctgtaatcccagcactttgggaggccgaggcg

SEQ ID NO: 305996 - DNA, 201 bp, Homo sapiens
aaaatgggctcttccacagaccagctacatacttgatttctcagtttgaacttcagtgtagactacaaactatcctgaattcctttcttcatccccatttrttcttccttccccaattctcaaattcactgaatggtaccatcttcctcctcagtaaagaagcctagagacagtaccttagccacttccaattccgtcttc

SEQ ID NO: 305997 - DNA, 201 bp, Homo sapiens
ctttatcttccaaggtttttgctaagtgaccacccttgaaaagatagtctgaagcaaagagcatgtttgcagcttgcaggacaggcagaaatgtgagagascaatggagaattgtctcctaataggcattatattatattagaccaatgagaccattatttattctcaatgtaaatgaaatatgttcagaaattcttagtg

SEQ ID NO: 305998 - DNA, 201 bp, Homo sapiens
catcttattgcaaatttatttatatttttgtgctattttacatggtattttttatgtgaatttctgattatctgttattagtaatatacaattgatttagktatattgatttttatatcctgcaaccttgctaaactcattaattctcgtagcttttttattagattcttttggaatttctacgcattcagtcatgctgtc

SEQ ID NO: 305999 - DNA, 201 bp, Homo sapiens
gttcagcaggccaagacactggggaggagaaaggttctgtggtagtaaatactagcactatttagtcacataattttgaaatgcggcattatttttgttaygtagaactagaaaataggaaaataaaaatcattaaataaatagcagtaacagtaccgacatttttggacattacagctctaccagttcttagctttctag

SEQ ID NO: 306000 - DNA, 201 bp, Homo sapiens
ttatccttcataaggaattctgaagctttggtcctcaaaacatttcttcaacagctcttacctagttcttgaataggaagattatgttccaggctgtacarctgttttagaatcaactagatcctcttagaaacccaagcaatttacccatgttttccatatcccttggttctttgcttttgttttttgttttcttttttg

SEQ ID NO: 306001 - DNA, 201 bp, Homo sapiens
aaagaaggatattaaaagataaacatttgagaatataaggtatgagaaactaagcaattagaataaggtgtggactcagtcattaaagatacatttttgcratgggctttacttagttaatagagaggaattggcaagagataggtaatcaatcaactcttctagttgaaaaatggagtttgctttgctgtcatgtgttta

SEQ ID NO: 306002 - DNA, 201 bp, Homo sapiens
gagaagacggcccaattaaaagctatacactccctctatgtgagtgtttatacatagagctgtatatataatacatatttgtaagtgtgtgtatatatatrtgtgtatgtatgtgtctataaatatataggcttagcaatttcattacatgggataaattgttggaaaaaatacccaggagctggtcccctttctgttgct

SEQ ID NO: 306003 - DNA, 201 bp, Homo sapiens
aggtggtgagggagtgagggagatttttgttttgttttgttttgtttttttcagacagggtctggctctgttgcccaggctggagtgcagtagtgcagtcwcagctcactgcagccctgaacccctgggctcaaagaatcgtcccaccacagcttcccaagtagttgggactaccaacgtctgccactacgctcaagcaaa

SEQ ID NO: 306004 - DNA, 201 bp, Homo sapiens
tctctctgtctctttgcctccttccctgccttctgaagagtaaaaatggtgttaattttcagaagctgctttgctaatagattttaaattctgagtttttrgttgctttcattgaatgttttttaaatttttaaattatttttaaattttttctcttcttttcaaaggtactgatcattgaatttttagggatgtaatttt

SEQ ID NO: 306005 - DNA, 201 bp, Homo sapiens
gaaatacaggagtatttctaccctctcaggaaaagaatagtttatacaaggaatgatatgaataagcaataggatctaaggtctttgtagtgtctactaayaccagaagagattttgggaagatactttgtgttatcatttgcctgtttggttttctgtttctcaattttcatttcctctgtttctgttttaagggccaag

SEQ ID NO: 306006 - DNA, 201 bp, Homo sapiens
agttttgctattattattgcaatggctttctactacatttctctctgtctctttgcctccttccctgccttctgaagagtaaaaatggtgttaattttcaraagctgctttgctaatagattttaaattctgagtttttagttgctttcattgaatgttttttaaatttttaaattatttttaaattttttctcttctttt

SEQ ID NO: 306007 - DNA, 201 bp, Homo sapiens
ccagtctaaccttttcagggtgggagggcagagcagaagttttacagtggatacgaggcctgaagccaaaggagtaaaacctctgcctcatgggagtccargcatgcttaggcaggaggggtggcaggtgggtaggacagcctcttgactccagaaatctcacttcataagtggcacctgctctgagctctccagatatcc

SEQ ID NO: 306008 - DNA, 201 bp, Homo sapiens
gagtttggaggggcaaatttaggccattttgttttcttgaaatgcttcctcctagtccctaaattcagtcccaggtcaataaatggcagttagttattctyggtggtcgtggtgatgtctaaagactgacaggattcccagattcaatgttgggaaaatcaccttgagtccacttttcaatgtgctggggagtgagtacag

SEQ ID NO: 306009 - DNA, 201 bp, Homo sapiens
catggtgaaaccccgtctctactaaaaatacaaaaattagctgggtgtggtggcgcatacctgtaatcctagctactgtcggggctgaggcaggagaatcrcttgaaccagggagtaggaggttgccatgagccgagatcattccactgcactccagcctggcaaaagagccagactccgtctcaaaaaaaaaaataaaat

SEQ ID NO: 306010 - DNA, 201 bp, Homo sapiens; identical to SEQ ID NO: 64096

SEQ ID NO: 306011 - DNA, 201 bp, Homo sapiens
gtctttttcatataatgacttcttttcctttaggtagatatccagtagtgggattgctggattgaatggtagacctacttttagttctttaaggaatctcygtactgttttccatagaggctgcactaattaacatctgcaccagcagggtgtaagtttctgttttcaccacatccatgccaacatgtattgttttatgac

SEQ ID NO: 306012 - DNA, 201 bp, Homo sapiens; identical to SEQ ID NO: 64097

SEQ ID NO: 306013 - DNA, 201 bp, Homo sapiens; identical to SEQ ID NO: 64098

SEQ ID NO: 306014 - DNA, 201 bp, Homo sapiens
tggctcatggttctgcaggctgtgcaagcatggcaccaacatctgtttggcttatgatgcaggcctcaggaagcttacaatcatggcagaaagtgaagtgsgagcaggcacatcatatggcaagagtgggagaaagagagtgaagggggaggacccagtcgtttattattattattattattatttttgagacaaagtttt

SEQ ID NO: 306015 - DNA, 201 bp, Homo sapiens
catcatatggcaagagtgggagaaagagagtgaagggggaggacccagtcgtttattattattattattattatttttgagacaaagttttgctcttgtcrcccaggctggagagcaatggtgtgatctcggctcaccgcaaacctccacctcccaggttcaagcaattctcctgcctcagcctcctgagtagctgggaat

SEQ ID NO: 306016 - DNA, 201 bp, Homo sapiens
gagtgggagaaagagagtgaagggggaggacccagtcgtttattattattattattattatttttgagacaaagttttgctcttgtcacccaggctggagwgcaatggtgtgatctcggctcaccgcaaacctccacctcccaggttcaagcaattctcctgcctcagcctcctgagtagctgggaatataggcatgcacc

SEQ ID NO: 306017 - DNA, 201 bp, Homo sapiens
caccatgttggccaggctggtctcgaactcctgacctcaagggatccacctgcctcggcctcccaaagtgctgggattacaggcatgagccaccgtgcccwgctgtgtcacctgttttataaataaagttttattgaaacacagccacatacatttttttacttattgcttgtggctgttttcacactgcagcagcagagt

SEQ ID NO: 306018 - DNA, 201 bp, Homo sapiens; identical to SEQ ID NO: 64099

SEQ ID NO: 306019 - DNA, 201 bp, Homo sapiens
cagtctcaaaaaaaaaaaaaaccaaagaacaacagaaagccatttttgcagatgcaggaacaggcttagagaggttatataacttgcccaagaccacatcrcatttaagtggcagagccaggattgcaacccaggtatgtatgattccaaatcaagtgctcctttaattatgtccggctgcttaagactttatattgacat

SEQ ID NO: 306020 - DNA, 201 bp, Homo sapiens
tgaagtaatggtcttagctgggtaagatatagatggtcgcataacagaatctcttaggattctttttacaaaatacatataccaacccctctttgaaatcygcttggctgaagagactgtcagtttaagagcatctttaatcagtaagcataggcccccctggcaacaaaaataggcaaaatattcttgtgctttggaaat

SEQ ID NO: 306021 - DNA, 201 bp, Homo sapiens
ggagtgcagtgtctccatctcggctcactgcagcttccacctcctgggttcaagcgattctcccgcctcagcctcctgagtagctgggactacaggcgcgygctaccacgcccagctaatttttctatttttaggagagatggggtttcaccatgttaactaggacggtctcgatttcttgacctcgcgatctgcccgcct

SEQ ID NO: 306022 - DNA, 201 bp, Homo sapiens
tgtgctggaatattgttaccaagctgatgtgccgttctcaccctgcagaatactggttttgtcatttcataaatgatatttttataaatatttttgaatgrctgtactttttactgattatcttaataccgcctcacttatgtacctgtagcataaatattcctggttctgattcttgctgttctttccacatacaaatca

SEQ ID NO: 306023 - DNA, 201 bp, Homo sapiens
actgtattacacctttgatcataattgtccactatctgaatgaagcaatatatgattcttactaacttttcacttgctgtaccagattgctacagaaggtragacctacttagaggtcaaggatatccttgtgttggtccatacataattctttaagtcatctttgtttttatcttgctaagggtttccaatatatctttg

SEQ ID NO: 306024 - DNA, 201 bp, Homo sapiens
ctagaaacttttctgatgttctctggtttgatgatgaaggcgtctaataaaacacatcaactctaagcctctacctctacttctctaaacctgaagtttaraaatgaaagtcatgcctggaaatgtttcacatcattagcactgacagcgtttacagggaaatagagaaaacgtatatggattaattttcttttagatcaa

SEQ ID NO: 306025 - DNA, 201 bp, Homo sapiens
gtataatgaaggcatagaaataaaatgttttatataattcttgctggtaaagtttaaaattatttttcattcatttttatctcctttatcttcagacatartttttaaattcatatttcttgtttactttattctgacatgaataatcatgaaatagttcccaatcgccacatacacaaattatttaaattaattcatgtt

SEQ ID NO: 306026 - DNA, 201 bp, Homo sapiens
acattccttattccaagtctactccttcatggccttacatagttgctttgaaggatggatctttaaagattcataagctttggtgggtgagtggggtggayaaaggagataggctttcttattgcctgaggccccaccagtttcaccatcttatctttcgttggttttgcagctcaaagaccttgaaactacatctggatg

SEQ ID NO: 306027 - DNA, 201 bp, Homo sapiens
gacctgtattcttttctcattctgttactgtgatatttttagaagtatccattttccttctaatatgcccattctgcccgtctttgaagtacctatatctytaaatgatgcctgtattcaccagtctgaagactcttctgactgggttttgcagggagcttgtggtgcatggggcatggggcattgactccgccaaggtgc

SEQ ID NO: 306028 - DNA, 201 bp, Homo sapiens
acagatgctcactgagctcagcttgtcattgcgtggtttaggacagacaacaaggaaccttgaaggatggagtcagcttaaaaggcaagcattaggtttgkctacacacccctatccttagcacctgtgaagatctcagagtgcaaagagaaatacagatcatggcccactcctctatgcctggcactgctgggtgcagag

SEQ ID NO: 306029 - DNA, 201 bp, Homo sapiens
atataggacctgtattcttttctcattctgttactgtgatatttttagaagtatccattttccttctaatatgcccattctgcccgtctttgaagtacctrtatctttaaatgatgcctgtattcaccagtctgaagactcttctgactgggttttgcagggagcttgtggtgcatggggcatggggcattgactccgcca

SEQ ID NO: 306030 - DNA, 201 bp, Homo sapiens
tcagctgagcatgtctttgcctttcatggggccccctgcgatgctgtttgggagacagttacagctactttgaggataataatgactgccccaaactcctktggaagaatgttgggaagataaatgagataatccacctgacagctctttgagctcttatgaaaaagatacccttgaaatgtaggatacaggtgtgccttg

SEQ ID NO: 306031 - DNA, 201 bp, Homo sapiens
ggcaaatgcttgaaaagcatttttccccacagaggacagtttagagattttaagaaataagagtctcatgtttgtggaaaattagaaataatacctccttwttctgatataattgagcaagaattgaggactgaatttccatctctgtctccccctccccgctccctgaacagagagattttgcctttcaaggtctcagtc

SEQ ID NO: 306032 - DNA, 201 bp, Homo sapiens
aaagtttctagactaggtgccaaagcataggagtcgctcaagagatggtagctgaaaaaggaagtttcttacagtttttgatggtgtatggagtgacagtrttcaatgcaagtagtgtctaatttgtgtagtctaattagtggcattttaaaatcccattgtaggctttaaaaaaatctgagggattgaatgttgttcttc

SEQ ID NO: 306033 - DNA, 201 bp, Homo sapiens
cggactgtgaactccactgcagccgtaaggactgtctgtgacagtgagcccgagatgactgggctctgtgctccctcccggccctccaatccttggcctgmcacagagaactgagctcttttattagcaccatgaatgtgactgatacagctagccattcccttgtgcgaatgactcagtttattaatgctctgctaaaga

SEQ ID NO: 306034 - DNA, 201 bp, Homo sapiens; identical to SEQ ID NO: 64092

SEQ ID NO: 306035 - DNA, 201 bp, Homo sapiens
gtccagtaaaatacttgctttcaggagaaagtggtgaatttggcaaaatacttatttaacacatagtttttttaaacttaccttatcagagacattaaaaygaatgtaagccccaagaaacctaggaaataagatagagaaataaaaaatgaacgctcctttctagtttagcccgaccacgaagaaatacacattatattt

SEQ ID NO: 306036 - DNA, 201 bp, Homo sapiens
aggacatacggttttatttatattgtttagtggctaaggaaggttaacatgaaatcttgttcaatttattttttgtatttgcatagtaacgtaattatcarttctccttcagtatgcatgcaatgcattgattcataattaattgattcccctttccacaatatcatcttccagtgctttcagaggatagaaatgtccact

SEQ ID NO: 306037 - DNA, 201 bp, Homo sapiens
aactggtgttttcttcttctccttgtctgaatctctgctggtccttatttccaactcttaattgggcattgtataagactcttagcctccattattctctyttggaaggtttacacatttttgtctgtcatgacacccaaacaagaaactttcaagtaatcttggacaacttttttttatcaccacctatatcttatcagt

SEQ ID NO: 306038 - DNA, 201 bp, Homo sapiens
ctgtgttggtaaggtggtgagggagtgagggagatttttgttttgttttgttttgtttttttcagacagggtctggctctgttgcccaggctggagtgcartagtgcagtcacagctcactgcagccctgaacccctgggctcaaagaatcgtcccaccacagcttcccaagtagttgggactaccaacgtctgccactac

SEQ ID NO: 306039 - DNA, 201 bp, Homo sapiens
accgggggagccaatgatgtaagtcctggttcaagtctgaaggcctaaacaccaggagttccaatgtccaagctcaggagaatgtggatgtcacagctcawgcagaacaagggaattcaccattctgcctttttgttcgatctgatcacccaacagattgaatgatgtgcccacctgtgttggtaaggtggtgagggagtg

SEQ ID NO: 306040 - DNA, 201 bp, Homo sapiens
tttgactccatgtctcacatccaggtcacactgatgcaagagttgggctcccatggccttgggcagctccacccctttggctttgcatgatatagcccccmactcctggctactttcacaggctggcattgagtgtctgtggcttttccaggtgcacggtgcaaactgtcagtggatctaccattctgaggtctagagaac

SEQ ID NO: 306041 - DNA, 201 bp, Homo sapiens
ctgtgattcctttttttctgttgtctttaggattaaaggggtatttttaaattccattttttaatttgatgacttactagcagtgctctttgttgttgttktttttttaagtggttgcttaagggtttatggtatacatgatagaatttcatgtgtagtataagaaccttaatatattaccacttttttctgggttcttgc

SEQ ID NO: 306042 - DNA, 201 bp, Homo sapiens
actaataagtgattatagcaggttgggtgcagtggctcacgcctgtaatcccagcactttgggaggcagaggtgggcggattgcctgaggtcaggagtttragaccagcctggctaacatggtgaaaccccgtctctactaaaaatacaaaaatcagctgggcgtggtggcgcacgtctgtagtcccagctactcgggagg

SEQ ID NO: 306043 - DNA, 201 bp, Homo sapiens
ccgcttgaacctgggaggcagagattgcagtaagccaagatcacaccactgcactccagcctgggcaatagagtgagactcagtctcaaaaaaaaaaaaaaccaaagaacaacagaaagccatttttgcagatgcaggaacaggcttagagaggttatataacttgcccaagaccacatcgcatttaagtggcagagccag

SEQ ID NO: 306044 - DNA, 201 bp, Homo sapiens
gcctcccgggttcaacgtttctcctgcctagcctcctgagtagctgggattacaggcatgcatcaccacatccagctgatttttgtatttttagtaaagayggggtttcaccatgttggccaggctgttctcgaactcctgaccacggtgatccacccgcctcggcctcccaaagtgctgggattacaggcatgagccatc

SEQ ID NO: 306045 - DNA, 201 bp, Homo sapiens
gacccaggctggggagcagcacaagctatttcttttggatgcgcctcctaggagtggaggaacttttctttgtaaagaaagagaggatctttataaacctyggacttttttcaaggaggctttatgggtggcaaggataaagctatagaggcaggaaaaagagttgctaactatatgccagtacagcatactttttaaggg

SEQ ID NO: 306046 - DNA, 201 bp, Homo sapiens
aaactgaccttaactcaaggatcactttgttacacaccaggctacttcaatcctctggccttgtttccattcttgatccctttgatctctgctgagccttraggcttatgatcctgtttcagggcttcagtgattccccttgctcccagctctggggactggtctgcttatcctgtctccagtccccatggttggagctgc

SEQ ID NO: 306047 - DNA, 201 bp, Homo sapiens
atcagtgagaccaacaaataccaacaggtcattcacttttttgggtacaggacagtgggaccttgccactaggattagaaagtttctatgaagctttaggkctgagagagtccagaataactatgtacaatgtctccagcaagattgttgcctaagtagagaagttaaatttagtatgaagcagaaagatttcaaaacata

SEQ ID NO: 306048 - DNA, 201 bp, Homo sapiens
acactcactgtccgcctctactaacctacaccaccttcttagactgctgtttgcatcttcccaagacagagttttccctgtgaccacttgtgcctacggaygagtcttaagcctccaagtcttcccaagaaactgaccttaactcaaggatcactttgttacacaccaggctacttcaatcctctggccttgtttccattc

SEQ ID NO: 306049 - DNA, 201 bp, Homo sapiens
catttgaacttttttggtagtacacatagtaccattgtagtaaacctcaaatccaaatgttttccctaagattctgcattaacttcaaaaacactaaaaamattttttttattatttagcttagacatgtttattcagtttttaaattagctattatgatttcagagtaacacaccttgatatattggtcaactttaaaag

SEQ ID NO: 306050 - DNA, 201 bp, Homo sapiens
cttgctgcccaggctggagtgcaatggtgcgatctcggctcattgcaacctctgcctcccacgttcaagcaattctgcctcagcctcccaagtagtgaggrttataggcatgcgccaccacgcccagctaatttttgtatttttagtagagacagagtctcaccgtgttagtcaggctggtcacaaactcctgacctcagg

SEQ ID NO: 306051 - DNA, 201 bp, Homo sapiens
gcgccctgccggctaaagcattaacttaatgtaagattgaaagcaagtggtagaccgctgacatctgaaaaagtaaagcccagccttatttagaagcgggrcgatatttggcagatgcaggagcttctagaaatgagtgagctcattgttcaactttcctctttgggagtctctcaggggtgtgtgtgtgtgtgtgtgtgt

SEQ ID NO: 306052 - DNA, 201 bp, Homo sapiens
tatagtttgaagtcggtagcgtgatgcctccagctttgttctttttgtttaggattgtcttggctatgcggggtcttttttggttccatatgaaatttaargtagttttttccaattctgtgaagaaagtcagtggtagcttgatggggatagcattgaatctataaattaccttgggcagtatggccattttcatgatac

SEQ ID NO: 306053 - DNA, 201 bp, Homo sapiens
ctcccccttggggactgtgaccaataacacgaatacagagaccagatcctaggccaggccaacttcccagcctggcccttttccttatggcactgacattyggctgcaactagccaccaccgacctcaataggcccgtcccttacaactctttcatccaagcttcagtgggaagggtggaatagattttatacagtgaatg

SEQ ID NO: 306054 - DNA, 201 bp, Homo sapiens
tgttgccgtgttgctcaggctggtcttgaactcctcagctcaagtaagtgatcttcctgccttggcttcccaaagtgctgggattacagacatgagctacygcacctggccaggctaacaatactcttaagaaaatagtgtatacagtcagacagtcaatttacttaattctcagtgattacaaaacattacttccatgag

SEQ ID NO: 306055 - DNA, 201 bp, Homo sapiens
agatctgtggtaacaatctcataaagcaagagtgtggttttaaaatgaaacaaaagaaatccttagctagtgccccatttcactgaaccttaattttagakagcttgcatttgccttgcaaatgagtccacaaattaccaagccacaagcatttaaaaccatcctgcccactgccagaaggagtatgcctggcagaaccaa

SEQ ID NO: 306056 - DNA, 201 bp, Homo sapiens
taatatttctgaaactcttctagagatatctcatgtgggtttttttgtttgttttttaaaaagcagactcccctctacccataagaatctgcttggttacytccttgtccatagaacaactatctctaatcaagcatcatcatctctgctgcttccccaagaggaaatgccagaaagtatgggagccttcatggtgctaag

SEQ ID NO: 306057 - DNA, 201 bp, Homo sapiens
ttgtgagttgcaaaactcatgagtccttcaaaaaacactttaaaggcatgtcagtaagacatgaaactagcatttatctgctgcagtatactttgagtatytacaagtggacaacatggtcaaaagcacttaaaatgtttaatagattagtacatgatcttgcagtgatagtgcagatttgtttttggttgtattgcacat

SEQ ID NO: 306058 - DNA, 201 bp, Homo sapiens
agcaccatggggaaactgaaagaaccagatattctaccaccatggaggaatgacctcaccctgggtagtaactcttcccttctgctcatctacccaaaggkaaaagaaagtgcaagtttcctagtttacattgtgtttcttgagggagaaaaggctcttggtaaaacaatgccttattcctttcgtttggaagttctttct

SEQ ID NO: 306059 - DNA, 201 bp, Homo sapiens
aaaaaaatgctagcagagattttagttaaatgcattcttagtagtaaggtccagctgcgtgctttgtgagttgcaaaactcatgagtccttcaaaaaacaytttaaaggcatgtcagtaagacatgaaactagcatttatctgctgcagtatactttgagtatttacaagtggacaacatggtcaaaagcacttaaaatgt

SEQ ID NO: 306060 - DNA, 201 bp, Homo sapiens
ggcagcatctaatcttgaggtaggtagatagtggtgagatggctactcatgaataattttaaaatcaatcatctgtggctaaatgtagtgatttcaaatcrcttcacagctttgggctgtggaggggaaaagccattgtggtgaaatagagtaagaaacaggagatgtaaagctttcctcatttcttgcttcaattcgatc

SEQ ID NO: 306061 - DNA, 201 bp, Homo sapiens
agatttttatcatgaattgatgttggattttgtttatgtgcatgtattaagatgaatacatggtctttagcttatttaataaggtaagttacattgacttytgcatgttaaaccaatctgtatccttgggataaactacataggtatgataattgtcctttcatttcactaaatgttgttaatttttgcctctataaggga

SEQ ID NO: 306062 - DNA, 201 bp, Homo sapiens
gtaatttaattcagaatcgcagcaggttattttgtggctatcagcaaagttattctaaagtttatattggtcagagacctagactaggcaacacaatattrtaggagaacaaagtcagactgacactattgtacttaaagacttatgaagccacagtaatcaagacattgtggtattgttgaaagaataaatagatcattg

SEQ ID NO: 306063 - DNA, 201 bp, Homo sapiens
tttgctgagatttttatcatgcttctagtcccagtttgctgagatttttatcatgaattgatgttggattttgtttatgtgcatgtattaagatgaatacrtggtctttagcttatttaataaggtaagttacattgacttctgcatgttaaaccaatctgtatccttgggataaactacataggtatgataattgtcctt

SEQ ID NO: 306064 - DNA, 201 bp, Homo sapiens
cacaatcctgaacagttgctttgggtggtagctagcaattccttctcaccagggattggtcatgtatttaatggcagactctcccttcccctaccttcccygcttccccacattttcccctgggtgtcctaaaggcttggcacccttaacagtgccttctcctcccatgggctcagccacaggtatttcttaagagtctca

SEQ ID NO: 306065 - DNA, 201 bp, Homo sapiens
ttatttcagcacttgaaaaacattgtgccacttcctattggctccatggttcgtgataagaaatctgctgttaatccagttttctcttgtaggcttcatayaggtgcattcaagactttttttgtcttttgttttcagaagtttgattatgatatgtcttgacatggatatctttgggtttaccttatttggagtttgttc

SEQ ID NO: 306066 - DNA, 201 bp, Homo sapiens
aaactgggcagcagtggtgctatcacaagttccctcctgctggagcctctgcagaaggccaggcaggctgctctcccacagtcacgtgagcagatgtcctmtcctgcctccatgaaccatcccgtttggttacctggacgccattatatccccctgccccaccatagtgctttctctgaactgcattttagcgtgaagcca

SEQ ID NO: 306067 - DNA, 201 bp, Homo sapiens
atagaatcagtgccatgagttaaagggtaatggatgtgatgaccagaataccctcacaactagtttataccattacgttgtttttcacagatctaaggtayatctaaaattccaattaatggggtacaattaattagttacatggaaaagataatattctatatctgtcttcttaataagccaacagaaatgccctctaga

SEQ ID NO: 306068 - DNA, 201 bp, Homo sapiens
acatatattattgtcatattcattaggctatggtaggaagtccagttagatttaaactgatacttgttctactcagaataatttatgtcacctgaagagargctgatggctatattcttatttcagcatatttggatatgggaaaattaattaaactaaaattctcatatgactttggaaatgactattgaaaacacactg

SEQ ID NO: 306069 - DNA, 201 bp, Homo sapiens
ttagtcagagaacatattttgtatgatttgagtactttcaaatattttgaaccttgttttatgactgagaatatggtctgtcttatcaaatgttccatgtrcacttgaaaagaatgtgtatctgcattctggatggagtggtctctaaatgccaattggctaattagttgatgatattgttcaaatttgctgtatcttagt

SEQ ID NO: 306070 - DNA, 201 bp, Homo sapiens
ttttcttcagctttttaatttttccaagttgagttttgaatttttgatctcttttgacagcctttttttctttttggctaggactctctacataacttttktgatagttatggaaaacagtgggatagatgttcagatgttataacttctcttttttggctgggatggggtggatgagtaaaaagaaaaaatcaataagtc

SEQ ID NO: 306071 - DNA, 201 bp, Homo sapiens
cgaagaaatacacattatatttgcaagcttgtctactcaagccatgttttgattacatacatttgttttttactgaactttagaataataacaaaaatatsttttttacatttttgcattcctatcccatcttgctcctttttgtctgaatcttattctttgatttttttaaagtatatttcctagttcttcttcctttcc

SEQ ID NO: 306072 - DNA, 201 bp, Homo sapiens
accacttaaggaatgcccaaatattttctaatacttcctcactcaaattttctagctcaaggggataaagtattttaaagggatgtgagtgctgatctcartggatcataagccttttaggggagagggccagctaacttttgtataattttacttgacagtatttgacacatttccttgcatatagtatgtactcaaata

SEQ ID NO: 306073 - DNA, 201 bp, Homo sapiens
tgcagtgctggctacttgggaggctgaggtgggaggaccacttgagcccaggagttagaggttacagtgagttatgatcatgccactgtgctgtccggcakgagtgacagaatgagattctgtctcaagaaagaaaaaacaaatagattctagagaattttaaagcaataataatcacctgaatttacctcagatagcatg

SEQ ID NO: 306074 - DNA, 201 bp, Homo sapiens
ggtgggcggattgcctgaggtcaggagtttgagaccagcctggctaacatggtgaaaccccgtctctactaaaaatacaaaaatcagctgggcgtggtggygcacgtctgtagtcccagctactcgggaggctgaggcaggagaatcgcttgaacctgggaggtggatgttgcagagagctgagatcacgccactgctctc

SEQ ID NO: 306075 - DNA, 201 bp, Homo sapiens
ctaggaaggtagttcttatttttggtcagtttgcaatactattaggatatcggggacaaaatggaaagtatgattttaaaaactgctcagtatttattaayggaaaattgtcatttttataagaaagaaatagtggaaaattcactatagttctttctggctaaaaagtgtgtaatatatgagtatataaaatatgaatta

SEQ ID NO: 306076 - DNA, 201 bp, Homo sapiens
ttcttcagtgtgcatatattgttaatttagaaattgcaaataattacataaacaataaattaataatttagggatgatgtttaatttgactttcctgttgycagtggtgaccaaaaagtgctaagtattattgaacattttatctaccttaattatgccaagtaaatccagggcttattgtgatttataccaagtaaatcc

SEQ ID NO: 306077 - DNA, 201 bp, Homo sapiens
gtgttccaggaatggactttctgcagtatgatgacctgcaaaagcagcccttccatttacatttcaaactccaagtcagccgtgtcaaagtttgaaccagractgtggaggataatgggtcagatgcaattagcagcccagagaaccacacgttgcagtctgatttatttttttgcccatcagattccaagaatcctagtg

SEQ ID NO: 306078 - DNA, 201 bp, Homo sapiens; identical to SEQ ID NO: 64093

SEQ ID NO: 306079 - DNA, 201 bp, Homo sapiens
tcagtaaaccgggtggtaaactgaggtgctatcagctagctagtctttgttgtcccatttatagatcacaggcagagtcgatttagcataattcttaaagrccctaggaattttcatatggtaaatgagcattggcttcaacttaaagtcactagctttctttagttcctggtagagtcagcttgttcttcgaaggcaggc

SEQ ID NO: 306080 - DNA, 201 bp, Homo sapiens
ctgataggaggaccttgtgttgatttaaatgactgctgactaatcagagtggtggctggaggtgggggtgactgtggcaatttcttcaaataagacaacartgaggtttagatttctctgtagcacggagtgctgtttgatagcattttacccacagtagaaattccttcaaaattggagtcaatctcaaaccctgatgct

SEQ ID NO: 306081 - DNA, 201 bp, Homo sapiens
atcctgcattgggtcttggactggaggacaaaacagatctaaaggacattattagggtgactggagaaattgtagaatggatttgaatggtgtaatatgawtattaaattttctgagtgataatttattctgattacataggaaaatactcttcttcttaatggggtacatgttgacatatttaggagtgaaatgtcatga

SEQ ID NO: 306082 - DNA, 201 bp, Homo sapiens
atattcaaattaaatgctatgaaaaagaatttctttgaatgagtctattatttctgtagcatgaaacactttgtaaatccatcttttctttataaaattgtatatatatatatatatatatatatatatatatatatatatatattttaaatgcccagtgtctcctgctgcccattttttttttacttgttctcttgaaaa

SEQ ID NO: 306083 - DNA, 201 bp, Homo sapiens
tattcaaattaaatgctatgaaaaagaatttctttgaatgagtctattatttctgtagcatgaaacactttgtaaatccatcttttctttataaaattgtatatatatatatatatatatatatatatatatatatatatatattttaaatgcccagtgtctcctgctgcccattttttttttacttgttctcttgaaaac

SEQ ID NO: 306084 - DNA, 201 bp, Homo sapiens
attcaaattaaatgctatgaaaaagaatttctttgaatgagtctattatttctgtagcatgaaacactttgtaaatccatcttttctttataaaattgtatatatatatatatatatatatatatatatatatatatatatattttaaatgcccagtgtctcctgctgcccattttttttttacttgttctcttgaaaacc

SEQ ID NO: 306085 - DNA, 201 bp, Homo sapiens
ttcaaattaaatgctatgaaaaagaatttctttgaatgagtctattatttctgtagcatgaaacactttgtaaatccatcttttctttataaaattgtatatatatatatatatatatatatatatatatatatatatatattttaaatgcccagtgtctcctgctgcccattttttttttacttgttctcttgaaaacca

SEQ ID NO: 306086 - DNA, 201 bp, Homo sapiens
cactatagaaacatttgattaagataagatgctgaaaccatttggtgaaagattgttgggattggattcggagaaatctgaccagtttaacttaatgctcwaacttaacatcaacattatgggacaaactgacgttacgtattccttgatatggtgcgctgagaagagtacaacttcacctgtttggtacttaatgccatt

SEQ ID NO: 306087 - DNA, 201 bp, Homo sapiens
aagcactatagaaacatttgattaagataagatgctgaaaccatttggtgaaagattgttgggattggattcggagaaatctgaccagtttaacttaatgmtcaaacttaacatcaacattatgggacaaactgacgttacgtattccttgatatggtgcgctgagaagagtacaacttcacctgtttggtacttaatgcc

SEQ ID NO: 306088 - DNA, 201 bp, Homo sapiens
tcaaattaaatgctatgaaaaagaatttctttgaatgagtctattatttctgtagcatgaaacactttgtaaatccatcttttctttataaaattgtatawatatatatatatatatatatatatatatatatatatatattttaaatgcccagtgtctcctgctgcccattttttttttacttgttctcttgaaaaccat

SEQ ID NO: 306089 - DNA, 201 bp, Homo sapiens
gaatttgaataaaagtgatagcttctttacacgtccaatcttagagtagggaaatgagcatttcacagcagaaagttttgttctgaacaaaacagagtccmttgtagtgtatatctatcatatatactgcattatgtttggttaggacttgaaaattttatttcattgcatcatgtttttgatcaagaatttgtaggaatt

SEQ ID NO: 306090 - DNA, 201 bp, Homo sapiens
tattcatgttatatagcatgtgtggaatttcatttttaaggctgagtactattacattgaatgtatacacattttgttaatccattcatctattcacggayacttggattgcttctaccttttggctttttgtgactagtgctgccatgaacctgggtgtacaaatatctgtttgagtgcctgcctttacttcttttgact

SEQ ID NO: 306091 - DNA, 201 bp, Homo sapiens
tttgctaaagcatagcaagagggacctttgcttcaatatccaataaattactcgtctgcatctgagaccacctcagcctggaccccattgtccatatcacwatcagccttttggtcacagccattcaacaagtctctaggaggttccaaactttccctctttctgtcttttcctgagccctccaaactgtcccggcctctg

SEQ ID NO: 306092 - DNA, 201 bp, Homo sapiens
gattgaaagagtacatcttagcacaacaatacggtatattgcctagtaatagaataatgcttcaagaaggagctctggagaggggacggggtgcttatttaaaaaaaaaaaaaatttggcaaggcaaggcacggtggctcacgcctgtaatcccagccctttgggaggccgaggcgggtggatcacaaggtcaggagttca

SEQ ID NO: 306093 - DNA, 201 bp, Homo sapiens
ttccaaagtcacaaattaatatgtatatttggagtgaaaaacagttattaagagagaagctgaaggtgatttccaataagccctagaaatggatgtttccrtaggattctgatgtctgattcagaattactagctacatagtaatctgacctgcccagtttacaagataactagcttggaattcatttggtttcctcgacg

SEQ ID NO: 306094 - DNA, 201 bp, Homo sapiens
tagatactccctgttctgcctgggactgcttttttccctccctgatttcagagctactgttacacgctttccaccactattaaggttgtgatagccaggttttttttttttttttttttgagatagagtctcactctattgcccaggctggagtgcagtggcatgatcttgactcactgcaacctccacctcccaggttaa

SEQ ID NO: 306095 - DNA, 201 bp, Homo sapiens
aagggaaaagtattgtgaaaatttttcatagatttttccaagattttaaatacctaaacaaaatcagcctaggtgaaatgtattttgatgtatctatgtartcaagaactgttgtagatgtaactagtatcctcaaatatcttttagcttaatagccatatgctccataaatggggaaggaaaaggaaagaaacatcgcct

SEQ ID NO: 306096 - DNA, 201 bp, Homo sapiens
tgtttcaagctctgtaaaagtggttttaggtttttaaattcctatcttggaaatattttgctatcatcaaatttcattttctttaaattgtatataatgartgtgttctccctttttaggtgcgctttgtaaagaatataacttcctggaaagagatgaaaccaggattttatcatggacacgtttcttacttggattttg

SEQ ID NO: 306097 - DNA, 201 bp, Homo sapiens
ctgtaaaagtggttttaggtttttaaattcctatcttggaaatattttgctatcatcaaatttcattttctttaaattgtatataatgagtgtgttctccytttttaggtgcgctttgtaaagaatataacttcctggaaagagatgaaaccaggattttatcatggacacgtttcttacttggattttgcaaagtaagtt

SEQ ID NO: 306098 - DNA, 201 bp, Homo sapiens
agcaattggattgcataatgaccaacacttaaaaaatgtttgtgtggggcagcgcagaagaatagtcttaatcattagctgacatacttcaaaattatcakctggtagtccaaaacctgatcttaattaagagtaacttacttaacaaatgttctttatataccctatctccagttttgtgatctcttgttctatgtagac

SEQ ID NO: 306099 - DNA, 201 bp, Homo sapiens
tggctgaggcaggtggattacctgagatcaggagtttgagaccagcctggccaacatggtgaaaccccatctctactaaaaatgcaaaaattagctgggcrtggtggcgggtgcctgtaatctcagctacttgggaggctgaggcaggagaatcgcttgaacccaggaggtggaggtttgcagtgagccaagactgcgcca

SEQ ID NO: 306100 - DNA, 201 bp, Homo sapiens
ttaaataaagaatatatattgcaagattgtatttataccaactataacctcatttttaaaaatgcttgtgaaagaaaacaatgtcaacaaaatgctaacartggttctaggatgatccaattcattgattttttttttcttaactaaaatttcttcagtgtgcatatattgttaatttagaaattgcaaataattacataa

SEQ ID NO: 306101 - DNA, 201 bp, Homo sapiens
gtggatctaccattctgaggtctagagaacagtggccctcttctcacagcgccactaggtggtgccccagtagggaatctgtgtgggggctgcaaccccacatttcccttccacactgccctagcagaggttctccatgagggccccgccccacagcaaacttctgcttgggtatccaggtgtttccatacatcttctgaa

SEQ ID NO: 306102 - DNA, 201 bp, Homo sapiens
ccccacgcctttaatcccagcactttggaggctgaggttgaggctggtggatcacttgagcctagaagtttgagaccagcctgggcaacatggcaaaacgktgtctctacaaaaagtacaaaaattagccaggtatggtggcaggcacctgtggttccagctatttgtgaagctgaagtgggaggatctgagccctgggag

SEQ ID NO: 306103 - DNA, 201 bp, Homo sapiens
cctttgtaagtaggaaagaaatctcatcttaggaaaaccacagagaagaaactccccactaaacaaaccattgcaaaactacagcaatctgatatttggamaatggagaatgagttctatgaatttgcactagagcagttccaattcatcagagcccatgccgttcgagaaaaagatggagacctctacatcctcgcacaa

SEQ ID NO: 306104 - DNA, 201 bp, Homo sapiens
ctgcatgagtagagtctgggtaaatgtttaatgactaaacttatgttttccatatgaacgggttaattttatacagaggaatatttttttcccacctgtakagatggtatttcctattctaggcacttacctcacaaatgatcttataatagtgactgccgtttattgaacattggcttgtgttctacaactgttctagat

SEQ ID NO: 306105 - DNA, 201 bp, Homo sapiens
tttccatatgaacgggttaattttatacagaggaatatttttttcccacctgtatagatggtatttcctattctaggcacttacctcacaaatgatcttayaatagtgactgccgtttattgaacattggcttgtgttctacaactgttctagatactgtatggactttttctttttaccctctcaactttgaggtagttg

SEQ ID NO: 306106 - DNA, 201 bp, Homo sapiens
catcctatgtatttccccctgttggctagttatttcaccaaagcgctaacacaaaacttgtagattcagcattttaggtggtcactgggtaaaggaattayagctttgtatgtgcatgggaagctttcctttgggtttctgatgtacagagagcactgtggtttccttgtaagttttggtttacaaagtcaacatcagcaa

SEQ ID NO: 306107 - DNA, 201 bp, Homo sapiens
aagatgttttttgatttttaagaagtactatgaagttgcataattgcttttttctcttgtatatcttttcttttttccattcttcagatccaaaattaacrggacaggctcttattccaggatcagtaatataccacaaacagtcacaaatactattggtttattgcaaggtatgtttttcattagtttcaagttatcata

SEQ ID NO: 306108 - DNA, 201 bp, Homo sapiens
ttgccctttaggatggttggattggtgttcgatcagtgatgctcaagaaatcactaacagctactgacttctacaatggatatttgcacccctggtaccaraaaaattcccaagctcaaccaagccaatgcagatttcagactctcagacttccaacaaagaagaagcagaaaaaaactgttgctatgcaacaatgcattg

SEQ ID NO: 306109 - DNA, 201 bp, Homo sapiens
taggatggttggattggtgttcgatcagtgatgctcaagaaatcactaacagctactgacttctacaatggatatttgcacccctggtaccagaaaaattcccaagctcaaccaagccaatgcagatttcagactctcagacttccaacaaagaagaagcagaaaaaaactgttgctatgcaacaatgcattgagtagtta

SEQ ID NO: 306110 - DNA, 201 bp, Homo sapiens
ggttgcagtaagcagagatcgcgccacagcactccagcctgcgcgacagagcaagaccctttctgaaataaataaataaataaataaataaataaataaakcgattttaaaaagaaaagaaagacttattctggaggattggctacatagtgcaaataaacagaacaaaaatctagggccgctgtagcgggcaaattcgtt

SEQ ID NO: 306111 - DNA, 201 bp, Homo sapiens
acaaaaaaattagccagacctagtggcgcatgcctgtaatcctagctacttgggaggctgaggcaggagaattgcttgaacccaggaggtggaggttatgrtgagccgagattgcacattgcacaccagcctgggcaacaagagcgaaactccatctcaaaaaaaaaaaaaaaaaaatcaaatagtgtgataaattccttg

SEQ ID NO: 306112 - DNA, 201 bp, Homo sapiens; identical to SEQ ID NO: 64128

SEQ ID NO: 306113 - DNA, 201 bp, Homo sapiens
ctgctgccactctcgcctacattactacagaagcctcctaactggtccctacttctgtccttggccctctcagtcttttaccaatccagcagccaaaatgtatttatttatttatttatttatttatttctattttattgtttaatttagagacagtcttgctgtcacccaggctggagtacagtgttgctgtcataactc

SEQ ID NO: 306114 - DNA, 201 bp, Homo sapiens
ggagcgcaactgtgcagtttcagctcactgcaacctccgccttctgggctctagcaattctacctcagcctcctgagtagctgggattacaggcatgcagsaccatgctcagctcatttttttgtatttttagtagagatggggtttcaccatgttggccaggctgatctcaaactcctgaacttgagtgatccgcccacc

SEQ ID NO: 306115 - DNA, 201 bp, Homo sapiens; identical to SEQ ID NO: 64129

SEQ ID NO: 306116 - DNA, 201 bp, Homo sapiens
tgctgccactctcgcctacattactacagaagcctcctaactggtccctacttctgtccttggccctctcagtcttttaccaatccagcagccaaaatgtatttatttatttatttatttatttatttctattttattgtttaatttagagacagtcttgctgtcacccaggctggagtacagtgttgctgtcataactca

SEQ ID NO: 306117 - DNA, 201 bp, Homo sapiens; identical to SEQ ID NO: 64130

SEQ ID NO: 306118 - DNA, 201 bp, Homo sapiens
gctgccactctcgcctacattactacagaagcctcctaactggtccctacttctgtccttggccctctcagtcttttaccaatccagcagccaaaatgtatttatttatttatttatttatttatttctattttattgtttaatttagagacagtcttgctgtcacccaggctggagtacagtgttgctgtcataactcac

SEQ ID NO: 306119 - DNA, 201 bp, Homo sapiens
gccaaaatgtatttatttatttatttatttatttatttctattttattgtttaatttagagacagtcttgctgtcacccaggctggagtacagtgttgctrtcataactcactgcagccccagactcaagggatcttcctgcctcagccttctgagtagctgagactataggaatgtgccaacacacccagctaactcttt

SEQ ID NO: 306120 - DNA, 201 bp, Homo sapiens
atggtggctcacgcctgtaatcctaaactttgggaggccgaggtgggaggatcacttgagtctgggagttcaagaccagcctgggcaacatataaaaaataaaaaaattagccaggtgtggtgatacacacctgtagtcccagctactcaggaggctgaggtgagaggatctcttcagcctaggaggttgaggcggcagtg

SEQ ID NO: 306121 - DNA, 201 bp, Homo sapiens
aaataaaaatatcccaaataaaaggttgatcttaggaacaaaacctagaaaacctgaaatttattcttaaaaattctttaagctgtttaaagtgtttatasagaccttagaattcacaaagcacttttaaatatatgtatattgcagtttcacataaccaagttttactatcctacttcataggtgaggggaaagaaatga

SEQ ID NO: 306122 - DNA, 201 bp, Homo sapiens
tttactgggaaagaaaattatttgaaatccaaccagtcctgagagtccatggtatgtggtggcaataccgtatatacttctctgcctctttttcccaattratgttttttatttccccattctgtttttttctgacgcagtcctccttccactttttttggtcatctccatctccttttccctacagatacttcacagcag

SEQ ID NO: 306123 - DNA, 201 bp, Homo sapiens
ggcagggatgaaagggccagcctaaatcctaaacatcctatgtatttccccctgttggctagttatttcaccaaagcgctaacacaaaacttgtagattcrgcattttaggtggtcactgggtaaaggaattatagctttgtatgtgcatgggaagctttcctttgggtttctgatgtacagagagcactgtggtttcctt

SEQ ID NO: 306124 - DNA, 201 bp, Homo sapiens
attttatttgtggcatgagttgtcaaaatgtatttaactccttatcaccctctataggctttcatccaccttcatttaaattccatatatatgctgacaaygcccaaattggtccctctagctcagctcggtccccaaactctagtcccctaatacctactgcctccacagctcttcctggatgtctgatagccactttac

SEQ ID NO: 306125 - DNA, 201 bp, Homo sapiens
ttcacggagacacagttactggagtaacaattatgcaaattagacctaaaaggtagcacatattttcctttcttgagatttttgtgatttttaaatgttgrtgtcagcctgtttggggggcagtggatgaatgggtggtgctcactaatttctgtgactccagagtgcttcttctgcttttatatcctttctgttttctcc

SEQ ID NO: 306126 - DNA, 201 bp, Homo sapiens
tactcccaggatgtaaagaagttcacccatgttttattttaatatttatatgattatttatttattatttttacttgatatatggaaaattttgaacatawagaaaagttgagaggttagaatgaattctctggtatctcttattcagtatcaatagctgtcaattcatggacactgaccctgatgttcatttttgctctt

SEQ ID NO: 306127 - DNA, 201 bp, Homo sapiens; identical to SEQ ID NO: 64132

SEQ ID NO: 306128 - DNA, 201 bp, Homo sapiens
ttttggtatttatgcggggtctctttaaagtccatatgtgaattttaatttgttaattgaaataggttatattattaatactcggatttctataaaatacmttgtataaatgagagatggatttttgtatgttaattgttttgaatcttggttttgctggccttggtttctaaactatggccaaaaaatttttggaacctg

SEQ ID NO: 306129 - DNA, 201 bp, Homo sapiens
aacttatggcatttctttttgtcttttttttttttttaatttattttgcctaggcatggtagctcatgcatctaatcctagcactttgggaggatgaggcrggtggatcacttaaggttaggagttcgagaccagcctggcaaacatggcaaaaccctgtctctactaaaaatacaaaaaattagccaggcatggtagtgc

SEQ ID NO: 306130 - DNA, 201 bp, Homo sapiens
tttttgctcttggttttatcttgtagcccctaagatttctgctggtaccagttgtataaaatgggaggaacaaacttcagaacaaatattcagactttacygtgccattggaaatatagtaagttgggaagtcaggttgcagttctacctagttggttttctatgtgtgtaatttgctttctaaatatttttatttaggaa

SEQ ID NO: 306131 - DNA, 201 bp, Homo sapiens
ctgaaataagaatatattgtatatcaatatgcaatataattgtcctaaaacattcattttttcctgtcatacctatagtttagaacaatttagaaacaatktagaacaattttttagaaacaattatttagaattacttgaggagtttattcagtctctgcctgttaccacctaatttccccttagaaaagaataattcac

SEQ ID NO: 306132 - DNA, 201 bp, Homo sapiens
gattcagtaaagcagatggcccccctaatgtggatgagcctcatccagtcagttgaagacctgaatagaacaaaaaggccgagtaagaaggatttcttccrgcctgactgcctttgagctgggatattggtttttaccctgcctttagatttgaactgaaaatcagttcatcataggtctcgagcctgctggctttttggc

SEQ ID NO: 306133 - DNA, 201 bp, Homo sapiens
atgacctgtactctacagaaagcagaatctctactgaggtttccccaagtagacacctatcctcacagcttaagccaatgtactaccttaccctgccacayagatcttttaaagttataggttcagccttgaagagccaatagtaaagattttttttttaatttgaaaaaagaaaaagaaaaaaagttataggttatttca

SEQ ID NO: 306134 - DNA, 201 bp, Homo sapiens
gaccatagggccagacagtgctgggttccatcttgactctgctacttcctaacgtcgtagactcaggaaagttatttaacctccgagctttagtttgttcmttggaatatcagggctggtataatatatttacagcatcttgtacagtatctggcacagaataggtactcattaaatgatagctgctattattcattcatt

SEQ ID NO: 306135 - DNA, 201 bp, Homo sapiens
ttccatcttgactctgctacttcctaacgtcgtagactcaggaaagttatttaacctccgagctttagtttgttccttggaatatcagggctggtataatrtatttacagcatcttgtacagtatctggcacagaataggtactcattaaatgatagctgctattattcattcattcattaaacaaaatatttattgaagg

SEQ ID NO: 306136 - DNA, 201 bp, Homo sapiens; identical to SEQ ID NO: 64127

SEQ ID NO: 306137 - DNA, 201 bp, Homo sapiens
ctctgtctcaaatttttttaaaagtctagaaataaacccatacatttatggtcaattgatttttttttctaaaggtagttcccaaaagatagttctttttwttattattattattattatactttaagttctagggtacatgtgcacaatgtgcaggtttgttacatatgtatacatgtgccatgttggtgtgctgtaccc

SEQ ID NO: 306138 - DNA, 201 bp, Homo sapiens
ccgcctctgtgggttctccaggcgccctgccacccacgctgtgccgagctggggctgggcgctctgcctgcatcccccgggccagtcccacggcctccctrcccgttttgagtgtggggaatccgtggctcagagaggttatgcgattgcccaaggtcatcagccgaggtggttcggactaaaaccaggtcccacttcaaa

SEQ ID NO: 306139 - DNA, 201 bp, Homo sapiens
catatgtatacatgtgccatgttggtgtgctgtacccattaactcatcatttacatgaggtatatctcctaatgctatccctctcccctcccacccaccttttttttttttttttttttttttttgacaagagtgccaagacaatccaatggagaaagaatagtattctcaataaatggagctgggataactggatgtcca

SEQ ID NO: 306140 - DNA, 201 bp, Homo sapiens
tgccgagctggggctgggcgctctgcctgcatcccccgggccagtcccacggcctccctgcccgttttgagtgtggggaatccgtggctcagagaggttaygcgattgcccaaggtcatcagccgaggtggttcggactaaaaccaggtcccacttcaaagttccctgctttgcagttcctcctgacccccatccttcggc

SEQ ID NO: 306141 - DNA, 201 bp, Homo sapiens
aaccaaagggcataaataggcaggttacagataaataaattaaaagtgcacataaatatatggacagcttctcagcttcgctaataataaacagcaagagrttatcatatttttttctcacttatccaggcagtttagcaataaaatgttgatgctgtttaacccacgcattccactttaaaaacaaaaaaccccaaaact

SEQ ID NO: 306142 - DNA, 201 bp, Homo sapiens
ccgggcatggttgcaggcgcctgtagtcccagctactcgggaggctgaagcaggagaatggcgtgaacccgggaggcggagcttgcagtgagccaagatcrcgccactgcactccagcctggtgacacaacgagactccgtctcaaaaaaaaaaaaaaaaagatcttataaatcctggaaacactgatgtagagagtcatg

SEQ ID NO: 306143 - DNA, 201 bp, Homo sapiens
ctctgcctcccaggttcaagcgattctcctgtctcagccttccgagtagctgggattacaggcatgcgccaccacacctggctaattttgtctttttagtrgagatggggtttctccatgttggtccggctggtctcaaactcccgatctcaagtgatccgcccgcctcggcctctcaaagtgctgggattacaggcatga

SEQ ID NO: 306144 - DNA, 201 bp, Homo sapiens
gagagtggaatttattaaaagaaagctctcagcaaaaaaagagggggtcctgccaacaggctcccacctcacagattgaataccaggccaccacacaggarctgaagaggccaggctcttcccctgcataaggcagaaattcctggtggctccacccccattcttccagtgctcatgcgggcccttagtctgagccacgcc

SEQ ID NO: 306145 - DNA, 201 bp, Homo sapiens
gggcatggttgcaggcgcctgtagtcccagctactcgggaggctgaagcaggagaatggcgtgaacccgggaggcggagcttgcagtgagccaagatcacrccactgcactccagcctggtgacacaacgagactccgtctcaaaaaaaaaaaaaaaaagatcttataaatcctggaaacactgatgtagagagtcatgtt

SEQ ID NO: 306146 - DNA, 201 bp, Homo sapiens
gtctctactaaatacaaaaatttagctgggcatggtggcacatgcctgtaatcccagctacttgggaggctgaggcaggagagtcacttgaacctgggagrcagaggtttcagtgagccaagattgcgccgctgcactccagcctgggcaatgagtgaaactccatttcaaaaaaaaaaaaaaaaaatcattacaggaccc

SEQ ID NO: 306147 - DNA, 201 bp, Homo sapiens
cccaggttcaagcgattctcctgtctcagccttccgagtagctgggattacaggcatgcgccaccacacctggctaattttgtctttttagtggagatggsgtttctccatgttggtccggctggtctcaaactcccgatctcaagtgatccgcccgcctcggcctctcaaagtgctgggattacaggcatgagccaccac

SEQ ID NO: 306148 - DNA, 201 bp, Homo sapiens
ctgaggcaggagagtcacttgaacctgggaggcagaggtttcagtgagccaagattgcgccgctgcactccagcctgggcaatgagtgaaactccatttcaaaaaaaaaaaaaaaaaatcattacaggaccctggggagtaggcaaagcagtgttcctatcccattttaagctctgtgatttcctgccttaaggttttcag

SEQ ID NO: 306149 - DNA, 201 bp, Homo sapiens
ctccatgttggtccggctggtctcaaactcccgatctcaagtgatccgcccgcctcggcctctcaaagtgctgggattacaggcatgagccaccacacccrgacagaacatctttagaacagcaaatagttgtcctagctctgtttttaattaaatgtcattggtttcttatggtaagagagtgaatttacatgtaacttt

SEQ ID NO: 306150 - DNA, 201 bp, Homo sapiens
aagcaggcaagccccgccctccccaggctgcacccttgtccccgccccgatgcgcctgcgcagggccggccgccggcggccgaggcgatgagggtgttggygcggcgctgttggggtcctccgctggctcatggcgccaggcgtgggaggccgagtccccagtggcgagcactggcccgactcggctgggaggactgccgg

SEQ ID NO: 306151 - DNA, 201 bp, Homo sapiens
gatacccaaagcatctcctaaaatctttatctcaataaatggctactccatcattctagctgcttgcaccaaaatcctggagtcatgcttgatttcttacrtcccatatccaatccatcagtaaatcctattggctctgccttcaaaatctgtgtagaatctgtctgtatctcatcacttccgctgctgccactctcgcct

SEQ ID NO: 306152 - DNA, 201 bp, Homo sapiens
ctaaagacaggcttataaatttgaatccagtaacttaagatgttccctttctctggtaacagagttgattcataccaggctgctaggcctccagtcacagktatagacaagaaaagagggtatagaccaccaaaagcaagaccaatccactctgtgttatggtacacgtttcacaattcaaatcacctgtattcgaaggaa

SEQ ID NO: 306153 - DNA, 201 bp, Homo sapiens
gtaaaactacagtaaccaagatagtgtggtactggctatagctcattagaatcgaattaagggtctagaaataagccaggcatgatggcttatgcctgtaktcccagcactttgggaggctgaggcaggtggatcacttgaggtcaggagtttgagaccagcctggccaacatggtgaaacctcatctctactaaaaatat

SEQ ID NO: 306154 - DNA, 201 bp, Homo sapiens
ctgccactctcgcctacattactacagaagcctcctaactggtccctacttctgtccttggccctctcagtcttttaccaatccagcagccaaaatgtatttatttatttatttatttatttatttctattttattgtttaatttagagacagtcttgctgtcacccaggctggagtacagtgttgctgtcataactcact

SEQ ID NO: 306155 - DNA, 201 bp, Homo sapiens
cgctaacataacattccttttgcagcccatggatcaaggaataattttgactttcaggtcttatttagaaaatactttctgtaaggttaaaactgtcgtargtagtgattctgtgatggatctgggcaaagtcaattgaaaaccttctggaaaggattcaccattctagataccattaagatcatttgtgattcataggaa

SEQ ID NO: 306156 - DNA, 201 bp, Homo sapiens
ctcgaactcctaagctcaagtggcctgcccacctcggcctcccaaagtgctgggattacaggtttgagccactgtgcccagccaccattgtgattgttttrtggcaaaatgaaatgcacctatataagatggtgaacttaatcgataaatgtatgtgttctgactgctctcactggccattcctccatctctctccctctc

SEQ ID NO: 306157 - DNA, 201 bp, Homo sapiens
ggagaggttctgggccaggctcaaagagagacatcatgaggtttgatttcttcttgctgtcagcttgggagtagagcattccatgccattcaggactagayggagagaagacggaagatcagaagaacatcaagcctgagactgtcaagttaaataagtctagcctgtatttttctcttgagagacacaggcttcagcttt

SEQ ID NO: 306158 - DNA, 201 bp, Homo sapiens
ggttgactccaggaggtcagggctgcagagagctatggtcccaccactgcattctaacctgggaacagagtgagaccctatctcaaaaaaaaaaaaaaaaagcccggattagataccagctttatccatgtagactagcttgatgcctacttctccagcctaatgtcgttttttcaccttgaaagtttcacaagacattac

SEQ ID NO: 306159 - DNA, 201 bp, Homo sapiens
tgcagcctcaggcttgctatattaactcttctgcacacatactaatcacataaatttgaagataaatactaatgatttgaatgagaaaggaaactcttgtmtaaagggttagatagcaggtagtttattgtgaactctttgtagttctgccagagattctgaaaatgggatgaattgatttcagttcacttaacagttatt

SEQ ID NO: 306160 - DNA, 201 bp, Homo sapiens
ctacaatagctccaaggtatgcctgtaaattaaaatgataggatactgtttctcacattagagtaggaaaattgaaaaagcctgacatgaccaagtgtttytgagaatgttcagtgacaggacttttttttttttttttttttttttgagatggagtctcaccgtgtcgccccaggctggattgcaatggctcaatcttgg

SEQ ID NO: 306161 - DNA, 201 bp, Homo sapiens
aaaagtgttaagtagtttcactttacattatgatgctaaattgaaggtatgtagcaacttctgggaatcaatgagcagtctggagaattttgacctctccygagtcttgtttcctttgggggttaagagagtctggagcctctaagttagagacacaggcacagcgtgtttcattttcattcaccacctgcaatcctctgc

SEQ ID NO: 306162 - DNA, 201 bp, Homo sapiens
caggacatgtagacaaacaatgagctggaatggcctataagaatttgagtttagttgggaagactccccaaattgacccctgtgaaaaaatctgtaactgwtccaatacagttctgatcttgatgcaggtgtttctaaaaccggggtctgctgagccaggacagtcattttcatgggaggaaaatttataagctgagggta

SEQ ID NO: 306163 - DNA, 201 bp, Homo sapiens
aaaggggaataatagagttcttttatttggaacagagcccaggttttagctgcagaggaatgggaaagtcagagaccccaagttgagtcagggccctgccrtttattagcggtgtgatcttgaacaagtctcttcacttcttcgagttctggtgttctcatgtgttaaatgaaggtctggactaagtgatccttccagctc

SEQ ID NO: 306164 - DNA, 201 bp, Homo sapiens
taaagaatatttattaagttccaactatgtgcaagatactttacatattcaacttctctctttatagcaactctagagcgaagatgttattagtcccattraagatgaggaaactaaggcacagagaggttggacttatacaaggtttcacagtgactcagttgggcctgcttcaaaagccaacactttttccaccattca

SEQ ID NO: 306165 - DNA, 201 bp, Homo sapiens
ttctctcataagcagggagagaatccaatagatggggtattttggcttctggaattacacttagctctggtggcttgagcttcttgatttccgtgcgcagrtgctcagttgttttgagaaagcatgaataataaccagtggtacagtgggcagagaacctgtcatggagcttcctttggagaaaagggacaggacatgtag

SEQ ID NO: 306166 - DNA, 201 bp, Homo sapiens
aagctggcttttggatggccttgctctgctcaagtttgcagtaacccacatttctttctttatagctcaaggacatggtgccaaaggagacaatgtctatraatttcacctggagttcttagaccttgtgaaaccagaggtatgttctttcctttctcacttcccttcccattttaggaaatgaataccagtagtttagtg

SEQ ID NO: 306167 - DNA, 201 bp, Homo sapiens
tgccagggacttttttgcaaagacgattcaatggggaaaaaatagtctcttcaacatttggtgctgagacaactggatatccacaagcaaaagaataaagytggacccttacatcataccatatacaaaaaactaactcaaaatggatcagagacctacatgtaaaagctaaaactataaaactcttagaaaaaaacgggc

SEQ ID NO: 306168 - DNA, 201 bp, Homo sapiens
tcattttttatggctgcatagtattccatggtgtatatgtgccacattttcttaataaaaatatggaacgcttcacgaatttgcgtgtcatccttgcacasgggccatactaatcttctctgtatcattccaattttagtatatgtgctgccgaagtgagcacatatttttctttttaaacatttaaaaaaataataatta

SEQ ID NO: 306169 - DNA, 201 bp, Homo sapiens
attcttggattttagggaaggaacagacctatcacttttactgagtttatttgaaaaaactgaggcacaagtcatacatctctaacccctgcccatattcwcactgccatctcacagttttactgtcgtgaaccatatattttgggcacatcctcttctgtctgtctcaccttatagaatgtctgtgttttttcaggtagt

SEQ ID NO: 306170 - DNA, 201 bp, Homo sapiens
gccgaggtgggcggatcacaatgtcaggagtttgagaccagcctgaccaatatggtgtaatcccatctctgctgggaaaaaaaaaaaaaaaaaaaaaaaaattagctgggtgtggtggcgcacacctgtaatcccagctgctcgggaggctgaagcagaagaatcgcttgagcctgggaggtggaggttgcagtgaattga

SEQ ID NO: 306171 - DNA, 201 bp, Homo sapiens
gagcccaggttttagctgcagaggaatgggaaagtcagagaccccaagttgagtcagggccctgccatttattagcggtgtgatcttgaacaagtctcttmacttcttcgagttctggtgttctcatgtgttaaatgaaggtctggactaagtgatccttccagctctgatattctctggttttagtgatggcagaggaat

SEQ ID NO: 306172 - DNA, 201 bp, Homo sapiens
agtccttttatgacacattccatactgtggctgacatgatgtatttctgccagatgctggcagttgtggaaactatcaatgcagcaattggagtcactacrtcaccggtgctgccttctctgatccaggtattgaatagttaagctgaagggtgggtaatggaaggtcccattatttgtctagtgggtatgtgtattagtc

SEQ ID NO: 306173 - DNA, 201 bp, Homo sapiens
gggctcaagttgtcctcccagcttagcctcccaagtagctgggaccgcaggcatgtgccaccacacttggctaatttttttatttttgtagagacggtctrtgttgttcaggctggtcttgaactcctgggctcaagtgatcttcctgcgtaggcctcccgaagtgttgggattataggcatgagctaccttgcccagcca

SEQ ID NO: 306174 - DNA, 201 bp, Homo sapiens
tttttcttattttccacagggaaacttctgcaagtaattagtaggtttattgttggtaaaaaatattgatattctaattctgaaacttttttgggataaarcaaatatataaatgtactaatgttattaggaagcttttcactgtaaaagatataaatcttaaataacaaggtagggagaagccttgtaagagcttgaatt

SEQ ID NO: 306175 - DNA, 201 bp, Homo sapiens
aatttgactcttaggcaggagctgaaaaacctaccttcagtctccttagttagaaatgtatgtggtctcctcccaccttgtgtagatgaaggcagtacttmttaaaaacttgtattaatgaaaagtacaataatcaaactttaaaatttacagccaggcatggtggctcattcctgtaatccccatactttgggaagctga

SEQ ID NO: 306176 - DNA, 201 bp, Homo sapiens
gcctggcgacaaagtgggactctgtctctctaaaaaaaaaaaaaaaagaaagaaaagaaaaaagcaaattaaataaacagaaccaaaaggacctaactgtrtatcaaattgatgacaaaatcttacagataaattaatcaatacacataatatttgaacacagtactctggtactttagtagatcatgtcctttttaaaaa

SEQ ID NO: 306177 - DNA, 201 bp, Homo sapiens
tggtattctgtgagattgtttatgtcccataggagaataacatggcctggctgtgagtgctatgcctgcttctggagtgtcacgggttgccttttttttttctttctcaactgattgctctatgcagggcctgttgaaaccagtggttttacatgtgcagatttgttatttaaaaaaaaaaaaaaagaaagaaaagcagcc

SEQ ID NO: 306178 - DNA, 201 bp, Homo sapiens
tattaaagagttttaagcagagaagtgactttgtaggatttgtgtttcaaaaaagattattctggctgctatgtggattataaaggggcaaaagtgaactmtagaaaaccatttagggaggctgttatagtagtatgggtaagagatgaggtggctcagtttagggttgtggaggtggaaagccatggacacatttgagat

SEQ ID NO: 306179 - DNA, 201 bp, Homo sapiens
ttgaatggggacacagccaaaccatatctgtatgttacattttgctaagaagtctcaattagtaaaaacacctatttgtacaggaatagcattattttacytgaacaagaaagaacatttaaaaccccagggttatttaccaaagtagacttttactatttcaggtctttttcattttttataatatccttatgaaatcac

SEQ ID NO: 306180 - DNA, 201 bp, Homo sapiens
tattgttatttttaaaattatggctgggcatggtggctcatgcctgtaatcccagcagtttggtaggctgaggtggaggattacttgagcccaggagttcrggaccagcctgggcaacatagtgagacttgtctctgcaaaaaatttaaaaaagatattagccaggcatggtgatgtggacctgtagtcccagatacttga

SEQ ID NO: 306181 - DNA, 201 bp, Homo sapiens
tggtcacagagcaatggaagaatagagcctattagcagacctattcatatatgaaaagttaaggtatgacaagaggcgctcttacaaattaatgaggagaraatgacccattcaggaaattgtactgggacaattggtaatccaaatggcaaaaagaaaataagatcctgccttatgccatacacaaaaatcagtttcagg

SEQ ID NO: 306182 - DNA, 201 bp, Homo sapiens
attggtttatttacaaggtgcttgtttgttttgggtgttgtgagcagagaacagagcgtagctgtgtttgagagctgtttgaaagatattgttcctgtccktacctaacagagtctggtggaaagagtgctaactgaacacatgagattgggtccttgttcttattacacttatgctctagtgaccatgattcacttaacc

SEQ ID NO: 306183 - DNA, 201 bp, Homo sapiens
ggaaattctgtctaaaaaaaaaaaaaaagaaagaaagaaaattataattttgtgacctccagtgtaaaattgcatcaggtaaggattaacaatggttgacygtaccattggatgaaagagtgttgtgagggaatggcagattacattattaggtaacttgctaattacaaaaggaaacactacagtggaaagttctggcag

SEQ ID NO: 306184 - DNA, 201 bp, Homo sapiens
tgagttttaaagtgttaagttccagtttggaggcattggctctgtctccctccatcctgacacagggaactgtccagtcatcacatctctattctgtcttkgatgctgcagggctagtgactatgagagaacacggctgatgtgaggagaaatggtggacaataaagacttcagcagtggcatcgtctgtgcttgaggtga

SEQ ID NO: 306185 - DNA, 201 bp, Homo sapiens
ttgtcttccttcttcctccttcctctaggattcttattgctctaaattttgtaaaaaatgattttgctatatacatgttttactgtagggcatctcaaatmccttttggaaataatgacaaacattagaagtaaatgaattactaagtatcaaaggaaaagaaaatcaaataaaatgcctgcctgcctacccaaatgtctc

SEQ ID NO: 306186 - DNA, 201 bp, Homo sapiens
gtggttgggtatctgaataaatcttacctgtagggcagggagactagtataagaacaaaactgtaattgctacaggagtagcagtcactcaatttggccaragggtgtttggtatttcgtgagtggcatagccactatgtatttgtctgtgcttataacaaaattgtgaaatggcctttgtctcattttatgaggatttca

SEQ ID NO: 306187 - DNA, 201 bp, Homo sapiens
acttgtaatctctgacttaagccgtgtcagtgcccaaaggccaccaataacacacccgtagttaaacaagttgggtttattactcattgcattgagagagsatactccatggggaaccctggggtgtttcattaggagggtgttagaactgattataggatttgggtgttggtgattaggggaggggagggttaaggaggt

SEQ ID NO: 306188 - DNA, 201 bp, Homo sapiens
aatgagaattatttttgtcaaactaagactgggagaatgttccagaaagagaaaggcatagacttttagacacttgtaatctctgacttaagccgtgtcartgcccaaaggccaccaataacacacccgtagttaaacaagttgggtttattactcattgcattgagagagcatactccatggggaaccctggggtgtttc

SEQ ID NO: 306189 - DNA, 201 bp, Homo sapiens
aactaccattagtttaaaagcatgatgttaccctcataaaagagtgtttacatgtgttagcaatcctctaacacatgtaaggtagtacagatttacaaagrtgagtcagacccagcttttcaagggcatgctatctagaaggaggcgtatcatatacaaacaaaaagttttgtgtaggagtatgtttattggtagaattgg

SEQ ID NO: 306190 - DNA, 201 bp, Homo sapiens
tggtcttgaactcctggacttaagcaatcctcttgccttggcctcccagatccctgaggttacaggcttgaaccactgtgcctagccttgatgttactatygtgattgtttattatttatttatttatttttgagacagggtctcactctgtcacccaggctggagtgcagtggtgtgatcttggcccaccgcaacctccg

SEQ ID NO: 306191 - DNA, 201 bp, Homo sapiens
ctttcattcaaccaaatgtaaacaaagtttcctaccctaattgaacaatcgctaccattccttccacttttaggctaccatggagcaggacacaaaagttrggtattttgcctgcaatctgattggctgaattttcatcttcattgtcatcagtgatgccagtacccacctcatcaccttctgtgaaaaaaagagaaaaca

SEQ ID NO: 306192 - DNA, 201 bp, Homo sapiens
aaagacatacctgaaaccaggccgtttacaaaagaaagaggtttaattggatttacagttccatgtggcgggggaaggtctcacaattgtggtgcagggcraaaggcacttcttacatggcggtggcaagagagaatgaggaagaaacaaaagcggaaacccctgataagcccgccagatcttgtgagacttatttactaa

SEQ ID NO: 306193 - DNA, 201 bp, Homo sapiens
aaaagccaacactttttccaccattcaacactgctgttccttacttatccaaacttacctacctatattccaagtccagatcctatcttaccccttccatraaattgtttcaagtttttctggcagatagtggtttttgtagacccttttatcccctagcacttagtatcagtaccaaacatttcaacatctaatcagagc

SEQ ID NO: 306194 - DNA, 201 bp, Homo sapiens
tgttccttgtatgtttctctgtgggagtaggagcccaggctggtgaggacctggaccaggtatttgtgtgggagcttaggagcattcaggaaggaaaaagsgttgaagtcatccagatatgcctcatacacctgtctcctgctgggactattgcttttaatagcttactgctttgctttgctttacagctcttacaaactt

SEQ ID NO: 306195 - DNA, 201 bp, Homo sapiens
aatagagttcttttatttggaacagagcccaggttttagctgcagaggaatgggaaagtcagagaccccaagttgagtcagggccctgccatttattagcrgtgtgatcttgaacaagtctcttcacttcttcgagttctggtgttctcatgtgttaaatgaaggtctggactaagtgatccttccagctctgatattctc

SEQ ID NO: 306196 - DNA, 201 bp, Homo sapiens
ttgtctgtgtccccaaaagggggaattagaagatgatacaaacttttacatacacccaattgagtattatacagctataacaagaaagagtaaggtctttrtgagctgataaggatttatttaggtgaaaaaaaaagcaagatgtataagaatgtatattgtatgctaatttttgtatagaaagaagggaaaataagaata

SEQ ID NO: 306197 - DNA, 201 bp, Homo sapiens
tgggtaatggaaggtcccattatttgtctagtgggtatgtgtattagtccattttcatgctgctcataaagacatacctgagactgggcagtttacaaaakaaagaggtttaattggacttacagttccatgtggctgggaaggtctcacgatcatggtggagggcgaaaggcacttcttacgtggtggcggcaagagaga

SEQ ID NO: 306198 - DNA, 201 bp, Homo sapiens
ctggtagagcttactattcatgaccccattggcctgcacccttcctgcttagttaagtaagaaacttgaatctgactggatgtttgttattcctttcttasagttattttcacgaaaggagtaatctagtttgagaaatagttctgttggaatttaccaactgattcacccttaatgtatatttttgcctatagagtcctt

SEQ ID NO: 306199 - DNA, 201 bp, Homo sapiens
tctgccttcattctctctccctggttgggaggttttagattcagagctgtccaagacaacccagcatttccatgtaccctgcagtcaagatgatacacccmccaatttttgtctgctctagatttagagccaaagtaattgtgaaagttaaatttatatccgtgtggctcctttggcattgctttctctattctttttcct

SEQ ID NO: 306200 - DNA, 201 bp, Homo sapiens
ggcatgactgaagcgtgttgaactgtgttgaaatgtgattggacaaaaagggtctgacctaaacccagcaaggcctgtctgtccagattcttctcagcctstctgtgcagtgttccctcctccagagtatgaggcaagaccctctctggaatgagggtcttaggacccacaatcagattagagtcgtgccttgggcagctg

SEQ ID NO: 306201 - DNA, 201 bp, Homo sapiens
caccactcagctcaggttttttgggaattatatacatttacatgaaaattaaagtgataaaagcatatcttgccacttagaccttatatactgtcctaccktaaggaatttatcgtcacagagaataattgctacctgtagcgaatattaggcaggttattagtctacatatgatcagataaggaaagagagtcccagaag

SEQ ID NO: 306202 - DNA, 201 bp, Homo sapiens
gaggccaaggtgcgtggatcacgaggtcaggagattgagaccatcctggctagcacagtgaaaccctgtctctactaaaaatacaaaaaattagccgggcrtggtggtgcatgcctgtagtcggagctgctcaggaggctgaggcaggagaatggcgtgaactcgggaggcggggcttgccgtgagccgagatcacgccac

SEQ ID NO: 306203 - DNA, 201 bp, Homo sapiens
ttttttataatatccttatgaaatcacaaagttataaagagctttaagactagggaaatttgactcttaggcaggagctgaaaaacctaccttcagtctcyttagttagaaatgtatgtggtctcctcccaccttgtgtagatgaaggcagtacttcttaaaaacttgtattaatgaaaagtacaataatcaaactttaaa

SEQ ID NO: 306204 - DNA, 201 bp, Homo sapiens
ttcttgtaagagatgggctaggttgtgtagattgagctttctaataaaaacaactaaaagtgttgaataaaaatgtcttaaaaacatcgaaaagttaacamggtagaaatgaaattgggaactcagataagctgaacgtggaaactgcttttgccttgcgaacatttgctcaactaagtgaacttgaactttggttttgac

SEQ ID NO: 306205 - DNA, 201 bp, Homo sapiens
acttttgggtcagagtatgagtaaatgttctgtgctgtctccctctactgctccacggtggtttaatagaataggaaaaaacaaacaaaatcttttgtagrtggggatcaaagtccccgtctagagagggttcttccagcagtcaataaaaaagtacggaacaggccaggtgctgtggctcacgcctgtaatgccaacact

SEQ ID NO: 306206 - DNA, 201 bp, Homo sapiens
gggtttcaccgtgttagccaggatggcctctatctcctgaccttgtgatccgcccgcctcggcctcccaaagtgctgggattacaggcgtgagccacctgyggccgattctggattttttttaaagtgtaaatgtagtggcttcaggataactgcatcaagagtgccatcaaaattcgcaatttatttcttctttccctga

SEQ ID NO: 306207 - DNA, 201 bp, Homo sapiens
tgcccctatcccgcctgcgccccgcccccgcccggctcgcgccaaggcccgctgttggcgccgccgccatcccggcgcgtcactgcgcaggcgcggcccgsgagcgtggggtatctcgaggtgccgggttgcaggcgctcaggagcgctagggtttgaggcctgctttctgctcgcgccagcagagcactacctgaggcag

SEQ ID NO: 306208 - DNA, 201 bp, Homo sapiens
cagggtttcaccgtgttagccaggatggcctctatctcctgaccttgtgatccgcccgcctcggcctcccaaagtgctgggattacaggcgtgagccaccygcggccgattctggattttttttaaagtgtaaatgtagtggcttcaggataactgcatcaagagtgccatcaaaattcgcaatttatttcttctttccct

SEQ ID NO: 306209 - DNA, 201 bp, Homo sapiens
acctgcaagcgaatgcaagtaaaactgggaaatctgaataacataggtgggttgtgtcaatggcagtatcctgattttgattttatactatagttttgtaraatgctaccattgggggaaactaggaaaagtgtacaagggatctctcagtactatttcttttttaaaaatttttatttttgtgggtacacagtaggtgtg

SEQ ID NO: 306210 - DNA, 201 bp, Homo sapiens
gatggcctctatctcctgaccttgtgatccgcccgcctcggcctcccaaagtgctgggattacaggcgtgagccacctgcggccgattctggattttttttaaagtgtaaatgtagtggcttcaggataactgcatcaagagtgccatcaaaattcgcaatttatttcttctttccctgaatctgggcaggccctctggca

SEQ ID NO: 306211 - DNA, 201 bp, Homo sapiens
agatcatggcttctacattaccatttccaaccaaagaaactatgcctccttgaaaaaatggccaattattccaaatctgtgccagaaaaagaacagtatcytcaaaagctacacggtcatgtcagaatcatacaggacttgatttgaagggatttctactggccaagtttgtgacaatttgaacatcaacaagagtaataa

SEQ ID NO: 306212 - DNA, 201 bp, Homo sapiens
cgctctgtcgcccaggctggagtgtctcagctcattggaagctccgcctcccgggttcacgccattctcctgcctcagcctcctgagtagctgggactacrggcgcctgccaccaggcccggctaatttttttttttttttgtatttttagtagagacagggtttcaccgtgttagccaggatggcctctatctcctgacc

SEQ ID NO: 306213 - DNA, 201 bp, Homo sapiens
gttgggttgttctggcttggaatctcatgaggttgtggtcagatgacagctgtagttggggaacacagaaagctaagcccacagaagaaaaacaaacaccrtgacactgggaaggagctgcctcttgcttgttaaccttgagctggaagtaggagttgggttgtttctcatccactggaaaaagtgttaagtagtttcact

SEQ ID NO: 306214 - DNA, 201 bp, Homo sapiens; identical to SEQ ID NO: 64151

SEQ ID NO: 306215 - DNA, 201 bp, Homo sapiens
gttttgcgatgatataaagtgcttgtccccaaagaaacagttttccatcacggccacagttgctaggaaatcgtttttgactaccagggttatttttttcwtattctacaaagtcagctggcacataatagtactttggtacaacaggatatcctatggagtttaaaaataagtatttaaaatataacaaatctgtattag

SEQ ID NO: 306216 - DNA, 201 bp, Homo sapiens
attcccaatcttctccacttacccaggagttttgcgatgatataaagtgcttgtccccaaagaaacagttttccatcacggccacagttgctaggaaatcrtttttgactaccagggttatttttttcatattctacaaagtcagctggcacataatagtactttggtacaacaggatatcctatggagtttaaaaataag

SEQ ID NO: 306217 - DNA, 201 bp, Homo sapiens
tacttaggcatacataaagcaaaatattattagacttcactgagatacaaactggcctgaattagtgaaagtcatatactatatttttaaagattcactgytatattattttcatgtaaaaatagtaaccacaattagctgtccacaaaatgttgtcaagcagagatccagctgaggctcctttaatgaataaagactttt

SEQ ID NO: 306218 - DNA, 201 bp, Homo sapiens; identical to SEQ ID NO: 64152

SEQ ID NO: 306219 - DNA, 201 bp, Homo sapiens
tgcttaggattgcctctaaaaactcctaaaatataaaatataaaatccaatagcagctgagcttaataaggatctcaaaaattttaccttagaaaaaatayattagcccagttacaattattttggtaattttctatgccaatggtaaaattaaagtggaaaaaaaatgcaaatctgtgtgatatttttccaagaaattgg

SEQ ID NO: 306220 - DNA, 201 bp, Homo sapiens
atcctggactgtctgattcctaagctcataatccacaaactcttcacctttcactacagcacaggaaaaatgtaagaaaagaaaaaaaaaaaaaaaaaaaaggaagagaagctagggagggagaaagtagaagaaaaagatgataatgtcagagaaataatctgtaaccccatggttacaagtttgctgggtgttaataat

SEQ ID NO: 306221 - DNA, 201 bp, Homo sapiens
gaggtgggcggatcacaaggtcaggagtttgagaccagcctggccaacatggtgaaactccatctctactaaaaatacaaaaaaaaaaaaaaaaaaaaaaattagctgggcatggttgtgtgtgcctgtaatcccagctactcaggaggctgaggcaggagaattgcttgaacctgggaggtggaaggtgcagtgagccaa

SEQ ID NO: 306222 - DNA, 201 bp, Homo sapiens
gcagagatcaacaagtagatgaatggtaaagtatgaacagaaagtggaagaaccatttaaacatgtatttgtcccatagtaaatgctttatgtgtatttcsttaccagctaatccttataacataaaaataaaaaattaatgctcatggaagttaagaaaactcagatcacacaggtagtaagtggcagattttacattca

SEQ ID NO: 306223 - DNA, 201 bp, Homo sapiens
aatggtgagaaaacattcacaaatcagatatcttgtaagggatttacacctagaagatataaagaattcataacaacataataataaaaagaaaaaaaaamcccattaaaaaatagccacagtgtctatataggcttttctccaaaggagatatacaaattaccaataagcacatgaaaaaatgcacaacattagtcattt

SEQ ID NO: 306224 - DNA, 201 bp, Homo sapiens
gtaatcccagcactttgggaggctgaggtgggcggatcacaaggtcaggagtttgagaccagcctggccaacatggtgaaactccatctctactaaaaatmcaaaaaaaaaaaaaaaaaaaaaaattagctgggcatggttgtgtgtgcctgtaatcccagctactcaggaggctgaggcaggagaattgcttgaacctgg

SEQ ID NO: 306225 - DNA, 201 bp, Homo sapiens
aaatgccatatgaatggggctctagacttcctattaagtttcaatcaaaagagctcttctctcaagtgttttctatggtggtgttctacatatatattttkttttttctgaaagagtttggtgccaaaaagcaaccatcacactgaagttcaaaagctatgatgtggctcattcttttcattttttacaaaatgaaatttt

SEQ ID NO: 306226 - DNA, 201 bp, Homo sapiens
agatttttaaatgttttgtcttccaaaatatggattaagatgactaaacacatgaatctgttaccccttcttcctgagaatgcattaaaataatagtaagwtatgaagttcattacaacagagagcagtaagaggaggatgggtattatcaccagcagataaaagttttttttataacatttctggaaaatgaaaaatgga

SEQ ID NO: 306227 - DNA, 201 bp, Homo sapiens
aactaatatattctatattctgttgaggatttacttggaactgaacaatgctaatcttataaatgaaaggcatcagtaactttaagtaaatgaggctgggraaatgcaggagctgaaatctcccgaatgtaaatatatacatttaccctgataacaaaggatttaataatacagtactttgtcttttgaaagccaggaagg

SEQ ID NO: 306228 - DNA, 201 bp, Homo sapiens
aaaaatgttctgtgcttcccaaagtaacgaagtttatgaggccttcttcaactagcacctgtgagataaggacccttgtaaaaatctagggcttaatgtggttaagtaacaaagtaggttctttcatctttggaaactcagtgggtctagtcaggccataattaatgaaagatattatagtttcagtgtaatatagacagt

SEQ ID NO: 306229 - DNA, 201 bp, Homo sapiens
tataaagttccacaagggcagggatttttgtcttttattccataatacctagaatagtgcttgacatacaaaaagcatttagtaaatatttgttgaatgttgaaggatgtctgaattctttgctctgtagtactcctaggttttctgaaaaatgttctgtgcttcccaaagtaacgaagtttatgaggccttcttcaacta

SEQ ID NO: 306230 - DNA, 201 bp, Homo sapiens
aatggctaatattctattacaatttcctagtttaaaattttatgtttttaaaaatatcatatatatatttttttcgtgtatacatatatgtaatctaataytacggagacacttagcagtattttcattaagtatttgctctttgcatatttctcactttattctgtcattagttctcccactgttcaggatcattcctat

SEQ ID NO: 306231 - DNA, 201 bp, Homo sapiens
gctggaaggcgaggtctgggacgcgagcgggttcgggtttaccgctgcagtttccgagttgaattcgcttatttcaaagcatgttaactttcagaatggawaaagggtgtgttgcgggggggggggggaggaaataatgttttattctggaaaggattcttaaaatacaggaagccttttaaaaatgcagaagcaagtagc

SEQ ID NO: 306232 - DNA, 201 bp, Homo sapiens
atgtatatagctataccaggtagcttcaattattgtttatattagaggaaaatacaatttgtgcttctaaagagggtgtaatttcttagtgcagaaaaccyttattcacattctacttctaataggaacatttttgcacacttaaagtatatgtgaatagttcagggtttatacatgcctacctaatattctgtctacaaa

SEQ ID NO: 306233 - DNA, 201 bp, Homo sapiens
caggaaaactacaaagaacctcccactgcaacacacacatgccttgtatttaggattagcatggcaaatcctattaaaatgtatttaaaattctttttttwaaaaaatggcattagcatctgaaggttgactgacttctaaaaattatactcccccatctctactaaaaatacaaaaatatgctggaaatggtggcaggcg

SEQ ID NO: 306234 - DNA, 201 bp, Homo sapiens
ttttttttgtttcaagtacatcacatacatttaaaatacataacattcaaaaaccaaagagaacattttcaaaagccttgcaaagtatttcaatgatgacrttaaaaacttttataaacaaattttgcttccaaaaaagttaatgctattccttatcataaatataatagtttatataaatacaatgaatcataacattta

SEQ ID NO: 306235 - DNA, 201 bp, Homo sapiens
aaccaggtagcatctctgactgacctaaaagaaacccttattttttttttaatttattttattttattttttttttgagacggagtctcactttgtcgccsaggctggagtgcagtggcgcgatctcggctcagtgcaagcgccgcctcctgggttcatgcgattctcctgcctcagcctcccgagtagctgggaccacag

SEQ ID NO: 306236 - DNA, 201 bp, Homo sapiens
ctgtcactcatttctttgagatccataattaaacttaaatcctgcagatcttaggggaataagtattaagtctgaacaccagaataatttaccaattcatrttggtagaaacctgggggatatatgtctgaatagacttaagggtgttagaccagggagaaaggaagatgtacctaccagagattctggagtcagtgtatt

SEQ ID NO: 306237 - DNA, 201 bp, Homo sapiens
ccctcaggtaggaaatatttttaagaacctttaaagagtaattctgaaattttcagtcatgctgtgtatccctttataaatcattcagttgaatcatatgkccaatccatctgactttaataccctacattttaattaattggataacacatggcattaatgtgatgtgtgctaggaaattaggggaagaatcaacttctt

SEQ ID NO: 306238 - DNA, 201 bp, Homo sapiens
tataattatttaaaaaatagctctaagccggtgtagtggtacataactctagtccaagctactcaggtggctgagggcaggtcaattgagatgaggaattwgagggtgtagcgtactattacgattggacctatgaatagctagctgctgcactccaacctgggcatcatagcaagaccccatctctaaaaacataaattt

SEQ ID NO: 306239 - DNA, 201 bp, Homo sapiens
gtaatcctcccacctcagcctcctgactaggtgggactgcagtgcgtgccatcatgcccagctaatttttgtatcttttttttgtagagaaggggtttcgytgtgttgcccaggcatgtctcaaactcctgggctctagccatctgcccaccttggccaaagatgtccacatttgagaatatgttaccttatgtggcaaaa

SEQ ID NO: 306240 - DNA, 201 bp, Homo sapiens
atctgtaagtgtttaccactatgcctgaaaatattgtagctccttaatgactgttacttgttttcctttctgaatgagactttacttgggtctttatttttcaaataaggttataaatctgcctgcatctttccagatatacccacactgctttagtttgaggcactcagcaaaggtttctggaataaatagacagaatta

SEQ ID NO: 306241 - DNA, 201 bp, Homo sapiens
aattttatttctatatgctaacattaaggaatccaaaactcaagttacagaacgatttctgtttacagttagcattgaaaaaatctttgaaataaatttarcaaaatagtacaagacttttacaatggaaactataaaatattgttgaaattaaagaagacctaaatatattggaagacattccacgtttaaggatcagaa

SEQ ID NO: 306242 - DNA, 201 bp, Homo sapiens
aggttcatgccattatcctgcctcagtctttggagtagctgggactaccacacccagctatttttttttttttttttttttttagtagagacggggtttcrctgtgttagccgggatggtctcgatctcttgacctcgtgatccgtctgccttggcctcccaaagtgctgggattacaggcgtgagccaccacgcctggcc

SEQ ID NO: 306243 - DNA, 201 bp, Homo sapiens
gagtgacgcagaagacgggtgatttctgcatttccatcggaggtaccaggttcatctcactagggagtgccagacagtgggcacaggacagtgggtgcagygcaccgtgcgcgagccgaagcagggcgaggcattgcctcactcgggaagcacaaggggtcagggagttccctttcctagtcaaagaaaggggtgacagac

SEQ ID NO: 306244 - DNA, 201 bp, Homo sapiens
agctttgttctttttgctcaagattgctttggctacttggaatgtttttgtggtgccatatgaatttttttttctatttctctaaaaatgtcattttttttgttgctaagtatgtagaaatgcaattgatttttgcatgtttatcttgttccctgctaacttgatgaactaatttattagttctaatagtttttcagtaga

SEQ ID NO: 306245 - DNA, 201 bp, Homo sapiens
tttttaaggccttgcctgatgctaccctgtctgtgaggtttttgttaattattcatctttaagttatcgctatctcttttgaactataacatatttttctktatttttatctcatcattttccataatattaatagtaataatactttttgtgctttaaatcatacattatacactgctttatttgctttacatatattat

SEQ ID NO: 306246 - DNA, 201 bp, Homo sapiens
gaacattttccaatgcctttcaatactccttggttatcctgccttttctttggcacctttactatgttttcatagtatatgggaaagtttttaaaagatawtttttttaatacatcaagagactttagatgaaataaaattcaattgtggggaattagtctgtcacatcttttttatgaggatatagtatgactaggaaat

SEQ ID NO: 306247 - DNA, 201 bp, Homo sapiens
ttcttagtgcagaaaacccttattcacattctacttctaataggaacatttttgcacacttaaagtatatgtgaatagttcagggtttatacatgcctacytaatattctgtctacaaaataattctattttgacattactagaaaagggtatttttaacttagcagatactatcataacaagaatgtttatttatgcttg

SEQ ID NO: 306248 - DNA, 201 bp, Homo sapiens
tcatagccttccaaggctgtacttaattttgccaggtatctccaattatgtgaaaaaaggcagtgtctctggttaaaggaggtaggcaagaagtgagagasagtcagttaagagggactcttgaaaatcctatagtttgtaatgaccttgatgacaaacttctgatacagttatttcagagtaatttgtaaggatgcagct

SEQ ID NO: 306249 - DNA, 201 bp, Homo sapiens
tttagctgtcacttaaaatattaagcattacataaggttaaaaaaatggaatagtggcaagagtatgacccagaaagcatgagtgaggctgaaaagaataygaggatcctttcgatggtaattttggaagatcctatttgaaatagtgaacttaattatgtagaatttcatttccatctctatggctttagtcactgttac

SEQ ID NO: 306250 - DNA, 201 bp, Homo sapiens
catgttgataactatgcagcacctccccaggaatggtaagagggagataagagatacggaaacagaaagaagagaaactgtatgtaaaaaagtgactcttycaaccctctttttcactccagtcagtattagtcactttactttactgcttcaatgtaacactttgttccacttttcagaaaaagtctcctgaagagcttc

SEQ ID NO: 306251 - DNA, 201 bp, Homo sapiens
tggctggtggttcaaatttggagaggagatagcacctctctcccccgcaccactagtgccaagattgagaagacaaattcctgtgctgttgctttccttgkaataggtttatttcccctttactcttatacgttttttgtcacagtcttcttatgagggttcctgttagactattggatattttttgttgttttcagttat

SEQ ID NO: 306252 - DNA, 201 bp, Homo sapiens
cagtattagtcactttactttactgcttcaatgtaacactttgttccacttttcagaaaaagtctcctgaagagcttctaccagttagatagtaatcgttmaaagcagacaaaaataaatatggataggaatttttaccaatatatgggaaaatatttttctttacgggaaaatacttacatacacattactaaataccag

SEQ ID NO: 306253 - DNA, 201 bp, Homo sapiens; identical to SEQ ID NO: 64167

SEQ ID NO: 306254 - DNA, 201 bp, Homo sapiens
ttgtttttgttgtaaaaatatgcaccatctacaaataactttaatacctgaaaactcatttcttcagcagcattactgggcattctgctaggagctataarggctatgaaaaagaatcacataatgtcattattcttaggagtttaatgtaagataaaaagtgaagattatattttaaataataaaacaggcagtgcaatt

SEQ ID NO: 306255 - DNA, 201 bp, Homo sapiens
tctgtttctgtttttgctgagaatgatggtttccagcttcatctatgttcctgcaaaggacatgaactcatccttttttataactgcatagtattccatgrtatatatgtgccacattttctttatccagtctatcattaatgggcatttgggttagttccaagtctttgaaaagcattcctatttctccacatcctctcc

SEQ ID NO: 306256 - DNA, 201 bp, Homo sapiens
gccagagagaaaggttgggttactcacaaagggaagcccatcagactaccagtggatctctctgcagaaaccctacaagccagaagagagtgggggccaayattcaacattcttaaggaaaagaattctcaacccagaatttcatgtccagccaaattaagcttcataagcgaaagagaaataaaatcctttacacgcaag

SEQ ID NO: 306257 - DNA, 201 bp, Homo sapiens
atcctcacctcaatcgtggtagctctactttatttgtttttcatattaggttttctgattttgaatcattagagagttctgctgttaaaaaaaaaaaaaargggggtggaggtagtgttattgaaaagcacttgcaaaattcagctctgtacatttgagatataactacaacaaaaatgtttctattatgcttttgcccct

SEQ ID NO: 306258 - DNA, 201 bp, Homo sapiens
tgctaaaaaattcagagatctgtcatatcattgaagtatactagggatccagtggtctaggacatgttgagatatttcctccgagttgagggataactgakacatttgaaattctctacataaagggctctttggattctgaaggcaaattcatgacttctgagtactattgctccaaaatactactgtaaggctgtatgt

SEQ ID NO: 306259 - DNA, 201 bp, Homo sapiens
gggcatgagactccccttccccactgacagacactgggtggccagtgtgcctggcaagggggatgtcctcacaaatgcctagcccagaaagtgatctttgwtcctgtcacctggagactcctttctctcccctaaaggtaccagatgacccaacctgaggaagctctctttccccctactgtaaggcaccagtgtggactg

SEQ ID NO: 306260 - DNA, 201 bp, Homo sapiens
ggtaacaactaattaatttctgcttcttaccctcataggaaaaatattgaacttctatgtagcacttacacttagggagagacatcttgatcctgattgcractgggatggaaaactgattttattactattctaagaaaagtttttatttgtatttttattaaaaatgaagttatgttcaaatgaaagagagtatgtatg

SEQ ID NO: 306261 - DNA, 201 bp, Homo sapiens
gggtgtacctgaaagtgacggggagaatggaaccaagttggaaaacactcttcaggatattatccaggagaacttccccaacctagcaaggaaggccaacrttcaaattcaggaaatacagagaacaccacaaagatactcctcgagaagagcaactccaaaacacataattgtcagattcaccaaagttgaaataaagga

SEQ ID NO: 306262 - DNA, 201 bp, Homo sapiens
tgcgtgacacatgcacaagcttcagtagccgattcgatcaagtagaagaaagggtgtcagtgattgaagatcagatgaatgaaatgaagcgagaagagaartttagagaaaaaagaaagaaatgagcaaagcctccaagaaatatgggactatatgaaaagaccaaatctacgtctgatgggtgtacctgaaagtgacggg

SEQ ID NO: 306263 - DNA, 201 bp, Homo sapiens
gatgattggtaataacaaacttctgtgagctgaaggagaatgttcgaacccatcgcaaagaagccaaaaaccttgaaaaaagattagacgaatggctaackaaaataaacagtgtatagaagactttaaatgacctgttggagctgaacaccatggcatgagaactgcgtgacacatgcacaagcttcagtagccgattcg

SEQ ID NO: 306264 - DNA, 201 bp, Homo sapiens
gagattgctcttataagcaagcagcaggactactttttatcagtgtttctccaccgtattttgattacaactccgaatccagggatatatatatatatatwtttatattgtatatacatatgtaaaatatatgtacatatattaaatattatatatacatatattatatatatgtttccataatcatctcccccttcatgt

SEQ ID NO: 306265 - DNA, 201 bp, Homo sapiens
tccttctttcccccattcttttgttttcctcactgaggtagccactatcccgaatattatgataattagtcctttgtttttttaaaaaaatttttttttttgtttcaagtacatcacatacatttaaaatacataacattcaaaaaccaaagagaacattttcaaaagccttgcaaagtatttcaatgatgacattaaaaa

SEQ ID NO: 306266 - DNA, 201 bp, Homo sapiens
tatcatgtttccttctttcccccattcttttgttttcctcactgaggtagccactatcccgaatattatgataattagtcctttgtttttttaaaaaaatwtttttttttgtttcaagtacatcacatacatttaaaatacataacattcaaaaaccaaagagaacattttcaaaagccttgcaaagtatttcaatgatga

SEQ ID NO: 306267 - DNA, 201 bp, Homo sapiens
ctatcatgtttccttctttcccccattcttttgttttcctcactgaggtagccactatcccgaatattatgataattagtcctttgtttttttaaaaaaawttttttttttgtttcaagtacatcacatacatttaaaatacataacattcaaaaaccaaagagaacattttcaaaagccttgcaaagtatttcaatgatg

SEQ ID NO: 306268 - DNA, 201 bp, Homo sapiens
ggtgttgaacctctcatttcctgagcctatgcctgataccaggtttctcatcattccagctgcttttttgtctgttactattgttctgcccttatttcccsgcacaatgctgctatcctctagtggagtggttgcttacaaaattgatttacttagagacttggtgttatctttgcatcctgttaccttattctacagata

SEQ ID NO: 306269 - DNA, 201 bp, Homo sapiens
ttgtaatgtacaatattgagggagatggtctgcaatattgtaaaaatataatattgaaatattgtaatacaaaatgctacagtagagagatctaaagagarcaagcagagaaaaaagaagcattgtacatagtaagatttttagagacctttaagagtccagttaaaatagggcatacattccttctcatattagcagcct

SEQ ID NO: 306270 - DNA, 201 bp, Homo sapiens; identical to SEQ ID NO: 64157

SEQ ID NO: 306271 - DNA, 201 bp, Homo sapiens
tgccattctcctgtctcagcatccctagtagctgggactacaggcgcccgccaccatggctggctaattttttgtatttttattagagacggtgtttcacygtgttagccaggatggtctggatctcctgaccttgtgatccacctgcctcggccttccaaagtgctgggattacaggcgtgagccaccacgcctggccat

SEQ ID NO: 306272 - DNA, 201 bp, Homo sapiens
tccaatacaggaagtgtctttgttgcctgagcataaggtatctaggcaaaatagcacaggaagatacaacttaatggtatcgtgaaataatttagattgarctccattatgattcattttatctaaatatttttaacaattatttttcatgtaaagctgtacatatagggcacattttactcctatatattactatatata

SEQ ID NO: 306273 - DNA, 201 bp, Homo sapiens
aggaaatgccaatataagactatagtattgtagtggtagttttgacagcagaaactagattctgctgtgacatcctgaaaagtgttcagaaagcttcctaractttctatctgaaagataggcaacgagatttatctatcagctcttgttctttattggtcaaagattccctccatcccttaacctgggaaagttaactca

SEQ ID NO: 306274 - DNA, 201 bp, Homo sapiens
actggtcgtttttataggatgaaagagacttacataatagagattctcaacctaaaaataaattgtgagtattgcaatataatattgttgttaaagttatrgattttgtagttagagaaaccacagtatgattctggctctgctactgccttgccctgtaagtctgggcaagttgcttagacttgctcagccacagtttat

SEQ ID NO: 306275 - DNA, 201 bp, Homo sapiens
tgtataagaatgcttgtgatttttgtacattgattttgtatcctgagactttgctgaagttgcttatcagcttaaggagattttgggctgagacgatgggrttttctagatatacaatcatgtcgtctgcaaacagggacaatccttctcctgcctaattgtcctggccagaacttccaacactatgttgaataggagtgg

SEQ ID NO: 306276 - DNA, 201 bp, Homo sapiens
tagcaagggggaattgatttggaaccactggcaatcagtgaccagggagaagcattctccttccctcctgggcatgagactccccttccccactgacagayactgggtggccagtgtgcctggcaagggggatgtcctcacaaatgcctagcccagaaagtgatctttgatcctgtcacctggagactcctttctctcccc

SEQ ID NO: 306277 - DNA, 201 bp, Homo sapiens
agaatcagctgggaatgaatcggctgccaagctcattcaggttgtcctcaggttgttcttcatttccgttggttgtggattcttgatggctctgggttctygatggctattggctgggggccacccacagttcgtagaggctgcccatagttttttgtcacatggtcttcctcagtatggctgcttacttcatggagctag

SEQ ID NO: 306278 - DNA, 201 bp, Homo sapiens
tgatcctttagaggagaagaggcgttgtgttttttggaattttcagcctttttgtgctggtttctccccatctttgtggatttatctacctttggtctttratgttggtgacctctggatggggtctttgagtggacatgcgatttctttctgcttgttagttttccttctgacagtcaggcccctatgctgcaggtctgc

SEQ ID NO: 306279 - DNA, 201 bp, Homo sapiens
agcgacgcagaagacaggtgatttctgcatttccatctgaggtaccgggttcatctcactagggagtgccagacagtgggcgcaggccagtgggtgtgcgmaccgtgcgcgagccgaagcagggcgaggcattgcctcacctgggaagcgcaaggggtcagggagttccctttccgagtcaaagaaaggggtgacggacgc

SEQ ID NO: 306280 - DNA, 201 bp, Homo sapiens
ggagatctgagaacgggcagactgcctcctcaagtgggtccctgacccctgacccccgagcagcctaactgggaggcacccccaagtaggggcagactgayacttcacacggccgggtactcctctgagacaaaacttccagaggaacgatcagacagcaacattcacggttcacaaaaatccgctgttctgcagccaccg

SEQ ID NO: 306281 - DNA, 201 bp, Homo sapiens
gagcgacgcagaagacaggtgatttctgcatttccatctgaggtaccgggttcatctcactagggagtgccagacagtgggcgcaggccagtgggtgtgcrcaccgtgcgcgagccgaagcagggcgaggcattgcctcacctgggaagcgcaaggggtcagggagttccctttccgagtcaaagaaaggggtgacggacg

SEQ ID NO: 306282 - DNA, 201 bp, Homo sapiens
caacaatgatagactggattaagaaaatgtggcacatagtgggaggagccaagatggccgaataggaacagctccggtctacagctcccagcgtgagcgaygcagaagacaggtgatttctgcatttccatctgaggtaccgggttcatctcactagggagtgccagacagtgggcgcaggccagtgggtgtgcgcaccgt

SEQ ID NO: 306283 - DNA, 201 bp, Homo sapiens
cacaactctgcacatgttaggtcagcctccacaatcatgtgaactacttccttataataaaaaatctctacacacacacacacacacacacacacacacactcacacacatactattgtttctgtttccctggagaactgtaattaataaagggtgacttggaaaggcatcacagaggaggtggaatttaagccagaggct

SEQ ID NO: 306284 - DNA, 201 bp, Homo sapiens
aaattaaaaaaaaaaagaaaaaggatctattaccccttttattttctttgtttaaaacaaaacagaaaaaaacatcagttgttacacactaacatcttcaragcacatcgtttgtacaagagatagactaagaacaaaaatgtgtttacagagatccaaacataagtgagtgagagcgcctctcacatggctctcaggacg

SEQ ID NO: 306285 - DNA, 201 bp, Homo sapiens
ccacaactctgcacatgttaggtcagcctccacaatcatgtgaactacttccttataataaaaaatctctacacacacacacacacacacacacacacacactcacacacatactattgtttctgtttccctggagaactgtaattaataaagggtgacttggaaaggcatcacagaggaggtggaatttaagccagaggc

SEQ ID NO: 306286 - DNA, 201 bp, Homo sapiens
cccacaactctgcacatgttaggtcagcctccacaatcatgtgaactacttccttataataaaaaatctctacacacacacacacacacacacacacacacactcacacacatactattgtttctgtttccctggagaactgtaattaataaagggtgacttggaaaggcatcacagaggaggtggaatttaagccagagg

SEQ ID NO: 306287 - DNA, 201 bp, Homo sapiens
tcccacaactctgcacatgttaggtcagcctccacaatcatgtgaactacttccttataataaaaaatctctacacacacacacacacacacacacacacacactcacacacatactattgtttctgtttccctggagaactgtaattaataaagggtgacttggaaaggcatcacagaggaggtggaatttaagccagag

SEQ ID NO: 306288 - DNA, 201 bp, Homo sapiens
aaatataaaattcctttaaggtcacaatttgcatgaaagaggcaagagttctcaacaaatagatactgtaattgcaatagctttaaacattaggacttggwactaaatatgtgttgtgttttgctttgttttgttttttgagacggagtcctgctctgtcacccaggctggagtgcagtggggcattctcggcttactgca

SEQ ID NO: 306289 - DNA, 201 bp, Homo sapiens
cagcttttagatagttgctattgtatgtgctagtaaaatttttgtttttatctctttgtgtggtattatcacatgcacagatttatattgtttgcattgaagtcctattcttgatttaggttcaacatttattccgagctatttatgttaccttatttttatcaatatcttaggctttaaaaaccaattttgagccattta

SEQ ID NO: 306290 - DNA, 201 bp, Homo sapiens
ttgtgttcctccaaaaattcatgtgtcgaaatcctataccctgatatgacggtattgggaggtaaggcctttgggaggtaattaggtcatgaaggtggatycttcatgaatgggattagttcccttataaaagaaccccagaaaactctctttcccaccctctttcccaccgtgtgaggatacaatgtgaaatcggtagtc

SEQ ID NO: 306291 - DNA, 201 bp, Homo sapiens
agaactcgctctgttgcccaggccagtcccaaacttttggcttcaagtgatcctcccgccttggcctcccaaagcactaggattataggtatgagctgttrtgcctggccaagatctctttttacaaaaaaacaaacaaaactctacatattgagcttatagcatgtaattatcatataatcagcacccagatccagaaac

SEQ ID NO: 306292 - DNA, 201 bp, Homo sapiens
ggagcatcacaggttgacttcagactgctgtgctggcagcaagaatttcaagccaatggatcccagcttgttgggctccatcagggtgggatccactgagmtagaccactgggctccctggcttcaactccctttccagggtagtgaacagttttgtcttgctggtgttccatgtgccactggggtatgaaaagaaactcc

SEQ ID NO: 306293 - DNA, 201 bp, Homo sapiens
ttgaaacttgaagactgactctctgaaataagaaagtaagacaaaaattattttaaaaagaatgaaaaggaatgagcaaaacctctagaaatatgggattrtgtaaagaggccaaatctacacatcattgacatccctgacaggagaaagcaaacaacctggaaaacatatttcaggatatcatccatgaaaacttcccca

SEQ ID NO: 306294 - DNA, 201 bp, Homo sapiens
tgtcttttattccataatacctagaatagtgcttgacatacaaaaagcatttagtaaatatttgttgaatgttgaaggatgtctgaattctttgctctgtwgtactcctaggttttctgaaaaatgttctgtgcttcccaaagtaacgaagtttatgaggccttcttcaactagcacctgtgagataaggacccttgtaaa

SEQ ID NO: 306295 - DNA, 201 bp, Homo sapiens
gtgagataaggacccttgtaaaaatctagggcttaatgtggttaagtaacaaagtaggttctttcatctttggaaactcagtgggtctagtcaggccatarttaatgaaagatattatagtttcagtgtaatatagacagtagcatataataccaccagctgggtcaagcattcttcttcattctcatggtaaggaatgtg

SEQ ID NO: 306296 - DNA, 201 bp, Homo sapiens
atggcattaatcagaagcttggaaagaaaaggctaagatggaaagaataactgtcacagggagaatctagggaatagagaagcatctaattattttttttwaaatgtattctcagaatttgaaaaatattgcatccataaagtaagaacaggaaactataataaaggaacatcagaaaacaagttaggctcttagaaacta

SEQ ID NO: 306297 - DNA, 201 bp, Homo sapiens
aatgtaaaagataaactttcaatatgattatgttaaggtgaaatataatactgttagtactggtttcattacttttgcccagaacaagatttttaatatartagtattttttaatttttttacttataagtcactataactgaaatattgcttgggttacaaataatacagtaacttgttctaattctatcatcctaaagc

SEQ ID NO: 306298 - DNA, 201 bp, Homo sapiens
ttataaattacctagtctcaggtagtatctctatagcagtgtaaacacagaaaagaacaaaccgagaacagtgtaaaagaatcctgagataacagctgttygtcaagactatttctttaccctataaaaaaacaacaaaactagctgctttgtgttctgtggcaccttatttatctgctatctctctactgaatttttttt

SEQ ID NO: 306299 - DNA, 201 bp, Homo sapiens
aaggtatagagaatatgtgcatgttactaaaaacaatgaaaacaatgtatttataatggcaatatagttttgttcttaaatttcaaaatttaggcttttarggaaaagaaacacctatttcttttgaaaaattatcctggtaataaatgccaatataaggatatggttttttttcctcttaccctttgatacctgtaacta

SEQ ID NO: 306300 - DNA, 201 bp, Homo sapiens
gggctacatgactgaatgtgtgtgtactctgtattgtctgagtacattctatgtgtaaactttaagatatgtttatagacatatttgttattgacatttaktcttgtatttattttatttctcagaagtattttatttgttcatttttgataactagcactcagccattcactttttatttctaattttggtgtctttgtg

SEQ ID NO: 306301 - DNA, 201 bp, Homo sapiens
gtgagctgagatcgcgccactgcactctagcctgggcaacagaacgagagtccatctcaaaaaaaaaaaaaaaagtgccttcttagtcatgagataatggstatgacctagatttttgttaatgtttcctcctgtttcttatgttttaaaaggggacatttgttcagattagtcagacttatcctttgtatgatctaagtc

SEQ ID NO: 306302 - DNA, 201 bp, Homo sapiens
gtacttttcaagttcatgtgacttaagtataactttactaaacaagctggttttaaaatgattggtaaaataaaaatagaaatgacttcaaaaaaaaaaaaggaatggacattttttactgttgagtcttccaatccatggacatgatatatctctttatttacttaggtcttctttgattttattcatcagtgtttcgta

SEQ ID NO: 306303 - DNA, 201 bp, Homo sapiens
ggcatagagtggcaaactggattttaaaaaaagtaagacccaatgatacactgtcttcaagagacccatttcacaggcagcaacacccataggctcaaaayaaagggatggaggaaaatctaccaagcaagtggaaatcaggaaaaagcagaggttgcaatcctaatttcagacaaaacagactttaaaccaacaaagatc

SEQ ID NO: 306304 - DNA, 201 bp, Homo sapiens
atatctgagatggagtaatttataagaaaagaagtttaattggcttacagttctgcaggctgtacaggaagcatagtgctggcatctgcttctggggaggyctcaggaagttttactcatggcggaaggtgaagtgggagcaggcacatcatatggccagagcaggagcaagagagtctggtgcgggaggtgccggacttt

SEQ ID NO: 306305 - DNA, 201 bp, Homo sapiens
ctttttatagctattacaaatggcacagttaaatacgtaagtgcaataaggtaagctagatttgagatggaattaaaaaaatactttcccatactttacasacagaatgtagtttgtatacagtttaggaaaacctactaagaagggaaaatcacaatgttttattaggggtgaaacacaaatcagaaaggcttagggaaa

SEQ ID NO: 306306 - DNA, 201 bp, Homo sapiens
cagcacactggtcttggcaaaagataacacaaaagtaaacactactatgtcaaaaaggatgaaaagccagcgatccaaccagtagaattgttttggaagcctgtttgtctcggactgagatcacacattaagccttggctgttgccttccattcttgcacaagcctccctgctcctggggaccctctgtaagagtgagcgt

SEQ ID NO: 306307 - DNA, 201 bp, Homo sapiens
gtcttactatattggctaggctgctcttgaactcctggcctcaagcaattctcttgtcttgggctcccaaagcactgagattataggagtgagccaccacrcccaatcctgttttcttttttgaggtgcgttaaatatttacattttacctggagtttggaaaagtagtttatttggacgtacaagcttgttttttttttt

SEQ ID NO: 306308 - DNA, 201 bp, Homo sapiens
ttgttttggaagcctgtttgtctcggactgagatcacacattaagccttggctgttgccttccattcttgcacaagcctccctgctcctggggaccctctrtaagagtgagcgtcctaatgaaaatagatggcacactcaaatggctaaagtagggagagtttatgaaggaatgatttataaaagagtgggaagtgttaag

SEQ ID NO: 306309 - DNA, 201 bp, Homo sapiens
acaagctggcttaataaccaggtaacagcacaatgacaggaacaaatccacacacatctatactaaccttgagtgtaaatgggctaaatgccccatttaaraggcatagagtggcaaactggattttaaaaaaagtaagacccaatgatacactgtcttcaagagacccatttcacaggcagcaacacccataggctcaaa

SEQ ID NO: 306310 - DNA, 201 bp, Homo sapiens
tgcagcacagcaacatggcacatatatacatatgtaacaaacttgcacgttgtgcacatgtaccctaaaacttaaagtataataataataataataataawaaaagaatttttgtctgttttgttcactgccatgtccaaaataatgcctggtaagagctcaaatagctattgaatgggtaaatatcacactgactttgct

SEQ ID NO: 306311 - DNA, 201 bp, Homo sapiens
ttaaaagagatcttgaaaagagcactaaatatgaaaggaagaaccattaccaggcaatacaaaaaaacacagttaagtacacagacccagtgatgtaaagstaccacacaagctggcttaataaccaggtaacagcacaatgacaggaacaaatccacacacatctatactaaccttgagtgtaaatgggctaaatgcccc

SEQ ID NO: 306312 - DNA, 201 bp, Homo sapiens
ttgggcaggctggtcttggactcctgacctcaagtgatcctcctgccttggcctcccaaagtgttgggattacaggcatgagccactgcgcctggccaagrtgtgtttttaaagtagaagttaattctgtggattgatttaaccaattttctttgcaagcaattgtataggagaattaaatacaaatcctcctactgatgt

SEQ ID NO: 306313 - DNA, 201 bp, Homo sapiens
aaaaaaattttaagcatgaagcaaagagtctagttttaagaacttagctgtgaatggatgatatcctacccatttaatagagttctccaaatgaacagaargtatacaatgaaaggaaggtcccttagacatttgaagtttttctgcagcacaatcctgtctgtctgctttattcaagaatttgtagtcattttcagaatt

SEQ ID NO: 306314 - DNA, 201 bp, Homo sapiens
taaaaccataaaaaccctagaagaaaacctaggcattaccgttcaggacataggcatgggcaaggacttcatgtctaaaacaccaaaagcaatggcaacaraagccaaaattgacaaatgggatctaattaaactcaagagcttctgcacagcaaaagaaactaccatcagagtgaacaggcaacctacaaaatgggagaa

SEQ ID NO: 306315 - DNA, 201 bp, Homo sapiens
gtctacagcttccagcgtgagcgacgcaaaagacggttgatttctgcatttccatctgaggtactgggttcatctcactagggagtgccagacagtgggcrtaggacagtgggtgcagcgcaccgtgcacgagccgaagcagggcgaggcattgcctcactcgggaagcgcaaggggtcagggagttccctttcctagtca

SEQ ID NO: 306316 - DNA, 201 bp, Homo sapiens
aaatgggaaccaatggaaaactttcaatctggaagaataacacgattagatttacattttatgaggatcaaatagcatacttcagttgtcccttgttataygtgggggattggttctaggacctcctcagctataaaaatcttcacatattcaattcccacagtcaaccctatggaacctgcagatacaaaaagttggccc

SEQ ID NO: 306317 - DNA, 201 bp, Homo sapiens
tcaaggggagggctaagagtttgactttaaatcttgtttatatatacacagcagctgtctacacacacacacacacacacacacacacacacacacacacmgagctagtgcaactgctgaaagagtagatattgtgtgaatggcttccaaacaaatagaggtgacaaaagaattgagggaaaaaaggagaccaaataatta

SEQ ID NO: 306318 - DNA, 201 bp, Homo sapiens
atcactgtagtggaccaggaagcatgggaaaagatggccttatcaaattttaaggattctgaaagtcagggattatacctaggaaccaaagggaagctcayagtagtaggccattgcctctggagggaaaacatgcaaagcggcactggtgcccacgtaacgtcagagacgtctgatactcttaagactggaccccaaaga

SEQ ID NO: 306319 - DNA, 201 bp, Homo sapiens
ttaaaattatttcatagttgtatagtcttattcactttaatttttaaataaaattcatttaagtgcttaagtcaccttttataggtaaaagattatctaayacaatactttgaatgtgtattccttaaagacttctattttgaagtctctcaaaaaaatgccatatgaatggggctctagacttcctattaagtttcaatc

SEQ ID NO: 306320 - DNA, 201 bp, Homo sapiens
tatagaattaatacttattaagcaaacctggaagccatgcctgaggttgaatcctggcttctcttccttatctccaatacgaccttggttgggtaagttasttaacctctctgtgccagtttcctcattgataaaataggaatgatggtacctacctcataaggtttctgtgaggattaaatgaactaatatatgtagact

SEQ ID NO: 306321 - DNA, 201 bp, Homo sapiens
attataatttcatatatatcactaaaaacaatatgttatctcagagagtttcacttaatctaagtgtcattattcaatatcaaagcaggaaaatgtcatcygatatcctcccacttatgaaagttttaatcatccctcatcagaactaaacttctttctcattctggttatgctattaaactttcttcagatattgatgta

SEQ ID NO: 306322 - DNA, 201 bp, Homo sapiens
ccaaaatcagaaacccctctggtctcaagcattttgaatagggatattcaacctttaataactgcatatatccatttaacttagatttggaactttgtttstcagatacagattcagcagtcattacattgagtaaccactatctaaatgttcagattcaacagtcatgttttgagtaacttctatatgccgggtactggg

SEQ ID NO: 306323 - DNA, 201 bp, Homo sapiens
gttgatataaaataatatatatgcctatatttttaaaaataaacatttttattgttatggtaacatttcctaaaatattattgcttgttatattttctttygacacataaacttatactattgtgactttatttcacatatttttcacatagaaacaaaccagttattagaaacaaaccagttatttcaaatgagtttaaa

SEQ ID NO: 306324 - DNA, 201 bp, Homo sapiens; identical to SEQ ID NO: 64156

SEQ ID NO: 306325 - DNA, 201 bp, Homo sapiens
accctgattatccccgtagagaccttatttcctaataagattacattctgaggtactgaggattaggactcaacatatttttttggggcgatacaattcarcccatgtaggtagaaacagaaaactaaagctacgtaaaattgaattgtttttcaaaatggatgctgaatataaattgatacatttatatttttgctatca

SEQ ID NO: 306326 - DNA, 201 bp, Homo sapiens
atttcttggaggctttgttcatttctttttattcttttttctctaatcttcttgctttatttcatcaagttgatcttcaatctctgatatcctttcttccrcttgatcaattaggctattgatacttgtgtatgcctcacgaagttctcgtgctgtgtttttcagctccatcaggtcatttattttcttctctacactgat

SEQ ID NO: 306327 - DNA, 201 bp, Homo sapiens
agatatgtttgagacatccaagtttggaatgttgagaaagatgtacaggttgaacatccctaatctgaaaatccaaaatcagaaatgctccaaaatctgamgctttttgaatgcctataagatgcttgaaggtcatgctcaaaggaaatgctcatttggagcatttcagattttggatatttggattagcgttgctcagcc

SEQ ID NO: 306328 - DNA, 201 bp, Homo sapiens
gaatcaatagtgccttcatcattaggtgggagatagttggtcgagttttgtgccttagcatagttatctgggtgatttacacatagcggcttagtgcaaayagtacaaagatcagaagtcatttagagagtggggctttcagttaagaatataggctctggatttgcaccatctgtgtttaatttctgactccagcacttt

SEQ ID NO: 306329 - DNA, 201 bp, Homo sapiens
gtgacatcttccattctgatttttttgaaagaattaattgtaggcaagttttaaataaattattaaagacgtatattaatacatggttaacattccagaawacaaatcacaaaaacattatactcagctacaaatagaaattctgatttttaaagtaaactttattttaattgacatttaggttatgtataccttatttca

SEQ ID NO: 306330 - DNA, 201 bp, Homo sapiens
gttgaatttcaggaaatagatgttttattgatcatatatgatgtgtcagacactgtgctggatgctttcacatatttagtatttaattcctgtggcaagcmtgagacatagtatttctgacctttttgtgggggacacaaatgtaagtaaccagaatttgtaactgttctgtgtacaaaactgttttgtgtgcaaacatgg

SEQ ID NO: 306331 - DNA, 201 bp, Homo sapiens
ttgctttgggatgcttattcagtgaccatagctaaactgataaactacttagtcttcaggtattaaggaatgatagtgtgtggaagtggtaagataacatrtttgtgttttgtcaggagtctaggatccctgtttttcccctttgtttccctattcaccatccattggatcataggaaaaattaactgttaatgtaagtga

SEQ ID NO: 306332 - DNA, 201 bp, Homo sapiens; identical to SEQ ID NO: 64160

SEQ ID NO: 306333 - DNA, 201 bp, Homo sapiens; identical to SEQ ID NO: 64161

SEQ ID NO: 306334 - DNA, 201 bp, Homo sapiens
aacatttgattttataattagatttataatatttgatttaaatgctatatatgtatcagttcagttcttaactaaggtttttttttttttttggcaaagcwtttagagatttgaagcccaaatctaggtgctgttaatggtgttctgctttggtgggttaatggaaagaagcactgagtttgtagtcttatctgccaagaa

SEQ ID NO: 306335 - DNA, 201 bp, Homo sapiens
aggatttattgctaggctctctgttctatgtcataggtctatacgtctgtgtttctgtcagtaccacactgttttgattattgtatcttttagtaagtttygaaatcatgaagtttgagacctcaaactttgttctttttcaagattattttggctatttgagtgtcctttgagattccaatatgaattttaggatgaatt

SEQ ID NO: 306336 - DNA, 201 bp, Homo sapiens
gagaaagcttgccattattaagtacgaaaatcaggatttgaacctagttttctgaaactcaactccaatgattactcttaagaatttttttttttttttttgagacagagtcttactctgtcatccaggctagagagtacagtggcacaatcatggctcactgcagcttccaactcctgggctcaagcaatcttccctcct

SEQ ID NO: 306337 - DNA, 201 bp, Homo sapiens
ttaaaattcatttttctatatacacagaaaaccaaggatcatcagccatggcattaatcagaagcttggaaagaaaaggctaagatggaaagaataactgwcacagggagaatctagggaatagagaagcatctaattattttttttaaaatgtattctcagaatttgaaaaatattgcatccataaagtaagaacaggaa

SEQ ID NO: 306338 - DNA, 201 bp, Homo sapiens; identical to SEQ ID NO: 64158

SEQ ID NO: 306339 - DNA, 201 bp, Homo sapiens
atcattctttatgactcaaatatgggggttctcaaagtatatggtagtgtaaacacttttcatcacatatttatagctaattttgaatacaatttcatgtrttataagttaacatgacttagcagtttgggttggctactaattgaccgtttgctaattctttcagtaaaaacagttttagaacatctactctgtaccagg

SEQ ID NO: 306340 - DNA, 201 bp, Homo sapiens
ggaatagtttgccaactccacagctgaggagaagctcaggaacttcaggattgctacctgttgaacagtcttcaaggtgggatcgtaataatggcaaaagrcctcaccaagaatttggcatttcaaggtaaaatctgcagagccttttaagaaacttgaatcaaatgcatctactttgtttctgtcaataatgtttcaaat

SEQ ID NO: 306341 - DNA, 201 bp, Homo sapiens
aagagacttacataatagagattctcaacctaaaaataaattgtgagtattgcaatataatattgttgttaaagttatggattttgtagttagagaaaccmcagtatgattctggctctgctactgccttgccctgtaagtctgggcaagttgcttagacttgctcagccacagtttatttaaaagtgaggacagccacaa

SEQ ID NO: 306342 - DNA, 201 bp, Homo sapiens
accacagtatgattctggctctgctactgccttgccctgtaagtctgggcaagttgcttagacttgctcagccacagtttatttaaaagtgaggacagccmcaaggttgtttcaagttttaagtgagataatggcatatagtaagcccttaatagatgttagctattattagtagtgttcatagattctataaccaaaatt

SEQ ID NO: 306343 - DNA, 201 bp, Homo sapiens
atgcacagatttatattgtttgcattgaagtcctattcttgatttaggttcaacatttattccgagctatttatgttaccttatttttatcaatatcttargctttaaaaaccaattttgagccatttatttattgattggggagtataatgcaacacaatgaaaataatgcaaatttaaaagatataaataatattcaaa

SEQ ID NO: 306344 - DNA, 201 bp, Homo sapiens
tatatcacatgaatacaaacatggctcttggcattagagtacaaatatttaaaaaggtaatgtttatttaatcatgtaggtcaatgaagtggggaaggcasactactcaatgttaagaaaccatcctaatgaaaagtatacttgagttagccagaaatcaacttctacttagagttgtgagtcagggaaataaggtataca

SEQ ID NO: 306345 - DNA, 201 bp, Homo sapiens
aggctggagtgcagtggcatgatctcggctcaccgcaacctccagctccctggttcaagcgattctcctgcctcagcctccggagtagctgggattacagrcatgtgccaccacacccggctaattttgtatttttagtagagatgggatttctccatgttggtcaggctggtcttgaactcccgacctcaggtgatctgc

SEQ ID NO: 306346 - DNA, 201 bp, Homo sapiens
tttttaagttttattgaattagatgggtaaatgaatagtaattatattatctgcagtgtaattatctttgatttcagttattcacaccatctctttacaastgataatcaaaaattatttcaaagtttgaaaatttttaacataaaatttctgctcaatttttatactttttaaatttccttcaagtaatatatgcacata

SEQ ID NO: 306347 - DNA, 201 bp, Homo sapiens
aacaaggaacagaagaaacaaacacaaaacaaataataaaacagcaaacttatggcctgacagaagtatttaccttaaaaggatacaatatgaagaaaagkaaaaattgaccatgaaaaaaagatttgtctatgaaaatgatttttttttacatgaggtattcctgttgtcattggagatatttatgagtagattctaatt

SEQ ID NO: 306348 - DNA, 201 bp, Homo sapiens
ccgttggttgtggattcttgatggctctgggttcttgatggctattggctgggggccacccacagttcgtagaggctgcccatagttttttgtcacatggkcttcctcagtatggctgcttacttcatggagctagcaagaagaatctctagagtgagtctctagcaagatggaattcataatgaaacataatcatagggg

SEQ ID NO: 306349 - DNA, 201 bp, Homo sapiens
taaaatttgatgactcaaactaccagtagtagttaactaagtaactcagaccaacatttcccctgagggcagctagaaaaggtggatgaattatttttttwaaaaaaatctacttgaagccattgaagaactaaaaaaatcttatgaatcaccagtacaagatctgttggaagacagaactccaagaaagtgagcctggag

SEQ ID NO: 306350 - DNA, 201 bp, Homo sapiens
ttaaaatttgatgactcaaactaccagtagtagttaactaagtaactcagaccaacatttcccctgagggcagctagaaaaggtggatgaattatttttttaaaaaaaatctacttgaagccattgaagaactaaaaaaatcttatgaatcaccagtacaagatctgttggaagacagaactccaagaaagtgagcctgga

SEQ ID NO: 306351 - DNA, 201 bp, Homo sapiens
gctatttacatttttttcttgaagattttattggaaatgtttggcgtctttatgagttttcagcaagttttgatgtcgtttaatcactaaagtttatactrtgccagtgatgttattttatttgcttaatatgaaaaacctcaataagtttgtctcatttccagttaacttaattagaacatttggctccctctgaaactg

SEQ ID NO: 306352 - DNA, 201 bp, Homo sapiens
acacatacatattcagttggtttttggcaaaggtggtagggcatttcaaaggaggaagtaataatatttacaacaaatgtgctggaaaaactgtataataygtatgtaataaaatgtatactgactcttacctcacatcatgcaggaaaggtgaacttaaaatgtgtcatagacctaaatttaaaactaaaaaaagctgta

SEQ ID NO: 306353 - DNA, 201 bp, Homo sapiens
acatcaaatgctgaaatatgtttcaacatctgaatcagatggtacagattgctgcagtggaaaatcaggtgagattacaaaagtcatatgtatttgagttyaagagaaatttcttacaatgatttttagaatgggaaaatgaatgagtttaacttcagtttatccatctttaaaatgaagattattattttttacccactt

SEQ ID NO: 306354 - DNA, 201 bp, Homo sapiens
taagcagacattttaattttgtttaagtctaatgcactaatttttttcctttacatttagtgctttttttataccttaagaaatttttgcttaagcatctytaaggtactctgttttcttctagaagttttatggtgtatgatctaacttgaagtaattttttgggtatgaggtaaggtagggggtcaaagtttgcttttt

SEQ ID NO: 306355 - DNA, 201 bp, Homo sapiens
actccattatgattcattttatctaaatatttttaacaattatttttcatgtaaagctgtacatatagggcacattttactcctatatattactatatatwttttttgaaaggtgaagaagaaaacattttctcgaaagaatcattcaaacttatggaaactcaacaagaagaggaaacagagaagaaagacagcagaaaa

SEQ ID NO: 306356 - DNA, 201 bp, Homo sapiens
tggttgatacctcttttacatctctaaatgggatgtaaactccctgagtgtaagaactaagcatttctgttttgtatttatcatttacattttggagttcrcaatggatatctgttattatatttatacttattgtcatttcttataatgtttccatgttaacctttagtgaagaaaagaactgtgggtggagatggatcc

SEQ ID NO: 306357 - DNA, 201 bp, Homo sapiens
tgaagatgcttaaagtcttagtgactgaaagtttactggtgtcattagctaatgtagggaacattggaagatgagctggtttgggagaaatgctaaagagsttgactattgattaatgcatgttccagttttcacatgtgaatggttgatacctcttttacatctctaaatgggatgtaaactccctgagtgtaagaacta

SEQ ID NO: 306358 - DNA, 201 bp, Homo sapiens
cccatagttttttgtcacatggtcttcctcagtatggctgcttacttcatggagctagcaagaagaatctctagagtgagtctctagcaagatggaattcrtaatgaaacataatcataggggtgacatcctgtcatctttcttttgataagaagctagtcacaggtgttttctacacaaagacatgaacaccagggggca

SEQ ID NO: 306359 - DNA, 201 bp, Homo sapiens
atctcattgggcccaaagcaaggtgtcagcagggctatgtgtcttctggaggctttagggggtaatccattttctttgcattttccagtttccagaggccytcctagagcttgcctgcctggattcctggcccatggccccattactccatcttcattgccagcaatgtcagtctgaatcctgacgctgccatctctctgg

SEQ ID NO: 306360 - DNA, 201 bp, Homo sapiens
cttaggctttgctgtcttcaggctttggagaatctgtggggaccaggggctagctagtccatacccgagcacagagtatccacctcacagaaaagtggtcrgactgttctccacgtaggtcctggtcctcacttctcctctcaacctggtactctagcacaaacacgctgtccctgtcagaccacatcaatcagaggcagc

SEQ ID NO: 306361 - DNA, 201 bp, Homo sapiens
aaccacttatccccaagttctactgtgtaagttttgatgcataataatgacatgaaaaattttaaacctgatacccatcttaaagatagattaatattcagtactgctggatctatcatgtttccttctttcccccattcttttgttttcctcactgaggtagccactatcccgaatattatgataattagtcctttgttt

SEQ ID NO: 306362 - DNA, 201 bp, Homo sapiens
agtgttcttttttgaggtagaaataagtagttataattcttatatgattttttgatattgtgtatgtactatacttaataaatacatatatatatatatayacacacacacacacatataattcatgattctttgtggtaatcacaaatattgaaacccatggttagttatatgttttgctagaaagcattttttagaaag

SEQ ID NO: 306363 - DNA, 201 bp, Homo sapiens
ccagtccagattcactctccagtctgtctgacagcaaagcctgtgcttgttgccctgtcatgagctctttctagtgaacagtgtctagggttttggtctcmtgtgaacagtctttctcaggtgttgactatttccttctccctccaggtagggggccagggagaatagtctccagcagccaatgtcttaacagctttagtc

SEQ ID NO: 306364 - DNA, 201 bp, Homo sapiens
caagtaatgtttagaacagatagataattgtaatagctatccatagaataggtagaaaatgatataacaatatagagttgcaagtctaagatagtcagctstgccctactagcatagttagcttgcttctactcttaaaccttgtatcattttgaaatggaaagtatgtcttgtaaaagtagtggttactctgcattattg

SEQ ID NO: 306365 - DNA, 201 bp, Homo sapiens
ctgtgcagggcctcaatgtattattattaaagtgaattttaataaaaccttataaacaaattcaatctcagtcagctttgaccacacaacataagatttcygtaaattttttacaactacttacaaaattatttcaggtttttttcttccccaacttgttttatccatttagttttatctatatcattttttccttcatta

SEQ ID NO: 306366 - DNA, 201 bp, Homo sapiens
acttggtaattagttttagcggatatatagtaaatgacagccatttgttttggtatttccccttcattcatcggtgtttatattggtctttataatatggratggtatttattggccgtctacattttaaatttcttttttttttctttttcttttttttttgagatggagtctcgctctgttgcccaggctggagtgcag

SEQ ID NO: 306367 - DNA, 201 bp, Homo sapiens
gaattcacctcaattttctcatccacagaaaataacaaaattgaagttatttcattttattaacagggcaggtgtttgtttgccagtggcagtccatttgrgccagtgaaacttacagatgggcgagtctttacaccaggtcaaggaaacaatgtttatatttttccaggtaaatgccaccattatttatgttatagagca

SEQ ID NO: 306368 - DNA, 201 bp, Homo sapiens
cttggattactggcatgagccacagcacctggcctgtgcccattcttataattggtttcttactgcactttttccccttaatatattgtaagtcttttccrtgtaacttaataataattctcatgtatgtgatcattaatgctgcatggcattctctttattattttttcaaaatttgtttcatcatttctctgtttttgg

SEQ ID NO: 306369 - DNA, 201 bp, Homo sapiens
cgaaaagcaagaaaaaagaggaaaaggaacataggcaagacaagatgagatgagagtgatgagactaaatgtttgggggctaaatctgccccaattacttraaaaaaaaaaaactaaaagtaaaagtaaaaaccacattaaatctaaatggaccacattctctacttaaaaaaatgctattaaccatgtgatcttctcagt

SEQ ID NO: 306370 - DNA, 201 bp, Homo sapiens
agaccctgtctcaaaaaaaaaaaaaaaaaaaaagagtgaatgaggcttatggcagattagaccagagagaattaatcaactggaaaatatctcagaagaarcaatccagaatgcagcacagagagaccaaaaagaaaaaaaaataggtaagggacatacatttcattgatagatctttaattgaagtcctagaagaaatga

SEQ ID NO: 306371 - DNA, 201 bp, Homo sapiens
tctgtattcccagcttctattattggcagtaacattcatcctgttgccaaaactttgatcttagtgttatctttgactcttctgccttctccgtcagtctcccgtgcagtcagatattcctcaaattcagtgggtactaccacttaaatgtctcctgttttccattgccgcaatcttgctctctccttatctctcttctgg

SEQ ID NO: 306372 - DNA, 201 bp, Homo sapiens
ctgtattcccagcttctattattggcagtaacattcatcctgttgccaaaactttgatcttagtgttatctttgactcttctgccttctccgtcagtctcccgtgcagtcagatattcctcaaattcagtgggtactaccacttaaatgtctcctgttttccattgccgcaatcttgctctctccttatctctcttctgga

SEQ ID NO: 306373 - DNA, 201 bp, Homo sapiens
ctgaaatcctaaaggctttgaaattccaaaattttttccaaaatttatttttgtgaccaatctgattgccttgaatttacctagaagcgaaacctgactcaaactaataagaagctctttgtaatcttaaccttttgtacttgatgtgactattcataagtttgttcagttgtggagtatctgttgggagggagaatatgt

SEQ ID NO: 306374 - DNA, 201 bp, Homo sapiens
tgaaatcctaaaggctttgaaattccaaaattttttccaaaatttatttttgtgaccaatctgattgccttgaatttacctagaagcgaaacctgactcaaactaataagaagctctttgtaatcttaaccttttgtacttgatgtgactattcataagtttgttcagttgtggagtatctgttgggagggagaatatgta

SEQ ID NO: 306375 - DNA, 201 bp, Homo sapiens
tttagagttggtatgactgttggactcaaaacatgaaaaaaaccaaagccatttgcagattttaccaggaaaattctatgcagactcaaagttttcgtggrcaacaaagctgaaaactttgagtgtgttttgaatcaggcattgcatagatgccatcagactatgtcatcatggcattacattctcagcagaaaatgtaaa

SEQ ID NO: 306376 - DNA, 201 bp, Homo sapiens
ctgtcactcaagctggagttggctcactgcaacttccacctcccgggttcaagcaattctcttgccccagcctcccaagtagctgggattacaggtacccrccaccacgcccagctaatttttgtaattttagtagagatggggtttcaccatgttgaccaggctggtcttgaactcctgacctcaggtgatccacctgcc

SEQ ID NO: 306377 - DNA, 201 bp, Homo sapiens
ttatcttcccaattagagtgatgaagatagtcatatactctttttaaaaattggttgggcatggtggctcacacctgtaattccagcactctgggaggccraggcaggcggatcacctgaggtcaggagtttgagactagcctggccaacatggcaaaaccccatctctactaaaaatacaaaaattagccgggcgtggtg

SEQ ID NO: 306378 - DNA, 201 bp, Homo sapiens
tgagatgggaagatcactcgagcttgggaggtcaaggctggagtgagtcatgattgggccactgcactccagcctgggtgacagagcaagaccctgtctcaaaaaaaaaaaaaaaaaaaaagagtgaatgaggcttatggcagattagaccagagagaattaatcaactggaaaatatctcagaagaagcaatccagaatg

SEQ ID NO: 306379 - DNA, 201 bp, Homo sapiens
ctggcctacctttaaaattgctggcacgtagaagatatttaaacattaattccttttcagagtcaaagtcaacaagtctaaagctgaactttacatcttcycagaaattgccatctctccttcttcctctcactttcctatcttggacaaccaaatagtaccttcttagttaccccattaccttcacattgtaacagcttc

SEQ ID NO: 306380 - DNA, 201 bp, Homo sapiens
aatgtaatgagaatatacatatcaaatatatattttttgaggttcagagtcaaaggaagtgtcctcctggacacttgaaaatagtttacatagattgatakcccatgggtttatcattgtgccacattctttttaaacacctcatactttttttattgaataatttctacattttggatctagtctttcacaggctctgaa

SEQ ID NO: 306381 - DNA, 201 bp, Homo sapiens
cgaagactttggaaatcataatgcattcaggttcttgagaaagtaccgagaaaaatattgtactttcaatgatgatattcaaggtaaagcaaaaaaacttyagggttttgattcctactttttaaacatttttaatgtgcccattttttatttgtaaaaatctttgtttttcttacagggacagctgcagtagctctagca

SEQ ID NO: 306382 - DNA, 201 bp, Homo sapiens
gagaaaaatactctaaaaaaaaatcttcatagttgaattgccagctgcttacatagaccaagttggacttcagaataagaatatactattatcattaaaayctggccacgtttaagccatggattaattattgagttaaatgggcagggaggcagggatggtgacctggagaacgtgaactgctatagaatcttgtcatta

SEQ ID NO: 306383 - DNA, 201 bp, Homo sapiens
aattaactgagttaaacacatataaagcacttggtaattagttttagcggatatatagtaaatgacagccatttgttttggtatttccccttcattcatcrgtgtttatattggtctttataatatggaatggtatttattggccgtctacattttaaatttcttttttttttctttttcttttttttttgagatggagtc

SEQ ID NO: 306384 - DNA, 201 bp, Homo sapiens
tttaacaaagctatttttttaaactttttttttttagttccaggggtacatatgaaggtttgttatataggtaaattgtgtgttgcagggggtttcatgtrtagattatttcatcacccgggtaataagcatgctacccgataggtagttgtttgatccttaccctcttcccgccctctacccttaagtaggccccagtgt

SEQ ID NO: 306385 - DNA, 201 bp, Homo sapiens
agcaggagtttaggtgctaatttgggctttaccatttactagccatgaaactttggcaaacccttcaacttctctaggccttagtttttttcatgtaaatwatataggtaatagcatttggaaacatttaaagggctatacaagtataaaattggatttctccttttctccccatgctcatttggctaacttttctcataa

SEQ ID NO: 306386 - DNA, 201 bp, Homo sapiens
agcaaaaacaagaaaaacagacacactgaaaccctggatataccgtaaatgctatgaaacaaatatgcttattatgtttatagagataaaagccaatcttraaaacttaagacaagtaccactaaattctagaattgaaaaatgtagtagtctataagaactgagtgagctgggtgtagtggctcatgcctgtaatcccag

SEQ ID NO: 306387 - DNA, 201 bp, Homo sapiens
ttaacttcaggaaagacaaagttatgcagaaaaggaaaagtaaccatgatataaacattgaatattgattgaaccacaattatgctctaactatattgggragaagaaagaaagctgaaaatatgaaagagcgctaaatatttactcctacaggaaagagtcagtgatctccaaaacagaaaatgcaagatcagcacaata

SEQ ID NO: 306388 - DNA, 201 bp, Homo sapiens
aaagctgaaaatatgaaagagcgctaaatatttactcctacaggaaagagtcagtgatctccaaaacagaaaatgcaagatcagcacaataagagaaggcmaaaaaaaaaagaaaaaaaaaaagagagagagagagaaaaaaaaatcacaagaaacataagttatttaagagtgagagagagaaacaatcagctaaaaaaa

SEQ ID NO: 306389 - DNA, 201 bp, Homo sapiens
aggaagaaagtggctaagaggtacagctgtgcttttcatggaaagtggacaagatcggcaccatgtccgagtctggcactacctcccactctggactgaamccctaaagtgctgtaccttggattgggggtatagtttgcagcagcaatgggtgatttagaaaacctcaagcctctgttcgggactgccagtgcccacaag

SEQ ID NO: 306390 - DNA, 201 bp, Homo sapiens
gctcccaggttcaagcgattctcctgcctcagcatcccaagtagctgggattacaggcatgtgccaccacgcctggctaattttgtatttttggtagagayggggtttcagcgtgttgtccaggctgatctcgaactcctgacctcaggtgatccactcgcctcagcctcccaaagtgctgggattacaggcgtgagccac

SEQ ID NO: 306391 - DNA, 201 bp, Homo sapiens
atgaaacaacccagaaaatcattgccaaagcagaactctcagaacttcctgaacttaatattcatacttttgatatatttggcattctttttttttttttycccattgttaaacactgtgtaggccaggcacagtggttcatgcctgtaatcccagcactttggaatgccaaggtgggcagaccacttgaggccaggagtt

SEQ ID NO: 306392 - DNA, 201 bp, Homo sapiens
cattaagtaatcctacagcacaggcagagtgcacggctgaagaagcatatacacttacagaggtattaataatcacatgaattgatatgtatattattttycctccactagcttattagttatacattcttacaccattgttctaatggtttccctagagattacagcatgcatctatgggtgatcaaagtctgatattaa

SEQ ID NO: 306393 - DNA, 201 bp, Homo sapiens
tgacctttatgcatgttactactaaacccataaaaacccatctgtagttccactgctcttgtgaggcctgcatttctaatagtcagaatcttccatctggrtattctgttatgagtgcatattcatatcccacactgaactcctttcctttccaaacaacctatcttctgtattcccagcttctattattggcagtaacat

SEQ ID NO: 306394 - DNA, 201 bp, Homo sapiens
tgagccactgtgcctggcctctatcatctatttttatttggccatgattctcttaaaagtatacttacttttaagattataacatatacttttatatgcarttttaccactgggaaaagtatactataaatatatctctaaaatgtttgataagctgtataataaatatatgggtgcataatagtgtagtagcctttggat

SEQ ID NO: 306395 - DNA, 201 bp, Homo sapiens
ctttcagccatgtcaactatgacctttatgcatgttactactaaacccataaaaacccatctgtagttccactgctcttgtgaggcctgcatttctaatartcagaatcttccatctggatattctgttatgagtgcatattcatatcccacactgaactcctttcctttccaaacaacctatcttctgtattcccagctt

SEQ ID NO: 306396 - DNA, 201 bp, Homo sapiens
ttagaaaagatctttaaaataaatatttaatgaagccagaatttaaagttatgaagcatgaactggtgaccataaaacagaaccaaatagaaatatagacrtaaaataattgaagtgaaaagatggaatatcagaaatagataactaaagagctatataagaagttaggtggtggataaattgcttaattaagaaatgagg

SEQ ID NO: 306397 - DNA, 201 bp, Homo sapiens
atgaaagagcgctaaatatttactcctacaggaaagagtcagtgatctccaaaacagaaaatgcaagatcagcacaataagagaaggcaaaaaaaaaaagaaaaaaaaaaagagagagagagagaaaaaaaaatcacaagaaacataagttatttaagagtgagagagagaaacaatcagctaaaaaaaattgtcattgcc

SEQ ID NO: 306398 - DNA, 201 bp, Homo sapiens
acggctcactgcaacctctgcctcccaggtttaaacaactctcctgcctcagcctcccaagtagctgggattacagatgcccaccaccatgcccagctaaytttttgtatttttagtagagacggggtttcaccatgttggtcaggctggtctcgaactcctgacctcaggtgatccaccggccctggcctctcaaactgc

SEQ ID NO: 306399 - DNA, 201 bp, Homo sapiens
ttaatatatatatattaagtgtatatatactgtttgctgtggtgcagatattttcccatttgtcatttgttttaactttatagaattgtttgacatgtctwttaaaagttttttatggaattatttgtttattttgtggattctctcctcaccttttatgaatattaatgccttctgtcactccaaaatcataactgtcta

SEQ ID NO: 306400 - DNA, 201 bp, Homo sapiens
agcagaaagaagaaaaagatgagttaagtcacctaaaaagagagcaaaggacaggagaaggaaaataaagaaaattagagagccaatccaagaggtacaayatcagaaaatataaatgtcagggaacaagaacagaaaaatggagggaagtgaatcctcaagacttcatgaacatttcccaaaactgaaagactcgtgttt

SEQ ID NO: 306401 - DNA, 201 bp, Homo sapiens
caagatttcaaaaaatatatatctcccatgcactgttcttcagaaagccttgggagaatgtaccctaccaaaagagggagtaataaactaggaaaagttgwatttgggaaatggaatcaacttagaaagaagcaaagaggcctgtaatgataaaggggttttctaggatgacagctccatagctggaatgggggacaacca

SEQ ID NO: 306402 - DNA, 201 bp, Homo sapiens
accatttttgtttactatctgacactgttttaaattttataatgtgtataatgtaacatttagtactttatctttcccatcattatgctttttcagtgttktcttgactgttctaaattgttttcttctggacaagtttttgtatctgcttttttaattttaaaaaactctgcaactttgtatgaaattgttgcatttata

SEQ ID NO: 306403 - DNA, 201 bp, Homo sapiens
gtgattctcctgcctcagcctcctgagtagctgggattacaggtgcccgccaccacgcctgactaatttttgtatttttagtagagacagggtttcaccaygttggccagcctggtctcataaactcctgacgtcaggtgatccacctgcctcagcctcccaaagtgctgggatcataggtgtgagccaccacgcccagcc

SEQ ID NO: 306404 - DNA, 201 bp, Homo sapiens; identical to SEQ ID NO: 64178

SEQ ID NO: 306405 - DNA, 201 bp, Homo sapiens
tgcaacttccacctcccaggttcaagtgattctcctgtctcagccccccgagtagctgggaccacaggcacatgccaccacgcccggctaatttttgtacktttagtagagacagggtttcaccatgttggccaagctggtctcgaattcctgacctcaggtgatccgcccaccttggcctcccaaagtgctgggattaca

SEQ ID NO: 306406 - DNA, 201 bp, Homo sapiens
gatggggtgagcgccaagttaggtcaaatgaagatagccttgcaagtggggtcttccagggaaccaccagacaggtcaaataatgacattttcctggaatrgggcttagaagaatctccagccccttcttcctgccctggtggcttccaggctgctgattttcatagtaattgtgaggtgttagttttcgatttaaaactc

SEQ ID NO: 306407 - DNA, 201 bp, Homo sapiens
tttatatgttttctagccaatttatatgatttgtttatattaaataacaggttttctaagacaaaaaattctagtacgttaaatttaaacattaaacatartccattaaaattctaggtctagattaagaatcaggatagtttttcttcctctgtgtctctgctttcttattatttacttttccaccttcaagctaaactc

SEQ ID NO: 306408 - DNA, 201 bp, Homo sapiens
cataagtacacaatgctggttctatatatgtgtgtgtgtgtatatatttatactatatacccacacaaatttaaaatttaaaaaaaaaggaaaacttgggragcctatacaggtatgtgtctattttttaatttaaaattgagaaagggtaagttagatttttttttttttttgagatggagtctcactccgttgcccagg

SEQ ID NO: 306409 - DNA, 201 bp, Homo sapiens
gaagacaattcataagtacacaatgctggttctatatatgtgtgtgtgtgtatatatttatactatatacccacacaaatttaaaatttaaaaaaaaaggraaacttgggaagcctatacaggtatgtgtctattttttaatttaaaattgagaaagggtaagttagatttttttttttttttgagatggagtctcactcc

SEQ ID NO: 306410 - DNA, 201 bp, Homo sapiens
gccggttcctgcctccaattggcccgcgagcccgtccgtctccaccgtgggccacgccttccgggccccgcggctggccggctcctcgcgtcgtcccctcwctcggccgctcttcgggccgcctctgcgtgtggggccgcccgcgccagtgtgagcctgagctgacggcggctccgggaggctcgcagaaggggagggccg

SEQ ID NO: 306411 - DNA, 201 bp, Homo sapiens
cccctccggccggttcctgcctccaattggcccgcgagcccgtccgtctccaccgtgggccacgccttccgggccccgcggctggccggctcctcgcgtcstcccctctctcggccgctcttcgggccgcctctgcgtgtggggccgcccgcgccagtgtgagcctgagctgacggcggctccgggaggctcgcagaaggg

SEQ ID NO: 306412 - DNA, 201 bp, Homo sapiens
cgcccctccggccggttcctgcctccaattggcccgcgagcccgtccgtctccaccgtgggccacgccttccgggccccgcggctggccggctcctcgcgycgtcccctctctcggccgctcttcgggccgcctctgcgtgtggggccgcccgcgccagtgtgagcctgagctgacggcggctccgggaggctcgcagaag

SEQ ID NO: 306413 - DNA, 201 bp, Homo sapiens
ttgctatttactatgttacctcttaatgtgtttctgttacaagtgggagatgcataccttgccacacttgtgtgactagaaagaggttaaatgttttttgyagtgtctgatacatagtaggtggtacttaaagagtagcagtgattatttcccaagaacataagagtgttatcagaaaaagtaagttttcaccttcgcctc

SEQ ID NO: 306414 - DNA, 201 bp, Homo sapiens
aatcatgacttaaatttttgtaaactgaatcctctcgttttaataacacttagactatacttgcaatttgtatatctgaatatattgtgacagcatagatractccttgcatgtttttaatggacaagtactggtattatttggagtgctggcctatgggagctccagactttgaagtatttctgaagaactcacattaat

SEQ ID NO: 306415 - DNA, 201 bp, Homo sapiens
tttttttttttttcctggtggtgtattgagtttatttgaacatgagatgtggttacatttcttcttgggtaaaatgactgtatcatttaacaataatcttkgttgcatctgctatgaacagtaattacagtttgaagtacttgaaaatgtttgaaaataaaccagtgtgacttagctaaatctgcttggaaattataccat

SEQ ID NO: 306416 - DNA, 201 bp, Homo sapiens
gtattcccagcttctattattggcagtaacattcatcctgttgccaaaactttgatcttagtgttatctttgactcttctgccttctccgtcagtctcccrtgcagtcagatattcctcaaattcagtgggtactaccacttaaatgtctcctgttttccattgccgcaatcttgctctctccttatctctcttctggagt

SEQ ID NO: 306417 - DNA, 201 bp, Homo sapiens
tattcccagcttctattattggcagtaacattcatcctgttgccaaaactttgatcttagtgttatctttgactcttctgccttctccgtcagtctcccgtgcagtcagatattcctcaaattcagtgggtactaccacttaaatgtctcctgttttccattgccgcaatcttgctctctccttatctctcttctggagtt

SEQ ID NO: 306418 - DNA, 201 bp, Homo sapiens
aattatattacctgttttactctctgtttccccaatgctttttccatttactgggtccttattctgttatttaaacaaacaaaagcaaaatgctgtttttytcttcaggccctgacaagccaattgacagatgaagagctagcccaagggagactttacccaccgcttgctaatattcaggaagtttctattaacattgct

SEQ ID NO: 306419 - DNA, 201 bp, Homo sapiens
gcagtggtttaagtgtattccttcaagaaataagaggaattatattacctgttttactctctgtttccccaatgctttttccatttactgggtccttattytgttatttaaacaaacaaaagcaaaatgctgtttttctcttcaggccctgacaagccaattgacagatgaagagctagcccaagggagactttacccacc

SEQ ID NO: 306420 - DNA, 201 bp, Homo sapiens
gtctagactggaggaagccagaaagtcaaggagtggagtgagagttaacagagggaagtaggctatcatgggacctgaaaacaggaaagtctaaagcgtgtatgtatacatgataggggaggggagtggacagaaaagggcccccagagagcacgccacctgagctgcatttggagcgcacatgtataggactatacctgg

SEQ ID NO: 306421 - DNA, 201 bp, Homo sapiens
gttttcttcatctgaatatggcatttttacttttttctaaatatttttaaatttctgtttttctaacaaagacttttttttctttccaagtatcttctcawtgatcatttctaatatataggaaaaggtaggaataatactaatttgaaaacattcatttttatgaatttacttgatgaccagttttttgaacaatcttat

SEQ ID NO: 306422 - DNA, 201 bp, Homo sapiens
agactgtctcaaaaaaaaaaaaaaaaaccaacaaaaaaacaacctttatgttgacacatgtattctctcaaaattcctttttgacctttttgaccactccrttagtcaaaataaattctcatgactgttagtttccaattgatataataattattgaaatctcttcttctaaatcaatcacaaaatcaccatacagatatt

SEQ ID NO: 306423 - DNA, 201 bp, Homo sapiens
tgagacccccatctctataaaattaaaaaaaaaaaaaaaattagccaggcatagtggcatatgcctgtagtcctagctattcaggaggctgagatgggaaratcactcgagcttgggaggtcaaggctggagtgagtcatgattgggccactgcactccagcctgggtgacagagcaagaccctgtctcaaaaaaaaaaaa

SEQ ID NO: 306424 - DNA, 201 bp, Homo sapiens
tctccaaggtcggaaggaatgaggaaaaatgtgtttattccatcctcctggaagcaaaaatctctgcctgtctttttatatcattcctgtttttcctgttwagtacaaaaactgagaagagcaatttggtcaacaaactgtactaatgacatgttatgtttatttggcccttaggttttttgtttgtttgtttgtttttga

SEQ ID NO: 306425 - DNA, 201 bp, Homo sapiens
caagagtggataagggcattcaccattgctgagctataatgatcctaggtgagtgctgcccatcactgaggcacacagaagactgactaaagtgaaataasgattgaaagtggtaacattgaggagatccatgacttgtagagcttccctctatcacatgcctcataggtcatctgttctttccttaacattacttccatc

SEQ ID NO: 306426 - DNA, 201 bp, Homo sapiens
ttcccagcttctattattggcagtaacattcatcctgttgccaaaactttgatcttagtgttatctttgactcttctgccttctccgtcagtctcccgtgmagtcagatattcctcaaattcagtgggtactaccacttaaatgtctcctgttttccattgccgcaatcttgctctctccttatctctcttctggagtttt

SEQ ID NO: 306427 - DNA, 201 bp, Homo sapiens
tcccagcttctattattggcagtaacattcatcctgttgccaaaactttgatcttagtgttatctttgactcttctgccttctccgtcagtctcccgtgcwgtcagatattcctcaaattcagtgggtactaccacttaaatgtctcctgttttccattgccgcaatcttgctctctccttatctctcttctggagttttc

SEQ ID NO: 306428 - DNA, 201 bp, Homo sapiens
cccagcttctattattggcagtaacattcatcctgttgccaaaactttgatcttagtgttatctttgactcttctgccttctccgtcagtctcccgtgcaktcagatattcctcaaattcagtgggtactaccacttaaatgtctcctgttttccattgccgcaatcttgctctctccttatctctcttctggagttttct

SEQ ID NO: 306429 - DNA, 201 bp, Homo sapiens
ttatataaagtaattacaattactttatatgttttctagccaatttatatgatttgtttatattaaataacaggttttctaagacaaaaaattctagtacrttaaatttaaacattaaacatagtccattaaaattctaggtctagattaagaatcaggatagtttttcttcctctgtgtctctgctttcttattatttac

SEQ ID NO: 306430 - DNA, 201 bp, Homo sapiens
acacagtagaacttaaatgtgtttggttttatcttttaaactttccatagtttccaaatgttttgaaaggagtcaaagcaatgttattttttactgtgaaraaagaagaatgccattcttctaaacttattttcctgtgttataatagtacgttgtctctctaataggttaatactcagagcctacacaataaccttactt

SEQ ID NO: 306431 - DNA, 201 bp, Homo sapiens; identical to SEQ ID NO: 64176

SEQ ID NO: 306432 - DNA, 201 bp, Homo sapiens
gctttatacctcctcaatttcatcctcatgacttttaccaccagaaaaggattgactttgattcctagttctagctttaaaaaataaaaaataaaaaatcycagaatagtgctttggccaggactttgggccacatgtgagatatttacatttccccagctcatatcaggtactcaccctgagctaatcagttaggccctt

SEQ ID NO: 306433 - DNA, 201 bp, Homo sapiens
aaatacactaggtgccttagagcaacgcttagcaaatagtaagtactcaatgaatggtaattattatttatcaaacatcatctatatgccaggcagacagmctgcatgagaatactttgcatctgtatccttttaatattcacaaaactcttgcatattttgtgtctcattcctcttttcaatgccctttgagatacatag

SEQ ID NO: 306434 - DNA, 201 bp, Homo sapiens
gtgtgtgtgtgtctgaaacggagtttcgctcttgttgcccaggctgcagtgcagtggtgcaatctcggctcactgcagccgccgcctctcgggttcaagcrattctcccacctcagtctcccgagtagctgggattgcaggcgccggtcaccacacccagctaattttttgtgtttttagtagagacagggttttgccatg

SEQ ID NO: 306435 - DNA, 201 bp, Homo sapiens
aaaattagccgggcatggtggtgcatgcctatagtcccagctactcaggaggctgaggcaggagaatcactgaatccaggagacggaggctgcagtgagcygagatcgtgccactgcactccagcctgtgtgacggcaagactctgtcgcaaaaagaaaaaagaaaaccaaatctgatggtgtaagtttcacagcagctaa

SEQ ID NO: 306436 - DNA, 201 bp, Homo sapiens
taaatattttagatttaatgtatagttttctctttaaaaatgtccatgtttatgatggatgcaattattttatacattattttatataaagtaattacaattactttatatgttttctagccaatttatatgatttgtttatattaaataacaggttttctaagacaaaaaattctagtacgttaaatttaaacattaaac

SEQ ID NO: 306437 - DNA, 201 bp, Homo sapiens
aaatgcaaattggggaggttgtgatttactcagcatcacagagctagcaaatggcaaagccaggatttattttgttttgtttttgtttttgagagagggtmtcacttttacctaggctagagtgcagtggtgctgttatggttcactgcaacctcaacctcccatgctcaagccatcctcctgcctcagcctctgaagtag

SEQ ID NO: 306438 - DNA, 201 bp, Homo sapiens
ccatgcccggctaatttgtgtgtgtgtgtattttgagtagagacagggtttcaccatgtttttcaggctggtctcgaactgctgacctcaagtgctccacytccttcggcctcccaaagtgctgggattacaggagtgagccaccatgcccggtgaactagccgtattttaaaacacaaataacattaaaacctatattta

SEQ ID NO: 306439 - DNA, 201 bp, Homo sapiens
attgtttctcattattaaggcattattagtgagattgaagaattaatatatatatattaagtgtatatatactgtttgctgtggtgcagatattttcccayttgtcatttgttttaactttatagaattgtttgacatgtcttttaaaagttttttatggaattatttgtttattttgtggattctctcctcaccttttat

SEQ ID NO: 306440 - DNA, 201 bp, Homo sapiens
acatgccagttgaatctgttcttttttttaaaaaaggctttccagaagccccggccgtcagcttccttgtatgtgtttctaacagggtcaccttagacccrcatgatccaactgaaatagagtgcaagccacaaataggaattacgtatataattttaaattttctgtagccacatttaaaaagtaaaagaggtttaaaaa

SEQ ID NO: 306441 - DNA, 201 bp, Homo sapiens
tcttatagttatgtctatggtagaaaatggcctgtcagaacaagaggcacaaaagaaaatctggatgtttgacaagtatggtttattagttaaggtaaggyatttaaaatttggagaagcaaaagagtgtattatatttttagttggatttttaaaatattattccttaaaatcttgtttctcattggagtctccaaatta

SEQ ID NO: 306442 - DNA, 201 bp, Homo sapiens
gggcaagaaaccacgggcatattccagtattcaagaaactctcctgctgggtgtggtggctcacacctgtaatcccagcactttgggaggccgaggcgggyggatcacctgagatcaggagtttgagaccagcctggccaatatggtgaaaccccatctctactaaaaatacaaaaaagtaaacgggcatggtggtgggca

SEQ ID NO: 306443 - DNA, 201 bp, Homo sapiens
gctacttgagaggctgaggtgggaggattgcttgagcccccgaggtcgaggctgcagtgagctgtgatcatgccactgcactctagcctaggcaacagagyaagaccctgtctcaaaaaaaaaaaaaaatgaaaatatacgaaatgaaattttgtcttgaaaaatgggatttagaaaggaatgggagggaatacatttatg

SEQ ID NO: 306444 - DNA, 201 bp, Homo sapiens
aaaagaaaaaggcaagccacttatgctgaacccaagaacaaacaaggttagtaacattaatatcaatgtacattttctctcttcttattaaagtttgatayatttaagactgataaggtgtgacatatttttgtagctttatgctaaggttgttcagagatagttgtttacatgaaattttcacgcttctccacatggcaa

SEQ ID NO: 306445 - DNA, 201 bp, Homo sapiens
tttgaccacacaacataagatttctgtaaattttttacaactacttacaaaattatttcaggtttttttcttccccaacttgttttatccatttagttttmtctatatcattttttccttcattatgaaacctttaaataacctctaaactagacagaattccttttttcaacaaaaaacacatcttttgtctttcttata

SEQ ID NO: 306446 - DNA, 201 bp, Homo sapiens
aaatattttagatttaatgtatagttttctctttaaaaatgtccatgtttatgatggatgcaattattttatacattattttatataaagtaattacaattactttatatgttttctagccaatttatatgatttgtttatattaaataacaggttttctaagacaaaaaattctagtacgttaaatttaaacattaaaca

SEQ ID NO: 306447 - DNA, 201 bp, Homo sapiens
aatattttagatttaatgtatagttttctctttaaaaatgtccatgtttatgatggatgcaattattttatacattattttatataaagtaattacaattactttatatgttttctagccaatttatatgatttgtttatattaaataacaggttttctaagacaaaaaattctagtacgttaaatttaaacattaaacat

SEQ ID NO: 306448 - DNA, 201 bp, Homo sapiens
atattttagatttaatgtatagttttctctttaaaaatgtccatgtttatgatggatgcaattattttatacattattttatataaagtaattacaattactttatatgttttctagccaatttatatgatttgtttatattaaataacaggttttctaagacaaaaaattctagtacgttaaatttaaacattaaacata

SEQ ID NO: 306449 - DNA, 201 bp, Homo sapiens
gtgtatgggaccaccatcaaagattgcaaagtgagcttatagacaaaaattatgccatgaaagagactgaaaatttatatccaggcactaaagacattagmaaagatctttaaaataaatatttaatgaagccagaatttaaagttatgaagcatgaactggtgaccataaaacagaaccaaatagaaatatagacataaa

SEQ ID NO: 306450 - DNA, 201 bp, Homo sapiens
tcaaaatagagagactcctggctctttattgtactcttgtgacaaaagtgacgtgcaatattgagatccagtcattacttcatccttcatctatgtttggwtcggtggacaagtgcctgcctgttttttagtggcaatattaaatagtaagtaaaagttctgggaagagattttttttacaagaagcttgcaagaggatac

SEQ ID NO: 306451 - DNA, 201 bp, Homo sapiens; identical to SEQ ID NO: 64179

SEQ ID NO: 306452 - DNA, 201 bp, Homo sapiens
gaggcaggagaatcgtttgaacccggaagtggagagtgcggtgagccgagatcgtgccattgcatgccatcctgggcaagaagagcgaaactccatctcaaaaaaaaaaagaaaaagaaaaagaaaaaaaagaatgtctaacattctggccttctgaaatccctaagattgaatagcatctatatggtcacatcattgaag

SEQ ID NO: 306453 - DNA, 201 bp, Homo sapiens
accggccctggcctctcaaactgctgggattacaggcgtgagccaccacgcccgggctgtgatggtttttttttttttttgggataaattctaagcttaaraacaaaggtttttaaggtgttttaaggcttctgatgcatattgtcaaatgagctcttcagaaaaagtactgatttacattgcagcaattagatatgagtg

SEQ ID NO: 306454 - DNA, 201 bp, Homo sapiens; identical to SEQ ID NO: 64180

SEQ ID NO: 306455 - DNA, 201 bp, Homo sapiens
aggcaggagaatcgtttgaacccggaagtggagagtgcggtgagccgagatcgtgccattgcatgccatcctgggcaagaagagcgaaactccatctcaaaaaaaaaaagaaaaagaaaaagaaaaaaaagaatgtctaacattctggccttctgaaatccctaagattgaatagcatctatatggtcacatcattgaagg

SEQ ID NO: 306456 - DNA, 201 bp, Homo sapiens
ggcaggagaatcgtttgaacccggaagtggagagtgcggtgagccgagatcgtgccattgcatgccatcctgggcaagaagagcgaaactccatctcaaaaaaaaaaagaaaaagaaaaagaaaaaaaagaatgtctaacattctggccttctgaaatccctaagattgaatagcatctatatggtcacatcattgaagga

SEQ ID NO: 306457 - DNA, 201 bp, Homo sapiens
gcaggagaatcgtttgaacccggaagtggagagtgcggtgagccgagatcgtgccattgcatgccatcctgggcaagaagagcgaaactccatctcaaaaaaaaaaagaaaaagaaaaagaaaaaaaagaatgtctaacattctggccttctgaaatccctaagattgaatagcatctatatggtcacatcattgaaggac

SEQ ID NO: 306458 - DNA, 201 bp, Homo sapiens
aatcgtttgaacccggaagtggagagtgcggtgagccgagatcgtgccattgcatgccatcctgggcaagaagagcgaaactccatctcaaaaaaaaaaagaaaaagaaaaagaaaaaaaagaatgtctaacattctggccttctgaaatccctaagattgaatagcatctatatggtcacatcattgaaggaccacttct

SEQ ID NO: 306459 - DNA, 201 bp, Homo sapiens
agcccatttcatcttacaaagtcttaaaaattgagtgatgcagtttttttttttaaataagaatagggggaggaagaaggaaaaaagtaagaataattttwtttatttatttatttatttatttatttatttattgagatggagtctcgctctgttgcccaggctggagtgcagtggcgtgatctcggctcactgcaagct

SEQ ID NO: 306460 - DNA, 201 bp, Homo sapiens
aaaacagaaccaaatagaaatatagacataaaataattgaagtgaaaagatggaatatcagaaatagataactaaagagctatataagaagttaggtggtrgataaattgcttaattaagaaatgaggccaggctcagtggctcacgcctgtaatcataacactttgggaggttgaggctggcagatcacttgagcccaga

SEQ ID NO: 306461 - DNA, 201 bp, Homo sapiens
aacatcaggaagagtttatttttgtttaaagaacatagaccagtgattcccaattcatgggttatagactcctcaggaacttaccatgtaaagaaatctcrtttgtgcttcaaatattgtatacttaataacttttcacatttttgtaaatattatctttaaggatatgttgctgctgtaattaataaaatagtaattaaa

SEQ ID NO: 306462 - DNA, 201 bp, Homo sapiens
ccccgggctcaggtgattttcccatctcaccttcccgagtagctgagactacaggcacgtgccactacacctggctactttttgtatttttttgtagagaygaggtcttgccatgttgtctatgctggttttgaactcctgggctcaagtgatccgcctgccttggcctcctaaactgttgggattacaggcatgagccac

SEQ ID NO: 306463 - DNA, 201 bp, Homo sapiens
atattaaataagtaaaagtaacttcactttttcctgatgcttcaggtgtctcatcttttgtgtgattttactgtaattttcttctctcccttcctgctccytcaaatttcaaattttcagtttcagtaagtcttaacaatagtttagttggccttgtactgctctcctgcattggtggcttgctttagatttttttttttt

SEQ ID NO: 306464 - DNA, 201 bp, Homo sapiens
actacaggcacgtgccactacacctggctactttttgtatttttttgtagagacgaggtcttgccatgttgtctatgctggttttgaactcctgggctcargtgatccgcctgccttggcctcctaaactgttgggattacaggcatgagccaccacacctggccaaaatttcttacactttaaaaggtgggacaccatta

SEQ ID NO: 306465 - DNA, 201 bp, Homo sapiens
cacgtgccactacacctggctactttttgtatttttttgtagagacgaggtcttgccatgttgtctatgctggttttgaactcctgggctcaagtgatccrcctgccttggcctcctaaactgttgggattacaggcatgagccaccacacctggccaaaatttcttacactttaaaaggtgggacaccattatgctaggt

SEQ ID NO: 306466 - DNA, 201 bp, Homo sapiens
tggcaaaaccccatctctacaaaaaaatcatccgggcatggtggtgtgtgcccatagttccagctactctggaggctgaggtgggaggatcacctgagccyggggaggtagaggctgccactgcactcaagtctgggcgacagagtgataccccatttcaaaataaataaatcaaattaaattaaatatgaaaatttctta

SEQ ID NO: 306467 - DNA, 201 bp, Homo sapiens
tgctaggttataagcaggagtttaggtgctaatttgggctttaccatttactagccatgaaactttggcaaacccttcaacttctctaggccttagttttyttcatgtaaataatataggtaatagcatttggaaacatttaaagggctatacaagtataaaattggatttctccttttctccccatgctcatttggctaa

SEQ ID NO: 306468 - DNA, 201 bp, Homo sapiens
ggcttagaggctgaaaattttggaacaggaagggaaaacaaaataaaaaccctggactacgactagtaagctgagtgatattggacatgtccatttctgtytctgggctttatttttttttcatttaaattaagatatttaaactaggtgatgtctaagactcgtgataactataattgtgattcaaggaaaatctaagtg

SEQ ID NO: 306469 - DNA, 201 bp, Homo sapiens
atcttaccccacagtacttagcacacacagagcctcagtacatgctgggtagatggatgaatgcataaacagatgagcaaataggaaaacaaaatctgacrtgattggtgctcggagtttcacagataattaaacataggttttgtttccagaaaataagtttggattagataggagttttgttacctactcttgtaaaac

SEQ ID NO: 306470 - DNA, 201 bp, Homo sapiens
ggaatacatttatgaaacaaaaacaacagaaccaaaggcttagaggctgaaaattttggaacaggaagggaaaacaaaataaaaaccctggactacgactrgtaagctgagtgatattggacatgtccatttctgtctctgggctttatttttttttcatttaaattaagatatttaaactaggtgatgtctaagactcgt

SEQ ID NO: 306471 - DNA, 201 bp, Homo sapiens
atatgtttttgtcttttaatatatttatgaaaacaaaatattcataaaggaaaaaacccatttaccatttgggaacttcttttgtaaaattaaaaacttayagctatgtatgtataatctgtatattaagttaaaaactctaattgattttggtgaatttcagacaaactagacatattttattctctttaagacggagtt

SEQ ID NO: 306472 - DNA, 201 bp, Homo sapiens
ggtctcaggtgatctgcctgcctcagcctcccaaagtgctgggatttcaggcatgagccaccacgccaggcccaaagttttaactgtagtaaataatgctrtctctcctggaagagccacataaacatatgatgaattcttttagaacttctttttagctgggtgtgatggctcatgcctctaatcccagcaactcacagg

SEQ ID NO: 306473 - DNA, 201 bp, Homo sapiens
ctagagcacctagagggcattgtgataagcatcttaatgaattatctaatttaaatcttaaaatagcctattaaataggtcttgtagtttaacgttcccawtttactgatgagaaaatgcaaattggggaggttgtgatttactcagcatcacagagctagcaaatggcaaagccaggatttattttgttttgtttttgtt

SEQ ID NO: 306474 - DNA, 201 bp, Homo sapiens
tattatactaaatatattgatcttcctgattctgtcacagagctcctcaaacccttggatttcctgaatgataagagtgtctttaaaaaaaattttttttwaactgatgcataatagatgtacatagtttcagggtacgtgtgataatttaatatattcatataatttgtaaagatcaagccagtgtattctggatatcca

SEQ ID NO: 306475 - DNA, 201 bp, Homo sapiens
atagtgtggtattatactaaatatattgatcttcctgattctgtcacagagctcctcaaacccttggatttcctgaatgataagagtgtctttaaaaaaawttttttttaaactgatgcataatagatgtacatagtttcagggtacgtgtgataatttaatatattcatataatttgtaaagatcaagccagtgtattct

SEQ ID NO: 306476 - DNA, 201 bp, Homo sapiens
cactgcacccggcctggacttgtaattctttatagttgctttactttttgaaaaaatgttaatatctttaatctgtttgaaaggttttgctaactgtagtrgcaaatccttctacctattctttttcaaaatttcttggattttctcacatgtgctctttcaaatatatatttaagctgagtctaaagctccataaagttc

SEQ ID NO: 306477 - DNA, 201 bp, Homo sapiens
tcatctatgtttggttcggtggacaagtgcctgcctgttttttagtggcaatattaaatagtaagtaaaagttctgggaagagattttttttacaagaagmttgcaagaggatacattgagtttattgcaatatatgaaatttaccttttggggaaaggtaaattcaaatgaaaagtgtgacttattttaaaagaacagtc

SEQ ID NO: 306478 - DNA, 201 bp, Homo sapiens
atgcttaactctttcgtagttaatgggctttttgttagcttgtaatatccaagagaactagaaacaatgctacaactaaactttttgtatatgcctttgtrtgccattaagaatgtttctctagaatggctccctggaagtcagattgcttgatgaataatatgtatataaaaaatttaagaatactttaaaactgtcttc

SEQ ID NO: 306479 - DNA, 201 bp, Homo sapiens
aaaaaatttaagaatactttaaaactgtcttccaaaggcctaaactagtttatattcccagcagtggtttgtgagaataactattttccacaccctgaccratactgacatcagtcttacaaagttttgaaagcctgggcaaaaataatatgtcattgatttttcaaatttgcatttaaattatattttgaagaacaatgt

SEQ ID NO: 306480 - DNA, 201 bp, Homo sapiens
aatttttgagaactttgttctgcctggctgtttctgcctgattagatgtgccgatatgaggtggtacccatggtctgccttgctttcttgagttacctgasattttgagggaagtctgccctcactgcttccatcaaacgcttactgctcagtacctttttcagccttgaccttcaggctcacgcccaccattccactgaa

SEQ ID NO: 306481 - DNA, 201 bp, Homo sapiens
gtgccaccacacctggctaatttttgtatttttgtagagatgaggtttcaccatgctgccctagctggtctcaaactcctgggctcaagcaatctatccgygctggcatcccaaaatgcttggattacaggcatgaaccactgtgcctggcccaaagcacttctaaatgaactgcatagttcatttaaacatacgttttag

SEQ ID NO: 306482 - DNA, 201 bp, Homo sapiens
tgtcaaattcctgacctcaggtgatccgcccgcctcagcctcccaaagtgctgggattataggcatgagccactgcgcctggactttttcttttcttttctttttttttttttttgagacagggtctcactctgttgcccaggctggagtgcagtggcacaatttcagctcactgcaacctctgcctcccgggctcaagca

SEQ ID NO: 306483 - DNA, 201 bp, Homo sapiens
tctagactggaggaagccagaaagtcaaggagtggagtgagagttaacagagggaagtaggctatcatgggacctgaaaacaggaaagtctaaagcgtgtatgtatacatgataggggaggggagtggacagaaaagggcccccagagagcacgccacctgagctgcatttggagcgcacatgtataggactatacctgga

SEQ ID NO: 306484 - DNA, 201 bp, Homo sapiens
ttttgtttttgagacagagtctcactttgtcacccaggctggagtggagtgcagcagtatgatcttggctcactgcaacctctgcctcccaggttcaagtwattcttgtgcctcaacctccctagtagctggaattacaggtgcacgccaccatgcctgctaatttttgtatttttagtagagatgggatttcaccatgtt

SEQ ID NO: 306485 - DNA, 201 bp, Homo sapiens
ttttttttttcctggtggtgtattgagtttatttgaacatgagatgtggttacatttcttcttgggtaaaatgactgtatcatttaacaataatctttgtkgcatctgctatgaacagtaattacagtttgaagtacttgaaaatgtttgaaaataaaccagtgtgacttagctaaatctgcttggaaattataccatgtc

SEQ ID NO: 306486 - DNA, 201 bp, Homo sapiens
tatttgaacatgagatgtggttacatttcttcttgggtaaaatgactgtatcatttaacaataatctttgttgcatctgctatgaacagtaattacagttkgaagtacttgaaaatgtttgaaaataaaccagtgtgacttagctaaatctgcttggaaattataccatgtcttgatattttattaaaatatcaaaatatt

SEQ ID NO: 306487 - DNA, 201 bp, Homo sapiens
cttcttgggtaaaatgactgtatcatttaacaataatctttgttgcatctgctatgaacagtaattacagtttgaagtacttgaaaatgtttgaaaataamccagtgtgacttagctaaatctgcttggaaattataccatgtcttgatattttattaaaatatcaaaatatttcaattatgaacaaaaacttagaaacaa

SEQ ID NO: 306488 - DNA, 201 bp, Homo sapiens
tttattgagatggagtctcgctctgttgcccaggctggagtgcagtggcgtgatctcggctcactgcaagctctgccttctgggttcatgccatgctcctscctcagcctccctagtagctgggagtacaggcgcctgccaccatgctcagctaattttttgtatttttagtagagatggtgtttcactgtggtcgcgatc

SEQ ID NO: 306489 - DNA, 201 bp, Homo sapiens
tggcacatgcttgtaatcccagctacaaggctgaggcaagagaattgcttgaatgcaaaagacagaggttgcagtgagccgagatcacaccattgcactcyagcctgggtgacaagagtgagactgtctcaaaaaagaaaaaataaagtttcttgtagggcaatacatttaaaaaattgtattagtaattttttattttgc

SEQ ID NO: 306490 - DNA, 201 bp, Homo sapiens
tcttctgtattcccagcttctattattggcagtaacattcatcctgttgccaaaactttgatcttagtgttatctttgactcttctgccttctccgtcagtctcccgtgcagtcagatattcctcaaattcagtgggtactaccacttaaatgtctcctgttttccattgccgcaatcttgctctctccttatctctcttc

SEQ ID NO: 306491 - DNA, 201 bp, Homo sapiens
cagggtctttcaggatcagctggaggaagtacacctctgctatgtaaattgggagggagggaattgctgttgcatagatgagaaaaagggagacttgggaraagtggcaaagggagatggagaaagtaggagaagagtagataagaggatgatcatttctgcttaatactaaactaaccaggccattcattttaaactaat

SEQ ID NO: 306492 - DNA, 201 bp, Homo sapiens
cttctgtattcccagcttctattattggcagtaacattcatcctgttgccaaaactttgatcttagtgttatctttgactcttctgccttctccgtcagtctcccgtgcagtcagatattcctcaaattcagtgggtactaccacttaaatgtctcctgttttccattgccgcaatcttgctctctccttatctctcttct

SEQ ID NO: 306493 - DNA, 201 bp, Homo sapiens
aaagggagatggagaaagtaggagaagagtagataagaggatgatcatttctgcttaatactaaactaaccaggccattcattttaaactaatgtcatcawcacaggcttgcttcacttattaacaccagcctagcaaatttaagaacttaatcaactgttaacataaatatctatacataaaattatttaatcattttat

SEQ ID NO: 306494 - DNA, 201 bp, Homo sapiens
gtcaaggctggagtgagtcatgattgggccactgcactccagcctgggtgacagagcaagaccctgtctcaaaaaaaaaaaaaaaaaaaaagagtgaatgwggcttatggcagattagaccagagagaattaatcaactggaaaatatctcagaagaagcaatccagaatgcagcacagagagaccaaaaagaaaaaaaaa

SEQ ID NO: 306495 - DNA, 201 bp, Homo sapiens
atatattaagtgtatatatactgtttgctgtggtgcagatattttcccatttgtcatttgttttaactttatagaattgtttgacatgtcttttaaaagtkttttatggaattatttgtttattttgtggattctctcctcaccttttatgaatattaatgccttctgtcactccaaaatcataactgtctacttgcattt

SEQ ID NO: 306496 - DNA, 201 bp, Homo sapiens
ttgtgtgtgtttgtgtgtgtgtgtgtgtgtgtgtctgaaacggagtttcgctcttgttgcccaggctgcagtgcagtggtgcaatctcggctcactgcagccgccgcctctcgggttcaagcaattctcccacctcagtctcccgagtagctgggattgcaggcgccggtcaccacacccagctaattttttgtgttttta

SEQ ID NO: 306497 - DNA, 201 bp, Homo sapiens
gccaattaatttattccataagcacctaagccaataagcctttttcatggaaagtcccagaggtagctttgcaggtttagaataccatagacatgagtggmattttttaaatggcacagaattggttccgcatgatccccaaaagaattcactcccacaaagaggctaagatagcagaagactcttgttgccatagacagt

SEQ ID NO: 306498 - DNA, 201 bp, Homo sapiens
tttgctttctcttttgaaatctggattgattatctgaattaggtaacaatatactgtgtctaaaatgactttttgttagccattccacaatttatacatayttcaaaacatgttgtacatgataaatacagttgacccttgaacaacacaggtgtgaaggtccatttatactcagattttcctgtgcttctgccacccctg

SEQ ID NO: 306499 - DNA, 201 bp, Homo sapiens
tgaggcaggagaatcgtttgaacccggaagtggagagtgcggtgagccgagatcgtgccattgcatgccatcctgggcaagaagagcgaaactccatctcaaaaaaaaaaagaaaaagaaaaagaaaaaaaagaatgtctaacattctggccttctgaaatccctaagattgaatagcatctatatggtcacatcattgaa

SEQ ID NO: 306500 - DNA, 201 bp, Homo sapiens
tgtgtttcctcatgtgtaaaatgggaatagcaggacctatcaaagagctattggagaaaccaatgtgacagttctttggaaaattatcagcaatattatayacacacacacacacacacacacacacacacacacacacacacatatgctgttttcacttaatctgagttttcttattcctctaatccattattatttttc

SEQ ID NO: 306501 - DNA, 201 bp, Homo sapiens
tctttgactcttctgccttctccgtcagtctcccgtgcagtcagatattcctcaaattcagtgggtactaccacttaaatgtctcctgttttccattgccrcaatcttgctctctccttatctctcttctggagttttctaattcttcctccagtttctctcctctccagttcgtctccaccttaataccagattaattgt

SEQ ID NO: 306502 - DNA, 201 bp, Homo sapiens
ctctcttctggagttttctaattcttcctccagtttctctcctctccagttcgtctccaccttaataccagattaattgttttgaaacgtgtgcttcattwtgtcattcttttgcttgaaatctctgattggtttcctattgccataggataaagtcaaactcttttaccttaatgatctaaccctggcctacctttaaaa

SEQ ID NO: 306503 - DNA, 201 bp, Homo sapiens
tgtgcaggtagcttggcctatgggcattaggcttccagtgtctcctggtgatcctaaacactgcccttcattttgaaactttgaaaacagtggcttcttaygtcactgtttgctcagcctggttttctcagccgattgatgatagtgtcctgctttactaacccctgcagtttcttatctggagttatcttggagttctga

SEQ ID NO: 306504 - DNA, 201 bp, Homo sapiens
ccagtgacattatcttctagacctactgacatggcctcgtctgattctctgcttttcagttgtgttcttacctctaggtgagaaaactgagtttcttcctrcagtgaggtttcccctattccttcacctctgaaatttggaaactaagttgccctctgacagttcaagcattaaaaaaaacccaacatatagtaattaagg

SEQ ID NO: 306505 - DNA, 201 bp, Homo sapiens
gttaggatgtggccctccgtgtaacgttgtatgggggtgttttttggtctgttgttcacagggctcgttctcactgcttatgttcttcgggattctgggakccaccactctatccgtctccattctgctttgggcgacccagcgccgaaaagccaagacttcatgaactacataggtcttaccattgacctaagatcaatc

SEQ ID NO: 306506 - DNA, 201 bp, Homo sapiens
agagctgctgcagtcccctgccctcccctaacctgctatattactgtgttgtgaattggtttaacatatacactgtgattcagagttcctgggaatatggrgtttctttccaaacctcagccataaatgtatatctgtcctcttgtcctgtttgcagctgaggagccaaaggagaagtcctctcggaaggtagccgagcca

SEQ ID NO: 306507 - DNA, 201 bp, Homo sapiens
tcatcgactgctttgcctcagaccatggtgagagaatccagcatgtacctcctctgcccagtggggcttgtgggacagccctagcaagaaaatgggaagcrggccaggcctcaggactctactaggacagggtcttgatccgtatgggaccctagcctctagggtacctggtctgtgataggtgcctgataaatacttgtt

SEQ ID NO: 306508 - DNA, 201 bp, Homo sapiens
agtgggagagtgttgcaagctctagcacagtagttatattctgcccacaattggggggtgaacacaggagagaatcaaaggaggctttgaaggtaggagttggtgcaggcatatcttatacccactgagcacagctgccaactgttgccctttattcgtctatttctcagactccacgggtattcaatacagggggtgccc

SEQ ID NO: 306509 - DNA, 201 bp, Homo sapiens
ctcggatccttgctttggactgtggcctcaagtataatcagatccgatgcctctgccagcgtggggctgaggtcactgtggtaccctgggaccatgcactrgacagccaaggtgagtagctggggcctgttcagggcctcagacaagcagcttgggtggaagatctatcccttggtccaattgctaaaagtcagtaggagt

SEQ ID NO: 306510 - DNA, 201 bp, Homo sapiens
ctgttcagggcctcagacaagcagcttgggtggaagatctatcccttggtccaattgctaaaagtcagtaggagttgcagtgaagaagatagacattgggrcttaacactctcatgggctgggggggctgcaggtgtgtctcctgtaattgaaatactgattttgatgtcatcttttctgcccactccagagtatgagggt

SEQ ID NO: 306511 - DNA, 201 bp, Homo sapiens
ggaactccagggtcctgggttctggtcctccctctgctcctcctgaggtgcataatttgctctggactcttctgaaagcgagggagctaatccagttgacmtcttgggtccagctcagctctaacattctacgaccttctttgcttccacagttagagagcggctgactgagcgcctctgtccccctgggattcccactcc

SEQ ID NO: 306512 - DNA, 201 bp, Homo sapiens
tcaattcagatgtgatatttttggcaggaatacttcatggtagtatacttctgtcacaatggcccaggattttgatgcacatagaacagctgtgtgtgacyggggctctggaatggaagtgcttctggaagtctaacctcacagatgactgagttgtaggaatgtgatccctaagactgtgctattttgacaggagtagac

SEQ ID NO: 306513 - DNA, 201 bp, Homo sapiens
gtggtttgggccactgtgataaacttccagtatccagtgtatggggatatattccagtatccccatgcccgttttaggcatattgattccatattcatcartaagcacaaagcctgagcttatccatgaaaatagcagggaaaagagctataagttaagatttctttttgtttgtttgtttgttttgttttgtttgagacg

SEQ ID NO: 306514 - DNA, 201 bp, Homo sapiens
tgttcctgtcctgagcctttctttggctctcctaatcatagctcagctctgagttgaataaagttttttcccgtatgaccagaaagtaaatctcattataytgggaaacaaaatgaaaaaacttaccagcaaaaaccaaaattagccctttattttttaaaatttttatcgttttgagatggcatctcgctctgttgccca

SEQ ID NO: 306515 - DNA, 201 bp, Homo sapiens
agtgcccaccacagcggagcatcctggagcagctagctgagaaaaactttgagctggtgattaacctgtcaatgcgtggagctgggggccggcgtctctcytcctttgtcaccaagggctaccgcacccgacgcttggccgctgacttctccgtgcccctaatcatcgatatcaagtgcaccaaactctttgtggaggtaa

SEQ ID NO: 306516 - DNA, 201 bp, Homo sapiens
cagtgagctgagattgcaccactgactccagcctgggcaacacagtgagactacgtctcagaaaaaaaaaaaaaaaaaaagctaaatgtccttcagttagyagttaaattatggcagatcatacaagaattaagttagttggttgggcgcagtggcacacgcctgtaatcccagcactttgggaggccgaggcaggtggat

SEQ ID NO: 306517 - DNA, 201 bp, Homo sapiens
tggatgagtagtaaggatcatcttcctattatctacacttttttaaaaagttttaaagaattccagttggtgttatgattatgtgaataaatcaaacccartaactggacagccatcagtggtttgggccactgtgataaacttccagtatccagtgtatggggatatattccagtatccccatgcccgttttaggcatat

SEQ ID NO: 306518 - DNA, 201 bp, Homo sapiens
ccttctgcctgcaggttctggtacccccgggctatggacaggatgtacggaagtggccacagggggctgttcctcagctcccaccctcagcccctgccacyagtgagatgaccacggtatccacactactgggctagggggctgggaggtgttagtctcagggcaggatgaacagcttgaacattttcattggtggttcag

SEQ ID NO: 306519 - DNA, 201 bp, Homo sapiens
tgatgagcacagtcagagattctgcacactccttcatcagttctttctgctcccagcatttcgagacatggccctcccacctccccattgtggctcacgcrgagcagcaaaccgtggctgctgtcctcatggtggctcagctcactcagcgctcagtgcacatatgtcacgtggcacggaaggaggaggtaagagtacacc

SEQ ID NO: 306520 - DNA, 201 bp, Homo sapiens
gtgacttcctagacatggaggtgattggtcctgagggtaatggctttctttctcccagctccccataccttggaggagaagtgtgggtccaggcccccacmtgggttcccagggttagagaccatgctgccactactcctgacggctgtaagcgagggccggctcagcctggacgacctgctgcagcgattgcaccacaat

SEQ ID NO: 306521 - DNA, 201 bp, Homo sapiens
tgctgccactactcctgacggctgtaagcgagggccggctcagcctggacgacctgctgcagcgattgcaccacaatcctcggcgcatctttcacctgccyccgcaggaggacacctatgtggaggtgtggggatgaggcccagagcaggaggggggctctccagccctaggatatgttctctggggatcctttccctagc

SEQ ID NO: 306522 - DNA, 201 bp, Homo sapiens
gagtacgaagctgtgagtgctgggcttgaggaagaagccagggctgctgccgtagggcatcagatatgaggacagaaaggctgggctgagggctgggtcakagctgttaaacttcacatctgtcaattgccatagctgcatgtgggtgtggaggggaccccagtggagcccagacttgtgtcctctgtagccactcctacc

SEQ ID NO: 306523 - DNA, 201 bp, Homo sapiens
ataggacaggctgtggcttaaagcatttcatagggtgaaaatcgagtcctcctgttccccaccctccttccctctcctcgatttcctcactcttccccacycccatcctgtcacctggggcctataatcaatgagacgtaaaatgagaaagtatcaggaaccagcaaagcatggcgagcagctggggcggccttgccgccg

SEQ ID NO: 306524 - DNA, 201 bp, Homo sapiens
ctctaggccctggaactgatagtctagttgttaccccctcttcttgtataatttttggcccttgaggttgaggtcttttgggcttacagtccctggagtasaagctggaatcttctttactaggttacttttctctcctttctgagacctctcctagacagggtcttctaggccagtgactttattctccttctttgcagt

SEQ ID NO: 306525 - DNA, 201 bp, Homo sapiens
gcgtggtccagtggatggaggtagggagtgtgcatgtggcaggaggccaccacccagtgtctcctggcttgtgggcccctgcctaagtgggctggtagcartgaggattcaggggagctcctggggactctgggctctgatgagcacagtcagagattctgcacactccttcatcagttctttctgctcccagcatttcga

SEQ ID NO: 306526 - DNA, 201 bp, Homo sapiens
gagatcggagagcatgtggccccgagcgaggcagcaaattctcttgaacaggttggaggggtgtttgggtaaaggaagaatggtggtgttttttttggtastgttattttcttttttttttttttttttttgagacggagtttcgctcttgttgcgcaggctggagtacagtggcgtgatctcggctcatcataacctcca

SEQ ID NO: 306527 - DNA, 201 bp, Homo sapiens
gaagctttacctcaatgagaccttctctgagctgcggctggacagcgtggtccagtggatggaggtagggagtgtgcatgtggcaggaggccaccacccastgtctcctggcttgtgggcccctgcctaagtgggctggtagcagtgaggattcaggggagctcctggggactctgggctctgatgagcacagtcagagat

SEQ ID NO: 306528 - DNA, 201 bp, Homo sapiens
ctcctgcctcagtctcccgagtaactgggactacagacatgtgctaccacacccagctaactttttgtatttttagtagagatggggttttgccatgttgkctaggctggtgttgaactcctgacttcaagtgatctgcccgcctcagcctcccaaagtgctaggattacaggcatgagccaccgcacccagccaaaatta

SEQ ID NO: 306529 - DNA, 201 bp, Homo sapiens
cctcgtctgaaaatgcaggaaccttgggcaccgtggccgggtctgcagccgggctgaagctttacctcaatgagaccttctctgagctgcggctggacagygtggtccagtggatggaggtagggagtgtgcatgtggcaggaggccaccacccagtgtctcctggcttgtgggcccctgcctaagtgggctggtagcagt

SEQ ID NO: 306530 - DNA, 201 bp, Homo sapiens
ctaccccgaggccctcactgatccctcctacaaggcacagatcttagtgctcacctatcctctgatcggcaactatggcatccccccagatgaaatggatragttcggtctctgcaaggtagccacacccagtgctttctctacattccttttcaagtcagtaattgttaactattagtgaagtaggagacgttgacaccc

SEQ ID NO: 306531 - DNA, 201 bp, Homo sapiens
cagagactgcctcggggctggtggacgggaggagacttagtcctggacaagccatccatgggctgcacgataacacttcctttttttttttttttttttttgcagcgtggaagtggactcggatccccgcgcagcctacttccgccaggctgagaacggcatgtacatccgcatggctctgttagccaccgtgctgggccg

SEQ ID NO: 306532 - DNA, 201 bp, Homo sapiens
cctgcccggtctccacacgtgggtagccagagcccggccgagagccctggccgggagcccgcgggggccccgccccctgcccgccccctgcccgccccgcycgccgtgccgccatgtttactgagggcggatggaggggcccgagtttctgcgaagccgcgacctcggcgtccggacgcggggaacaccgggctgagggag

SEQ ID NO: 306533 - DNA, 201 bp, Homo sapiens
cccctaccagccacccttgcttccctgagcccttttccttctgccccgccctatgggcccaggccactggtgccaggctagcctgtgtgggcatgggtgcsagtgagccttacctctgtgtatcctctccagctggcagaggctggcgcccggtgcgactttgcgctattccttggggcctcgtctgaaaatgcaggaacc

SEQ ID NO: 306534 - DNA, 201 bp, Homo sapiens
tcctgcgaggggaggttgcctatatcgatgggcaggtacgcaagtagcccctgcctgatctcagtagtgccctcttctgcaccacgttcatttcttccctwcccagcacatctacactgtcccactatgtgcaccactgccctggaccaggggttgggggcacagctcccccaaggtgctttttgtccttgctgacatcta

SEQ ID NO: 306535 - DNA, 201 bp, Homo sapiens
gacctcaggaagcagaggttgcagtgagctgagattgcaccactgactccagcctgggcaacacagtgagactacgtctcagaaaaaaaaaaaaaaaaaaagctaaatgtccttcagttagtagttaaattatggcagatcatacaagaattaagttagttggttgggcgcagtggcacacgcctgtaatcccagcacttt

SEQ ID NO: 306536 - DNA, 201 bp, Homo sapiens
ccctgccattcttggaccccaatgcccgccccctggtaccagaggtctccattaaggtacagaggtagagtgggagagtgttgcaagctctagcacagtasttatattctgcccacaattggggggtgaacacaggagagaatcaaaggaggctttgaaggtaggagttggtgcaggcatatcttatacccactgagcaca

SEQ ID NO: 306537 - DNA, 201 bp, Homo sapiens
cccatgggccccagcgccataaacccctcgcgaccaaggcagcctccactggggcgtgctcatcgcgcggggagtgttccgaagggtgccctaccggagcycagccctgcttctttcttgcagtgtttcaaaccggcatggtcggctaccccgaggccctcactgatccctcctacaaggcacagatcttagtgctcacct

SEQ ID NO: 306538 - DNA, 201 bp, Homo sapiens
gaagcacggacgcacagtacattccctggcctgcctgctcacccagtatcgtgtcagcctgcgctacgtggcacctcccagcctgcgcatgccacccactstgcgggccttcgtggcctcccgcggcaccaagcaggtgagaccctcacagccctgcctggaagccatggagatgtgggttgggcagtcagagcccagcgc

SEQ ID NO: 306539 - DNA, 201 bp, Homo sapiens
gtgcagaaggagcggagcctcgacatcctgaaggtcaggatcagggccgggggtagggtccaggccatcgcctgcccttgggccgcatcagcgcagggccrcgcagtggtcagagtgggtcttcctccccctgccatcccgtccccttatgctagtccatccctctgctgctgtagatcttcccccacgttttccctcccc

SEQ ID NO: 306540 - DNA, 201 bp, Homo sapiens
cagcttgcctttcttcaggtgagcctggttgactgggtctgtgaaaatttgaagccctgtgggccttgatgatggaaaagtaaagcacggcagtggatccragtcccctgtcccactacccacctcgaggctgccagtgtcatgccagggaccatgatggttttcatgatgcaatctcttcaatagtgtccagtttcaccc

SEQ ID NO: 306541 - DNA, 201 bp, Homo sapiens
atgggaagaagaaagagggaggagtgagtatggaacagccatgctagtaataaagctttgtggctacagagggagagatggtgggtatagagtgtgcagarcctggtttatgggaaaaccacatctctccctacaactcccaggatcacccttcccttaaagctgactgctttccacttgcaggccctaggccagatcggg

SEQ ID NO: 306542 - DNA, 201 bp, Homo sapiens
caatgcgtggagctgggggccggcgtctctcttcctttgtcaccaagggctaccgcacccgacgcttggccgctgacttctccgtgcccctaatcatcgayatcaagtgcaccaaactctttgtggaggtaactgagacccatgtgctgggagggagactgccagtgttgatgggaagaagaaagagggaggagtgagtat

SEQ ID NO: 306543 - DNA, 201 bp, Homo sapiens
aaggtgcaggaactctggcaacctaccccactgctgcccttccccaagggggtgaaaatactgcaccaaagaattatctgggctgggcacggtggcatatrcctgtagtcccagatactcaggaggctaaggcaggagaatctcttgagcccaggaggtagaggctgcagtgagctgcgagtgtgcagtgagtgcaccact

SEQ ID NO: 306544 - DNA, 201 bp, Homo sapiens
aggagggcacacagagagggcaggctgaccctgccattcagatgggatcaagcacagggtactgtgtccgtctctgctggtgagggaggaggtcctctcayaccttggccctctctcttccctcccgcccctttaggtgcctcagttctccttctcccgcttggcgggtgctgacgtggtgttgggtgtggaaatgaccag

SEQ ID NO: 306545 - DNA, 201 bp, Homo sapiens
gcgagggccggctcagcctggacgacctgctgcagcgattgcaccacaatcctcggcgcatctttcacctgcccccgcaggaggacacctatgtggaggtstggggatgaggcccagagcaggaggggggctctccagccctaggatatgttctctggggatcctttccctagcataacccatgtcctctgggcaggtgga

SEQ ID NO: 306546 - DNA, 201 bp, Homo sapiens
tcagagactgtgtagggacaggatccacttcttcccagtgcctcgcctttctctacttacatgtcctcctctccatccctttatcctcgtctgatctgccrtgccatcctttgcctaaacaagtctccccggtgtgagtagacatctcacagcttctcacatgcccttttttgttgtgggcagctgtgttcctccgcccag

SEQ ID NO: 306547 - DNA, 201 bp, Homo sapiens
cctccctgagtctcctccttctatgggcagaagatggactggatgcttggtgaaggcattcacctgccctgagcattcccctgcaaagggacccagcatcrcacagataggacaggctgtggcttaaagcatttcatagggtgaaaatcgagtcctcctgttccccaccctccttccctctcctcgatttcctcactcttc

SEQ ID NO: 306548 - DNA, 201 bp, Homo sapiens
ttttttttttttgcagcgtggaagtggactcggatccccgcgcagcctacttccgccaggctgagaacggcatgtacatccgcatggctctgttagccacygtgctgggccgtttctagggcctggcttcctcagcctcttctctttaggcccagctgctgggcaaggaattccagtgcctcctacgggggcagcacactt

SEQ ID NO: 306549 - DNA, 201 bp, Homo sapiens
ccggcacccccagcctggagcagtggaggtgaggccagcctgggtactgagatggggttaagaaggctggacccaggggcatgagaacccttctgcccacrttttctgtgttttgggccagatgagtgaggggaccccagaagagggggactggcagttggggggcctctgagctgcaaaagacaggattttccccttttt

SEQ ID NO: 306550 - DNA, 201 bp, Homo sapiens
acaaggtcaggagatctgagaccatcctggctaacatggtgaaaccccgtctctactaaaaatacaaaaaattagccgggtgtggtggcgggcgcctgtastcccagctactcgggaggctaaagcaagagaattgcttgaatccgggaggcagaggttgcagtgagcttagatgtcgccactgcattgcagcctgggtga

SEQ ID NO: 306551 - DNA, 201 bp, Homo sapiens
aagtgagcacacggaccagcagctcctttgcagcagccatggcccggctgggaggtgctgtgctcagcttctcggaagccacatcgtccgtccagaagggygaatccctggctgactccgtgcagaccatgagctgctatgccgacgtcgtcgtgctccggcacccccagcctggagcagtggaggtgaggccagcctggg

SEQ ID NO: 306552 - DNA, 201 bp, Homo sapiens
ggtttgggtgcagaagggtcctcacagcacccctcaagtgtcagttggggtggtggtgcctagctggggtttccccagggtggacacgcatacgtacaccytccatcttgctctttccctaggggaaggtcatggcctccatgttctatgaagtgagcacacggaccagcagctcctttgcagcagccatggcccggctgg

SEQ ID NO: 306553 - DNA, 201 bp, Homo sapiens
gaatcacctacttcatccagagagtaacagcgtattctagagatgagaaaaggagaaggacctcgttttttgagaacttagtgtgaacaggaacttgatgygtattctcatttctcacaccagccttccacccatttcacagatgtggacactggctcagagaagtggtgggggccggtggctcacccctgtaatctcagc

SEQ ID NO: 306554 - DNA, 201 bp, Homo sapiens
gccgtgtggtcctgcgaggggaggttgcctatatcgatgggcaggtacgcaagtagcccctgcctgatctcagtagtgccctcttctgcaccacgttcatwtcttcccttcccagcacatctacactgtcccactatgtgcaccactgccctggaccaggggttgggggcacagctcccccaaggtgctttttgtccttgc

SEQ ID NO: 306555 - DNA, 201 bp, Homo sapiens
tcatccaagtaggcagggaagctggagggaaagggctgtagctagagctcatggtgttggggcttatgacagtcagtgaccctgaaccctgctcagtctgwtcccccagagctgaggacggagaggaagagtctaggcctatagatagtgtcagcaaggccaacctgcagaaggcctgaccagtcttctctgccccaggat

SEQ ID NO: 306556 - DNA, 201 bp, Homo sapiens
tcttcctggaaaagaatttctaggttcatcacaaacctacaaatacactgcattctagttgatagtgaattcttgtgaatttggttaacctttgtcagtcrtcacctttgtcaactctagacacactgactaaattgagtttataaaactacaaaattgaggcctgattaggatcagggtgggaaaggcctcttggagcca

SEQ ID NO: 306557 - DNA, 201 bp, Homo sapiens
cttgtccaacttgttaggcatgcagaagtcaggagaaaaaagcctgcagataagttaaatccggtgggcatggagggacctgaagccaaagcagagtcagsttagtttggtaaaggatccattgaaggtttttttttagcagcagagtcagatgggagcagtgctttttaggactacataaattagtggaaagaggctgga

SEQ ID NO: 306558 - DNA, 201 bp, Homo sapiens
tcatatgacgtaaatagcaagagaggaaataaagtattaaaacagctctaagatggaggcacaagctgtattgggtgagtgggaggggcttcacagagaarggatttgtgatttcagttttagataaaggaagaaagaggcggggcgcggtagctcatgacttgtaatcccagcactttggaaggctgaggtggggggatc

SEQ ID NO: 306559 - DNA, 201 bp, Homo sapiens
gtcaggttagtttggtaaaggatccattgaaggtttttttttagcagcagagtcagatgggagcagtgctttttaggactacataaattagtggaaagagrctggaaactagggtcacatacttctctgtgacagtgagtgccagtttacctacaaaaccagtgacattatcttctagacctactgacatggcctcgtctg

SEQ ID NO: 306560 - DNA, 201 bp, Homo sapiens
tgtctcaaaaaaaaaaaaaaggaatggctaggtgcgatggctcactcctgtaatcccagcactttgggaggctgaggtgggcagatcacaaggtcaggagrtctgagaccatcctggctaacatggtgaaaccccgtctctactaaaaatacaaaaaattagccgggtgtggtggcgggcgcctgtagtcccagctactcg

SEQ ID NO: 306561 - DNA, 201 bp, Homo sapiens
tggcagccatcgccatctctgagcatgtggagaatgcaggtgtgcattcaggtgatgcgacgctggtgacccccccacaagatatcactgccaaaaccctrgagcggatcaaagccattgtgcatgctgtgggccaggagctacaggtcacaggacccttcaatctgcagctcattgccaaggtaataaggctaaaggaaa

SEQ ID NO: 306562 - DNA, 201 bp, Homo sapiens
gtttcttcctacagtgaggtttcccctattccttcacctctgaaatttggaaactaagttgccctctgacagttcaagcattaaaaaaaacccaacatatrgtaattaaggtaatagaggaagtcaatctggcctagagtagtatctctcaaaatttgtttggcctcactgcaggtgtaagcctttaattcttaatttgcc

SEQ ID NO: 306563 - DNA, 201 bp, Homo sapiens
gatctgagaccatcctggctaacatggtgaaaccccgtctctactaaaaatacaaaaaattagccgggtgtggtggcgggcgcctgtagtcccagctactygggaggctaaagcaagagaattgcttgaatccgggaggcagaggttgcagtgagcttagatgtcgccactgcattgcagcctgggtgacagagtgagact

SEQ ID NO: 306564 - DNA, 201 bp, Homo sapiens
tttgggcttacagtccctggagtacaagctggaatcttctttactaggttacttttctctcctttctgagacctctcctagacagggtcttctaggccagwgactttattctccttctttgcagtattacatcattgaagtgaatgccaggctctctcgcagctctgccctggccagtaaggccacaggttatccactggc

SEQ ID NO: 306565 - DNA, 201 bp, Homo sapiens
cgcgcggggagtgttccgaagggtgccctaccggagcccagccctgcttctttcttgcagtgtttcaaaccggcatggtcggctaccccgaggccctcacygatccctcctacaaggcacagatcttagtgctcacctatcctctgatcggcaactatggcatccccccagatgaaatggatgagttcggtctctgcaagg

SEQ ID NO: 306566 - DNA, 201 bp, Homo sapiens
cctctcctagacagggtcttctaggccagtgactttattctccttctttgcagtattacatcattgaagtgaatgccaggctctctcgcagctctgccctrgccagtaaggccacaggttatccactggcttatgtggcagccaagctagcattgggcatccctttgcctgagctcaggtacgaggatgagggagatatca

SEQ ID NO: 306567 - DNA, 201 bp, Homo sapiens
tctccattaaggtacagaggtagagtgggagagtgttgcaagctctagcacagtagttatattctgcccacaattggggggtgaacacaggagagaatcaraggaggctttgaaggtaggagttggtgcaggcatatcttatacccactgagcacagctgccaactgttgccctttattcgtctatttctcagactccacg

SEQ ID NO: 306568 - DNA, 201 bp, Homo sapiens
cagggagggaaagaagaggagaatgctactctaaggctgtttgcaattttgcttcttcagcagaggctgagatgccattcttgtccttttaggcaattaargccctgaaggaggaaaacatccagacgttgctgatcaaccccaatattgccacagtgcagacctcccaggggctggccgacaaggtctattttcttccca

SEQ ID NO: 306569 - DNA, 201 bp, Homo sapiens
cccaggaggtagaggctgcagtgagctgcgagtgtgcagtgagtgcaccactgcactccagcttgggaaacagtgagatgctgtctcaaaaaaaaaaaaaacaaagaattatctcctattcccctgcttttattattaccattatactagtaagctatattccatgcagaaagcagaatacacaggaagcaaagagaaaag

SEQ ID NO: 306570 - DNA, 201 bp, Homo sapiens
tgccctgggctgccgccctgctcctcgctctgggcgtggaaagggctctggcgctacccgaggtacagaagcaagtttgaggtcgggctgaagcagggtcrctggccagccgtgcgtcgcgctcgccagcggctcccccttctcctcggcgggcctgcggttctgatttcgtccctgacgcttcccgaccctgcccagcca

SEQ ID NO: 306571 - DNA, 201 bp, Homo sapiens
ttggaatgtggtcttctttggtaactttttgtaacttttattatacaagtaagaaacatgaatcatggaaaacgaggaaagatagtttaaccaaagaacartagtcacctgtaatcttgccttacagagattgattaattcgaccgtgtatctgcgactgcataattcagccgtgtatctacgactgcatacatttctagg

SEQ ID NO: 306572 - DNA, 201 bp, Homo sapiens
ggggatggcaccaggttcaagaggccaaagaagagacccagagccccatacaagacatggggttttactggagccttacatccaggggagaggccactggyggcaggctgggcaggagaactgcacgacttgcaaaaagcatgcagtttctatagcatcttcacttagcaccatccccctaacagtctccatctggcaact

SEQ ID NO: 306573 - DNA, 201 bp, Homo sapiens
tttgtgacatgtatatattgcatagtggtgaaatctgggcttcagcataaccatcacccaaagagcgtatgttaaatcaggttattcagtaatctgcagamccgagatgtaatataagacccgagatgtctagatatgatttactcattacacaaagatccaaaaattatgcgttatgcagaatcaggaacatttcactct

SEQ ID NO: 306574 - DNA, 201 bp, Homo sapiens
atttcaatttcatagtcagttctcttgccttctgctcttgagagaccctgttacctattgtgaacccagtgtcccataaacgggagatttacctgactggsaaggttctgctttggcagtgggaatagtaagaaaactaaaacaagatcctgcctccagggaccgcacagtctagtaagggagatactaggtaaacaaagc

SEQ ID NO: 306575 - DNA, 201 bp, Homo sapiens
atttgatatattttagaatatttgtcataaattcttggcacataccatgatctatgtttgttttgtttattagttactagtgtatgcactgtatttgtgartttttcttctctttaaatgtgtacagctcctttggttgagcgatgtagatgttgttaaaactgacccagctattgcaatgatctcatgtctttgtaccat

SEQ ID NO: 306576 - DNA, 201 bp, Homo sapiens
agacagagtagtaacatctgtcatgctgaacccctattgactccagtggggatggcaccaggttcaagaggccaaagaagagacccagagccccatacaaracatggggttttactggagccttacatccaggggagaggccactggtggcaggctgggcaggagaactgcacgacttgcaaaaagcatgcagtttctata

SEQ ID NO: 306577 - DNA, 201 bp, Homo sapiens
agaagtgaggagttaagaagaacccacaaattgtccaataactagactcactgccttgagtcaatcttctagattgaaagacagagtagtaacatctgtcrtgctgaacccctattgactccagtggggatggcaccaggttcaagaggccaaagaagagacccagagccccatacaagacatggggttttactggagcct

SEQ ID NO: 306578 - DNA, 201 bp, Homo sapiens
aggattaattttattattgaatagccattgaatggaatattatgccatcattaccataatttttgagaattcctcaggcccttgggaaaaactcgtaatgyagtcctcaacacagaggcaaactatgaaactacataacaagtgtgtttgtatatagaaagaataggaaatactctaaagtatattttttagtatttttac

SEQ ID NO: 306579 - DNA, 201 bp, Homo sapiens
tggtcaatgtcttccatatacggacttcaacccggagaggtaatcgtggttttaaatttacattacatgacattctctgaataaaatatattcattttatyatcttattttttaggtgtggtgggcagcttctgacttaggctgggttgttggacattcctatatctgctatggacctcttcttcatgggaacacaacagt

SEQ ID NO: 306580 - DNA, 201 bp, Homo sapiens
cgggcagatcaccaggtcaagagataaagaccatactggccagcatgttgaaaccccatttctactaaaactaccaaaaaaaaaaaattagctgggtttgrtggtgcacacctgtagtcccagctactcaggaagctgaggcaggagaactgcttgagcctgggagacggaggttgcagtgagccgagatcacgccactgc

SEQ ID NO: 306581 - DNA, 201 bp, Homo sapiens
ccattagaaaagtttgtattgcatgtaattttgtgaaatcatgttttctttagaagactaataatgttatgtgagaatggattctaaaaatggcactaatraggacaaattattttgtgttgactattgaaggacccaaagaaataatgattcaaagataattttataaaagccaaagtaacttgtagctaatatataaaa

SEQ ID NO: 306582 - DNA, 201 bp, Homo sapiens
ctgcactgcacttacataccatttatttcatctatgtaaaaaggctgattttggtgctctataccctagttttatcctaagcaataaaatccacaaagtckccagctggaagtgtgaggtatgtatttttttagtgcacatcaaaataaatacatgcttattaaaataaaaaagtatactgtgtaccatcttaaatatcta

SEQ ID NO: 306583 - DNA, 201 bp, Homo sapiens; identical to SEQ ID NO: 64243

SEQ ID NO: 306584 - DNA, 201 bp, Homo sapiens
gacgcctacatgcatatgtttattgcagcttaatttacaatttcaaagacatggaatcaacctaagtgaccatcaactgaagagtggataaataaaatgtkatatatataatatattatatatattataatatatattatatatcacattatatattatatattataatatattatatatcacatatataatatatatcac

SEQ ID NO: 306585 - DNA, 201 bp, Homo sapiens
aaatcttgtacaggatcctctatggagaaactcctcctatctcagaaaattacactctaggcccagaaaagtttgtgtgatgtctgtgcatgtgcatgggygcaggtgagggtgcaggaagcataagtgggggagggcatgtgtggcttaataatagtaaccaaagaaaccaaaattaaaactatgtttcacttttcaaat

SEQ ID NO: 306586 - DNA, 201 bp, Homo sapiens; identical to SEQ ID NO: 64237

SEQ ID NO: 306587 - DNA, 201 bp, Homo sapiens
cggtagttgagtgaagtacatttcagaatctgaataaagatcctttttcacttgtcagttaatggaggttttggttactaaaatccttcttcctatgagtrtttaaggaagaagaggcaatgagagtaggatttctagactttccggaagtcatatagagccttgttcctgttccacaagtcttaaatcttgtacaggatc

SEQ ID NO: 306588 - DNA, 201 bp, Homo sapiens
ccatattaataaactactgctgtattgggaaattattcattgggagctttaaagcttttaaaagttaatacaattaaagaagaaatgtatcaaagaattaytttgcaatatcaaagtatattagaattagtattgagctattacttctccattaaaaaaagaaattggattcataaactttacaactctatattcaaacac

SEQ ID NO: 306589 - DNA, 201 bp, Homo sapiens
ggactctggaagaatcaggaagcattcaagcatttatactttgaaaaatttcctgtaagaactttaatatgcttttttatcttcttatgtacttttctatwattcttgcctattaaattgagaaacttgctcctagaatcgtagatcaaaaagaaacttttaaaggttatctggaccagtttccagctcccagggataaga

SEQ ID NO: 306590 - DNA, 201 bp, Homo sapiens
ttccagagactaaagtcattcttcaacaattctgctgtacaatggtcagctacataaacctctgttagacatgatctgtccagcagatttaggggttatawttcaatgtaggatttgaattgtaattatctgtcacagtagaaaaataatagttctaatcaacctgtctttattaccactttcatcataattttaacttct

SEQ ID NO: 306591 - DNA, 201 bp, Homo sapiens
ttcttgtaagaatgagtgatggtatgaaaatgtgtattgtccttgttcttcaggaactttgtgcagatatttaaagttttgtgcaacagctctggaagccygtgtccttaaggcttagttttttctgggagacgacgtatgctttcatcctgtaggcatcaattaattataagaatatattctctctattacaaattgcta

SEQ ID NO: 306592 - DNA, 201 bp, Homo sapiens
ctctataagggtggctttaattccagagagaaagtgaagagctgagattttctattcttaatgattaagattaaaggtacttttgatatgattaggatgayctatttttaccactgaagtacattttaggttgggcttttcattgaacagaggttttaatatttggtgattgttaccaaccttcgaataattagatgaaag

SEQ ID NO: 306593 - DNA, 201 bp, Homo sapiens
tgtgtcatatttaatagcaatcacctctgtaatccaaagggaaccagctagacatatgatgtccctctataagggtggctttaattccagagagaaagtgwagagctgagattttctattcttaatgattaagattaaaggtacttttgatatgattaggatgacctatttttaccactgaagtacattttaggttgggct

SEQ ID NO: 306594 - DNA, 201 bp, Homo sapiens
gctccagctggtccctccatttggggtccttgacttcccacaacacttcactgtggaggtgatgtagaagctgggtcaagtaataaaaatagaagtgtgtgccccacacataggtgactcttccacaggtgtcccctgaaggtctgcagaagatttatccaagaggtggatttgacatagttaataatgaaaatgtgcacc

SEQ ID NO: 306595 - DNA, 201 bp, Homo sapiens
accgtatggcataatccagcctgtccttactgattgaggggtaaataataactttatgactgttgggataatttagtctgctaaagtacataaacattgtyaggtatatcataaaatagctaacctttttattatctgttatcataaaaacagctgttatgaaaacagctaacaactaagctttttattgtctccatagta

SEQ ID NO: 306596 - DNA, 201 bp, Homo sapiens
ctcagtaactaaacaaattatttgtcacctctctacttctacaaatcccaaaatgccacctctcctgaaaatactgcttttactatattgcgctctttgcrttggcatcactattgatctagaatagaaactttctgtttccatctagaatataaactttctatagaaactttcaaagagtcagctttgatttttctcttt

SEQ ID NO: 306597 - DNA, 201 bp, Homo sapiens
ctactcatccttcagatctactcattgttatttcctaaagaaaaagtttttgaggcccatatctttctgcaaaattggttgcttttgctgtatctttcatrtaaaaaaaattccccagagcccttatcacttttgtatttagacatttagaatagatattcataattatttattaatatctgtctccactactagactgaa

SEQ ID NO: 306598 - DNA, 201 bp, Homo sapiens
ccttatttccaccacagaatgacaactttacctttttgttggtgtgttagatatttatggccacaattatactatatgaccaggaaccacaaaaatctccrtaaaatgaactattaagagtttatttccatatgtctgcaggtggtcaaggcatcagctgatctaggttgggggtggttgggagcattgcttcaagacata

SEQ ID NO: 306599 - DNA, 201 bp, Homo sapiens
atattctagcaagtaaatagtttccctgccagaaatgttttttttttcaggtacaaatatatatatatatatatatatatatatatatatatatatatatwtatatatataaatgtttttgtgggaaattctataaaacacctttccttatttccaccacagaatgacaactttacctttttgttggtgtgttagatattt

SEQ ID NO: 306600 - DNA, 201 bp, Homo sapiens
aatattctagcaagtaaatagtttccctgccagaaatgttttttttttcaggtacaaatatatatatatatatatatatatatatatatatatatatatatatatatatataaatgtttttgtgggaaattctataaaacacctttccttatttccaccacagaatgacaactttacctttttgttggtgtgttagatatt

SEQ ID NO: 306601 - DNA, 201 bp, Homo sapiens
ggaaaagagaataatgatattatcaagaaatattctagcaagtaaatagtttccctgccagaaatgttttttttttcaggtacaaatatatatatatatayatatatatatatatatatatatatatatatatatatataaatgtttttgtgggaaattctataaaacacctttccttatttccaccacagaatgacaact

SEQ ID NO: 306602 - DNA, 201 bp, Homo sapiens
taatcttctgctagcgtctttgaagttcttgaaacatagcactcaattatagagtttgcaatataaagtagaataaaacactaaaatcgtgttttttttttctttctgtctttcaccagatcccttaaccttcaccacacctgtccccatccatacagaggaagtgaataaatagaaaagagaaaaatggccaggattcag

SEQ ID NO: 306603 - DNA, 201 bp, Homo sapiens
aagagattttattgcttatgtgtgcatgcttgtctatgtgtgtgtgcgtgtgcatgaaggcaggagagaattttaaataaaataaataagccattgagccwcttttatttactgttaataataaaagattcttacaggctttgcttcagctttctgaagctactagtggtggtaggtactgagaacatataagtcctctgt

SEQ ID NO: 306604 - DNA, 201 bp, Homo sapiens
tattgattagatccatgtttgccctttcataaaaaacaattttttttgcataagagcagttataattgttgtactaaaagatgcttcaaaatacatgtgartggaatataccttctatctcttagcaggtgttcacctactcattctgagtattcactcagttatgtcttattgggccaatgatgattaatgttttttaaa

SEQ ID NO: 306605 - DNA, 201 bp, Homo sapiens
cagatttaggggttatatttcaatgtaggatttgaattgtaattatctgtcacagtagaaaaataatagttctaatcaacctgtctttattaccactttcrtcataattttaacttctctgtttttatataaggttaccattgccacctggggctttttcaggactctggaagaatcaggaagcattcaagcatttatact

SEQ ID NO: 306606 - DNA, 201 bp, Homo sapiens
cctgttgttggtgttttcagggactcaaattcttcctggtttagtcttgggagggtgtatgtgtacaggaatttatccatttcttctagattttctagttyatttgcatagaggtgtttatagtattctctgatggtagtttgtatttctgtgggatcggtggtgatatcccctttatcattttttattgcgtctatttga

SEQ ID NO: 306607 - DNA, 201 bp, Homo sapiens
ctatctctctttgcagataatatgattctatacttagaaaaccctatagtctctgcccaaaagctcctagatctgataaacaacttcagtaaagtttcaaratccaaaatcaagagcctctgcacagcaaaagaaactaccatcacagtgaacaggcaacccacaaaatgggagaaaattttcacaacctactcatctgac

SEQ ID NO: 306608 - DNA, 201 bp, Homo sapiens
taagccactgacatatacatctccttccaatcgccacaaattttaaaaagtatagtctaaccttactgtctctacttacttcctgtttatttcttaatcastctagctgttgctttccccactccattgaaatgacaatcatgagaaaactcaaaacatcttaattactaagttccatgatcactgttgcatctgctttca

SEQ ID NO: 306609 - DNA, 201 bp, Homo sapiens
tattgtatgtcttcctttatgagtctttctttagagatttttctcaatatccaaattaccacatctgattttttaagataccacatcttgttagtgaggawcagaaagcatgcacttattttatcctatcaattaccaattgcaatttcatatcttgcttttcagactgatcctcagttagacttgtgaatgatgaagtag

SEQ ID NO: 306610 - DNA, 201 bp, Homo sapiens
agtagccgtcttggttatcagatcggctgtctaggtgttacagtgcttgtgtgcaaccaacctttattttacttaacaatggccctaaagcacaatagtastgatgctggcatattgttctaagtgttctattttgttattagttgttgctgttcatctcttactgtgcctaatttataaattaaactttatcatagctat

SEQ ID NO: 306611 - DNA, 201 bp, Homo sapiens
taattcaccttttaaattgcacaccattctgaataggtgatgaattcttgtactgtcctgcttagtcttgccaggatgtgaatcagccctttgtccagtgyatccatgttttctacgctactgcccgttagtcacttagtagccgtcttggttatcagatcggctgtctaggtgttacagtgcttgtgtgcaaccaacctt

SEQ ID NO: 306612 - DNA, 201 bp, Homo sapiens
ctgccagatgtgctgttggttaaaagtttgctcactgttttctctagctattagagctagagagtcactgaaataatgattattggggtcaccaaaataamtgttaatctttcagaaaaaaaattttgaatatgcatttttaaaagtcccgtcaccatatatatatatatattaaccctaagcgtctgtattttatgtggt

SEQ ID NO: 306613 - DNA, 201 bp, Homo sapiens
aagaaaattttaactgcaattgcctttcttcctagcacagtgctcactgttattaaagccataggtctctggctctttctctctgatggacaaacgttttyctctgaccagatccattgttgctattggaagtgtggcctgttcaccctgtgctgtgtcctgcaagccatggtggggtgcaagggagttgtatggaattgt

SEQ ID NO: 306614 - DNA, 201 bp, Homo sapiens
cttttttccccaactgaaattatatgtgtttgtatatctatatctgtatctatatctatatgttgaatatacatatatggtaaataaatgtattctaaatraatgcctttccttattacagtcaatcctttcccatggtaccgtggcagactgtgctgttgttggcaaggaagatcccttaaaaggtcatgtccccttagc

SEQ ID NO: 306615 - DNA, 201 bp, Homo sapiens
ttatatctagttgtaagaaatagttaagctttcttccctcatgtaacttcagtacagaagtttctcaactggcttgcagacagtacaggttaaacatttawaaccaaggaatcagtgactttatgactgataatttttatgttttgtgattgtttagagattaaaatcataatgtaatattaaatagtataataataaaaa

SEQ ID NO: 306616 - DNA, 201 bp, Homo sapiens
caaacagctacccaaaaccagatctggcaagatcccccgatcagctttatctgccattgtcaatggcaagccatacaaggtaaattatcaaagatatttawtcctgggttctaagatatttttcttcatttctttggcatcagcaaagctcttaaaaatggttctcaaatgtgaattgcatctctagaaaacacataatag

SEQ ID NO: 306617 - DNA, 201 bp, Homo sapiens
gcttagtagacctatgaagaaaacctagctttgggagacaaaatatgattcctaacatatgtttcttatttgcatataaactacaaaattcagagatttgwcttttgcttctctaacataaaaatattggatttcccttctaggacaatggctagttacaaaaacgtggatcatttggtttaacctagcagatacatttat

SEQ ID NO: 306618 - DNA, 201 bp, Homo sapiens
tgatctaaagagatcctctcacatcagtctcataagtagttgggactacaggtgcatgcaactgtgcctggctaatttttttcttttgtatttatagaggkagtgttctcactatgttgcccagggtggtcttgaattcctgggctcaagcgatttgattgcctcaacctcccaaagtgctgggattacacgcctgagcca

SEQ ID NO: 306619 - DNA, 201 bp, Homo sapiens
tataaattatacaagtcacataactttttgaacactgtttccttatttctaaataagagtaacatttttatatgctttccagggcttctgttttgtgatgwtatgcaataaagcattaacacagtgcctaccagtagaaaggcagaatatgtcttagctagtagtgctactaatatttcagaaaagtcagaggactgactt

SEQ ID NO: 306620 - DNA, 201 bp, Homo sapiens
atcctctcacatcagtctcataagtagttgggactacaggtgcatgcaactgtgcctggctaatttttttcttttgtatttatagagggagtgttctcacyatgttgcccagggtggtcttgaattcctgggctcaagcgatttgattgcctcaacctcccaaagtgctgggattacacgcctgagccactgctgcctgcc

SEQ ID NO: 306621 - DNA, 201 bp, Homo sapiens
ggtactctggtttcctttcacatcctaaagatgtgcacataaggtgaattggcatatctaaatggtcccagtatgagagagagagagagagagagagtgtrtgtgtgtgtgtgtgtgtgtgtgtgagactgtgccctgcgataggatggtgtcctgtctggggctggttcctgccctgtcccctgagttgctgagataggc

SEQ ID NO: 306622 - DNA, 201 bp, Homo sapiens
gttattttgcattgttactatatttggtagtctgacattggaagaaatggaccattactgtacttgcatattttattctaattcccattttactaaaaatktggcatatgtaaagccttttcttttagaaaaatgagttatatttccttaaaaaattattccatgtatctacatggtttctgtgttttcgaaggaaaacat

SEQ ID NO: 306623 - DNA, 201 bp, Homo sapiens
gttactagtgtatgcactgtatttgtgagtttttcttctctttaaatgtgtacagctcctttggttgagcgatgtagatgttgttaaaactgacccagctrttgcaatgatctcatgtctttgtaccattcctgggatatttggcaagttctctatgagaccttcacctatattgattggcttttgagatgtattgatcaa

SEQ ID NO: 306624 - DNA, 201 bp, Homo sapiens
aaataaataaatataaaaataaaaataaaaacaaagggggaggatcccaaaagaaaacatttctttgatgctggctttatgtgactaaaagctataatatyctgtcaatttttgtttttaaatttacagtagtaaccattattattaaacaatttatcttggatggctctctctaggtgtataaattatacaagtcacata

SEQ ID NO: 306625 - DNA, 201 bp, Homo sapiens
gggtactctggtttcctttcacatcctaaagatgtgcacataaggtgaattggcatatctaaatggtcccagtatgagagagagagagagagagagagtgwgtgtgtgtgtgtgtgtgtgtgtgtgagactgtgccctgcgataggatggtgtcctgtctggggctggttcctgccctgtcccctgagttgctgagatagg

SEQ ID NO: 306626 - DNA, 201 bp, Homo sapiens
gtagtctgacattggaagaaatggaccattactgtacttgcatattttattctaattcccattttactaaaaatgtggcatatgtaaagccttttcttttrgaaaaatgagttatatttccttaaaaaattattccatgtatctacatggtttctgtgttttcgaaggaaaacattgatcgattaagagatgaaaagcact

SEQ ID NO: 306627 - DNA, 201 bp, Homo sapiens
ccgggtactctggtttcctttcacatcctaaagatgtgcacataaggtgaattggcatatctaaatggtcccagtatgagagagagagagagagagagagwgtgtgtgtgtgtgtgtgtgtgtgtgtgagactgtgccctgcgataggatggtgtcctgtctggggctggttcctgccctgtcccctgagttgctgagata

SEQ ID NO: 306628 - DNA, 201 bp, Homo sapiens
gtttctgtgttttcgaaggaaaacattgatcgattaagagatgaaaagcactgaattgcaaaggctttcaaaaataaatattttatatgcatgtcccttcyttattcaaattatgaagcatttcaaacatgcagaaaagagcttatctattctttgtgaaattgtaggcatcacatttaactgaaataaaaaatacatata

SEQ ID NO: 306629 - DNA, 201 bp, Homo sapiens
tacataggtatacatgtgccatgtggtttgctgcaccgatcaaccggtcatctacattaggtatttctcctaacgctatccctccccttgccccccacccmctgacaggccccagtgcgtgatgttcccctccctgtgcccatatgttctcattgttctacttccacttatgagtgagaacatgtggtgtttggttttctg

SEQ ID NO: 306630 - DNA, 201 bp, Homo sapiens
cttctttattcaaattatgaagcatttcaaacatgcagaaaagagcttatctattctttgtgaaattgtaggcatcacatttaactgaaataaaaaatacwtatagctctttcagagcagaatagaatttttcggtaagtttttctatttgcagcaggtaccaaaacttcagtcacacatctgccatttgccctttcacaa

SEQ ID NO: 306631 - DNA, 201 bp, Homo sapiens
tcatgtaggaaggatcggtgggactaaggaatgcctctgtctttacatcaggtttctctgttaaaataattatctgtgctatggagagatgtgctttccargtactttcacaaaaacaatatccctagtggtaaattaacataaggctattattctgttccaagtaagcaattacccaatttggagagtttcctggaacag

SEQ ID NO: 306632 - DNA, 201 bp, Homo sapiens
tcttcctctggtctttactcttcatccacattaccatcacctttggctgctccccagatcttgtactattgaaacagtcttctaactgccttccctgtcaytaggctctgctcatattagatgatcaccagggtgttcttcctaagaaacaacatatttctctatgccacttaaaaatctatttcttaaaaaatgctgtta

SEQ ID NO: 306633 - DNA, 201 bp, Homo sapiens
tagacttgcatctttgggcttggcattccaaggatatatttttttttcctctctctctctctctgtctctctctctgtgtgtgtgtgtgtgtgtgtgtgtktttctctttccttccttctggtaaattcttagcagatttcaatgtatattatccagccattctccaaaaaaataataaatattgtaagttcccaccatct

SEQ ID NO: 306634 - DNA, 201 bp, Homo sapiens
aaggtatggagctcagaaaagaaggttagggctggagatcaaagtggaagttgaaaccagaagagtataggcatcatctagggagaaactgtagcgtgagmtaagggatgcatatggaacatgagatatcacagccaataaaagatgaagcagagaaaacaagatgcaacaaacatattgaaaaagagctggcaaagaagt

SEQ ID NO: 306635 - DNA, 201 bp, Homo sapiens
tagttggccaaacttaggtgacttgcctaaacaaccaggcagtggggaagaaatatcttgtcctcctttgatttaatagtaggaactggggacctgtctcyctctaggatgcaaacaaggggaatttcagtctaataagaatggggttcaaatgctgggcagctcaagacagaaaaaagcaaaataatgctgcaatatatc

SEQ ID NO: 306636 - DNA, 201 bp, Homo sapiens
tttatttgcttttataaatcggcagatagacttgcatctttgggcttggcattccaaggatatatttttttttcctctctctctctctctgtctctctctstgtgtgtgtgtgtgtgtgtgtgtgtgtttctctttccttccttctggtaaattcttagcagatttcaatgtatattatccagccattctccaaaaaaata

SEQ ID NO: 306637 - DNA, 201 bp, Homo sapiens
acaaggggaatttcagtctaataagaatggggttcaaatgctgggcagctcaagacagaaaaaagcaaaataatgctgcaatatatcgtttggtatttttwattggtctgtaactgaaaactgtatttttgggattaagtatacagagacagctctcacactgggatgagttagaaaggcactctgttaccaaatgagctt

SEQ ID NO: 306638 - DNA, 201 bp, Homo sapiens
tctttatttgcttttataaatcggcagatagacttgcatctttgggcttggcattccaaggatatatttttttttcctctctctctctctctgtctctctstctgtgtgtgtgtgtgtgtgtgtgtgtgtttctctttccttccttctggtaaattcttagcagatttcaatgtatattatccagccattctccaaaaaaa

SEQ ID NO: 306639 - DNA, 201 bp, Homo sapiens
ttattgtattcttgctcttgttagctcttttcaagttagtcgttatattaagcctcagtgaaataaaaggtatgtgtaagagtgtattttatgtgtatgtwtatcttatatatatagtactagtcattttaaagtatctttattttcaccatcactaattttatgttgaatttacttctgtgtgtggcaagtgtgctctgt

SEQ ID NO: 306640 - DNA, 201 bp, Homo sapiens
tttcatattggcatttagatggtttctctttatttgcttttataaatcggcagatagacttgcatctttgggcttggcattccaaggatatatttttttttcctctctctctctctctgtctctctctctgtgtgtgtgtgtgtgtgtgtgtgtgtttctctttccttccttctggtaaattcttagcagatttcaatgta

SEQ ID NO: 306641 - DNA, 201 bp, Homo sapiens
acaattatgaatttttatgtatttattcactaaataagaacgtgtcccctgaagggcatttgagcaattttcatgaatacatgtatactgggaaaattgayaaaaccaattatgtgttaaattttcctgatttaattcaaactgcaaattcctattatcttaactaaaggtaattttttgaaacataactatggcagtagt

SEQ ID NO: 306642 - DNA, 201 bp, Homo sapiens
caggagaatcgcttgaacctgggagatggaggttgcagtgagccgagactgcaccaatgcacactccagcctggatgacagagcgacactctgtccccacygccaccaaaaaaaaaaaaagaattctgattaaagtgtaggtttatgccttttttcccactgtaaaaataggtattactttacattttaattaggtaaatg

SEQ ID NO: 306643 - DNA, 201 bp, Homo sapiens
gcagtggtttgtagttctccttgaagaggtccttcacatcccttgtaagttggattcctaggtattttattatctttgaagtaattgtgaatgggaattcsctcatgatttggctctctgtttgtctgttattgatgtataggaatgcctgtggtttttgcacattgattttgtatcctaagactctgctgaagttgctta

SEQ ID NO: 306644 - DNA, 201 bp, Homo sapiens
ggagtgttcttccatttgtttgtgtcctcttttattttgttgagcagtggtttgtagttctccttgaagaggtccttcacatcccttgtaagttggattcytaggtattttattatctttgaagtaattgtgaatgggaattcgctcatgatttggctctctgtttgtctgttattgatgtataggaatgcctgtggtttt

SEQ ID NO: 306645 - DNA, 201 bp, Homo sapiens
aggacaacacaaaccagacaaaattctcatttataatcgtccaaatatggtaatctgaatattgaatttggttcttgcttatcgtaatatgctaagaatgrgtttagtttttaccatttaaaagagacatttgatttataagctattaagtatactgctgaatgttattgttatttctaaaaaatatatgaataagactta

SEQ ID NO: 306646 - DNA, 201 bp, Homo sapiens
ccatccagagggcccaaattactctacaaaaatgtctaattttaacttttgtaaaatgtatatttacacaaaatatatttttgaattttctacggtaggcrtttattcctttgtattattaataaaataatgtcaaggtcattaatgaggaatttagctgttgaaaaggttactattttttttttataaaccactgtactt

SEQ ID NO: 306647 - DNA, 201 bp, Homo sapiens
ttttttgagacagtctccctctgttgcccaggctggagtgcagtggcgcgatctcggctcactgcaagctccacctcccgggttcacgccattctcgtgcsttagccccccgagtagctgggactacaggcgcccgccaccacgcctggctaatttttttttttttttttttttttgtatttttagtagagatggggtttc

SEQ ID NO: 306648 - DNA, 201 bp, Homo sapiens
tatattagcagatttttttttaattttctcagaaaacgaacgtggattagtaacagcacattggatgttttatcacaatttaactaaaacctttttgacayccttatagatttaaaggtattatcttctatagatgaaaattaccatgaataattctaggtgattgcacttcacatatagacatcatttatcagtgattca

SEQ ID NO: 306649 - DNA, 201 bp, Homo sapiens
caattatgtgttaaattttcctgatttaattcaaactgcaaattcctattatcttaactaaaggtaattttttgaaacataactatggcagtagttgtaaytataaaggtcaaaaaatttagaggagaaaattattctgaaatcaagggccatgtcccatgagaattcttccttccaacccctgccctgtaggatattttc

SEQ ID NO: 306650 - DNA, 201 bp, Homo sapiens
accagtgccggtatttaaggatctatagaagatgatgctgtgttaatgcatttattaatgttaaaatgttctagtcacatttaagtggtctgacccaaccwtatgtttctgtgagctatgttgtataatgcaagtataatgtatatattgtataatgcttgtgtacatataatgtacacaagcagaaaggcttgtatttca

SEQ ID NO: 306651 - DNA, 201 bp, Homo sapiens
gaacacttggaaatttactcctccaacctctcaataaaaaaataggatttctttatatgttaagttgttggttttatttacttttaaatacgttgatgtgyactatttctttttatttttctttcattcttttttatcttgatcctaattcccttctgcattttcaagcagaagatatgcaggtggagaaaccttgattaa

SEQ ID NO: 306652 - DNA, 201 bp, Homo sapiens
tcagggaaagtacttgtcacttatgaaatgacatttgagcatagactgaaataaagggtgggataggaactatgtgaatatttgagtgaaaattgtattarggctctgaaacaagagtagattcagaccattggaaaagccatgaggactcagagctcatgagaagagaatggtagaaagtgaggttaggtgagtatccag

SEQ ID NO: 306653 - DNA, 201 bp, Homo sapiens
gacaatgttttggggagtctacctgaacccacaatggagtggcgtgagtgagaaataaacatttatttttgcaagttactgagattttgcaatcgttaccrtatggcataatccagcctgtccttactgattgaggggtaaataataactttatgactgttgggataatttagtctgctaaagtacataaacattgtcagg

SEQ ID NO: 306654 - DNA, 201 bp, Homo sapiens
gatgacaaatgaatcggcaccccataacataaatccccttagaacagcagtatttacttacatgtgggaaattaagggataggatagatacagtttgtgcygtgagattctggaagctattctgcgtatgtttctggtcttggatccctggctacatccagtgtgtttgaaagaagtctgattgaaccaattatgcagcag

SEQ ID NO: 306655 - DNA, 201 bp, Homo sapiens
gttatataaagaggaagaatttttctccttttgacaaactctaaattaaatgaatttattcatagcgttgtacacagtaaaggtatatttaaaatataaaatcatcattattttatagatttaaaaatattttaagaaggtatctgcttggcatgaaaaattgcctgttagaaataaggcctctcaaaataacctcatcaa

SEQ ID NO: 306656 - DNA, 201 bp, Homo sapiens
gtttgttattcactgtcctcacccctattgcattatactttgcctgtcccagccgttaacttttccattgtgatcatttttgtttgcagtgcctcgtaagrcagtaatgatccatggaaacattttgttaagaaggtgataggatgaaagtattatcagaagccaagtttgacttcagatttcaatatttcttggtaggtt

SEQ ID NO: 306657 - DNA, 201 bp, Homo sapiens
atgtaggtgtagcattttttatcttttataccatatttttactgttatttttctatgcttaaacatgtttaggtacacagtcacttaccattgtgatacarttgtctacagtattcagtacagtaacatgctgtacagatatgtagccttggagtaagaggcaataccatatagcctcagtgtgtggtaggcttcaccatc

SEQ ID NO: 306658 - DNA, 201 bp, Homo sapiens
gccaacatggtgaaaccccatatctactaaaaatacaaaaattagctggatgtggtggcacacaccggtaatcctagctacttgggagactgaggcaggaraatcgcttgatctagggagtcagagccaagattgtgccactgcactccagcctggtgacagagtgagactctgtctcaaaaaaacaaacaagaacaacaa

SEQ ID NO: 306659 - DNA, 201 bp, Homo sapiens
gagacaaattgtggagatggaagacagtgataccgacaatcctgatcctgtgtaggcctaggctaatgtgtatgtttgtgtcttagtttttaaacaaaaaagtttaaagttttttaaaaattgaaatttttaaaatggaaaaaacttatagaatgaacatgtaaacaaagaaaataattttgttcagttgtacaatgtgtt

SEQ ID NO: 306660 - DNA, 201 bp, Homo sapiens
taggagatgacagctctatgcttgccctagtagagcttccagtgagacaaattgtggagatggaagacagtgataccgacaatcctgatcctgtgtaggcytaggctaatgtgtatgtttgtgtcttagtttttaaacaaaaaagtttaaagttttttaaaaattgaaatttttaaaatggaaaaaacttatagaatgaac

SEQ ID NO: 306661 - DNA, 201 bp, Homo sapiens
agatccttcaggtggtattccagaagaagtcattattgtcataggagatgacagctctatgcttgccctagtagagcttccagtgagacaaattgtggagrtggaagacagtgataccgacaatcctgatcctgtgtaggcctaggctaatgtgtatgtttgtgtcttagtttttaaacaaaaaagtttaaagttttttaa

SEQ ID NO: 306662 - DNA, 201 bp, Homo sapiens
ggaagatgtctcaccagtaatttttatattcattgcatgttgaaataataacattttggatatatgtattttaataaaatatattattagagctaatttgwccttattcttttttttctctgaatgtggctactagaaaattttaaactagatatattttttggatttgcagctcacattatatttccattggaccatgcc

SEQ ID NO: 306663 - DNA, 201 bp, Homo sapiens
ggagaatggcgtgaatccgggaggcggagcttgcagtgagccgagattgcgccaccgcactccagcctgggcagaagagcgagacttcgtctcaaaaaaamaaaacaaaacaaaacaaaaaaaatacataaatgtttctactactagctagtttcttatctattttcattcactgattaacttcagaaaaatgccttttaa

SEQ ID NO: 306664 - DNA, 201 bp, Homo sapiens
aacatggcactacttttcagtcctaggattatcaacattatggcctttatattttttattttgtcttgtttttacatagcatttaaagttataggtatatyaacctcattttaaacgttaaaactttacactaatctttgttatactttaacctacttttaataatttaatgtttaaataattttttcattctgctataac

SEQ ID NO: 306665 - DNA, 201 bp, Homo sapiens
aaataacttttttttcattttacaggttatgtatagatgataaagttaacttacatacaaaaaaaatatgaataagtaaataaagttcctgtactctcacytctcagcaattacatcattaacttcataatatacatgactatctacatttttttggtatagattcaggggtacattacaagttcgtttcatgggtatatt

SEQ ID NO: 306666 - DNA, 201 bp, Homo sapiens
tagtactcaacaggcagtttttcaacccttgcctccctccctcacaccttttggactccccagagtttctagttttcatcattatgtccatgtgtacccawtatttagctctcagttataaaagataacatgcagtatttgattttcagtttctgatttgactttccactttttgacaaacattttacaatggcgaatcaa

SEQ ID NO: 306667 - DNA, 201 bp, Homo sapiens
ttcttatgagttaatgaatttttttataaagattatatattcacctttttttagtatatagataatcaaatgtagccttcatctttgaattgtttccaatrtgttggctttggttgattctactttagaaaaagagcctgaagttcttttgttttattgtttatttatttataaattgtgatgaagacccatgtatatagg

SEQ ID NO: 306668 - DNA, 201 bp, Homo sapiens
acagtgaaactagatatttgaatatattataaatctttttgtattagaaaggtaaggtagaaataatcggaaaacaaaggttaccaccaagatttctctcyctcctgctctctctttaacaaaacagattttgaaaccttttttcagaaactccttttatctataagagcaagaatttctttttgaaacccacattgccag

SEQ ID NO: 306669 - DNA, 201 bp, Homo sapiens
tcccttctcttatattcttttcccctaaatatctatgtgtcacatgtcttctcttctttcagatgtttacttaaatgtcaccttctcagggaggtctttcytgttcaatacaaaattgaaaaccctctccatgacatttcatactcagtttatgtttcctttttccgttagtatttatcactcttttacacaccacacatt

SEQ ID NO: 306670 - DNA, 201 bp, Homo sapiens
ccatcttttatctaggataggaggcatctaggagtgtaatatttcgattggccaggaatgtattattttccagggtgatggacatcctttgtcctgccctrgttatttaaggattgctcagcactctaatgcttcccttcccacatggctgtcactgctgcctcaattattcacctttccccttcagaatgatcttttagg

SEQ ID NO: 306671 - DNA, 201 bp, Homo sapiens
agatacttcatgttctcactgttaagtgggagctaagctatgtgtatgcaaagacatatagagtggtataatggacactggaaacccagaacggggataarggatgaaaaactacctattggatacaatgtacactatttgggtgacaggtaccctaaaagtccagacttcaagctatttaaataaatacataaataaaat

SEQ ID NO: 306672 - DNA, 201 bp, Homo sapiens
agaaaattattatgaaatgtattaaatagaaacacttttgaatagaaaaattattatagttaatatttgggattctaatctgttgtagtcttcttatgagwtaatgaatttttttataaagattatatattcacctttttttagtatatagataatcaaatgtagccttcatctttgaattgtttccaatatgttggcttt

SEQ ID NO: 306673 - DNA, 201 bp, Homo sapiens
acaattctttaaaatttttccctaaggtttatagatgaaaaaagaaagtcttaaacatgttaatttgtctgcagtcatttaaataactagcaaatgacatrgctaagattcgaactctagtctgttggcctcaaagctcaggccttaacattgtactacattccttttcacatccatcagctccttaccacattccctagt

SEQ ID NO: 306674 - DNA, 201 bp, Homo sapiens
aaattcttgaggctgaggaagagaaactatataaattgagagttagaaattggagtcaacaggagaatccgaaaagcaaagtgtactaaagaagggtgacragaaggtttttcagaggatgaggatcaacagtgccaagtgctacagagaaaagactgataagacaactgaagagcactttggtgatcagggtatcattag

SEQ ID NO: 306675 - DNA, 201 bp, Homo sapiens
agaaggctttgggtaagaacagtttagaggaatggcaggaacacacacacaatgtatgcatatgtgagtatatgtgtgctgtttacattacatatacttayagtatataagtgctgaacatgtaatttgttcagaacttatgatgttctaagttctaggcccaatgctaagtacttccaaatattttttcttatttaattc

SEQ ID NO: 306676 - DNA, 201 bp, Homo sapiens
aatacaaaaaaattagccaggcgtggtggtgggcacctgtagtcccagctacttgggaggctgaggcaggagaacggtgtgaacctgggaggtggagttckcagtgaaccaagattgcaccactgcacttgcagcctggcaacagagcgagactctgtctcaaaaagaaaaaaaaaaagattaatataaagtacagaaagc

SEQ ID NO: 306677 - DNA, 201 bp, Homo sapiens
cacagtgaaaccccgtctctactaaaaatacaaaaaaattagccaggcgtggtggtgggcacctgtagtcccagctacttgggaggctgaggcaggagaayggtgtgaacctgggaggtggagttcgcagtgaaccaagattgcaccactgcacttgcagcctggcaacagagcgagactctgtctcaaaaagaaaaaaaa

SEQ ID NO: 306678 - DNA, 201 bp, Homo sapiens
ccacaggttgctaaaactcagtaactaaacaaattatttgtcacctctctacttctacaaatcccaaaatgccacctctcctgaaaatactgcttttactrtattgcgctctttgcgttggcatcactattgatctagaatagaaactttctgtttccatctagaatataaactttctatagaaactttcaaagagtcagc

SEQ ID NO: 306679 - DNA, 201 bp, Homo sapiens
cattttgaagcccttattgctataccttacatattttaagaaatcaatatctatttgctgattaactgactgaatagaaagaatgaatgaaacaaagaaaygcatgaaaggaaggaagggtttaggtacgttggtcacacagcatgaagtgtctttccttcttattcctttttcagcttcatgaacctattcttcaagatc

SEQ ID NO: 306680 - DNA, 201 bp, Homo sapiens
agctactgaatggtagtgtgataatgtaacaacaaagctttgtgcatttgtagcatggagaaaggaccaacctggccacagcagttcagagaaggcttcaytattgggggaacccacccccgatatttcgtaggttctttctattttccctaagtgtcggccgatctgagaaataaagagaaagagtacaaagagaggaat

SEQ ID NO: 306681 - DNA, 201 bp, Homo sapiens
gagtggttgtctttgttagtaggcacttcctacaaggaacaaatatgagaatttcatttatttatgtaaacacagatagatacatagttagataaacaagkagatagatagaggttaagcccttgccatgcatataacacctgtttgaccctataaatgaaagaagtataaggaggaaatttgctgaaaacaaaagataca

SEQ ID NO: 306682 - DNA, 201 bp, Homo sapiens
gcatttgtagcatggagaaaggaccaacctggccacagcagttcagagaaggcttcattattgggggaacccacccccgatatttcgtaggttctttctawtttccctaagtgtcggccgatctgagaaataaagagaaagagtacaaagagaggaattttacagccgggctgctgggggtgacatcacatagcggtagga

SEQ ID NO: 306683 - DNA, 201 bp, Homo sapiens
ctgtggctgcttttcgaaatgcagtgtttgtcaaacagctacccaaaaccagatctggcaagatcccccgatcagctttatctgccattgtcaatggcaarccatacaaggtaaattatcaaagatatttaatcctgggttctaagatatttttcttcatttctttggcatcagcaaagctcttaaaaatggttctcaaat

SEQ ID NO: 306684 - DNA, 201 bp, Homo sapiens
atcaccactcagtaataggagagtagggttcaggtctaaattacatttgtgatcttcgcagcagaatgcacaaagccttctgtatatatcagttgaactgrcattaaaaacttcaccatatacagatttaccttctaatccatctcctaaatctgattttttatataaattgcaggtagatactacctgaatcatctatcc

SEQ ID NO: 306685 - DNA, 201 bp, Homo sapiens
ggccatttggaagtacatgtagaatagaagcagtttggattgctaagcaaaaacgtatagatgacaatgttttggggagtctacctgaacccacaatggartggcgtgagtgagaaataaacatttatttttgcaagttactgagattttgcaatcgttaccgtatggcataatccagcctgtccttactgattgaggggt

SEQ ID NO: 306686 - DNA, 201 bp, Homo sapiens
gaaggtgatggggaagcagaataaatatcagatatggccttccaccaaaggctctgacaatatattcaaggaattaagattaatataaagtacagaggccrggcgcagtggctcatgcctgtaatcccagcagttcgggaggccaagacaggcggatcacgaggtcaggagatcgagaccatcctggctaacacagtgaaa

SEQ ID NO: 306687 - DNA, 201 bp, Homo sapiens
taaataataactttatgactgttgggataatttagtctgctaaagtacataaacattgtcaggtatatcataaaatagctaacctttttattatctgttaycataaaaacagctgttatgaaaacagctaacaactaagctttttattgtctccatagtatgcgctagatacaatactaagtgttttaatttgtttaatat

SEQ ID NO: 306688 - DNA, 201 bp, Homo sapiens
tccactaagtcatcctatactgtatttttcacatgtacaccttctgaatacttaactcctcccaggcttcattttcacagtgtaattttacctacatggakgtagttatcttctctttgcaagaattttgtatttttatttatattaaccagtttaatttgtttattcctttttcaaggacagggatttgcttcttttaaa

SEQ ID NO: 306689 - DNA, 201 bp, Homo sapiens
gggactggtgcagcctcatttaactaaaaattgttttcagggcagtggttgacaactcagatgcctacagaagagggtggatgggagaaaaatcaattgtmggtatgtatcacactttctgtatggttagggaactatggtgtaagcatataacataaaataaataagaggtaaaaaatatattttaaactcagaatgaaa

SEQ ID NO: 306690 - DNA, 201 bp, Homo sapiens
aaataataactttatgactgttgggataatttagtctgctaaagtacataaacattgtcaggtatatcataaaatagctaacctttttattatctgttatyataaaaacagctgttatgaaaacagctaacaactaagctttttattgtctccatagtatgcgctagatacaatactaagtgttttaatttgtttaatatt

SEQ ID NO: 306691 - DNA, 201 bp, Homo sapiens
tttaatgaacatctcaattctgtatttccctgtatctgtaatctccactaagtcatcctatactgtatttttcacatgtacaccttctgaatacttaactsctcccaggcttcattttcacagtgtaattttacctacatggaggtagttatcttctctttgcaagaattttgtatttttatttatattaaccagtttaat

SEQ ID NO: 306692 - DNA, 201 bp, Homo sapiens
tgcattttctttacaattattattcctgtatgtgattttttttttccagactccaaatttctttggtgtaaggaccaaccatttccttcttatttttgtayctgtagacttaacctcagtttaggacatacagctgatactacataaattgaaccaatgacaggacatttatgtgttaaaatggctttaaattagtaccaa

SEQ ID NO: 306693 - DNA, 201 bp, Homo sapiens
tccagaagaagtcattattgtcataggagatgacagctctatgcttgccctagtagagcttccagtgagacaaattgtggagatggaagacagtgataccracaatcctgatcctgtgtaggcctaggctaatgtgtatgtttgtgtcttagtttttaaacaaaaaagtttaaagttttttaaaaattgaaatttttaaaa

SEQ ID NO: 306694 - DNA, 201 bp, Homo sapiens
gtttggaaatacagtttcttaagaaacttgcctaaacttataaaactagtaaatagcagagctaagatttcaacccaggctggctgaatttagcatctgtrctcctaaatatattctattgcttgttgaaaatagtctcaattaattttagatttttaaaaattttttaactcttctcctctgaaaccgtttaaagttttt

SEQ ID NO: 306695 - DNA, 201 bp, Homo sapiens
aggatgaacatttttcaattattacacattgtttttcgggttagtctaaactcgatgggcataacaagactccgtatcatatctaatattgtttcttcatrcctttccagttcatctcacaacccacttcatcctgaatgttttctctctctatactaaactgccttcactttttcagccaaatggcacatgctgtgatga

SEQ ID NO: 306696 - DNA, 201 bp, Homo sapiens
accgtttaaagtttttacttttctttttaaatagtgatataagaagagtttttaaagtttgggtctacatctcaaaaacattctagatatggaataaaaartagctgttctttgaaaaaataaacttttaattttttattgtgtatgacagtcctaaaggtgggaggaagggagctttaaatgagttgacagcttctttag

SEQ ID NO: 306697 - DNA, 201 bp, Homo sapiens
gcttctttagaaatgtttcctggacaatagaaagcaatattaatctcttccttaaaactactctgttgattttctggcttaaggaaaatctataatgaccrcattattcattgcttatagtatgctttaatgttatttttataagaacatgataaatagcctaattaatttgtctaattatgaacacttggaaatttactc

SEQ ID NO: 306698 - DNA, 201 bp, Homo sapiens
cttctttagaaatgtttcctggacaatagaaagcaatattaatctcttccttaaaactactctgttgattttctggcttaaggaaaatctataatgaccayattattcattgcttatagtatgctttaatgttatttttataagaacatgataaatagcctaattaatttgtctaattatgaacacttggaaatttactcc

SEQ ID NO: 306699 - DNA, 201 bp, Homo sapiens
gtgttattccatagatattgccaaactttggaaaacaaatgatctaaaaatgttaaatgcttcctttgagtgtttatgggatgagtcaaaaatatatgtgsagagtctgtaatagaatgagaaggaaactaacatgtgattattctctagcttgttactgagtcattcctttctgtaacctgatgtattatcgtcaataat

SEQ ID NO: 306700 - DNA, 201 bp, Homo sapiens
tttatcttcctggagtcctctatttttttctctctggttcattttgggattacattctgtgatttgctacttattttttttaggcccctgatctttatcawgggagcctaaaatcatgttagaagtatgcattaactagtcagcaaacatttcccaagcacagaatgtcagggactggactgttggtcctgctgatacaaa

SEQ ID NO: 306701 - DNA, 201 bp, Homo sapiens
tatctgatttattgctttgggttgggatcatcagtttagtgctccagttagcaactgaagagatttttctataatgcaattctgagcaaatcgcctttacraaaccccccatgtctcccattgttcctggaacaatattcaaatttcttaacatgggattttcatcccgctgtttacttctttcacttggtctctcattat

SEQ ID NO: 306702 - DNA, 201 bp, Homo sapiens
ggctccagctggtccctccatttggggtccttgacttcccacaacacttcactgtggaggtgatgtagaagctgggtcaagtaataaaaatagaagtgtgtgccccacacataggtgactcttccacaggtgtcccctgaaggtctgcagaagatttatccaagaggtggatttgacatagttaataatgaaaatgtgcac

SEQ ID NO: 306703 - DNA, 201 bp, Homo sapiens
accaacacagtggtgacttctgataaaaagatgtgccttcttatcaatagttttctttttgattactgcttttcaagtcttatttaagacataggtgtttktcctgtatttcattttctagaaattttattgttcattttacctttcatacttacaactataatctacctggaatagatttgtatgtatgacatgaagtaa

SEQ ID NO: 306704 - DNA, 201 bp, Homo sapiens
aggagtttttcatactttattttggatccaagtcctttactgacttatatgtattataaacaatcttctccaacttctgacttaaattttccttttaccawcacagtggtgacttctgataaaaagatgtgccttcttatcaatagttttctttttgattactgcttttcaagtcttatttaagacataggtgtttttcct

SEQ ID NO: 306705 - DNA, 201 bp, Homo sapiens
aatgggtgccagcactgagatgacacagagtttggaactacctgacaagtattttaaagcggccatcataaaagtgcttcaaggaacaattatgaacacaytcaaaacaatttttttagaaagtttccataaataagtagaaatcatcagcaaataaatgaaatatataaaaaataaccaaatggaaattttagaacttaa

SEQ ID NO: 306706 - DNA, 201 bp, Homo sapiens
atgtaaaataagaagtccaaaaggaattttaaaagctatcttctttacagatcgctttggggaggccctcagtcctgtctctgagagcttacatgatgaargtgcatctttgacttctttacaaggacatctaacatttctgtagtgactatttatttacaggagctgagattctacccatttcatttgccctggagtgca

SEQ ID NO: 306707 - DNA, 201 bp, Homo sapiens
tgtcccaactcttgggaaggtggaggaggatatagaggaatggacatgctattttaatatccacacagagaaatgtcatatatgctttctacacacatccyatttggccatcagctgctaggaaggctggagaaagtagtgtaggtggaggcatcttgatggggagttaggagttcctgccacaagtactctttcatttca

SEQ ID NO: 306708 - DNA, 201 bp, Homo sapiens
tgaggtttcttcaaagttacccacttgtggccctgggggcattctggattgtaggtctggtttctaggaacctgctctcatttggagtttggttctttgcmagctcatcatgacatttctgaattggttgactggggaccactgttcctaagagagtccctaaagtgttatgaaaaggactgactgatgaagcatgctttc

SEQ ID NO: 306709 - DNA, 201 bp, Homo sapiens
ttcaacatatgcaaatcacaaaatatgagtcatcacataaaaataactaaaaacaaaagctgtgtgattatctcaatagatgcagaaaatgacataaatawaatttagtatcccttcattttaaaaccccaaacaaggcatcaaaagaacatacctcaaaataataaggctcatctataacaaatctacagccaacaatat

SEQ ID NO: 306710 - DNA, 201 bp, Homo sapiens
gtattctaaatgaatgcctttccttattacagtcaatcctttcccatggtaccgtggcagactgtgctgttgttggcaaggaagatcccttaaaaggtcaygtccccttagcactctgtgtattgagaaaaggtgagagatctttttctccctgattgcttgggacctgaataattaactaaggttaattcagtgcttacc

SEQ ID NO: 306711 - DNA, 201 bp, Homo sapiens
acttatgtttaaattactttcactggcatttatttattcagaaataattctgagccagacgcagtggctcacggctgtaatcctagcactttgtgaggccraggtaagcggatcaattggggtcaggagttcgagaccatactgaccaacatggtgagaccccatctctactgaaaaatacaaaaaaattagacaggcatg

SEQ ID NO: 306712 - DNA, 201 bp, Homo sapiens
tatcttgctatattaggtatagttcccttcagtgttttttttttggaaataattatagacttacaagaagttgcaaaaataatgcaaagagttcatttgtrtccataatccagcttcccccagtaataacatcttacataactatagtacattattaaaatcaaaattgtcattggcataatgcaatgaactaagctatag

SEQ ID NO: 306713 - DNA, 201 bp, Homo sapiens
cattattaaaatcaaaattgtcattggcataatgcaatgaactaagctataggtcttattcagattcaccagtttttgcacttatttatttatattttatrtgtagatgttatgcctttaaaaaatcaagaatctatgtctgtcaatctgtttgactccctggatctctatttctgttcttatagagaaatggaattgtac

SEQ ID NO: 306714 - DNA, 201 bp, Homo sapiens
ctcataacattgaagaattcaaatcagagcactagaggcagctccctttggagcccattaattctcctctcagcaccaagaaaaaagaaatcagcatacarggatgtgttgattcagctactacgaattttgaagaatgagcagaagatataggagaaaactcggtggtctctccccttgtagatctatcctttaagtgta

SEQ ID NO: 306715 - DNA, 201 bp, Homo sapiens
gaaagcacttacttttaaagaggatgaacatttttcaattattacacattgtttttcgggttagtctaaactcgatgggcataacaagactccgtatcatrtctaatattgtttcttcatacctttccagttcatctcacaacccacttcatcctgaatgttttctctctctatactaaactgccttcactttttcagcca

SEQ ID NO: 306716 - DNA, 201 bp, Homo sapiens
acatatttcaatttcatgatacagtaagcccaggcttccacaatgacagtggtgtggttaagcaagaaatgagattactgttccttggctagagtattacrtaggtctaaaatggaatgttagtagttactgtttctccttaaatccggctttagagtaagccataaactggttggtataattggtcttgatatagcagtt

SEQ ID NO: 306717 - DNA, 201 bp, Homo sapiens
agaatgtggaaagcacttacttttaaagaggatgaacatttttcaattattacacattgtttttcgggttagtctaaactcgatgggcataacaagactcygtatcatatctaatattgtttcttcatacctttccagttcatctcacaacccacttcatcctgaatgttttctctctctatactaaactgccttcacttt

SEQ ID NO: 306718 - DNA, 201 bp, Homo sapiens
gcaagaataattatttttcacataggcttttaaaatttggctttgatggaattttaattcatttttaatttaattaattaattttccattgttgttgtttygagacagggtttcactttgttgcccaggctggagtgcagtggtgctatcaggctattgagttcacagactcaagtgatcctcccacctcagcctgcccag

SEQ ID NO: 306719 - DNA, 201 bp, Homo sapiens
tagtgtgtatgcgcattcacatgtgtgtgatggcaaatggtgattatacagagatatgctcccttgcctctctcttctttctagtatttcttccctttacmagactgtcatctgcagaatcaaaatccaacacatttctctaaggcaaataaatctttccgtgtcctgcctttctccttatctttgctgtctaccaatgtg

SEQ ID NO: 306720 - DNA, 201 bp, Homo sapiens
tacagaaagcagagagtctgggaggacacaaaagtacacaaaaaaacatggatacttaaaagcggacatgcacttgtaccattttctttttcttcttttgktattattatactttaagttctgggatacatgcacagaaaatgcaggcttgttacataggtatacatgtgccatgtggtttgctgcaccgatcaaccggtc

SEQ ID NO: 306721 - DNA, 201 bp, Homo sapiens
ttcctgcctattagggtctctcgtattcaggttagagaggagcttcgtcagaaagcatcagtatgttgaggaccactcataactcttggattccatcaaarggtgatatctgaaagatttaaacgtgttcaatttaagaggacattgagaaagcttatcctgcattcctacacatagagtacaacagcaatatattccaca

SEQ ID NO: 306722 - DNA, 201 bp, Homo sapiens
ttagaaaagaggaaaacactcaaatcaagaatataagctcctatctcaagaacctaggaaaaaaggaacaaaatatgcccaaaaccaggaaagaataataragttaccaaataataaaggaataagtcaggatatatgttttatagacagagatttacttttatcaatggaattggacatatttaaatacaaaacacctgg

SEQ ID NO: 306723 - DNA, 201 bp, Homo sapiens
cagagaatacacataaatcagttatatgttccaataatgttttctttgcacaaacacatagtggaccagtttgacatgtgagttgtagtttgctgaccccrgccctaaaactttggtttcttttgtattcgttttccttactcttttcctgtttgcctctaaaattttcctttacagtattccatatttctcaaacacctc

SEQ ID NO: 306724 - DNA, 201 bp, Homo sapiens
tgctccaagtctccaagtattgttgactaaaacaacccggacagtattcagtgatgaatttgttatctgaaagagctcctgatccagaccccaagaagggrttcttggacctcacacaagattgaattcagggcaagtccatagagtaaagtgaaagcaagtttattaggaaagtaaaggaaaaaaagagtgctactccat

SEQ ID NO: 306725 - DNA, 201 bp, Homo sapiens
ttttctgagagggaaatttatagcactaaatagatagattagaaaagaggaaaacactcaaatcaagaatataagctcctatctcaagaacctaggaaaaraggaacaaaatatgcccaaaaccaggaaagaataataaagttaccaaataataaaggaataagtcaggatatatgttttatagacagagatttactttta

SEQ ID NO: 306726 - DNA, 201 bp, Homo sapiens
gtggatcataggcagaaatcagccagggattctggtgctccaagtctccaagtattgttgactaaaacaacccggacagtattcagtgatgaatttgttayctgaaagagctcctgatccagaccccaagaagggattcttggacctcacacaagattgaattcagggcaagtccatagagtaaagtgaaagcaagtttat

SEQ ID NO: 306727 - DNA, 201 bp, Homo sapiens
tatttaaatacagaacacctgtatttaagtagtttattttctgagagggaaatttatagcactaaatagatagattagaaaagaggaaaacactcaaatcragaatataagctcctatctcaagaacctaggaaaaaaggaacaaaatatgcccaaaaccaggaaagaataataaagttaccaaataataaaggaataagt

SEQ ID NO: 306728 - DNA, 201 bp, Homo sapiens
gctgtcaccatcattccatagctacagcttttcctaacatccccagtcatctctacttgccaaagtcaatgggcattttcagtcttcactgtgcttgactyctcagcatttgaaagtgttggccatttgctcgatcctaatcattctctttccttccaaggtacaacgtgctcctgtctaatgtaccacatgctcctgttt

SEQ ID NO: 306729 - DNA, 201 bp, Homo sapiens
taaacatatagatacaagaattcttgacaaaatattagcaaatattttgaattcaacaattcagcaatctataaaatgaattatacactgtgaccaagtgsaatttattccagaggtacaaggctgcttcaatatctgaaaattaatcaaggtaatctaccatattaataggctacagaaaaattatataatcatattaat

SEQ ID NO: 306730 - DNA, 201 bp, Homo sapiens
ttgggaggccgaggcgggcagatcaccaggtcaagagataaagaccatactggccagcatgttgaaaccccatttctactaaaactaccaaaaaaaaaaaattagctgggtttgatggtgcacacctgtagtcccagctactcaggaagctgaggcaggagaactgcttgagcctgggagacggaggttgcagtgagccga

SEQ ID NO: 306731 - DNA, 201 bp, Homo sapiens
tgtaataccaccattttgggaggccgaggcgggcagatcaccaggtcaagagataaagaccatactggccagcatgttgaaaccccatttctactaaaacyaccaaaaaaaaaaaattagctgggtttgatggtgcacacctgtagtcccagctactcaggaagctgaggcaggagaactgcttgagcctgggagacggag

SEQ ID NO: 306732 - DNA, 201 bp, Homo sapiens; identical to SEQ ID NO: 64238

SEQ ID NO: 306733 - DNA, 201 bp, Homo sapiens
aatacctatccacctctgtaactccatctcctccattctcactctttttgttctctgctttccagccacattggtctctttgaggtatgaatggtgcctaygaagtccttccccagggtttttgccccaaccccttctccttgcctaataaatatctactcatccttcagatctactcattgttatttcctaaagaaaaag

SEQ ID NO: 306734 - DNA, 201 bp, Homo sapiens
aagctgtccgttactctctgaaaaatggctatcattcactctgaaagaagactttttttttcagtatcagtcttattcccttttataatatttgaatagtraatacatatttaaattaaaaatttttagctctcagaaaagggaaggatggaaattggcagtgatgaaaaaattgatgggaagagaagaatcatgtaaaca

SEQ ID NO: 306735 - DNA, 201 bp, Homo sapiens
ttcttcacagtctctttcagaaaatagaagaggagggaacactctccttatcatttaatgaagcttgtattgccctaataaaaagtcaacgacaaaaaaamatactacaaactaatgtccttcataaacatatagatacaagaattcttgacaaaatattagcaaatattttgaattcaacaattcagcaatctataaaat

SEQ ID NO: 306736 - DNA, 201 bp, Homo sapiens
ttaacattaggaaagacagcgaagactcagggtaggctaaggtgaagaagagaacaaatcagattcaagcaagagtctctcaaagggctgagtccaggttyttatgctggatgtgagttagcaggcattaatgagcaaggggcaaggacaaatgcaaaattaccagtttttttttttttttttttttttgagatggggtct

SEQ ID NO: 306737 - DNA, 201 bp, Homo sapiens
tattgtagcctttggccaatacctcccaactaccctctccccctccaaccatcctggctgctggcaaccaccattctattctctatcagatcagcagttgmattcttttttgattgtttctaattttttgactcttatgcagttgcagcattaataatacatgtctttttggtgtccatacacatatagtgctgttgagca

SEQ ID NO: 306738 - DNA, 201 bp, Homo sapiens
agcaggcattaatgagcaaggggcaaggacaaatgcaaaattaccagtttttttttttttttttttttttgagatggggtcttgccatgttgcccaggctrgagtgcagtggctattcacaggtgtgattataggagaaaatagaaaattatgtaaaataagaagtccaaaaggaattttaaaagctatcttctttacaga

SEQ ID NO: 306739 - DNA, 201 bp, Homo sapiens
ctttattgggggatatgatactgtcttctttagaaggatcatgagaggggtctagaggaaatgatgtttaaactgagatcaaaatgagtaggagttagacrtgtgagaagtggggaggaacattccagggaaagaaaatagcatatgcaaaggccatgaggtagacatgtttagtaagttccagaaacttaaagaaggttt

SEQ ID NO: 306740 - DNA, 201 bp, Homo sapiens
cttcaaatacttctactttattttcccttcttaaactttgatactttaatgacacatatgttagaactttttaccatatcacctatatttcacaggctctstttgatgatttttctgcttttttttcacagttgcagttagatgattttattgtaacctctagttgtatctaaactttcattgagtttataattcctaaac

SEQ ID NO: 306741 - DNA, 201 bp, Homo sapiens
acttattcagtacttatcaaaagtgtcctcttttttccatgcctcttgacatgtattcagggctgatattcagctcatgcacaaatatgtcatgttgactkatgtccattctatgttttggcttctgatatgatgtgtgcctatacattccagttacatatttcaggttatcattagatacacttctctcttaatattgat

SEQ ID NO: 306742 - DNA, 201 bp, Homo sapiens
tttgccatcagataagtgctcaatgctaatgcatggtttattattataatcacttacttagattaattgtagtttgtgtggtagagactgggggatagtcaaaaaaaaaattacagcttgcaaaaatgctggtaatatcaagatatcaggtgtcccttggtttgctaaaaatctgtattttagttttttagttgacaatgt

SEQ ID NO: 306743 - DNA, 201 bp, Homo sapiens
ccttttctctgccctctggcttgttttctacaacttataaatgtctttgactttctctggtcacaaaaccaagtcttttagacctttgcctgcttcaactrtgccatctttattttcttctccactaaattccttgaaaaaatatcctgcccagattcctgaacctcatattgtttcagttattcctcatctcaccgtagt

SEQ ID NO: 306744 - DNA, 201 bp, Homo sapiens
agtattcaatagatgattgaggcagaaaactaacaaagatatttgggactccacactcaatcaaatggacctgacagacatccacagaacactccacccarcaacaacagaatattcattcttcttatctgcgtatgagaaatactctaaaatctaccatgtgctcagccataaagcaattctcaacaaattaaaaaaaca

SEQ ID NO: 306745 - DNA, 201 bp, Homo sapiens
ctataaatatttgttgtgtgaataattgactgaagtaagctactatttaaaaccttttctctgccctctggcttgttttctacaacttataaatgtctttractttctctggtcacaaaaccaagtcttttagacctttgcctgcttcaactatgccatctttattttcttctccactaaattccttgaaaaaatatcctg

SEQ ID NO: 306746 - DNA, 201 bp, Homo sapiens
ttaactacatgcactttttttttgagacttgcactaaatctttttaaaaaggttatataacatttttaatgggaaatgttcctagtatttattgctatgtaaaaaaaaaaaaaaaattactccagaacctggcagcttaaaacaacaaccatatctcatgattttgtggatcataggcagaaatcagccagggattctggt

SEQ ID NO: 306747 - DNA, 201 bp, Homo sapiens
taatagccccatttatgacaatctgtgagtttacttgtcttcaaaagtagctcagtaagctggaaattataaagaactatctgtgataactttgtggtccyatttctgagtaactaacattcaccctttacttttacttgcactgattggattttttaaacaccataaacattgtatttgtcccccactcccaaaagagag

SEQ ID NO: 306748 - DNA, 201 bp, Homo sapiens
gcttatcctgcattcctacacatagagtacaacagcaatatattccacaatagtatagcaaaataagtaaaaactatcccaagtaaactaaataagaaggctttctatgaacctggcaactgttggaaccaaactgatatggggatgctagctgattccaatatatacccagaattagaatactaatctggaattttacat

SEQ ID NO: 306749 - DNA, 201 bp, Homo sapiens
gacaaaaaaattatacaactgccaaaatatcctccatggacatagcttcagaatcatctgaaaacctgtatcaagatatttcatgtttgatgaaatatccygaatagaaactttttatgccttctaagaagattcaagattcactaagttctacaagtgtcaagggtttctcctgaacaaagagtgtttgttgaaataatt

SEQ ID NO: 306750 - DNA, 201 bp, Homo sapiens
atcttcagttcaaacttaacagcttaatacttcttgtcatgttgggatgtgtttcttaaatgtgattttttttgagtaaaaggaaggaactttataaaatattttagaacatttcacctttgtgtgctattataatattatcttgtttttaaacgactctaaattttgtgataacctgaaattgaaatttttacttcatgt

SEQ ID NO: 306751 - DNA, 201 bp, Homo sapiens
cttatcctgcattcctacacatagagtacaacagcaatatattccacaatagtatagcaaaataagtaaaaactatcccaagtaaactaaataagaaggctttctatgaacctggcaactgttggaaccaaactgatatggggatgctagctgattccaatatatacccagaattagaatactaatctggaattttacatt

SEQ ID NO: 306752 - DNA, 201 bp, Homo sapiens
catacatttctgttttgttgtgggcttctattctgtttggtctgggtgcctatatttgagatagttcaaagcactacatgataaaagaatccctcatctgkatcagatgtccttttaggtatgggagatttagtgattataatatttatcttgttcagtttgatatcataaagggatcatgataataaaaaaaggaaaaat

SEQ ID NO: 306753 - DNA, 201 bp, Homo sapiens
tatcttcagttcaaacttaacagcttaatacttcttgtcatgttgggatgtgtttcttaaatgtgattttttttgagtaaaaggaaggaactttataaaatattttagaacatttcacctttgtgtgctattataatattatcttgtttttaaacgactctaaattttgtgataacctgaaattgaaatttttacttcatg

SEQ ID NO: 306754 - DNA, 201 bp, Homo sapiens
ttatcctgcattcctacacatagagtacaacagcaatatattccacaatagtatagcaaaataagtaaaaactatcccaagtaaactaaataagaaggctttctatgaacctggcaactgttggaaccaaactgatatggggatgctagctgattccaatatatacccagaattagaatactaatctggaattttacatta

SEQ ID NO: 306755 - DNA, 201 bp, Homo sapiens
tgatgagagtctgagcccaagagttacacatatggggttggagatagacccttgtaggtcactggggtacaggactggtgattaaattgtgtgcgtgagtrggctttgcaaagttaacacatacagaatggcaaaagaaggtagttatctctttaggtccctcttccttccagtggactttagggttgaaattgctttaaa

SEQ ID NO: 306756 - DNA, 201 bp, Homo sapiens
ctatcttcagttcaaacttaacagcttaatacttcttgtcatgttgggatgtgtttcttaaatgtgattttttttgagtaaaaggaaggaactttataaaatattttagaacatttcacctttgtgtgctattataatattatcttgtttttaaacgactctaaattttgtgataacctgaaattgaaatttttacttcat

SEQ ID NO: 306757 - DNA, 201 bp, Homo sapiens
tatcctgcattcctacacatagagtacaacagcaatatattccacaatagtatagcaaaataagtaaaaactatcccaagtaaactaaataagaaggctttctatgaacctggcaactgttggaaccaaactgatatggggatgctagctgattccaatatatacccagaattagaatactaatctggaattttacattac

SEQ ID NO: 306758 - DNA, 201 bp, Homo sapiens
agttggtgatgagagtctgagcccaagagttacacatatggggttggagatagacccttgtaggtcactggggtacaggactggtgattaaattgtgtgcrtgagtgggctttgcaaagttaacacatacagaatggcaaaagaaggtagttatctctttaggtccctcttccttccagtggactttagggttgaaattgc

SEQ ID NO: 306759 - DNA, 201 bp, Homo sapiens
agcaaatcctttgctctttttaccttagttcagtgtttcctacatgtcatttacagagtttcatgggaaacagagatcgagaatttaatcacagaggtttwggaaatattagatacagttacccttctcgtagaaattagtaatacatcttaacccttttaaggtttcaagaaatgatctaagattaaaacaccctgttgc

SEQ ID NO: 306760 - DNA, 201 bp, Homo sapiens
ctacctgtgtacttaccatcagaagatctagagcttatattgaaagtgtttcaagtgtccttatgtccaggtactgatgacatagttgaaatgaagtaatraccaccaacttgagcagcactaggtgattttgttgtttgtttgttttcatcactttaatggaggaataaaattcttagataattcacagaatttgttaaa

SEQ ID NO: 306761 - DNA, 201 bp, Homo sapiens
cctatcttcagttcaaacttaacagcttaatacttcttgtcatgttgggatgtgtttcttaaatgtgattttttttgagtaaaaggaaggaactttataaaatattttagaacatttcacctttgtgtgctattataatattatcttgtttttaaacgactctaaattttgtgataacctgaaattgaaatttttacttca

SEQ ID NO: 306762 - DNA, 201 bp, Homo sapiens
atggcgtgaacccgggaggtggagcttgcagtgagctgagatcgcaccactgcactccagcactccagcctgggtgacagagcgagagagactccgtctcaaaaaaaaaaaaaaaaaaagggcaaaggacgttgcattagtccattctcacattgtataaagaaatacctgagactaggtcatttataaagagaagacgtt

SEQ ID NO: 306763 - DNA, 201 bp, Homo sapiens
acctatcttcagttcaaacttaacagcttaatacttcttgtcatgttgggatgtgtttcttaaatgtgattttttttgagtaaaaggaaggaactttataaaatattttagaacatttcacctttgtgtgctattataatattatcttgtttttaaacgactctaaattttgtgataacctgaaattgaaatttttacttc

SEQ ID NO: 306764 - DNA, 201 bp, Homo sapiens
ctttacataggacagcatgcttaacagggaggaatcagatttggttcaaagttaggagtctaagactttgagaacatatgagggtgcttttgaatattcaytgaaatagaatcagaaggatggttggaggctagggaaactaaaagtctttgacatactcatcatgatgtgtcttcaggacatttaacatgaagatgccca

SEQ ID NO: 306765 - DNA, 201 bp, Homo sapiens
ccagcactccagcctgggtgacagagcgagagagactccgtctcaaaaaaaaaaaaaaaaaaagggcaaaggacgttgcattagtccattctcacattgtwtaaagaaatacctgagactaggtcatttataaagagaagacgtttaattggctcatggttttgcaggctgtaaaggaagcatgatgctgtcatctgctca

SEQ ID NO: 306766 - DNA, 201 bp, Homo sapiens
ttatacaccaataacagacaaacagagagccaaatcatgagtgaactcccattcacaattgcttcaaagagaataaaatacctaagaatccagcttacaasggacgtgaaggacctcttcaaggagaactacaaaccactgctcaatgaaataaaagaggatacaaagaaatgcaagaacattccacgctcatgggtagga

SEQ ID NO: 306767 - DNA, 201 bp, Homo sapiens
agtaatacatcttaacccttttaaggtttcaagaaatgatctaagattaaaacaccctgttgccatttgtttgcctccaacttccacaaacggattttggwtatatatatatatccaagacatttattaacattgcaggcatcttgctttagaaacacaggaagaggtagcagtgatgaggactgattatggaagaagggg

SEQ ID NO: 306768 - DNA, 201 bp, Homo sapiens
gacaagcaacttcagcaaagtctcaggatacaaaatcaatgtacaaaaatcacaggcattcttatacaccaataacagacaaacagagagccaaatcatgrgtgaactcccattcacaattgcttcaaagagaataaaatacctaagaatccagcttacaagggacgtgaaggacctcttcaaggagaactacaaaccact

SEQ ID NO: 306769 - DNA, 201 bp, Homo sapiens
tctaatataaaagtatcaacatgagagaaaactcctgaccctgaaaacacagtataacttaattttttaaaaatttagtttcttaaaagcctgaagaaatmttataaaaacatttgtgctacctcaagactttaagtcactgaaattcactgtgacctggaatgggatcttatgggaggggcagaagaaaaggttttcaga

SEQ ID NO: 306770 - DNA, 201 bp, Homo sapiens
agcaaagtaattcatgatctcaatgacaaattcaacaaagaaatatatatcataaaaaagaatcagaaatcttgaagccaaagatttcaatcaattaagcaaaaaaaaaaaaaaaaaaaaaaaagcaatagagagctacaatagtagactagataaagccaaaaaagaatctgtgaacttcttgaaaatcagtcttttgaa

SEQ ID NO: 306771 - DNA, 201 bp, Homo sapiens
cattgttcaattcccacctatgagtgagaatatgtggtgtttggttttttgttcttgcgatagtttactgagaatgatgatttccaatttcatccatgtcygtacaaaggacatgaactcatcattttttatggctgcatagtattccatggtatatgtgtgccacattttcttaatccagtctatcattattggacattt

SEQ ID NO: 306772 - DNA, 201 bp, Homo sapiens
gaagatttatttattgaagcatgccatataatctgctcgacataattctcaacctccactttttccagttctgccttgcacactagccacctggagtccarctgaacatttggctataaaataagaggggactcagcaaagttatgatctaatataaaagtatcaacatgagagaaaactcctgaccctgaaaacacagta

SEQ ID NO: 306773 - DNA, 201 bp, Homo sapiens
gcaaagtaattcatgatctcaatgacaaattcaacaaagaaatatatatcataaaaaagaatcagaaatcttgaagccaaagatttcaatcaattaagcaaaaaaaaaaaaaaaaaaaaaaaagcaatagagagctacaatagtagactagataaagccaaaaaagaatctgtgaacttcttgaaaatcagtcttttgaaa

SEQ ID NO: 306774 - DNA, 201 bp, Homo sapiens
gcttgaaattaacataactactcctacttataaaaattagcatggtataactttctccatccctttacttttaatctatatgtattgttatatttaaaatsggtttctttcagaaaacatataattgagtcttgtttttgatctactctctgacattctgccttttaattggtatatttagatcattgatattaagtgatc

SEQ ID NO: 306775 - DNA, 201 bp, Homo sapiens
aagccttatgattttgttgcaactctagtgacttgaaaaatatttctgcatattgaagattggaagatttatttattgaagcatgccatataatctgctcracataattctcaacctccactttttccagttctgccttgcacactagccacctggagtccaactgaacatttggctataaaataagaggggactcagcaa

SEQ ID NO: 306776 - DNA, 201 bp, Homo sapiens
caaagtaattcatgatctcaatgacaaattcaacaaagaaatatatatcataaaaaagaatcagaaatcttgaagccaaagatttcaatcaattaagcaaaaaaaaaaaaaaaaaaaaaaaagcaatagagagctacaatagtagactagataaagccaaaaaagaatctgtgaacttcttgaaaatcagtcttttgaaat

SEQ ID NO: 306777 - DNA, 201 bp, Homo sapiens
ttgaaataaagagcatctagcaaaggagaactccgcaggatcactactgggaggctggacattatagaagtgggcgatatctgctgggctgcccaaagaggcatcggcagctgcttccacttgtaacagcattttgttcctgacagaatgtgagagtaaaattcagtgccatgaagttctaatgttgaggtggccatgtga

SEQ ID NO: 306778 - DNA, 201 bp, Homo sapiens
gctataaatgtgtttattcatacaggtatcatattcatacaggcatcatatttgtgatattatattgaagtattaattggtaaatgtacctatttaaatawatgaacagtttttacaaccctgattaatgtattaagcagcttagaaaatggaagtggcttgtcttttctaaatttttcaatctttgggcttatctcagga

SEQ ID NO: 306779 - DNA, 201 bp, Homo sapiens
tagaaacacaggaagaggtagcagtgatgaggactgattatggaagaaggggatgtggcttggccaagataggttttatgggttagttagaatgtttggaragttactgacttatttcagtaacttgcctattttccacttttcagaaacatcaactaaacctttctttgtcttttgaattgtatggcttgccaaattgtg

SEQ ID NO: 306780 - DNA, 201 bp, Homo sapiens
tatctgggtaccctggtcaagctaaattgatgcatagaattaaccatcacacctattcataatgttgaggactatttacacacacacacacacacacacamaagtgttgattagactgagcagaccatttatacttgtgcactcattattcacttcattttgaagcccttattgctataccttacatattttaagaaatca

SEQ ID NO: 306781 - DNA, 201 bp, Homo sapiens
ctgtttcttagcctgaagaataaccatttattgaagtcctaatttcattagagtcctatcaaaattatcaacctgtaattatttttgtgatcctcaatttsatgtttgtattttgcagtgtgatgatttttatagatctctgtgttgtcaaaagtttgataatttgcaattagttgcttttatccattgtataaatagaaa

SEQ ID NO: 306782 - DNA, 201 bp, Homo sapiens
atttggtaacttggctttaacatgtcccattgtactagtcagggttctccgaagaaatagaaccaataggatttacacacacacacacacacacacacacatatatatatacatacacacatatctatagagagggagaaatatttgttttaaggaattagctcatgcagttgtgaaggctagcaagtataaaatttgcag

SEQ ID NO: 306783 - DNA, 201 bp, Homo sapiens
atttgaggcatgtccagaatgtactgaaaagagaggttaacataagctgtggttcccaccagggatacattttgcctacacctgtgtttgtcttgaagaawgacttaacaagttggcaggtaaagagtataaagtgtatcttaaggacaggggcaggtctaggctttgtggggcttgaaactttaatcatttgggagcctt

SEQ ID NO: 306784 - DNA, 201 bp, Homo sapiens
aaccgtagctttgccgcttactctgagaaagcttcaatacctttatttgcaaaattagaatcatgacggtatctatttctaaggattaaattgggtgagaraagcttgtaaagtgcctaggactgtccctgacacatacaactagatatgattatctttggaatatgaaagaaatactcccgtgagctaatgtggtccaat

SEQ ID NO: 306785 - DNA, 201 bp, Homo sapiens
catttggtaacttggctttaacatgtcccattgtactagtcagggttctccgaagaaatagaaccaataggatttacacacacacacacacacacacacacatatatatatacatacacacatatctatagagagggagaaatatttgttttaaggaattagctcatgcagttgtgaaggctagcaagtataaaatttgca

SEQ ID NO: 306786 - DNA, 201 bp, Homo sapiens
aagactttctgctttttttttcctttttgttttaaggcagcttgatatggtggaaagaggttctgcaaccagacagaactggccttccttctgcctttgcsacttgtaacctggggcaaactatgtaattgcactgagcctctgttccatgaatattaaattatattcaaaaagcaggcaatactatatatgcatatattt

SEQ ID NO: 306787 - DNA, 201 bp, Homo sapiens
aacaagactttctgctttttttttcctttttgttttaaggcagcttgatatggtggaaagaggttctgcaaccagacagaactggccttccttctgccttygccacttgtaacctggggcaaactatgtaattgcactgagcctctgttccatgaatattaaattatattcaaaaagcaggcaatactatatatgcatata

SEQ ID NO: 306788 - DNA, 201 bp, Homo sapiens
tattggatttttaagttttttcttattaatttgtagaaacactttaaatattgcaaatatgtctttcccttgttaaatatgttgaaaatatgctctccccrtaccctggctttatattctcttctattttatgcacacgcacacacacacacacacacacacacatattctagcacatacatatatatatacacacacaca

SEQ ID NO: 306789 - DNA, 201 bp, Homo sapiens
ttaatattaattttcttgactgttaataaggttgagcatctttttttttatacttactggtcattttcattttgttttcatcagtggatatcatgctgaarttgtttgcctattggatttttaagttttttcttattaatttgtagaaacactttaaatattgcaaatatgtctttcccttgttaaatatgttgaaaatat

SEQ ID NO: 306790 - DNA, 201 bp, Homo sapiens
tctataaatagcccttcattaatgtaaaggccatctttagaatcttggcctgtaaataattcagattcaaaaaaacttggactgtaaaagcggaacttacktttgagaaaatgtaaccgtagagattttactttccttgagtcaactagctagttgacattagaaccagaactctcattcttctgtgctgtcctgggtcct

SEQ ID NO: 306791 - DNA, 201 bp, Homo sapiens
cttgttatttttacactttttaaaacgtttcacaactgtgtgttagcgtgtgactttcttcgaatttacttagcttgtgtcctgtgcaaaatcttgtatakttactgcaaaatacattcctaggcatacctaggcataagaggcccatatagctgatgtgacaatgaagaaagcacattcttggtgacttgaggactccat

SEQ ID NO: 306792 - DNA, 201 bp, Homo sapiens
gtatgatttttttaatatcaagtcagaggggcaaatgacatcttataattttaatattaattttcttgactgttaataaggttgagcatctttttttttawacttactggtcattttcattttgttttcatcagtggatatcatgctgaaattgtttgcctattggatttttaagttttttcttattaatttgtagaaaca

SEQ ID NO: 306793 - DNA, 201 bp, Homo sapiens
aattctcagacatttttctttcatgtgtccatgttgatacactgaattgcagatggatttaatctgtcagcctgcagttctctatatttaggctataatarggaattttatatccctggaatcagcattgagaacattatgcctcttgttatttttacactttttaaaacgtttcacaactgtgtgttagcgtgtgacttt

SEQ ID NO: 306794 - DNA, 201 bp, Homo sapiens
ttatattttttatttaaaaaaatttaaatcacccattcagtatgtaaatacgtgctcaaataactcaaataacacagaagttttattacataaaaatacasactatcccttttctattactgccctccaatttttctcttacctggagtttaccactattattttcttaagcatttttccatactgcttgtgcatttatat

SEQ ID NO: 306795 - DNA, 201 bp, Homo sapiens
ttaaatagatttagctactttttgttctcttgatttaatctccttattacagtacatattcttatatttttgctgtgtaggaggcggttcctttggctccsggtcgtgaccttgattgggatgaagagatggcaaaagcccagtcacatgactgtgttcctgttctttcagaacacccactgtatattctttacacatctg

SEQ ID NO: 306796 - DNA, 201 bp, Homo sapiens
gtttaatactaggtcattattaaaactgtattctagtggcttcttagatactactttcccctggttctcataatatctctgattttcttttctttttttttcctcagtggagttttttctttgatatttctgcaacactgatatttagccgtagaactatttttcctgttttatactctctccacgaatcatctcaccaat

SEQ ID NO: 306797 - DNA, 201 bp, Homo sapiens
tctttgtgatctgaaggttctgtgtagccagttattattgactttttagctgcttgaggttgattctgttgagaaaataaaaggcagaagcaaaatttttrtggcccagattttagtttcataaaactgagtttagatgttgttataagtggaagaaatgcttctttttaccagaagaaaaatttaaagttatatttttac

SEQ ID NO: 306798 - DNA, 201 bp, Homo sapiens
tctttccccatgttttctttcattgatcacattttcttatcacatgtttacatatatatatgcatatacatacatacatatatatatacacacacacacaygtgtgtgtgtgtgtgtgtgtgtgtgtatgcacatgcagtagtccctattatccgtagtttcacttcatgcagtttcagttacctgtggtcgaccatagtc

SEQ ID NO: 306799 - DNA, 201 bp, Homo sapiens
ttaaatagaaacacttttgaatagaaaaattattatagttaatatttgggattctaatctgttgtagtcttcttatgagttaatgaatttttttataaagwttatatattcacctttttttagtatatagataatcaaatgtagccttcatctttgaattgtttccaatatgttggctttggttgattctactttagaaaa

SEQ ID NO: 306800 - DNA, 201 bp, Homo sapiens
caggttctctaggcaagtgtagctcttaggaaattagagcatgatattatccatatatattatatatttttttaatttataaagacattttattaaaatgyttttttctgtgtgtaatctttttttatttttattattattatactttaaattttagggtacgtgtgcacaacatgaattaaacaatgagaacacatggac

SEQ ID NO: 306801 - DNA, 201 bp, Homo sapiens
taaagatgtgcacataaggtgaattggcatatctaaatggtcccagtatgagagagagagagagagagagagtgtgtgtgtgtgtgtgtgtgtgtgtgtgwgactgtgccctgcgataggatggtgtcctgtctggggctggttcctgccctgtcccctgagttgctgagataggctccagccgcccacaaccctgagctg

SEQ ID NO: 306802 - DNA, 201 bp, Homo sapiens
actttgggaggccgaagcaggtagattgcttgagcccaggagtttgagaccagcctagggaacatggcgaaaccccatctctacaaaaaaaaaaaaaaaaatacaaaaatttagccagccatggtggtgtgcacctgtagaaccagctgttgaagaggctgaggttggaggatcacctgagcctgggagattgaggttgca

SEQ ID NO: 306803 - DNA, 201 bp, Homo sapiens
gtagagtgtgcatgtactcaagaaacattatgattccaagttaaaacatgaagtgataaataacatttctttttccagagactggatctccaattactgcrtcatgtgttggattaggcaattctaaaacacctccaccagggcaagcaggaaaaagcgtcccaggatacaatggtaaggaatgaccctgataatacgtaa

SEQ ID NO: 306804 - DNA, 201 bp, Homo sapiens
ttagatagaaggaataagttctaatattcagtagcaaagtagagtgtctatagttaataacaatgtatagttcaaaatagctagaaattaggacttggaaygttttcaacacacagaaatgataaatactcgaagtgatggataccttaagtaccctgaattgatcattacacactctatgcatgtaacaaaatatcacat

SEQ ID NO: 306805 - DNA, 201 bp, Homo sapiens
aggattaaattgggtgagagaagcttgtaaagtgcctaggactgtccctgacacatacaactagatatgattatctttggaatatgaaagaaatactcccrtgagctaatgtggtccaataagttttgaggggaagcggtagcatttagagtgaatcttaaagtaggacttaggaggaaagtcatttatgttcagggaaca

SEQ ID NO: 306806 - DNA, 201 bp, Homo sapiens
tattattaatctatgaatttagtgcaggagttagaaaaattttaatggtaattgaccagatagtaaatattttaggcagtatggataacatgatctctatygcacctactcagctttgctgctgtagcacaaaagcatccttagacaacatgtacatgataggtgtgcatttttcaataatattttatagaaacaggctgt

SEQ ID NO: 306807 - DNA, 201 bp, Homo sapiens
gggtatttatccaaaggaaaataaattagtatgtcaaagggctacatttacccccatgtttgttgcagcagtgctcaagtagcaaagatatagaatcaacytaagcgatcatcaacagatgaatgaagaaataaaatatggtaaatgtgcataatagaataatacttggccataaagaaataataaaatcctgccatttgc

SEQ ID NO: 306808 - DNA, 201 bp, Homo sapiens
ggacatataactagttttacaatccatatacttccaggaagtatatatgtttgaatggggtacaaaaataacaatttagtgagtctgttgtgaaatatcaytgagctatttaatctaaaacagcacactgtctggcatatagtacacatttaaaaaatgttaactattattaatctatgaatttagtgcaggagttagaaa

SEQ ID NO: 306809 - DNA, 201 bp, Homo sapiens
agtaaacattttatgagtaattattagaaagacaaaaaagtgtgtaagttattgttagaaagtcattcatgcttgcaaggatgtagagaaaagggaactcmtacacggttagtaggaatgtaaattagtacagccgttatggaaaatagcatggagatttttcgaaaaactaaaagtagaactaccataaggtcttgcaat

SEQ ID NO: 306810 - DNA, 201 bp, Homo sapiens
ttgtcatatatttgggtgtataagacatacaagaaaaggactaataactaatttgttcattcaacatatattttattaagctcctgctatgttcctgacaytgtctttgcaactgggtaataagtaatacttatcaaatggatgggacatataactagttttacaatccatatacttccaggaagtatatatgtttgaatg

SEQ ID NO: 306811 - DNA, 201 bp, Homo sapiens
atatattataatatattatatatcacatatataatatatatcacattatatataatatataatacaataatacttaaatacatataataatatataaatayatataatatataatattataataatatataaaataaaatatatacacacacacacaccatggaatacttctcagccataacaaagaataaagtaatacct

SEQ ID NO: 306812 - DNA, 201 bp, Homo sapiens
aacataaattgaggacactgagtggctaaagtggtgcaaattaatatattagaatcacactttgagtatataagacaaagtatttttcatataaggttttytgaaatagataaatacgtagctatgaaaaatgatgccactaaattattttaattcatttggaagttttatgctcacatttgtgcactgggtagatatatg

SEQ ID NO: 306813 - DNA, 201 bp, Homo sapiens
tgacagattcaccttttgcaatacataggctctacagggacaattctgtgtctttcttttatcagtgttacattcccaactcttacatactatgtctggtrtataatagttgctcagtaaaaatgttgtgacatgaatggttaagcaatcttaagtcataaagtttatgtgacataataatagtaggttggtttataatca

SEQ ID NO: 306814 - DNA, 201 bp, Homo sapiens
caccatgcccctacaggccctttggctccctgacctgatcgacaactgtcttttcacttgtttcttctccaggcccctggtttccttgctgttccttgatygcatcacatatgatctcctttacctcttacatgtttgtatttcactgatgttctctttgcctgaaatagtacattcatagatatccactttttttcaact

SEQ ID NO: 306815 - DNA, 201 bp, Homo sapiens
aatgtcatttttattcaactggcataattcaagatgctgaagtcacagctttggctatgactagctattctcgttggtctctctcagtgtggtaccttaaatgatgtacctagtaatgtgataatgaagcatggtcactttctgcaggggttgcacactgagatgtttggatataactttccaatttttgtcttgtttttt

SEQ ID NO: 306816 - DNA, 201 bp, Homo sapiens
ataaatgaaatggacaaacctctacaagcctagcaaagaaaagagacagaagacacaaattaccagtaccacatgtgaaacagtagatatcactaaagacsctgcagacatcaaaagtgtaataggggaatactatgagaaattcaacacacataaatttgacaacttagatgaagatgaaatagactaattcctcaaaaa

SEQ ID NO: 306817 - DNA, 201 bp, Homo sapiens
ttctttatgaatatatacttgcttcctttaacagttacccaacatctatctaaatttgtaaatattttgtttttctgttcacctgacagattcaccttttrcaatacataggctctacagggacaattctgtgtctttcttttatcagtgttacattcccaactcttacatactatgtctggtatataatagttgctcagt

SEQ ID NO: 306818 - DNA, 201 bp, Homo sapiens
ctggcaactgttggaaccaaactgatatggggatgctagctgattccaatatatacccagaattagaatactaatctggaattttacattacccatctctkttgtttcttctgagctgcagtcagagatcactgattggttcacaggaataatcaaggtcagtctaaattacaggaaaaaactcagaaacaagtgatgaga

SEQ ID NO: 306819 - DNA, 201 bp, Homo sapiens
aatttgtctgtatttattatttaattaatgagccaacaagacaggctaccttgtcttagtaacatgaaagatctgaaaattttacagaatgattcagaagyagaggttttctaaaactatcattttttctatagatctgaaaatattttaaataaccctttattaaggtttttgtacagagatttgggcctagttcaagat

SEQ ID NO: 306820 - DNA, 201 bp, Homo sapiens
gactctgggaagattaaggaaggaaggtgcttatcagagcaagagatggttgacctttagagttttacaagcccaagatgagacattcttaatgggaagaragctaatatatactgaaggccccctgagtactaggtatagagtgaggctttgcatatctcactttatcttgtaatagattagttattaaaacaagaaagc

SEQ ID NO: 306821 - DNA, 201 bp, Homo sapiens
ccagaatgataacataaaattttttattaatttagttttcattattcatagcaatatgttttcattttataactgaaatttaaagcttttacttctgtctkatgcattatatgttatatttatgttatttataaaccaaatatatgtgcataccattttataatatataaatttcagttgttgcattttctttacaattat

SEQ ID NO: 306822 - DNA, 201 bp, Homo sapiens
caaagacatatagagtggtataatggacactggaaacccagaacggggataagggatgaaaaactacctattggatacaatgtacactatttgggtgacargtaccctaaaagtccagacttcaagctatttaaataaatacataaataaaatgttttttatttcacatacacctgttaatcacacatttgttttaaagtc

SEQ ID NO: 306823 - DNA, 201 bp, Homo sapiens
aggtgcaagtattttatataactctttctatggaaattatacatattctcaagaacaattcatttatccatacttttagtaatctgtttcctcagatattwtaattggtttttaaattagttttattttttgttacggtttagaccagggtttgcaatgtaacattgtggcattttgaaaatatgcattccctgtctgctt

SEQ ID NO: 306824 - DNA, 201 bp, Homo sapiens
aagtggatgcaatccttaattattctttgtctgtgtattttctttcctttttattgcatgcaccctagtcctgttgtgtgttaataacaggcatcaattgyattttccattcttttagaccttggacttctccttgacgtagaattattttctctgtccacaatggcctgttacacagaaatactgttttaaaattaacaa

SEQ ID NO: 306825 - DNA, 201 bp, Homo sapiens
cccattcttaatatttctcaaataagcttatttatttttacccctattacgcaataatcgagtttatgcaataatcattacattattgattctagtttatrcaataatcattacattttaagaatgtggaaagcacttacttttaaagaggatgaacatttttcaattattacacattgtttttcgggttagtctaaactc

SEQ ID NO: 306826 - DNA, 201 bp, Homo sapiens
aacccaaactgtggccccattcttaatatttctcaaataagcttatttatttttacccctattacgcaataatcgagtttatgcaataatcattacattawtgattctagtttatacaataatcattacattttaagaatgtggaaagcacttacttttaaagaggatgaacatttttcaattattacacattgtttttcg

SEQ ID NO: 306827 - DNA, 201 bp, Homo sapiens
cttcttttgcctgtcccttcactacctgcttctaggttgccttctttttccattttacacatcccgcctgggtgattatatctgcgccaatggccttttttgccacatatgtgatggttactcccagtggcaacgctggctattctcagttctgtgtcatcagcccacatctctcttctgatgttgagatcatatgcagga

SEQ ID NO: 306828 - DNA, 201 bp, Homo sapiens
atcaggaacatttcactctgaataagaaaaacaatcaatgggtgccagcactgagatgacacagagtttggaactacctgacaagtattttaaagcggccrtcataaaagtgcttcaaggaacaattatgaacacactcaaaacaatttttttagaaagtttccataaataagtagaaatcatcagcaaataaatgaaata

SEQ ID NO: 306829 - DNA, 201 bp, Homo sapiens
cacattataaatcttgctaatattagcaattgatgttttataaatctctgaggttaaattttataatttctaacagctgaaagcttagaattttggcttcrtcattgtagacatccctttctgcctttattatctaggaagcaactaataatgtagacttagtttgggagaaaggaattaaataaacaactggtaaccaca

SEQ ID NO: 306830 - DNA, 201 bp, Homo sapiens
ttgttctgttaatctatcttatacctatctcactgctggctctttctcttaaaagcatgcataaatggtccgggcttggtggctcacgcctgtaatcccarcactttgggaggccgaggcgggcagatcacgaggtcaggagatcgaaaccatcctggctaacacggtgaaaccctgtctctactaaaaatacaaaaaatt

SEQ ID NO: 306831 - DNA, 201 bp, Homo sapiens
agtatatatggatgttaacattaaggcattttggtaactgttttggtttctgtgctttgtaccattgttagccacattataaatcttgctaatattagcarttgatgttttataaatctctgaggttaaattttataatttctaacagctgaaagcttagaattttggcttcgtcattgtagacatccctttctgccttta

SEQ ID NO: 306832 - DNA, 201 bp, Homo sapiens
cctggagccattctatcaattctttttagggctcttgttctgttaatctatcttatacctatctcactgctggctctttctcttaaaagcatgcataaatkgtccgggcttggtggctcacgcctgtaatcccagcactttgggaggccgaggcgggcagatcacgaggtcaggagatcgaaaccatcctggctaacacgg

SEQ ID NO: 306833 - DNA, 201 bp, Homo sapiens
gactcaaaaagttttatatcagtgtctgggaaatcacaagtagtcttaacctcaagacctgaagaaatgggatcataggattaatcataggattaataatraagcaaatttttttgcccaaagatttaactctagtgtttaattataattttattttgctaagtggttgtatttcactgctttcctgtgttgaaaacttaa

SEQ ID NO: 306834 - DNA, 201 bp, Homo sapiens
ctgagtggctaaagtggtgcaaattaatatattagaatcacactttgagtatataagacaaagtatttttcatataaggttttttgaaatagataaatacrtagctatgaaaaatgatgccactaaattattttaattcatttggaagttttatgctcacatttgtgcactgggtagatatatgtaatacttaagtaaata

SEQ ID NO: 306835 - DNA, 201 bp, Homo sapiens
acatttaaaactgcaaatactgtcacaccaagacagaatgtgtttggcataatattaaggcaaaagattgcatctgaatctcgctaaagcatgaataatascggagcttgacgaatgttaaacctagacagtactatataccacctttctttttacattttcccagtttcctcttttgattcatctttacttacttcctat

SEQ ID NO: 306836 - DNA, 201 bp, Homo sapiens
acaccttctcctaatgtactggttcattattgcttttttaatccagttattagggtacctacatgatcttcctaccagagaaaaagctccttgagataagrgtaatattttattcagtttttcacctacacagtagctaatgtaggcctcatagtacatggagtcatattatgtagtgaattagtttgtgaataaacattt

SEQ ID NO: 306837 - DNA, 201 bp, Homo sapiens
ccgggtgtggtggtgtgcgcctctaaccccagctacttgggaggctgaggcacgagaattgcttgaacccaggaagcagaggtttcagtgagctgagatcrtgccactccagcctaggcaacacagcaagactctgtctcaaaaaataaataaataaatataaaaataaaaataaaaacaaagggggaggatcccaaaaga

SEQ ID NO: 306838 - DNA, 201 bp, Homo sapiens
cccagtactttatatatgtcttttcatttcatgctgaagtatatttaattcagagctatcattactattttagagatgagttaaccaactggttaacagamtaaataattttcttgagataacactgctggttagatcctggggacaatgcaaaccattgtcctcagaatttgcttgctttgatttcaaaagctgcagttt

SEQ ID NO: 306839 - DNA, 201 bp, Homo sapiens
actggatttgagtaatgttagatggtggtgtgaataagatggagaaaggcaagatggcagcctatccttacaggtgaggcctacagaatgatggtacatcyctagcaagtaagaatcaaggaagtcagtctgatctgaatcagattgtatttataagtaaattttcaattattaaaggagcgtctgccataacacaaagtc

SEQ ID NO: 306840 - DNA, 201 bp, Homo sapiens
catttacttgacattaatacttccaaaggtaaactttttttaaaggggattagatagactcttatctgctagatagaaacaatggcttattcattgggggytggcttcattataagaccccaaattgtcaactctcagagctaggaaaggacgagagaagaaccaaaccaaaaggatagatctagaccatttaggatacac

SEQ ID NO: 306841 - DNA, 201 bp, Homo sapiens
actgtgttttgatgttcaagagttcatcctctgttattgatgccagctgagcctccatccataaaatgtgaataataaaatgaactactctggaaggtaamgagcagtaataaattcttcccatcattctaaagtgatatcaatatgtgataaattatggtagagcccatggtagaaggaacacattctgagtactttaga

SEQ ID NO: 306842 - DNA, 201 bp, Homo sapiens
aggttatactctcaccttcttttcctacatcccccttctcccagtgcgataggaacaacagagtgataacgtctttcatgagaatccacactgtaagaackgtagagagtttgaactctaggtaactggtgtgtccctattgacaaactgaacttaataagaatacttctaaaatagatttactctagcagcttccttgca

SEQ ID NO: 306843 - DNA, 201 bp, Homo sapiens
catgtaatgggaaataacatttaaaaaaatctagtatatagcaatctgccttctgtgtatatagaatgagaaaaatgatgactcagctattactctgattyaggctatataatttgatcttcccaattggaaaagattataaagctgatgctagcatcttttagatttttcccatgactagttgttaaaaaaatatttatt

SEQ ID NO: 306844 - DNA, 201 bp, Homo sapiens
ttcgtatatcagcttacttaggcagtgaagaaggacaacgcttcattaatcctttcttgctgtcttgcagctttatttaagactaggttatactctcaccytcttttcctacatcccccttctcccagtgcgataggaacaacagagtgataacgtctttcatgagaatccacactgtaagaacggtagagagtttgaact

SEQ ID NO: 306845 - DNA, 201 bp, Homo sapiens
tcatgtaatgggaaataacatttaaaaaaatctagtatatagcaatctgccttctgtgtatatagaatgagaaaaatgatgactcagctattactctgatwcaggctatataatttgatcttcccaattggaaaagattataaagctgatgctagcatcttttagatttttcccatgactagttgttaaaaaaatatttat

SEQ ID NO: 306846 - DNA, 201 bp, Homo sapiens
ctgtgcagcttgcagctgagaggacacccagagtgggtagttcctattggcaggcaagtcatcccattgagtctgcagccctctggaatggataactcctmtctgcaggcaagctgtccctcaactctgtgagtctggctgagtctggggtttttatggtcttcagaagggagaaagtgcatgctgattggcctattagca

SEQ ID NO: 306847 - DNA, 201 bp, Homo sapiens
gctgtgctcagcttgtcctactggcctggatcccatgcctgccaagggcaagccaggaccaaaatggcaaggggtgtgtgagcatgcaagcgtggggtccagccactgcacacagtcaggcacactggttgttaatgctggttgggcagctccaggagccactacggacctgtgtctggacgagggaaacatggtggcaca

SEQ ID NO: 306848 - DNA, 201 bp, Homo sapiens
aggctgtgctcagcttgtcctactggcctggatcccatgcctgccaagggcaagccaggaccaaaatggcaaggggtgtgtgagcatgcaagcgtggggtscagccactgcacacagtcaggcacactggttgttaatgctggttgggcagctccaggagccactacggacctgtgtctggacgagggaaacatggtggca

SEQ ID NO: 306849 - DNA, 201 bp, Homo sapiens
gcaggctgtgctcagcttgtcctactggcctggatcccatgcctgccaagggcaagccaggaccaaaatggcaaggggtgtgtgagcatgcaagcgtgggrtccagccactgcacacagtcaggcacactggttgttaatgctggttgggcagctccaggagccactacggacctgtgtctggacgagggaaacatggtgg

SEQ ID NO: 306850 - DNA, 201 bp, Homo sapiens
ggcaggctgtgctcagcttgtcctactggcctggatcccatgcctgccaagggcaagccaggaccaaaatggcaaggggtgtgtgagcatgcaagcgtggsgtccagccactgcacacagtcaggcacactggttgttaatgctggttgggcagctccaggagccactacggacctgtgtctggacgagggaaacatggtg

SEQ ID NO: 306851 - DNA, 201 bp, Homo sapiens
cattctttatttttgatacagtgatattgctttgtagcattttaaaaattctttcttagaattttaatctctctgctcagcttacattaatcatctattaktgcaagttgtctactttttccattaatgcccttaacatattaatcgtagttttaaaaaatatcatgttcagataattccaatattcctgtcatatgaaac

SEQ ID NO: 306852 - DNA, 201 bp, Homo sapiens
ttcagaatgcttgtatatgtgaatgcataactgtgaaaagttacctctctaatagttgaattttctttttcattttagtccaggtgggttacatatttttyatatgtaataaagctttcttcagcacttgggatattttctttacaaatactctaggaagcgtacagaaagtaatcaactttgaattgtgttatgttttaa

SEQ ID NO: 306853 - DNA, 201 bp, Homo sapiens
gaatgcttgtatatgtgaatgcataactgtgaaaagttacctctctaatagttgaattttctttttcattttagtccaggtgggttacatattttttataygtaataaagctttcttcagcacttgggatattttctttacaaatactctaggaagcgtacagaaagtaatcaactttgaattgtgttatgttttaaaaaa

SEQ ID NO: 306854 - DNA, 201 bp, Homo sapiens
tggtacaggagtatggtcgctggactagaaatactaacatatgtgtggttatcttgctctgcctttatgtacctatatgacttaagcaaattaattaaacctctttggtagttcattttttaatcattaaaatgagagggttgacacacactgtctcaattttcacttttgtgaatcttcttcactttaattggttttctt

SEQ ID NO: 306855 - DNA, 201 bp, Homo sapiens
actttgaaggtatatgccatactctgccttctcaggcaataaattgaattagagaaaggtgaggatttaaaattctgaatgatggtacaggagtatggtckctggactagaaatactaacatatgtgtggttatcttgctctgcctttatgtacctatatgacttaagcaaattaattaaacctctttggtagttcatttt

SEQ ID NO: 306856 - DNA, 201 bp, Homo sapiens
tcagctgatctaggttgggggtggttgggagcattgcttcaagacataaatctagctggtgtgggctccctgcttctttgggctctgttcccacctgcagktgttcattcttggtgccatgttgaggagggagcagttatatctgggaggctgttctcctggagaaggtagtggtgcaggagagctagcctctgcttgcat

SEQ ID NO: 306857 - DNA, 201 bp, Homo sapiens
ggaaattctataaaacacctttccttatttccaccacagaatgacaactttacctttttgttggtgtgttagatatttatggccacaattatactatatgwccaggaaccacaaaaatctccgtaaaatgaactattaagagtttatttccatatgtctgcaggtggtcaaggcatcagctgatctaggttgggggtggtt

SEQ ID NO: 306858 - DNA, 201 bp, Homo sapiens
taaaagtgaactcgaaggctttaatcagtgaataacacagagaattccctggctcaccattaccaagcattttaatgtttcacttctatttttttgatggrcattatcattgctagtttttcaactttgcataaaagtttgaaaacttcatagtattcagcttgataatctcttactgaatgctttttcttaaattcatag

SEQ ID NO: 306859 - DNA, 201 bp, Homo sapiens
ctttctattttccctaagtgtcggccgatctgagaaataaagagaaagagtacaaagagaggaattttacagccgggctgctgggggtgacatcacatagyggtaggactgtgatgcccacctgagccacaaaatcagcaggtttttactgaggatttcaaaaggggagggggtgcaagaacagggagtaggtcataagat

SEQ ID NO: 306860 - DNA, 201 bp, Homo sapiens
gttaggtgagtatccaggagtcagatcatatagaaccttgcaggccatggtcaagactgtatctaattccaaagatgatgggaagctccatattgtcaaakaaatcactttggcatctctgaagatgaagagactgtagtagataacattggaaacaaggagatgacaaatgaatcggcaccccataacataaatcccctt

SEQ ID NO: 306861 - DNA, 201 bp, Homo sapiens
actgccttaagttagaagtttggtgaaataatacaaaatacactttactgatttaatggtcttggcataggtctccaagctggctggtgtcttggtcaagyatggcatcaagaaaggtgacactgtggttatctacatgcctatgatcccacaggcgatgtataccatgttggcatgtgcaaggataggtgccatccacag

SEQ ID NO: 306862 - DNA, 201 bp, Homo sapiens
caggcaaacaatgatggaatcaaaggatattgcatcaatcacccctatgctctcccaataccgccttttaagaattataagaattaggaaagacatatctrtagaagtaaatgcatatatgtgaaagtgttttttttcctctgtttctcagatctcctttgcacatacctctgtttcttagcctgaagaataaccatttat

SEQ ID NO: 306863 - DNA, 201 bp, Homo sapiens
ttcaccgtgttagccaggatggtctcgatctcctgacctcgtgatccgcctgcctgggccccccaaagtgctgggattacaggtgtgagccaccgcgcccrgccatattttttaatcttcctggtaactctattaactagatgataatattattactattttaataaaagaagactccagtgaacatggagataaagtaac

SEQ ID NO: 306864 - DNA, 201 bp, Homo sapiens
gctggagtgcagtggccgatgtccgctcattgcaagctccgccccctgggttcatgccattctcctgcctcagcctctggagtagctgggactacaggtgyctgccaccacacccggctaattttttgtatttttagtagagacggggtttcaccgtgttagccaggatggtctcgatctcctgacctcgtgatccgcctg

SEQ ID NO: 306865 - DNA, 201 bp, Homo sapiens
ggcaattctaaaacacctccaccagggcaagcaggaaaaagcgtcccaggatacaatggtaaggaatgaccctgataatacgtaaagttaataaatttggyattttcttgcatctagtgtgtattatgttgcatgaaacaaactaggggcttaattagaatctggttgaatgaatgccttgtattaaaaatgaatgcctta

SEQ ID NO: 306866 - DNA, 201 bp, Homo sapiens
atttacttatttattgtgtttattgcttattgtgagtattttctctgctaaagtataagtacttgcagggtagagattattgtcttgtcttgtttacttayctgatgtatctgaaaacagtgtctgacatataatagatacttaatatatatattttaagtaaaagaatgttgaactacttattcattaagatctgggagt

SEQ ID NO: 306867 - DNA, 201 bp, Homo sapiens
tttttaactctggaatttattccaatttcttttcatagttagggaatgctgattcttcaaatatatttactgaagaaaactttcactttaaattagtgaayacttttagtgtttgagaggaagcatactagttaaggctgccatggtatgatttctgacacttctgtttattaattgtgtggcctcaagctgctttactgc

SEQ ID NO: 306868 - DNA, 201 bp, Homo sapiens
tatttcaatttcatgatacagtaagcccaggcttccacaatgacagtggtgtggttaagcaagaaatgagattactgttccttggctagagtattacgtargtctaaaatggaatgttagtagttactgtttctccttaaatccggctttagagtaagccataaactggttggtataattggtcttgatatagcagttgtc

SEQ ID NO: 306869 - DNA, 201 bp, Homo sapiens
gcatttttctttttcaagttgtggcagccaaaactgcacacaacatttacaccaacatgttttctgttttactttaatagccccatttatgacaatctgtragtttacttgtcttcaaaagtagctcagtaagctggaaattataaagaactatctgtgataactttgtggtcctatttctgagtaactaacattcaccct

SEQ ID NO: 306870 - DNA, 201 bp, Homo sapiens
tccttatctcaaccacataagacagacactcgcagagcggctgtttatagacctctccccaggaatgcattcctttcccagggtcttaattattaatattycttgctaggaaaagaattcagtgatatcttccctacttgcacgtccatttataggctgtctatgctatatggctctattctgcctgaccccgcaggcagt

SEQ ID NO: 306871 - DNA, 201 bp, Homo sapiens
aggctggagtgcagtggccgatgtccgctcattgcaagctccgccccctgggttcatgccattctcctgcctcagcctctggagtagctgggactacaggygcctgccaccacacccggctaattttttgtatttttagtagagacggggtttcaccgtgttagccaggatggtctcgatctcctgacctcgtgatccgcc

SEQ ID NO: 306872 - DNA, 201 bp, Homo sapiens
agtagctggaatttcaggcacctgtcaccatgcctggttaattttttgtatttttagtaaagacagggtttcaccatcttggccaggttggtcttgaactyctgacctcgtgatccacccacctcagcctcccaaagtgctgggattacaggcatgagccactgagcccggcctctgtggctatgattttttaatgctgcc

SEQ ID NO: 306873 - DNA, 201 bp, Homo sapiens
tgttaaacatcagaaatgtctgctctggttacttgccgatgatcctcagcagtgaccatatggcttagcatcttgagcactaaactgtgacttaggaactrtgttttgatgttcaagagttcatcctctgttattgatgccagctgagcctccatccataaaatgtgaataataaaatgaactactctggaaggtaaagag

SEQ ID NO: 306874 - DNA, 201 bp, Homo sapiens
tccagtgaacatggagataaagtaactttctcagtttgaaagtgccagtgtcaagatgcgaatgcatgcgctctgactgtatgcttaatccctcagctatmctgactcttggagtggtgtgattaatttgcatgcaattgtcttcttaaaattttgaagagtatttaggccagaaataaaactatgcttaggaaaacaaaa

SEQ ID NO: 306875 - DNA, 201 bp, Homo sapiens
actattttaataaaagaagactccagtgaacatggagataaagtaactttctcagtttgaaagtgccagtgtcaagatgcgaatgcatgcgctctgactgyatgcttaatccctcagctatcctgactcttggagtggtgtgattaatttgcatgcaattgtcttcttaaaattttgaagagtatttaggccagaaataaa

SEQ ID NO: 306876 - DNA, 201 bp, Homo sapiens
agaagaagcgctaaaaataggacaacacaaaccagacaaaattctcatttataatcgtccaaatatggtaatctgaatattgaatttggttcttgcttatsgtaatatgctaagaatgagtttagtttttaccatttaaaagagacatttgatttataagctattaagtatactgctgaatgttattgttatttctaaaaa

SEQ ID NO: 306877 - DNA, 201 bp, Homo sapiens
tacaaagggtttactggttttcagaccattcaatagaaaacagaaacattcagacatttctttacaaatgttgaattgccagtctgcaactaaaatattgkgattacctaattaacattgttaaagctttctctccattattattttttaattgtagcccaaggtggttgttacagcatcatttggcattgaacctggaag

SEQ ID NO: 306878 - DNA, 201 bp, Homo sapiens
aaaaacatcattgagcatgcagttttgaacaggtaagtgagatttgtgtagaagtgatcaagtctctaacaattacaaagggtttactggttttcagaccrttcaatagaaaacagaaacattcagacatttctttacaaatgttgaattgccagtctgcaactaaaatattgtgattacctaattaacattgttaaagct

SEQ ID NO: 306879 - DNA, 201 bp, Homo sapiens
agaattatatgccaacaaattggataaactagagaaaatggataaattcctagaaaaatataagctaccaatattaagtcaattaaagtgatttgagaagwaatcaaaacccttcccacaaagaaaagcccaaaaccagatgattttagagctgaattttaccaaacattcaaaaataatttatatcaatatttctaaaac

SEQ ID NO: 306880 - DNA, 201 bp, Homo sapiens
tttttgaatttagagatattcagagtatctcttctgtgatatgcttgataaaagatattgaaaagtgttgttattgaacaaaccttaaaatttaaagatgrtatatatctctgataggttagtaaataatgaaactgatctagccttaggaatatgagaattttcatatattatatcaaaataatatttatggtttcaagt

SEQ ID NO: 306881 - DNA, 201 bp, Homo sapiens
tttcatatattatatcaaaataatatttatggtttcaagtttatgtcattactttaaaaaatatttcatatgaagtagaagtaatttaatagggaactatrcatacatttatattttaacttttattgaggtatatatacagaaaagaacataaatcagaattttaaaagttataattattacaaagtgaacatatccatt

SEQ ID NO: 306882 - DNA, 201 bp, Homo sapiens
aatgttttcatctttaaaagaaagatttttcttttttagataacatctctaactttcctggttttaagagacatatctcaaaataaattggcttagcatartatcatcttcaatgaaaattatttcaatgctgtatctaataaattgtaactgtctaaaaatgttacatttctagaagcttcttatgttatatgaaaatat

SEQ ID NO: 306883 - DNA, 201 bp, Homo sapiens
tatacagtgcaataaaactacatttttagatagcatgcatttttagacacaatacctatttaaataccacaggttttttttgaacttttattttaggtttmgggggtacatgtgcaggttaattacatggataaattgcgtgttgttgaggtttgttgttcagatgagcacagtacctgataggctttcagttctcacccc

SEQ ID NO: 306884 - DNA, 201 bp, Homo sapiens
aatggacaataaaacacaaagcaattgaactttttctatgttcaattaacttatgaaagaacattgtgggattttatgaatcgcttctttactattctaayagtaatgctacattatcatgatttttataatccataagtataatattgacgaaaattagtttggtacagagtcagacttgcaatagaagttaaaatccta

SEQ ID NO: 306885 - DNA, 201 bp, Homo sapiens
aatcaatatacttctaaataaataatccataggtcaaataggaaatatccaggaaaacacacacacacacacacacaccccacacacacacacacacacamgtctctgggtgtatatatctcaaactgattgaaaaagaaagtacatcatataaaattttggaggacacaactaaggcagttctgagagggaaatttatag

SEQ ID NO: 306886 - DNA, 201 bp, Homo sapiens
gaaagagactaaatgtatttctaatcctgccacaaaaaaagaggcaaaactgcagttgactcaaaaagttttatatcagtgtctgggaaatcacaagtagycttaacctcaagacctgaagaaatgggatcataggattaatcataggattaataataaagcaaatttttttgcccaaagatttaactctagtgtttaatt

SEQ ID NO: 306887 - DNA, 201 bp, Homo sapiens
aaaatccccaaacaattggaatctaatcaatatacttctaaataaataatccataggtcaaataggaaatatccaggaaaacacacacacacacacacacmccccacacacacacacacacacacgtctctgggtgtatatatctcaaactgattgaaaaagaaagtacatcatataaaattttggaggacacaactaagg

SEQ ID NO: 306888 - DNA, 201 bp, Homo sapiens
gtcgataaaggatgctgctgtcttcaccttagaactgctgtggaaacattccttgggtgacatttctcaaaagtagtgctcagaaagagactaaatgtatytctaatcctgccacaaaaaaagaggcaaaactgcagttgactcaaaaagttttatatcagtgtctgggaaatcacaagtagtcttaacctcaagacctga

SEQ ID NO: 306889 - DNA, 201 bp, Homo sapiens
caatttatctcccttgaaggttgtcaatcttatatgttatgatagttaattcatatatgagcaatgtcttttattgttttttaatacaaatggaattgtayaaatgctatgcatactattctgcattttaatttttttttcactaaatagtatatcctggataactgcttatgttttaacaagttttaagtttaaatgttg

SEQ ID NO: 306890 - DNA, 201 bp, Homo sapiens
acaatttatctcccttgaaggttgtcaatcttatatgttatgatagttaattcatatatgagcaatgtcttttattgttttttaatacaaatggaattgtrtaaatgctatgcatactattctgcattttaatttttttttcactaaatagtatatcctggataactgcttatgttttaacaagttttaagtttaaatgtt

SEQ ID NO: 306891 - DNA, 201 bp, Homo sapiens
acacgaagtgactgcttaccatatgatttttaagacattctactaatgaatatatatatataaaataataataataataataattattattatttttttttgagacagagtctcactctgtcgcccaggctggagtgcagtggccgatgtccgctcattgcaagctccgccccctgggttcatgccattctcctgcctcag

SEQ ID NO: 306892 - DNA, 201 bp, Homo sapiens
aacacgaagtgactgcttaccatatgatttttaagacattctactaatgaatatatatatataaaataataataataataataattattattatttttttttgagacagagtctcactctgtcgcccaggctggagtgcagtggccgatgtccgctcattgcaagctccgccccctgggttcatgccattctcctgcctca

SEQ ID NO: 306893 - DNA, 201 bp, Homo sapiens
gagccaccgcgcccggccatattttttaatcttcctggtaactctattaactagatgataatattattactattttaataaaagaagactccagtgaacayggagataaagtaactttctcagtttgaaagtgccagtgtcaagatgcgaatgcatgcgctctgactgtatgcttaatccctcagctatcctgactcttgg

SEQ ID NO: 306894 - DNA, 201 bp, Homo sapiens
tatatactgaaggccccctgagtactaggtatagagtgaggctttgcatatctcactttatcttgtaatagattagttattaaaacaagaaagctgatttrtggacaaaccatctgggtccttttttatctttttttttttctttttaaacatgttgagttaatgcctatgaagaaaatctagggaaaaaatatcagtcac

SEQ ID NO: 306895 - DNA, 201 bp, Homo sapiens
taataacaaacacgaagtgactgcttaccatatgatttttaagacattctactaatgaatatatatatataaaataataataataataataattattattatttttttttgagacagagtctcactctgtcgcccaggctggagtgcagtggccgatgtccgctcattgcaagctccgccccctgggttcatgccattctc

SEQ ID NO: 306896 - DNA, 201 bp, Homo sapiens
  misc_feature (1)...(201): n = A,T,C or G
tggtttaatattcattgaattgtagaattttagtaggggacgggactttcataatcattctcttccttgaggacagtggcttctttattactgttagattnctatagcatcagtgttctgaaaacttcatttcttaatcttcttagaatagtggttctatttgattagttagctttttaaaaggaaatttaagatgttcca

SEQ ID NO: 306897 - DNA, 201 bp, Homo sapiens
taaacaatgttaagaagaggcaggtcttgcagtatgtaagtgggagtgaagctggaagctgtaataaaaacctttgataggtggtctgtttgtgaaacagygggcaatatgaaggggaaaaaggactctgggaagattaaggaaggaaggtgcttatcagagcaagagatggttgacctttagagttttacaagcccaaga

SEQ ID NO: 306898 - DNA, 201 bp, Homo sapiens
cactccagcctaggcaacacagcaagactctgtctcaaaaaataaataaataaatataaaaataaaaataaaaacaaagggggaggatcccaaaagaaaayatttctttgatgctggctttatgtgactaaaagctataatatcctgtcaatttttgtttttaaatttacagtagtaaccattattattaaacaatttatc

SEQ ID NO: 306899 - DNA, 201 bp, Homo sapiens
tttgatttacagcatggaagacactcaaggatttttaaatctgtttaccatgaaatgtgtttttacaaagcaaagttgaaagcatcaatattcattgatgygtcaaatagcaacaaataccacttttgcctggtatctccaaataacactgtttcttcatagacccttataaaagataacagtatcattttccttactcat

SEQ ID NO: 306900 - DNA, 201 bp, Homo sapiens
agtttctgactgatctttttattttattaaaagtgtccataacagagaaaaaaatacttttcattttgatgaattctaatttatcatttttttcttttacrgattatgattttggtattgtatataaaaatgctttcctaactcagcatcacaaagattttctcttttgttttcatctaagagttttatagttttatgttt

SEQ ID NO: 306901 - DNA, 201 bp, Homo sapiens
aaaagaaataaagaaaaaccccacatacaataacattgaaaagataaaataaaatactttggaataattttaaccaaggaggtggaaaactatattggtayggtaaaactttacattaaaactataaaatattgatgaaagaaattgaagaaaacacaaataagtggaaagatagcccattgctcatggattggaggattt

SEQ ID NO: 306902 - DNA, 201 bp, Homo sapiens
aaagaaattaaatgtatctaattgaaaaagaagtaaaattatctctatttgcagatgatgttgtcctatatgcaaaaacctccaaagataccacaaaaacrttattactaataaatgaaatcactaaattgcagaatacaaaatcagcatacaaaaatcagtggcatttttctacacaaataatgatctaactgaaaagaa

SEQ ID NO: 306903 - DNA, 201 bp, Homo sapiens
tgagtccaggtttttatgctggatgtgagttagcaggcattaatgagcaaggggcaaggacaaatgcaaaattaccagtttttttttttttttttttttttgagatggggtcttgccatgttgcccaggctggagtgcagtggctattcacaggtgtgattataggagaaaatagaaaattatgtaaaataagaagtccaa

SEQ ID NO: 306904 - DNA, 201 bp, Homo sapiens
tgtctctgagagcttacatgatgaaggtgcatctttgacttctttacaaggacatctaacatttctgtagtgactatttatttacaggagctgagattctwcccatttcatttgccctggagtgcatccctctgcctcttaaattatgaaatacaacaatttcaaagtttatttgaatttgccgaaactgatagatcttaa

SEQ ID NO: 306905 - DNA, 201 bp, Homo sapiens
tttcatttgccctggagtgcatccctctgcctcttaaattatgaaatacaacaatttcaaagtttatttgaatttgccgaaactgatagatcttaagaatyttatatcagtcagaatagcctaggctatgctgcagaaataacccccaaatcttcctagtacatcatagcccaggtatttctcgctcatcctacaaattga

SEQ ID NO: 306906 - DNA, 201 bp, Homo sapiens
atctcctttacctcttacatgtttgtatttcactgatgttctctttgcctgaaatagtacattcatagatatccactttttttcaacttctacatgtcttmcaaaactgttgctttcttagtgagctcccggtgagaattacatccaccccttcccctgcactctgaatcctctttactctgctctacttccctcctgcat

SEQ ID NO: 306907 - DNA, 201 bp, Homo sapiens
aatttatcattttcaaagttgtatgttgtggtaagtagttataaaatgatactgaagggctgggtgcggtggttcaagcctgtaatcccagcactttgggrggccgaggtgggcggatcacgaggtcaggagttcgagaccagcctgaccaacatggtgaaacctgtctctactaaaaatacaaacaaattagccgggtgt

SEQ ID NO: 306908 - DNA, 201 bp, Homo sapiens
tctgcctcttaaattatgaaatacaacaatttcaaagtttatttgaatttgccgaaactgatagatcttaagaatcttatatcagtcagaatagcctaggmtatgctgcagaaataacccccaaatcttcctagtacatcatagcccaggtatttctcgctcatcctacaaattgatcttgggttattaggaagatttgcc

SEQ ID NO: 306909 - DNA, 201 bp, Homo sapiens
tcattgtgttggacagtcacattcaaaggcaagccatggtccttccaattgcccaccatgcccctacaggccctttggctccctgacctgatcgacaactstcttttcacttgtttcttctccaggcccctggtttccttgctgttccttgatcgcatcacatatgatctcctttacctcttacatgtttgtatttcactg

SEQ ID NO: 306910 - DNA, 201 bp, Homo sapiens
gatacacactgcacactgctcccagagtccttttatgaaggcttgttcctctcataggactctctggccaccttcttgtgttctataatatctaatatatyctgcctagcattaaaggcagagaaatttatttttcttcaaaacaattgtcattacatatgtaatttgttcatttaatttattttgtttattccctatagt

SEQ ID NO: 306911 - DNA, 201 bp, Homo sapiens
agcagcagccagctcttattggggcctttgcaagtaaggggcctcaagatttgcattgtactagtttatggcaaatccatctggcttaatggattatttgraagggatttatacatttcatacatatgagtcaaaaacatcattgagcatgcagttttgaacaggtaagtgagatttgtgtagaagtgatcaagtctctaa

SEQ ID NO: 306912 - DNA, 201 bp, Homo sapiens
atgaaatgctactacaacctcagcagcagccagctcttattggggcctttgcaagtaaggggcctcaagatttgcattgtactagtttatggcaaatccayctggcttaatggattatttgaaagggatttatacatttcatacatatgagtcaaaaacatcattgagcatgcagttttgaacaggtaagtgagatttgtg

SEQ ID NO: 306913 - DNA, 201 bp, Homo sapiens
catgttattcccaaatcatcttggagttattccccctatttaactgaaatattgtagcctttggccaatacctcccaactaccctctccccctccaaccaycctggctgctggcaaccaccattctattctctatcagatcagcagttgaattcttttttgattgtttctaattttttgactcttatgcagttgcagcatt

SEQ ID NO: 306914 - DNA, 201 bp, Homo sapiens
aacgccacatatctacaactatctgatctttgacaaatagcaaaatatttctaattcctcccttgtagctcttgtatcactgctgtcattcacttgctagsacattagcatatacacatgcgcatatacacacattgttgctattattattttgaacaaacttatctgtgaggtaaattgagaacaagaaaaataattttt

SEQ ID NO: 306915 - DNA, 201 bp, Homo sapiens
aattttgccctttctagtgaatgcatagtggtattgcattgtgatttaatttttttttccctgatgacaaatgaagttgaacttcttatcctgtgcttaayggacatttgtcttttattttgttttattttaagtttgccgagatgatatctcgctctatcccaggctggtctcaaactcctgggctcaagcaatcctccc

SEQ ID NO: 306916 - DNA, 201 bp, Homo sapiens
gcaataataataacaaacacgaagtgactgcttaccatatgatttttaagacattctactaatgaatatatatatataaaataataataataataataatwattattatttttttttgagacagagtctcactctgtcgcccaggctggagtgcagtggccgatgtccgctcattgcaagctccgccccctgggttcatgc

SEQ ID NO: 306917 - DNA, 201 bp, Homo sapiens
acagaataattccatgtaagcaacaaagaaacagaatatttccaggcccccagaagcccttgttgtgcctctatttagtcatcctcagcccctacatgatwgctattcagacatctaaaggtttacctgcttttgagctttatacaaattgagtaatacaatgtactcttttgtgtcaggattttttcactcaactttctg

SEQ ID NO: 306918 - DNA, 201 bp, Homo sapiens
caatatgtattaacagtgactataaaccaaaaaggaaaagactaactaaatgcagattattagaaaataacttaagcttggctaacatttctgtagtcaaratactgtgggtttctcaacatgcaggatctgaattccttactagctgagattaaggttgtttaatcctgccaagtcttaaaatggcttttaagaattaaa

SEQ ID NO: 306919 - DNA, 201 bp, Homo sapiens
aacaaggcgagattgctatagctaattgttctctcctctgtggagctggcatatgtgtagtcacagtctctgatgccctttggcttcccagaggcaagagsgattcttcattataagcttgtctgtttgttgttcacaaaagtaaactcccctcagaacccacaggcttatcaaaagtctcagcatataaatagtattgca

SEQ ID NO: 306920 - DNA, 201 bp, Homo sapiens
aattcttagtaaagtattatcaaaacaaatccaacaacacatgaaaagattatacattgtgttcatgtgagatttttccatggcatgcaaaactgatttawcgtacataaatctatcagtgtgatacatcacattaacaggatcatcataattaacataaaaaaagcattcaacaaaatccaacatcctttcttgataaaa

SEQ ID NO: 306921 - DNA, 201 bp, Homo sapiens
ggaatattacgaagaattatatgccaacaaattggataaactagagaaaatggataaattcctagaaaaatataagctaccaatattaagtcaattaaagwgatttgagaagaaatcaaaacccttcccacaaagaaaagcccaaaaccagatgattttagagctgaattttaccaaacattcaaaaataatttatatcaa

SEQ ID NO: 306922 - DNA, 201 bp, Homo sapiens
taaatgcctacaattagaaagaagaaagaccccaaataaatattctaacattacccctcaaggaatgcaaaacgaataaacaactaaccaaaaattagctsatgggaataataaatatcagaacagcagtaaatcaaatgaagtacagaaaaaccataaaaataattaataaaactaaagttcactttttgaagaacaaca

SEQ ID NO: 306923 - DNA, 201 bp, Homo sapiens
tgatgatttgtcgctgtcttccatcaccccaagatgggactgtctagttacaggaaaacaagctcagggctcccactgattctacattatggtgagttgtrtaattatttcattatatgttataatgtaataataataaaaataaagtgcacaataaatgtaatgcgcttgaatcatcctgaaaccatacccttcccccac

SEQ ID NO: 306924 - DNA, 201 bp, Homo sapiens
agagaattttaaaagcaacagagaaaagcatcaaattacatataagggaatttccatagaacattagcagatttctcagtagaagccttacaggccagggkaaaatggcatggtgctgaaaggaataagaataaaacaaacacaaaactgctagccagacatgctgtccttcaggaaagaaggataaataaagtgtttcaa

SEQ ID NO: 306925 - DNA, 201 bp, Homo sapiens
agcagagaaaaaaaagtaaaatcatctataaatgaatgagtgaatatgatgttgccaactataacaccagtttagacatctagacttgggtttcaggtatrgctttctccaattcctaaccacgtgccctgggtattcttcttatctctattctcttgactttaaaatggagagtaaaaacttccctagttactctgtctg

SEQ ID NO: 306926 - DNA, 201 bp, Homo sapiens
tgtgaacttcttgaaaatcagtcttttgaaatgactcattcacaggaaaaaataaaaaaagaatgaaaaggggtgaagacagcctatgagatttatgggaygtcattaagtgaagaagtattgcattatgttctttaagaagggaagagacagagaaagggactaacagcttatttaatgaaataaattatgaaaaattct

SEQ ID NO: 306927 - DNA, 201 bp, Homo sapiens
gagatgtaatataagacccgagatgtctagatatgatttactcattacacaaagatccaaaaattatgcgttatgcagaatcaggaacatttcactctgartaagaaaaacaatcaatgggtgccagcactgagatgacacagagtttggaactacctgacaagtattttaaagcggccatcataaaagtgcttcaaggaa

SEQ ID NO: 306928 - DNA, 201 bp, Homo sapiens
cctgctaaaacagaagatttaaatcagattattatttttgtttattttttaatttttatttttatagatttagaaggtacaagtacagctttgtgacatgyatatattgcatagtggtgaaatctgggcttcagcataaccatcacccaaagagcgtatgttaaatcaggttattcagtaatctgcagacccgagatgtaa

SEQ ID NO: 306929 - DNA, 201 bp, Homo sapiens
ctatctcctgcagcagttctgtgtaacattgcctacagaacctacctcatttggatctttatattgcctcctccaaaaggtactcttgtttaaaaaaaaaattgtctaaaggtacttttaaaaaagaaaatcctaggatgttaatattttcaatattaaactactctaaagttgccaacaattgaaaaaaaattccaagtt

SEQ ID NO: 306930 - DNA, 201 bp, Homo sapiens
aatacaatgggaatattttctaacttattctatggggccagcattgttccagttccatagattgagttagaaaatattcccatgacttctgtcattggaasgacagattgtagataattggtctaatttattccttaaatggtagaattaactgatgaattggtagaattcaccaacgaacctatcttcacctggtacttt

SEQ ID NO: 306931 - DNA, 201 bp, Homo sapiens
ctttgattattgaatttcgaaccagctttgtatacctggggtaaattccacctggtcatggtacataactctttccacacattggcatctatgctcatgayggcctctgtcaatagttttttttaattgtcttattttagtattaatacaatgggaatattttctaacttattctatggggccagcattgttccagttcca

SEQ ID NO: 306932 - DNA, 201 bp, Homo sapiens
tttttcttaaaagatgtttagattttcctgataaatgtctattttaaatcttatcccgagtattttgaatattacatcatgaggttctggatcctatttawatcttctgcatttctgttcttgtggctatttattttaggaagtggtcagcccagttaggatcagactacatagctttacccactttctgtggactgtggt

SEQ ID NO: 306933 - DNA, 201 bp, Homo sapiens
gccctttctctattgaattgccattgcaactttgtcaaaaatcagatgataatattggagtgggtctgtttctagaatatctttctatttcattgatctaygttttttttatgatgatcatggaaaatatttaatagatttttttatgtagatcaatataattgatctacattatatttttatgaatatactgccttgaca

SEQ ID NO: 306934 - DNA, 201 bp, Homo sapiens
acatttatatcattttaaatttaaatttgagttaattttttaatatagtgcaaggtgtaggttgataaataattttttaagtggatgccagttgttccagyatcatttgttgaaaaagctgccctttctctattgaattgccattgcaactttgtcaaaaatcagatgataatattggagtgggtctgtttctagaatatc

SEQ ID NO: 306935 - DNA, 201 bp, Homo sapiens
ataccatggatgctggttacatggatgaagaaggctatttgtatgttatgtctcgagtggatgatgtaataaatgttgcaggtcacagaatttctgcaggygccattgaagaggtattgatgaatattggtattctattccaagtagtgcttaggcacagagctgcactgaagacaatattgaggttatttcacttggaaa

SEQ ID NO: 306936 - DNA, 201 bp, Homo sapiens
gggagctttaaagcttttaaaagttaatacaattaaagaagaaatgtatcaaagaattattttgcaatatcaaagtatattagaattagtattgagctatkacttctccattaaaaaaagaaattggattcataaactttacaactctatattcaaacacttaaacatttctaaaaacacttcaacttattcttggctgtt

SEQ ID NO: 306937 - DNA, 201 bp, Homo sapiens
gttctttttcaaggtgcactgatttcatattgttcaagcacacatgttttacaatcaatttgtacagttaacacaatcatcacagtgatcctgaggtgatrtacatcctcagcttatgaagataacaatattaagagattaaagtaagacaggcataagaaatcataagagtattattagggaagtcataaacgtccatga

SEQ ID NO: 306938 - DNA, 201 bp, Homo sapiens
atcaatcattcacccactgcatgtacagtacagagaaaatgatgaaagagatagtgaaggaactcaccacacagcagcgtgaaagacatgcattaaattaytacaaaagagactaattttaaattttagatgcaggggtacatgtgcaggtttgttatatggacatattgtgtgatgttaagatttgggcttccattgaac

SEQ ID NO: 306939 - DNA, 201 bp, Homo sapiens
gacacctctttgggaggtgataagtggatttaggcacaatttggtgtgaaggagctttacttactttctttgaagctgggatctggagaagggagatattracagccaagtgcttaagcaaaacaaggcgagattgctatagctaattgttctctcctctgtggagctggcatatgtgtagtcacagtctctgatgccctt

SEQ ID NO: 306940 - DNA, 201 bp, Homo sapiens
gtttcttccccaccctaataagcctgagggtactgcaggagaccagggtgtatttcaatccttatctcaaccacataagacagacactcgcagagcggctrtttatagacctctccccaggaatgcattcctttcccagggtcttaattattaatattccttgctaggaaaagaattcagtgatatcttccctacttgcac

SEQ ID NO: 306941 - DNA, 201 bp, Homo sapiens
catgtgcaggtttgttatatggacatattgtgtgatgttaagatttgggcttccattgaactcatcacccagatagtaaacacggtacctggtaggttttygaccctggcctcctctctccttccttgccttttggaatccccagtgtctattgttcccatctttatatctgtatgtctccagtgtttagctcccacttat

SEQ ID NO: 306942 - DNA, 201 bp, Homo sapiens
atttgataacaccgtatctgaattctttatcttttcagtcttgaactcatgcccagaaaatcaaagtgaagaagtgataaaactttgactctatttatttyagcagtgcgattcaatcttacaagaattctggttgggcaagcagggttgggagggaagtagacgtaggagaccaatcttaaatttcagttagtcagtagt

SEQ ID NO: 306943 - DNA, 201 bp, Homo sapiens
tgtgtttaatgagaaattttgtgaaagggtcactatatttttatagatcacaatttgataacaccgtatctgaattctttatcttttcagtcttgaactcrtgcccagaaaatcaaagtgaagaagtgataaaactttgactctatttatttcagcagtgcgattcaatcttacaagaattctggttgggcaagcagggtt

SEQ ID NO: 306944 - DNA, 201 bp, Homo sapiens
ggaaataattggaggcttaacttagtaaaggatgaagactatgtctttatacactagaccctatacatgttagaggaagaatagctctctttgtattctcrgaccataattatcttaggagcaggaaactctcctagtattcctcagatgaaagcacagagattattgcatcactgtttctcaaagttctgtgtacaaata

SEQ ID NO: 306945 - DNA, 201 bp, Homo sapiens
aaattctctttgactctggagttctggatctgtgcttctgtttgatgttgtttctcttgctgggtgaccttctctctgactccctgctgtaaagacctccyttttttttttttttttttttttttttaatcaaaacctaacttggtccgacctaccccatggctgaccacccaggcacttgcttttgacttaagggtagca

SEQ ID NO: 306946 - DNA, 201 bp, Homo sapiens
cagtcagctactgcactgccctggcccatgtttcttagagacatggttatctctgtgctattagtgtctgtgtcctggccgaggcaagtcccttccctttytgagtctatattcttataaaatgtggctttgagaatagatgatgtttctggtcttaaaattctctttgactctggagttctggatctgtgcttctgtttg

SEQ ID NO: 306947 - DNA, 201 bp, Homo sapiens
ttggttccgactgtcatgttcttgcacctgtcctgagtatctcttgctgtagctctggccctttccccagtcagctactgcactgccctggcccatgtttyttagagacatggttatctctgtgctattagtgtctgtgtcctggccgaggcaagtcccttccctttctgagtctatattcttataaaatgtggctttgag

SEQ ID NO: 306948 - DNA, 201 bp, Homo sapiens
accttgtcacgcacacactccaccaccgcgtgattgtggctaaactccttggcttggcattccaggcccttcctggcacagcccaagcctcccatcccggyagagcccaggcctcccttccattcacctgctcagcactccatgggcatctctgtgcgccgtgtagttactgggcacagagcgggagtcgcatgcaatccc

SEQ ID NO: 306949 - DNA, 201 bp, Homo sapiens
tcggcctcccaaagtgctgggattacaggcgtgagccaccgcaccctgcccaagccttctacttttcagctgctgtgctcagaattgagaaaacctgatgrtttcctcctttatacaaagcatacagccatcagcgacagaaatctcagctaggcctttcttttatggggagaaactgaaagggcctgtctctgaaatttt

SEQ ID NO: 306950 - DNA, 201 bp, Homo sapiens
atacatacacacacacacacacacaagctgtaaagcagtgggactttcacatgtgagatgcccacataagtgcccctgagaggcagctgcatctcaacacygcggaccctaatgacctggctccctcccctgcgtgcccctccagaggaagcctggaccttgtcacgcacacactccaccaccgcgtgattgtggctaaac

SEQ ID NO: 306951 - DNA, 201 bp, Homo sapiens
acttcacttagaataagagccttcagctccttctaagttgctgcaaaggacattatttcattcctttctatggctgagtagtattccatggtgtatatatrccacattttctttatccactcattggtcgatgggcacttgggttggtttcgtatctttgcaattgcaaattgtgctgctataaatgtgtatgcaagtgtc

SEQ ID NO: 306952 - DNA, 201 bp, Homo sapiens
tgggaggcagaggttgcagtgagccgagatcatgccactgcactccagcctggtcaatagagtgagactccatctcaaaaaaaaaattatacatatatatwttttatttatttatttatattatttattttaaatacatgtatatatattttatttatatattattttaaatatatataaaatacgtatatttaaaataaa

SEQ ID NO: 306953 - DNA, 201 bp, Homo sapiens
agtgaggcacagggtcccatgagaaagtaccttggcagccacctttggccagcagcactgcaggcacttgctgaccgcccatcatgatgtgtctgtgcccrccccagctgaatggggtctcctggagctgtttccaggaagtcagagattcgcaatgggtctttaaaactggttgtccattctcttcaaagagcttgctct

SEQ ID NO: 306954 - DNA, 201 bp, Homo sapiens
aggaggctgaggcagaagaattgcttgaacctgggaggctgaggcagaagaattgcttgaacctgggaggcagaggttgcagtgagccgagatcatgccaytgcactccagcctggtcaatagagtgagactccatctcaaaaaaaaaattatacatatatatattttatttatttatttatattatttattttaaataca

SEQ ID NO: 306955 - DNA, 201 bp, Homo sapiens
actttgggaggccaaggcgggaggatcacgaggttaggagttcgagataagcctgaccaatatggtgaaaccccgtcttactaaaaatacaaaaattagcygggtgtgatggcaggcacctgtagtcccagctcctcaggaggctgaggcagaagaattgcttgaacctgggaggctgaggcagaagaattgcttgaacct

SEQ ID NO: 306956 - DNA, 201 bp, Homo sapiens
atctcccctgagggacaggagtggtgtggggctggagaggggcagtcccatacctggattcctcaccccttacagatacaggctcctgaagtcaggaaccraataactgagtctgagatggaaattcccaggaaaatcttcaaggcaaatttacaagggatatccccccatcacccccatcgtgtgcagccctatcagaga

SEQ ID NO: 306957 - DNA, 201 bp, Homo sapiens
agtgtgtcattgtaaatgacagtattcaaaacttaccatccaattcagcaaagaagtggctcacatcattgataaacacatgaaattctgtttttttttttaatttcagttttatttgttaaggtacatgaaaatatcaaccatcgcccatgttggagctacatgcagagggttagttgttaaaccgcacactgctggatg

SEQ ID NO: 306958 - DNA, 201 bp, Homo sapiens
ggccttccaagtctgtgtttcctctgggcttttcaggcttctgagtcctcctagatttagggggaatcctatatgcttctctctagccttagagactgctytgtatgaaattatcgtttattttttagagtgaagaaacttggaaatgggagtagggatagtgaaggatggagatttgtttccgtggaggtttggagacct

SEQ ID NO: 306959 - DNA, 201 bp, Homo sapiens
tagctgttcaggtttgctattcagggagtagccaaggaggggagagagatggagagagagatggaaagatagaccaaccttgcgtctttttttttttttttgagatggaatcttgctctgtcacccaggctggagtgcagtggcgcgatcttgactcacttcaagctccgcctcctgggttcacaccgttctcccgcctca

SEQ ID NO: 306960 - DNA, 201 bp, Homo sapiens
ttaagtcagacctgctttggtgtctccaccctcaaagagaatagaagccacagagaccacagcctcagtgtggggactcagttgcgggtgtttcctcccctagaaggctgttgcctaagatttgattgagagctccccacacttggcaggcaggtggtcaaaacagttcttactcacaagggggtctgaatttcttaactt

SEQ ID NO: 306961 - DNA, 201 bp, Homo sapiens
tgggagggggcctgaaacactggggctgttgtgcagagcaaggagctcaggtcctaacactgaagtgacagctcttcctcccctgacccttttttttttttgagacccagagtctcgttcagtcgcccaggctggagtgcagtggtgcaatcttggctcactgcaacctccacctcctgggttcaagcagttctcctgcct

SEQ ID NO: 306962 - DNA, 201 bp, Homo sapiens
aatggggaaaaacgaactccgtccactaacaaaagatggctacgagggtaacatgttcggtgagtcgattcaaaccactttgatattgggagggacccacygccccgccagtggccgagtggaattttacttttggcttttcacctcctgagctgtgggggctccacagttctccagatctggggccttccaagtctgtgt

SEQ ID NO: 306963 - DNA, 201 bp, Homo sapiens
gaccttctagttctccatcctctccctctatcctcttattttgtctggctgcagtccttagtcctacctcccttttaattaattaattaattaattaatttatttatttacttacctttgaaacagagtttcattcttgtcacccaggctggagttcaatagcacgatctctgctcactgcaacctctgcctcctggtttt

SEQ ID NO: 306964 - DNA, 201 bp, Homo sapiens
tcttggccttcaaaggccaagcgtcttgtgctcctatgcccagtccatagaccccctccgtgggtagaaattgtatttatcagcctataggcaacacggcraaaccccatctatacagaaaaatacaaaaattatccaggcatggtgacgcacgcctatagtcccagctgcttgaggggctgaggcaagaggattgctcga

SEQ ID NO: 306965 - DNA, 201 bp, Homo sapiens
ctggaaagaccggcagcagtgagcgaagggagcacatggccttagggaagcctccccttggaagttaagtagaatttgagagaggtactctccaggctccragaccataccctgaatgaaagggaaactagtacagacacaggaagcgctttgcatgtacctggtactcttccgcacttgacacaacatcactgaacctca

SEQ ID NO: 306966 - DNA, 201 bp, Homo sapiens
cacacacgcccccatacacctacatacaccacacacattcattcaccacacatacacactcaccccacaccccatacatacatacacacacacacacacamaagctgtaaagcagtgggactttcacatgtgagatgcccacataagtgcccctgagaggcagctgcatctcaacaccgcggaccctaatgacctggctcc

SEQ ID NO: 306967 - DNA, 201 bp, Homo sapiens
cactgcctatgggttagccctgctccacaaggaacagcacaaatatttttgttaatacattaaaaaaaaaaaaccctggtcttgtgccccacttagctccytgcaccgctgcttgctgtgatttaaaccttttaccagtcgtctgccagcctgcactgtcttgtgttttgttttagaaagccttgttttttatctttgcat

SEQ ID NO: 306968 - DNA, 201 bp, Homo sapiens
gtggcgcaatctcagttccctgcaacctgcccctcccgggttcaagcaattcccctgcctcagcttctcgagtagctgggattacaggtgtgtgccaccawgcctggctaatttttgtatttttaatagagacagggtttcaccatgttggctaggctggtctggaactcctggcctcaagtgatccgtctgtctcagcct

SEQ ID NO: 306969 - DNA, 201 bp, Homo sapiens
gtgtttgctcttctgaggctgctgcaggtggccactgctccagtctacttccacgtaactcttgcttctgaggttgttctgaggttatttggggtcctgtytggggagctcacgaccccccgcagagagagcaggtccaggtatggcctgcttgactctgtggcctctccatggcctaaccaaatctctccagcaagggac

SEQ ID NO: 306970 - DNA, 201 bp, Homo sapiens
acgaagccttggaggtaagacaagccctggattattcacaggccgctggtcaccagcccccggctctctcacggccgagcgagagtgctgcgggcagcggrgccagatgggccgagacttgctcccaccccctgcaatgaaccggtgagaagattgacaggacagtcccctcccagccaggcattttacaccctgcgaccc

SEQ ID NO: 306971 - DNA, 201 bp, Homo sapiens
tgcttgatctttctgattggcctcttcatagcagctcttgactcctaaaagtctgaccccaaggcctccaggcacttcctgaggacatgtgtggacactcytgtcctggggtctaagctgaggagccttcctgctgccgcatgtcaggccctgaaggcctgtgtagctcctggaagaggcctccctgaccagaggtccagg

SEQ ID NO: 306972 - DNA, 201 bp, Homo sapiens
ggctaaaaatatgtactacgaagccttggaggtaagacaagccctggattattcacaggccgctggtcaccagcccccggctctctcacggccgagcgagrgtgctgcgggcagcggagccagatgggccgagacttgctcccaccccctgcaatgaaccggtgagaagattgacaggacagtcccctcccagccaggcat

SEQ ID NO: 306973 - DNA, 201 bp, Homo sapiens
tcccctgccttggtgggtcttggcactggcatgaagttgcttcctcctgaagcagagcgtgggtgccctcccaccgacatgcaggatcagtggtgggcccrgagcaaaattactcaacctctgcctcaatgtccttttctgcacaatgggtgacagtgggatcaccctcggggttgcagtgctcagcagggtgcctggccc

SEQ ID NO: 306974 - DNA, 201 bp, Homo sapiens
ctgtctcaaaaaaaaaaaaaaaaaaaaaccctccccaaaagaatccctcaaagtacccctaaagcagcaagcaatgaggaagtgttgagagttgggtgggrtaggagtcggccaggcagtggttctggggttgagactgtccaggtgccaggcagagcagtcagtggagaggctatggatcaggccctgtcacacccttca

SEQ ID NO: 306975 - DNA, 201 bp, Homo sapiens
tgctcccccaggggagtcaaaggtcagtttttcgagacgtttttggctgccacactggggatgctatgggcatctcgtggataggggccagggaagctgabaaccaaaggatagcatccaggacagaccccacagcaaataattatctggcccaacatgtcagcagtgccgggactgggaaaccctgatctattcctggtt

SEQ ID NO: 306976 - DNA, 201 bp, Homo sapiens
ggaccttctagttctccatcctctccctctatcctcttattttgtctggctgcagtccttagtcctacctcccttttaattaattaattaattaattaatttatttatttacttacctttgaaacagagtttcattcttgtcacccaggctggagttcaatagcacgatctctgctcactgcaacctctgcctcctggttt

SEQ ID NO: 306977 - DNA, 201 bp, Homo sapiens
acctcatgtgatccacccacctcggcctcccaaagtgccaggatgataggtatgagccactataccccacctcattttctttttaatgtttgtgagatctstggtggtattccttctttaattcctgttatggcaattgctttttctgtttcctcttaaaaataatttagctcggctactgggggaacccacccccaatat

SEQ ID NO: 306978 - DNA, 201 bp, Homo sapiens
agggaccttctagttctccatcctctccctctatcctcttattttgtctggctgcagtccttagtcctacctcccttttaattaattaattaattaattaatttatttatttacttacctttgaaacagagtttcattcttgtcacccaggctggagttcaatagcacgatctctgctcactgcaacctctgcctcctggt

SEQ ID NO: 306979 - DNA, 201 bp, Homo sapiens
cgggcatggtggcatgtgcctgtaatcccagctacttggccggctgaggcaggagaatcacctgaaccagggagatgaaggttgcagtgagctgagatcgygccactgcactccagcctgggcaacagagcaaactctgtctcaaaaaaaaaaattaaattaaaaaataatttaggtcatactttatcagttttgttaatc

SEQ ID NO: 306980 - DNA, 201 bp, Homo sapiens
tttcttctcaggcagagccagggcctgcaggtctgggcaaagtcagtcgcatatgggaaattgtttcctattaataaaatctgagccctcggcctgctaaagagcagagggggttataatgcccagctcgcccaaacgtctgccttcctcctcccctggccttggtgcccggggtcatctcaggtttcctgtggttttttg

SEQ ID NO: 306981 - DNA, 201 bp, Homo sapiens
agaattgcttgaactagggaggcggaggttgcagtaagtcgagattgtgccactgcactccagcctgggcaacagagcgagactctgtctcaaaaaaaaataataataaaataaaataaaagaatgctaaatcaaacttgcatttgatcttctaatatttttgttaaggatttttgcatctatgtttatgagggatattgg

SEQ ID NO: 306982 - DNA, 201 bp, Homo sapiens
aattcctgttatggcaattgctttttctgtttcctcttaaaaataatttagctcggctactgggggaacccacccccaatatttcaatgtaggttctttcyattttccgtaagtgtcagctggctgagaaataaaagagtaccaagagaggaattttacagccgggcctccggggtgacatcacatatcggtaggaccgtg

SEQ ID NO: 306983 - DNA, 201 bp, Homo sapiens
ttccatttgtgtggaatatctttttccacccctttactttgagtttatatgaatccttatacgttaggtgagtctcttaaagacagcagatatttggttcktattctgccattctgccaatctgtatcttttaagtggagcatttaggccatttatgttcaacattaatactgagatgtgaggtgctgttccatttatcat

SEQ ID NO: 306984 - DNA, 201 bp, Homo sapiens
gagtagctgggactacaagcatgtgccaccatgtctggctactttttttgtatttttagtagagatggggtttagtagagatgttggccaagctggtctcraactcctgacctcaaatgatccaaccgcctcggcctcccaaagtgctgggattacaggcgtgagccaccacgcctggctccaactttaatttaaaaaaca

SEQ ID NO: 306985 - DNA, 201 bp, Homo sapiens
tcctctttcccaatttggatgtcctttattcctttctcttgccagattgctctggctaggacttccagtactatgtttttgtttgtttgtttgtttgtttktttttgtttttgagacagagtctcgctctgtcgcccaggctggagtccagtggcacgatcttggctcactgaaacccccgcctcccgcatttaagtgatt

SEQ ID NO: 306986 - DNA, 201 bp, Homo sapiens
tttttgagacagagtctcactctgtcacccaggccggagtgcagtggcacgatctcggctcactgcaacctctgcctcccaggttcaagtgattctcctgrctcagccacccgagtagctgggactacaagcatgtgccaccatgtctggctactttttttgtatttttagtagagatggggtttagtagagatgttggcc

SEQ ID NO: 306987 - DNA, 201 bp, Homo sapiens
gagagatagggatccagtttcattcctctatgtgtggctagccagttttcccagcaccatttattaaatagggtgccctttaccctatttaaaaaataaayatttttatatgcttcatcaaagatccgttggttgtaaatatttggctttatctatgggttctctattcttttccatgggtctatgtgcctacttttatat

SEQ ID NO: 306988 - DNA, 201 bp, Homo sapiens
ccttgcagcttttgttttatcagaaagcatctctattttgcctttatttcaaaagggtatttttgctggatatacaatattaggttgactctttctttacrccaaagatgtcattccattgtcttgtagcctgaattctttctgatgagaagttacaggatattcccctgcatgtgctggtttctccttccctttggatgc

SEQ ID NO: 306989 - DNA, 201 bp, Homo sapiens
ccaggcacagtgactcacgcctataatcccagcactttgggaggccgaggctggtggatcacttgaggtcaagagttcgagaccagcctggccaacatggygaaaccccatctctactaaaaatacaaaaattagccaggtgtggtggtgcatgcctgtagtcttaactactgaggaggctgagacgggagaaccacttga

SEQ ID NO: 306990 - DNA, 201 bp, Homo sapiens
accccacctttaaaagaaccctccctaggccaggcacagtgactcacgcctataatcccagcactttgggaggccgaggctggtggatcacttgaggtcargagttcgagaccagcctggccaacatggcgaaaccccatctctactaaaaatacaaaaattagccaggtgtggtggtgcatgcctgtagtcttaactact

SEQ ID NO: 306991 - DNA, 201 bp, Homo sapiens
cggccgacagaaccaagccatatcctatccttagacccaatcccagacagcaggaccatgtggctcccaatgtggagataagagggaagcagtagcgacayctgggcatcacttggcagcgtggctttggctgctcagcacgtgcttgctagagaatccctgatggctgttatggcttacacatttaaccacttccctttg

SEQ ID NO: 306992 - DNA, 201 bp, Homo sapiens
aaacgagctactgtcaattaaccccacctttaaaagaaccctccctaggccaggcacagtgactcacgcctataatcccagcactttgggaggccgaggcwggtggatcacttgaggtcaagagttcgagaccagcctggccaacatggcgaaaccccatctctactaaaaatacaaaaattagccaggtgtggtggtgca

SEQ ID NO: 306993 - DNA, 201 bp, Homo sapiens
ttcttttctttttttttttgagacagagtccaggctggagtgcaaaggcgccatgtctgctaactgcaacctctaccttcaggttcaagcagtgcttgtgyctccacctccagagtagctaagattacaggcctgtgccaccacgcctggccaatttttgtatttttagtagagatgggggtttcaccatgttgccacggc

SEQ ID NO: 306994 - DNA, 201 bp, Homo sapiens
tttttttttttgagacggagtctctctctgtcgcccagcctggagtgcagtggcaccatctcggctcactgcaacctccacctcccggttcaagcgattckcctgtctcagcctcccgagtagctgggattacaggtgcccaccaccatgcctgggtaatttttgtatttttagtagagacgggatttcaccatgttggcc

SEQ ID NO: 306995 - DNA, 201 bp, Homo sapiens
ccaccacagccttcctgcagaccctgtgcccttggttgtcctaaatatcccacaggaaagataatcatgatacatatgaggaaactgaggcacggggggggcagcttgcccagaaccacccccattctgcaccttcttttcctctttattcccacaaaagcccaggaaggaggaggcatgaacctaggagatggaggcatc

SEQ ID NO: 306996 - DNA, 201 bp, Homo sapiens
aaatgctcgtgaagggcctaacccagtgggtggcacacagtaagtgctcagtggatgtccactactggataatagaggtaatgcatgagccattgttgtaytgatgtgctatgttgactccctctttatggccaagctctgtgctaggggttggggatacagaggggaataggttccagcattcaagggcaaaggagacag

SEQ ID NO: 306997 - DNA, 201 bp, Homo sapiens
accggcaaaggatcaagtctgtttggctttgggatgtgttttcctaccacttcttaagcatgggaggggctgacattctggaaattcacttcagcccaaayagggaagccatcccaggacgcagtgctgggtccttccagccttctcctccctccttggcgaactcccttctggtaatagattctccgacctccagcccat

SEQ ID NO: 306998 - DNA, 201 bp, Homo sapiens
aaaggctttattcagtagccaaaggtccgaaccctcccaaaggaaaggatcaagagggtctccctgacctcgttgcccttcctcactccctggccaggctrctatttcaaggtgaactaagggaccccagaactgatgaacaatcggttcaatgaactgatttatcaagcacttagtctgtgccaagcatatgggttgtat

SEQ ID NO: 306999 - DNA, 201 bp, Homo sapiens
gcaggttgtgcccattctgctgtgctggctgagtagggtatacgaggagaccctgagcagcgccccgcctcctggtgctcggcttggacactggctcttayggcctcgtccctggcctgcagggctggcagggctgtgtgcggggaagggtaatgagttcacacaggtgcctagttttgctgagatttacaggagctgcag

SEQ ID NO: 307000 - DNA, 201 bp, Homo sapiens
tggtcccatttgcacccgaatcacagcactgtttatcctccacatgcagaaccaccaatggttgtgagccatccggtgccttcagccagaggacagcaacygggtgttctgtggggtctttgtggcccctgatagcattatccacatcatctgtaaattcagcataactcttgtaccaggtctcgagctcccaagtcttac

SEQ ID NO: 307001 - DNA, 201 bp, Homo sapiens
cccacactccctggggcttacagttctatttctgtagcagccttggctctgcccccgacccttacgtcagacctagaaatacgtctcacctggatgacctscagggagctgctgctttggtcctcagactgcagtttcctacattacatacttccttatgtaaaaagcacagtgctggctacctctttctcaagctcttcc

SEQ ID NO: 307002 - DNA, 201 bp, Homo sapiens
gggcagcttgcccagaaccacccccattctgcaccttcttttcctctttattcccacaaaagcccaggaaggaggaggcatgaacctaggagatggaggcwtcgccttcactgtgtcttacggatgcaggcacggaggcatgcgaggattaagtggtttgcccgagggctccagctgagcgacacttgaacctgcaccttc

SEQ ID NO: 307003 - DNA, 201 bp, Homo sapiens
aagttccatgattaggaagagccagaactagaacacacatctgaggcttctggctctagattcagcattctttttgttgtgttgcacttcttgcagaagcygtctgatattggtgctaatcttttcccaccctctctttgttagagcagatgatggtcttggggtcataagttgccaagaacctggaggaggaggaggagg

SEQ ID NO: 307004 - DNA, 201 bp, Homo sapiens
ccctcccccactgtcccctgccccaagccaggatgaaggtggctgtctctatatgtgttgaggtcacttgaccccaaagatctcaaaacccgagcccttcrtctgttcccacaagctgggaggctggtaagtgtccctactttcccagaaaccacatccagccccaagaatggagtttagagagaacagcagtatcagggg

SEQ ID NO: 307005 - DNA, 201 bp, Homo sapiens
aaggctggaagttacagtgaaccaagatggggccactgcactccaccctgggcgatggagtgagactccatctcaaaaaaaaaaaaaaaaaaaagcaattmaaagaaaaagaaacaatgaaacttgaagatctgagttttctctctgtccccattagttcatcacgattacagccttttgattttcatagttaattgttct

SEQ ID NO: 307006 - DNA, 201 bp, Homo sapiens
tccttccttccatttatctttccttctgtcttatcttccttccattcgtctttccttccttccttccttccttctccttccatccatcttttcttctgtcyttttctccttccatccatccttccatcattctccttccatccaccttttcttctgtctttttctccttccatccatccttccatcattctccttccatgc

SEQ ID NO: 307007 - DNA, 201 bp, Homo sapiens
ctgttgttatatagtctattatattgcatttactggacatttaggttatttctgattttgggccaatctaagcactggtgagatgagtgtcttaatttggktcactaatctttacacatttgccttagtgttgtcttaggataagtttttagaacaggactagctaacattttcaagcatttaccacgtgccactctgcta

SEQ ID NO: 307008 - DNA, 201 bp, Homo sapiens
catctttccttccatccttccttccatttatctttccttctgtcttatcttccttccattcgtctttccttccttccttccttccttctccttccatccaycttttcttctgtccttttctccttccatccatccttccatcattctccttccatccaccttttcttctgtctttttctccttccatccatccttccatca

SEQ ID NO: 307009 - DNA, 201 bp, Homo sapiens
catctttcctcccttccgtccatctttccttctgtccttccatccatctttccttccgttcttccttccttctatccatctttccacccttccctcccccrtttccatccatctttccttccttccttccatccatctttccttccatccttccttcccttcgttcatctttccttccatccttccttccatttatctttc

SEQ ID NO: 307010 - DNA, 201 bp, Homo sapiens
gcacagggtctgagcagagatgtgtgcatagctgggaactcgagactgaggcctggctttgtggaagacaggcaggaagcaggaagcagagccacagtttyattagagttcgtgaaaatgggatgtctcctcccaatgtaatgatttgctaattgttctcagtgctgtgtgtggggttgaagggagatctaagatgaaacc

SEQ ID NO: 307011 - DNA, 201 bp, Homo sapiens
gagaatacaggtggtgatatcctagaaagtgggccgctaaggcgggaaacacaggctgggagagaggaggggaaagccagcggacgcaggactgtctgggmgtgaggtgagtgatacaaacaatataacagattggtgcttctcacatgtggcccctgggccagcagcagcacaggggaactggtagaaaagcagattctt

SEQ ID NO: 307012 - DNA, 201 bp, Homo sapiens
gtgtgagcagcttcctccctccccttggtccccagggctcctggggtgagagcagtctgaccccctcacgcccccgacatcccagagtctttacaacagcrtcacctcccttcccaccaaaaggcatggccatcaggtagtggaagaagcagagctctggacattgtggggtcttgtttctaggctggtgtggctgggtgg

SEQ ID NO: 307013 - DNA, 201 bp, Homo sapiens
gctatctcggctcactgcaagctccgcctcccgagttcatgccattctcctgtctcagcctcccaagcagctgggactataggcgcccgccaccatgcccrgctaattttttgtatttttagtagagacggggtttcactgtgttagccaggatggtctcgatctcctgacctcgtgatccacccgccttggcctcccaaa

SEQ ID NO: 307014 - DNA, 201 bp, Homo sapiens
gtgcctttgatacattaaaaggtagagagacagagacaagaagagagagagaggagacgagagagagagagagaaacaagacgagagagagagatgagacragagagagagaggtgaaccttgtttttaaaattacctgaaaggatttatgcagaagagagaaggaaggggcacagagctgagttcaagagaagggagtga

SEQ ID NO: 307015 - DNA, 201 bp, Homo sapiens
agtggatggacacacacacagcgtgacccaccagccggaccactgctcactttcagggctcaccaacctcagcatttccagccaaggccctgtggtgctckacaccatctccttgcctgctgccctgccccctggccttgacctgtctgaagatgagaccacctttcctgctctctgggagcccctggtcctgtgcagggt

SEQ ID NO: 307016 - DNA, 201 bp, Homo sapiens
gtctctgtgtctgctgttaggagctgaccagagcagtagctggactttgatgtctggtgggatgagcggcaaagggctctgatttttgcccttctccccaytgaggcaaaaagagtactgcagtcctattgggtagttaaaatgccccagtccctgcccagctctgtcctgacttccccatggctcacactttctgcttgc

SEQ ID NO: 307017 - DNA, 201 bp, Homo sapiens
acaacttaactcccacacgttggttgtgtctctgctttcatttctagttgtaccatttgagggaattaggcattccaggagcaattgcttcttaggccccrtattcttaactctgtctttagtgtcagggctagaaacaaatagaaggatgatttttaaaagtctgctgcctatttcacagtatagttagtggtggtgggg

SEQ ID NO: 307018 - DNA, 201 bp, Homo sapiens
gctgaggtgaggcacctggctcacatgccctgtggtcttgttgaattcttgttcctggactggtaaacagctacccccacagctggggagcatctccagctgccttcacagggtctcaaagcacagacccaggtgctcctgcccccgtcctcctcatccgtaagtgcctagaggacaattcaccaaaccaagatgggtagc

SEQ ID NO: 307019 - DNA, 201 bp, Homo sapiens
caaacgttaacattaattttaccctgtttgctttctctctctgtttttcactcatttgctttacatatatatcatatatatgcacactgtatgtataatakatgtatacacatgtacatacatattgtcttgtgaaccaatttgaaagttgcaaatataatgtcctctacccttaaatacttcattgtatatttccaaaaa

SEQ ID NO: 307020 - DNA, 201 bp, Homo sapiens
ctcttccgtttccctcttgtcctgctctaccatgcatttaacataggtggagactggcctgtaataactggacaggccccttggaaaacccttacatcctyagcccagccatacgcctcctccttccgtaggaccaagtgtgcagttgagtaaagcttagcacttgtccctaccaggtatacaacttaactcccacacgtt

SEQ ID NO: 307021 - DNA, 201 bp, Homo sapiens
tgcactgcagcttggacaacagagtgagaccctgactcaaaaaataacaataatcatcatcatcgtcatcatcatcatcatcatcatcatcatcatcatcaaatgagaggcaactcataggtatcctctgtagtccatttacatttaaggaaaacaaacctcattgtgtatccactagcatcagtggcttcagtcgtctac

SEQ ID NO: 307022 - DNA, 201 bp, Homo sapiens
tagcggcagaggtgggattagaacctcggcatctctgatctgggagcctgagtatttcccagcacactaggctgcctccccatccacctgcgcctcagctstgctgccaccgcgggccccggctcctcctctgctccacgggtcaccccagaactctgctgtgttgtgctccctctgcagccagccatgccaagggaaaag

SEQ ID NO: 307023 - DNA, 201 bp, Homo sapiens
agcatcttggcggagtttggatccctgcacttggaattcttacacctcactgaactctctggcaaccaggtcttcgctgaaaaggcaagtctcctccccamccttcttcctgcggagcagagggatgagcgtgcggctgccacagggttttcagaggcgagtgggtcctccctcatggatcagcaggagggcagtggggag

SEQ ID NO: 307024 - DNA, 201 bp, Homo sapiens
gaaagtaagtttattgagaaagtaaaggaataaagaatggctactccataggcagaacagcagcctgggctgcttgactgaatatacttacagttatttcktgaccatatgctaaacaagggatggattattcatgagttttccagggaaggggtgggcaattccctgaactgagggttcctcccttttttagaccatata

SEQ ID NO: 307025 - DNA, 201 bp, Homo sapiens
tgttcctatctgggggaggctgggatggacccccaggatggaccctgtcagaagtcatgaactggctgtaggagagcagctgtttgctccttttgttcccrgaaaggggtcccaatccagatcccatgagaaagttcattggaccttacacaagaaagaatttggggcgagtccataaagtgaaagtaagtttattgagaa

SEQ ID NO: 307026 - DNA, 201 bp, Homo sapiens
tgagaatgacaaatactaggggctttaattgttcagtcacatgagggtggtgcctcctgagttctgagaactgctctcgccaggaaagccttgaaatgctyctgggcttcgatctttaggaaattgaactgtgtgttttctctgaagcggagagctgtctcctgggccgtggcacgtttgctgcatttgtgaattgtttgg

SEQ ID NO: 307027 - DNA, 201 bp, Homo sapiens
ccttgggggaagagggacagagatggggcagggtggcacctctctctttccctctgggtgagtgcggggctgtcttagggtgggaggcccagcagacctgwttgaatcctgtctccgtcgtcttccgcctctgacctcgaacacttcacttccctgtatgagcctcagtttcctcctttgcataggggtatgaatgatgct

SEQ ID NO: 307028 - DNA, 201 bp, Homo sapiens
gtattcttagagcccacacatcctcttaagagtttagctgatccagccaacagccttgcggcatacagagcatgggctgtcatcctgttttatggctgagrggctgaagaccctgaaaagggatgtgaccaaccccaggtcccaccagtttaaattgtgatgcctagacttaaacctcccctccccactccaagggtgatg

SEQ ID NO: 307029 - DNA, 201 bp, Homo sapiens
tggagtagattatagcatgataaggttctctgtgctctgagtgaagtgctgttcaacttggcgctaataggagcgggattcaggtttgtgagctctggaaytcgaagtcgacttgcctgttagagaagggggttttggattctgtatagcctgtagtcttttaaatgtaagaatccccagggagtctgctttgaagggtag

SEQ ID NO: 307030 - DNA, 201 bp, Homo sapiens
ttatttggggttgtggtgtgaggtaggactccagcttcattcttttgcatgtggatatccaattgttccagcacaattttttgaaaagactgttcttttcygattgagttgtcttagcatccttgtcaaaacttagttgagcatagtatcaggtattatttctggactctcgatttcattgatctatgtctatttttatgc

SEQ ID NO: 307031 - DNA, 201 bp, Homo sapiens
aagttgaatctgtgttagaggaagtgttgggagctttaggctctccctgcgttgctttcagtggcaaaattgggaaggatttcccaagggaatgatggacrtaggctagttgcctcaggcgagctcatggatttatgattacatttcttgaaaataggggccatgcatggagcagggacaagtgtcatgagtcaaggattg

SEQ ID NO: 307032 - DNA, 201 bp, Homo sapiens
gcctgagctacagccaggagcatggacaccaggcctgtaccctgtgtgctgggcacgatctgctttgctcagtctgcctgggctcctcagtgcctccctgsttgagcacctcgagagggtgaatacgggccaggaactctgttcagccctgccacctacaggggaagcagctgggatgaaccggcaaaggatcaagtctgt

SEQ ID NO: 307033 - DNA, 201 bp, Homo sapiens
ccaggtatacaacttaactcccacacgttggttgtgtctctgctttcatttctagttgtaccatttgagggaattaggcattccaggagcaattgcttctyaggccccatattcttaactctgtctttagtgtcagggctagaaacaaatagaaggatgatttttaaaagtctgctgcctatttcacagtatagttagtgg

SEQ ID NO: 307034 - DNA, 201 bp, Homo sapiens
ttcaacttggcgctaataggagcgggattcaggtttgtgagctctggaactcgaagtcgacttgcctgttagagaagggggttttggattctgtatagccygtagtcttttaaatgtaagaatccccagggagtctgctttgaagggtagtcggggctaggctggaacaatgcttcctggacagatcaggtcaaaaattcc

SEQ ID NO: 307035 - DNA, 201 bp, Homo sapiens
ccctcttgtcctgctctaccatgcatttaacataggtggagactggcctgtaataactggacaggccccttggaaaacccttacatcctcagcccagccayacgcctcctccttccgtaggaccaagtgtgcagttgagtaaagcttagcacttgtccctaccaggtatacaacttaactcccacacgttggttgtgtctc

SEQ ID NO: 307036 - DNA, 201 bp, Homo sapiens
tccttccaagagctctgtttgagttgtaaatccattcaagatcctttcccttctccctggcccttcagtctcttccgtttccctcttgtcctgctctaccrtgcatttaacataggtggagactggcctgtaataactggacaggccccttggaaaacccttacatcctcagcccagccatacgcctcctccttccgtagg

SEQ ID NO: 307037 - DNA, 201 bp, Homo sapiens
tgtttgtggctccttggctgtgtcttcaagttaaatgtggggcagaagagaagatggttgtggatctgtgtggtgagtgggctctgctgactgataatccmagtaggataatccaatgggaactcaatataggtgtttgttctctagagctagtctggttctgcatagaaaatgttttcattctcctacctagcaaatgga

SEQ ID NO: 307038 - DNA, 201 bp, Homo sapiens
aaataacatgatgggagaaggtctaagttggtgaccagatgtctggatctttctagctggtatctccttgcacccctggtactagctggaggcatgctgcrtatacttggagttggtgttcagctagccctctcttactaatcttgaagaagagagggctggtttctgttgttttgaaacctattgtctcttcaggcttcc

SEQ ID NO: 307039 - DNA, 201 bp, Homo sapiens
ccagcagcactgcaggcacttgctgaccgcccatcatgatgtgtctgtgcccgccccagctgaatggggtctcctggagctgtttccaggaagtcagagaytcgcaatgggtctttaaaactggttgtccattctcttcaaagagcttgctctgccagggccataaacaaataagaaatctcaggactaataaaaggctcg

SEQ ID NO: 307040 - DNA, 201 bp, Homo sapiens
gagctgaggtgaggcacctggctcacatgccctgtggtcttgttgaattcttgttcctggactggtaaacagctacccccacagctggggagcatctccasctgccttcacagggtctcaaagcacagacccaggtgctcctgcccccgtcctcctcatccgtaagtgcctagaggacaattcaccaaaccaagatgggta

SEQ ID NO: 307041 - DNA, 201 bp, Homo sapiens
tgatgatcatggaggctgctagacccagctcagattactacccagtggactagctggatgaccttaggcactagtcatttaaattcctcctctgtgaaccrggtttaacaacactgctcagggtggggataaggaacaaacagactaagtcctgcctgtggatagactttggaaatggatacttcatgtccttgtcgtagt

SEQ ID NO: 307042 - DNA, 201 bp, Homo sapiens
ggaagaggggtgaggattctgtgctttgcaggtgggtataaaataacatgatgggagaaggtctaagttggtgaccagatgtctggatctttctagctggyatctccttgcacccctggtactagctggaggcatgctgcatatacttggagttggtgttcagctagccctctcttactaatcttgaagaagagagggctg

SEQ ID NO: 307043 - DNA, 201 bp, Homo sapiens
ctgtcacttaagggatgaggaaactgagttctagggaagttaaccaacctgcccgaggtcactttgttgggacccggagaagccaccattggaagctgggyaggagaggaaaggcgcccagccacctgcctgcctctgcccaggccagctcacttgtctgccagggcatctccaccacaggaagcccacttgggagggtga

SEQ ID NO: 307044 - DNA, 201 bp, Homo sapiens
ttctctgtatatctgatttatcgtcactagtgccagggacaggtaggaaaattaaaaggctttgtagcatgtgaatctgagcctgtgagatgttcaggatwattaatattaggaacagctcagatttaaatagctttccttccaagagctctgtttgagttgtaaatccattcaagatcctttcccttctccctggccctt

SEQ ID NO: 307045 - DNA, 201 bp, Homo sapiens
aagcagcacatgagatgacccactttacatttctgaaagtttcctccgacttctgagtggagagacctaggaattctttttcctctcacatctgtctcagyggaaaaccattctcagattcctaagcggaagcttctgaagcctgtgccccaggagtgccgcgaggcccgagtgccctctgccctgtgtgcatgacctctc

SEQ ID NO: 307046 - DNA, 201 bp, Homo sapiens
tcacggctcactgcaacctccacctcatgggttcaagcgattctcatgccacaccctcctaagtagctaggactacaggtgtgcaccaccatgcccagctracttttgtatttttagtagagatggggtttcaccatgttggccaggctggtctcgaactcctggcctcaaatgatccacccacctcagcctttcaaagta

SEQ ID NO: 307047 - DNA, 201 bp, Homo sapiens
ctgcactgcagcttggacaacagagtgagaccctgactcaaaaaataacaataatcatcatcatcgtcatcatcatcatcatcatcatcatcatcatcatcaaatgagaggcaactcataggtatcctctgtagtccatttacatttaaggaaaacaaacctcattgtgtatccactagcatcagtggcttcagtcgtcta

SEQ ID NO: 307048 - DNA, 201 bp, Homo sapiens
acccggtcctgggaacgagggccgatgagagtcaggagccccagagccaagtgcgagcccagcgggagaaaatcaaggaggtatggactcagcccccaaaytcctcccaccaactgccccctctaaggagagaagaccctctggcgctcccacccctttcccttgcctcagtcactcctggtcccaggtctacttctggcc

SEQ ID NO: 307049 - DNA, 201 bp, Homo sapiens
actgcactgcagcttggacaacagagtgagaccctgactcaaaaaataacaataatcatcatcatcgtcatcatcatcatcatcatcatcatcatcatcatcaaatgagaggcaactcataggtatcctctgtagtccatttacatttaaggaaaacaaacctcattgtgtatccactagcatcagtggcttcagtcgtct

SEQ ID NO: 307050 - DNA, 201 bp, Homo sapiens
gggcatggtggctcacacctgtaatcctagcactttgggaggctgaggcaggaggattgcttgagcccaagttcaagaccagcctggccaacacagtaagrtcctctctattaaaaaatatatttaggccgggcacggtggctcacgcctgtaatcccagcactttgggaggccaaggcgggaggatcacgaggttaggag

SEQ ID NO: 307051 - DNA, 201 bp, Homo sapiens
taagtcctgtccgtggagatggaggggcagacaggggccagttcctgggagggcagtgtgaccaggagcaaggaagcagagtgcccctggcagagccagtygctcaacctgctccacactaactacacctcagagcgtctacaaatgggaggaggtcacaccaccctgctctgccccacctctgtccaccacagccttcct

SEQ ID NO: 307052 - DNA, 201 bp, Homo sapiens
ctttttaatgatttgagctgtgccttctgtgaattgacaaaaatggattaccatatatttctgaaagccacactgccaaaatcagatttttttttttttttagttttctcagccatcctcgaaaaccttagctgagaatgacaaatactaggggctttaattgttcagtcacatgagggtggtgcctcctgagttctgaga

SEQ ID NO: 307053 - DNA, 201 bp, Homo sapiens
acactggggctgttgtgcagagcaaggagctcaggtcctaacactgaagtgacagctcttcctcccctgacccttttttttttttgagacccagagtctcrttcagtcgcccaggctggagtgcagtggtgcaatcttggctcactgcaacctccacctcctgggttcaagcagttctcctgcctcagcttccccagtagc

SEQ ID NO: 307054 - DNA, 201 bp, Homo sapiens
gtcccagctgcttgaggggctgaggcaagaggattgctcgaactgcagaggttgaagctgcagagtgagctctgatcgccccactgccctccagcctgggygacaaaatgagaccttgtctcaagaaaaaaaaatgcatttatatagaaagatgaatggcttggctcacttgcctccagcccaggggccatctctcctgag

SEQ ID NO: 307055 - DNA, 201 bp, Homo sapiens
ggttctttatatgtattcttccaaactcatcaccataccaccctaaaagggagacctcattgtcccattttactttgtttaatttttgtttttgcagcagrgtcttgctctgtcgcccaggctggagtgcagtggcgccatcacagctcactgcagcctctacctcctgggctcaagcaatcttcccacctcagcctccca

SEQ ID NO: 307056 - DNA, 201 bp, Homo sapiens
gcaagaggattgctcgaactgcagaggttgaagctgcagagtgagctctgatcgccccactgccctccagcctgggcgacaaaatgagaccttgtctcaaraaaaaaaaatgcatttatatagaaagatgaatggcttggctcacttgcctccagcccaggggccatctctcctgagaatccctggagtaccaagtccgtc

SEQ ID NO: 307057 - DNA, 201 bp, Homo sapiens
caggctgggcaggccaaacgactgcctacctttttttttttttttttttgaaacagagttttgctcttgttgcccaggctggagtgcagtggcacaatctyggctcgctgcaacctccgcctcccgggttcaagcgattctcctgcctcagcctccagagtagctgagactacaggtgcacgccaccacgcccggctaatt

SEQ ID NO: 307058 - DNA, 201 bp, Homo sapiens
gggattacaggcatgagccactgtgcccagccccaatacttattattttttatcttttatttatttatttatttatttatttatttatttatttatttatwgagatagggtctctctgtgctcaggctggagtgcagtagcatcattttagctcactgcagcctcgaactcctggtttcaagcaatcctcccacctcagcc

SEQ ID NO: 307059 - DNA, 201 bp, Homo sapiens
taaaatcagtctttttctttttaaggctgttctagtagatgtgtgttgatatcacactatagctttatttacacacacacacacacacacacacacacacatagccattcccccattctttccattatagttacatcaaaatattggttgttcggggtgtaacttcctatggctgtgtacacactcttcatggctgattct

SEQ ID NO: 307060 - DNA, 201 bp, Homo sapiens
gtaaaatcagtctttttctttttaaggctgttctagtagatgtgtgttgatatcacactatagctttatttacacacacacacacacacacacacacacacatagccattcccccattctttccattatagttacatcaaaatattggttgttcggggtgtaacttcctatggctgtgtacacactcttcatggctgattc

SEQ ID NO: 307061 - DNA, 201 bp, Homo sapiens
ctctccagcacacctgtagccccagtacctagcacagcgctgacaccaaggaaatattacatggctgccgagatattgtaagccaggagggtacctgagtraaaaaaggccagtgtaggtgaggtagggtgtgaggagggaggggcaggagacagactagagtggaatcataggggtcagtaattagtggggactcgctct

SEQ ID NO: 307062 - DNA, 201 bp, Homo sapiens
aagtgcagggaagaggaattctgtgaaggttttgaaacacctgtcatgggccgtgggttcatttgtgccctgcctatggcagggtctgttttgcccactgkcaggagctgctgtttcctatagctggtttacaggccccagcaggaagtcccagttctggaggcagcataggaaagagaaaatcctggtctcctgttagaa

SEQ ID NO: 307063 - DNA, 201 bp, Homo sapiens
ctggtcttgtgccccacttagctccttgcaccgctgcttgctgtgatttaaaccttttaccagtcgtctgccagcctgcactgtcttgtgttttgttttaraaagccttgttttttatctttgcatctgcgtgtctcagttgtgtcttcaaagaggcagtggtttataatttcctcttgactgcaattacttagcttgggg

SEQ ID NO: 307064 - DNA, 201 bp, Homo sapiens
ccttgggtgattttttttcttctaaatgttcttcctggagtttgtgttgccagcctgaccatttctctttgctaatatgatatcacataaaaacatcatcrtcattaatatggcagagtcagcagggtgggatacagaccgtgatccagggaggcaggctggttcctggctcagcagctcctggggaggaggttctgggag

SEQ ID NO: 307065 - DNA, 201 bp, Homo sapiens
ttagttaagtatattcctaagttttttattttattttatttttgcagctgttgtaaaagggattgagttattgacttgattcttagcttggttgttgttgktgtatagcagtgctactgatttgtatatactgattttgtaacctgagactttaatgaatttatttatcaaatctaagagtcttttggaggaatctttagg

SEQ ID NO: 307066 - DNA, 201 bp, Homo sapiens
ccttcaggaggtagcctgtggtctcaaagccaagagtacttccctgggaccttcttggaccctccaaaccaggcccagtctcccaagttgtgcaggaatgraatggcacagcagtgaagggcagagcaaccagggaagatggccagagttgagtcctggctccctgttcatcagccctgggaggtttagatgattctctaa

SEQ ID NO: 307067 - DNA, 201 bp, Homo sapiens
aaggaatgagacagcatgggaggtggaggaggttggtgtctgcacccaccctgcccgagaacgggacagtgggggatacgtgcaggacaaaatggccttgsccccgactccaggctccagaggctgggggtgagcattctctacccccatcccaaagctatggcagaggaaccctgcagcaaaaggacacggagtgcccat

SEQ ID NO: 307068 - DNA, 201 bp, Homo sapiens
ccagcccccttgtctgcagcctggcctccatctcccctgagggacaggagtggtgtggggctggagaggggcagtcccatacctggattcctcaccccttrcagatacaggctcctgaagtcaggaaccaaataactgagtctgagatggaaattcccaggaaaatcttcaaggcaaatttacaagggatatccccccatc

SEQ ID NO: 307069 - DNA, 201 bp, Homo sapiens
acagacgcccatgctgtgggctcgttttgttcagccgaaccccttacctttaatgcctcctagggtcagactgtagccaggcactgggagttgtgaatgcsccacagccccccttgaagccctccccatccagttggagggggcctttctttcattcctaaatacttacgggcccccgtgggggctggaaagtgttctggg

SEQ ID NO: 307070 - DNA, 201 bp, Homo sapiens
tctcacgccaagtgggtgctcacccccaagcctgccaggtcccaggacttagctgttgccgaagcagcttttctcttctccaaataactgtgctttctttrtgctttgcttttactttaatctgtgtgtggctgcactggaaagggtaactttatggcagatgctgtggaacgtaatctgctcatgtttaggctgtaaatt

SEQ ID NO: 307071 - DNA, 201 bp, Homo sapiens
tgtgaatgcgccacagccccccttgaagccctccccatccagttggagggggcctttctttcattcctaaatacttacgggcccccgtgggggctggaaastgttctgggcagtggaaggtggcggtgaaccgagttctctccctaggagccaacccctcaggagaagacagagtggctgggaaagcagatccgtgcgtga

SEQ ID NO: 307072 - DNA, 201 bp, Homo sapiens
gtgcagctggtggtggccggagtgtgctgcccagaggccctttctgccttcccttgcagagtaaacataaagttaatgagcagccaggctccctgccctcrgggcacacagtagttgagccatcaagggaagaaatggccatgaattatttaaggaaactcagagcacttgattttgtaggagagaactttgaatagaaga

SEQ ID NO: 307073 - DNA, 201 bp, Homo sapiens
tattcttccaaactcatcaccataccaccctaaaagggagacctcattgtcccattttactttgtttaatttttgtttttgcagcagggtcttgctctgtygcccaggctggagtgcagtggcgccatcacagctcactgcagcctctacctcctgggctcaagcaatcttcccacctcagcctcccaagtagctggggcc

SEQ ID NO: 307074 - DNA, 201 bp, Homo sapiens
aggaagagcaggcagcaaggatcaggacctgccctgtcaagacctgctcagagccgatggagggcttagccagattatccccttctccttgtctgaaccakcctcccttccagcgcccacctctcttccacttcttatcttttctgttactctgtttggagacttaactagcaatcacaggacattttgtgaagttacagt

SEQ ID NO: 307075 - DNA, 201 bp, Homo sapiens
aggattcaggagcctgagagcaggggcaggaacttgccaacaaatctcttagcaagctgctttctcagctggcctcatagagcgtccccagggacgtcacrgggcagagctggtcacgaggagtcctggctgccctcccagcctgatctagaggaagaagggcgcatggggtgaaaacaccagggagctcaaggcaggatt

SEQ ID NO: 307076 - DNA, 201 bp, Homo sapiens
gttgctgtcatgtgttttactgctatgtatgttataaacctcacaatacattggtattatttttgctttaaacagtcagttgtcttaaataaattaataasttagattccttttatttacccatatactgaccatttccaatattcttcatttcttcttatatgtctgatatccatctggtattgtttcccttcagcatga

SEQ ID NO: 307077 - DNA, 201 bp, Homo sapiens
atttcagtatattataacctgtcaaatattttctctgggctttttaccttaagcctaatgactgctttttaaaacttagtttgtaaattctcacattaaarcagtttttaaaaagagaatcgttcacataagccaaattgctgaattactaatcagagggatgctaagtagctgaaggagtttccaaggcaccatctgtga

SEQ ID NO: 307078 - DNA, 201 bp, Homo sapiens
gagggaccttctagttctccatcctctccctctatcctcttattttgtctggctgcagtccttagtcctacctcccttttaattaattaattaattaattwatttatttatttacttacctttgaaacagagtttcattcttgtcacccaggctggagttcaatagcacgatctctgctcactgcaacctctgcctcctgg

SEQ ID NO: 307079 - DNA, 201 bp, Homo sapiens
acagaagcacacagtctcttaagacctaggctcagaactggcacacagtcacttcctctgcatcctgttggtcagagtaagttaattggccagcctggacmcaaggagtgaagagagagactccatctcttgatgggaacaaccgctaagtctcatggccaaagtcagggctacagggagaagtaggacaccaggaacatt

SEQ ID NO: 307080 - DNA, 201 bp, Homo sapiens
ctcttccctccaggaactgagcaggcctgggatgtggccagaacatgacttttagaatccctaaacctgggggagattatggagcctaaaatataattcaraagaaatctttcttttttagtgataaaagttacatgttgtacaaacattgatgtagcttctttctagcatttctaattgtgcagtcccaggtgagtccat

SEQ ID NO: 307081 - DNA, 201 bp, Homo sapiens
agagcctgcctggcccgcttcttctgtcgggaaaggcttccctgcagtattttctgtctcgtcaacactgcatttcattttaaattgcagctgaaagtagrtattttccctcttgcctattacaaacctcttaatttgtctctccctctgctgttatttgtctctataaagtgttttgcatgaaagacccacacagcacaa

SEQ ID NO: 307082 - DNA, 201 bp, Homo sapiens
gaagaagaagaagcatgagagagggattatggcacagaaacacatgggcaaagtcctagatgggagatgtggcaagacctcggccccttggggtctaaaaratgttcagtgtggctgtactgggtgggggccatggtaagagaccatctgtgagtggtgctggcatataaatggggtcataaatgcagctcctggtatttc

SEQ ID NO: 307083 - DNA, 201 bp, Homo sapiens
aggagattgatacagccggagccatagacaaacaagatgacaggccctgggaacatgggaaccttttgtcatgccctgttacccatgggggctttggcctyagtaagttattactggctaccagcgccttgtatatatcatcctcactagaatgaaaacacccatgtaactcttagtgagttgcttgctctgcattgaggc

SEQ ID NO: 307084 - DNA, 201 bp, Homo sapiens
tgccctttgacaaacacacaaaaaggagattgatacagccggagccatagacaaacaagatgacaggccctgggaacatgggaaccttttgtcatgccctrttacccatgggggctttggcctcagtaagttattactggctaccagcgccttgtatatatcatcctcactagaatgaaaacacccatgtaactcttagtg

SEQ ID NO: 307085 - DNA, 201 bp, Homo sapiens
cttgttgcttttagtattgaaaactctaggatgctccatcttgtctgtggttgtactggctcccgagaagacctttagccactggcctggctgagttgccraagttgggggagggggcagtgcacagacccagtttctgacactcaaagcaggggctataaattctgtacactcccatgtccacagctctgcaccactgac

SEQ ID NO: 307086 - DNA, 201 bp, Homo sapiens
cttcgtcaactgtcctcccctgtagttgggaagaattctcagggtgtgaactcattggaatctcaccataggccagggaggggggtgctctcgggggccgragaaatcccagtctcgatgccagggttgactcctcagagctggactcctggatctctgctcagatccctcttccataaacactgatcctggagagacaca

SEQ ID NO: 307087 - DNA, 201 bp, Homo sapiens
atggaatggcacagcagtgaagggcagagcaaccagggaagatggccagagttgagtcctggctccctgttcatcagccctgggaggtttagatgattctytaagcctcagtttccccatctgtaaaacaggggcaggaattgcaccctcctcctcaggtgttgtgagacttaaaagaggtgctgtctgtggtgcgctcag

SEQ ID NO: 307088 - DNA, 201 bp, Homo sapiens
ggccttgctccagcccagaggtgggagatagggtcaggctaagccacaggccttcaggaggtagcctgtggtctcaaagccaagagtacttccctgggacyttcttggaccctccaaaccaggcccagtctcccaagttgtgcaggaatggaatggcacagcagtgaagggcagagcaaccagggaagatggccagagttg

SEQ ID NO: 307089 - DNA, 201 bp, Homo sapiens
cagatgggacctgtggggcggttttcctttaagttgggccaagggtttttgcaagctgcaatctcacgctcacgttgccctgcagggtgagagagagggcygggaatgtagttgcaccccaaggcctcactgacccaagaagatttttgtggaggggctgcccagtgccagtaggggcaaggagggccacatgtactcact

SEQ ID NO: 307090 - DNA, 201 bp, Homo sapiens
cgcctgcctctctgctctgtgctctctgggccctgggcaccagtcttcctgctcttcctcagacaccccaggcgactcccacctcagggcctttgcacttrctgtcccctctgcctggaatatcattccaatggctgggtccctttcactagtcaactctcaattcaaatgccactgaaactaccattcccagcctgtcac

SEQ ID NO: 307091 - DNA, 201 bp, Homo sapiens
aagcagctctctggaggctggaactattttgctagaggtgtttggatgctgctgtctaacccgagacatggagtttatataggactgttgggccctaagcyttcctgattcatatgaggtctgaaaagaggcccatggatgtgcctcatctccggcctctgttcagactagggtacacagacacataaatcgttataatgc

SEQ ID NO: 307092 - DNA, 201 bp, Homo sapiens
ttacatagacttggggagtaagcagtggagaccgggaggggccgcatccaagcacacaccaggctccatgtgggctccgggagtgccaggtcctgctgcakacaggtctggggctggttcctgcagctcctggcagcagcgaggaccctgcctccttgagagacagcttgccagcacagagcagggtggagagagagtctg

SEQ ID NO: 307093 - DNA, 201 bp, Homo sapiens
ctgtactcctagctattcaggaggttgaggtgtgaggatggcttgaacctgggaagtggaggttgcagtgagctgaaagtgcgccactgcattccagcttkgttgacagagcaagaccctgtttccaaaaaaaaaagtaaaattcttggtttaggttttggcatgaaggctgtattagacacataaccatgatgatcatgg

SEQ ID NO: 307094 - DNA, 201 bp, Homo sapiens
ctcctctttactgatgctgggagtaaaccagatggattcgtcatggcctgatggagagaaggccacctgtctggcctgtggtcatgtgtgctctcggctcytgctctgttctatgtcagggttaatttactatatatttactccaaacctaccatgcacctggcatcacactaggctctttggtggctccaaagatgcatc

SEQ ID NO: 307095 - DNA, 201 bp, Homo sapiens
actccatttatctcaatttgctaaatttaaactctgtttttccagagtggctctacttgagggcttggccagctaaattaaggtttttcttcctctttccygtggccttttatgaagctacccagcattaattatcatgtttgtcactgggtaataaaaatctctgaactccctgccaccagattatctttgtaaagaaat

SEQ ID NO: 307096 - DNA, 201 bp, Homo sapiens
tctgcagccacagcctccttccccaggactagcacccccaccctgctgcccacagttttggggttgcaaggctccagaccttgaccataggcctatcacaraggccctgagacttgttcccaggcccacccttcttccccaggccactgacagactgtgtcttgcttccctgccctgcgtggggcacaggtatctctatct

SEQ ID NO: 307097 - DNA, 201 bp, Homo sapiens
ttctcaagtggggtgctccacggattccctgatttttctgaatgttctcggacctagtaggtatcagtgtccagggccaaggggtcacatcacagaggccrttggtcttaagagctgctttccccagaacgaggctgctgtggtttggccttggctccccacaagtctggcttctgcaggaagtttgctgagtagcccagc

SEQ ID NO: 307098 - DNA, 201 bp, Homo sapiens
tttcaacttctccaggtctgagtttcaactacaaaatgtggggataaaactcgatctccaagctcccttgctgcagcctctcactcagctcctggagtccrtggatctcagggagggaacctgctgtccaacactgctcttccagggttaaagttccccttctgcaaggtgagggcgagctgaagaaatgagcccctcttg

SEQ ID NO: 307099 - DNA, 201 bp, Homo sapiens
tccatcaaactttacacacacacacaatctgagcggggttgtcctgcttgcttatgttgcctgcagtctgcatttttcagtcctggccagcagcagcatcrgtggccctggccctgccagacacccctgcgtcgtgcctgagcctgctgcccagaggggatgcactgggaagagcaggaggctgttgcaaggctgaggaag

SEQ ID NO: 307100 - DNA, 201 bp, Homo sapiens
cacaccaaatccatgttcagtgacatcatgttggtagctctaaatcagccctggtgggaatatttctgtttgccacagaaattggcaaacactataaactygggtttgatttattgttttgataattgcctagacttaggaaagtgatagagagaatgctaatcagattaaacttaagtgtttatatatggcccagtgtgg

SEQ ID NO: 307101 - DNA, 201 bp, Homo sapiens
ccttgaccataggcctatcacaaaggccctgagacttgttcccaggcccacccttcttccccaggccactgacagactgtgtcttgcttccctgccctgcrtggggcacaggtatctctatcttctgttctctgaagatgacttgctctccctggaagactgggtgttcaacaccgaggcccacccactcccggtgaacca

SEQ ID NO: 307102 - DNA, 201 bp, Homo sapiens
gtgctgggattacaggtgtgagtcaccatgcccggcctgaaactccatttttgagacagactcttactctatcacccaggctggagtgctgtggtgcagtsatggctcactgcagattcgaactcctgggctcaaggggtcctcccacctcagcctcccaagtagctgggaccacaggtgcatgcaaccatgcccagctaa

SEQ ID NO: 307103 - DNA, 201 bp, Homo sapiens
gcctcctggaagcatctgctcatcagggagcatattcccagttgacagattgagctttagaaaaggagtggctttaagttccatgattaggaagagccagractagaacacacatctgaggcttctggctctagattcagcattctttttgttgtgttgcacttcttgcagaagccgtctgatattggtgctaatcttttc

SEQ ID NO: 307104 - DNA, 201 bp, Homo sapiens
agtgctggtttaaattggggcattctctccaaggaagtgacattctggaggaggtggggttagcagagtcagggctggagcatgcaggaaggaggcgcagcaccagctaagccccgaagcaggaagaaaaatgcagctttcaagaatgtcacctttgcagagagattttccctgacctccctctgcaaagtacagcactgc

SEQ ID NO: 307105 - DNA, 201 bp, Homo sapiens
ctgaacctcagttttcttatctataaaatgggctcaatacttgcttctgggagtagcaatggaagattaaatgagataaaatatgtgatcacatctggcaraagggctggtacatggaggtgctcaataaatactggcaccatcgggcacactggcttgtgcttttaaccatagcactttgggaggtcgaggcaggaggat

SEQ ID NO: 307106 - DNA, 201 bp, Homo sapiens
caaatgtccccctctgtgtcttgctctcccccaccgagggtgagttctgcctccattgtggcaggatctttcaacctcacaccaaaggagacaaggcttakcttgagcacagggtctgagcagagatgtgtgcatagctgggaactcgagactgaggcctggctttgtggaagacaggcaggaagcaggaagcagagccac

SEQ ID NO: 307107 - DNA, 201 bp, Homo sapiens
ttaatggtttgccttttcaaagggtggccctggtagctgtttggagaaaggatgggggtgacatgcggggagagagggcagctggagaccattacagacartcagatgacagccagaggtgaacggggagggggaaaggaggtgagtcagagatgtcatcgccagaaatcctgttgaatagatttgggtggggaggaaagg

SEQ ID NO: 307108 - DNA, 201 bp, Homo sapiens
aaaggggaagactcgctgggcgggggctgtgactcaaggcactcatataaggaggcaattatctcacgattggacatgctggtggcccagtctccagccaktgctacttggaggatccgtcactgttagacatgccaacaaatatatatactgctcagttgagagcagacctcacaagcaaggctggcggctttaattatc

SEQ ID NO: 307109 - DNA, 201 bp, Homo sapiens
tttatggaaagtctctatgtgctgggtactctcctaggtgctagggagcagtaatgagcaatggagccaacagagcctcgtggagcctgcataatcatgcrgggaaatagatactaattaatcacacaactaatgtaaaattttgactttaataatcctccataatagggtgattcaacctgaagggaagacctctcttgg

SEQ ID NO: 307110 - DNA, 201 bp, Homo sapiens
ttggaattcttacacctcactgaactctctggcaaccaggtcttcgctgaaaaggcaagtctcctccccacccttcttcctgcggagcagagggatgagcrtgcggctgccacagggttttcagaggcgagtgggtcctccctcatggatcagcaggagggcagtggggagcccgggagcccaagctaccactaaggtagc

SEQ ID NO: 307111 - DNA, 201 bp, Homo sapiens
tcttgttcctggactggtaaacagctacccccacagctggggagcatctccagctgccttcacagggtctcaaagcacagacccaggtgctcctgcccccstcctcctcatccgtaagtgcctagaggacaattcaccaaaccaagatgggtagctctggagtcccgttgggcccagccactcatcatacagcagccagtc

SEQ ID NO: 307112 - DNA, 201 bp, Homo sapiens
aatttttgcattttttgtagagacagggttttgccatgtcgcctaagctggtcttgaactcccgggctcaagcgatccacctacctaagcctcccaaagtrttgtaattacatgcctgagccactgcaccccggctcattatcccatttcactgagggtgcaagaggtcaagtcagttgcccaagctcacacagcaaggat

SEQ ID NO: 307113 - DNA, 201 bp, Homo sapiens
catccgcaaggtcctcaggaagatcgaaaagccctttggcctctaccccaacttcctcagcccagtgagtgggaactgggtgcaacgtgagtacagagacrccactgccccttattcagcgggttcctgcccaggcttcctaggaagaccctgccaggcccctgggctgagtgaggatgtgtctgtcagagccatgcagcc

SEQ ID NO: 307114 - DNA, 201 bp, Homo sapiens
acccattgcaacagaatggggtttggggtcgcttaggtgtgagagtgtggacaagtcccccaggcctctggaatgtgcatgcctgttgagaagcccagctytgggaagcagaggcaggccctggtcacatggtcatggtcagctggaactggcagtgacaggttccgtgggcactgcctctagggcctcccaagacctggc

SEQ ID NO: 307115 - DNA, 201 bp, Homo sapiens
cgctgtcttccctatccaggcctcgcaggaaacataaagttcacgtgctctggaaggtggcttctggtcacagctctgccctgagttttgtgactttggaratatcactccagaattctgggcttcagttttgagatgaaagcagttcagagcttgctctacagcacggtcagagggagtttttaaacacaggtttccaga

SEQ ID NO: 307116 - DNA, 201 bp, Homo sapiens
cgggggaggcgcggccagggctgcgcgctccgcggagccggcggggccgggaacaggtgatcccagtgggagccccgcgccctgccgagttcgaggggcgrgagcccgcgctcccgggcgcatctgcagccgcccagccgcggctccggacccaggcatccctgcgctgtctggggcccgggggaagccccctgcccccgc

SEQ ID NO: 307117 - DNA, 201 bp, Homo sapiens
ctactctcacgcttaatcgataattaggctgaataaagaattataagatggaagtcattttccctctgaattttgaaactgatccattgcttctagcttcygacattccggatgagaaacctgatgccattttgatatctcgtcatttgtatgtgaactgtcttttccctggaagcttatagggcgtactctttgtcctca

SEQ ID NO: 307118 - DNA, 201 bp, Homo sapiens
aaaagggctgaaaggggtgtgggcttcctagctcaacagttaccttggcaaattataagggagcccctgccgggaagcataattttcttctcaggcagagycagggcctgcaggtctgggcaaagtcagtcgcatatgggaaattgtttcctattaataaaatctgagccctcggcctgctaaagagcagagggggttata

SEQ ID NO: 307119 - DNA, 201 bp, Homo sapiens
gtctctactaaaaatacaaaataattagctagacatggtgccgcccacctgtagacccagctacttgggaggctgaggcaggagaattgcttgaacctggraggtggagattacagtaagccgagattgccccactgcactccagcttgggcgacagaatgagactccatctcggaaaaaaagagaaaatttgcgattagg

SEQ ID NO: 307120 - DNA, 201 bp, Homo sapiens
gctctggacattgtggggtcttgtttctaggctggtgtggctgggtggcctgggacaagctgccacacctcccatttgtctgtgtagggcgcggcagcccrggtgcctggcttgctgtaggcattaaatgaggaaacgtgtgacaagatactcctagagaacagctcttaattttctgcaggttctttttgagaaactggt

SEQ ID NO: 307121 - DNA, 201 bp, Homo sapiens
ggttcggtggctgctggcgagatgcccgcttcctacccgtacaggcaccgggcccctgaggtcaggcgggtgtgcgaggccctgccccgtgagagccggcrgcagatggagataatgttcttgtcctctttcccttcacagaccatgtctcagttggaggactcggggacagtttttatgaatatttgatcaaatcctggt

SEQ ID NO: 307122 - DNA, 201 bp, Homo sapiens
ctctcagccatttgccatcacaatattataaaaagctattttaagaattgagagtgcccaatctatggggtgaaaaatggactcggtgtgataacagcctrcatcttcaaaaagacttaattttaaccagaatagttcttacacgatgcaatattccccagtagcaagacggaaaaacgcttccaaatagttagctgcatt

SEQ ID NO: 307123 - DNA, 201 bp, Homo sapiens
attttactgggttcataggaaggaggaattatgcctctgatttcttctggctcttcccctgacctcaggagggtttagacttttaacggtttaaatagccrtagctatccacccaggaaacatttttgcatttcggttctctgtctttttgcgtcgttttcatccccaaccccatttttcacttagtgacttcacatccag

SEQ ID NO: 307124 - DNA, 201 bp, Homo sapiens
agcttctcagggcagcaggttgagtagaagccatcctccttagaaaaggcagacttggtgtttaattaacagcagctggaaaggaccccactccccccacmactggcagctgagccgacatcgttttatgtaatagattcttttcagctgctgtgctcagaattgagaaaacctgatggtttcctcctttatacaaaacat

SEQ ID NO: 307125 - DNA, 201 bp, Homo sapiens
tagggagagagagaaggaccacctggataggaggctgtccccttcatcccctgtcccctgctcacccagcacctaggctgagccacccatggccggagtcrggaggcacgtgtgcattgagggaatgaaagcaagaagaggcagctctgattgccttgtgaattcagtccccagcgatgctgggatgttttgtgccttcat

SEQ ID NO: 307126 - DNA, 201 bp, Homo sapiens
ccaatcctgagttacttcacttagaataagagccttcagctccttctaagttgctgcaaaggacattatttcattcctttctatggctgagtagtattccrtggtgtatatataccacattttctttatccactcattggtcgatgggcacttgggttggtttcgtatctttgcaattgcaaattgtgctgctataaatgt

SEQ ID NO: 307127 - DNA, 201 bp, Homo sapiens
atataaatgagtatgtacgaacaagcaaagggccatgtctacatgagtgatttatgatttctgttgtaataaatgaggttggcagttgtcccagtgagccygtggcaggctctgaggtcccttgggttgtctgtctcaggagtagccttggcagggcccagggagccctgtcatccagtacatgtagcgttcctagcagtg

SEQ ID NO: 307128 - DNA, 201 bp, Homo sapiens
tatataccacattttctttatccactcattggtcgatgggcacttgggttggtttcgtatctttgcaattgcaaattgtgctgctataaatgtgtatgcawgtgtctttttcatataatgacttattttgcggggggggggggaggtggttacccagtgtgggattgctggatcaaatgatagttctacttttagttcttt

SEQ ID NO: 307129 - DNA, 201 bp, Homo sapiens
acattcctggggcccaaggggtgatcatcagagcaaagcacgcctcgaaattagcttgctgcagtgtcgtgcactcacaccgccgaccgaccactcaccgstccacactctgcgctttccttcttcaaagagtttttgccaagcagtttctaattaagatgcatcttggccattttcttgttctttaaaaggctttccact

SEQ ID NO: 307130 - DNA, 201 bp, Homo sapiens
tttacaaagcctttgtaataaaattggaatatgtcataattatgggaagaaacaaaggtacaatatgagagggaaaaacaaaggtacctgcagagaaagaygccaaaatgggaatggtggttgttaaataatgggcagttgttttccttctctttttctgcttttcttcagcgagcttgtgtgcctttgatacattaaaag

SEQ ID NO: 307131 - DNA, 201 bp, Homo sapiens
tggacatttcctataaatggaatcatactccaggtagcatttgtgcatctggcatctttcactaatcgtagtatctcaagtttcatccatgctgtagcctrcaacagtgcttcattcctttttccatctgaataatattccattgcatggtataccacattctgttgatccattcaatcaatggacatttgggctgtttcc

SEQ ID NO: 307132 - DNA, 201 bp, Homo sapiens
gtccccgtggggctgcttagaaagaacttgagcacccagatggaccagggcaagccgcttctcattcttagccagagctgacagcagggcccacatcgccyctggcagtgtggcttcatccgaagggccttgaattcccaggacatgaaactcgcccagatccagatgtaagtacaaaagtgggtcccacagtcagtggag

SEQ ID NO: 307133 - DNA, 201 bp, Homo sapiens
agctgtggcagcaaagcgtggcatctgctcaggaagggtggaggaagccattagttccaccagggccctgacgtctgtggctgcccatttcgcccccccgwcagggatttccttggtagctggccactactgtgtgtgctgtgtcttctccgagtcccaggggcctggtaaagtgttggagagccccaagaaagagctgtt

SEQ ID NO: 307134 - DNA, 201 bp, Homo sapiens
cccacctgtagacccagctacttgggaggctgaggcaggagaattgcttgaacctgggaggtggagattacagtaagccgagattgccccactgcactccmgcttgggcgacagaatgagactccatctcggaaaaaaagagaaaatttgcgattaggtggacccacgcattacaagttcatgttgatcaaggccaaatgt

SEQ ID NO: 307135 - DNA, 201 bp, Homo sapiens; identical to SEQ ID NO: 64246

SEQ ID NO: 307136 - DNA, 201 bp, Homo sapiens
aaagcaattcaaagaaaaagaaacaatgaaacttgaagatctgagttttctctctgtccccattagttcatcacgattacagccttttgattttcatagtkaattgttcttcggcattctatttcagggttttgaaatcaaattgctcgatcttttctctctcctgtgtgattaggttatcttttataatacagctgcaat

SEQ ID NO: 307137 - DNA, 201 bp, Homo sapiens
gaaacacaggctgggagagaggaggggaaagccagcggacgcaggactgtctgggcgtgaggtgagtgatacaaacaatataacagattggtgcttctcasatgtggcccctgggccagcagcagcacaggggaactggtagaaaagcagattcttgggccccaccccagacctgctgaatcaaaaactcagggtggggcc

SEQ ID NO: 307138 - DNA, 201 bp, Homo sapiens
ctttggagccagaggggatggctcaattcccaacattctcactgactcactgagcgatgttggatgagttacctcatgtctacaacccgtctccttagctmtaaaatgggttaacaatacctagctcggagtgttccattatagcaagcactcattttccttcccttcggaggatgactttaagccagagcaaaacaggga

SEQ ID NO: 307139 - DNA, 201 bp, Homo sapiens
cttaagtgcacagtctaatggattttacatatagttacctctgtgtaactgccatgcaggtcaagattaaaagcatttccatcaccctaaaaggttctctyaggtccctcctagtctgtagctccccaagggtagctgctgttctttttttacttttcttttccttctttttttaaatatagacagggtctagctctgttg

SEQ ID NO: 307140 - DNA, 201 bp, Homo sapiens
gaaaggggctgaggtgtggatggatgtcagccctgctttccttcatggccacccagaagcttttggatgctttgggtaggacaaacctccaaggagctttygggtcacaaagggcccaccttcttgggcactggcgggatctgtctgcccagttcctggttgcccaagcccatcccatcatccagcctgcccacagacgcc

SEQ ID NO: 307141 - DNA, 201 bp, Homo sapiens
tgtcatctctgagacccagagatgttgagggtctctcccacggctgcacagcccagcagtctcggaaccggagctgccgtgcagtctgtgctgagtccctyccttaagacagccttgaggtggggacatcctccccagtctagcatcttccctggggaggggacacagccacgaccatccatcccctccctgcaaggtcag

SEQ ID NO: 307142 - DNA, 201 bp, Homo sapiens
ttccagctggtcagtgataaagccgtgattcaagcccaggatgtgctggctccttccagaccagattgatagagcaggctgcaggcttttgctctagagtscatccgtctatctctgtctcctctacatttacatactctggctattttcatcccccaatcatgcctcccacagaggcaattattggcagtcaacaaattg

SEQ ID NO: 307143 - DNA, 201 bp, Homo sapiens
tcacctgaggtcaggagtttgagaccagcctgaccaacatggagaaaccccttctctactaaaaataaaaaaaaaatctactaaaaaagaaaaaaagcatrcctgtaatcccagctactcaagaggctgaggcaggagaatcgcttgaacccggcaggtggaggttgcggtgaactgagatcgcaccattgcactccagcc

SEQ ID NO: 307144 - DNA, 201 bp, Homo sapiens
ccgtaggagccaaaatgggttctctaagaacaatcatgctagtctaaccccctatttgccttaaaaaaaaaagcaatttatttttctgtactagctgtacyagggcagagtgtctttatatttcagcctgtctttcacaatatcttggtgtacaaaaatggagaatcgggggttgtacggattgcttggcagatttcttat

SEQ ID NO: 307145 - DNA, 201 bp, Homo sapiens
gtacggattgcttggcagatttcttatttgctgatgaatgacatcaaaacaaacaaacaaagaacagagctgggtccaggagagagactcctgaggctgtyttcccaacttagtccttagctggctgtttatgtttccgttcaaaacctgagggtagatgcagatagcagtcccatcaagtctgcagattatgcaaagcag

SEQ ID NO: 307146 - DNA, 201 bp, Homo sapiens
tttgagaccacgtagatacctatgattctcgtagttactctggaacacccacttctctctctctaggtagggggaattttcagggtagggtgtggcccccygcttagacctctcctccttttctgctgtcatttatgctttaacagcttgctgcttgcccccgccagccccccagccacctgcctctctcccccgatactg

SEQ ID NO: 307147 - DNA, 201 bp, Homo sapiens
gaatggaaccaggactcaaagcccatgccaagcccttggctgtgttaccatgacgtttgcttgtgtgtcacatgggaagccacatgtctggccaagcctgrgggggtgtcagctgccctgggagatgagtgaacggggttctggcctggctgctgtgctgccatgaccacttctcatctctgggcctcagttacatcatct

SEQ ID NO: 307148 - DNA, 201 bp, Homo sapiens
agcaaggcctttatgcataaacatttgcataatttggggaaaagaaacaacaaatgttcttagctctgtattgccatgcagatgatggtaagaagccaaaygggagactcctcaaagaattccaaggactcaaggaacttaggcccctccgtcttcctcctcactcccccttcactctgggggctggtcagtagctcagac

SEQ ID NO: 307149 - DNA, 201 bp, Homo sapiens
tcatctctgggcctcagttacatcatctgtgaaatggggcagtggtgctagattattctgccatttcacggagagtccaggccatgcacctgtcaggtctkcctgcccacctggtctgtgcgtttgggctgcagcagtgagagtagctgtttactatccctgtgtgcctggaagagacgtctcctaagcgcgggcaccagg

SEQ ID NO: 307150 - DNA, 201 bp, Homo sapiens
atcatctgtgaaatggggcagtggtgctagattattctgccatttcacggagagtccaggccatgcacctgtcaggtctgcctgcccacctggtctgtgcrtttgggctgcagcagtgagagtagctgtttactatccctgtgtgcctggaagagacgtctcctaagcgcgggcaccaggagtggccgagcatggagaata

SEQ ID NO: 307151 - DNA, 201 bp, Homo sapiens
acagcagggttttggatgtcctaaatgtagagttgatgcaactgagattgctgttaagtcagacctgctttggtgtctccaccctcaaagagaatagaagscacagagaccacagcctcagtgtggggactcagttgcgggtgtttcctcccctagaaggctgttgcctaagatttgattgagagctccccacacttggca

SEQ ID NO: 307152 - DNA, 201 bp, Homo sapiens
acagaagaaactttgctatattgattagtgcccgccttgatagatgatcaataattgtgcttttatctggcatcttcttgggagtcagctgctgccaaggygaaccttctgggcaaacaattgtcactaaatagcaaccattttcaatggccaaataaaaggaagtttttctctcctccttccacctctgccatcttctta

SEQ ID NO: 307153 - DNA, 201 bp, Homo sapiens
ttgtgaaatctaggtggacacatctaatgggttgttggaaatatgggcttaggactgattggggtaatggtaccagagacatatatatatatatatatatwtttttttttttttttttttttttttgagacaaggtctcaccctgtcacccaggctggagtacagtggtgcgatctgggctcactgtagcgtccgtctccc

SEQ ID NO: 307154 - DNA, 201 bp, Homo sapiens
tccagctaatgagcctcatctttttactcctcttaagtggtcccagctagacctggagtcaaatctgagagcaaacggtagcacacatctttctcaggttyacaaacggaacaccaagtccatagtgaaagggagaggaatttcttcctcttgcttagaaagacaaaaagagcagcttctcagggcagcaggttgagtaga

SEQ ID NO: 307155 - DNA, 201 bp, Homo sapiens
gctacagattcagcaggtgggagagtggaactgaggtactctgtttctgacgtgccccctgggtggccctactcctggtccctggagcactttgagcagcragagtttctctgcctgtatggcccacactctcgaccctgatgccttagaaacagctgcagacaggatgcgattcctgagactgctcaaacctgaaacccc

SEQ ID NO: 307156 - DNA, 201 bp, Homo sapiens
gtagctgggtcagggcagtagcacggagaaggtgagatgtgggcagtgtctggaaatctcgcagagacggccagcaggatttgctgcaggactggatgagrgggtgtgagacagggtcaagggttgggggccacagctcttgggaggaggacattggtgttaatcaagatggggaagactggaaggaacaggtctggagga

SEQ ID NO: 307157 - DNA, 201 bp, Homo sapiens
agatcgaaaagccctttggcctctaccccaacttcctcagcccagtgagtgggaactgggtgcaacgtgagtacagagacgccactgccccttattcagcrggttcctgcccaggcttcctaggaagaccctgccaggcccctgggctgagtgaggatgtgtctgtcagagccatgcagccagcaaggcattcgctcggtg

SEQ ID NO: 307158 - DNA, 201 bp, Homo sapiens
acgctgcccatctcctggctgtgctcccccgccacacctaaatggagctcctccttagccactctgtttttctgcatcacacacgttacatttagatgtgyctctgtgtgtctttcccctcattccactaggctccagtgccaggcacaccccgagtacccaaaaaatacatttgggatgaatgaatgaatgaatcttgaa

SEQ ID NO: 307159 - DNA, 201 bp, Homo sapiens
ctgctgttaggagctgaccagagcagtagctggactttgatgtctggtgggatgagcggcaaagggctctgatttttgcccttctccccattgaggcaaaragagtactgcagtcctattgggtagttaaaatgccccagtccctgcccagctctgtcctgacttccccatggctcacactttctgcttgcctggcacaaa

SEQ ID NO: 307160 - DNA, 201 bp, Homo sapiens
gattcaggtttgtgagctctggaactcgaagtcgacttgcctgttagagaagggggttttggattctgtatagcctgtagtcttttaaatgtaagaatccycagggagtctgctttgaagggtagtcggggctaggctggaacaatgcttcctggacagatcaggtcaaaaattcccagtgcgcggggtattcttagagcc

SEQ ID NO: 307161 - DNA, 201 bp, Homo sapiens
taatgctggctgctgtgacagataaacccagagacttcagtgcttggagacaacagacatttctttcttgctcatgtaaagtcatattgatggtggggagrgctctgttccctctgatgactcaggcactcagggtgatggaggcgccatcatcttcaggttgtaacacccaagattgcctcggccttggaatatccatga

SEQ ID NO: 307162 - DNA, 201 bp, Homo sapiens
cctatgagtgagcctgggccaggggatcagtggtggggcccagaatggtgtaggtaagaagagccatccctcgagggcatctgggggggctcctgcagagrgtgcccaggctcctagggagaggcggcagctctctgcaaggtagtgcctgctgcaggggggccttgctccagcccagaggtgggagatagggtcaggcta

SEQ ID NO: 307163 - DNA, 201 bp, Homo sapiens
aatgtgctgtgcattctgcccgccgtgcccttggcccctttctcctgggcctccttcaagcctctgcccgaacgctgcccatctcctggctgtgctccccsgccacacctaaatggagctcctccttagccactctgtttttctgcatcacacacgttacatttagatgtgtctctgtgtgtctttcccctcattccacta

SEQ ID NO: 307164 - DNA, 201 bp, Homo sapiens
tggagtgtggctgtgaaatggtcttggatgttttcgtagattgctgaacacatatctgatggggctgggtacatgctatttagagtcggggctgggggccrggcgtggtggccttcacctgtagtaccagtcacttgggaggatgaggtgggaggatcccttgagcctgggagttcaggtccggcctgggcagcatattga

SEQ ID NO: 307165 - DNA, 201 bp, Homo sapiens
aaagtgcaaatcaggcaaaaaaaaaatctgttctgctctgtagatgcagcctccattgacatctttgcttattctcaatcttttcttctttctgctttttyttccttttatataccattttatgtcctttctgctttttttttgacttcatgttatatcgtgtttcccgaagtcatctaaatgttttcataaagaatgttt

SEQ ID NO: 307166 - DNA, 201 bp, Homo sapiens
acccacctcgcaagcaggcctttctgaggacagacgtctaagacctgctgcattaacttttctgcacaggtccgtacctagaattagaattgttaggtcayatggtaactccatatttaactttttttgccaaactgttctccaaagtggccgcaccgttttcattccaaccagccatgtatgagggttctgatttcagca

SEQ ID NO: 307167 - DNA, 201 bp, Homo sapiens
caagacatgcactggcaacccttcctggagcctcttgggggtctgtctaggtgctctcagagagagggacaagtgggggtgaccacaagtgctgacatggrcagtccttacgggctggaacttccggcagacctgatttaaattcagactttactacgtcctggttgtgtgaccttggacaagtcatttctctccaaggct

SEQ ID NO: 307168 - DNA, 201 bp, Homo sapiens
tttgttcaggtagacaagaacatcttttgtttgaggaagaactgaagagatttcttgggattcagctccgatggctctgcctgtatctctctatcattggrgctttgttttccacctttgcaagacttgagtgaagggaaggctttgtggtctattgttaggtgctctttgaatctataaatcacaggctacaggaaggga

SEQ ID NO: 307169 - DNA, 201 bp, Homo sapiens
tggagcctcttgggggtctgtctaggtgctctcagagagagggacaagtgggggtgaccacaagtgctgacatgggcagtccttacgggctggaacttccrgcagacctgatttaaattcagactttactacgtcctggttgtgtgaccttggacaagtcatttctctccaaggctgagtttttctgtaaattggaactaa

SEQ ID NO: 307170 - DNA, 201 bp, Homo sapiens
tgtcagctcttcccttggactgtgctgaaagtggaagaggagaaaaaaatcaacccaatgttctaagctctctgtctacatagtcattagatcccaggatygttagagaccaaatcccttcccacttggcccctgcaaatggggccaggtgtcactgctgggagacgccagtaaggctgcacgtcatggtgtgagcacttg

SEQ ID NO: 307171 - DNA, 201 bp, Homo sapiens
cagagagagggacaagtgggggtgaccacaagtgctgacatgggcagtccttacgggctggaacttccggcagacctgatttaaattcagactttactacktcctggttgtgtgaccttggacaagtcatttctctccaaggctgagtttttctgtaaattggaactaatgatatactcaaatcctggcctagggactgcc

SEQ ID NO: 307172 - DNA, 201 bp, Homo sapiens
agaacctgttcgtaggtagtagctcagattactgtcaccacaaatgggtcataggacacgaaggcttatgggtacacacccaaaggaggagggctgagggkcattcttggagcctgagaggggttctagttggggtgaacccatgaggggcattgaagctagactattcctgaaggtaggagataaactggcctgaatgaa

SEQ ID NO: 307173 - DNA, 201 bp, Homo sapiens
ggtaggagataaactggcctgaatgaagcagcttgtcacccaccttcttttctggactcatgggggctgctgggttgcatcattcctggacatttaatgtsctccctataggctgagccctgcagacatgggacactgggtgcagtcaggtggcaggttgtgcccattctgctgtgctggctgagtagggtatacgaggag

SEQ ID NO: 307174 - DNA, 201 bp, Homo sapiens
tcccagaaacttaactgcttattagcctactgttgactggaagctttaccaataataaaaagttaatacatattttgtatgttctgtgtattatatactgkattataataacataagctagagaaaattaaatcttattaagaaaataaaggaagagaaaatatattcactgtccattaagtgaaagtggatcattataaa

SEQ ID NO: 307175 - DNA, 201 bp, Homo sapiens
aacaggaaaatgacagaaggagcagaaaaagcatctgtgttcttcagggcatatgcccagccttcctacttggccgtggtcagtggagatggcctgcaggraggaagaggggaggacacagctcagggctctcggggcggtttgggggtgagcaattcaggaaagagttggtggctgttgagacacattgcttcttccttc

SEQ ID NO: 307176 - DNA, 201 bp, Homo sapiens
cgtacctatttttgggcctcagttggctgtgggtaactgaaactgcggaaagtgaaactgcagatatggggggattactgcatcggggattactgtgtcgrgggcacagtgggacgaatggggagatgggtatgtaaaaaagtgtctgggtttgccatggcctacatagagctgagctgacaattccattgaagtcgcgag

SEQ ID NO: 307177 - DNA, 201 bp, Homo sapiens
ctctctaccaggctgggagctgggagcagagttgggcagaggatgtgaaaatgagcagaacacagtgggctcctcggagagaagacacaggccatccccckgtgctaccagacatgatgccggcctaaggaacacatctatgagaaagcgggcatttaagaagagaggcttgtcatactcctcgaactctttaagtgtctt

SEQ ID NO: 307178 - DNA, 201 bp, Homo sapiens
gtatgtggttgccatggaaatgtcttctaacgtggcattccaagagcaaagagaagggaagttttctttgaaaagaaaagcagagcagaacttggctaatwgtcatcacactaatccccaaactgtcattcttccctgactacctgtcttctacttcctgtcagcaactgaacaggggaaggcaaatcagtgtgcaggact

SEQ ID NO: 307179 - DNA, 201 bp, Homo sapiens
gtttcctttcttagcctcagttttctgtcctgtagaatggggatgataatgccctcttacaggattggtgttgggatctcatgagaccgttccttcatgcrggtggttgttcagtgcctgccatgcgctacagactgtttaggcataagacaagtagcagggagcaagacagacgctctgtgaccctccccggccagtgag

SEQ ID NO: 307180 - DNA, 201 bp, Homo sapiens
tatgtatttctgcatacacagaatcatttgataaatgccgtcttgtgacctgcagtttcacttttcagtattttgggatcttctgaagctgtcagatggtraacacctgaagtgtcatagtcgatggctgtccagtattctatcacatggatggactgttgttatatagtctattatattgcatttactggacatttaggt

SEQ ID NO: 307181 - DNA, 201 bp, Homo sapiens
cagtctgtgctgagtccctcccttaagacagccttgaggtggggacatcctccccagtctagcatcttccctggggaggggacacagccacgaccatccawcccctccctgcaaggtcagtcattgctcatctggggcacattgcttccaccctggacggcccctggggctggatctatcacacacagcagctgcagcaag

SEQ ID NO: 307182 - DNA, 201 bp, Homo sapiens
cagctgccttgacctctcgtcacagagtacactccgaatcagcagacagaccctgtaaaaagtagcagttctgcttagtcagcagatctgatgttcaggcmtcttctctgtgcttgtgtggccaaaagtaacatctccctgctctgagccagccccaggatgaccatgaggagccccaaattggattccgcctctgcctcg

SEQ ID NO: 307183 - DNA, 201 bp, Homo sapiens
ggatcgaaccctggtcttctaacttgagcctctattttttttttgttttaaaattactttttaaaaattggggtataacttataacatgtctacattaaawtgcacaaatcttaagtgcacagtctaatggattttacatatagttacctctgtgtaactgccatgcaggtcaagattaaaagcatttccatcaccctaaa

SEQ ID NO: 307184 - DNA, 201 bp, Homo sapiens
gaaccggagaggtcgagattgcggtgagctgagattgcgccattgcactccagcctgggcaacaagagcgaaactccatcttaaattaaaaaaaaaaaaaraagaagaagaagaagaagcatgagagagggattatggcacagaaacacatgggcaaagtcctagatgggagatgtggcaagacctcggccccttggggtc

SEQ ID NO: 307185 - DNA, 201 bp, Homo sapiens
ggatcaataggaattgttgaaaaattctgaaaagagagcccggaggaagacaaagagccccggaagtatgttgtcagcacaatttggtgctaatactcaastttgtttttcttttcatcaaagtctgaaaggcagttggaaatccactgcccttgtttttttgttgttgtttttgtttttaatgactggataaagcacaat

SEQ ID NO: 307186 - DNA, 201 bp, Homo sapiens
ataatgctcctcttgaaatagcacttgcccagaaatgcatctggagattgttttgcaacaagaaactgacagtgcttggggacatggagaatttatttgartaatttcttcagtttctgcaagtttgtcctgaggaccttctctctaccaggctgggagctgggagcagagttgggcagaggatgtgaaaatgagcagaac

SEQ ID NO: 307187 - DNA, 201 bp, Homo sapiens
gcgggcatttaagaagagaggcttgtcatactcctcgaactctttaagtgtcttcataaagttccccacagttcagtgccagggaatcacacagatactakaatttgaatggaggctgggaggaggtaggctggggtggtagattttgacagacatcagtaaatttctctgtgacaggtcgggggacaggccaggccaagc

SEQ ID NO: 307188 - DNA, 201 bp, Homo sapiens
gtggtagattttgacagacatcagtaaatttctctgtgacaggtcgggggacaggccaggccaagcgtaggaggccctgctgggcagtgttggtgctgcakatggggttggggtgggaggcggggaatgcaggcttggaaggaagaggcctcttggggcattcggcaccagccaggcaccccccagatggctgtctgcaca

SEQ ID NO: 307189 - DNA, 201 bp, Homo sapiens
ggtctggccagaggtagaaggatgactgagtcccagccgcccatccccagcaggcctcagggaagaagcaagatttacgaggcgagagcctgcctggccckcttcttctgtcgggaaaggcttccctgcagtattttctgtctcgtcaacactgcatttcattttaaattgcagctgaaagtagatattttccctcttgcc

SEQ ID NO: 307190 - DNA, 201 bp, Homo sapiens
ttgcataatttggggaaaagaaacaacaaatgttcttagctctgtattgccatgcagatgatggtaagaagccaaacgggagactcctcaaagaattccarggactcaaggaacttaggcccctccgtcttcctcctcactcccccttcactctgggggctggtcagtagctcagacagcagggttttggatgtcctaaat

SEQ ID NO: 307191 - DNA, 201 bp, Homo sapiens
taaaaaaaactttgcctaccccaggttatgaatattttttaattccagaagcttgatcatttcagtatttacatttaggtctttcattgacttcaagttawtttttgtatataatgtaaggtaggagttaaagttcactatttgctatttagatgtccagttgtttatcactatttgttgaaaaaaactttcctttccctg

SEQ ID NO: 307192 - DNA, 201 bp, Homo sapiens
ccctttaaacatatttttccagaagtcacatgcagcacttcaactgaatcccattggccagaactcagtcatatgcctacacgtagctggaagggaggctrggaaatgtagtttttattcccatggccatgtgctcagctaaaattgttgcttctgtttctatggaaattgaaggagaatggatattaggggcaactagca

SEQ ID NO: 307193 - DNA, 201 bp, Homo sapiens
ttagaattccacattccacaagaagcttttgtgggggtgtccaccctgggctaggatctcagagcctcatggagtcagtgtctggctcccagcacctcacwccacagaggaattgcctctggccagggcactggctgtctaggtggcctcctcacatagaggcagtgcagggagggtgtccaatccttcactccgcagatc

SEQ ID NO: 307194 - DNA, 201 bp, Homo sapiens
gtgggaggcggggaatgcaggcttggaaggaagaggcctcttggggcattcggcaccagccaggcaccccccagatggctgtctgcacagggctgacttckccattaggcttggcgcctagggcccacaaaaatgttttcattttaatttcttttaaaatccgaggagaaaaagcgaacatgataatgaagccagcctgga

SEQ ID NO: 307195 - DNA, 201 bp, Homo sapiens
ttcgggtcacaaagggcccaccttcttgggcactggcgggatctgtctgcccagttcctggttgcccaagcccatcccatcatccagcctgcccacagacrcccctgccacatgcttctggctgcctgtcccttcatcccggctcctgtctctcctcgtctccctgatcaatagcaaccagccaggaaagcagtcccgcag

SEQ ID NO: 307196 - DNA, 201 bp, Homo sapiens
gacgcccctgccacatgcttctggctgcctgtcccttcatcccggctcctgtctctcctcgtctccctgatcaatagcaaccagccaggaaagcagtcccrcagtgtttcaggcccactcctttaatctctcccgaggctgagaacagcctctttctagccacccagcccctttattaaacttccttcctgcccccagtcc

SEQ ID NO: 307197 - DNA, 201 bp, Homo sapiens
gaccatgtggctcccaatgtggagataagagggaagcagtagcgacatctgggcatcacttggcagcgtggctttggctgctcagcacgtgcttgctagakaatccctgatggctgttatggcttacacatttaaccacttccctttggtacatgtgtagaggtgctgggtaagcatcttgtcaactttaacacagctgac

SEQ ID NO: 307198 - DNA, 201 bp, Homo sapiens
ggcgcctgggctgctcattgccctgcaagtggtatgagtgggatggactcctgtttccattctgccctggtcatgtgtgacaggcaggaaggaaggggcakcccagcactgtggaccaagtctcctcaaagaagtatccagcctttcccttgttggaggggccgtgacccaagatgaaaatccttttcttagaggaaaatg

SEQ ID NO: 307199 - DNA, 201 bp, Homo sapiens
tgtcaactttaacacagctgacaaagttatgacaccaagaatgcttagactttgcagttttccccgaactccggctgatcctgttaaaatgtctctccttmcagagagctgatttgtgcccccaaattttctcatctcagcaggcagggtctctttgccagaaaaaagaaaaatctgttgtcatccagatactctgattta

SEQ ID NO: 307200 - DNA, 201 bp, Homo sapiens
cccagtaggtctcagcttcattttacccagtccctattcaagatggagttgcagccaggcacagtggctcatgcctgtaatcccagcactttgggaggccraggcaggcggatcacctgaggtcaggagtttgagaccagcctgggcaacgtggagaaatcctgtctctactgaaaatacaaaaattagttgggcagttgc

SEQ ID NO: 307201 - DNA, 201 bp, Homo sapiens
agaagagacggggttttgccatgttgcccaggctggtctcaaactcctgagcttaggcagtccacccgcctcagcctcccaaagtgctaggattacaggcrtgagccaccgcacccagcccagtgctatgtttaatagaagtagtgaaagtcggcatccttgtcttgttccagttcttagaagggaatgccttaaactttt

SEQ ID NO: 307202 - DNA, 201 bp, Homo sapiens
taaatgtctgcagaagcaatgaatgagtcctgtcaaaagtaacagtactgaatcaaaccagtgttctgggaggcaggcacgcagatgtttcttgtccaccytaactctccagctccaaagcccatgctcttacccagggctctgtgagccctattcagttgtgttaatcagatgtggctgcattgcctccccgccgtcttg

SEQ ID NO: 307203 - DNA, 201 bp, Homo sapiens
tgctggtctgtccgcggggtgtggaatgaacgagggctggaaggctgaggtgagtccttccaaagaggagagacgaggacgaaagagggaatcagttagcytgagccattgggaagagggctaaggaatcccaccactcaacagatactttggagcccaactaaggaaaaggcactgggcctgttctgggcctcagtttcc

SEQ ID NO: 307204 - DNA, 201 bp, Homo sapiens
taaatgccacctacaatccaaggcatggaggacagccattcaaaccgcctttcacttctcgaataggaaaacctactctctccctgatgatcttccacccscttcaaccctccctggcttagtgccctggggtgactttcagcctagtaggtcttaggctcctgcatggcggtgggcatcggctgtgtctcatccctgcag

SEQ ID NO: 307205 - DNA, 201 bp, Homo sapiens
cagcagcaggcagagacctactttctagaaagagtttattagggtccagtctagtgggtgaaacagataagcaggacacgacagtgcacaatctaggcacwggctcttgaaagcagctctctggaggctggaactattttgctagaggtgtttggatgctgctgtctaacccgagacatggagtttatataggactgttgg

SEQ ID NO: 307206 - DNA, 201 bp, Homo sapiens
gtctacttttaaaatcttttatggagaaaaaaatattgctttccaactctaattatggatttgttccatgattccctttcattctgtcaggttttgcttcrtattttttatatttatgttattagatatgtacacatttaggattattcttaaagaattggccctttttaacattatacatgtatttcttcatttctgata

SEQ ID NO: 307207 - DNA, 201 bp, Homo sapiens
cgtacacacacacaatgactgcctgttgcgcgtttctagaacctagtggggacaggggtacagtttcttttggtgcatagttctcatgttgattggttccractgtcatgttcttgcacctgtcctgagtatctcttgctgtagctctggccctttccccagtcagctactgcactgccctggcccatgtttcttagagac

SEQ ID NO: 307208 - DNA, 201 bp, Homo sapiens
accttcgtgtttcctgtagcccctcctcaaatagacacaccagctggcatttttccttaaataccactcatttttaaaaggggaaaaaaatgttggtggckttgaaatagatcacactttaaaatgcagcgtagcagagagtcagttcaaattattctcttaatagagttcttcagagtgaggaagtgatgagggaacata

SEQ ID NO: 307209 - DNA, 201 bp, Homo sapiens
ttagtctcatatcctttgtttcgtttttccttttcatgccttcttttgaattaatcaagtatttcagattctatttttatgtcatccgttatacgcatacrcacacagagaaacatactttaagttattgttttgatgattagaattttcatccttatcacaatctacactgaaataatacatcatttcatgtataatgta

SEQ ID NO: 307210 - DNA, 201 bp, Homo sapiens
ttctatttttatgtcatccgttatacgcatacacacacagagaaacatactttaagttattgttttgatgattagaattttcatccttatcacaatctacmctgaaataatacatcatttcatgtataatgtaagccctttcaacaatatacttccatttatcttctcccagtcttcattctgttgctgtcatgtgtttta

SEQ ID NO: 307211 - DNA, 201 bp, Homo sapiens
tgttttcagcaatttgactattgtagttaggtgtgattgtcgttgttgatctttcttggggtttcttgagcttattttgtctgtggattgatattttttcrtcagtttggaaaaagtttggcccatatttcttctcagcccatctccttttcttttataactccagttacatataagttagattgcttgatatcatcctag

SEQ ID NO: 307212 - DNA, 201 bp, Homo sapiens
gttggacttgtgtttctgtctttggagaacagctctgcaatagaaatggcttcctgaaggcaggagctgcctctgagctgcctccaagccagcctggggcstgcagtacagatgctgggaatgggcggccgacagaaccaagccatatcctatccttagacccaatcccagacagcaggaccatgtggctcccaatgtgga

SEQ ID NO: 307213 - DNA, 201 bp, Homo sapiens
tcttcctagggatggacaggtgggaggttgagggtaggggtccgcagtccctcccctccacagtcaggttctgtggtcacaggacgggagcccaaaagggstgaagggcttgggatccagagggctgcaccccaggtgtgagccttgggccaggccgctttctcggagagtgagactgggctagaatccaagttccctagg

SEQ ID NO: 307214 - DNA, 201 bp, Homo sapiens
gcacccccaaccacgacaacaagcagcagagcttctttctagcggagacactaaagtgagcagtgtgggctcttcctagggatggacaggtgggaggttgrgggtaggggtccgcagtccctcccctccacagtcaggttctgtggtcacaggacgggagcccaaaaggggtgaagggcttgggatccagagggctgcacc

SEQ ID NO: 307215 - DNA, 201 bp, Homo sapiens
ctctcctgagaatccctggagtaccaagtccgtccccaaatcccagcccatggccatcacccgtggcttctcttcacctctgcctaccactgtgggtgaayctgtaagaccagcctagtcccctgaaacacaaagagaagcttcctctaagttcaaaccaggtgaagagctcaggacaggcagcccatcgggccagagctc

SEQ ID NO: 307216 - DNA, 201 bp, Homo sapiens
attagggaaaagctttgtttataagtaaaactattctggctcttattcatgaataaaaatgtttgcagtaaggcctctgagaagcagtagaagaatttctktaccaaccctggtaaaaatgcatcctcaagcattgatttttgtagctgaagtgcattatgtgttctgcatgagcttttgaaagcttagataaatgaggtg

SEQ ID NO: 307217 - DNA, 201 bp, Homo sapiens
tacacagttgtggaaccccgcccaaaccttcacctacccagactgctgagtagctcatttggactctcagagtccaaagctgctcacatttccagtccccragggtcttgttctgtccagcccaggccaagagggaagctgtgcatctgcccggtgcagccttacacagcagtccaggcaggggcaccccacacccacaca

SEQ ID NO: 307218 - DNA, 201 bp, Homo sapiens
ctgtggacgcctgtagcagtggctcctgccttcaccccactagcgacttggcaaaatgactgttttctgatggccaggagccgctacaccatttgaaaagrttagagaggctagggtctagctaattcctcttccctgaagccctccatggaagagcaggaagtcctgcaaacctctaacccctgcctctaaagtaaaagc

SEQ ID NO: 307219 - DNA, 201 bp, Homo sapiens
ggtaaaatcagtctttttctttttaaggctgttctagtagatgtgtgttgatatcacactatagctttatttacacacacacacacacacacacacacacacatagccattcccccattctttccattatagttacatcaaaatattggttgttcggggtgtaacttcctatggctgtgtacacactcttcatggctgatt

SEQ ID NO: 307220 - DNA, 201 bp, Homo sapiens
agcccccatcttacagatgacgaaactgagggtcagaaaggcccaaggtccatatagcaacaagtgtcagagccaggacacaaacacgggtctgactccasatccattgggctggcctctacttaccagcagccaaatcacagaggggcctggcttgcctgaaacccctcccgcgagtgctcagatggggctcctgcaggc

SEQ ID NO: 307221 - DNA, 201 bp, Homo sapiens
tggtaaaatcagtctttttctttttaaggctgttctagtagatgtgtgttgatatcacactatagctttatttacacacacacacacacacacacacacacacatagccattcccccattctttccattatagttacatcaaaatattggttgttcggggtgtaacttcctatggctgtgtacacactcttcatggctgat

SEQ ID NO: 307222 - DNA, 201 bp, Homo sapiens
ttttctgtatttattaagacctgcaccgaaattgagtgagaaaaaagctggagacaagagtcaaaactgagttttccagagttaagagcagacactgtttrcatgatacggataagccatgaatttattaaaactttaagagaaatattgaaaacacctaccatctattgagtctcagttgcaagagctgaaggaaagaca

SEQ ID NO: 307223 - DNA, 201 bp, Homo sapiens
cgattctcctcctgagtagctgggattacaggcatgtgccaccaccctggctagttttgtatttttagtagagatggggtttctccatgttggtcaggctrgtcttgaactcccaacctcaggtgatctgcccaccttggcctcccaaagtgctgggattacaggcatgagccaccatgctcggccccattttccgttctt

SEQ ID NO: 307224 - DNA, 201 bp, Homo sapiens
gtttcataaaaatggaagcaaaaacctgtggtcttttgtatctgacttctttcactgagcataagttttttaaggttcatccacattgtagcatgcatcartatttcatttctttacattgatgaataattcattataaatctaccacatcttatttattcatttatcagttgatggacatttgggttgtttccacttttt

SEQ ID NO: 307225 - DNA, 201 bp, Homo sapiens
tacgtttccctgttgttaattttcaaagcctgggagcgaagtgttttctgtcttgcgtctgcggtgaagtgttcctcgggcaacccgtcttcctcctgggwcggccctgggtggagagacctctggttcagccacagcctgtgaggccctgctccttggctggcccactgtccagcaggcagaggccaccagggcagagag

SEQ ID NO: 307226 - DNA, 201 bp, Homo sapiens
ctcctccctgaccagcttcctacctcagggcctttgcacatgctgtgctctctgcctggaatgtcccccctgttgctctccaccctgcgggttcctgctcwtccttcccgatccatcacaggtccatgaggcttcctgagcagagttagccactcggccagcatttattgagagcttactgtgtaccaggcactgcaataa

SEQ ID NO: 307227 - DNA, 201 bp, Homo sapiens
gaagtagccaggacataaacagctgaaatgaaaatatttgcttgtcccgaagtcgatttccccacaggccatcgccctccctcctgtggctgcctctgctrttctcattagctaagcagccttgcccttacagagatcctgagggccttacagagatcctgagggcaacaaagccggtggtcatctgtaaaatccagtaac

SEQ ID NO: 307228 - DNA, 201 bp, Homo sapiens
ccaaattgtctttttcaaagcagatgtaccattttcctttttttttttttttttgagatggagtttctctcttgttgcccaggctggagtgcagtggcgcratctcggctcactgcagcctccgcctcccgggttcaagcgattctcctcctgagtagctgggattacaggcatgtgccaccaccctggctagttttgtat

SEQ ID NO: 307229 - DNA, 201 bp, Homo sapiens
gagcccaggcctcccttccattcacctgctcagcactccatgggcatctctgtgcgccgtgtagttactgggcacagagcgggagtcgcatgcaatccctmcccacaaagagcccacgagctagtgagggaggcagacccgtacgcaggcactcatcgcacacccggcgggcacccgatggcaaggggggcccaccaccca

SEQ ID NO: 307230 - DNA, 201 bp, Homo sapiens
tcctcaagcattgatttttgtagctgaagtgcattatgtgttctgcatgagcttttgaaagcttagataaatgaggtggctcagaaagcagataaaaaaaatgggaggaaattataccgatccaaaagaagataaatgtccactaattctcagattaacattttagactcctgtgtttttataggggaatttttgcaatgc

SEQ ID NO: 307231 - DNA, 201 bp, Homo sapiens
ccattttaataatactaagttttccggttcatgaatatgaaatgtctttccatttatttagatcttctttaatttccctcaacaatattttatagtttagwgtatacaaattttgcaattattttgttaaatttatacctaagtattttattcctttttgatgctttgtaaatggaattgtcttcttaatttccattttgg

SEQ ID NO: 307232 - DNA, 201 bp, Homo sapiens
acaatattttatagtttagagtatacaaattttgcaattattttgttaaatttatacctaagtattttattcctttttgatgctttgtaaatggaattgtyttcttaatttccattttggaatgttcattgctagtatataaaattacaattgatgtatcctacaaccttgctgaactcattcatcagttgtaatggtgtt

SEQ ID NO: 307233 - DNA, 201 bp, Homo sapiens
tatttacttacctttgaaacagagtttcattcttgtcacccaggctggagttcaatagcacgatctctgctcactgcaacctctgcctcctggttttaagygattctccagcctcagcctcctgagtagctgggactacaggcacccgccaccacgcctggctaatttttttttttttttttttttgtatttttagtagag

SEQ ID NO: 307234 - DNA, 201 bp, Homo sapiens
cactgccctggcccatgtttcttagagacatggttatctctgtgctattagtgtctgtgtcctggccgaggcaagtcccttccctttctgagtctatattyttataaaatgtggctttgagaatagatgatgtttctggtcttaaaattctctttgactctggagttctggatctgtgcttctgtttgatgttgtttctct

SEQ ID NO: 307235 - DNA, 201 bp, Homo sapiens
actctgcctctggttttctgctgggatgagaggaaacattttcttggcagaagtaggaagagaatctagggatcttactgcctttaggctgacttgcaacmagccctcctcttatttcacttccagagatacctggtgttgccaccaatcccagagcctttggggttttctagcacaaacctgagtgcctgtttgcttgca

SEQ ID NO: 307236 - DNA, 201 bp, Homo sapiens
aatatatgttagccattttaaaatgtacaactcaatggcactaggtataatacattcacagtgttacgtgaccatcaccactgcctagtttcacaactctrtctccccaaatggaaaaccatacccattaggcagtcactccagacccactacccccagcccagtccctggcagccacgaatctgctttctgcctctgaat

SEQ ID NO: 307237 - DNA, 201 bp, Homo sapiens
gaggcaagtcccttccctttctgagtctatattcttataaaatgtggctttgagaatagatgatgtttctggtcttaaaattctctttgactctggagttytggatctgtgcttctgtttgatgttgtttctcttgctgggtgaccttctctctgactccctgctgtaaagacctcccttttttttttttttttttttttt

SEQ ID NO: 307238 - DNA, 201 bp, Homo sapiens
tacagacagatggaatgggatatgtgtgagttgaatgcatgtgggttgtgagtccccaggctctcttggctgctggctaatggcttaggacctagggtagkataggggtctgagaggaccagaaaggctgacgttaaagcctctggggtgctgggcaggtgctgcagggctatcctcccaccccttgctggaaagacctgg

SEQ ID NO: 307239 - DNA, 201 bp, Homo sapiens
agaatagatgatgtttctggtcttaaaattctctttgactctggagttctggatctgtgcttctgtttgatgttgtttctcttgctgggtgaccttctctytgactccctgctgtaaagacctcccttttttttttttttttttttttttttaatcaaaacctaacttggtccgacctaccccatggctgaccacccaggc

SEQ ID NO: 307240 - DNA, 201 bp, Homo sapiens
acagacagatggaatgggatatgtgtgagttgaatgcatgtgggttgtgagtccccaggctctcttggctgctggctaatggcttaggacctagggtaggwtaggggtctgagaggaccagaaaggctgacgttaaagcctctggggtgctgggcaggtgctgcagggctatcctcccaccccttgctggaaagacctgga

SEQ ID NO: 307241 - DNA, 201 bp, Homo sapiens
cacaggaagcagtggtggctggagaacagccctgaggcgtgagtggagccggcacatctaggagttttcattcagctgatgtttggtgaaagtgggatctrtaggctgggcgcggtggctcacacctgtaatcccagcattttgggaggccaaggcaggcagatcacctgaggtcgggagttcgagaccagcctgaccaac

SEQ ID NO: 307242 - DNA, 201 bp, Homo sapiens
tggaactcttgtaaggatcactcactgccaaggagtctgctcagtgtggcagtggcgctctcccgggaagtgagactctgcaaatgtgttctcaagttctrttccagctggcaccagcccttcccaccccacaggctggaggcccccagcacccgctcaggcatggggccgagttgctggcagcccttggtgcatggctgg

SEQ ID NO: 307243 - DNA, 201 bp, Homo sapiens
cagcgccaggcactgagccaggcttcgaatatcctctcctttaatcctcacaaccaacccaggaatcattactcccattttatagatgagcaaagtgagtsttcattaaagtgaaataacttgcccaaggtcatctagctcctaaatcgcagagctgagattcaaacccaggcctctcgccacgctgggctcactgcctat

SEQ ID NO: 307244 - DNA, 201 bp, Homo sapiens
atgcacagctgtacctcctctgttgaaacccccaaccatttcccaatactgctggtcccttattaggggcctttatggtaaaccatctttttgtgttgtgytgtgactactcgtgtggccctaagccaaattaggtgtcttgtcatcccaccctggaggaggacctctggcttctcaagtggggtgctccacggattccct

SEQ ID NO: 307245 - DNA, 201 bp, Homo sapiens
gtgcccagcctgaggatggatgctggggccactgggaaatgttagacccagccactgcaccctgggattcacaggcacctatgcagagacatacaatatcrtgtacacagtgctgggacaaagtcacatgcagcagagttggtgggcatcaatgggcatggtcagttctgcttggtggctcaggaacgtcttgggaaaagg

SEQ ID NO: 307246 - DNA, 201 bp, Homo sapiens
ctgtctcaaaaaaataaagaaaatagcacctcatcctttctgcttcattccgttggtccagatgatcacaatggtctgcccaggttcaaggggaggagccrtgggaggtgtgtcagtgtcacaagaaaagcttcgttcttcttgtgggataagatacaccacagcagctgcctttgaaaagatggtctgccacacagccac

SEQ ID NO: 307247 - DNA, 201 bp, Homo sapiens
ccctcctgccgtcccactgtggggaggacacagatgcagactacagtccccactattataaagtgacagggacagggaaacgcatgagtccattagcatgmgatgagaatggggggaggtggaggtgcacagtgtaggggcctagaatgtggacattggggctggggaagaccctctcacagaagaagggctctaagccgg

SEQ ID NO: 307248 - DNA, 201 bp, Homo sapiens
ctgtttctaccactcctttcaagcgggcccagctgcgcttttaaaaaatggaagctgcttcccaaggtggcccggctccttctctcgcacatgcgccaacrgaggctgtttgtggggcctggggccttcttttcattcttctttgaaaccttcaggatttgtggcaggtatgaagtcagggagttctgggtctctcaaaag

SEQ ID NO: 307249 - DNA, 201 bp, Homo sapiens
aaacagatttcacttccatctgccaaagatggtccaagttgtcccaaaagggaacaatgcaagtggggcctagagaggcagcattggggacactgtggcgmagcagctgaggcctttccttccaacctgaacctcccccagaaaactcaacccaggaatttcccccagggacgacctcaccccaagtggcctcccgtaaaa

SEQ ID NO: 307250 - DNA, 201 bp, Homo sapiens
gtgtggacaagtcccccaggcctctggaatgtgcatgcctgttgagaagcccagctctgggaagcagaggcaggccctggtcacatggtcatggtcagctrgaactggcagtgacaggttccgtgggcactgcctctagggcctcccaagacctggcagagcccccacccccactgtctgtgtgcaaacaaggaccccctt

SEQ ID NO: 307251 - DNA, 201 bp, Homo sapiens
gcaaggccacgtcaccatccccgggttggagcctgcagtccgttgggcagctctcccttcctgcctcctcataaggtttcctccatgcatctgaaccagckgcctcccatcctcagcaggctgggtgcagtcggcttcttcggaagcatgaaggctcacctggtgtccgtctctcggcaggtcaggaacatccgcaaggtc

SEQ ID NO: 307252 - DNA, 201 bp, Homo sapiens
ccgatgaaatttgcttaattatttgattcaatcagaagttggcttaattattttcttgctctcacctcttttgaatccattctggaaactgattatgtctrtaacaccaacccagagataagcatttcaattgggaaatgtaattagccaaggaaaatgaatgtgggagctgccttttgtcaaagcaccattaaaacccag

SEQ ID NO: 307253 - DNA, 201 bp, Homo sapiens
tcaagtgatccacctcccttggcctcccaaagtgctgggattataggcgtgagccaccatgcctggctataccacattttttttattcattcatctgttgrtggacatttaggttgattccacatcttgcctatttgaataatgctgcagtgaacacaggaatatagataatctcttcaacatactgatgtcatttccttt

SEQ ID NO: 307254 - DNA, 201 bp, Homo sapiens
ggaatgcagtgaggtggagaggttatctgaccaggtggctcctgcacctggggaaagggaaagggagggaggaccaccacgaccacggtctccagggccayggcaaggtagacccaccaaacctctgcccaactcgttcctatttaccttaacccttagccatccttacaaggaagaattcagccaagagtgaccaggcac

SEQ ID NO: 307255 - DNA, 201 bp, Homo sapiens
tggtggtgcacacctgtaatcccagctactttggaggctgaggcaggagaatcgcttgaacctgagaggcagaggttgcagtgagcctagatctcaccgckgcactccagcctgggtgacagagctagatgctgtctcaaaaaataaataagtaaataaaagtaaagccaaattagttagttacatcccccaaaccaagaa

SEQ ID NO: 307256 - DNA, 201 bp, Homo sapiens
agataatgtatataacggatctggctcaaaggaactgaaaaaggataacaactgttattgctttttataattattattatttttattaaaacactgaaacrcctgttaggacatggggttattcaggagcccaagcctctcccccgaaataattccagggcatcagataaaatagcatattactagattgggccatatgaa

SEQ ID NO: 307257 - DNA, 201 bp, Homo sapiens
aggggggcgggggccagaagaggcccaacagccagcttcaccctgtcatctctgagacccagagatgttgagggtctctcccacggctgcacagcccagcrgtctcggaaccggagctgccgtgcagtctgtgctgagtccctcccttaagacagccttgaggtggggacatcctccccagtctagcatcttccctgggga

SEQ ID NO: 307258 - DNA, 201 bp, Homo sapiens
cttgaaccggagaggtcgagattgcggtgagctgagattgcgccattgcactccagcctgggcaacaagagcgaaactccatcttaaattaaaaaaaaaaraaaaagaagaagaagaagaagcatgagagagggattatggcacagaaacacatgggcaaagtcctagatgggagatgtggcaagacctcggccccttggg

SEQ ID NO: 307259 - DNA, 201 bp, Homo sapiens
ttaatttaaaaaacaaacaaacaaacaaacaaacaaaaaccatacaacagtgtagaaatcatgaattcaggccaagcacctgacgggaggccgaggcaggyggatcacgaggtcaggagttctagaccagcctggccaacatggcgaaaccctgtctctactaaaaatacaaaaagtagctgggtgtggtggcacgtgtct

SEQ ID NO: 307260 - DNA, 201 bp, Homo sapiens
ggcctggcttggctgtgggtgggtggacagggcaagcggggagggggttctccctgtgtgggcacttcctcctccttttcactctcctgccagactctgtkcatggagtcctgcacccttcacctgattcaggccacccacatctgcgacagggttattgctagtaccttggacagatgcagactcgctgctggctcagag

SEQ ID NO: 307261 - DNA, 201 bp, Homo sapiens
cttgaaccctggaggcggaagttgcagtgagtggagatcgcgccactgcactccagcctgggagacagagcaagactctgtcttggaaaaaaaaaaaaaaagcttcttgggaaggctgacctccatactgagactggaagcatgaatgaagaagcatgaaaggctgggcgcagtgcctcacgcctataatcccagcacttt

SEQ ID NO: 307262 - DNA, 201 bp, Homo sapiens
catttggggcacagaacacctaggatttggaattggattcagttctaccacttactctgtggcctcgccctcattctatgaaataaagacaatggtatctrcctccgaagttggttgtgaaggtaaaataagaaccaccagaaccacctggcacagatcagaaacttagtaacaacaacatttacatgtgcataattacat

SEQ ID NO: 307263 - DNA, 201 bp, Homo sapiens
cacctcagcctctgggtagctaggactacaagcacgggacaccacgcctggctaattttttaaattttttgtagagatgaggtcttgctatgttacccagrctggtctcaaactcctggcctcaaggggtcctcctgcctcagcctcccacagtgttgggattacaggcgtgagccaccatgcctgactgagtggccacta

SEQ ID NO: 307264 - DNA, 201 bp, Homo sapiens
ggccaaggtgggcagagcccctgaggtcaggagttcgaaaccagcctggccaacatggtgaaacccgtctctactaaaaatacaaaataattagctagacrtggtgccgcccacctgtagacccagctacttgggaggctgaggcaggagaattgcttgaacctgggaggtggagattacagtaagccgagattgccccac

SEQ ID NO: 307265 - DNA, 201 bp, Homo sapiens
atcctcgaggccctccaacaatcccgacgctaggaaggctgtgacgttccactgcaccagacttcccatcccatctcctgaagtgatttctcatctcaggsctctcaaaccaacagaagcttcagccagctgtctgggaggggaggcaggggccctgggctctggttggaggacccatggctccgatcactgtcctgggga

SEQ ID NO: 307266 - DNA, 201 bp, Homo sapiens
agctgaggtgaggcacctggctcacatgccctgtggtcttgttgaattcttgttcctggactggtaaacagctacccccacagctggggagcatctccagytgccttcacagggtctcaaagcacagacccaggtgctcctgcccccgtcctcctcatccgtaagtgcctagaggacaattcaccaaaccaagatgggtag

SEQ ID NO: 307267 - DNA, 201 bp, Homo sapiens
accccagtggccaccaacaacgaggatgcagcccgttcctcgccttgtggctcaggctaaggctgatctctgcctctttttttttttttttttttttttttgagatggagtcttgttctgtcgcccaggctggagtgcagtagtgcgatctcagctcacttcagccgctgcctcccaggttcaagtgattctcctgcctca

SEQ ID NO: 307268 - DNA, 201 bp, Homo sapiens
gaatggctttgtggaggggggacgtggctcatctgctgagagctgctccagccttgagcccgccctgcactggcctgttgagatggccgggtggggtgggygtggagtgggtggtgcatatccctttgcagacccatggccaggcctgggacctcttggtctccagccttgcaggcacacttggtcagggaccagagcctt

SEQ ID NO: 307269 - DNA, 201 bp, Homo sapiens
cctcctcacatagaggcagtgcagggagggtgtccaatccttcactccgcagatcccaaaggcaccttgaccctgcagggtctgtgtaggcttaaatcaamcaggcttagatctagccatgaagacactccctgcctggaatggacttgagaaaaggacacaaattactgtaatagaagttgagaaacaatgcctttgata

SEQ ID NO: 307270 - DNA, 201 bp, Homo sapiens
aaccccagtggccaccaacaacgaggatgcagcccgttcctcgccttgtggctcaggctaaggctgatctctgcctctttttttttttttttttttttttttgagatggagtcttgttctgtcgcccaggctggagtgcagtagtgcgatctcagctcacttcagccgctgcctcccaggttcaagtgattctcctgcctc

SEQ ID NO: 307271 - DNA, 201 bp, Homo sapiens
gcagcaagtggggaatggctttgtggaggggggacgtggctcatctgctgagagctgctccagccttgagcccgccctgcactggcctgttgagatggccrggtggggtgggcgtggagtgggtggtgcatatccctttgcagacccatggccaggcctgggacctcttggtctccagccttgcaggcacacttggtcagg

SEQ ID NO: 307272 - DNA, 201 bp, Homo sapiens
aaaccccagtggccaccaacaacgaggatgcagcccgttcctcgccttgtggctcaggctaaggctgatctctgcctctttttttttttttttttttttttttgagatggagtcttgttctgtcgcccaggctggagtgcagtagtgcgatctcagctcacttcagccgctgcctcccaggttcaagtgattctcctgcct

SEQ ID NO: 307273 - DNA, 201 bp, Homo sapiens
cggctactcgggaggctgacgcaggagaattgcttgagtctgggaggcagaggttgtggtaagctgagatttcgccaccgcactccagcctggacagcagrgtgagactccatctcaaaaaaaaaaaaaaaagagactactattaaggaacttcccaggagacctttgaggtcttagaactgcctaagcatgacagcagga

SEQ ID NO: 307274 - DNA, 201 bp, Homo sapiens
aattgattaaagaagaactttgtgaaactccacaatcaaatgggcctgggaaggtggagagcagcccatcactgagcgtgttcaaaaagataccactggcygggcacggtggctcacacctgtaatcccagcactttgggaggccgaggcgggcaaatcacttgaggtcaggagtttgagaccaacctggccaacatggtg

SEQ ID NO: 307275 - DNA, 201 bp, Homo sapiens
ggcaggccctggtcacatggtcatggtcagctggaactggcagtgacaggttccgtgggcactgcctctagggcctcccaagacctggcagagcccccacycccactgtctgtgtgcaaacaaggacccccttccctttcccctgcctccaacccagtttttgtgacatcagcaagggctcaggggcaaagtgggtatgag

SEQ ID NO: 307276 - DNA, 201 bp, Homo sapiens
cacccctgagggcctgttttccctccgaccatccctccgctccctgtttaatcagtcattgctcatcatgggcatgttgctcccaccccagacggcccccsagggctgaatctatcacacaaagcagcggcagcaagaggagaatggctcttcctcctttactctctgatccctccattctgctgcccaggtgagcccaac

SEQ ID NO: 307277 - DNA, 201 bp, Homo sapiens
caccatttgtgttttgtctgggtggtgctggtgaggaggctccaggggcagtaggcaggcaagcaggaggggggacccttgggaccacctctgttgaaccygttcttttatgatgtagaaactgaggcacagggagaggaccatacctaccttgggagccacagtgagtcggtggcacggtgaaagtgccagcgacttccc

SEQ ID NO: 307278 - DNA, 201 bp, Homo sapiens
cagaacaggaaaatgacagaaggagcagaaaaagcatctgtgttcttcagggcatatgcccagccttcctacttggccgtggtcagtggagatggcctgcrggaaggaagaggggaggacacagctcagggctctcggggcggtttgggggtgagcaattcaggaaagagttggtggctgttgagacacattgcttcttcc

SEQ ID NO: 307279 - DNA, 201 bp, Homo sapiens
acacaccctgttttccaatgaggagctgtgtccagcagactgcttcagtgaactgtgtccagccacttgtcacagggaaccttctccagccattggctgcrgtaatcattctccagccagctgtggcagcaaagcgtggcatctgctcaggaagggtggaggaagccattagttccaccagggccctgacgtctgtggctg

SEQ ID NO: 307280 - DNA, 201 bp, Homo sapiens
agtcacatgcagcagagttggtgggcatcaatgggcatggtcagttctgcttggtggctcaggaacgtcttgggaaaaggctgaatgtatgagccaaggcyagaaagatgagtaggtgtttaccgagccatctctgcaaaggaaggcatcccaggcagagggacccatatcagcaggcacgccagggagtctgaggagctg

SEQ ID NO: 307281 - DNA, 201 bp, Homo sapiens
tgcaagcatttaggattaaaaatgatgatccgtaggagccaaaatgggttctctaagaacaatcatgctagtctaaccccctatttgccttaaaaaaaaaagcaatttatttttctgtactagctgtactagggcagagtgtctttatatttcagcctgtctttcacaatatcttggtgtacaaaaatggagaatcggggg

SEQ ID NO: 307282 - DNA, 201 bp, Homo sapiens
tccttcttagccccagcctttccctgtctgccccacagcctcctcagagaaccaggaaagggccttgctgtcttcctgctgagccttggggtctcctccargaaggtgaagtagcctggccagagtgggatttacctcccctcagtctaagctccagccagcagctctcccggcaggttctggcgctccttggagcacaac

SEQ ID NO: 307283 - DNA, 201 bp, Homo sapiens
tgttggctagaacctcagatgggactgtcagtcagaaaactgatacatggctctctacatgttttctccttgagagctagctatcttgggcttccttacartatggtggctggttccaagatccaacattctgagaggcaggaagtggaagctgccagtttcttaaggtctgggccttaaggtcaagccaggcacagtggc

SEQ ID NO: 307284 - DNA, 201 bp, Homo sapiens
cgcttgaacccggcaggtggaggttgcggtgaactgagatcgcaccattgcactccagcctgggcaacaagagcaatactccgtctcaaaaaaaaaaaaaagaaaagaaaagaaaaagtaaaaaagaaaggttacagagcaaaattagcaaaggaaacagtggatggggacaacccggaggaaaccaggtgcaggcttcca

SEQ ID NO: 307285 - DNA, 201 bp, Homo sapiens
agctccccacggagagaggctatttacatagacttggggagtaagcagtggagaccgggaggggccgcatccaagcacacaccaggctccatgtgggctcygggagtgccaggtcctgctgcagacaggtctggggctggttcctgcagctcctggcagcagcgaggaccctgcctccttgagagacagcttgccagcaca

SEQ ID NO: 307286 - DNA, 201 bp, Homo sapiens
gactgtagccaggcactgggagttgtgaatgcgccacagccccccttgaagccctccccatccagttggagggggcctttctttcattcctaaatacttaygggcccccgtgggggctggaaagtgttctgggcagtggaaggtggcggtgaaccgagttctctccctaggagccaacccctcaggagaagacagagtggc

SEQ ID NO: 307287 - DNA, 201 bp, Homo sapiens
tttgggaagcgaggcgtgcagatcacctgaggtcaggagtttgagaccagcctgaccaacatggagaaaccccttctctactaaaaataaaaaaaaaatcwactaaaaaagaaaaaaagcatgcctgtaatcccagctactcaagaggctgaggcaggagaatcgcttgaacccggcaggtggaggttgcggtgaactgag

SEQ ID NO: 307288 - DNA, 201 bp, Homo sapiens
taggttcagtgatgcactaggaagactcataggactcagcccatagttcttgtcatggcgatgatttattacagtgaaaggtttcagagcagatgagcacrgtggctcatgcctgtaatcccagcactttgggaagcgaggcgtgcagatcacctgaggtcaggagtttgagaccagcctgaccaacatggagaaacccct

SEQ ID NO: 307289 - DNA, 201 bp, Homo sapiens
gccaggctgctatttcaaggtgaactaagggaccccagaactgatgaacaatcggttcaatgaactgatttatcaagcacttagtctgtgccaagcatatrggttgtatttatcagatgtatctaggccaggtgtgtatgtgatgtatttatcctggctcaggaacctgcagtggctccccagtgccctggtccagtggtc

SEQ ID NO: 307290 - DNA, 201 bp, Homo sapiens
aactcctggcctcagatgatccgcccacctgggcctcccaaagtgctgggattacacgtgtgagccaccatgcccagcctcagtcattttaatatattcamaaattgtgaataatcaccacaatcaattgtagaaaaatttcattactctgaaaagaccccatgcccatgaacagtcactccccatttctcccttccccta

SEQ ID NO: 307291 - DNA, 201 bp, Homo sapiens
ttttgagatagagcctacctctgggtagaggcctaggtgacacagcaagacctctgtctcaaaaaaaaaaaaaaaatatatatatatatatatatatatayacacacacacacacacatatatatatttcacataccataaaattcatataccataatatctgacttttaaagtataaattttagtcattttatttcattt

SEQ ID NO: 307292 - DNA, 201 bp, Homo sapiens
ttttttgagatagagcctacctctgggtagaggcctaggtgacacagcaagacctctgtctcaaaaaaaaaaaaaaaatatatatatatatatatatatayatacacacacacacacacatatatatatttcacataccataaaattcatataccataatatctgacttttaaagtataaattttagtcattttatttcat

SEQ ID NO: 307293 - DNA, 201 bp, Homo sapiens
tttctttttcttttttttctttttttgagatagagcctacctctgggtagaggcctaggtgacacagcaagacctctgtctcaaaaaaaaaaaaaaaatawatatatatatatatatatatatacacacacacacacacatatatatatttcacataccataaaattcatataccataatatctgacttttaaagtataaa

SEQ ID NO: 307294 - DNA, 201 bp, Homo sapiens
tttttctttttcttttttttctttttttgagatagagcctacctctgggtagaggcctaggtgacacagcaagacctctgtctcaaaaaaaaaaaaaaaawatatatatatatatatatatatatacacacacacacacacatatatatatttcacataccataaaattcatataccataatatctgacttttaaagtata

SEQ ID NO: 307295 - DNA, 201 bp, Homo sapiens
cttgtgaaccaatttgaaagttgcaaatataatgtcctctacccttaaatacttcattgtatatttccaaaaagaatgacatttttctttttcttttttttctttttttgagatagagcctacctctgggtagaggcctaggtgacacagcaagacctctgtctcaaaaaaaaaaaaaaaatatatatatatatatatata

SEQ ID NO: 307296 - DNA, 201 bp, Homo sapiens
agccatacgcctcctccttccgtaggaccaagtgtgcagttgagtaaagcttagcacttgtccctaccaggtatacaacttaactcccacacgttggttgkgtctctgctttcatttctagttgtaccatttgagggaattaggcattccaggagcaattgcttcttaggccccatattcttaactctgtctttagtgtca

SEQ ID NO: 307297 - DNA, 201 bp, Homo sapiens
tacaccatactcatgagtgtacctgcctagaagctacagccagggtgggaaggggcattgtggagcagcccctcctgccaggagagagaacacaggctatrggcccacttgcacttgaaaggctgggagaggagatcagagcttcctgctggcccattggctcacagggctgagcagaggccctcctggtctctgggatgc

SEQ ID NO: 307298 - DNA, 201 bp, Homo sapiens
ctgggaggtggtgctggtgagtgggccccagggatgggcagcaaggtgctagatgcccctgagaatttacaggctgggtgctaggtgccctggcttgggcmtggagtggaaggccaagccacgttgacctctgaccacagttcagagtgcaaagggtcaaggtggtggttacagagccaagagtccccagctgggcaaagt

SEQ ID NO: 307299 - DNA, 201 bp, Homo sapiens
gggtcttgttctgtccagcccaggccaagagggaagctgtgcatctgcccggtgcagccttacacagcagtccaggcaggggcaccccacacccacacacmcctgacatcaccctggccgcgggttcaaggcaactgacatctctcctggatcccgaaaagcaggaggtgggaggtctgacctgggccctctgcttggctg

SEQ ID NO: 307300 - DNA, 201 bp, Homo sapiens
caggagaatcacttgcaccagggaggtggaggttgcagtgatctgagatcatgccattgcaatccagcctgggcaacagagcaagactccatctcaaaatwataaataaataaataaataaataaataaataaataaataaataaaaatgcaaaaattagccaggcatggtggtacacacctgtaatcccagctgctcagg

SEQ ID NO: 307301 - DNA, 201 bp, Homo sapiens
tgaggcatgagaatcgcttgaacctgggaggcggaggttgcagtgagctaagataacgccactgcactctagtctggaggacagagcaagattctgtctcaaaaaaaaaaaaaagaaagcatagctttgatcatatttctcttgagcttaaaaaacaaggaaacacacagcagctttctgtggtccctacatcctctaagt

SEQ ID NO: 307302 - DNA, 201 bp, Homo sapiens
aggcatgagaatcgcttgaacctgggaggcggaggttgcagtgagctaagataacgccactgcactctagtctggaggacagagcaagattctgtctcaaraaaaaaaaaaagaaagcatagctttgatcatatttctcttgagcttaaaaaacaaggaaacacacagcagctttctgtggtccctacatcctctaagttc

SEQ ID NO: 307303 - DNA, 201 bp, Homo sapiens
caaaaatcctcccagagggatacccaatgtacatataacactgaaatttaccactgactttaaacctttaaaaaccaacacattattttctttcttttttwtttttttttgagacagagtctcactctgttgcccaggctggagtgcagtggctcaatctcagctcactgcagcctctgcctcctgggttcaagcgattct

SEQ ID NO: 307304 - DNA, 201 bp, Homo sapiens
gtaaagagaataaacttaagggtttgaattagccaagtttttttactctagggactgatttatacataacttgtagccactggctccaaaatataaaattsaataaactttcaccccaaatccaagaagtttaagtctgttctgtcttgctgttaagattattttatacaaaagcaaagcatttgataacttcaacaaaat

SEQ ID NO: 307305 - DNA, 201 bp, Homo sapiens
catctcaaataaaaaaaaataataaaataaataatttttttgtagagacagtctcactatgctgcccaggtttacaacaattttacaattaatgtaagccmattattcttgaagaaagtaaatcagccattcaaaaaaaaattggtgctcactttggcagctcatatactaaaattagaacgacacagagaaaattagagt

SEQ ID NO: 307306 - DNA, 201 bp, Homo sapiens
aattttaaaagtcttaatcagagagggttgtttgttagttggaaaagtactcaagaataaaccaggtgaaaaggacaatactgcttccccccccacccccygactattttcttatgtagtattggtgtatggggaggagtgcccattcagcttcattgatgttcaattgtgtcttttgtgcagggtatgtccttgaacttg

SEQ ID NO: 307307 - DNA, 201 bp, Homo sapiens
ataaataaaaatgcaaaaattagccaggcatggtggtacacacctgtaatcccagctgctcaggaggctgaggcatgagaatcgcttgaacctgggaggcrgaggttgcagtgagctaagataacgccactgcactctagtctggaggacagagcaagattctgtctcaaaaaaaaaaaaaagaaagcatagctttgatca

SEQ ID NO: 307308 - DNA, 201 bp, Homo sapiens
catactcctgatctataggccctaatctctggggcaaaaaggaacagaaaaaggcctaaagtatcataagagggataccctagctatagcaagaatgcacmacaaaacataatgtgactttaagtataagaaaaatcacatacattttgaaaattctaaaacccatattatttgtttttaagaaaaggcaggaggctgggt

SEQ ID NO: 307309 - DNA, 201 bp, Homo sapiens
ttattattattttttgaggcggagtttcactctttcacccaggctgcagtgaagtgacttgatctcggctcactgcaacctctgcccccgggggttcaagygattctcctccctcagcctcccgaatagctgggattgcaggcgcttgccaccatacctgactaatttttttgtatttttagtagagacggggttttgcca

SEQ ID NO: 307310 - DNA, 201 bp, Homo sapiens
atttatttatttattgagacagtctcactctgtcacctaggctagagtgcagtggtggcacaatcccggctcactgcaaccttgtcctcccaagttcaagygattctcttgcctcagcatcccaagtagctgggactacaggtgcgtgccacaatccccaactaatttttctatttttagtagacacaggttatcaccatg

SEQ ID NO: 307311 - DNA, 201 bp, Homo sapiens
cccgccgtcatgccctgctactttttgtagtttttcgtagagacggggtttcaccatgttggctaggctggtcttgaactcctgacgtcaggtgatccgcycgcctcggccttctgaagtgctgggattacaagcatgagccgtcgtgcccggccgcttgttgtcgttgttgttgttgttgtttttaagtaaaattggaac

SEQ ID NO: 307312 - DNA, 201 bp, Homo sapiens
tcccaaagcgctgggattacaggcgtgagccaccgtgcccggctgacctaaaccagttttatctaattagctgctaaaaacaacctgcagtgactctaagratcgttttacctagttgccattacttgccaatcaaaacttgccagctccccaaaaccttactagtgacaatgaactttcttaaagaacaatatacaacag

SEQ ID NO: 307313 - DNA, 201 bp, Homo sapiens
tgaaataaacatgttggctgttttgctgccttaacaaccgctggtagcatcttgggtttctgttaacaaaaaagcatttttaacggttttcatctagctcytatggaaggtagaggcttcagaattgacagtgaccagtcgcagtattacaacttgaaggagaaactgaaggaagttccaggtggctgcaggatttgttga

SEQ ID NO: 307314 - DNA, 201 bp, Homo sapiens
atacttttcttttttttttttttgagacaaagtctccctcttgtttcccaggctggagtgcaatgccgtgatctcagctcactgcaacctctgattcccargttcaagcaattctcctgcctcagctttctgagtagctaggactacaggcgcttgccaccatgcccggctaatttttgtatttttagtagagacggggtt

SEQ ID NO: 307315 - DNA, 201 bp, Homo sapiens
tgattgatagatagatagatagatagatagatagatagatagatagatagatatatagatagttttttttttcttggactattcttcataacaaaggggtrtgatataatattagcttcctataaaaggaatgtggccaggcacagtggctcatgcctgtaatcccaacactttgggaggccggggtgggaagattgctgg

SEQ ID NO: 307316 - DNA, 201 bp, Homo sapiens
atttcttggctggatttgaagcttaaactcctgtggattcacatcaaataccagttcagttttgtcattgttctagtaaattagttccatttgtaaaaggkttactctcatactccttatgtacagaaatcacatgaaaaataaaggttccataatgcatagttgttttctgtcatttgtgttattctttaaaaccaagat

SEQ ID NO: 307317 - DNA, 201 bp, Homo sapiens
aaaagaaagttaatacgtttttattttgtcaagtcatttcagcaaaatatttatactcaaaacagtattaacactgtcagattataaacagtgcttatggactatactgaaagattatgcctcaagccttgaaaatataagaaataactgttttctgtcaggggtgggaggaaggattattaagtggagttctaggtcatt

SEQ ID NO: 307318 - DNA, 201 bp, Homo sapiens
gataggggcttcacaaccaggaaaacttaagtatatttaatgtcttcctttcaggaattaaggcctgttagagtcccctcccccacttggctatatgaatrtgtaatttggcagatttaaaagaaagttaatacgtttttattttgtcaagtcatttcagcaaaatatttatactcaaaacagtattaacactgtcagatt

SEQ ID NO: 307319 - DNA, 201 bp, Homo sapiens
aactcctggccttatgccatcttcccacctctcaaagtgctggcattataggcgtgagccaccatgcccggcctcaaactatctttctttttctttctttyttttttttttttttttttaatacagagtctccttctgtcacccaggctggagtatatttttagtagaaatggtaaaacctctaccattttggccaggctg

SEQ ID NO: 307320 - DNA, 201 bp, Homo sapiens
tggtcttgaactcctggccttatgccatcttcccacctctcaaagtgctggcattataggcgtgagccaccatgcccggcctcaaactatctttctttttytttctttcttttttttttttttttttaatacagagtctccttctgtcacccaggctggagtatatttttagtagaaatggtaaaacctctaccattttgg

SEQ ID NO: 307321 - DNA, 201 bp, Homo sapiens
tcatttctgatcaactcttgctttctagctacttgagaaataacttctagatctgattttccttttctgaaataaggaagttacttttagttagaaggttytgcacatttcgttttttttttttttttttttttttgttttttttttttgagagttttgctcttgttgcccaggctggagtgcaatggcacgatctcggct

SEQ ID NO: 307322 - DNA, 201 bp, Homo sapiens
gtaggattggcaatgactcttctaggcctccttgtgattgttgatatattttttttaatttaaagttccggaatacatgtccaggacgtgcaggtttgttacacaggtaaatgtgtgccatggtggtttgctgtaactatcatcccatcacctaggtattaagctccgcatgtattagctatttatcttgatgctcccctc

SEQ ID NO: 307323 - DNA, 201 bp, Homo sapiens
tttgagatagtctcactcctgtcgcgcatactgaagtgcagaggcgcaatcttggctcactgcaacctccacctggctcactgcaaccttcacctcctggrttcaagcgattctccttcctcagcctcctgagtagctggggttacaggtgtgcaccaccacccccagctaatttttgattttttagtagagacggggttt

SEQ ID NO: 307324 - DNA, 201 bp, Homo sapiens
ttattattattattattattttgagatggagtttttgcccttgttacccaggcttgagtgcaatggtgtgatttcagctcaccgcaacctccgcctcctgkgttcaagcgattcttctgcctcagcctccgcctcccgagtagctgggattacaggcatgtgccaccatgcccagctaattttgtatttttagtagagaca

SEQ ID NO: 307325 - DNA, 201 bp, Homo sapiens
aaataaaataaaataaataaataaaaaaaaaagaaaagtgaaggcaacgttaataagtgtccactatgacataataataaccagcatcacacacacacacvaatcttgcatatatcacaaaaatctcagtatggtaattctgtggagaaaaaaaaaaagcccatccaggtaagcatagaaagtgttttttcatcatctccc

SEQ ID NO: 307326 - DNA, 201 bp, Homo sapiens
atgtgtgccatggtggtttgctgtaactatcatcccatcacctaggtattaagctccgcatgtattagctatttatcttgatgctcccctcccccggttaycaggatttttaaacagtttgctctaattcactgacaggattcttttagaatgaatctaaaaaagctgggaatctttaacctgagcgcagatcggatcacg

SEQ ID NO: 307327 - DNA, 201 bp, Homo sapiens
gtgctcactttggcagctcatatactaaaattagaacgacacagagaaaattagagtggcctctactcaaggaagatgggtaaatttgtgaagtgttccayattttgttttgtggcttatctagaaataatatggaaaatattgctgttatttttggcaaagaaagtcaattttgtatagtttatttcaacctaaataaac

SEQ ID NO: 307328 - DNA, 201 bp, Homo sapiens
actcctgatctataggccctaatctctggggcaaaaaggaacagaaaaaggcctaaagtatcataagagggataccctagctatagcaagaatgcacaacmaaacataatgtgactttaagtataagaaaaatcacatacattttgaaaattctaaaacccatattatttgtttttaagaaaaggcaggaggctgggtgcg

SEQ ID NO: 307329 - DNA, 201 bp, Homo sapiens
tctcccttatttgactgtaagcagagactgttctttaaggaagttactatcgtattcatctcgcttccccagttataacagagctatagtaagaaggcacmaaacataatgtgactttaagttgtatgatagtatgtaagtataaaaaaaaagtttaaaaaattctaaaatacacattatttgtaaaaaaaaaaggcaaga

SEQ ID NO: 307330 - DNA, 201 bp, Homo sapiens
aagtgagctaaagcagaaaattcaacccaggactcgaaggtaaaaagcatttctactctggcagaaactgctagttactcatgttaatccttcctgtcatwcttccttaactaacagaatcgcaaatttattctgtgcaacaatttgaccactaaaacactacattttctagcccttctcgcaagtaacctttttcaaact

SEQ ID NO: 307331 - DNA, 201 bp, Homo sapiens
aaataaaaaaaaaagaaaagtgaaggcaacgttaataagtgtccactatgacataataataaccagcatcacacacacacacaaatcttgcatatatcacmaaaatctcagtatggtaattctgtggagaaaaaaaaaaagcccatccaggtaagcatagaaagtgttttttcatcatctccctttgactccaaatgaaga

SEQ ID NO: 307332 - DNA, 201 bp, Homo sapiens
ccacctcctgggtttgagtgattctctcctgcctcagcctcccgagtagctggtattacaagcatgcaccaccacagctggctaatttttttttttttttyccttagtagagatgggattttgctgtgttggccaggctggtccaaactcttggcctcaagtggtccgcccgcctcccaaagtgctggtattactggcgtg

SEQ ID NO: 307333 - DNA, 201 bp, Homo sapiens
ggagaaggtactgactgggaggggacataagaaaggtggtctccggccgggtgccgtggctcacgcctgtaatcccagcactttgggaggccaaggcgggyggattacctgaggtcagaagtttgagaccagcctggccaacatggtgagaccccgtctctactaaaaatacaaaaattagcagggcgtggtggaacacgc

SEQ ID NO: 307334 - DNA, 201 bp, Homo sapiens
agaataaacttaagggtttgaattagccaagtttttttactctagggactgatttatacataacttgtagccactggctccaaaatataaaattgaataarctttcaccccaaatccaagaagtttaagtctgttctgtcttgctgttaagattattttatacaaaagcaaagcatttgataacttcaacaaaatttttct

SEQ ID NO: 307335 - DNA, 201 bp, Homo sapiens
tacaaaagcaaagcatttgataacttcaacaaaatttttctggtggaaattggaagtccgtgactttgtatttctagtgagtagacatattgttcaaaggmgagttttggtgtagctatcagaagctctctaatgtaagtctactttgtattgggttgagcctcatctgtcagggtatgagaaataagttgtaggagttag

SEQ ID NO: 307336 - DNA, 201 bp, Homo sapiens
tctctctcccaacactgtggaggcagcctgtcagcccacaactgctgctgcagaatttaaaggaaaccaaaaatgtgagagcagggtactgcaagataagyctaaaaatatacacctgcacaacgtgagaggaagctgcgctaggatcagaaggacgtccatgcatcatggtactaaataaagctgacagactgccctctt

SEQ ID NO: 307337 - DNA, 201 bp, Homo sapiens
agttttaatgatgagagatgatttggtgctgttatgttatgaaaatttgtatttgattggttacagttaggtagcttttaatttcactttctactaactcraagagtacaggttttgattaatttttgaaactgtttatggagcttctcacacataaataagatgataatcaaatttgtcttaagatttccatttggcctt

SEQ ID NO: 307338 - DNA, 201 bp, Homo sapiens
gttacagcaatgaaccatgagattcaaatactgctttttactaagtacttacagactaatgacataggagacctcataggcacctggctgtttttaaccakgcaggcctaaatacactgcccaagtggcccttctgtgtggcaacaaaatggctgtcataaaattgtgtctgtgtgcatttatcttatcactgggggtggt

SEQ ID NO: 307339 - DNA, 201 bp, Homo sapiens
catgcactaccatgcctggctaatttttttgtattttgtagagacagggtctcactatgttgcccaggctggtcttgaactcctggccttatgccatcttyccacctctcaaagtgctggcattataggcgtgagccaccatgcccggcctcaaactatctttctttttctttctttcttttttttttttttttttaatac

SEQ ID NO: 307340 - DNA, 201 bp, Homo sapiens
catgtatctaagcatttgtacgttacatgtgaatcctttccacactcacgcatttgtgacaagatgggtgcagtgtgtaaggcctgagtttcagagcctgratgcctgagtttggatctagatctgcttactgtaatagctatgtaatcttgggcaacataccaacttctctatagtcctctcatctgtaaaaagggaata

SEQ ID NO: 307341 - DNA, 201 bp, Homo sapiens
tccaggtggctgcaggatttgttgagagagtaaaataagtccacatgccacaactcttggtttctaatctaactctagcatttattcagtttttgtttgcytgttttttttttttttttttttttgagatggtgtctcgctcagtcgcccaggctggattgcaatggcgtgatctccgcccactgcaaccaccgcctccca

SEQ ID NO: 307342 - DNA, 201 bp, Homo sapiens
aagccacagaataagagaagacatttgcaatattttagcaggtaaagagttaatatccagaatatataaagaactgccacaaatcaataagaaaaaggcayagtctaatagaaaaatgggcaaaagactaaacagccaatttacaaaacagagtatctaattagccaacaagtatgtgaaaatgttcttaacctcgttaat

SEQ ID NO: 307343 - DNA, 201 bp, Homo sapiens
ctcccaaagtgctgggattacaggtgtgagcccccatgcccggccctgtattctgttttttaaagagagacagtgtcttgcagtgtcacccaggctggagkgcagtggtgccatcatagctcactgcaggcttgaactcctgggctcaagcagtcctgcagccttagcttcctgagtagctaagactacgggcatgcacta

SEQ ID NO: 307344 - DNA, 201 bp, Homo sapiens
aggtggctgcaggatttgttgagagagtaaaataagtccacatgccacaactcttggtttctaatctaactctagcatttattcagtttttgtttgcttgktttttttttttttttttttttgagatggtgtctcgctcagtcgcccaggctggattgcaatggcgtgatctccgcccactgcaaccaccgcctcccagga

SEQ ID NO: 307345 - DNA, 201 bp, Homo sapiens
aaagaaaaaaaatctgttcattgaaagatgctattaaaagggcaaaaaggcaagccacagaataagagaagacatttgcaatattttagcaggtaaagagytaatatccagaatatataaagaactgccacaaatcaataagaaaaaggcacagtctaatagaaaaatgggcaaaagactaaacagccaatttacaaaaca

SEQ ID NO: 307346 - DNA, 201 bp, Homo sapiens
ctaatttttgtatttttagtagagacagggtttcaccatgttggccaggctggtctcgaactcctgacctcaggtaatccaccctgcctcagcctcccaamgtgctgggattacaggtgtgagcccccatgcccggccctgtattctgttttttaaagagagacagtgtcttgcagtgtcacccaggctggagtgcagtgg

SEQ ID NO: 307347 - DNA, 201 bp, Homo sapiens
taggaagacactataagttggggaatttctttggagatgagtatttggacttttaaaataaaggttaaatatatatgtgtgtgagagtgtgtgtgtatatrtgtgtgtgtgtgtgtgtgtgtatgtgtacacacacccccacgttcagcatatatgtttttcttttttcttttttttttgagatggagttttgctcttgtt

SEQ ID NO: 307348 - DNA, 201 bp, Homo sapiens
ccttagtagctcggattacaggtgtgagccaccacgcccgactaatttttgtatttttagtagagacagggtttcaccatgttggccaggctggtctcgawctcctgacctcaggtaatccaccctgcctcagcctcccaaagtgctgggattacaggtgtgagcccccatgcccggccctgtattctgttttttaaagag

SEQ ID NO: 307349 - DNA, 201 bp, Homo sapiens
gggcatggtggcacacgcctgtaatcccagctactcaggaggctgaggcaggagaatcgattgaacccgggaggaggagtgtgcagtgagccgagattgtsccattgcactccagcctgggtgacagaaagagactccatctcaaaaaaaaaaaaaagaaaaaaaatctgttcattgaaagatgctattaaaagggcaaaa

SEQ ID NO: 307350 - DNA, 201 bp, Homo sapiens
caaccttggctcattgcaacctccacctcctggattcacgcgattctcctgcctcagcctccttagtagctcggattacaggtgtgagccaccacgcccgrctaatttttgtatttttagtagagacagggtttcaccatgttggccaggctggtctcgaactcctgacctcaggtaatccaccctgcctcagcctcccaa

SEQ ID NO: 307351 - DNA, 201 bp, Homo sapiens
cgtgtcggatccgctgcccaaaccagggctatgaagcaggtaattttgcatcactttggcagtaagggggctatcattagattagcatcttaaggtattaatatattaactatatttgtatagtgctctgtgtcactgagttacagtacagtaatttctgtattgcaggtagcaggtaccatgaagctggaattggctcag

SEQ ID NO: 307352 - DNA, 201 bp, Homo sapiens
tcgtgtcggatccgctgcccaaaccagggctatgaagcaggtaattttgcatcactttggcagtaagggggctatcattagattagcatcttaaggtattaatatattaactatatttgtatagtgctctgtgtcactgagttacagtacagtaatttctgtattgcaggtagcaggtaccatgaagctggaattggctca

SEQ ID NO: 307353 - DNA, 201 bp, Homo sapiens
gtatctcgtgtcggatccgctgcccaaaccagggctatgaagcaggtaattttgcatcactttggcagtaagggggctatcattagattagcatcttaaggtattaatatattaactatatttgtatagtgctctgtgtcactgagttacagtacagtaatttctgtattgcaggtagcaggtaccatgaagctggaattg

SEQ ID NO: 307354 - DNA, 201 bp, Homo sapiens
tgtatctcgtgtcggatccgctgcccaaaccagggctatgaagcaggtaattttgcatcactttggcagtaagggggctatcattagattagcatcttaaggtattaatatattaactatatttgtatagtgctctgtgtcactgagttacagtacagtaatttctgtattgcaggtagcaggtaccatgaagctggaatt

SEQ ID NO: 307355 - DNA, 201 bp, Homo sapiens
ctgtatctcgtgtcggatccgctgcccaaaccagggctatgaagcaggtaattttgcatcactttggcagtaagggggctatcattagattagcatcttaaggtattaatatattaactatatttgtatagtgctctgtgtcactgagttacagtacagtaatttctgtattgcaggtagcaggtaccatgaagctggaat

SEQ ID NO: 307356 - DNA, 201 bp, Homo sapiens
acggtgctggtgtttgttaaaaattcagattgccccgaattttcgactcagagggtctgaagtggggctaagatctgcagattaacgggctccgtgggagrctccctgctggtggccagtcccggggtttagctgttcactgttgctactcgtgctaaaccacggtctaacactaccgacactattaatcgccctggtcct

SEQ ID NO: 307357 - DNA, 201 bp, Homo sapiens
attattattattttgagatggagtttttgcccttgttacccaggcttgagtgcaatggtgtgatttcagctcaccgcaacctccgcctcctgggttcaagygattcttctgcctcagcctccgcctcccgagtagctgggattacaggcatgtgccaccatgcccagctaattttgtatttttagtagagacagggttctc

SEQ ID NO: 307358 - DNA, 201 bp, Homo sapiens
gacacaggtgcccttttgctcgtcacctgcgcagaggcagaatggtacagggcagacagttaactcgatggtgtccagagacagggcctcaagattcctgycttcggctgacagcggccctagaagggggatcttgggtgaaggtcagggcttgggcgctagctctccgaggcctgttctgaatcggtgaggttcctctct

SEQ ID NO: 307359 - DNA, 201 bp, Homo sapiens
gcttgagtgcaatggtgtgatttcagctcaccgcaacctccgcctcctgggttcaagcgattcttctgcctcagcctccgcctcccgagtagctgggattrcaggcatgtgccaccatgcccagctaattttgtatttttagtagagacagggttctccatgttggtcaggctggtctcaaactcctgcccttaggtgatc

SEQ ID NO: 307360 - DNA, 201 bp, Homo sapiens
ggtttctaatctaactctagcatttattcagtttttgtttgcttgttttttttttttttttttttttgagatggtgtctcgctcagtcgcccaggctggaytgcaatggcgtgatctccgcccactgcaaccaccgcctcccaggatcaagtgattctcccacctcagcctcccgagtagctgggattacaggcacccgcc

SEQ ID NO: 307361 - DNA, 201 bp, Homo sapiens
tttacaattaatgtaagccaattattcttgaagaaagtaaatcagccattcaaaaaaaaattggtgctcactttggcagctcatatactaaaattagaacracacagagaaaattagagtggcctctactcaaggaagatgggtaaatttgtgaagtgttccacattttgttttgtggcttatctagaaataatatggaaa

SEQ ID NO: 307362 - DNA, 201 bp, Homo sapiens
agagattgtcgaatgtccccaagggagattaaatcatcaccaattcccacccccaagaatcactgctctaaagtcaacagaaataaactaacttctgctaygggcaacgttatagacaaatgtcaaatacgtaatgtgtgaaagtggctaggcacaaaagtacatgctgtctgatttcatttaaataaagttctaaaacag

SEQ ID NO: 307363 - DNA, 201 bp, Homo sapiens
ggtgatctgcctgcctcagcctccaaaagtgctgggattacagctgtgagccactgtgcctggcccagattatttttttaattgaattgaattgtcttccrtagggactgctgagatgtcctctattcttgaagagcgtattcttggagctgatacctctgttgatcttgaagaaactgggcgtgtcttaagtattggtga

SEQ ID NO: 307364 - DNA, 201 bp, Homo sapiens
gtctgtatctcgtgtcggatccgctgcccaaaccagggctatgaagcaggtaattttgcatcactttggcagtaagggggctatcattagattagcatcttaaggtattaatatattaactatatttgtatagtgctctgtgtcactgagttacagtacagtaatttctgtattgcaggtagcaggtaccatgaagctgga

SEQ ID NO: 307365 - DNA, 201 bp, Homo sapiens
tgtctgtatctcgtgtcggatccgctgcccaaaccagggctatgaagcaggtaattttgcatcactttggcagtaagggggctatcattagattagcatcttaaggtattaatatattaactatatttgtatagtgctctgtgtcactgagttacagtacagtaatttctgtattgcaggtagcaggtaccatgaagctgg

SEQ ID NO: 307366 - DNA, 201 bp, Homo sapiens
tgtgagttaccatgcccggcccaaactacatttcttattatcatttgagtgtaaatgataggggcttcacaaccaggaaaacttaagtatatttaatgtcytcctttcaggaattaaggcctgttagagtcccctcccccacttggctatatgaatatgtaatttggcagatttaaaagaaagttaatacgtttttatttt

SEQ ID NO: 307367 - DNA, 201 bp, Homo sapiens
ctgtctgtatctcgtgtcggatccgctgcccaaaccagggctatgaagcaggtaattttgcatcactttggcagtaagggggctatcattagattagcatcttaaggtattaatatattaactatatttgtatagtgctctgtgtcactgagttacagtacagtaatttctgtattgcaggtagcaggtaccatgaagctg

SEQ ID NO: 307368 - DNA, 201 bp, Homo sapiens
tctgtctgtatctcgtgtcggatccgctgcccaaaccagggctatgaagcaggtaattttgcatcactttggcagtaagggggctatcattagattagcatcttaaggtattaatatattaactatatttgtatagtgctctgtgtcactgagttacagtacagtaatttctgtattgcaggtagcaggtaccatgaagct

SEQ ID NO: 307369 - DNA, 201 bp, Homo sapiens
cataggctgttgcttaccgtcagatgtctctgttgctccgccgaccccctggtcgtgaggcctatcctggtgatgtgttctacctacactcccggttgctrgagagagcagccaaaatgaacgatgcttttggtggtggctccttgactgctttgccagtcatagaaacacaggctggtgatgtgtctgcttacattccaa

SEQ ID NO: 307370 - DNA, 201 bp, Homo sapiens
ccccatgttgggcaccagatgaagggggccagcccctccacacctgtgagtatttctcgtcaggtgggttgagagactgagaaaataaataagacacagakacaaagtatagagaaagaacagtgggcccaggggaacggcgctcagcatatggaggacccatgccgccactggtctctgagttccctcagtatttattga

SEQ ID NO: 307371 - DNA, 201 bp, Homo sapiens
aaatagcaattttaaaagtcttaatcagagagggttgtttgttagttggaaaagtactcaagaataaaccaggtgaaaaggacaatactgcttccccccccaccccccgactattttcttatgtagtattggtgtatggggaggagtgcccattcagcttcattgatgttcaattgtgtcttttgtgcagggtatgtcctt

SEQ ID NO: 307372 - DNA, 201 bp, Homo sapiens
ctaggtaatggaatctttgtgacctctggaagacttcctttttccttttctaaaaggcattagaaaaaatgtaagttcttattgataggttttcttattckttttctttttttttgagacagaatcttgctctgtcgccaggctggagtgcagtggcaagatctcggctcactgcaacctctgtctcctgagttcaagcaa

SEQ ID NO: 307373 - DNA, 201 bp, Homo sapiens
tgaagatataaattacatacatcgtataactgtggtgagttgtttttcatttgttagttttttctctagtttgtatagactctcaggttcttaaaccatawtgttaccatttagccctgtcatggttctcttgttatagtcaaatgaactactgttacatatttttcttttgatattagtatggcttctttgttctggtaa

SEQ ID NO: 307374 - DNA, 201 bp, Homo sapiens
gtgaacgcgaggggcagtacttccgggtcaggtgggccggctgtcttgaccttctttgcggctcggccattttgtcccagtcagtccggaggctgcggctkcagaagtaccgcctgcggagtaactgcaaagatgctgtccgtgcgcgttgctgcggccgtggtccgcgcccttcctcggcgggccggactggtgagcacc

SEQ ID NO: 307375 - DNA, 201 bp, Homo sapiens
agcatagctttgatcatatttctcttgagcttaaaaaacaaggaaacacacagcagctttctgtggtccctacatcctctaagttcaacactctttatatrttaaggccttctacatcatgaaccaattgaccttttccaactttatcttacatttcatgtttctaagcagccggactttatcacttgctacagcttgagt

SEQ ID NO: 307376 - DNA, 201 bp, Homo sapiens
taggcatgcagatatgggaaaagatagtcttgatactcttggtaatgtctactacggaaaaagagccacttgatgtggaagaataattacagagcccaaarttatcattagctgtaagacattggccaatttagcatcttcagtgtacagtatttatctttgaaaggtgaggtcgaaacagattaattctgagttcccctt

SEQ ID NO: 307377 - DNA, 201 bp, Homo sapiens
gttttgtcattgttctagtaaattagttccatttgtaaaagggttactctcatactccttatgtacagaaatcacatgaaaaataaaggttccataatgcrtagttgttttctgtcatttgtgttattctttaaaaccaagatcaaattgagaaattggtaagcaaatgcttcttgatctattttacttgaatattggtac

SEQ ID NO: 307378 - DNA, 201 bp, Homo sapiens
cccaagaatcattgccaaagaaaatacagtggaaaaaagcttattaacctgtccaatttctttgcttctgtaatagttatttgaggatatgatagtgagcrtattaggcttatcaatgtgctgtcctaagattattcaaaatagcaattttaaaagtcttaatcagagagggttgtttgttagttggaaaagtactcaaga

SEQ ID NO: 307379 - DNA, 201 bp, Homo sapiens
gccggcatgatgcaggcggccgggtggggctgcagggtggtggtgcgccggctcgggcgctctctgcaggagggcgaggggctgtggcgaatgccgccatyttgcacccgtggcttctccggctggacagagcaggcgacacaggtgcccttttgctcgtcacctgcgcagaggcagaatggtacagggcagacagttaac

SEQ ID NO: 307380 - DNA, 201 bp, Homo sapiens
gttccagttggtgaggagctgttgggtcgtgtagttgatgcccttggtaatgctattgatggaaaggtaggtttaatgttcgttagatatagttgcagctwctaacaaacatcaaaactgattatgcttagggtttttctttttattttttaacagggtccaattggttccaagacgcgtaggcgagttggtctgaaagcc

SEQ ID NO: 307381 - DNA, 201 bp, Homo sapiens
ttcctgtcttcggctgacagcggccctagaagggggatcttgggtgaaggtcagggcttgggcgctagctctccgaggcctgttctgaatcggtgaggttyctctctttcgattcttagggtcgcgtcccgctgaaggtcagaaaactgctgtcagctcttgttgaagctagtcagtggagtctgacattgtgtgaaggtc

SEQ ID NO: 307382 - DNA, 201 bp, Homo sapiens
gagaaaccttgcacaatacccaggctttattgggcagagggccctgcagccttccacagtgcattgtgtccctgggtactcgagactggagaatggcgatracttttacgaagtatactgcctgcaaacacatttttaccaaagcacatcctgcacagccctaaatccgttaaaccttaagtcaacacagcacatgtttct

SEQ ID NO: 307383 - DNA, 201 bp, Homo sapiens
gggatagcctttgaaggactggttttgtccttttccccttcactttgaaagtatcttaaagatatgactgccctctggtggctaaaattatatatgtcaayggccccctgcccttcaaacatgatcctaacaagtgattgaatgtcctaggaaggagtgagctgcagggttaggttatggggtttgtttgggattggggtg

SEQ ID NO: 307384 - DNA, 201 bp, Homo sapiens
ggtctcccaaagtgctgggattccgggcgtgagtggcacccaaccctctgatctatttcatcaaggcttctgtcagatttcatgtatcatcctcccctcargggaccagagcctcatgctaaatgagtgcaatccccaggcctaaagtaggagagtggtttgagtgctaggcttgtccttttgggagcgaatcttaccatg

SEQ ID NO: 307385 - DNA, 201 bp, Homo sapiens
acctggtggaggtggcgcacccctgtagtcccagctactcgggaggctgagaatcgcttgagactaggaggtggaggatgcagtgagccgtctcaaaaaamcaataataataaagtacagactgcattttaaaaatatgcgagtgtttactgtgtactaggagctgtataaaaggttttcacatatatcaaaagctacttt

SEQ ID NO: 307386 - DNA, 201 bp, Homo sapiens
atgttttaaatttatagatttgtctctgtattttattttacttggacagcctttttctttttcttttctttttttctttctttttttttttttttttttttagatggagtttcacttttattgcccaggctggaggacagtggtgcaatctggggctcactgcaacttctgcctcccgggttaaagcaattctcctgcctc

SEQ ID NO: 307387 - DNA, 201 bp, Homo sapiens
aatgttttaaatttatagatttgtctctgtattttattttacttggacagcctttttctttttcttttctttttttctttctttttttttttttttttttttagatggagtttcacttttattgcccaggctggaggacagtggtgcaatctggggctcactgcaacttctgcctcccgggttaaagcaattctcctgcct

SEQ ID NO: 307388 - DNA, 201 bp, Homo sapiens
aaatgttttaaatttatagatttgtctctgtattttattttacttggacagcctttttctttttcttttctttttttctttctttttttttttttttttttttagatggagtttcacttttattgcccaggctggaggacagtggtgcaatctggggctcactgcaacttctgcctcccgggttaaagcaattctcctgcc

SEQ ID NO: 307389 - DNA, 201 bp, Homo sapiens
agatgctctaacttttatttaatgttatttaaaataagggaagcaaaaaaggaaacattagaacaaaaaattttaaaaataccattatgaatatcaaataygcttttagatattcccttgtttttacatctcccctcttcccctgcaaaagcactcagactcctaagtgattctaagaaatatgtgaagggaagggaaaaa

SEQ ID NO: 307390 - DNA, 201 bp, Homo sapiens
tcatcatgttggtcaggctggtcttgaactcctgacctcaggtgatccacccgcctcggcctcccaaagcgctgggattacaggcgtgagccaccgtgccyggctgacctaaaccagttttatctaattagctgctaaaaacaacctgcagtgactctaaggatcgttttacctagttgccattacttgccaatcaaaact

SEQ ID NO: 307391 - DNA, 201 bp, Homo sapiens
cttgaactcctgacctcaggcgatctgcctgccttggcctcccaatgtgctaggattacatgcgtgagccaccatgcccggccttgttgtttttagaaacsatattttttcctgttagcttgtgaaagttgattgggtcattcttgtcatccccaactaaaacagtgtcaagaggtaaagggaaaaaaaagcactcagggc

SEQ ID NO: 307392 - DNA, 201 bp, Homo sapiens
gagcaccgaaggccggcatgatgcaggcggccgggtggggctgcagggtggtggtgcgccggctcgggcgctctctgcaggagggcgaggggctgtggcgratgccgccatcttgcacccgtggcttctccggctggacagagcaggcgacacaggtgcccttttgctcgtcacctgcgcagaggcagaatggtacagggc

SEQ ID NO: 307393 - DNA, 201 bp, Homo sapiens
gtgaaaaggacaatactgcttccccccccaccccccgactattttcttatgtagtattggtgtatggggaggagtgcccattcagcttcattgatgttcarttgtgtcttttgtgcagggtatgtccttgaacttggaacctgacaatgttggtgttgtcgtgtttggaaatgataaactaattaaggaaggagatatagt

SEQ ID NO: 307394 - DNA, 201 bp, Homo sapiens
agcacagggttggggctatggttacagactaacagcatctcaaggcagaagaatttttcttagtacagaacaaaatggagtttcttatgtcttcttctttmtgcatagacacagtaacagtctgatctctctttctttcccccacagggaagtccttttaagtttaggaagatttatatttactttctctttttaaaggaa

SEQ ID NO: 307395 - DNA, 201 bp, Homo sapiens
ctggagcccagcaagattacaaagtttgagaatgctttcttgtctcatgtcgtcagccagcaccaagccttgttgggcactatcaggtatgaatgcaattsttggcatctttttttaaagttatgtttaagatatgaagttaaaattattttcaaatctgtagttaggctagtcattaaaactttttccaggtcagaactt

SEQ ID NO: 307396 - DNA, 201 bp, Homo sapiens
aaatggagtctcgctctgttgcccaggctggagtgcagtggcacgatctcagctcactgcaacctccaccccccgggttccagtgattctcctgcctcagyctcctgagtaactgggattacaggcgcccaccaccatgcccagctaattttttttgtatttttagtagagatggggtttcaccatgttggccaggctggt

SEQ ID NO: 307397 - DNA, 201 bp, Homo sapiens
aatgttatttaaaataagggaagcaaaaaaggaaacattagaacaaaaaattttaaaaataccattatgaatatcaaatatgcttttagatattcccttgyttttacatctcccctcttcccctgcaaaagcactcagactcctaagtgattctaagaaatatgtgaagggaagggaaaaaagcctttagagagagagaaa

SEQ ID NO: 307398 - DNA, 201 bp, Homo sapiens
ggtgatcacccgcctagggcctcccaaagtgctgggattacaggcatgagccactgcgcctggcctgattaactcttaatggtaaatatttttagcacttrggtaatttttatagtagcctccaatttaaaaccacaatattgataaaattgtaaaatatattttctcagatgccatgaagtacaccattgtggtgtcggc

SEQ ID NO: 307399 - DNA, 201 bp, Homo sapiens
gggaacaatgtgatactaacccctttccaaatatacatgagaaccacccttcataaatctaatcctggaagaagaaaacactaaaaattaaccaataccayatttatccaaattaattatactcactggcaaagacatgaagtaactaaattcagtgctttgtatttattgccaatttttcatatagaattatgctgagaa

SEQ ID NO: 307400 - DNA, 201 bp, Homo sapiens
tttgccagtcatagaaacacaggctggtgatgtgtctgcttacattccaacaaatgtcatttccatcactgacggacaggtattattttaatgattaaaakaaatgttaaaaaagatttggataattctaaggcattggttgagactaatggtatattgactgatttgctaaatgcattttactttttattatggaaaatt

SEQ ID NO: 307401 - DNA, 201 bp, Homo sapiens
tgattaaaagaaatgttaaaaaagatttggataattctaaggcattggttgagactaatggtatattgactgatttgctaaatgcattttactttttattrtggaaaatttcaaatacatagaaaagttaggagaatggcatagtgaaaccccatgtatctgtcacccagttattgcatagagtagcatgtttcgttctag

SEQ ID NO: 307402 - DNA, 201 bp, Homo sapiens
tgctaaatgcattttactttttattatggaaaatttcaaatacatagaaaagttaggagaatggcatagtgaaaccccatgtatctgtcacccagttattrcatagagtagcatgtttcgttctagtttcatttttaaccactactgttctcccttctagataattttgaatcaaatagaaattatatcacttcatttgta

SEQ ID NO: 307403 - DNA, 201 bp, Homo sapiens
tctggggcaaaaaggaacagaaaaaggcctaaagtatcataagagggataccctagctatagcaagaatgcacaacaaaacataatgtgactttaagtatragaaaaatcacatacattttgaaaattctaaaacccatattatttgtttttaagaaaaggcaggaggctgggtgcggtggctcatgcctgtaatcctagc

SEQ ID NO: 307404 - DNA, 201 bp, Homo sapiens
tttactttttattatggaaaatttcaaatacatagaaaagttaggagaatggcatagtgaaaccccatgtatctgtcacccagttattgcatagagtagcrtgtttcgttctagtttcatttttaaccactactgttctcccttctagataattttgaatcaaatagaaattatatcacttcatttgtatgtatttcagta

SEQ ID NO: 307405 - DNA, 201 bp, Homo sapiens
acctcaggtgatccaccagtcttggtctcccaaagtgctgggattacaggtgtgagccactgggcccagcctggtcaatgttttttatatttacccacatacacatatttgccacattctttgcagtttattctccattgtgttccaggccttcaatctggaatcattttccttctgataatttttttttttttttagaat

SEQ ID NO: 307406 - DNA, 201 bp, Homo sapiens
atgtcatttccatcactgacggacaggtattattttaatgattaaaagaaatgttaaaaaagatttggataattctaaggcattggttgagactaatggtrtattgactgatttgctaaatgcattttactttttattatggaaaatttcaaatacatagaaaagttaggagaatggcatagtgaaaccccatgtatctgt

SEQ ID NO: 307407 - DNA, 201 bp, Homo sapiens
agtagaatttttttcattctttcccttactggcatggataataaagtctcgctctctttttttttatcacatcttgttattattttggcttctttttacamacggtgagcagccagacccttttgccagttacaatatcagggttgtgagatagatagatgattgatagatagatagatagatagatagatagatagatag

SEQ ID NO: 307408 - DNA, 201 bp, Homo sapiens
cttggctcactgcaacctcctcctcctgggctcaagtgatcctcccacctcagcctcccaagtcgctgaaactaaaggcaccagctgccacacacagctamtttttggtattttggtagaggcagggtttcctaatgtagttcaggctggtctcaaattcctgagctcaagcgatcctcctgcctcagcctcccaaagtgc

SEQ ID NO: 307409 - DNA, 201 bp, Homo sapiens
tttccatcactgacggacaggtattattttaatgattaaaagaaatgttaaaaaagatttggataattctaaggcattggttgagactaatggtatattgrctgatttgctaaatgcattttactttttattatggaaaatttcaaatacatagaaaagttaggagaatggcatagtgaaaccccatgtatctgtcaccca

SEQ ID NO: 307410 - DNA, 201 bp, Homo sapiens
ctatgtccccttcccttgactctgggtagactactatgactgccttgattgatatgtatggtggaagtaattctttgactctgggtggactactatgactkccttgattgatattccatggtggaagaaatcctttgtgacttccaaggttaggtcataaaaatgccatatactttgttgagacatttacccttaaaaacc

SEQ ID NO: 307411 - DNA, 201 bp, Homo sapiens
aaataaactgtgaattttgtttaaaaaataataataataataataatttaacatatctgaagccaatttgaaataggaggtcctaaatacctctgtactaratgtgacatgaagttcgagaccagcctggccaacatggtgaaaccccgtctctgctaaaaatacaaagaaattagctgggtgtggtggcaggtgcctgta

SEQ ID NO: 307412 - DNA, 201 bp, Homo sapiens
cctccaggttcaagcaattctcctgcctcagcctcccgagaagctggaactacaggcacccaccaccatgccctgctaatttttgtatttttagtagaggyggggtttcaccatattggccaggctggtctcgaactcctgaccttgtgatctgcctgccttggcctcccacagtgctgggattacaggtgtgagccacca

SEQ ID NO: 307413 - DNA, 201 bp, Homo sapiens
acctataatcccagcattttgggaggccaaggtgggcagatcacctgaggtcaggagttcgagaccagcctggccaacatggtgaaaccctgtctttactraaaatacaaaaattagccaggcatggtggcatgcgcccataatcctggctactcaggaggctgaggcaggagaatcacttgaacctgggaggcagaggtt

SEQ ID NO: 307414 - DNA, 201 bp, Homo sapiens
ggtcttggtctgtcacccaggcttgaatgcagtggtgtgatcactgcagcctcaagctccttggctgaagtgatcctcccacttcagcctcccaaatagcyagggctacagacacatgccactatgcctggctaatttttaaatcttttgtagatggccaggcacagtggcttacacctataatcccagcattttgggagg

SEQ ID NO: 307415 - DNA, 201 bp, Homo sapiens
ctcactccaaatggaaacaacacctgttagatgcttaaaataggaaagttatagtcttatttaattattattattataatttttttttgagatggagtctytctgtgttgcccaggctggagtgcagtggtacaatcatggcttacggtggcctcaaactcctcagctcaaccaatcttcccacttcagccttccaggtag

SEQ ID NO: 307416 - DNA, 201 bp, Homo sapiens
tgagttaccatgcccggcccaaactacatttcttattatcatttgagtgtaaatgataggggcttcacaaccaggaaaacttaagtatatttaatgtcttyctttcaggaattaaggcctgttagagtcccctcccccacttggctatatgaatatgtaatttggcagatttaaaagaaagttaatacgtttttattttgt

SEQ ID NO: 307417 - DNA, 201 bp, Homo sapiens
gaagtaactaaattcagtgctttgtatttattgccaatttttcatatagaattatgctgagaacaaaaagtctttaagaccttatagcagatatgattgcrgaaattaaaactgtcataagaattacctagctagcgaggtatcctttgtttcaagggccaccgcactgtcaaccaaagcattcagatacctggaaccagt

SEQ ID NO: 307418 - DNA, 201 bp, Homo sapiens
tcgattgaacccgggaggaggagtgtgcagtgagccgagattgtgccattgcactccagcctgggtgacagaaagagactccatctcaaaaaaaaaaaaaagaaaaaaaatctgttcattgaaagatgctattaaaagggcaaaaaggcaagccacagaataagagaagacatttgcaatattttagcaggtaaagagtta

SEQ ID NO: 307419 - DNA, 201 bp, Homo sapiens
gaacctcaagagtttgaggctacagtgagctataatcgtgccactgcattccagcagcctgcgtgacagtgcaagaccccgtcaaaggaaaggaaaaggasaaggagaagcagaaggagaaggagaaggagagagagaaagaaagagaaggagagaaggaaaggaaaggagaaggagaaggagagagagaaagaaagagaa

SEQ ID NO: 307420 - DNA, 201 bp, Homo sapiens
tcatgcctgtaatcttagcactttgggaggccaaggcaggcagatcacaaggtcaggagatcaagaccatcctggccaacatggtgaaactctgtctctamtaaatacacaaaaattagctgggcatggtggcacacacctgtagtcacagctacttgggaggttgaggcaggaggatcacctgaacctgggaggggaggc

SEQ ID NO: 307421 - DNA, 201 bp, Homo sapiens
cagacccttttgccagttacaatatcagggttgtgagatagatagatgattgatagatagatagatagatagatagatagatagatagatagatagatatrtagatagttttttttttcttggactattcttcataacaaaggggtgtgatataatattagcttcctataaaaggaatgtggccaggcacagtggctcatg

SEQ ID NO: 307422 - DNA, 201 bp, Homo sapiens
gccagacccttttgccagttacaatatcagggttgtgagatagatagatgattgatagatagatagatagatagatagatagatagatagatagatagatrtatagatagttttttttttcttggactattcttcataacaaaggggtgtgatataatattagcttcctataaaaggaatgtggccaggcacagtggctca

SEQ ID NO: 307423 - DNA, 201 bp, Homo sapiens
cacctcaaataataggcccgccttggcctcccaaagggctgggattacaggcatgagccaccatgccaggctgttcatatagtttcttctcctccaacagrcctgtccaggcttctttaaatggtggttttggaattccaaagagaagtaaggaagtaagagagagcaagccccaatgcatagtttatattcctttgcttt

SEQ ID NO: 307424 - DNA, 201 bp, Homo sapiens
tgtgtgtgtgtgtgtgtgtgtgtgtgtgtgtgtgtgtgtgacagggtctcactctgtcacccaggctggagtgcagtggcaccatcaccactcagtgcagyctctacctcctgggctcaagtgatcctcccacctcagcctcccaagtagctgagaatacaggtgtgtgccaccatacctagctaatttttgtattttttg

SEQ ID NO: 307425 - DNA, 201 bp, Homo sapiens
atggcttacggtggcctcaaactcctcagctcaaccaatcttcccacttcagccttccaggtagctgggaccacaggcgtgcaccaccatgcctggctaattttttttttttttttttttgagatagagtcttgctctgtcacccaggctggagtgcagtggcacgatctcggcccactgcaacctccgccccctgagttc

SEQ ID NO: 307426 - DNA, 201 bp, Homo sapiens
agcataggaagacactataagttggggaatttctttggagatgagtatttggacttttaaaataaaggttaaatatatatgtgtgtgagagtgtgtgtgtrtatgtgtgtgtgtgtgtgtgtgtgtatgtgtacacacacccccacgttcagcatatatgtttttcttttttcttttttttttgagatggagttttgctct

SEQ ID NO: 307427 - DNA, 201 bp, Homo sapiens
cataggaagacactataagttggggaatttctttggagatgagtatttggacttttaaaataaaggttaaatatatatgtgtgtgagagtgtgtgtgtatrtgtgtgtgtgtgtgtgtgtgtgtatgtgtacacacacccccacgttcagcatatatgtttttcttttttcttttttttttgagatggagttttgctcttg

SEQ ID NO: 307428 - DNA, 201 bp, Homo sapiens
cctgggagacggaggttgcagtgagccgagatcttggcactgcactccagcctggccaacagagtaagactttgtctcaaaaaaaaaaaaaaaaaaaaaaaggtggtttctgatgatactttatatgaaccctaatctgggtaatatttccaggggtgtgttactttgtgaaagtttatcaagccatacccttctggtttt

SEQ ID NO: 307429 - DNA, 201 bp, Homo sapiens
caaagcgctgggattacaggcgtgagccaccgtgcccggctgacctaaaccagttttatctaattagctgctaaaaacaacctgcagtgactctaaggatygttttacctagttgccattacttgccaatcaaaacttgccagctccccaaaaccttactagtgacaatgaactttcttaaagaacaatatacaacagttc

SEQ ID NO: 307430 - DNA, 201 bp, Homo sapiens
gtattctaaagtagggcactattgccattttgggtgagataactttttgctgtgaggggctaacctgtgtataccaaatactatttagcagcgccactgtyctctacccactagactgcagtacaactagcactaccctagctgtgacaaccaacaatgtctccagagattgtcgaatgtccccaagggagattaaatcat

SEQ ID NO: 307431 - DNA, 201 bp, Homo sapiens
tgtggtggcttacacttctaaccccagcactttgggaggccaaggtgggaggatcacttgagcccaggagtttgagaccagcttgggcaacatagcaagayccccatctctatttataaaaacaaggggaaaaaaatgtaaagggagaactagaatcccaaatacatatttatgaattgtcaacattagattccaagaaca

SEQ ID NO: 307432 - DNA, 201 bp, Homo sapiens
agtgctactaaggactgatgagacagagaagcatccatgcctctggctgaaagttgctcctacaattaccaaaaaaaggagttcagttaaaaaattatttsaaaagtgaccaccatcaaatatttttctttttcttcttttttttttgagaccgagtcttgctctgtcacccaggctggagtgcagtggcgcgatctcggc

SEQ ID NO: 307433 - DNA, 201 bp, Homo sapiens
attgtatgaagtaaaattgtatgaagtaaaagctgaaaaagtcaggccgggcgcagtggctcacgcctgtaatcccagcactttgggaggccgaggcgggmggatcacctgaggtcgggagttcgagaccagcctgaccaacatggagaaaccccgtctctactaaaaatacaaaattagctgggcatggtggctcatgcc

SEQ ID NO: 307434 - DNA, 201 bp, Homo sapiens
taaaatacacattatttgtaaaaaaaaaaggcaagaaattatatgattcatccctgcttccccagtgcttatacaactaacatacaactggtatttgttatctgctgaacttatttaattcaagtctagatttctgctgccatacagtagggatgctcttatacctaaaacactactctttgagcttatacataaattgcc

SEQ ID NO: 307435 - DNA, 201 bp, Homo sapiens
aaaatacacattatttgtaaaaaaaaaaggcaagaaattatatgattcatccctgcttccccagtgcttatacaactaacatacaactggtatttgttatctgctgaacttatttaattcaagtctagatttctgctgccatacagtagggatgctcttatacctaaaacactactctttgagcttatacataaattgcct

SEQ ID NO: 307436 - DNA, 201 bp, Homo sapiens
aatacacattatttgtaaaaaaaaaaggcaagaaattatatgattcatccctgcttccccagtgcttatacaactaacatacaactggtatttgttatctgctgaacttatttaattcaagtctagatttctgctgccatacagtagggatgctcttatacctaaaacactactctttgagcttatacataaattgccttt

SEQ ID NO: 307437 - DNA, 201 bp, Homo sapiens
atcgctttaccccgggaggcggaggttgtagggagccgagatcacgccactgcactccagcctgggtgacagaatgagactctgtctcaaaaacaaaaacwaaaacaaaatattagtagtcctagctaagatatggccaaaagtggtagtcatatgaactttataagactggttttgaatctcagctctgccatttagtag

SEQ ID NO: 307438 - DNA, 201 bp, Homo sapiens
ccgtgctttgtgaccatttgtgtatcttcgtaggagaaatgtctgtgtataccccttgcccattttaaaattgggttgtctttttattattgaggttttgkttttttttgtcgttattttttttttgggacagggtcttgctctgtcacccaggctggagtacaatggtacaatctcagctcactgcaacctccacctgct

SEQ ID NO: 307439 - DNA, 201 bp, Homo sapiens
atagcaattttaaaagtcttaatcagagagggttgtttgttagttggaaaagtactcaagaataaaccaggtgaaaaggacaatactgcttccccccccamcccccgactattttcttatgtagtattggtgtatggggaggagtgcccattcagcttcattgatgttcaattgtgtcttttgtgcagggtatgtccttga

SEQ ID NO: 307440 - DNA, 201 bp, Homo sapiens
gaccatttgtgtatcttcgtaggagaaatgtctgtgtataccccttgcccattttaaaattgggttgtctttttattattgaggttttggttttttttgtygttattttttttttgggacagggtcttgctctgtcacccaggctggagtacaatggtacaatctcagctcactgcaacctccacctgctgggctcaagtg

SEQ ID NO: 307441 - DNA, 201 bp, Homo sapiens
accatttgtgtatcttcgtaggagaaatgtctgtgtataccccttgcccattttaaaattgggttgtctttttattattgaggttttggttttttttgtcrttattttttttttgggacagggtcttgctctgtcacccaggctggagtacaatggtacaatctcagctcactgcaacctccacctgctgggctcaagtga

SEQ ID NO: 307442 - DNA, 201 bp, Homo sapiens
tacttagaggaacactaaacttgatagcagttggtcatttctgatcaactcttgctttctagctacttgagaaataacttctagatctgattttccttttytgaaataaggaagttacttttagttagaaggttctgcacatttcgttttttttttttttttttttttttgttttttttttttgagagttttgctcttgtt

SEQ ID NO: 307443 - DNA, 201 bp, Homo sapiens
agcctcccgaagtgctgagattataggtgtgagccacaatgcccagcctgtcttttcatattcttgatggtgtcctttgagaacaaaagttttaaattttsatgatgtctaatttatatactttttattttgtttgcttgtgcttttggcatcatatccaagaaaccaatgccaaatccaaggttacaagggtatatacct

SEQ ID NO: 307444 - DNA, 201 bp, Homo sapiens
tcagcctcccgaagtgctgagattataggtgtgagccacaatgcccagcctgtcttttcatattcttgatggtgtcctttgagaacaaaagttttaaattytgatgatgtctaatttatatactttttattttgtttgcttgtgcttttggcatcatatccaagaaaccaatgccaaatccaaggttacaagggtatatac

SEQ ID NO: 307445 - DNA, 201 bp, Homo sapiens
acgatattggctcactgcaacctctgcttcccgggctcaagcaatcctcccacctcagcctcccaagtagctgggactacaggcgtgcaccaccacccctrgctaattttttttttttttttttttgagatgcagtctcactctgtttcccaggctggagtgcagtggcacaatctcggctcactgcaacctctgcctccc

SEQ ID NO: 307446 - DNA, 201 bp, Homo sapiens
gctggagtgcagtggcacgatattggctcactgcaacctctgcttcccgggctcaagcaatcctcccacctcagcctcccaagtagctgggactacaggcrtgcaccaccacccctggctaattttttttttttttttttttgagatgcagtctcactctgtttcccaggctggagtgcagtggcacaatctcggctcact

SEQ ID NO: 307447 - DNA, 201 bp, Homo sapiens
ttccagcaacaacaacaacaacaaaaaagaggaatgcaaagaataagacaggaactgtaatagaaaaaagcaagcaacagaagctgcctgtgagaatgacmagatgttggctttatcaggaaaaacttcaaatatccataataagcatgttcacagaattaaaggaaaccaaattaaagaaggaacatgaggtaagatgac

SEQ ID NO: 307448 - DNA, 201 bp, Homo sapiens
caccatgcctggctaattttggtaattttttagagatgtagtttcgccatgttgcctaggctgacctcaaactcctgggctcaagcagtctgtctgcctcrgcctcccaaagtggtgggattacaggtgtgagccactgtgcccaggctttattattgagttgtaagagttctttacatgttgtagatacaagtcccatat

SEQ ID NO: 307449 - DNA, 201 bp, Homo sapiens
gttaagacatctaggagagccatccagaagataaaacaaatatctaactgacctcagaaactattcctctaagagagctagaatttgattggaattgctcrtagagcagtttatgcccagggcattgttgaaaacaacagctgtaaattagtggaattttacagtcaggtgtgctcagtgaaagagaggaagtcagcttga

SEQ ID NO: 307450 - DNA, 201 bp, Homo sapiens
acctctaaccatctgtttgttcttctgacgtaccaaagaccaccctgtttgtgtgtatgccctgaatggcaattattgcttcccaaatgttttaaatttakagatttgtctctgtattttattttacttggacagcctttttctttttcttttctttttttctttctttttttttttttttttttttagatggagtttcac

SEQ ID NO: 307451 - DNA, 201 bp, Homo sapiens
ttggctcactgcaacctctgcttcccgggctcaagcaatcctcccacctcagcctcccaagtagctgggactacaggcgtgcaccaccacccctggctaattttttttttttttttttttgagatgcagtctcactctgtttcccaggctggagtgcagtggcacaatctcggctcactgcaacctctgcctcccaggttt

SEQ ID NO: 307452 - DNA, 201 bp, Homo sapiens
cttagaaaggttcaagcctaagggcaatctcaaaaagagtagaagttgtggtcaaagaaattgggagcagattcaagatacaggctaaactgtagggcaaktagtttgtagttaagacatctaggagagccatccagaagataaaacaaatatctaactgacctcagaaactattcctctaagagagctagaatttgattg

SEQ ID NO: 307453 - DNA, 201 bp, Homo sapiens
tggctcactgcaacctctgcttcccgggctcaagcaatcctcccacctcagcctcccaagtagctgggactacaggcgtgcaccaccacccctggctaattttttttttttttttttttgagatgcagtctcactctgtttcccaggctggagtgcagtggcacaatctcggctcactgcaacctctgcctcccaggttta

SEQ ID NO: 307454 - DNA, 201 bp, Homo sapiens
gcaatctggggctcactgcaacttctgcctcccgggttaaagcaattctcctgcctcagcctccccagtagctgggattacaggtgcccgcccccatgcckggctaatttttgtatttttagtagagatggggttttgccatgttggccaagctggtctcgaactcctgacctcaggtgatccacccgcctcagcctccca

SEQ ID NO: 307455 - DNA, 201 bp, Homo sapiens
tttttctctattctttttaaatggcatcctctttgctgtagtctgaatgtgttcctcaaaattcatgtgttagaaacttaatccccaatgcaacagtgtcrgatggtagagccctatgggaagtgtttaggtcaccagggctccactgtcatgaacagattaatgccattataaaaaggcatgatggaggcagtttggtct

SEQ ID NO: 307456 - DNA, 201 bp, Homo sapiens
gctactcgggaggctgaggcaggtgaatggcgtgaacgcgggaggcggagcttgcagtgagcagagattgcgccactacactccagccccggcgacagagsgagactccgtttcaaaaaaaaaaaaaaaaaaagagatcctaaaagcttcctgggaagaaaaattacattacatgcaaaggatcaggaataggaatggtaa

SEQ ID NO: 307457 - DNA, 201 bp, Homo sapiens
attttggtatgggggagagtgtcggggggggaacagggagaggttctggaaccaatctcttccatatgcccagagaccatttctagagaccccattagctrggcatggtggcatgtgctggtagtcctagctacctgggaggctgaggcatgagaatcacttgaacctgggaggcggaggttgctgcactgtagcctgggt

SEQ ID NO: 307458 - DNA, 201 bp, Homo sapiens
gggaagtgtttaggtcaccagggctccactgtcatgaacagattaatgccattataaaaaggcatgatggaggcagtttggtctctcttgtttgccttccmcttgccatcatgtgaagacacattgtttccccctcttgaggatgtgccatcttggaagcagaggccagcctctcaccagacaccaaacctgctggtgcct

SEQ ID NO: 307459 - DNA, 201 bp, Homo sapiens
aagagacagcccagactcctaaacacagggtgatcagcactgttagtgacatgatctcacttccagatggctagttcccatctagcatgatacccaaattytcctatgatattggacacattatttttattttaactagcagagtatgacttcagtgttccctgccagattcgtgcaatcatcctggtgtcccatgtaatg

SEQ ID NO: 307460 - DNA, 201 bp, Homo sapiens
ctttaaaatacgactgtgggccaggtgcagtggctcatgcctgtaatcccagcactttgggaggcggaggtaggcagatcacttgaggtcaggtgttcaaracctgcctggcccacatgatgaaactctatctctactaaaaatacaaaaattacccaggcgttgtggcacgtgcttgtagtcccagctactcaggaggct

SEQ ID NO: 307461 - DNA, 201 bp, Homo sapiens
agtttacccctgaacctaaaataaaagtttaaaaaagtgaatagtcccctgtaactataccatggaaaatgatgtaagtctctccaaactcttttacatctgtgtgtgtgtgtgtgtgtgtgtgtgtgtgtagagcacatacacagagcaacaaaaatgcgttgtcctgtagatacaagtgatatttgttctatggcctgt

SEQ ID NO: 307462 - DNA, 201 bp, Homo sapiens
ttcatcttcaattataatcctcataatccccacctgtcaaggacgggaccaggtggagataactgaatcataggggtggtttcccccatgctgttctcatgagatctcactgcaccttgatggttttataagtgctcactctgtcctgccaccctgtaaagaagatgcctgcctctctcttttgctttccatcatgattgt

SEQ ID NO: 307463 - DNA, 201 bp, Homo sapiens
gtttacccctgaacctaaaataaaagtttaaaaaagtgaatagtcccctgtaactataccatggaaaatgatgtaagtctctccaaactcttttacatctgtgtgtgtgtgtgtgtgtgtgtgtgtgtgtagagcacatacacagagcaacaaaaatgcgttgtcctgtagatacaagtgatatttgttctatggcctgtt

SEQ ID NO: 307464 - DNA, 201 bp, Homo sapiens
tagaaaccaggtttcaccatgttgccccggctcctcttgaactcttgggctcaagcaatcctcccgcctcgggctcccaaaatgctgggattacaggcatragccaccatgcctagcttctccctgcctttctaaatacaagtagaaacatactatgttcccttttgtacctggcttttcccccaacttaatatgcacaga

SEQ ID NO: 307465 - DNA, 201 bp, Homo sapiens
gggaaataagagatgttgattagggaaaaacaatatctacttggagaatatattttaaaaataagtataagccctttatagttctgagaatgttttcacayacattatttctttcaagcttcaggcaaagcaggagacagataaagggaatgctgttcttcccattctcagaggggaccaaggtcaagagaggtcaatcca

SEQ ID NO: 307466 - DNA, 201 bp, Homo sapiens
tcatcttcaattataatcctcataatccccacctgtcaaggacgggaccaggtggagataactgaatcataggggtggtttcccccatgctgttctcatgagatctcactgcaccttgatggttttataagtgctcactctgtcctgccaccctgtaaagaagatgcctgcctctctcttttgctttccatcatgattgtc

SEQ ID NO: 307467 - DNA, 201 bp, Homo sapiens
ttcagaatgagaataagaaaaaatgggaagacagtttagatattctcagtgtttttatgagtgagaaatacctggtgatgacgttttcattgttactcttytttaaaaaatatttaaaattttattttttaaaaaatttatttctgtcactcaggctggagtgcaatagtatgatctcggctcactacaacctcggcttcc

SEQ ID NO: 307468 - DNA, 201 bp, Homo sapiens
ccccacaacttagtgccttaagacaacaatttatttgtttgtaattccgtgggtaggcagttggagctgggctcagctgggctggctcatctcttttccaygtggtattcttggctgagctcaatcacaggtctgagccatcagccagagtagctggaaaagatggagagactgaaaaggctgggacaagcagtacggcca

SEQ ID NO: 307469 - DNA, 201 bp, Homo sapiens
ttgatgtttattactcataacatgctgagaggtattttaagtaggcagggtatatccaggacactggattaaaaccatggggccaatccctggatttcctwctgtttcttagtttgaatgggaggactcctttctctctcacacctttctcctggtctaatgctccttttaaggaaggtggaaggaacaatggaagaatgc

SEQ ID NO: 307470 - DNA, 201 bp, Homo sapiens
atttagcttccctgttaaaagatctcccggccgagtgcagtggatcacgcctgtaatcccagcactttgggaggctgaggcaagcagatcacttgaggtcrggagtttgagaccagcctggccaacatggcgaaatcccgtttctaccaaaaatacaaaaaatagcccagcatggtggcacacgcctgtaatcccagctac

SEQ ID NO: 307471 - DNA, 201 bp, Homo sapiens
tattttccctcttttcatcatttagttaatttcaagcactcccagatcagatgtcctgacctgtctgaagatcaacaatgagccaggaggtgtgagctcasgcttctggcttcgccagtcctgacctgtggggacccattcttctcttgcttttccctcctgttcacagctcatcttgcattcctttctccagcttctcaa

SEQ ID NO: 307472 - DNA, 201 bp, Homo sapiens
taaacacagggtgatcagcactgttagtgacatgatctcacttccagatggctagttcccatctagcatgatacccaaattctcctatgatattggacacrttatttttattttaactagcagagtatgacttcagtgttccctgccagattcgtgcaatcatcctggtgtcccatgtaatgcagcaaaatggtgtcaagt

SEQ ID NO: 307473 - DNA, 201 bp, Homo sapiens
gggtttcaccatgttagctaggctggtctcaaactcctgacctcaggtgatctgcccacctcagcctcccaaagtgctgggattacaggcaggagccacckcgcccagcccgaaatagtatttcttgagcacctgttgggtatttattctgcatgatggagggagggggaatccacatcatatggtccataatctttggcc

SEQ ID NO: 307474 - DNA, 201 bp, Homo sapiens
aataatacattccaagtggatgttatcttatatgaaagttctttgatgatcttgattggtagatctttggaatttccttcagtgctcgagacttgttaatktgaattacttcaatgatggcaaatttgggttgaatttgggttttatcattttgccaaatgttacctaaaatgaatacctgtgaataaagaggtaaccaag

SEQ ID NO: 307475 - DNA, 201 bp, Homo sapiens
taggtgcacaccaccaagcccagctaatttttgtgtagaaatcaggtttcaccatgttgcccaggctcctcttgaacttttggcctcaagcaatcctcccrccttgggctctcaaaatgctgggattacaggcataagccaccatgcctagcatctccctgcctttctaaatacaagtaggaacatactatgtgttccctt

SEQ ID NO: 307476 - DNA, 201 bp, Homo sapiens
ttggttttaaaagaagttaagaactaaaatttaagacctggagagtctttcttctttcagaggattttgagacacagcccttgcttctagtgctaaggccrcttatattggacagttttacaactgaacaagttaaaaatgacagtaaggaacaaagatcaaggtactacttttatacagaaacactctgaagtgcaatgt

SEQ ID NO: 307477 - DNA, 201 bp, Homo sapiens
caccaagcccagctaatttttgtgtagaaatcaggtttcaccatgttgcccaggctcctcttgaacttttggcctcaagcaatcctcccgccttgggctcycaaaatgctgggattacaggcataagccaccatgcctagcatctccctgcctttctaaatacaagtaggaacatactatgtgttcccttttgtacctggc

SEQ ID NO: 307478 - DNA, 201 bp, Homo sapiens
tgatggcatgggaagtgatatgagatgtgttagtgttttgattattaacaatacgtatgttgaaaagtaacctaataaaaatggggtggttattcatttcaaaaaaaaaaaatgtacagaaatggaaaagtaaccatggtatttttggctccacagtgaacaacttttatatggtcctaataatgtaatcagcaaatattg

SEQ ID NO: 307479 - DNA, 201 bp, Homo sapiens
gttgccccttctgtcctcacttcaggactggggcacacgagagctgagcagtcacttccttccttgtgtgtgagactgacttctgtctataagcagggggwtggagttgaaatgcctgctcatcttttatgtgtttctctttaggtacaggaaagactttactggccaaagctgtggccactgaatgtaaaacaaccttct

SEQ ID NO: 307480 - DNA, 201 bp, Homo sapiens
aggatcacttgtgtccaggagtttgagactgggcaacatagtgagactccgtgtctacaaaaaatgaaaaaaaatagctgggcatggtgtgtgcctccttgggaggctgaggtgggaggattgcttgagcccgggaggttgaggctgcagtgagtggtgatcatgccactgccctccagcctgggctacagagcgagaccc

SEQ ID NO: 307481 - DNA, 201 bp, Homo sapiens
tcaggattagcatgaaactaatagctagttgtaattttactaatattccttgccacaccctctcccccattctctaccaacccttgccacccacattcccsagattgtttgaatttgaactaataggagagacttcctgaaggctacgcatgtcctgttcagcgttggtgtctcttaatgcgtttgcccctgaatattccc

SEQ ID NO: 307482 - DNA, 201 bp, Homo sapiens
gatctttctcttgacttcagggtcttagatgagggaatagacttatctgattcaagcagtctgtccttctaggggaaataactaaatcataccaagtgatstaaagacccagtcttaaaatcccaaaagaaattccttacagttagtggcagttctcatctattgcatcgtccggggcactaggctattctttactgctgg

SEQ ID NO: 307483 - DNA, 201 bp, Homo sapiens
taaaggaattatagttatgggcaaatgataattaaacatatagcaaatatatgggcaaatgctaattatatattatgcttataatatataataaataaattatatatatatatatatacacatatatatatagagagagacggtcttctctcttaggcaaaggtagttgagtattaaggggcatagatcctaaaaaaacat

SEQ ID NO: 307484 - DNA, 201 bp, Homo sapiens
aaaggaattatagttatgggcaaatgataattaaacatatagcaaatatatgggcaaatgctaattatatattatgcttataatatataataaataaattatatatatatatatatacacatatatatatagagagagacggtcttctctcttaggcaaaggtagttgagtattaaggggcatagatcctaaaaaaacata

SEQ ID NO: 307485 - DNA, 201 bp, Homo sapiens
attaaacatatagcaaatatatgggcaaatgctaattatatattatgcttataatatataataaataaattatatatatatatatatacacatatatatakagagagagacggtcttctctcttaggcaaaggtagttgagtattaaggggcatagatcctaaaaaaacatatacctagccaggcagggggcttgtgcctg

SEQ ID NO: 307486 - DNA, 201 bp, Homo sapiens
tcaggctaggcatagtggctcacacctgtaatcccaacactttggaggccaagaagggaatcaattgcttgaggccaggagtttgaaagcagcctgggcawcataaggagaccttgtctgaaagaaagaaagaaagagagagaagaggagggctactaaaaaagaaagttttctctttctactttcctggatctagattca

SEQ ID NO: 307487 - DNA, 201 bp, Homo sapiens
tttacaatatcacatttatagttgatgttatattttatattataaaatggtactgaatcttccaatgacattaagagcacttccatttatggtttaggtcscagtgtaagacaggtccttctttgaaatcctgttaaactatcacgctctgtagaatggcagatatgtaatcaatataagtgaatataaaatattacgtat

SEQ ID NO: 307488 - DNA, 201 bp, Homo sapiens
ttacgtattttctgaaaagtgattaacaaattatgcttaaattacattcccttagatgactgtttcaaaatatgatggcctatttggaagtcataatagartatgtttaaaggattgattttcctaaaataacctattatctattaccttgatatcattttcaagttgttgtaaatatgtaagcttatgtaaattcttgtt

SEQ ID NO: 307489 - DNA, 201 bp, Homo sapiens
gaccccatttctagagagcattagctggtatatgtgggtttcccaagatcgactgtgggacttgagtatgcacagattttggtatgggggagagtgtcggkgggggaacagggagaggttctggaaccaatctcttccatatgcccagagaccatttctagagaccccattagctaggcatggtggcatgtgctggtagtc

SEQ ID NO: 307490 - DNA, 201 bp, Homo sapiens
aacaccacttctctgtggcatcaggttatggctcagcagggctgactttaaatatgttacatatattatctctaaagattgtcactgaatatcctcagcargcaggaacacttctcagactgtaataagccttctgtttgtgcttccaaaagccagagtagtgttgtgctttttgttcgttcgtttttaagatcagctttc

SEQ ID NO: 307491 - DNA, 201 bp, Homo sapiens
ttaactttggattgatacaaggagaaactgtcagttgggaaattaaacattaccttgtggaactcaactctagaagaggtcaagaaatactgctgttatcyatggatgcttttaatacctaggtaaatgaatcttccttgtgtgccgagatttcactaagaaaggacggtaataagaatgtgagtggctggtgggcctgca

SEQ ID NO: 307492 - DNA, 201 bp, Homo sapiens
atagaagcaggcaactgcacaggcacctagatgggaatgcaccagcccaccctcatagtcactctacaaagaccaggtctccctatgcacttgttgttacrtgtgctttgtcgagctctgtccccagtttcccacaaccttcatcgagctaatgtgaagactcttcatctgctatccttgtgtgtgctccaggttctgccc

SEQ ID NO: 307493 - DNA, 201 bp, Homo sapiens
caggagaaaattgttggttttaaaagaagttaagaactaaaatttaagacctggagagtctttcttctttcagaggattttgagacacagcccttgcttcyagtgctaaggccgcttatattggacagttttacaactgaacaagttaaaaatgacagtaaggaacaaagatcaaggtactacttttatacagaaacactc

SEQ ID NO: 307494 - DNA, 201 bp, Homo sapiens
acacagggcttctgatactgggtcctgcctataacaacgtaatggccaggagcattctgcccactgaccaatggctggttttttggctgtttcaggagackgagggctactcaggctcagatattaagctcgtctgcagggaagcagccatgcggcccgtgaggaagatctttgatgcacttgaaaatcaccagtcaggta

SEQ ID NO: 307495 - DNA, 201 bp, Homo sapiens
catgtgcatgtcgcgttcacagaattgctatccagcatcggactttgcttgatggagtaggcaggtacatccagcaactctccatggctgctcacagccgrtgtgtccttgtctctctttcttcaggaggtagttgataacactcgcctggaaaatgccaacttcggcctacatatatcaagaatccgtaaagacagtgga

SEQ ID NO: 307496 - DNA, 201 bp, Homo sapiens
aggtgggaggattgtttgagcccaggagttccaggctgcagtgagccaagattgtgccactccagcttaggtgacagaacaaggccctgtctctaaaaagaaaaaaaaaaaggttaaaaaaaagtttgtaaaaacagaggaaatgttagtcattttctctgaggggcagaattttcttttgatttaccagtattttctagt

SEQ ID NO: 307497 - DNA, 201 bp, Homo sapiens
ttgagcccaggagttccaggctgcagtgagccaagattgtgccactccagcttaggtgacagaacaaggccctgtctctaaaaagaaaaaaaaaaaggttaaaaaaaagtttgtaaaaacagaggaaatgttagtcattttctctgaggggcagaattttcttttgatttaccagtattttctagttttttcttaagtgaa

SEQ ID NO: 307498 - DNA, 201 bp, Homo sapiens
aggggcttggaagagattgtctctagtgttcccatcagcttaaaaattctgtaataacaatgacaaacattggcatgatcatcctgcatcgttctcatcatttttttttttttttttaagagacagggtcttgctctgtcacccaggctggagtataatggtgcaatcatggctcactgcagcctcaaactcctgggctca

SEQ ID NO: 307499 - DNA, 201 bp, Homo sapiens
tgttttgcattgctataaaggaatacctgaggctgagtagtttataaagaaaagagatttatttgactcatagttctatatggcactgggatctgctcagyttctggtgaggcctcaggaagcttttactcatggcggaaggcaaggggacctggcatgtcacatggcaagagagggaacaagaagggagggagatgacct

SEQ ID NO: 307500 - DNA, 201 bp, Homo sapiens
gcttgtcagccctaggctggagcactctgctttctataccaggcctgatagaagcaggcaactgcacaggcacctagatgggaatgcaccagcccaccctcatagtcactctacaaagaccaggtctccctatgcacttgttgttacgtgtgctttgtcgagctctgtccccagtttcccacaaccttcatcgagctaatg

SEQ ID NO: 307501 - DNA, 201 bp, Homo sapiens
cacttcaggactggggcacacgagagctgagcagtcacttccttccttgtgtgtgagactgacttctgtctataagcagggggatggagttgaaatgcctrctcatcttttatgtgtttctctttaggtacaggaaagactttactggccaaagctgtggccactgaatgtaaaacaaccttctttaacatttctgcatcc

SEQ ID NO: 307502 - DNA, 201 bp, Homo sapiens
cttggcttgactttgtgaacagcacacttggctgaaaaatagccctatgaaaaaggtcacatttatttattttttgaggacctacgcttttaaaattgctrtgtgatctaattgaattttaggttttcttccagtacactggactaaaaccatggacatatccctagatttcctaatgtttcttaacttgagtgggaggac

SEQ ID NO: 307503 - DNA, 201 bp, Homo sapiens
agaaatattgtaacatagattcagaatgagaataagaaaaaatgggaagacagtttagatattctcagtgtttttatgagtgagaaatacctggtgatgaygttttcattgttactcttttttaaaaaatatttaaaattttattttttaaaaaatttatttctgtcactcaggctggagtgcaatagtatgatctcggct

SEQ ID NO: 307504 - DNA, 201 bp, Homo sapiens
cagttgcccaatcatggctcactgcagcctcaaattcctgggttcaagtgatcctctcacttcaacctcctgtgtagctgaaactacaggtgtatgccacsacactgtttgtttatttatttatttccttattcatttatttttggtaaagatggaatctcgctatgtagacatagctggccttgaacttgtggtctcatg

SEQ ID NO: 307505 - DNA, 201 bp, Homo sapiens
tgtgcacaagataactttcttaatcagtttttctttcctcaaaataaacgtattgcatttacttggacaacctaaacccaactctcttcttcctcgcaatrcccattctataactggcagggtgaggaaatttaaaaacttttgggtttggccacctacctcattaaaaacacacaagcaattacagtaagggctgctgct

SEQ ID NO: 307506 - DNA, 201 bp, Homo sapiens
tagatcaacatttttccaaaagcagtctgccacaggtcagcaagcattgtgcaaaaaatgagatctagtggcctggtatgttcaggagataccaagttaargacagttcaactggtttcccccagcagggttgctcaatgtctttaaaatacgactgtgggccaggtgcagtggctcatgcctgtaatcccagcactttgg

SEQ ID NO: 307507 - DNA, 201 bp, Homo sapiens
cctctcctgctggtgtaacattgctatagcaatgcatgcatgtgattggagggataagcagatgtaacccttgttctttccatagtaaccacatgcatttytgggctccaggaagaagctgtcctccctgcctgcaatcaaggtcttgattgtgccttcactagatcaacatttttccaaaagcagtctgccacaggtcag

SEQ ID NO: 307508 - DNA, 201 bp, Homo sapiens
aagtctgtaagtgggggaagtaattataaaccaagggagatcattgtcctgtttacaagccacttgttaagccacagactttaacatttcatgtagggacygggaaaccaagaggaacatcaatttaaaatagccagggccagatctcagagctagaaaaggtcaaagaggtattttatctgagctcccttccaatgcagc

SEQ ID NO: 307509 - DNA, 201 bp, Homo sapiens
attgaccacttcaggcaaagctgtgttgtttggctgcagccctggaagattaatgtggaggctttactgttcaggtccccaatccttgctgtctgtaccaygaaagatctgccttaacagaggaaacacaggccagggtgaccattaacaatatttaaaatggacatttcaagattaaagccaaattacatagtttgttta

SEQ ID NO: 307510 - DNA, 201 bp, Homo sapiens
atggtaattcttcttaatcgactcggctcgaggagcttgtggaatccctttccagaagctttaccatcacagctctgtgactgtctcccagcaatactgaytgcagtcatgtgacctggcccagcccaggacttctctcattacagctgccccagatttgggccaatgtccgtctactctcctggttttactgtaaataag

SEQ ID NO: 307511 - DNA, 201 bp, Homo sapiens
aatacttggcctcgggctacctttgctttgtgctattctgcaggaagagttttatcgctttgacaaaagtgttattcttttatttatagtttccacaaagytagtcagactctgggtaataaatgataactgcttgtgcatagaaatcatgaggagcgtttgcagccagcttcggaaggcttttggattctatttttctgg

SEQ ID NO: 307512 - DNA, 201 bp, Homo sapiens
aatgataactgcttgtgcatagaaatcatgaggagcgtttgcagccagcttcggaaggcttttggattctatttttctggaaccttctcagcattcttccytggcaaatgctctgtgagtgaatggtgtcagagtgctttgttccccttagggaaggagcaccgtggcacatttgacagtgtgggggctcctcagctcctc

SEQ ID NO: 307513 - DNA, 201 bp, Homo sapiens
ggaaggcttttggattctatttttctggaaccttctcagcattcttccttggcaaatgctctgtgagtgaatggtgtcagagtgctttgttccccttaggsaaggagcaccgtggcacatttgacagtgtgggggctcctcagctcctctctgagtagatgtttgtatgtggcaagtgtaaaagttgaatagcaaatggtt

SEQ ID NO: 307514 - DNA, 201 bp, Homo sapiens
cagccaagtgctcaaacctctggagtgctgacttagttctggccagctcttagaaaaactgaactctgtgtgtgtgaatttggaggggtgactggagcatmtccctgaaaatcaagagcagtgacctcactggcctgaactgactccctttaagggcctcacttacatggtaattgctgaagatgatgccatgggaatcaa

SEQ ID NO: 307515 - DNA, 201 bp, Homo sapiens
tgaaataatctgtacaacaaacccccatgacaaaagtttacccctgaacctaaaataaaagtttaaaaaagtgaatagtcccctgtaactataccatggamaatgatgtaagtctctccaaactcttttacatctgtgtgtgtgtgtgtgtgtgtgtgtgtgtgtagagcacatacacagagcaacaaaaatgcgttgtcc

SEQ ID NO: 307516 - DNA, 201 bp, Homo sapiens
tttccttttaaacatgaaaacaaaaaacattatttttgtcaaacaggaaagttaagatgtgatttttgaaggttggctgtgaggtaaatggagaagagcgycagaaaatgggttcttctttggaatctcctttctgaatgaatgggctggcatgaactgccccatctctaaggaactcagtttccacatttgtaaattgag

SEQ ID NO: 307517 - DNA, 201 bp, Homo sapiens
catggatgctggttcttctattaatagtcctccatatccatcttctcgggcttgggtaattttagtagcctctgcgtctctctcttgtgtcttgttattayggcccagtattgcacactactcctaaagtcccgtcctgtcgctctgttggttaagaatctctagcggctcctcctgccaaccacatcgaattcaaacctc

SEQ ID NO: 307518 - DNA, 201 bp, Homo sapiens
taatcatagcgtcccctttaagtctcatgatgaaaggagagccttggtgcagtgctagcacatagtaaacactccataaatgttaactattattattattatttttttttggtgcatccttgctttttccttcctacctctaggggggacagggtgatattggaaggatcatgggttgggagagagattaagtgggtttaa

SEQ ID NO: 307519 - DNA, 201 bp, Homo sapiens
gagatgagatttatctgttgcccaggctggtctgggactcctgggctcaagagatccacccaccttggcttccagagtgctgagattactggcatgaaccmccatgcctggcctaaggaactcttttttttttctcagaccatctttagagacgagttttccacagataactttgagaatgctgtcttcctagataagttg

SEQ ID NO: 307520 - DNA, 201 bp, Homo sapiens
gtagctgggactacaggcgcctgccaccacgcccggctaatttttttgtatttttaatagagatggggtttcaccatgctggccagactagtcttgaactcctgacctcaagtgatccgcctgcctcagcctcttttttttttcttttcctccacttgtcattgacttattgcctgccagagggattgtcttgcaggatgt

SEQ ID NO: 307521 - DNA, 201 bp, Homo sapiens
cccaagatcaatcagcagaggccccggtccaaaaccacagcggggaagacaggggacaccaaatcgctcaataaggagcatcctaatcaggtcaggatggyttggcttgactttgtgaacagcacacttggctgaaaaatagccctatgaaaaaggtcacatttatttattttttgaggacctacgcttttaaaattgctg

SEQ ID NO: 307522 - DNA, 201 bp, Homo sapiens
attaatgttaataacatgttttatttaacacagtattttcaaaacattattttaatatcagtataaaaattagtgtgatattgtagtttcttttttcatamtaaattggaaaaatccagcatatattttacacttacatcacacctcagtttggaataactgggtttcaatacccaaaagccacatgtggctggtgctacc

SEQ ID NO: 307523 - DNA, 201 bp, Homo sapiens
tatcctcaggcctcatgcttctgaactcactgctcagaatgagaagtggggtctctgtggaggccacatctgtcagctgattttcaaaagtactgcccagmcacatgggttcaatgaatcatcccctaaactcattgtttccattattttcactaaagattaaaatataacatcttatttccattgcccaagttgatgcgg

SEQ ID NO: 307524 - DNA, 201 bp, Homo sapiens
cactcctgagaggcagtcctcgacggtgtgtgaagcctgggaaaacaccacttctctgtggcatcaggttatggctcagcagggctgactttaaatatgtyacatatattatctctaaagattgtcactgaatatcctcagcaggcaggaacacttctcagactgtaataagccttctgtttgtgcttccaaaagccagag

SEQ ID NO: 307525 - DNA, 201 bp, Homo sapiens
gattataaagtttttgtgaaataacagagtgcagcataaatgcttattattacagtcattctaagtttttactctgggagcatctgaggactttaagtctrtaagcttgaacacttgcttgcttttcccccacccaggtgttatttgagcttgcccgctaccacgccccatccacgatcttcctggacgagctggagtcgg

SEQ ID NO: 307526 - DNA, 201 bp, Homo sapiens
ttctcatgacgctctccccagtgagaccaacactcacagatgtgtcaccatgtggacattggtggtgttatcgacatgtgtggtcttgctggccaaatagytgtgcatttatattagacatgaacatttattatccccataaagaaaggaagttgaaatagcagctctctgagatcactctgaacatggggagacttgctt

SEQ ID NO: 307527 - DNA, 201 bp, Homo sapiens
cattatattcatttacttgctttctatcatactgtatgtgaaaataacagcaaattgctcattttctctaactctagtatgaacggctccattggccatcrgaacagaaactgttctacagtcacagggacattgctgtgaatgctgctcttgtcatgagggcgaaggctctgacacttaggagaatcacgtcttgtctct

SEQ ID NO: 307528 - DNA, 201 bp, Homo sapiens
gtgacacattgctgatgtccttctatgagaaaatagtgtattttttagcaagaatgtgggaacagatctttctcttgacttcagggtcttagatgagggartagacttatctgattcaagcagtctgtccttctaggggaaataactaaatcataccaagtgatgtaaagacccagtcttaaaatcccaaaagaaattcct

SEQ ID NO: 307529 - DNA, 201 bp, Homo sapiens
gagtaggcaggtacatccagcaactctccatggctgctcacagccgatgtgtccttgtctctctttcttcaggaggtagttgataacactcgcctggaaartgccaacttcggcctacatatatcaagaatccgtaaagacagtggagaggaaaatgcccacccacgaagagtaagtgaaactcatgaacctaacactgaa

SEQ ID NO: 307530 - DNA, 201 bp, Homo sapiens
gtagacacagttgggctgcatttaatctaccagtgggactgtggaccctttagttattttctccagctcactgcctgcctttggttttctttcaaataccrtcattatattcatttacttgctttctatcatactgtatgtgaaaataacagcaaattgctcattttctctaactctagtatgaacggctccattggccat

SEQ ID NO: 307531 - DNA, 201 bp, Homo sapiens
ctgagaaaaggaattaaaaaaattaatgtcaaataatggaaaggtataatcacaatatccgattggtcaaaaggattctctccccctcaaggaggtcctayggttctggccgctgcagcctgactcatgtggaagagaggtgaaggtggggcaggatgagtcccatgggaggctagttgactctgccatatctccaaactc

SEQ ID NO: 307532 - DNA, 201 bp, Homo sapiens
gatgtgttggtaccaaacctcatccttgttccttgtttccttagtatccacagctatttacaggaattctttctccctggaaaggactactgctgtacggycctccaggtaaacacagcttcctattttgatgtcagtgttaagtgtgtgtgcagaggatgagttgccccttctgtcctcacttcaggactggggcacacg

SEQ ID NO: 307533 - DNA, 201 bp, Homo sapiens
gtccagaaccttcttagttaggacaaaacatcccaggtttcaaaggaaagaggaccaatggaaactgagaaaaggaattaaaaaaattaatgtcaaataayggaaaggtataatcacaatatccgattggtcaaaaggattctctccccctcaaggaggtcctatggttctggccgctgcagcctgactcatgtggaagag

SEQ ID NO: 307534 - DNA, 201 bp, Homo sapiens
tgggggccaagaagggcagcaaggagagaatccagcaggtgagtgaagtcaatggctcctgactcaggaggctcatgtccagaaccttcttagttaggacwaaacatcccaggtttcaaaggaaagaggaccaatggaaactgagaaaaggaattaaaaaaattaatgtcaaataatggaaaggtataatcacaatatccg

SEQ ID NO: 307535 - DNA, 201 bp, Homo sapiens
tgccgccatggctactttttgtttcgttgttttgttttgttttttggtagagatgagatttatctgttgcccaggctggtctgggactcctgggctcaagmgatccacccaccttggcttccagagtgctgagattactggcatgaacccccatgcctggcctaaggaactcttttttttttctcagaccatctttagaga

SEQ ID NO: 307536 - DNA, 201 bp, Homo sapiens
ggctcctccaaatcgcacatggtcagccctcaccccagaccttcatgctggacttcctgggggccaagaagggcagcaaggagagaatccagcaggtgagwgaagtcaatggctcctgactcaggaggctcatgtccagaaccttcttagttaggacaaaacatcccaggtttcaaaggaaagaggaccaatggaaactga

SEQ ID NO: 307537 - DNA, 201 bp, Homo sapiens
agtttgctgcttacaaagcatgcatttttcctttctgccacgagatggctctttgtatcgtgaatcaatgaaagttctactagaactgatcattttccgaracctgctgggaaagggacaaatgagtggactgtcaaaacgaaaatgaactataggtacttttaaggacatatgagtgtcaataaaagagatctgccttaa

SEQ ID NO: 307538 - DNA, 201 bp, Homo sapiens
cgtgaatcaatgaaagttctactagaactgatcattttccgagacctgctgggaaagggacaaatgagtggactgtcaaaacgaaaatgaactataggtayttttaaggacatatgagtgtcaataaaagagatctgccttaacgaagttctacaaattcagcagaggatagattactgtggattaaaataaacaatcagg

SEQ ID NO: 307539 - DNA, 201 bp, Homo sapiens
gcattctcggctaactgcaacctctgtcaagtgattctcctgcctcagcttcctgagtagctgggactacaggtgccccccaccatgcctggctttttgtwtttttagtagagacagggtttcaccatattggccaggctggtctcaaactcctgaccttgtgatctgcctaccttggcctcccaaagggctgggattaca

SEQ ID NO: 307540 - DNA, 201 bp, Homo sapiens
gtgttataagaattagaagtaggctgggtatgctggttcgcacctgtaatcccagccctttgggaggctaaggtgggagtataactcgagctcaggagttrggagaccagcctgggcaacataaagagaccccacttctgcaaaaaaaatttttttaattagccaaaagtagtggcgcacatatgtagtcccagctctttg

SEQ ID NO: 307541 - DNA, 201 bp, Homo sapiens
cactgcgacctctaaccacatccccctgctcccagcctccccagtagctgagactgctggtgtgtaccatcatgcctggctaatttttgtattttttgtasagacagggtctcaccatgttttccatgctggtctcaaattcctgagctcaaatgatcagcccacctcagcctcccaaagttctggcattacaggtgtgag

SEQ ID NO: 307542 - DNA, 201 bp, Homo sapiens
tagtcccagctactcgggaggctgaggcaggtgaatggcgtgaacgcgggaggcggagcttgcagtgagcagagattgcgccactacactccagccccggsgacagagcgagactccgtttcaaaaaaaaaaaaaaaaaaagagatcctaaaagcttcctgggaagaaaaattacattacatgcaaaggatcaggaatagg

SEQ ID NO: 307543 - DNA, 201 bp, Homo sapiens
tccttgtgattttctgagcatactttagccttctagcacactcctctcttcccctaaaattagccaagagtgggtttctgttgcttgcatcccaactaccrtcattgggacagagcccctgtgcttgagacaagcagaagatagacttctttcacctggggcctggcttcgtccaacagcagagcccaacctccagggcag

SEQ ID NO: 307544 - DNA, 201 bp, Homo sapiens
ggcccttccatgatccgcaacaaactgttctggtgtgtaggtggaattcctatttttaatagccaagttgttgagaaattgtagggcttctacttcctttygaacggaagggctccggagatatttatatctttgcttctatagaatctaggaggttgtctttacccagggagggtcagcatgtggagagggtcacctggg

SEQ ID NO: 307545 - DNA, 201 bp, Homo sapiens
ggggactctcctgtaacccaagggggtagcggaaggatggagcttcaggccttgagggccaggaaatgaatgtggaagactgaatcctcaggggaccccarctctgggccgggtctggggctctgttttgaggacggggagtgggaggaggtggcagcaggagccggcgtctgaggcatctcctcacactcttccaaggtc

SEQ ID NO: 307546 - DNA, 201 bp, Homo sapiens
gccagagtgcagtggtgtgatcttggctcattgcagctttggcctcctgggctcaagcagttctcccacctcagcctcccaagtagctgggattacaggckcccgcaagcatgtgtggttaatttttgcatttttagtagatatgcagtttcaccatgttggccaggctggtctcgaactcttcacctcaggtgatttgcc

SEQ ID NO: 307547 - DNA, 201 bp, Homo sapiens
tggccctaatttttgttcacctctggtactgagaggtaaggtgggggtgggtgacattttcaaaggggctgtatccctaaatgagataagaccactccctygtgggtggagacacccttagcccaaaggcttgagtagttgaagagctgtaaacagtggctaccaggtgccccaggtacccagacgatgagcaaagcccca

SEQ ID NO: 307548 - DNA, 201 bp, Homo sapiens
ctcctgggctcaagcagttctcccacctcagcctcccaagtagctgggattacaggcgcccgcaagcatgtgtggttaatttttgcatttttagtagataygcagtttcaccatgttggccaggctggtctcgaactcttcacctcaggtgatttgcctgcctcggcctcccaaagtgctgggattataggcaagagccac

SEQ ID NO: 307549 - DNA, 201 bp, Homo sapiens
ttttacatttaggtctctgctgccttgttagttaatttttgtgtatggtatgaggttggagattggggtttatttttctgttctctttgagccggtttctsggaggagagagaggacccaccagctcctctgctgtgtcaagctattatacaaggccccatataggccgaggtttctgtttttttcttctctaggaaaaaa

SEQ ID NO: 307550 - DNA, 201 bp, Homo sapiens
gtttatttttctgttctctttgagccggtttctgggaggagagagaggacccaccagctcctctgctgtgtcaagctattatacaaggccccatataggcygaggtttctgtttttttcttctctaggaaaaaaagaggaaaagccatcagcaataccaagggaaacagtaagctaagattggcatagttctcagcaagcc

SEQ ID NO: 307551 - DNA, 201 bp, Homo sapiens
caagcgggagactggcatgggggccggggccgtgctctgaggaaggcctggctgccccagctggggaacagctgggtgcttccgaggagtggccttctctsccgggagctcggggttggtcagctggtcagctatgaccaggcagaagctgacactgacctgacccaacctgggcaggcctaggagagctcgtccccagac

SEQ ID NO: 307552 - DNA, 201 bp, Homo sapiens
ggggttggtcagctggtcagctatgaccaggcagaagctgacactgacctgacccaacctgggcaggcctaggagagctcgtccccagaccttcaccttgsagaaccaagtagtagtgagaacagtgccgcggggctggcccagatcatcggtcctttggacgtcttcttccataaatgagtcatttatatcacactctct

SEQ ID NO: 307553 - DNA, 201 bp, Homo sapiens
gtagccaactctcctgggagtggggggaccaacttggctcaggttggctgggatggtcctgtttttagcattgaaaaccacaaaagcaatgaaagtctcaygttgtgggaggccctgagtcctgggcaaactgggactgttggtccaaaccgtcccttccagaagaggcccacatggcaggccctttgaggcctggggcag

SEQ ID NO: 307554 - DNA, 201 bp, Homo sapiens
tatttttctcttgatttgctgaaattccttctccagtagtttaatcaaaagggactaaatgaaaaaaaaatattcagttattgcaagttcaaaaaggtttytagtctttgtgtttgattgacagctttccagaatataaaattcttaggccacactttctttccttgagaacttcacagatgtcacttctgtctctagagt

SEQ ID NO: 307555 - DNA, 201 bp, Homo sapiens
gctgcagtgtagtggcgcgatctcagctcaccgcaacctccacctcctgggttcagctattctcatgcctcagcctcccaagtagctgggattacagccayatgccaccacgcccggctaatttttgtatttttagtagagacagggtttcaccacgttggccaggctggtctcaaactcccgacctagggcatccacccg

SEQ ID NO: 307556 - DNA, 201 bp, Homo sapiens; identical to SEQ ID NO: 64263

SEQ ID NO: 307557 - DNA, 201 bp, Homo sapiens
ctggctaatttttgtatttttagtagagacagagtttcaccatgtcggccagactggtctcgaactcctgacctcaggtaatccacctgtctcggcctcccaaagtgctggaattacaggcatgagccactgtgcctggccacccctcctgtttgtttctaacacaatcatctacccccagcctctggcaaccaccaatct

SEQ ID NO: 307558 - DNA, 201 bp, Homo sapiens
gacataaattaattaggaaatcgagcgctcacaaatcctattttatatgtatctatttcctgatatgtaagttgagcatatgacataaaatatcaaagaaytgtgacaaattggatgaaatatatatagaaataaaccttataatggtacaaagagtgcgatgctgccagtatccgttgacagttgctgctgttggttttt

SEQ ID NO: 307559 - DNA, 201 bp, Homo sapiens
cctttcttttatatttttagtctagttactttcatagaaattaccttgttattgacagatttttgtcattttccccaagacatggtgtgccctttcagttygtagatttatcttcttttacttcaagaaaattttcttgaatgatatctttaaatatttatgttcccctatttgagttttctattctgggatatatgatgg

SEQ ID NO: 307560 - DNA, 201 bp, Homo sapiens
ggattacaggcatgagccactgcgctcaagctttttttttttttttctttagacggagtctcgctctgtcacccaggctggagtgcagtggcgcgatctcrgctcactgcaagctccgcctcccaggttcacgccattctcctgcctcagcctcctgagcagctgggactacaggtgcccaccaacacgcccggctaattt

SEQ ID NO: 307561 - DNA, 201 bp, Homo sapiens
aatgctacaaggatccctcctgtttgcttctttccttttccttccttccttccttccttccttccttccttccttccttcctctctccctccctccctccctctctctctctttctttctttctagctgagattacaggcatgcgccatcacgtctgtttaatttttgtatttttactggagatgaggcttcactatgttg

SEQ ID NO: 307562 - DNA, 201 bp, Homo sapiens
gtcctcatctgtcactccttggtcacagccgccccctgactttcctccctgcctccttggcatggtgggaaacatgcgagttccatttctgaggctgcctygtgcctgatcttgggcaagttgcttgctagacctctcggcgtctccgttctcagcggtgcgggtaacctggccctgtgctactgtgtgtgggtttacagc

SEQ ID NO: 307563 - DNA, 201 bp, Homo sapiens
caatgctacaaggatccctcctgtttgcttctttccttttccttccttccttccttccttccttccttccttccttccttcctctctccctccctccctccctctctctctctttctttctttctagctgagattacaggcatgcgccatcacgtctgtttaatttttgtatttttactggagatgaggcttcactatgtt

SEQ ID NO: 307564 - DNA, 201 bp, Homo sapiens
gagaggtgccaagagtgcacgggatgcccgggtgcacagaggggaggagacagggcacagccgagctgccaggccaggcacaacttcttgatgaatagagwggtgtggagccgcccgtcgttcatgtcgattctctcagtcaatcaaaacgctgccacagcaggctttgggatgcggcgtctcgatgtgtgtgggcgtgtg

SEQ ID NO: 307565 - DNA, 201 bp, Homo sapiens
gagaaccaagtagtagtgagaacagtgccgcggggctggcccagatcatcggtcctttggacgtcttcttccataaatgagtcatttatatcacactctcytgtcaagaggtggaagtcagtttccaatggggaccaaattggccctaatttttgttcacctctggtactgagaggtaaggtgggggtgggtgacattttc

SEQ ID NO: 307566 - DNA, 201 bp, Homo sapiens
gaaccaagatcgcaccattgcactccagcctgggcgacagagcgagatttcgcttcaataaaataaaataaaataatagaataaaatagaataaaaaaaaatatggtactgatcatcacataaagttttgaggtctgcctttttcacttaacattaaatcattactatttttaagttagaacttttattttgagataatga

SEQ ID NO: 307567 - DNA, 201 bp, Homo sapiens
gtagagagtattccattgtttgactatactacagtttgttcattctacccctgattggcatttgtgcatttcatttttaaaattatgaataactctattakaggcaactaatggctcagttttgctccttgctctgcaaaccaaccctgcccataggaactgaacttgtaaaggggcaggtgacgtattttagtgagaacc

SEQ ID NO: 307568 - DNA, 201 bp, Homo sapiens
gaggaggtgacaccagcattttcccctgactggttctcgccctcagcctgggaatgtcgctgagtctttggttcttccagagacctgtcttttggctgccrgcctttgcatagtgtccactcctgtatctaattctcaggagactgaggtctggcctaggcgggtctctcctccgactcagttccatgcactgaatttgac

SEQ ID NO: 307569 - DNA, 201 bp, Homo sapiens
gaacccgggagttgaaggttgcggtgaaccaagatcgcaccattgcactccagcctgggcgacagagcgagatttcgcttcaataaaataaaataaaatawtagaataaaatagaataaaaaaaaatatggtactgatcatcacataaagttttgaggtctgcctttttcacttaacattaaatcattactatttttaagt

SEQ ID NO: 307570 - DNA, 201 bp, Homo sapiens
gcacatagttcgggtttcacctgagctgcacccctttccaggaagccttcctgattgtcctgtgctagcttttcatttcactgctccccagcattttgtaycaaatccaaatgccttctgagctgacagcatctcactccctgacaagatgtgggcccctggggagcggtgccaaagtctggttaatcccagggtccctgc

SEQ ID NO: 307571 - DNA, 201 bp, Homo sapiens
cctgagcccaggagctagaggctgcagtgagctatgattgcaccactgctttccagcctgggtgacagagtgagactcaaaaatggttaaaaaaaaaaaaagaaaaaatgttgatagctactataaagtttctcttatgcagtacctcctcattttacaggaaatttggagatagggaaaatagaaagaagaggaaaagat

SEQ ID NO: 307572 - DNA, 201 bp, Homo sapiens
gcgcctatggggtggagtgagagtgaggaagaaacattacccgaggggtcactctcttcagaagacctcaatgactgtagactactgaattatttccttaaaaaaaaaaaaaaaaggctaggtatggtggctcaggcctataatcccagcactttgggaggacaaaggaccacctgaagccaggagttccagactagcctg

SEQ ID NO: 307573 - DNA, 201 bp, Homo sapiens
cacacgaggaaaggcaaagagatcagagactggttcacccagagagaccgggatgctgccttccaaaatggaagagctgtgctggaaaagctgcatttgaytcactggaataagtgcaggggtccagggcctgctgattgcttcctggtccctgtgcacatgccccgtggtgactccgtacagtgcttcacagatcttttg

SEQ ID NO: 307574 - DNA, 201 bp, Homo sapiens
aatggaagagctgtgctggaaaagctgcatttgactcactggaataagtgcaggggtccagggcctgctgattgcttcctggtccctgtgcacatgccccrtggtgactccgtacagtgcttcacagatcttttgctgaggagctggggatgggcagggaaggaagcctggactgggtgcctagaagctctgggcagcagc

SEQ ID NO: 307575 - DNA, 201 bp, Homo sapiens
ctggggccagtgtcagcaggatggcagatgctttgagaacacggctaagaactctgccttctggagcaggatgtcaaatgctgtttgattcaggcatgtgmcacctgtcaagagccctggcacagctgctctcgagacacgcctcgactgccactctcccacccctgcgtggcaccctcctgactgttttatctgccttgg

SEQ ID NO: 307576 - DNA, 201 bp, Homo sapiens
cagcctgtttccacagcctgatccccaccactgcgttggccagtcacccaagaagcagctggacccatcatctggctctagggatgacccagttccagcayccccgcaaacctccgtctgtccccctacctccctcagcagaggcccagcccaatgcaggcccgtggctggatgggagtagctcttcccaccacccctggg

SEQ ID NO: 307577 - DNA, 201 bp, Homo sapiens
agacgggcgggggggtgggggggcatctgtagctgtctctggggctggggccaagcccaccacctgcagggggcaccaagctccacatgtgggtgtggggyagccaggctgggagcagaggccaggtccgacagcaagctcagggccactcccctcagtccagtgagggttggttgtgtgatcttgggcaagtcacatggc

SEQ ID NO: 307578 - DNA, 201 bp, Homo sapiens
tgttttatctgccttggtttttctgggtctggtgtagcacctgccccataagaagcgctcagtaaatgattgttgataaaagattgaaccaatcaaggaaygatgagccagtgaagggcaaatgactggaagcaaaaggccctcttgatggaattgggaagaagctgatccgagggcccaggacagccttctcttgaatgc

SEQ ID NO: 307579 - DNA, 201 bp, Homo sapiens
gcttttaccctggcggggttgggagcgtggcaatgggtcaccactgaccctgttaggaaacaagtgtgtctgtacgtgccacttatgatggggacaggccrtggtcactttgctggggccagtgtcagcaggatggcagatgctttgagaacacggctaagaactctgccttctggagcaggatgtcaaatgctgtttgat

SEQ ID NO: 307580 - DNA, 201 bp, Homo sapiens
gtttaactcctcttagcaagacaggcacaggcccagcccctcatccgtgagtggctgcagttggactgcgtggcctggcctcttccagcagtccctgagtrtagaggggctaccctcctggtgtctgtctggacacagaagggaacacatcagtggtgtctccctgccattccctggagggaatatgacatcaggattttt

SEQ ID NO: 307581 - DNA, 201 bp, Homo sapiens
gtttgctcatggtctctctctcagagcttttaccctggcggggttgggagcgtggcaatgggtcaccactgaccctgttaggaaacaagtgtgtctgtacrtgccacttatgatggggacaggccatggtcactttgctggggccagtgtcagcaggatggcagatgctttgagaacacggctaagaactctgccttctgg

SEQ ID NO: 307582 - DNA, 201 bp, Homo sapiens
agccagccctctgtcagtttactagcttattctctcactcattcaacattcctgtgtttatcataccatcccaggggtggtgtggcttaaggatgggtctsgggctggcctggctgctcctgtttcccgactgccacccactagctgtgtgacctcaagcaagctgcttaacctcccatgccttggtttcctcaaccatta

SEQ ID NO: 307583 - DNA, 201 bp, Homo sapiens
cctcctttgccaacacacagcagagcaagaaatacaccttgcctgtcttcatctaggtggcaactttgagggtcttgaatgggactgagcttgccttggtrgtgacatcagcagagaagtcagtagttgaagtcatcttccctttgagagttcaagtgctctcagtatggctgagcatgttggataaggagaatgcagaaa

SEQ ID NO: 307584 - DNA, 201 bp, Homo sapiens
cataggaactgaacttgtaaaggggcaggtgacgtattttagtgagaaccttccatggcgtaacctagtagaatgcctaatgttggaacctcgggcatcayagctggcctatttattttaaataaatgagttcatgaataaatgaaggaataaaggaatgaatgagaggaggggtaagtgactaaatgaatgcatttctgg

SEQ ID NO: 307585 - DNA, 201 bp, Homo sapiens
agcgcctatggggtggagtgagagtgaggaagaaacattacccgaggggtcactctcttcagaagacctcaatgactgtagactactgaattatttccttaaaaaaaaaaaaaaaaggctaggtatggtggctcaggcctataatcccagcactttgggaggacaaaggaccacctgaagccaggagttccagactagcct

SEQ ID NO: 307586 - DNA, 201 bp, Homo sapiens
ccctggctgcaccttgaccttggacttctagtccccagaactgtgagaagtagatttctgctgattacgctttcctgtctgcggcctgagctaagacagcrgcgcttggggagaagcagaatttgaggagctcctcagtggcaggctgccctggccctgctgtcagcagaggggaatggccatccatgctggcccctcacc

SEQ ID NO: 307587 - DNA, 201 bp, Homo sapiens
tcccaggctcaagccatccttccacctcagccttccaagtagctgggactacaggcacatgtcaccatgcccagctactttttgtatttttttttttttttgtagagatggggtctcacagtgttgcccaggctagttttgaactcccgggctcaatcctcctgcctcagcctcccacagtgctgggattacaggtgtgcg

SEQ ID NO: 307588 - DNA, 201 bp, Homo sapiens
acacacacacattcatatgcatactcacacatgctcactcatgcactcacacatacactcacactcatgcacacacacacattcacacacacacacacacattcacatgcatgctttaactcgagggaaatgaactcacaggactctaatttcctgatgccataggaagaacaacgggcattcctgtcatgtttttcatgg

SEQ ID NO: 307589 - DNA, 201 bp, Homo sapiens
tttcttttccatttatccagtcattccttccttctacccacccaccaacctgatcacccactcattcttctctccttcaatccaacctttcctcagtaccyaacctgtgcaactgtaccatggactccttcaggcagtggctcccaactcccatcacagagcaaatgctcaacacacacccgtgtttcatctgttattcaa

SEQ ID NO: 307590 - DNA, 201 bp, Homo sapiens
cacacacacacattcatatgcatactcacacatgctcactcatgcactcacacatacactcacactcatgcacacacacacattcacacacacacacacacattcacatgcatgctttaactcgagggaaatgaactcacaggactctaatttcctgatgccataggaagaacaacgggcattcctgtcatgtttttcatg

SEQ ID NO: 307591 - DNA, 201 bp, Homo sapiens
agtgcagtggtacaatcacagctcactgcagcctccacttcccaggctcaagccatccttccacctcagccttccaagtagctgggactacaggcacatgycaccatgcccagctactttttgtatttttttttttttttgtagagatggggtctcacagtgttgcccaggctagttttgaactcccgggctcaatcctcc

SEQ ID NO: 307592 - DNA, 201 bp, Homo sapiens
ccacacacacacattcatatgcatactcacacatgctcactcatgcactcacacatacactcacactcatgcacacacacacattcacacacacacacacacattcacatgcatgctttaactcgagggaaatgaactcacaggactctaatttcctgatgccataggaagaacaacgggcattcctgtcatgtttttcat

SEQ ID NO: 307593 - DNA, 201 bp, Homo sapiens
cctccgcagcccctcacccatccaacagatgccccgtccctgtgcctgctaactccctcccacctctccagctcaaggcctccctcccacgtgctggatcstgcctgttcagacctgtcctgtctcctggtggccaaactggcctccccagtcagtccctgctgcagaaagtggtttctttctttctttctttctttcttt

SEQ ID NO: 307594 - DNA, 201 bp, Homo sapiens
gccacacacacacattcatatgcatactcacacatgctcactcatgcactcacacatacactcacactcatgcacacacacacattcacacacacacacacacattcacatgcatgctttaactcgagggaaatgaactcacaggactctaatttcctgatgccataggaagaacaacgggcattcctgtcatgtttttca

SEQ ID NO: 307595 - DNA, 201 bp, Homo sapiens
gaaaagagagaaaaacaatagaggcagagcaggggctttttgcagtgatgcttggggagaagaaggaagccgaagggacagcaagtgggtagatggcaggwgactggccccaggttatccagagcagagctgagaccacccagtcctaaggggaaggggctgggaaggaagccactcagctctgccaagcagattaaatac

SEQ ID NO: 307596 - DNA, 201 bp, Homo sapiens
cggcagtgtggactctggctgcctgggttcaaatgagctcaccacctcctagttgtaagctcttcgacaagtgacttaaacactctgtgcccagttttccrcatctgcaaaatggggagataaatagcccctacctcctaggatcatcatgagaatgaggtgtgcgaagcttggccggcatgggttccatagcaggcactc

SEQ ID NO: 307597 - DNA, 201 bp, Homo sapiens
agtggcgcaatctcggctcactgcaagctccgcttcccaggttcacgccattctcctgcctcggcctcccgagtagctgggactacaggcgcccgccaccrcgcccggctaattttttgtatttttagtagagacggggtttcaccatgttggccagactggtcttgaactcctgacctcaggtgatctgcctgcctctgc

SEQ ID NO: 307598 - DNA, 201 bp, Homo sapiens
aggccagaagacctgcccagaagaattcagtataacccagttcagtgaaattggagagaacgagggcctgcgtcttccgggcagaaggcagggttcctgcsctctggagcccttggcctggcgcgggctgattaggacctagatctgcctgggtggctgggtggccgagtggcgattgggctggttctgtaccgggtgtgc

SEQ ID NO: 307599 - DNA, 201 bp, Homo sapiens
gactgcagtggcgcaatctcggctcactgcaagctccgcttcccaggttcacgccattctcctgcctcggcctcccgagtagctgggactacaggcgcccrccaccgcgcccggctaattttttgtatttttagtagagacggggtttcaccatgttggccagactggtcttgaactcctgacctcaggtgatctgcctgc

SEQ ID NO: 307600 - DNA, 201 bp, Homo sapiens
ccctctggagcccttggcctggcgcgggctgattaggacctagatctgcctgggtggctgggtggccgagtggcgattgggctggttctgtaccgggtgtrctccgtggggggcgtgatctggcaaagccttggaggtgggactgtggaggcaccattgattgaactgtgtcccctgcaattcacatgttgaggcccaaac

SEQ ID NO: 307601 - DNA, 201 bp, Homo sapiens
tttgaaaaagtaaaagacttaattttggtgaagtccaatttactgttgcttttttttcttttatagtttatgttttctgtgtactatttttttttttttttaattttttattttttgagtctcgctgtatcacccaggccagagtgcagtggtgtgatcttggctcattgcagctttggcctcctgggctcaagcagttct

SEQ ID NO: 307602 - DNA, 201 bp, Homo sapiens
tccctgtgggtggcctgcagtctgttctgctccccccggccccatgccagctgccatgctctatagaacatgtctcccatgctgcccgaggagggcctgcagagagttgagtggtcaggctgctgagtcaattgccctgggtactcattagatacatcctccccggcctcacccccagacctactgaatcagtctgggggt

SEQ ID NO: 307603 - DNA, 201 bp, Homo sapiens
gaaagtaattctaattatgacattttcctacaaagaacaaaccactgggcttctctggagcacaaaggcatggcgagatgagcagtttgccccacaggacsctggcattgccctctgaactttttcccagatgtgctgaggacaaggaagtcaggagtgtggcttgttttccatctgctcaacactgctcgtgcctggagc

SEQ ID NO: 307604 - DNA, 201 bp, Homo sapiens
tttgtacatctgagtattattgttaatttccacctggctacatgaggctccctcctctgggttttctctctatgcccttttgctgtggacagaaggtaccytgctcattcatccatccagccggtgagccagggggcagcccggagggaggagtggaggggatgtgggcctggaattagactgagcttggtgtgtccccag

SEQ ID NO: 307605 - DNA, 201 bp, Homo sapiens
ttttgaaaaagtaaaagacttaattttggtgaagtccaatttactgttgcttttttttcttttatagtttatgttttctgtgtactatttttttttttttttaattttttattttttgagtctcgctgtatcacccaggccagagtgcagtggtgtgatcttggctcattgcagctttggcctcctgggctcaagcagttc

SEQ ID NO: 307606 - DNA, 201 bp, Homo sapiens
agggagatggagaccaatcacccacccagtgtgcggtaagtcagacggtgacaagctctgaagacaaggaaagcagggaggaaggggcgggctatgccccytgctctttcatgtggggagccagagggagccagaggatgtggggatcgaccacgtggttaggggaggaaagcatgtttcaggcggagggtgggcaagcgc

SEQ ID NO: 307607 - DNA, 201 bp, Homo sapiens
ttttattttttttttgaggcagtgtcttgctctgtcactcaggttggagtactgtggccccatctcggctcactgcaagctccgcctcccaggttcatgcyattctcctgcctcagcctcccgagtagctgggactacaggcgcccgccaccacgcccagctaattttttgtatttttagtagagacaagctttcaccatg

SEQ ID NO: 307608 - DNA, 201 bp, Homo sapiens
tggcgacagagcgagactctgcctcaaaaaaaaaaaaaaaaagatggcgtttgcatcctgtttctctttctccttgttactatgggatgatttttttttttcgactttattggtgtataattgacatacaataaactgcgcctattgaatgtgttattagtaagttctgacatatgtatacacccatgcagctgtcacaac

SEQ ID NO: 307609 - DNA, 201 bp, Homo sapiens
acgccactgcactccaacctggcgacagagcgagactctgcctcaaaaaaaaaaaaaaaaagatggcgtttgcatcctgtttctctttctccttgttactrtgggatgatttttttttttcgactttattggtgtataattgacatacaataaactgcgcctattgaatgtgttattagtaagttctgacatatgtataca

SEQ ID NO: 307610 - DNA, 201 bp, Homo sapiens
cagtccccacccacctctcagactcacctcccgccccagcctctctggactcttttggcccctcatgggtgccatcattttgcccacataggctcttgtcygtgctgttttcactatagagtgggtccttcccttctttctttgtctaattcatgacactcatcgtttagtgcatttggcacttcctccaggaagcctgcc

SEQ ID NO: 307611 - DNA, 201 bp, Homo sapiens
gagtctaacttctattttgttaccctttatgaattgatgttttcacttgactgtccaaagtcttttttatttagctgtttccccctttcttttatattttwagtctagttactttcatagaaattaccttgttattgacagatttttgtcattttccccaagacatggtgtgccctttcagtttgtagatttatcttcttt

SEQ ID NO: 307612 - DNA, 201 bp, Homo sapiens
ctgatagtctcccccctgtttaaaacatgaaatggtatcctactaccctggggataaaaacaagacaaaaacgtttaagaggttagagaggtcttcatgaytcagtccccacccacctctcagactcacctcccgccccagcctctctggactcttttggcccctcatgggtgccatcattttgcccacataggctcttgt

SEQ ID NO: 307613 - DNA, 201 bp, Homo sapiens
ctcactgtcagttctcttgctgaagttttcctatttttctcttgatttgctgaaattccttctccagtagtttaatcaaaagggactaaatgaaaaaaaaatattcagttattgcaagttcaaaaaggtttctagtctttgtgtttgattgacagctttccagaatataaaattcttaggccacactttctttccttgaga

SEQ ID NO: 307614 - DNA, 201 bp, Homo sapiens
ttatttaaaaatgttgatttagatataattacatgcagaaaagtgcacaaatctgaagtctgcagtttgagaagttttagacatgtgcatactctgcaccsaccacctctgctaggatatagagcatggccagtgcccagagggcaccgcaggccctgcctagccacactcacactctcttcagtaacccctcattctgat

SEQ ID NO: 307615 - DNA, 201 bp, Homo sapiens
ttttcactttttgtgtattctttctatctactttttaaaggtttgtttcttttctaacttcctgttttagatgtatactttagtttctttatttatttttwtttatttttttgagatggagtctctgttgacaggctggagcgcagtggcgtgatcttggctcactgcaacctctgcctcccgggttcaagcgattctcct

SEQ ID NO: 307616 - DNA, 201 bp, Homo sapiens
ctaaactccatactcattaaacactaactctgtattccctcctccccgcagcccctggtaaacaccatcctaccttctgttcatatgaattaaaaaaaaawtttattttagtttttgagacagagtctcgctatgtaccccaggcgggagtgcagtggcgcaatctcggcttacggcaacctccgcctccccggttcaagt

SEQ ID NO: 307617 - DNA, 201 bp, Homo sapiens
gctagcccccttgcactgggcaacgctgtgtcccctctgtccctccccccagcgcatgctcctcgctctgcccctgctgcaggtgggccatgcttggagggcgcaggagagctgagatggggtggggatggatcaggccttgagagggtgcctggtaagccccgggaagggtagggaggaggaggagggagaggagagggc

SEQ ID NO: 307618 - DNA, 201 bp, Homo sapiens
gctgctggggaatcagggagacaccaaagaggaggtggcctttcccttgaagggtaagggatctgtaggagtctgtgggagagtggaagctgcgggagggraaggagggagggaaggaggcctggagagaggagggaggctcttgcattccaggcaggtatgggagctcctggcagagtttgcagtacccagtggctcagt

SEQ ID NO: 307619 - DNA, 201 bp, Homo sapiens
attatggatatcatggcatgttgctcatccattaatcaatcagtggacactgggtagcatctgcccaagttttagacattgggaataatgctgctgtgaayatgtgtgcacaaaataactcttcaagaccctgttttcagtttttttgggcatatacccagaagtggaattcctgatcatatggtaattctacttctaatt

SEQ ID NO: 307620 - DNA, 201 bp, Homo sapiens; identical to SEQ ID NO: 64262

SEQ ID NO: 307621 - DNA, 201 bp, Homo sapiens
taatcccagctactctggaggttgaggtaggagaatcgcttgaacccgggagttgaaggttgcggtgaaccaagatcgcaccattgcactccagcctgggygacagagcgagatttcgcttcaataaaataaaataaaataatagaataaaatagaataaaaaaaaatatggtactgatcatcacataaagttttgaggtc

SEQ ID NO: 307622 - DNA, 201 bp, Homo sapiens
gtgactgatgccagggcctcagagtgaagacagggctggggtcccctgccccctgatgggaaggagactgcgtggctggggtccctgggagcgcatccctkttgagaccacactcctcagcagcacctccctctctcaagcaccaacactggccttttggctgcctgagaaggggctctggggtccaggggagccagctca

SEQ ID NO: 307623 - DNA, 201 bp, Homo sapiens
agtcttgctctgtcacccaggctgcagtgcagtggcgcgatctcgactcactacaagctctgcctcctgggttcatgccgttctccggcctcagcctcccrtgtagctgggactacaggcgcccaccacctcgcctggctaattttttgtatttttagtagagacagagtttcaccgtgttagccaggatggtcttgatct

SEQ ID NO: 307624 - DNA, 201 bp, Homo sapiens
caactctctccttctttcttttcttcccaatttttgtttaatgtatcatttctaaattcatggtttatatttatatatgtccttaatcctcactcacattgccctacaggtagattcattgctcactgtcagttctcttgctgaagttttcctatttttctcttgatttgctgaaattccttctccagtagtttaatcaaa

SEQ ID NO: 307625 - DNA, 201 bp, Homo sapiens
cattgtcctctggccctacacacagtccctaggtttgcttttatgccaattgcagagaatctccatggctctactggcaattgcttgagagctcacattcctaccggatgtgagaagatgttccatcttcctgtgtccgggcagcaccaccaaagtgcggggctggggcaagcctggatggggtagggtgtggtcaaatga

SEQ ID NO: 307626 - DNA, 201 bp, Homo sapiens
cacttgaacctgggaggcagaggttgtagtgagctgagattgcactccagcctgggcgacaagagtgaaactccatctcaaaaaaaaaaaaaaaaaaaaaagttaaatagatgatcacctcctgggaaaggagaatgacctcttttgggaacaaagaaagtgaccatggaggccccggaacttgtagcagctctccgagtg

SEQ ID NO: 307627 - DNA, 201 bp, Homo sapiens
tcacttgaacctgggaggcagaggttgtagtgagctgagattgcactccagcctgggcgacaagagtgaaactccatctcaaaaaaaaaaaaaaaaaaaaaagttaaatagatgatcacctcctgggaaaggagaatgacctcttttgggaacaaagaaagtgaccatggaggccccggaacttgtagcagctctccgagt

SEQ ID NO: 307628 - DNA, 201 bp, Homo sapiens
ccgattttcctggtgatgtccaggtgggattgtgctcaatctgacagactgcacagctctctctctctctctctttttttttttttttttttttttttttwagacagggtctcagctctgtcactcaggctggagtgcagtgttgcgatcatggctcactgcagccttgacctccagggctcaagggatcctctcacctca

SEQ ID NO: 307629 - DNA, 201 bp, Homo sapiens; identical to SEQ ID NO: 64267

SEQ ID NO: 307630 - DNA, 201 bp, Homo sapiens
ctagtgtctgaggttgtgctgcttccgactcctgtgttctcatgaagatttcttcccgtgctgctctgtaagagaaagttgtctttgagggcacagatttytatctgtctttatatttataagcataaggcctccaaggatcaggtatttaagtgactggtacatggggaaataaactaattggaactgaagtattttggg

SEQ ID NO: 307631 - DNA, 201 bp, Homo sapiens
gtgtatagattcttttgtgaacttacattcacacaaaaatgcagttgctgggttgtgtggtatttgcctcataacttcagatgcttcttgactcacaacakggttacttcccgacgaacccattgtaaattggcagcgtggctgagtgggagctgcatctctctgcctctgtccagcactgtgagggaagtacagtttcta

SEQ ID NO: 307632 - DNA, 201 bp, Homo sapiens
ttgggaggctgagacaggagaatggcgtgaacccgggaggcggagcttgcgctccagcctgggtgacagagcaagactccgtctcaaaaagcaaaaccaarcaaaaaaaacaaaggtcagctttggggaccagaaccttgtatggagtggaagtggtgaagctgcaacctaaagtagccgttgtagactttgaagtacatg

SEQ ID NO: 307633 - DNA, 201 bp, Homo sapiens
ccccctgtaacactttatttttatttatttatttatttatttttttgagatgagacggagtctcactctgtcgctaggctggagtgcagtggcatgattayggctcactgcaacctctgcctcccaggttcaagcgattcttgtgcctctgcctcccgagtagttaggactgcaggcacgcaccaccatgtctggctgatt

SEQ ID NO: 307634 - DNA, 201 bp, Homo sapiens
tgcttgggaggctgagacaggagaatggcgtgaacccgggaggcggagcttgcgctccagcctgggtgacagagcaagactccgtctcaaaaagcaaaacmaagcaaaaaaaacaaaggtcagctttggggaccagaaccttgtatggagtggaagtggtgaagctgcaacctaaagtagccgttgtagactttgaagtac

SEQ ID NO: 307635 - DNA, 201 bp, Homo sapiens
tttttatttatttatttatttatttttttgagatgagacggagtctcactctgtcgctaggctggagtgcagtggcatgattatggctcactgcaacctcygcctcccaggttcaagcgattcttgtgcctctgcctcccgagtagttaggactgcaggcacgcaccaccatgtctggctgatttttgtatttttagtaga

SEQ ID NO: 307636 - DNA, 201 bp, Homo sapiens
ctgcaacctctgcctcccaggttcaagcgattcttgtgcctctgcctcccgagtagttaggactgcaggcacgcaccaccatgtctggctgatttttgtawttttagtagagatggggtttcaacatgttggccaggctggtcttgaacttctgacctcaggtcatctacctgcctcagcctcccaaagtgctgggattac

SEQ ID NO: 307637 - DNA, 201 bp, Homo sapiens
tacatgtgtatttttatttctagtcctgcttgcttaggatttattttgctgttccttttgtaatttcttgagatagatcttagtgcatttgtttttaatcmttcctcctttctccagttcaggctggtcttgaactcctgggctcaggcaagcatttcaggctagaaatttccctctgagtactgctttggttgcatccct

SEQ ID NO: 307638 - DNA, 201 bp, Homo sapiens
cattgagagcatggccaaagagcggcagcactggctacccagcacttactagccacatctgggcctaaggattttatgtccctcaggactcacggggctgrtgtgccatctgacccctctgagacctgtgggactgggctccgagcctctgggacactggaggggtggaggcaggtgtctgggcaacatccaataagaagc

SEQ ID NO: 307639 - DNA, 201 bp, Homo sapiens
ctgcaggatggtagcaattgtcatcccttttcttctcaatcattctcaccagaaatgtattagtttttgcagccttttcaaggaaccaactttaggtttcrttgattgtctctgtttcttagttcattacatgtgtatttttatttctagtcctgcttgcttaggatttattttgctgttccttttgtaatttcttgagat

SEQ ID NO: 307640 - DNA, 201 bp, Homo sapiens
ggactgttggtccaaaccgtcccttccagaagaggcccacatggcaggccctttgaggcctggggcaggcgggacagaggcagcacccgcctggcatgggkctgaggcctccttgcagctgcctcccggccccttgttctccttcatggctccatgcacagctgaggggagacatgaggtctctcggtctccatgggtttg

SEQ ID NO: 307641 - DNA, 201 bp, Homo sapiens
atggccctgaatccagtaacaccaactgtccctggaagtgtcaccaccctggtctgggaggagctccatgaacatctcaaccatccacttcttgtgcagayggggaaactgagtcagaaagggaggagactgccttaagaaagattcttgcaacttgactttgatcctgtagagtgtttgtgggtttagaagagcacaggt

SEQ ID NO: 307642 - DNA, 201 bp, Homo sapiens
aacttcctgcgcatcattattctggcttgtgctcatgtagcctgtaagtggcctggccaggatttgaacctacagccttccatcatccccctgcacaactsctgccaccccatgctgcctgcctctgggagattaggtgagcaaaggggtcttggccatgtctttccatctgaggcactcagtacagagggtgaggggtcc

SEQ ID NO: 307643 - DNA, 201 bp, Homo sapiens
gcccctacttaaacctgagcttcattttccaagtaatgttactggatttttggcccttgaataccaactcactagaatcatgttggtgttaactcctaaayaggtgaacgtgttgtagcctttgctgcagtggaaggcattttcttttccggttcttttgcgtcgatattctggctcaagaaacgaggactgatgcctggc

SEQ ID NO: 307644 - DNA, 201 bp, Homo sapiens
ggcctctgacctgaggactttgtcatgcaaaggaggaaccagatgggtgttctgtcacctggccagggagctaactggctgtattttgaggatcagtggcyctgccagtgtcggtctggagatcctgataatggtttaactcctcttagcaagacaggcacaggcccagcccctcatccgtgagtggctgcagttggactg

SEQ ID NO: 307645 - DNA, 201 bp, Homo sapiens
caggcgtgagccaccgtgcccggccagcagtggttttcaaactggtttcggaagcagattcattcttttcctagccaaagcctggtgaaccgtagtgtgtmcaacagttaaaagcagagacctgcaggtccacaggagcagacgctgagaccagcctgcctggggtcaatgccctctaacccctctgtgcctctgctgttc

SEQ ID NO: 307646 - DNA, 201 bp, Homo sapiens
gaaatacaccttgcctgtcttcatctaggtggcaactttgagggtcttgaatgggactgagcttgccttggtagtgacatcagcagagaagtcagtagttraagtcatcttccctttgagagttcaagtgctctcagtatggctgagcatgttggataaggagaatgcagaaaaggacaaagtaatttcatattccatgtt

SEQ ID NO: 307647 - DNA, 201 bp, Homo sapiens
cagcatacttaaagtttgagtgctcagtgtgagtcctgtaggctttactctcttccttttatgctaaaattgtgacttccgaacctcaggtggacctctcsaaggacattcagcactgggaatccctgaaacccgaggagagatattttatatcccatgttctggctttctttgcagcaagcgatggcatagtaaatgaaa

SEQ ID NO: 307648 - DNA, 201 bp, Homo sapiens
ggggggctaactgtggggcatagtaagtggtgccagcatacttaaagtttgagtgctcagtgtgagtcctgtaggctttactctcttccttttatgctaamattgtgacttccgaacctcaggtggacctctccaaggacattcagcactgggaatccctgaaacccgaggagagatattttatatcccatgttctggctt

SEQ ID NO: 307649 - DNA, 201 bp, Homo sapiens
tcccgcctaggcggcccctccccagggctgcctcccgcgcccctcggcccatttcccggttcgggcgtgcgctcctctgctgcgacccacggagtgcgacrggacagccacgttttcacatcgggccccgtgaaattgccgccaatggaaaggacttggtccagaaaaacgttagtttcatatggttcgcccggtacttaa

SEQ ID NO: 307650 - DNA, 201 bp, Homo sapiens
caacagcccagctaattttttttgtatttgtagtagagatggggtttcactatgttggccaggctggtcttgaactcctgacctcgtgatctgcttgcctyggcctccgaaagtgctgggatcacaggcgtgagccaccacacctggccacattgctgttgaggaggtgcataggagcagaatgactgggtcatatagtag

SEQ ID NO: 307651 - DNA, 201 bp, Homo sapiens
tgtacctcacgccactgccattcagttcattgaacaaacagcagctctcttgtcaggtgacgttttctacctgcattttaattcaggaagatggggcgctragccagaggggaggcccctccctctggagcttgggtttactcctagagaggaaaactgatagatgagtagatctgaattgttgggcagtggtgggggcag

SEQ ID NO: 307652 - DNA, 201 bp, Homo sapiens
gttcaaaccagtggacgtcagtcctgggtgtgaattataatcacctgggggcttttaaaagctactaaagtctggatctcacttggggaaaaggcagcccygctgagcttcagcatgttccagatgtgttttctggtgtgttctagacatgctgtgtaagagttacacttcattgtgtgtgcacattcggggccctgccca

SEQ ID NO: 307653 - DNA, 201 bp, Homo sapiens
gtgttgcagaggagttaaagcttgacgggcttagaaggtggaaagggtcgagatgcagcagagaacaagtcaatggaaagcacaaaataggatggtagaamtaaaagcacagtagatgtaaataaacttaagagttaaaactcttaaggctcaaattctagctataaacgattgccaaactaaacacttaagagtgtaaac

SEQ ID NO: 307654 - DNA, 201 bp, Homo sapiens
gtcaatggaaagcacaaaataggatggtagaaataaaagcacagtagatgtaaataaacttaagagttaaaactcttaaggctcaaattctagctataaaygattgccaaactaaacacttaagagtgtaaacaattactataggaaaaagactttaaagcaaaaagcccattagagatagaagttattggcctaaagaat

SEQ ID NO: 307655 - DNA, 201 bp, Homo sapiens
tcattttctgagtccagtgaattctgaagtccacatcccagatgtttcacagaagtaaatcaatacattcctgataggataaggttgattttcctgccacrtgcagtcagttccaccccaacagaattcacttgatctgcacagccaccgtggggcagagatgattgcccccattttacagatatggccgggaggctcagg

SEQ ID NO: 307656 - DNA, 201 bp, Homo sapiens
ctacccctcccctcacatggagccaggccccacctccacagattgggggcttggggacacgtcttctgtgctccatgctctcaggtcccagtgaggctgarcgctgaaccatccaagttggcagggccaggacaaggacccaggagctctggtgcccaggagtcccccgaaggggggctcagaggaggtgcgtgcggggct

SEQ ID NO: 307657 - DNA, 201 bp, Homo sapiens
tgcttccctgaggaccccgagctgcagccccagggcttccccctcccactttgggtgagtatgagcagggcccaggtggctggggtgcagtgggcagcccrgtggtcctgcctggggtctggtgctccctcggtgtctgtcagctcgggctgctctagcagaaggccacagaatgggggctcacaccgcaggaatatatag

SEQ ID NO: 307658 - DNA, 201 bp, Homo sapiens
tgtgcagatgttcacatgatgtggtggggaagtgagttttataaaactcttggcagagtaccattcggcatccctgtggttctagagatttctggggcctyggggctgtagcaccagctgcagacagctgcctgccttcttacagtgctcagcttttgggtccagcagctttctcagtcccaaacacatgtgacctcacga

SEQ ID NO: 307659 - DNA, 201 bp, Homo sapiens
atttctggggcctcggggctgtagcaccagctgcagacagctgcctgccttcttacagtgctcagcttttgggtccagcagctttctcagtcccaaacacrtgtgacctcacgattctggcccttccatgatccgcaacaaactgttctggtgtgtaggtggaattcctatttttaatagccaagttgttgagaaattgta

SEQ ID NO: 307660 - DNA, 201 bp, Homo sapiens
catgagcaatttcacatttattcatgtagttagttatagtctggatcctcctttggattttaagttcctataggtaaaagccttcctctcctttggccacygagatatctccaggactaccatggacatgcagtaaacattcaccagttgttgaatttatgagtgggtgagtggtgcctgccaccctagaatttcccttat

SEQ ID NO: 307661 - DNA, 201 bp, Homo sapiens
tctatttctcaattttaagatgaggaaacaggcttagagtggttaattaatttgcccaaagacatgcagctagcaagaggcagcatattgcaatttgcctkcaggatggtagcaattgtcatcccttttcttctcaatcattctcaccagaaatgtattagtttttgcagccttttcaaggaaccaactttaggtttcgtt

SEQ ID NO: 307662 - DNA, 201 bp, Homo sapiens
ttatggtcatgctgacagccattaggctgattttttgggggctggatttaggcggtttttaatcaaggggaacttaaaatgctgctgtttgtccaaaatgktgatgctcctgctttgtcaatccagaccctatagttataaaaggatgaggggcgacgtgctctttctggctacttcctgctgagagagggttgtcgttat

SEQ ID NO: 307663 - DNA, 201 bp, Homo sapiens
aagcatatcttacggatggcgaccttgaggctcagggaggttaaggtgccagcctgagatcacacagccagtgagaggcagagacagggcttaaactccaracgatggctccagagccccctctcttttccatgccctgggctgcctctttccccagtgcaccttgctttttggaaccagatgaccaatgtggaaagacac

SEQ ID NO: 307664 - DNA, 201 bp, Homo sapiens
cttgaacttctgacctcaggtcatctacctgcctcagcctcccaaagtgctgggattacaggtgtgagccaccgcacccagccccctgtggcactttagartattgataaccaccaccactgtgatcataactagtatgatttatatagtttgtattctctgctggacacttaactcacactatctcatttaattctcata

SEQ ID NO: 307665 - DNA, 201 bp, Homo sapiens
cgcatctgttctcaattgccctatgcagatacttagtctgtggctgggagccaagcctcagggtcccttttcctcttccaagatgggtggcactgaacgcygaggccacggcccgtcctgatgtggtcagagatgtcgtcatgtgccactaacaggcgtcgccaagaccagccaggtgcagaccttgggtgggtcctatgg

SEQ ID NO: 307666 - DNA, 201 bp, Homo sapiens
caaaggcaggccccaatcctcagatcaggaaccataacaattctcagagagaataaatgaacagaaatccatatttagatccatcagagtgaaactgcagwacaccaaagaccacaagaagattttaaaagcagcaagtacaagagagattaccctcagaacaccaacaacagattgacagttgacttcacaacagcaata

SEQ ID NO: 307667 - DNA, 201 bp, Homo sapiens
tgatccacccgccttggcctaccattgctggaattacaggcatgcgccaccacgcctggcctagcatagttattttgaagtccatcagttgtatataacartggttcattccttcttattgctgtgttgcatttcattgtatggctatgccatatttattcatccattcacctggtgatggacattggggctgtttccagc

SEQ ID NO: 307668 - DNA, 201 bp, Homo sapiens
tatggttaaatgaggtcgtatgggcgggtgctgatccactaggattaggatccttataagaacctgccaccttctctctgccacgtgaggacatggggagraggcggctgcctcccacccaggaggagcccttactggacactgggccctggctgcaccttgaccttggacttctagtccccagaactgtgagaagtagat

SEQ ID NO: 307669 - DNA, 201 bp, Homo sapiens
gctatgaccaggcagaagctgacactgacctgacccaacctgggcaggcctaggagagctcgtccccagaccttcaccttggagaaccaagtagtagtgaraacagtgccgcggggctggcccagatcatcggtcctttggacgtcttcttccataaatgagtcatttatatcacactctcttgtcaagaggtggaagtca

SEQ ID NO: 307670 - DNA, 201 bp, Homo sapiens
ggcagaagctgacactgacctgacccaacctgggcaggcctaggagagctcgtccccagaccttcaccttggagaaccaagtagtagtgagaacagtgccrcggggctggcccagatcatcggtcctttggacgtcttcttccataaatgagtcatttatatcacactctcttgtcaagaggtggaagtcagtttccaatg

SEQ ID NO: 307671 - DNA, 201 bp, Homo sapiens
cccaaagtgttgggattccaggcatgagccactgtgcccggcctcttttggttaccttcatcggaacacttgcagggcctttgagagaccccatcaaacaygtttccctttgggcacctacactgaatcctctgggatgaaatttcagccaggagagggactgaagtagagtcacatgtggggacctcccattagtgggct

SEQ ID NO: 307672 - DNA, 201 bp, Homo sapiens
gaggacaccgttccatcttaatgcctttccaataaagccttgaagacgacaggccccatttcctgagcagagctgaacagttactttacacttcatctaaktgattaaaatgactcctctaaattaaccaggccttccagagctgagtgcgggagagtgaagtccagagaccagagccggctgcaggggcaggccgggggc

SEQ ID NO: 307673 - DNA, 201 bp, Homo sapiens
aacgatggctccagagccccctctcttttccatgccctgggctgcctctttccccagtgcaccttgctttttggaaccagatgaccaatgtggaaagacaygaactgattcaatcagagtgtatggagaagggacttagagaccctggtatttttaaagctccctggtaattctcatgtgcagctagggtggggcgcctct

SEQ ID NO: 307674 - DNA, 201 bp, Homo sapiens
tcagccgttgcacggacaggttgccttctgggggctgctagcccccttgcactgggcaacgctgtgtcccctctgtccctccccccagcgcatgctcctckctctgcccctgctgcaggtgggccatgcttggagggcgcaggagagctgagatggggtggggatggatcaggccttgagagggtgcctggtaagccccgg

SEQ ID NO: 307675 - DNA, 201 bp, Homo sapiens
tcccgctcgcgcccatcacggacccgcagcagctgcagctctcgccgctgaaggggctcagcttggtcgacaaggagaacacggtgagcccgcggggaggscgctgcgggcaggggagggaggcagggaaagcgaagccgctcctcactcacacgcgtctccccgcagccgccggccctgagcgggacccgcgtcctggcc

SEQ ID NO: 307676 - DNA, 201 bp, Homo sapiens
ccccccagcgcatgctcctcgctctgcccctgctgcaggtgggccatgcttggagggcgcaggagagctgagatggggtggggatggatcaggccttgagrgggtgcctggtaagccccgggaagggtagggaggaggaggagggagaggagagggcagtgcaagggcagcgacccccagccttgcccccgttttgagcac

SEQ ID NO: 307677 - DNA, 201 bp, Homo sapiens
gctgcgccgccactatgctctccctccgtgtcccgctcgcgcccatcacggacccgcagcagctgcagctctcgccgctgaaggggctcagcttggtcgayaaggagaacacggtgagcccgcggggagggcgctgcgggcaggggagggaggcagggaaagcgaagccgctcctcactcacacgcgtctccccgcagccg

SEQ ID NO: 307678 - DNA, 201 bp, Homo sapiens
attgtatggctatgccatatttattcatccattcacctggtgatggacattggggctgtttccagcttttggctatgatgaatcaagttgctgccagtctscatgtagattttttttttttttttttgtagacagagtcttgctctgttgcccagactggagtgcagtggtgcgatcttggctcactacagcctctgcctc

SEQ ID NO: 307679 - DNA, 201 bp, Homo sapiens; identical to SEQ ID NO: 64261

SEQ ID NO: 307680 - DNA, 201 bp, Homo sapiens
tcccgggttcaagcgattctcctgcctcagcctcctgagtaactgggattacaggcgcgcactaccacgcccagctaatttttgcatttttagtagacatrgggtttcaccttgttggccaggatggacttgatctctcgaccgcgtgatctgcccacctcggcctcccaaagtgctgggattacacgtgtgagccactgg

SEQ ID NO: 307681 - DNA, 201 bp, Homo sapiens
cagcctcctgagtaactgggattacaggcgcgcactaccacgcccagctaatttttgcatttttagtagacatagggtttcaccttgttggccaggatggwcttgatctctcgaccgcgtgatctgcccacctcggcctcccaaagtgctgggattacacgtgtgagccactgggcccggcttagtttctttatttaaaga

SEQ ID NO: 307682 - DNA, 201 bp, Homo sapiens
tgtacttatacctctatgctatctttttcttatttttgccccctcccccataagaaagataaagaaatcagagacttagaccaggtgtggtggttcccgcytgtaatcccagcactttgggaggctgaggcgggtggatcactcgaggtcaggagtttgagaccagcctggccaacatggtgaaaccctgtctctagtaaa

SEQ ID NO: 307683 - DNA, 201 bp, Homo sapiens
cagcactttgggaggctgaggcgggtggatcactcgaggtcaggagtttgagaccagcctggccaacatggtgaaaccctgtctctagtaaaaatacaaarttagccaggcgtagtggcaggcgcctgtaatcccagctactccagaggctgaggcaggagaattgcttgaacctgggaagtggaggttgccatgagccag

SEQ ID NO: 307684 - DNA, 201 bp, Homo sapiens
attggggctgtttccagcttttggctatgatgaatcaagttgctgccagtctgcatgtagattttttttttttttttttgtagacagagtcttgctctgtygcccagactggagtgcagtggtgcgatcttggctcactacagcctctgcctccttggttcaagcgattctcctgcttcagcctcccaagtagctgggact

SEQ ID NO: 307685 - DNA, 201 bp, Homo sapiens
aatacaaagttagccaggcgtagtggcaggcgcctgtaatcccagctactccagaggctgaggcaggagaattgcttgaacctgggaagtggaggttgccrtgagccaggatcatgccactgcactccagcctgggcaacagagtgagaccctgactcaaaaaaaaaaaaaaaaaaaaaaaaaaaaaagaaatcagatact

SEQ ID NO: 307686 - DNA, 201 bp, Homo sapiens
cccgtgatgggcatgggagcccagaaaaaggccccatccagcctgtgggatcagaggagccttcttggaggaggtgatgctgggcgagtgttaaaggatayctaggcatcagctaggtgaagagagcagggaaggagactccagggagaggaatgtgtgagaaaatggggaggagagggaggaacggttggtgggcagcgg

SEQ ID NO: 307687 - DNA, 201 bp, Homo sapiens
ggttgcagtgagcagagattgtgccatcgcactccagcctgggtgacagagtgagactctgtctcacaaaaataaatacatacatacatacatacatacahgtgacggtctcccagacatgcactccggctccaccttgaccaaggggatggggctcacggttaagtcaaactctcaggctctttctccagagaatttgaa

SEQ ID NO: 307688 - DNA, 201 bp, Homo sapiens
ttgcttgaacctgggaggtggaggttgcagtgagccgagattgcaccactgctctccagcctggggaacagagcaagattccatctcaaaaaaaaaaaaaagaaagaaagaaagaaagaaaacagacttgtattgcacctttgcaaataaccatactgccataatttaaggatactcacaggtagtttccagactcgggag

SEQ ID NO: 307689 - DNA, 201 bp, Homo sapiens
aggctgccctggccctgctgtcagcagaggggaatggccatccatgctggcccctcaccagccgggccttcagtgagctccccgggtaggtgaagctctcycagctctgtgtcccccgccaaagcaggcccacaagcgagcgcctatggggtggagtgagagtgaggaagaaacattacccgaggggtcactctcttcaga

SEQ ID NO: 307690 - DNA, 201 bp, Homo sapiens
atggccatccatgctggcccctcaccagccgggccttcagtgagctccccgggtaggtgaagctctcccagctctgtgtcccccgccaaagcaggcccacragcgagcgcctatggggtggagtgagagtgaggaagaaacattacccgaggggtcactctcttcagaagacctcaatgactgtagactactgaattattt

SEQ ID NO: 307691 - DNA, 201 bp, Homo sapiens
cccgggtaggtgaagctctcccagctctgtgtcccccgccaaagcaggcccacaagcgagcgcctatggggtggagtgagagtgaggaagaaacattaccygaggggtcactctcttcagaagacctcaatgactgtagactactgaattatttccttaaaaaaaaaaaaaaaaggctaggtatggtggctcaggcctata

SEQ ID NO: 307692 - DNA, 201 bp, Homo sapiens
gagtgagagtgaggaagaaacattacccgaggggtcactctcttcagaagacctcaatgactgtagactactgaattatttccttaaaaaaaaaaaaaaarggctaggtatggtggctcaggcctataatcccagcactttgggaggacaaaggaccacctgaagccaggagttccagactagcctgggcaacacagcaag

SEQ ID NO: 307693 - DNA, 201 bp, Homo sapiens
aagctttcaccatgttagccaggatggtctcgatctcctgacctcgtgatccgcctgcctcggcctcctaaagtgctgggattgcaggtgtgagccaccaygcccggcccctttgcccatttaaaaatatcgagttgtgttatatattaggtttaacagctctttattctagttacacgtcttttatcagatatatgactt

SEQ ID NO: 307694 - DNA, 201 bp, Homo sapiens
tactgttgcttttttttcttttatagtttatgttttctgtgtactatttttttttttttttaattttttattttttgagtctcgctgtatcacccaggccrgagtgcagtggtgtgatcttggctcattgcagctttggcctcctgggctcaagcagttctcccacctcagcctcccaagtagctgggattacaggcgccc

SEQ ID NO: 307695 - DNA, 201 bp, Homo sapiens
gaagcagggtggggccaagggattggctggacctcagccactacccctcccctcacatggagccaggccccacctccacagattgggggcttggggacacrtcttctgtgctccatgctctcaggtcccagtgaggctgaacgctgaaccatccaagttggcagggccaggacaaggacccaggagctctggtgcccagga

SEQ ID NO: 307696 - DNA, 201 bp, Homo sapiens
ggtagtttccagactcgggagaaaaccaggcagagagaaataagcatgcctcaaattttgttcatgggagcacaccaaactgtcaaaagctgttgatagckcaaaagaaaagcctctttgactctgaaaagcaaacaaaggaccaacaatattccgagcaaaacatcaaaaagatcactccagtctgttagttcagttcac

SEQ ID NO: 307697 - DNA, 201 bp, Homo sapiens; identical to SEQ ID NO: 64265

SEQ ID NO: 307698 - DNA, 201 bp, Homo sapiens; identical to SEQ ID NO: 64266

SEQ ID NO: 307699 - DNA, 201 bp, Homo sapiens
gttctcttgctgaagttttcctatttttctcttgatttgctgaaattccttctccagtagtttaatcaaaagggactaaatgaaaaaaaaatattcagttrttgcaagttcaaaaaggtttctagtctttgtgtttgattgacagctttccagaatataaaattcttaggccacactttctttccttgagaacttcacaga

SEQ ID NO: 307700 - DNA, 201 bp, Homo sapiens
ccagtagtttaatcaaaagggactaaatgaaaaaaaaatattcagttattgcaagttcaaaaaggtttctagtctttgtgtttgattgacagctttccagmatataaaattcttaggccacactttctttccttgagaacttcacagatgtcacttctgtctctagagttaaatgccactgtgggaaagtctgagtctaac

SEQ ID NO: 307701 - DNA, 201 bp, Homo sapiens
gctcactttcctcagtcttgttctcagtgtcttgattgtgtcttgagcaatatttgatgctcctctgcgcacctttccatttcatcatgactttgaagatrcgatgtttttccttctttctccagctctgtcagctccagtttcatgttccccctgagctctcatatctgttttgtgtgcttgctttctggagaggattgc

SEQ ID NO: 307702 - DNA, 201 bp, Homo sapiens
agctctcatatctgttttgtgtgcttgctttctggagaggattgctgtattcattttttttttttttttcgagatggagtcttactctgttgctcaggctrgagtgcagtggtgggatctcagcttgctgcaacctctgcctcctgggatcaagcgattctcctacctcagcctcccaggtagctgggattacaggcttgc

SEQ ID NO: 307703 - DNA, 201 bp, Homo sapiens
gccaccatgcccggctaattttggtatttttagtagagatggtgttttgccgtgttggctaggctggtctcgaactcctggcctcaggtgatctgcccgcytcagcctcccaaagtgctgggattgcaggtgtgagtcactgcgcccagccctgctttattaatttttgttgttgtttaattttcagcgaaaagtttgctg

SEQ ID NO: 307704 - DNA, 201 bp, Homo sapiens
agtcactggtgaaagagggcacacaggtaatcctccagttcttgaatggggaatggaggcacaggagggctaagcgagggcccatggcctcaagattcaaacacaggcactgtctggccccagaacacacgcccttcccacctggccgaggaggtgctcacaaggggcactccaggtggatgcagagtgggccagccccct

SEQ ID NO: 307705 - DNA, 201 bp, Homo sapiens
tgtagctgggcgcagtggctcatgcctgtaatcccagcacttttggaggacgaggcgggtggattgcttgagcccaggagttcgagagcagtctggccaasaaggtgaaaccccatctctactaaaaacacaaaattagccgggcgtggtggtgcaagcctgtaatcccagcactttgggaggtcgaggcgggtggatcac

SEQ ID NO: 307706 - DNA, 201 bp, Homo sapiens
gagcagacgctgagaccagcctgcctggggtcaatgccctctaacccctctgtgcctctgctgttcatctgctgaatgggtctcatagttgagcagtggtygagagatttcctggcatcaaatacatggaagggacttagcgtaggtcctgcttagcacatagtaagtgctcagcgaacttacttaccacttattacttac

SEQ ID NO: 307707 - DNA, 201 bp, Homo sapiens
tccgattttcctggtgatgtccaggtgggattgtgctcaatctgacagactgcacagctctctctctctctctcttttttttttttttttttttttttttttagacagggtctcagctctgtcactcaggctggagtgcagtgttgcgatcatggctcactgcagccttgacctccagggctcaagggatcctctcacctc

SEQ ID NO: 307708 - DNA, 201 bp, Homo sapiens
ttccgattttcctggtgatgtccaggtgggattgtgctcaatctgacagactgcacagctctctctctctctctcttttttttttttttttttttttttttttagacagggtctcagctctgtcactcaggctggagtgcagtgttgcgatcatggctcactgcagccttgacctccagggctcaagggatcctctcacct

SEQ ID NO: 307709 - DNA, 201 bp, Homo sapiens
tttccgattttcctggtgatgtccaggtgggattgtgctcaatctgacagactgcacagctctctctctctctctcttttttttttttttttttttttttttttagacagggtctcagctctgtcactcaggctggagtgcagtgttgcgatcatggctcactgcagccttgacctccagggctcaagggatcctctcacc

SEQ ID NO: 307710 - DNA, 201 bp, Homo sapiens
ttttccgattttcctggtgatgtccaggtgggattgtgctcaatctgacagactgcacagctctctctctctctctcttttttttttttttttttttttttttttagacagggtctcagctctgtcactcaggctggagtgcagtgttgcgatcatggctcactgcagccttgacctccagggctcaagggatcctctcac

SEQ ID NO: 307711 - DNA, 201 bp, Homo sapiens
cctccacccagagccacctctctgtgagagcggccccaccaatgactttcctgtgggatgatggagccctcatgctgagcagaggttaatgccatcccacrgctcccttcccccagaggaggtctgggtctcagctgaggcttacagcctaacacatctggctccggacatactgggagctctttacctgagggtgtccct

SEQ ID NO: 307712 - DNA, 201 bp, Homo sapiens
tcaaatgtcagccactgcctcagagaggcccacgagggccttggcactcgtggttggccccttctcccctctggatgaacctcaggcctccagggctcctrcctcctgctcactaggctctcagcctggatggtccttctttctcttcttctatgaagccctctccatcctttagggcttagaaatcatctcctccctgtc

SEQ ID NO: 307713 - DNA, 201 bp, Homo sapiens
gaatttgatgatatcagcttcgggggaatgggatcctattactcgttctgaattctctggttcctggaattaattgtgtgtgtgtgtgtgtgtgtgtgtgygcgcacttgtaatcttttggtagaacagcctttgttgtgaaccagaggatgacaaaggacaggtcagcttgtctcaatctctccctccattccttgctgt

SEQ ID NO: 307714 - DNA, 201 bp, Homo sapiens
gttctttatctttcaagggccttaacaaaaatttttaaagagccaggctggttatcgtaactattataggaattcaagggtggttggagagtcaacgtagygaagagttagaaaagaggaaagaaatccacccccagactgggtatgtatcattgatagtgtcagaaacaggcaggagtattatttttggagaaaagacct

SEQ ID NO: 307715 - DNA, 201 bp, Homo sapiens
tactctgacttagttggtctggctgggagccaagggatctggaaagtgattgatgcagggtgtttcttggaccgtacttttaggggaagtagccacaaagrgctgaacctcacaccctttcatgtaaacttcctgcttagcaacagaatagagtaccttcatggttattaaaatgcttttctccttgtctttttatttttt

SEQ ID NO: 307716 - DNA, 201 bp, Homo sapiens
atttggtttgtcagttgaagatgcttaaagttaacagttacttttttttttcttttttgaaatggagttaacgctcttgtcacccaggctggagtgcaatrgtgcgattttggctcactgcaacctccgcctcccaggttcaagcagttctcctgcctcagcctcccgagtagctaggattacaagtgtgtgccaccatgc

SEQ ID NO: 307717 - DNA, 201 bp, Homo sapiens
gtatatatatatatacacacacacagagtatatgtacataaggtgagtatatgtgtgtgtatgtatttaattctcctatgatgcattgtggtactctgaaratactgttgggtgtttgagatactaattattcttttggagccacatgtaaaaataagaataagatcgccctgtacaaatagtactgaggataggaaatag

SEQ ID NO: 307718 - DNA, 201 bp, Homo sapiens
ttactcttttaataagcgtagtgtggatcagtggtcttcactgatcccattgccttatcagcaaaaaaaaatttggacccatgccccagtgtgtgtgtgtrtatatatatatatatatgtgtgtgtgtgtgtgtgtgtgtgtgtatatttatttatctgttatgttcttatactaaaatcctatgaaaattataaaacctt

SEQ ID NO: 307719 - DNA, 201 bp, Homo sapiens
gggtatgcatagcgctggtagattaggagcttgataatttcattaagtgatcatgatctatttcttctgcctttccatttttacatgtagaagcaaatatygttaccaaccaaaatgacccatttgctctcattatgaattacaattcttttaaagaatttagtatgcatatccttgaccttttttgaaattaaaaattat

SEQ ID NO: 307720 - DNA, 201 bp, Homo sapiens
cccctaaagagcagccactgaactcaggagcagatcaaaaccctctctaattcctttacacttgggacccaccccttgataaaggttttgggtttgctgaragtgcagtatgtcatggtggtcccctgtcccagtatgggttggggattaagataatcctgtgaatttaaatcccgactctaccacttaatagctgcgaac

SEQ ID NO: 307721 - DNA, 201 bp, Homo sapiens
gcagctgacatctgtgtttcactttaagcttccacaagacttaagccagatctagttagctgatcatctgcatagttgttctttaagttgggtatgcatarcgctggtagattaggagcttgataatttcattaagtgatcatgatctatttcttctgcctttccatttttacatgtagaagcaaatattgttaccaacca

SEQ ID NO: 307722 - DNA, 201 bp, Homo sapiens
tccttctgaagctggaagggatggatctgtccaactttcttttctttggctcgtggatggctgtcttctgcctgtgtcactttgtgtcatcttccctttaygcatatctctgtgttcatattttctctcttttcaaggacatcagccatattcgattagggtccaacctaatacctcattttaacttgattacctctgtaa

SEQ ID NO: 307723 - DNA, 201 bp, Homo sapiens
gaggtgaataattggtgatgtcagcggggccacactcacaggagcctgccatcctattcccagcagctgatctgaagggcaaggctacatgctgagtggcrgtggggttgggggacggggttaggtgatgttggattgagcgagaagcagccgtcatttaactaatgattttcccttccttcatttttttcagatacttat

SEQ ID NO: 307724 - DNA, 201 bp, Homo sapiens
tgatacttgctttcagttctagcacgtaagcctatctaggtgctagccaacacagtaaaagcagaagatagaagaagcgtaaaagataaaaagagggaaarttcgcattattggcagataaagatgtggtcaactacctagagaagccacaaactattaaaacttaagcagggttcttctgtttgaccggatacaatttca

SEQ ID NO: 307725 - DNA, 201 bp, Homo sapiens
cagccttaggttccctgcccccagaccctattctcctgcctcaacttggtccctgctactatcctgagacccatcttagttggcctgtcaggtgagaaacyagtgaacacatcaatagatagtactgacctactgtagccttgaaggagtgaaggatctcagatagataacagcagcaggattgattttaggcaatggtga

SEQ ID NO: 307726 - DNA, 201 bp, Homo sapiens
agatggggtttaggacttcaacataccttttttaaggggggatatgattcgacccatcacagtacatacgtaacattatcagtcaaactttagtctctcaccctttttctgattacagaaactctttataaaaaaaatcaaatacttcttcatgaaaaattgcttcccttcccaccaaaattgtcctgttgtataaatgac

SEQ ID NO: 307727 - DNA, 201 bp, Homo sapiens
attacgtgacaagaacatattttatgggccctcagtggggaggccatttgtggttgatctgtttctagataacgtgaaacatggcagagggtaatcacatsatctgttcaccatatttttattctgaagaaagtctcccataataaaagacagagtgaagtcctattactttgtccatttatttgactctaagccctgaca

SEQ ID NO: 307728 - DNA, 201 bp, Homo sapiens
ctaaaatcaacaactgtgaagccatactatcaataggagagtgaagatctcctagcatagacatagcatagaaaaacctcattttgattttcacctccttwcagataagattagtttacttgtctagagaggcatttaagaatagaaggtttcctgaagactttctggaggagaggctgatggaattgcctctgggttcgt

SEQ ID NO: 307729 - DNA, 201 bp, Homo sapiens
agcattgagaccattacctcctgagcaaagcagagtcatttatgcattaaataaataactttcctgtcccaacagggtttgtttgttttttttttttgggsgggcgggagagatcacttttaggcgacattatgtgtttgtaggggcttgtcttcaaataaaaggcataattgaaatacagctgaataggaatcaagagtg

SEQ ID NO: 307730 - DNA, 201 bp, Homo sapiens
ggtgacttgaatgttgtcttttccacttagtattaccgttcaaaacccacgtacaccaaggaattggaatattcgaatgtgagacagaaagatgacattgyggttagcactgtctgtatccaccaaatcgtgaaccttctcagagtcatagtcccagccagggaagtaagagtgtcgctcttcactattgctgcacacatc

SEQ ID NO: 307731 - DNA, 201 bp, Homo sapiens
gaattggaatattcgaatgtgagacagaaagatgacattgcggttagcactgtctgtatccaccaaatcgtgaaccttctcagagtcatagtcccagccagggaagtaagagtgtcgctcttcactattgctgcacacatcctgctgctgggtgccaaagtggggcaggtgctcaacttcccagcagtgttaggagtaaag

SEQ ID NO: 307732 - DNA, 201 bp, Homo sapiens
aggcagagaaaagcctttggattaaaagagacttgagagacctgtcacccaaatgcagtgtgtggactttgaatttgaacaaatcaatgttaaaagcaaatttttttttttgaagtagggaaatttgagtactggatgttacctgatttatggaattattgtcacttttaagtacaggcaaaatagtagtgttggaattat

SEQ ID NO: 307733 - DNA, 201 bp, Homo sapiens
gtggtttaatgttttgcagcttcattgtaaaccaagccaaaggaaaatctttctgccctttggtcaaacattcctgagtgaagagagcactggctgacatggaggagtgccaacatttttgggtcatactttagaacttaagtttagataactgagataagccaggatttatggacagacagatatatccctagtctcaac

SEQ ID NO: 307734 - DNA, 201 bp, Homo sapiens
ggttaatactttagtattgtgtgctttcctattaatatgacttttttcccaagtaaaagatgttttctcctgtcttcctctctgatcagggaaaagaaaacagtttctgtttttctttggagagctcttcaggggatctttttaaggattgactcaactttaggaatttttcagttgagctgacattcattgcaatgtgtt

SEQ ID NO: 307735 - DNA, 201 bp, Homo sapiens
atatggtaaaaccgtgtctctactaaaaatacaaaaattagccaggcgttgtggcacgcgcctgtagtcccagctactcgggagggtgaggaagaaaaatygcttgaacccgggaggtggaggttacagtgagccaagattgtgcgactgcactccagcctgggtgacagagcgagacgctgtctcaaaaaaaagaaaaaa

SEQ ID NO: 307736 - DNA, 201 bp, Homo sapiens
attgcttgaacccaggagttcaagaccagccttggcaacatggctaaacctcatctgtacaaaaaataccaaaaaaattagctgggtatggtggcgtgtgyctgtagtcctagctactttgcaggctgaggcaggaggatcacctgagcctggggaggtcaaggctgcagtgagccgtgattgtgccattgcactccagtc

SEQ ID NO: 307737 - DNA, 201 bp, Homo sapiens
gatcacctgagcctggggaggtcaaggctgcagtgagccgtgattgtgccattgcactccagtctgggtgacagagtgagaccctgttacacacgcacatacacacacacacacacaaatctatagtctagaggaagttataaggcacataggtgtaatgcttataattgataggaagtgatgagtatgaaagcaggttga

SEQ ID NO: 307738 - DNA, 201 bp, Homo sapiens
atcacctgagcctggggaggtcaaggctgcagtgagccgtgattgtgccattgcactccagtctgggtgacagagtgagaccctgttacacacgcacatacacacacacacacacaaatctatagtctagaggaagttataaggcacataggtgtaatgcttataattgataggaagtgatgagtatgaaagcaggttgac

SEQ ID NO: 307739 - DNA, 201 bp, Homo sapiens
ggcattcttaccaaggtaaatggcaataaagcaataagcaggaaatcaaatggtcttttcaaagggtatggagttaatattgtctgggattgggaagggtsgggaagataagatgggaccttgaaagcctggctaagggaatgtggaatctctccacacgtttctgaggaagggaataacaaagtcagcacaacgtttgag

SEQ ID NO: 307740 - DNA, 201 bp, Homo sapiens
accatttattaaatacggaatcttttccccattgcttgtgtgtgtcaggtttgtcaaagatcagatgattgtagctgtgtggtgttatttctgaggcctcygttctgttttattggactatatatctgttttggtaccagtaccgtgctgttttggttactgtagtcttgcagtgtagtttgaagtcagatagcgtgatgc

SEQ ID NO: 307741 - DNA, 201 bp, Homo sapiens
ctgtgtggtgttatttctgaggcctctgttctgttttattggactatatatctgttttggtaccagtaccgtgctgttttggttactgtagtcttgcagtrtagtttgaagtcagatagcgtgatgcctccagctttgttcttcttgcccaggattgtcttggttatgcaggctcttttttggttccatatgaagtttaaa

SEQ ID NO: 307742 - DNA, 201 bp, Homo sapiens
atagtcttttactattgagtatgatgttagctgtgagtttctaatagataccctttttcaggttgaggaagttctctgttattcctagtttgtcgagtggttttttttttttggtgttgctgttttgttctttttatgaaagggtctcagtctgtcacccaggctggagtgcagtggtgtgatctcagctcactgcaacct

SEQ ID NO: 307743 - DNA, 201 bp, Homo sapiens
gaactcctgacctcacgatctgccactttgacctccgaaagtgttgggattacaggcgcgtgagccaccgtgcccggctgtgtgtgtgtgttttttttttwaaccatgaagttgtgttggattttatcaaatgctttttctgtggaaacctaaacttttaggctacagttctttttaaagcaggtagcaggacagaacttc

SEQ ID NO: 307744 - DNA, 201 bp, Homo sapiens
tgctaattctcttcagatgctgatatagaaatgacactgatttttttctttttagtatttaagagcacccactagaaggatatttaatatttgtatgtagttttttttttcctgttatgttaagcagaatttcaggaccttgctgtagagcagcatctctccatttaagtaatgtgtagaccccttttcaaaggggaaagc

SEQ ID NO: 307745 - DNA, 201 bp, Homo sapiens
aatctgtacattgctttgggcaatatggttgttttaacgatattgattcttccaatccatgagcatgggaggtttttccatttgtttgtgtcatttgtgatttttttcagcagtatttcgtacttcttgtagcaatctttcacctgcttgattagatgtattcctaggtattttattcttttttgtggctattgtaaatgt

SEQ ID NO: 307746 - DNA, 201 bp, Homo sapiens
actggtttttatacattaattttgtatctcgaaacttcatactgaagttgtttatcagttccaggagcgtttgtctttagggttttctagttatacagtcatatcagtgaagagagatagtttgacttcttttcctatttggatgccttttctttctttctcttacctgattgttctggctaggactttcagtactatatt

SEQ ID NO: 307747 - DNA, 201 bp, Homo sapiens
ctggtttttatacattaattttgtatctcgaaacttcatactgaagttgtttatcagttccaggagcgtttgtctttagggttttctagttatacagtcatatcagtgaagagagatagtttgacttcttttcctatttggatgccttttctttctttctcttacctgattgttctggctaggactttcagtactatattg

SEQ ID NO: 307748 - DNA, 201 bp, Homo sapiens
tacctgggcggctgaaaagggaagattgcttgaccccacaagttcatttctagcctgggaaacatagcaagaccccatctggggagagagagagagagaaagagagagagagagagacagagacagacagacagagacagacataccaactgatctccatatgtaccttatttagatcccaattcaaatgaattaactagt

SEQ ID NO: 307749 - DNA, 201 bp, Homo sapiens
acctgggcggctgaaaagggaagattgcttgaccccacaagttcatttctagcctgggaaacatagcaagaccccatctggggagagagagagagagaaagagagagagagagagacagagacagacagacagagacagacataccaactgatctccatatgtaccttatttagatcccaattcaaatgaattaactagta

SEQ ID NO: 307750 - DNA, 201 bp, Homo sapiens
aactgagccacatggtatgtgcgattaatgagctagatgatcctgtaattgttcaggttcatccagctcattaaaagttatcaattggccgggcacggtgrctcacgcctgtaatcccagcactttgggaggccgaggcgggcggatcacgaagtcaggagatcgagaccatcctggctaacacagtgaaaccccgtctcc

SEQ ID NO: 307751 - DNA, 201 bp, Homo sapiens
caggaattgggtgggagttgggtggattgccacctatcttaaatagacctcattggaagaagttaatatttgagcagaaatgtgaaggaggtaaagttaaragttaggagcagagggaacatactactcactctcatgcgtggtttcatttgaaccttacaacaacgctgttagagcgttgctgtcaaccttcagccaaca

SEQ ID NO: 307752 - DNA, 201 bp, Homo sapiens
ggtaatctccagtatttatgggctcaaatcagtgttgatggtgtattcttttgttcacttattcaacaaaaacaaaaacgatgttggaggtcaaaggatcrgtgagtctcttccataagagttcttggtttctctttatccatccatctcatatttattgagtacctcctatgtgccataccttattttaggtatttggaa

SEQ ID NO: 307753 - DNA, 201 bp, Homo sapiens
aacttgagtggggggcaggcagccacttaggcccccaggaagaaattacaagaatgcttaatgaagcattatgagtttcctgcttgtgactaaatcacagraaaactggatttgtctctgatttgggctgtatttagtctgtgaatattgtatttgttcacccagtgtttttaacatccttggattcgttcccaatattta

SEQ ID NO: 307754 - DNA, 201 bp, Homo sapiens
cagctcggcttcccaaagtgctgagattataggtgtgagccactgcacccagccttgtttggaaatttctaaatgagagcagaagtacccatccaatggtaaaaaataagaaggatccataaatccagtgttacgaatggtataggaaaattggtattctcctgcactgttgattagagtaaaaaaatgtgtgtaatcttt

SEQ ID NO: 307755 - DNA, 201 bp, Homo sapiens
ttgcaccactgcactccaacctgggtgacagagtgagacccgtgtcaaaagaaaaaagtgtatttattgattatctgcttcatgccaagcattcctaggarctaaaatacttaaagagtgttcattgtatttagggttgagtagatatagatgccagttcacacagtatcaccatgtgataactacaataatgcagaaatg

SEQ ID NO: 307756 - DNA, 201 bp, Homo sapiens
caactgagcatttagagttcccacccttaaaaagtgggagctgttcccatggctgctgagagtgctgcggaagctggttctctttgtccttaagttgatcratagcaggcatcagcggggaagatgctttgtactttgcttgttaaacagagggctgctaagcagctgtggcagtgtgaccctggttgtgctgctgtgggt

SEQ ID NO: 307757 - DNA, 201 bp, Homo sapiens
tgagtctgttggtagaatgtctttcaaactcttctctcttgtagtcttcctagttcgtcagttacacttagaggtagatatccattaaaattcttaccagstggtatacatttctctgttctgatggaaacttgtatagtcaggtgataaaggcattacaacggtaccaagtcagcatcgctccactcaaaagaaattttt

SEQ ID NO: 307758 - DNA, 201 bp, Homo sapiens
ggctgaagaaaacacagttgccttattttcaaatttggtgtaaatgtttgctagttgtagaagctaatttaatagcttcatctgcaaattataagtaatayttgacaaatattcaatatgtgttttgctttgagattttagttgttaatatgcaacacattacctataaatatgcaaggggaagaaactctttgggattag

SEQ ID NO: 307759 - DNA, 201 bp, Homo sapiens
agtggtgcaatctcagccaactgcatcctctgcctcctgggttcaagtgattctcctacctcagcctcctaagtagctggattacaggcatctgccaaccwtgtccggctaatttttttgtatttttagtagagattgggtttcaccatgttggccaaggtgggtttgaactctgaagcgaatagaagtaggcttatcatc

SEQ ID NO: 307760 - DNA, 201 bp, Homo sapiens
tagattccatgtggtatacccagtagattgcattttgagtgtcattgatgattaatggatagagactgcttagaccactgtatggagaaggattctgaagycatgtctgggtgcagtgggagagtgtcatgatacattgattattacttttcataaccgatttacctaaaccaaataatactagtttttaaattcctggat

SEQ ID NO: 307761 - DNA, 201 bp, Homo sapiens
aagtgaacaaaggtctctggttttcctaggcagaggaccctgcggccttctgcagtgtttgtgtccctgggtacttgagactagggagtggtgatgactcrtaaggagcatgctgccttcaagcatctgtttaacaaagcacatcttgcaccgcccttaatccattcaaccctgagtggatatagcacatgtttcagagag

SEQ ID NO: 307762 - DNA, 201 bp, Homo sapiens
gggagagagagggagagagggggagagagagggagagagagagggagagggagagggctcttaagggtccatcatgttttggagtctaaaagttgggaccmggtgtgggggcacaacacctgcaatcctagcaccttgggaggccaaggcaggaggattcttgattggcccaggagtttgagaccagcctgtgtgacatgg

SEQ ID NO: 307763 - DNA, 201 bp, Homo sapiens
ggcacaacacctgcaatcctagcaccttgggaggccaaggcaggaggattcttgattggcccaggagtttgagaccagcctgtgtgacatggtgagactgtctctgcaaaatataaaaaattagctgggtgtggtggtgcgtgcccgtagtcctagctactcggagagactgaggtggagtgtatcactcgagcctgggaa

SEQ ID NO: 307764 - DNA, 201 bp, Homo sapiens
gcacaacacctgcaatcctagcaccttgggaggccaaggcaggaggattcttgattggcccaggagtttgagaccagcctgtgtgacatggtgagactgtctctgcaaaatataaaaaattagctgggtgtggtggtgcgtgcccgtagtcctagctactcggagagactgaggtggagtgtatcactcgagcctgggaag

SEQ ID NO: 307765 - DNA, 201 bp, Homo sapiens
gttgtttcatttatgatactaaattattttaaggacatgttaagtttaatttgtctttataatgcaagtaatatatggttcatgatagaaaaagttgattaaaaacatatcagccagaaactgagtcccgtatttttctcacccacaggtatcactgttagcatttctaggtaaacagtcttttttccccctattatgtat

SEQ ID NO: 307766 - DNA, 201 bp, Homo sapiens
tgggaggcagagcttgcagtgagctgagattgcaccactgcactccagcctgggcgacagagccagactccatctcaaaaaaaaaaaaaaaaaaaaaaaargaaaattactaaagtctgtgaaattagtacattttctgaatacttcactgtaattccagtgaatattttactttcacacacacacaaacacacacacaat

SEQ ID NO: 307767 - DNA, 201 bp, Homo sapiens
ttttgtagagacagggttcactatgttgtccaggttggtcttgaactcctggcctcaagcaatcctaccatctcagcctcccagtgtgctgggattacagrcataagccaccacacccagccataaaaatgttagtaactattttaaagccccaaatcactatggtaatttacattcttgggctactatttactgacactg

SEQ ID NO: 307768 - DNA, 201 bp, Homo sapiens
tgaggcaggagaatcgcttgaacccaggaggcagaggttgcagtgagcccagatcgcaccactgcactccagcgtgggtgacagagcgagactccgtctcaaaaaaaaaaaaaaaaaaaagaatcactacctcttcttatgtatgtttagtgtgggacaggtgctgtgttatacctggcacctaccttaaacaactgaatc

SEQ ID NO: 307769 - DNA, 201 bp, Homo sapiens
caaaagttttctcagactaccttgggagatgtcatgttacctgattgccttgtgttgtgctttagaatggtgctagtttctgaattatccattttatttcygtttttttttcttatcttctatagatgatcacagtagggtgaagttaagacctttaccaggaaaagactctaagcacagcgactacattaatgcaaacta

SEQ ID NO: 307770 - DNA, 201 bp, Homo sapiens
ctccaactttctttgctcaaaatgaaaccaattgatgataaatgaaaggatcagtaggctttaaagcagttatttacaactgagcatttagagttcccacscttaaaaagtgggagctgttcccatggctgctgagagtgctgcggaagctggttctctttgtccttaagttgatcgatagcaggcatcagcggggaagat

SEQ ID NO: 307771 - DNA, 201 bp, Homo sapiens
tggcacatgcttgtagctgaattattgatgatgcctttgatttgttttcttgggattcattgtgccctagtgtctcctgtatgtgccgtccctcatgcctycaactttctttgctcaaaatgaaaccaattgatgataaatgaaaggatcagtaggctttaaagcagttatttacaactgagcatttagagttcccaccct

SEQ ID NO: 307772 - DNA, 201 bp, Homo sapiens
tctcaaccttagcactagtggtatttttgggccccgatagttctgtgttgctggagctcttctgtgcattgtaggatgtgtagtagtattcctggcctccrctcactggatgccactagcatcctcctaagttggaacatccaggggtagtcaaatgccttctggcaagtgggggattctcccctaatagagaaccattct

SEQ ID NO: 307773 - DNA, 201 bp, Homo sapiens
acctctgcctgactctgaaattagaatttcctctacggtgcaatctattttccctgatggccaggacacttgttgagctctttctttgggtcatggactgkgctagggttaagggatattcagtggagcaaatgttccccttctctgcccttctagaaccttgttcctctagttacaatattttaatattgttgttaataa

SEQ ID NO: 307774 - DNA, 201 bp, Homo sapiens
tggctcctcttagaaataggttgtcgtatagatgcacagactgacacttaaagttttagttacttgctcaagatcatgtggctgatgacagggcttgaaaytggtaaagccttggtttggggtttgaatcctgccttatgtccctgagctcattatttcaacagacttgctataatctgctggtggaaagcagaccatcaa

SEQ ID NO: 307775 - DNA, 201 bp, Homo sapiens
agtgtactagagcttttggagttagaaaaagaaccatggaaagcagagttgctgctgatgtgttttgcttcttggctaagtttgtgtataagtttatagaygtatactttccctatgtatacacatgaggaagtactaaagcagaactttatagctatttactttacccttggtttcacaaatagcttcactgaaacatta

SEQ ID NO: 307776 - DNA, 201 bp, Homo sapiens
ctatgtatacacatgaggaagtactaaagcagaactttatagctatttactttacccttggtttcacaaatagcttcactgaaacattacaagagaaattytcagtctcagaatccctttcatttcagaaattctttgacttctgtgatttttttttttttttggtttggtaatttttcctgaaattcagttattcacttt

SEQ ID NO: 307777 - DNA, 201 bp, Homo sapiens
tatgggagccgcattggtcttaggtgtatactaaatgttagtaacctttttccgtaataactaagaaaaaaatgttgatacaaacatcactatgtgaaagraaggctcacaggtgtgagaagaacagggaggctgggttctttcaggtttggtgttgtcactagcctggagtcatttatctccacacccccccccaccccc

SEQ ID NO: 307778 - DNA, 201 bp, Homo sapiens
ttccaatggtacattgtggtagactgtattcggcaaccttttgtatgaaagggttaacatagatctgtctcatcagtgtctttctgtttaaggatagcatraaagtgctgattgttaacttcacttggtcctatgcttattctttatttttactgtaggatttactttttcttttcctgtgtctttctctctccaaaaaaa

SEQ ID NO: 307779 - DNA, 201 bp, Homo sapiens
atattagataggccaatatattgtaaatactctaagatgattctgtaggaagggtttttaaaaagtgacaaccagttatatgcaatttgaaacaaagaacrtgcatttttgcatttttttttttaatctcttgaaagagttttaacttatggtggtttagaaacttgggtgcagaaatcaacttgtattgttttgttttaa

SEQ ID NO: 307780 - DNA, 201 bp, Homo sapiens
gcagtggcgctgtcttggctcactgcaagctccgcctcccgggttcacgccattctcctgcctcagcctcccgagtagctgggactacaggcgcccaccaycgcgcccggctaattttttgtattttttttttttttagtagagacggggtttcaccgtgttagccaggatggtctcgatctcctgacctcgtgatccgcc

SEQ ID NO: 307781 - DNA, 201 bp, Homo sapiens
aaaaaaaaaaaaaatcaaagtgccccatggcacaagttatccactgatgacatttccctctgaggactgttttctgggttagggtaattaccacaacccaraaggtcatggagtctaagttaaagggcgtcactgattcagctctcagatgagccaccccactgggatgtatgatggtataaactgcaattaaatcttgtg

SEQ ID NO: 307782 - DNA, 201 bp, Homo sapiens
cattctggaaggctgtcaaagacaatcactgggctctctgatacggttttctacttgacttgcaacgcttgacagccttcggcaaagataacacgtttcaktgacagctttcagcttcgtatcaccaatgacaggttttagacgtatgtagggttcactcgatgcaagctgattcatgaccttggtcttccagaagctgat

SEQ ID NO: 307783 - DNA, 201 bp, Homo sapiens
gagaagttacaaaggtgttagctgttaagatgtggagtgaactggaatccagtggctctcaaatcttgcagctcatcagaaacccctggtgaactttgtamgtggcactcacccctattccttaactgtgaaatctatacatttttttttcatccaccccagataaatcatatgtaggtgggctcttggtccagtttggga

SEQ ID NO: 307784 - DNA, 201 bp, Homo sapiens
aaataagctctgggatgttatattacatctctgcttagtgctacctggggttctgttgatgcctaaagatatttttcactcttattacttaactacttatractttggcccattaaagcaagtttttttttctctttctcttcttaaagtgaaccctttgtaaccaaggatgtcactgtgaaccactgttagtaatccctt

SEQ ID NO: 307785 - DNA, 201 bp, Homo sapiens
ttaattttttttccctttttcatgtttacagtcttttatgggctaagaagaaagttgtatttaggatattgcccacaatagcaaaacatgctaactcgatsaaggtgctttttttgtgaataaatgctctgcttattttaggaaacatttaaaaattgtcagaaatatggacaaccctaatagcccttctacacaactctc

SEQ ID NO: 307786 - DNA, 201 bp, Homo sapiens
gaggaaggcttcttgttaagtgttcatctcttcccaactaggtttaagttaaccatagtctttatttagtatctttttttttcttttacttaaaagtattyattcaaatttgtgaaaaacaaagcattcaatactatgagtcttgtggaactgcaaatgattaatggtataattctcagtcttttataaagtgtcttaaca

SEQ ID NO: 307787 - DNA, 201 bp, Homo sapiens
tctcacacacacacacacgcttactacatattcatacatttattctacagggaagaagagacagttggagacactaatattccagctgtcggcagcagaaycatttcacaaccttcttcccagaacttttggtcattactattcttgcccctcagcctcactactcactgaaaaaatatttaatgtggatctagtcagttc

SEQ ID NO: 307788 - DNA, 201 bp, Homo sapiens
aaattgacttttctgtcttttagttgtatgtctttatctccaacagatatgtgattatcctccagagaggaccatgagaatttatttttaattttcattcygttaattacttgtgtaacatatgtatgtccccataacagccagtgctcactcgcgtgcacgctgtctctctctctctctctctcacacacacacacacgc

SEQ ID NO: 307789 - DNA, 201 bp, Homo sapiens
gtgacagagcgagactccgtctcaaaaaaaaaaaaaaaaaaaagaatcactacctcttcttatgtatgtttagtgtgggacaggtgctgtgttatacctgrcacctaccttaaacaactgaatctttatgaaggccatcagaggcagtctctcttattcttcccactttacatgtgaggaaacgaggcctagacagtgaga

SEQ ID NO: 307790 - DNA, 201 bp, Homo sapiens
ttccttgtctggaagtcttgtttgtttgatcttcagagtattttaaaaatagaaacagactgagaaaatccagccatgcttgaaaaatcttaaggtttccrtggatctacattgctcagtctcaaccagacactagaactgagtggaagctgctttctttagacctgtcattctcaaattgtggtccctgggactaacagc

SEQ ID NO: 307791 - DNA, 201 bp, Homo sapiens
cttgaacccgggaggtagaagttgcagtgagctgagatcatgccgttgcactgcagcctgggcgacgagcgaaactctgtctcaaaaaaccaaaaaaacaraaaagcaaaaaaaccccacaatccagtgagtaagacctcagccggcctgaggttcacagggtttaaatggaatgcagtgggaagtaaagagtgatcccaa

SEQ ID NO: 307792 - DNA, 201 bp, Homo sapiens
cttcagagtattttaaaaatagaaacagactgagaaaatccagccatgcttgaaaaatcttaaggtttccatggatctacattgctcagtctcaaccagasactagaactgagtggaagctgctttctttagacctgtcattctcaaattgtggtccctgggactaacagcatcagcatcaacccaggggacttgtaagaa

SEQ ID NO: 307793 - DNA, 201 bp, Homo sapiens
gggggccttcagtgacacctcaagttggtccttagccatccaccctggtgggtgcccatagattcagataagcagtggagagcatgtgtgctgcactagcsctgttcagggtaatagccagcatgtattcatacaacactggttaatgattcttcccggcagtcctactagggactccacctttgtcaaggccgtaaatgg

SEQ ID NO: 307794 - DNA, 201 bp, Homo sapiens
ttcattggagtaaaagggaacaaaagaagctagcttcagagcaggaaaatgcctgtgatgacaaagaagcctaaaagaatgatttgcataaaactgaaacmcttgaaaagcttcaagataataaggttaaatacaaaaggagactcaacctcagagtggctgcttttgaaataagttttctagagggttttcaagaacaaa

SEQ ID NO: 307795 - DNA, 201 bp, Homo sapiens
gtatttattgagtaatcaataagctatatattttgtcatgtatgaattatgtatgcattatttataatacctcacacatgaatcatacttatagtaagcaktttttgaatgcttagtatgtgtcaggcactgttctagaagctgggacaccaaagagagctgtttagataagatctgtgtttttacggtactcatattccg

SEQ ID NO: 307796 - DNA, 201 bp, Homo sapiens
catgtataaagctaacagcccaaattccttgctttggagaattgcagaaatgacattaactcattttctttctttgatttttatctgaatgtgcaagtaattttttttttttttttttcgagatgaagtctcgctcttgtcccccaggctgaaatgcaatggcacaatcttggctcactgccacctccgcctccggggttc

SEQ ID NO: 307797 - DNA, 201 bp, Homo sapiens
tgtgtttttacggtactcatattccgctttggagaaggaaagggagacacagtaaacaagtgttatgtttatttttttgtttgtttagtcatttagttttygtaatttaatttttaaaaatagataatacatgtacagcatttgaaagtcaaaataatgtaaaaaggtatatgcagagaagtcttatttccaccatgttgg

SEQ ID NO: 307798 - DNA, 201 bp, Homo sapiens
atgtataaagctaacagcccaaattccttgctttggagaattgcagaaatgacattaactcattttctttctttgatttttatctgaatgtgcaagtaattttttttttttttttttcgagatgaagtctcgctcttgtcccccaggctgaaatgcaatggcacaatcttggctcactgccacctccgcctccggggttca

SEQ ID NO: 307799 - DNA, 201 bp, Homo sapiens
catccaaactgctggaagaattgaaagatcctgagcacagttgcttaaataagtagactacatgctctatgaagaaatcatattattttctcagaggagaragagttggcccagtgaggaaatgattgctgggaacaaactttctggttttccattttgttctgctacaaatggcacgttctatcaatcaaggcctgccag

SEQ ID NO: 307800 - DNA, 201 bp, Homo sapiens
tgcaatggcacaatcttggctcactgccacctccgcctccggggttcaagcgattctcttgcctcagcctcccgagtagctggaattacaggcgctaccaygcccagctaatttttgtatttttagtagagatggggtttcaccatgttggccaggctggtctcgaactcctgacctcaggtgatccacccgcctcagcct

SEQ ID NO: 307801 - DNA, 201 bp, Homo sapiens
aatgtggttagatctatatttaaatctcttccttatttaaatgatgataattagcatcaattattgatatttcactatgtgccaggctttgtgctagaccyctttccatgtcgaatcccatgtagtgcgtacaatagttctatgaggttagataatagtagccccattttaaaagtaagtaaacgaaggcttagatataag

SEQ ID NO: 307802 - DNA, 201 bp, Homo sapiens
aggttagataatagtagccccattttaaaagtaagtaaacgaaggcttagatataagaggaaacttctcttagtctcttgactagtaagtggccccagatsattccaagcttgtccaacccgtggcccagggcagcatgtaccccaggatggctttgaatgaggcccaacacaaattcgtaaactttcttaaaacattatg

SEQ ID NO: 307803 - DNA, 201 bp, Homo sapiens
gtgggaacaatgcgggcaaaggcctagaggcagtgaaatgctccgagtatttgaggaagaggaaggaggccctggagtcctgtagggaaccatggaaatcstggaagaatccagaggtcggctgggcccagatctgggagagcttttacgctggcatgggttgtgattagattttttttttttaatttttttattttttta

SEQ ID NO: 307804 - DNA, 201 bp, Homo sapiens
aaataaagcaggcaatcaccattcaataaacacacttgatttattttgtataaaagggttacgtttacaactaaaagtttaaacttttataaaaagtttakcatgaataagtacatcattacactttttaatgcagaaatagacatctctgccactatacaagaaaactctaattaaagagttaacaaggtttcacttaaa

SEQ ID NO: 307805 - DNA, 201 bp, Homo sapiens
accatttttttcttcagtttttttgatgactacttttcttattttacagtaaccaaattttcatctatttttttaaattgcttgattaggatctcaaaggkttctaaggttttgttttgttgacagccgtaaaatgtaaccattatggagtaatttttttcccttttaagtcttttcatgtgacctcaatttttcaaatgt

SEQ ID NO: 307806 - DNA, 201 bp, Homo sapiens
ctaacaatatatctgagaactttcaaggttggtcttgaactcctggtctgaagcaatcctcctgcttcagtctcccaaattagtgcctaatttcttccttccccctccgtaggttctaccattctcctatttattatgcatatcaagtttttcttcccctgatgccatcgatggtggggcatagatacttgaatatttgtc

SEQ ID NO: 307807 - DNA, 201 bp, Homo sapiens
gcactttgggaggcttaggcgagtggatcacctgaggtcaggagaccagcctggttaacacggttaaaccccatgattactaaaaaaaaaaaaaaaaaaawagaaaaaaaatagaaaaattagttgggtgtggtgacatgcacctgtaatcccagctgcttgggaggctgaggcaccgagaaccacttgaaccagggaggc

SEQ ID NO: 307808 - DNA, 201 bp, Homo sapiens
attggccccagagggaagagacagaggacctgaagtctcaaatcagctgcatattgcagatgcccatgggaaagtgtgctgggcctacttgggatgtgcaytgaagagtaggcatgcttccatagcatacctagttcctggatgagtgcaaggagactgcagtggagcaagatgtggtgattttggggctctatcattttc

SEQ ID NO: 307809 - DNA, 201 bp, Homo sapiens
ttttgtagactagcttaataaggtgaaaggaaaaacaacttgttcttcatggagtttaagttcacatggatttatagtgcaagtagaaatcaataatgtakgacaacggagaaatgccttcattcttggatatgtctgtccagcaaatatactgataataaatatccctgttataaatgatgatgaagctgggtgcagtgg

SEQ ID NO: 307810 - DNA, 201 bp, Homo sapiens
cataacatgggaatctttatacaacagagggtacaaaatgtttttagcacaaaaaggggtaaatggagataaaaggggaacctatagattaaatgagattraggaataccttgatttatcttaatgtgtatggcccttatttggatcctgattgaagcaaacacgttgtaaaatggaaaacattataactagttgggaaaa

SEQ ID NO: 307811 - DNA, 201 bp, Homo sapiens
cttgtaatttttgtgtatataccgttactggttttgatttgtatttattttttctttacatgatgtgatatatttctgtaataatagttctgcaactagctttttttttcacagaatggcattagatacttctacctccatttgaaatttatatggttttttaaaaagtttaacttttaaattggtaagatatttatatga

SEQ ID NO: 307812 - DNA, 201 bp, Homo sapiens
cagacccactaagagataatgtttaaccaagtatctgggcaccccatggcccagtcaagttgacacacagaaatacccatcatctcagaaaacactccccyttttaatttcttgttcctgtgtctctgtttttttttttttttttttttttttactgtggctttagggataaaacagtaattttggtgttgaatcacggtg

SEQ ID NO: 307813 - DNA, 201 bp, Homo sapiens
cccactcttgtcctattggtcagaatttattcacatgtacatccctagctgcaagggaagctgggacatgtagtcttaaacttgggtggccagcagccacygacctgggggttctattgcttattttgttgaaataaattgacatagtcttctgaccatggggagcttatttgtcctgttgtgtatcatgcccctggtgct

SEQ ID NO: 307814 - DNA, 201 bp, Homo sapiens
ctttaccatgcccactgataatgtttcatgttgacagggggtgtaggacagggtttctgcatctcagcactatggacattctgggtggataattcttttcttttttttttttttcttttgtcaacctccaaagcgtgagtaggcacaggaaactcccatgatgtggggcactattctttgcattttggggtgtttaggagc

SEQ ID NO: 307815 - DNA, 201 bp, Homo sapiens
agctggaaggtacaaagtatagagtatgtctcattcccttttaagagtgtgtgctgctcccactcttgtcctattggtcagaatttattcacatgtacatmcctagctgcaagggaagctgggacatgtagtcttaaacttgggtggccagcagccactgacctgggggttctattgcttattttgttgaaataaattgac

SEQ ID NO: 307816 - DNA, 201 bp, Homo sapiens
ggaattatttaatttatgctgttacttcctttcctgccttttccctgaatgaatctaaggcaactttggtagcatcacattgcctctgtttgaaaaacttygctatgcttagttttagtggatgggttatctcattggcatctgaaatggtaaatattccgagtggtatcattagtttcgcttttcagtgatctgtgaagt

SEQ ID NO: 307817 - DNA, 201 bp, Homo sapiens
ctgggaagcccataaatgcttgatcactgaccccagaccttaatgttcattccttattggaagcctttaattttggtatgatggacacaattatatcacartggttcctgtggagttgttaaagtcaatctgttcttaaaaacttcttaaaaggccgatttattgacttgatgggctgtaaaacagtttccgtttattacg

SEQ ID NO: 307818 - DNA, 201 bp, Homo sapiens
atctatgacccccaaaaagggtaaaaatcattatttcataagagtttacagattaccagatacctggatttgtaacaaaccatgaactgcagtaaaagatrtatatggcatctagaaaaaaaatcagaaaaagatgccatatatagaaaaatgcatttgaattaatacgcatttagtgaattcagtgtaattttatgcttt

SEQ ID NO: 307819 - DNA, 201 bp, Homo sapiens
gttttttgttagtttcttttacctaaatgaacatattcatgacaagttgaagccttgatctgggcttgtcctttgggagaaaattaaatcttaacctaaayaatggaaatactaaaggaatgcttgttgaaaatatgtgcaatatatattttaaaaaaaaaagacctcagaaggcaagggtatatttagaatttggtagaa

SEQ ID NO: 307820 - DNA, 201 bp, Homo sapiens
acatgaatttacatttgtctgtctctaaaacattagaaaagttttactctggaaaaagatatggcccatcagatacaaagttagtgatgttattatagtctttttttttttttttttgagacggagtttcactcttgttgcccaggctggagtgcaatggtgtgatctcggctcactgcaacatctgcctcctgggttcaa

SEQ ID NO: 307821 - DNA, 201 bp, Homo sapiens
gccttgatctgggcttgtcctttgggagaaaattaaatcttaacctaaacaatggaaatactaaaggaatgcttgttgaaaatatgtgcaatatatatttwaaaaaaaaaagacctcagaaggcaagggtatatttagaatttggtagaaattttggtatctgtattctaaacatgtggtttcagtgtacaggtgatatgt

SEQ ID NO: 307822 - DNA, 201 bp, Homo sapiens
taagcacaatttttcaccctttctgatagatcactggtgctgccaagaagcttttaagctgtaaatgaaaaggaaaaacaatcctgcatttgatcttgggktttttttttttcccccttcagtgaattatcttagaacagaattttgccatgagtgcttttattggaatttaaaactataataccgacttttccttcagtc

SEQ ID NO: 307823 - DNA, 201 bp, Homo sapiens
gggagaaaattaaatcttaacctaaacaatggaaatactaaaggaatgcttgttgaaaatatgtgcaatatatattttaaaaaaaaaagacctcagaaggyaagggtatatttagaatttggtagaaattttggtatctgtattctaaacatgtggtttcagtgtacaggtgatatgtttaagtggatgtaatttaacagt

SEQ ID NO: 307824 - DNA, 201 bp, Homo sapiens
aggttgcagggagccaagatcatgccactgcactgtagcatgggtgactgagcaagaccctgtctaaaacaaaacaaaacaaaacaaaaaaacaaaaaccaaaaaaaaaaaaaaaacgcagactcagagaaccaagacagatttggaaacttcattcagggaagaatttgttagatcattgacattgctttagttttaaaa

SEQ ID NO: 307825 - DNA, 201 bp, Homo sapiens
ggagaaaattaaatcttaacctaaacaatggaaatactaaaggaatgcttgttgaaaatatgtgcaatatatattttaaaaaaaaaagacctcagaaggcragggtatatttagaatttggtagaaattttggtatctgtattctaaacatgtggtttcagtgtacaggtgatatgtttaagtggatgtaatttaacagta

SEQ ID NO: 307826 - DNA, 201 bp, Homo sapiens
tgtgagatacactttgtattttattttttaaattttttgcctgtggatgtccaattgctccagcaccatttgttgaaaagactatccttcctccattgaaytgcctttgcacctttgtcaaaaatcagttggccgtactctgtgggtctccttctgggttctctattctgttccattgatctttatgcctgaatctcagcc

SEQ ID NO: 307827 - DNA, 201 bp, Homo sapiens
tcatgtggaatttgcttcagaaggtatagagcacaatggttaatgtgttatcttttcagaaacatagaactaagttgatgggaaagaggggacaattttaytctgtaatcactaaagtggtttggagactttcccaaagatattggcaggatggctttataacataaaccatgacttggagaggataaaattaatcagtaa

SEQ ID NO: 307828 - DNA, 201 bp, Homo sapiens
atagaacaagtcttgaatttggatagagtgattctacccactctattcttctctttttgaagatttgattccctgcctacctccaccactacccccaccttttttttttttttttggcttggaatggctactgtgttcattgcaaatgaccacagcactccctgagaaatcttccctttcatgtggcacatttaatcctga

SEQ ID NO: 307829 - DNA, 201 bp, Homo sapiens
tcccaaagatattggcaggatggctttataacataaaccatgacttggagaggataaaattaatcagtaatcttcactgaagtataaagtgtgaatgaggygggaaacgtcatgggaaaggagatcttttcttatggactgggggactttctcagatggttctctcagcactgtcctctcctgggtggcattgtcacatgc

SEQ ID NO: 307830 - DNA, 201 bp, Homo sapiens
ggcggatcacgaggtcaggagatccagaccatcctggctaacgcagtgaaatcccgtctctactgaaaatacaaaaaattagccagccatggtggcgggcrtctgtaggcccagctactcgggagactgagacaggagaatggcgtgaacccgggaggcggagcttgcagtgagccgagattgtgccactgcagtccagcc

SEQ ID NO: 307831 - DNA, 201 bp, Homo sapiens
atcttttcttatggactgggggactttctcagatggttctctcagcactgtcctctcctgggtggcattgtcacatgcatttatttattatggggttatgmgttaatgacccacctccattgccgctgctagagcaaaatgttagtttgagatcaaaactctccatcaaacatagttgaattccaaatcgctgaactgccc

SEQ ID NO: 307832 - DNA, 201 bp, Homo sapiens
tgagacaggagaatggcgtgaacccgggaggcggagcttgcagtgagccgagattgtgccactgcagtccagcctgggcaacacagtgagactccgtctcaaaaaaaaaaaaaaaagattgagctattgaatttaattttgattttgattttctgtggcatttttctgagtgctgtagttttgaatgcaggaggggagagg

SEQ ID NO: 307833 - DNA, 201 bp, Homo sapiens
tcttaaaagtgaaattatgggccaagctggcttaagttgacaacattagcaacccactgtcagaaacacaaagacacccccagccagccattactattatyacgcgcttaagcaaagggcaaactcagagtttctttggaaccgattgcctttgttccacttagtatcataaaggagatattggctgtaaaacctaatggt

SEQ ID NO: 307834 - DNA, 201 bp, Homo sapiens
ataaaaatggagataacaaaaatgaacctgtagccctgggatattctgactagcaacattaaagtggttgcctgggcaatactaaccccaattccttgagttttttttttttttttctttgaaatgccggggacaggcctacattgattgaatcaaacaaagccgatgagaggcctgtgtttgagggggaagaaatgttcc

SEQ ID NO: 307835 - DNA, 201 bp, Homo sapiens
agatgtgctcacaccgacttacggaaaagttctttttagaattgttttgggaggcagagttgaggttgaggccatgctcacatccatgttaaaacaatgatttttttttttttttggagacagcatctcgctctgttgcccaggctggagcgcagtggcgtgatctcagctcactgcaacctccgcctcctgggttcaagt

SEQ ID NO: 307836 - DNA, 201 bp, Homo sapiens
ggagcgcagtggcgtgatctcagctcactgcaacctccgcctcctgggttcaagtgattctcctgcctcagattcccgagtagctgggactacaggcgcakgccaccatgcctggctaattttttgtattttagtagagatggggtttcaccatgttacccaggctggtctcaaactcctgagctcaggcaatccgcctgc

SEQ ID NO: 307837 - DNA, 201 bp, Homo sapiens
agagttgggggaaaagatcagaggttaagtaacttgcccaaggtcacatggctggaactggcacccagaccctgtagcttttatttctgtattctttattrccttccaggaaacctggtttttctgtagtagttggccttttcttaggttttatgagtggacaggttctgtgaatattctagaagacatgctaagtatgtt

SEQ ID NO: 307838 - DNA, 201 bp, Homo sapiens
gagcacggaagatgagagatctgtaatcttgtagttggtgtagtgtcaccaaaggggactctggcaggcacatgactttatgtctttacttctttcttgargcggggagttgggggtgggggaaggaccagttcttattctgtcacccaggctgagtgcagtggtgccatcacaactcactgcagccttgacctcctgggc

SEQ ID NO: 307839 - DNA, 201 bp, Homo sapiens
cagttcccatctcttaattttttagttgtttggctaaatgcttgggcattttagccatggaataaatactagtaaagactttatggaatacgtagcaggargcatttttaaatggtgcactgtttccactgagctgtggacagatgggttgtttataggctgtttcatatccagcctccttttttgttttgtttcgtttta

SEQ ID NO: 307840 - DNA, 201 bp, Homo sapiens
tgaggggcactggctatgggaaggaaccgctggcactgaatgaatagaaattttgaacatgcttgttttgaaactcggctacctctgttcagggttgaccsgtctcagtggtaacaagctaaaagtgaaataatgcctttttgccaacaccatcttgattcttcttgtatggactgcttgagccaatgtaacacataatgt

SEQ ID NO: 307841 - DNA, 201 bp, Homo sapiens
gagaattgctgtgatgtcatgtggcataaccctgggaatactgccagttctgaaaacctgtgtagcaaatcagaattgccgtatttttggaaacttcactrtgtgaatttcaagactgctatgctttggaattatacggtgtgaactgtcttactctgttgtcgtggaagaatactatcatcttttaggttgataatgttt

SEQ ID NO: 307842 - DNA, 201 bp, Homo sapiens
ccactgagctgtggacagatgggttgtttataggctgtttcatatccagcctccttttttgttttgtttcgttttattttgttttggtcttttgctggtgrgaagtagaaccacgcttcttttgttctttttctacctctctgctaaatcttcttttatatgtaatattctttaaagtataatttgcaatgataaagtggc

SEQ ID NO: 307843 - DNA, 201 bp, Homo sapiens
tatgtaatattctttaaagtataatttgcaatgataaagtggcatccaaaatgctaaaggaacatgttaagacatttgaagaatctctttcttctagaaakatgtatgaaaatatttgttaataataaatgattgagggtttgcttcagcataattggaggagtgtgaggatgtagacagaagaagactggtcatgaagct

SEQ ID NO: 307844 - DNA, 201 bp, Homo sapiens
aatactgccagttctgaaaacctgtgtagcaaatcagaattgccgtatttttggaaacttcactgtgtgaatttcaagactgctatgctttggaattatayggtgtgaactgtcttactctgttgtcgtggaagaatactatcatcttttaggttgataatgtttaatttagttgtgtaattacagttcaaccataaaacc

SEQ ID NO: 307845 - DNA, 201 bp, Homo sapiens
aaaaatgaagcagccacttaactagtatctcagcaattctattgcatcacgagatgcagcaaatttagtttgaaagggtaattttcaggaaagaaaacttyaacatagaacttcagtctgtaaaaaccaaaaccaacaattgaaatatggaaaattccgacaggccatcacattgtgtgcatacggaatctataccatgcc

SEQ ID NO: 307846 - DNA, 201 bp, Homo sapiens
tgggattacaggcatgagcctgtaaatagaaaggctttgagagtggcacaagaaatataagataggaaatataaacaagtggaggaaaggtctccaaggtycagtgaatgattgtgaatattggatgcatgtcaggatttgtctctttattggtccagcctgtcgcttcctgtctgtccctgcttctcacagttctactat

SEQ ID NO: 307847 - DNA, 201 bp, Homo sapiens
ccgacaggccatcacattgtgtgcatacggaatctataccatgccaaagaataactgattgttcatttcaacttaactttatgataatattattaatcagttttgatatgtttaattatggcttttgagctttaagccctttataaacacttcactgtcttaccctttactactacacaagtatctgaaatgttcactttg

SEQ ID NO: 307848 - DNA, 201 bp, Homo sapiens
tcaggtccttatctgacattatctcaccctcttcccccagtggatcttgtagggtaggtatcattatcttcattttatagctgagaaaactgagatgcagratatgctgctctgatctttggtttttacttacttttttaaaaaaaatatttatttctagtttgtatttcagtaggtttttggggaacagggtatttggtt

SEQ ID NO: 307849 - DNA, 201 bp, Homo sapiens
catttcttcattgtggtatagggcttaagagcacaggctggtgaaggtcaagaagtagtaacctcactaaatcttacttttttaatctgtaaaaagtaggygggaataggccgggcatgatggctcacacctataatcccagcactttgggaggctgaggcgggcggatcatctgaggtcagttcaagaccagcctgacaa

SEQ ID NO: 307850 - DNA, 201 bp, Homo sapiens
ttttaagttatcattgagaatggacttttttttcctactttgattggcattccttctttcctatttaaaatgtatttgctcgtatcttcccctattgttaycgtattccttagtaatattttggtagcaggatagaggctcattgtgtgttctcacatgtaaacttcctgagggggtcttgtttcttatccatttttgcat

SEQ ID NO: 307851 - DNA, 201 bp, Homo sapiens
gtattccttagtaatattttggtagcaggatagaggctcattgtgtgttctcacatgtaaacttcctgagggggtcttgtttcttatccatttttgcatcyttagtgcctggtctagagcttagcacagcgtggatacttaaggtaactgttgccgtgtttggacacctttctttctgtcttcctttctttcctttcttcc

SEQ ID NO: 307852 - DNA, 201 bp, Homo sapiens
ataagtgcttagtatataccggctatttttattatttttaaggctattgattactagtactttagaactttgtatatactgtgtctccccacccccattayaaagtggcctttgcatagtaaaagttcgtatggctttgagtgtaatcatatctttgggtggatagtgcatcactacctttgccttacatgatatattaaa

SEQ ID NO: 307853 - DNA, 201 bp, Homo sapiens
gacattttttcctaaccctcagctgttcctcatcaagttttttttttattttattttgtgtttccagctattggaacattcaacctcaagactgtgatctytctgtggcatgcttggactcatagcacgcggaaaggaagcctgtcttgtgcattgttctaggacaaagtccattaagtgaaggtcttaataaaatattga

SEQ ID NO: 307854 - DNA, 201 bp, Homo sapiens
taagtgcttagtatataccggctatttttattatttttaaggctattgattactagtactttagaactttgtatatactgtgtctccccacccccattacraagtggcctttgcatagtaaaagttcgtatggctttgagtgtaatcatatctttgggtggatagtgcatcactacctttgccttacatgatatattaaat

SEQ ID NO: 307855 - DNA, 201 bp, Homo sapiens
ggtttcctgagcatcccccttaatcttggctgcagagatagaaaaggagattgtagaaacttgccctgcagcaaagattattgatatgttttcctcttacwtgactcaaaaccaaaaaggaatgtaataaataacggctgtgactcctggagtgattaaagagcactcaggagccaggagagctgatagctgccagctcca

SEQ ID NO: 307856 - DNA, 201 bp, Homo sapiens
tgaactcatttaaaattttatgacacttttgaaatattatttgttttgataactgaatttttggtgaatgccttgtttgccttaccctagtcctatccctrttgaacagatatgaaaatagacaagtctctgacatcgtgaggctcattttctcatgggccttgcactaggaagagaaattaacaaagctaacaaaataga

SEQ ID NO: 307857 - DNA, 201 bp, Homo sapiens
tttcatgcttaataggctagtctttaagtgaacaatagtgtgaagttagcacatattaattaaaatgtctgcaaaaccaaagctttatgaattcaataagsattgagaggagttttcaggtctctgatttatgtgttcctaccagaaaaattttaatattgtaagcaaatctaaaaccaacaaggcatatatcctttaaga

SEQ ID NO: 307858 - DNA, 201 bp, Homo sapiens
ttaaaattttatgacacttttgaaatattatttgttttgataactgaatttttggtgaatgccttgtttgccttaccctagtcctatccctgttgaacagrtatgaaaatagacaagtctctgacatcgtgaggctcattttctcatgggccttgcactaggaagagaaattaacaaagctaacaaaatagagagtggcta

SEQ ID NO: 307859 - DNA, 201 bp, Homo sapiens
gctagtctttaagtgaacaatagtgtgaagttagcacatattaattaaaatgtctgcaaaaccaaagctttatgaattcaataagcattgagaggagtttkcaggtctctgatttatgtgttcctaccagaaaaattttaatattgtaagcaaatctaaaaccaacaaggcatatatcctttaagataatagataaacttt

SEQ ID NO: 307860 - DNA, 201 bp, Homo sapiens
tatttgttttgataactgaatttttggtgaatgccttgtttgccttaccctagtcctatccctgttgaacagatatgaaaatagacaagtctctgacatcrtgaggctcattttctcatgggccttgcactaggaagagaaattaacaaagctaacaaaatagagagtggctaaggttgctattttagatagttaggtcag

SEQ ID NO: 307861 - DNA, 201 bp, Homo sapiens
cagatggttctctcagcactgtcctctcctgggtggcattgtcacatgcatttatttattatggggttatgagttaatgacccacctccattgccgctgcyagagcaaaatgttagtttgagatcaaaactctccatcaaacatagttgaattccaaatcgctgaactgcccttcactagaagggaaagtgatatgacctg

SEQ ID NO: 307862 - DNA, 201 bp, Homo sapiens
cacatactgtctcattgacctagaattttagaaggaaacgcagtctagattagtatctctttgaattgttcagcctttaaaaaaaatccaatcaaaatgawataattttgtagttagtaaagaatccggggccgggtgcagtctctcacgcctgtaattccagcactttgggaggccaaggtgggcggatcacctgaggtc

SEQ ID NO: 307863 - DNA, 201 bp, Homo sapiens
ttttatttcaagggtttaaaaggtcagcctggggaccaatcacaaagtcagggttgagatcctatatatcacaaggctttgagactacctgaccaacatgkgtttaattactaatcctgcaaagactaatatagttcctaacgttttatccatgttttattagtatgctgatgttgaatgttgggtgtgtgttgttggcgt

SEQ ID NO: 307864 - DNA, 201 bp, Homo sapiens
gattataaccatggtgcttagagctagcataagagactagtttattacaaactccttttaataaactctctgcccatacattgaaaaaataaatgctctcygttttcttcctgtttgagtaaatagcacttccaatgttttaagtatgcagagcatgatcaaagaatgaggagatggagacaaaaagttgctgagtgaata

SEQ ID NO: 307865 - DNA, 201 bp, Homo sapiens
cttgccactggtagctttttatagatctatttgatatagatttcaaactaaaattccaggtaaaattaaggtgctaccatttgggggttgactttggcctrttcatttaagccctctcaactttactttcttcatctgttaaatgttggatggaggaggggagggaatgatatatgaggatgatcttgatgatatcactgt

SEQ ID NO: 307866 - DNA, 201 bp, Homo sapiens
tttttgtattttagtagagatggggtttcaccatgttacccaggctggtctcaaactcctgagctcaggcaatccgcctgcctcagcctcccaaagtgctrggattacaggtgtgagccaccgcacccggccattttttttttttttaattttttaatcatcactgacataaggttcctctgaaatccatagtagagcctt

SEQ ID NO: 307867 - DNA, 201 bp, Homo sapiens
ctattcatttaagccctctcaactttactttcttcatctgttaaatgttggatggaggaggggagggaatgatatatgaggatgatcttgatgatatcacygtatcgatggtgatacttcatgggactgtggaaagaaaatctgtgctatggcagttggtcaactttaaagaacatttgtagggtaatgattctcatagct

SEQ ID NO: 307868 - DNA, 201 bp, Homo sapiens
tatatagctaagggaaaatttagtaataatgtatattctttcttttccttattttctctgtgaatacttgtatttggcttgattctcattaactattatcttttttttcccccattgatctgtctaagcagttcattttgtgaacaatcctaattcagatgaagaagggtgaaggtgaagtttgtaaaaataatatcaaaa

SEQ ID NO: 307869 - DNA, 201 bp, Homo sapiens
aattaatttttcttcttggggaattttaattaaagacatgaaataatacaatcttttgggtacacagtagtcccgtacagaattgtatgatacacattatscttttcagcaaaaagtattaaagaagttggagaagaggcagtcttcttcaagggcaagatggatagtagatggtgatccaggagtaaagtgaggaggtga

SEQ ID NO: 307870 - DNA, 201 bp, Homo sapiens
cctcccgtctcagcctcctgaatagctggaaccaccttgcctggctaattttcatttttatttttgtagagatggggtcttgctctgttgctttttttttttttttttttgtttttttttttttggtagagatggggtcttgctttgttgcctagactggtcacaaactcctgggctcaagctctcctccctggttggcct

SEQ ID NO: 307871 - DNA, 201 bp, Homo sapiens
tacacagtagtcccgtacagaattgtatgatacacattatccttttcagcaaaaagtattaaagaagttggagaagaggcagtcttcttcaagggcaagakggatagtagatggtgatccaggagtaaagtgaggaggtgaggtgggtctgggagttggaactggcgccttttagaaagttttttccataaataacctaca

SEQ ID NO: 307872 - DNA, 201 bp, Homo sapiens
ctcccgtctcagcctcctgaatagctggaaccaccttgcctggctaattttcatttttatttttgtagagatggggtcttgctctgttgctttttttttttttttttttgtttttttttttttggtagagatggggtcttgctttgttgcctagactggtcacaaactcctgggctcaagctctcctccctggttggcctt

SEQ ID NO: 307873 - DNA, 201 bp, Homo sapiens
agtgaggaggtgaggtgggtctgggagttggaactggcgccttttagaaagttttttccataaataacctacagactcggtcaccctcagtccctgcatcktgcatggaccctggtgtgcacatctggtcattgggactaaaacatttggcacctatcagctgcatatgtccaacctggggagcgaatcacccggcccagc

SEQ ID NO: 307874 - DNA, 201 bp, Homo sapiens
cagcctcctgaatagctggaaccaccttgcctggctaattttcatttttatttttgtagagatggggtcttgctctgttgctttttttttttttttttttgtttttttttttttggtagagatggggtcttgctttgttgcctagactggtcacaaactcctgggctcaagctctcctccctggttggccttccaaagtga

SEQ ID NO: 307875 - DNA, 201 bp, Homo sapiens
aatgattttccccttggaaagctgcactgggtagatggtacacacccatgtcctttctcaatcacactggtagaatagattaatttatatggaagtacaasttaatatgaaaccagtgaggttgttttttagattaatacgtttcaaaaagattttgagataattttgagttaaactgtgaggcagatcaatcttcagcca

SEQ ID NO: 307876 - DNA, 201 bp, Homo sapiens
agatggggtcttgctttgttgcctagactggtcacaaactcctgggctcaagctctcctccctggttggccttccaaagtgatgggacttggcctatttgaaaaaaaaaaattttttttaaggctagtcaagggaagcagtgggagtggagaaagaacaaagaaatctgttcctggttgtgatcaatttgatacatatttc

SEQ ID NO: 307877 - DNA, 201 bp, Homo sapiens
ttccaatgtcaactcaagttaatgtgatttacccagagtagggtacctgggtagctttttggatggcattgagaaactcatgaggagaaggaaagaaggcytttaatttttttgtcatgttctgacctctgtctgtgttttagtgtcaggataaagaccatacttaaggaattttcctttcttctttgttttgaaaaatca

SEQ ID NO: 307878 - DNA, 201 bp, Homo sapiens
catctctctgagagtaaaacttaagaaaaaacatctatgtcacgaatgctgtttcatgtggtattcagaggagccgggctctttgtatgaaaaatgtttasactgcaaattaacacagaagagttaacacagcttgcaagtctttttttccccggaagtcaatatttctgtgaaacactgagagtaaggattacacagaat

SEQ ID NO: 307879 - DNA, 201 bp, Homo sapiens
ctcatgaggagaaggaaagaaggcctttaatttttttgtcatgttctgacctctgtctgtgttttagtgtcaggataaagaccatacttaaggaattttcstttcttctttgttttgaaaaatcactgacaaaaaaatgcagaaaacacagggaaacatctaaggagggctgaagaaaacacagttgccttattttcaaat

SEQ ID NO: 307880 - DNA, 201 bp, Homo sapiens
agtaaggattacacagaatcctcccgaagacacagttaaggcagatgggatacacatctgcttttttattctggaataaaaacatttattcttataaactrtgtccggtggctctgggaaattaaatgaggcacgtaggaaacagttgcgttgatatcttcagtagtaggtgactcttaggacatttttataggaagaaat

SEQ ID NO: 307881 - DNA, 201 bp, Homo sapiens
attaaatgaggcacgtaggaaacagttgcgttgatatcttcagtagtaggtgactcttaggacatttttataggaagaaattgggcctttgggtctggaattttttttttttttttttttgaactggtaatagaatttattcaaatgtgccttaatataggcgctggggcttgcccatggtgctctcgatatataaggccc

SEQ ID NO: 307882 - DNA, 201 bp, Homo sapiens
ggtgctctcgatatataaggcccggacattctgccagtttttcttgagcaatgacaccaagaagttgacagccaggtgaatgttatacacaagctcatcgkctgtcatcttcacgtgaccaacagctacagccagacataacaccttcttcatttggaacttgattgtggacttcacctcacccactttggccaccatgtt

SEQ ID NO: 307883 - DNA, 201 bp, Homo sapiens
aatgcaaaaacaaactaaagtaaaatagttaatattcttcagctgctagaaggctggaatttctgggaaggaccagctccaagagccacagcttaaaacawtttaaactaaccttgtcagagttgggacttgaactgaaaagataggaatttgctttaaaatagacctatatagcaacagtactttcgtatttgaaaaaaa

SEQ ID NO: 307884 - DNA, 201 bp, Homo sapiens
ggttatagagctaacacatgttccatatagagaatttggaaaataaacatttagagaaataaaatcgcaattaattacattagggaaaaagaattgctttkgacattttctgaattttctttctgtaccatacctgcttccctcacctctcaactctcacccccttccccctcgttgcctacacagcattttttgtcgtta

SEQ ID NO: 307885 - DNA, 201 bp, Homo sapiens
acctatttgtcatgggtcttctgggtctgttagaataattaccaagtatttggatagttaaaagttgcaacgctagggtcttttatacttgctctaggacrtagttgtcaggtatgaaaaatttaccatggcaagatccatttgttgtattaatcactacctttcccttagagttgatttatggttcagagggatattctg

SEQ ID NO: 307886 - DNA, 201 bp, Homo sapiens
ctcagcctccagagtagctgggaccacaggcatgtgccacaaggcctgactaatttttgtatttttagtagagatggggtttcaccatgttagccaggctrgtctcgaactcctgacctcaggcaatctgcccgcctcagcctcccaaagtgctgggattacaggcgtgagccacagcgcccagctgagatactattttta

SEQ ID NO: 307887 - DNA, 201 bp, Homo sapiens
gccaccgctcctggccagatcatctaattcttaattgaactgccttctttgtccaaaactcttctggaattacacatctagaaatgctcccattcaaaacmttattcccctagaggagttctttgtaccctttccccagcctcccccaatgatgcattctatatacttatagtgtaatatcaaaaccaagaaactgacatt

SEQ ID NO: 307888 - DNA, 201 bp, Homo sapiens
tgccatgttgtccaggctggtctcgaacttctgagctcaagtgataacgcctgccttggcctcccaaagtcctgggatcaaaggcatgagccaccgctccyggccagatcatctaattcttaattgaactgccttctttgtccaaaactcttctggaattacacatctagaaatgctcccattcaaaacattattccccta

SEQ ID NO: 307889 - DNA, 201 bp, Homo sapiens
ttgaatatcatttctcacaagtcttattttatttttttatgccttgtgaaaacttactgtgaaactgatgtgacttcccataagtaaaaattgcatgtacygttttccaaagagggggtggcctgtgtgtgatgatagtgtttcatctctcgggagatggaagaactaacattaatcccaggggagaatttaaagctgctc

SEQ ID NO: 307890 - DNA, 201 bp, Homo sapiens
cataggagaatgcagtactacctataaggtagttctgccaacaaaatagggaactttagtctgatcaagcttctacatctatcaatttacagaaattaaastgagtatcatgttaaatggcaccatggggatgcaatcagcaaaacagacaaaatccataacatgggaatctttatacaacagagggtacaaaatgttttt

SEQ ID NO: 307891 - DNA, 201 bp, Homo sapiens
gcaaaattaggggagagttgttaaatttttctaggtccaataataactttgtgtttttattttaaaagcacctattggctgggcgcggtggctcatgcctstaatgccagcactttgggaggccgaggcggtgaatcacttgaggtcaggagttcgagaccagcctggccaacatgatgaaacccccatctctactaaaaa

SEQ ID NO: 307892 - DNA, 201 bp, Homo sapiens
atcaatttacagaaattaaactgagtatcatgttaaatggcaccatggggatgcaatcagcaaaacagacaaaatccataacatgggaatctttatacaamagagggtacaaaatgtttttagcacaaaaaggggtaaatggagataaaaggggaacctatagattaaatgagattaaggaataccttgatttatcttaat

SEQ ID NO: 307893 - DNA, 201 bp, Homo sapiens
actcaagtttgtctatctacactctttggggagccccttaaaacccggatttgacttggaaatgaagcttttggttatggcttctgatcatgctatatgtrgtagaagcttagtgtctgtatttttaaaattcagactggcttttaatactgggtaactaagtcatagatgaggggaagttgatggagtgatggaaataga

SEQ ID NO: 307894 - DNA, 201 bp, Homo sapiens
caaatgagttcataaatgggaacttatacctgccacttattcctgacaccatctaaaatcctgagtttatgaaccaagtgagtccatatatggaaagttayacctgccacttatttctgaaactgtctaaaatcctgaatttaagagtgtaatattgcttatttattctctattctgtcaatatttcattgatgccccagt

SEQ ID NO: 307895 - DNA, 201 bp, Homo sapiens
aattcatcgctttctcatgcaaagagagggcagactgtttggaagcaggtcattttctgtgtcattctctgaggctgtttgagaaacagtgggggttagtyccagggttcaggatgaccacctagaatttgcagaaacccagagagtgatttcccttttttattttccacattagtattaactgccttctggttccccgaa

SEQ ID NO: 307896 - DNA, 201 bp, Homo sapiens
caaagccctggcctcatgctcctcctctcgtgtaatcagggacaagcatggatctttggaggccattaagttacagaattcccttcctggcaggtgatccygttagagcgaggccagatctacctcctttgagagcttaactcagtattttttaatacattgagacagtgagattctgtaccatcattcaagacaatgaca

SEQ ID NO: 307897 - DNA, 201 bp, Homo sapiens
ggaaccataactagtattaaagattatttctaatgtaggtattactcagacttttttttttttttttttgagatggaattccgctgttgttgcccaggctrgagtgcaatggcgtgatcttggctcaccacaacctccacctctgcctcctgggttccagcaattgtcctgcctcagcctcccgagtagctgggattacag

SEQ ID NO: 307898 - DNA, 201 bp, Homo sapiens
agccctttgagaacctcaccgaccaagtgagtgatatgttgagagatgagcatagccatcttaccattcatgtctgtgaattattatttattcagactggwtctcgttaagagaactgtgtgtaatcttagcatgataatcggattccacttatcacttggaactgtgactcacttttggaattttaaggacgtaattaca

SEQ ID NO: 307899 - DNA, 201 bp, Homo sapiens
ccttggtgacagagcgagactccatttcaaaataaataaataaataaataaatagattggtttcttctttaaaaaaataaaactctcagacatgtaggagyccaccacaaaactgtcaaatgatgctttcctttgccttcttgataatgtacatagactactgtcagagatttttttttcatggtattagtgatatttaaa

SEQ ID NO: 307900 - DNA, 201 bp, Homo sapiens
tctcagacatgtaggagtccaccacaaaactgtcaaatgatgctttcctttgccttcttgataatgtacatagactactgtcagagatttttttttcatgrtattagtgatatttaaacaggtagttgaagaactgtggaaccaacaccacagagccatactctaagccaaagttttctcttttcatttccagtaaacaag

SEQ ID NO: 307901 - DNA, 201 bp, Homo sapiens
atgactgtcttttttagagtgtgttggtattgttttaaactattttttaatcttttgataccttaaatagggcagactgtcttagtacacaaaggcctatrgtttcaattagttgtacatggaactttttttgtaccagtttttatttctaccttaatcttgcaacgtttatgtcattaatcttctcaaatttagtatgtc

SEQ ID NO: 307902 - DNA, 201 bp, Homo sapiens
gctgctagttttcctgtcatccatttttctttactttttagcacatgctgctgtttactcagattttggtgtgaacatttgctttagcctgtgttatacayacatgttgaatttaatttataaacagttgggggatgtcctgcaaagaatgctatgaatgccaggtacttggtcaacccttccagttcaggagaaaactaa

SEQ ID NO: 307903 - DNA, 201 bp, Homo sapiens
atgtagatgcaagatgaaaataaagtttggccaaaataaaatttggctaaatatatggcaaatgcatactatccctttgtgaatcatcacagtcatagggwatttgacaaagaggtaaaaaaatacatgagtgaaaagcctatgacagttgtaatcgtgcagtgaagaaaatggtgatgtgaactttttccggatagtagc

SEQ ID NO: 307904 - DNA, 201 bp, Homo sapiens
tgaacaggaaattacttttggcagcccaaattgccctgtgttttctaccccgcccttacctcttcccttttgagaacacggacttgtgtactagattgacrtgttggagttggtgagccactcagaaggatcttgctgccaaaatacagatgtcttgttacttctaagaaagagtcagtaagaggaaactaaagtgcaagt

SEQ ID NO: 307905 - DNA, 201 bp, Homo sapiens
tccccagcttgaattttacttaagtgcttgtagggggtgctatcaaaaaggcaataaataagtctgactgcatctactttgtttacctttagatgtgtgatttttttttttttttttttttttttctgacagtaagctggagtggacagaaaaggtttaattgcatgaccctttttaaccaaaggtatctgtgagaaacag

SEQ ID NO: 307906 - DNA, 201 bp, Homo sapiens
ttttttttttttttttttttttggtgacaagaataactttgtggcctgttgaggacaagtctctgtcactcagttgctgttccattcctcatatgtaataraattactttttttatttttaaaaatttttttattatttttttgagacagagtctcattccatcacccaggctggagtgcagtggcacaatctcggtgcac

SEQ ID NO: 307907 - DNA, 201 bp, Homo sapiens
gttaaacctctcaccagaaatgtcttcaaggagtattctctctgtaaaggtgtatattgtggaagatgaaaaaaggaagctctctttggttctctgttacrcggggtggctgctttgcaaggtgaatcacttcggagactgtgaaatatttcatgtcttataatgtattttccattatttttggtccataagcatgtatat

SEQ ID NO: 307908 - DNA, 201 bp, Homo sapiens
ataaattcgcctattctggacatttcatttaataggtggccttttgtgtctgacttctttcacttagcaaaatattttcaaggttcatctatcttgttgtrtcagtactttttttgttgtatttttagtagagactgggtttcaccatgttggtcaggctggtctcgaactcccggcctcaagtgatctgcctgccttggc

SEQ ID NO: 307909 - DNA, 201 bp, Homo sapiens
tggattgctctggttactaatttcaaagtcagttgctatgagcatcatttggcacaactgccctggaacactggatcagcatttctggcatgggaacccaraaatctgctctttcagcaagcctcccagtgacatgattgtgcagcaaggttgaggagctactgtgcaagaaaagagtgctttgaacatgtgtaaatgtct

SEQ ID NO: 307910 - DNA, 201 bp, Homo sapiens
tacttgatggagcctgtcaaacagccatattacaggcatgatttggttgcatgggacttctattcttaatgttaaaataaaatccaataaaatgagttggygaaaatcaagctgtcatggagttgctaaaaatcttgttccaatgaaatgctatgagaaaggccttatcattatgctgtttagtttttaccaattacccta

SEQ ID NO: 307911 - DNA, 201 bp, Homo sapiens
ctgttttgttctttttatgaaagggtctcagtctgtcacccaggctggagtgcagtggtgtgatctcagctcactgcaacctccacctcctgggttgaagygattctcatgcctcagtctcccaagtagctgggattacagcagtgtgccaccatgtctggctaattttttttatttttagtagagatggggtttcgccat

SEQ ID NO: 307912 - DNA, 201 bp, Homo sapiens
tgattttttgtatatttatcttgtatccttcaaccttgatgaactcgtttatgatctctgatagtattttttgtggattccttaagattttctgtatacargattatgtcatttgcaaatagaaatagttttacttattcttttccaatctggatgccttttatttctttttcttgcctaattgctctggctagaacctca

SEQ ID NO: 307913 - DNA, 201 bp, Homo sapiens
acttagcactatcagaagttgtccttattgttcatttgtatgttgtcttgtattcccaactggagtgtgagtttcatgatgggagtggcagggattctttkttcactactgtttcccccagcacttgagatataggaagcacttggtaagcatttgttaatcaaataaaggaacctgtagtagcttagggtacaattacaa

SEQ ID NO: 307914 - DNA, 201 bp, Homo sapiens
tggtaaattgtataatagtaataatggggtccaaaggaaaccaagaacccctgtgtatctctcacgaagggacgtttaccctgagatcaaacttttagccrggggtttcagatgtgtttattgaattcattaaaaaggatatatttgtcatcacatgttgaatgagaaacactattacattcccttagtacttagaggttg

SEQ ID NO: 307915 - DNA, 201 bp, Homo sapiens
cttctgtctttcttccaggactagccttcttgcttaccttgcatgccggctgtttccagaatttatgaaacttttttccaccccagggttcttacacatgmtgttcagttacacagaaagagtcatccccaccatccttcttcttgatttggcgcattgttagaatgtcacctccttagggagacttccctgatctttgta

SEQ ID NO: 307916 - DNA, 201 bp, Homo sapiens
aagctcagtgggcagccaatgttgacattacacaaaacatgtactgtatcattacgtaagacatgaactgtactttttgagtgattcacgggatttgtcargggtaattttgactctggatgaaaccttttactttgtcttttgaacttcttactaaagtttgatgatgatgtggttttggttcttttgttttttgttttt

SEQ ID NO: 307917 - DNA, 201 bp, Homo sapiens
gactgttggcttctgcccaaatgggaaatgcctgagtaagatgaccacaggctagtaaacttctctgcactgcaggaagtgacttcactcaagtgtcaccrccaccataagttccctcctggggaggtggggcccctcctctccctttgcatgccatgaaatgcttgcacccacctgccttagccgttgggtgggctacat

SEQ ID NO: 307918 - DNA, 201 bp, Homo sapiens
ccctcccctccctgcccatggcatcacattacatgtaggataaagctttcactctggaccatgttctgcaagattccacatgatccagcttctgtctttcytccaggactagccttcttgcttaccttgcatgccggctgtttccagaatttatgaaacttttttccaccccagggttcttacacatgctgttcagttaca

SEQ ID NO: 307919 - DNA, 201 bp, Homo sapiens
catcccagtattacccataaatcagtgcccatctccctcatctatcatgccatagacacggcctaagtgcataccagtaaatccagtaaaacctggttagyaaaatttaacttatttaacacaacttatattttacttggcttctatgcagtttgctccataatttcttcatttcattgtcagagtagccacaaaagaatg

SEQ ID NO: 307920 - DNA, 201 bp, Homo sapiens
cgcacatacacacacacacacacaaatctatagtctagaggaagttataaggcacataggtgtaatgcttataattgataggaagtgatgagtatgaaagsaggttgacagataaagtgctctttgtttctagagaaagaaatcacttctgttctaggatattagggaaggcctcagtgaggaggatgataattttgctat

SEQ ID NO: 307921 - DNA, 201 bp, Homo sapiens
  misc_feature (1)...(201): n = A,T,C or G
gagacaggcttcctttgccagtcagaggggctctggcttgtttacagatagaatctttaactcctttgaagggccagcgtgaggatactgggaaggttccngtgggacagttttataattgaaccagggaactcctctgtgcctgctcatatgtgatatggataagtcatgcagcaccggtcctcctgcatccaggaatgg

SEQ ID NO: 307922 - DNA, 201 bp, Homo sapiens
gaattgtgataactttgttagtatctcagatacttgttgaagccagtttcctgttgtatctatgagaagcaggaataaagctggtacaactttaagtcagmctagttaggtttggggtgaataaatgatcccaattattggtagaaatttttaatgaatgtttggatgtggggtggattcaacttgaaagatataactttt

SEQ ID NO: 307923 - DNA, 201 bp, Homo sapiens
gaatctttaactcctttgaagggccagcgtgaggatactgggaaggttcctgtgggacagttttataattgaaccagggaactcctctgtgcctgctcatwtgtgatatggataagtcatgcagcaccggtcctcctgcatccaggaatgggctgacattgatctgttcactcttcagggatgctgtctcaactacttgca

SEQ ID NO: 307924 - DNA, 201 bp, Homo sapiens
caggaccacttacatgccaagtggcaaaagtgggattctgtggtctggttctaggattcatggtctttatcactgtgctatgcatgatttctttctttatkgaacttgtcatctagtcagatctgacccgtgcagttttgttttcaggactctcaaagcaaacttttctttcatggcaaaaacaaatctattctagctcca

SEQ ID NO: 307925 - DNA, 201 bp, Homo sapiens
aattcatcatgttgttttggctttaccgcataaatatggtgctttatgtctagacatttccccagatagcatttaatagttaatatattttggagcaaacrttcctccttttatggttgtcacaggaagtgagttaatcatcctgtctgcaccctgtgaagtgtttcctagtcccacatcccatccacaccaggcccctgt

SEQ ID NO: 307926 - DNA, 201 bp, Homo sapiens
atgtgtattaatgaatgaaataaaaattggggctcactttgttcagtttttaataagaccatcttaaggggttaggctggttaataactaaagagtagatmcaatacagcataagaatcaaactcgattcaaaaccttcattcccagtttctaatgcagggatgtaacagatgttcttacatttagactgttatcttgatg

SEQ ID NO: 307927 - DNA, 201 bp, Homo sapiens
gttttgtttatggcactgatgaataggtcatttcacctacaaagagactgccaagcttctgattaagagcagaacatcagccaagtagacagacatttggraacatctgggcccttggcattgtttatattgggcgtgtctaatataaacagtgtctttgtagtaccctggggcatctctggttagcttaaggttgcccaa

SEQ ID NO: 307928 - DNA, 201 bp, Homo sapiens
tatctcatggcgtgctttatctgtataaacgtacctaacattttccaaatgtgcttttcacatctaatattcatttatttgcatggtggaaaaatgggttktttgaatcaggtatctatttttatagaattagattagggtgaagtacacttaacatttaaagcacatttaaattttaaaatgcctgagaattgtcatgag

SEQ ID NO: 307929 - DNA, 201 bp, Homo sapiens
gtaattttccagtgtcttatgattatagctatctagattggctgaccctcagaaactgtgatgaggttaatattagtggttttaggccactagattttgasgtaatctcttatgcagcaatagataactaatacaatgttgatacaattggggctgtatttttggttgatggtaaaatattttgagttcttttggaactag

SEQ ID NO: 307930 - DNA, 201 bp, Homo sapiens
tgcaagctccgcctcccgggttcacgccattctcctgcctcagcctcccgagtagctgggactacaggcgcccaccatcgcgcccggctaattttttgtattttttttttttttagtagagacggggtttcaccgtgttagccaggatggtctcgatctcctgacctcgtgatccgcccgcctcggcctcccaaagtgctg

SEQ ID NO: 307931 - DNA, 201 bp, Homo sapiens
gcctgggtgacagagcgagacgctgtctcaaaaaaaagaaaaaagaaaaaaaaagtttttttttttaaagacaaatgaaaattcaaatcttcagactattsgaagcagggaattgttatcagaagtgaggaagcagagctgaccattaaagttttttactactatcttgaaattgtatggtaagaaaaaaaaaatgggtag

SEQ ID NO: 307932 - DNA, 201 bp, Homo sapiens
tctggaattaataaccaagagtccaattgctgggttgtgtggtagttacgtatgcagttttatgagaaattggcaaatggttttccagagtggctgtaccrttttgcattcctgtagcaacatatctctgcagccttggcaatttttgacattacaatttgatattgatattgatactgatttttaattttttactttagc

SEQ ID NO: 307933 - DNA, 201 bp, Homo sapiens
ttttactttctatattttggtcttccatgtaaaacttcaaaactcagtttcaagaaaagcttctaaaatagctttaaaatgttcatgttaaagtagacttyatagtcttgtaatgttttactaaggggtataaaataatatgaaagggtaggccttttttttttttttttttttaaaagcaaagcactgatttaattatag

SEQ ID NO: 307934 - DNA, 201 bp, Homo sapiens
taaaatgttcatgttaaagtagactttatagtcttgtaatgttttactaaggggtataaaataatatgaaagggtaggccttttttttttttttttttttwaaagcaaagcactgatttaattatagtaatttcttacttttatttctctcttagtacttctcatactcttggtttactggtgcttcaggcctcacattag

SEQ ID NO: 307935 - DNA, 201 bp, Homo sapiens
aaagatagattccagtggatctcctagaggctctctgtgttaactggcattgtttaagtgtaacatgtcttcagctttaggctccttagcctttcaagggyccttctgtcaagctgatgggctaccatgccagaaatgaagtccgatattaaaatgtttgttcaacagaaggtggatggagagcagcattttcaagtaatg

SEQ ID NO: 307936 - DNA, 201 bp, Homo sapiens
ttttacaattgaaatttaaatagatgatccattttgagttaatgtttgtatgaggtgtgaggtttaggctgatcttctctttttttttgcctaaggttttccagttactttggcaccatctgttgaaaagggtattcttccattaattttatatcttcatcaaaaatgagttgagcatatttgtttgagtctatttctggg

SEQ ID NO: 307937 - DNA, 201 bp, Homo sapiens
tccaataaaactgtttataaaaacaggttgtgggctggatttgattcacaggccatagtttgcaaatgcccgttttggagcatggtttagtcccgtagatstggaattgactgtttgatcttacacatactacacgagggcaagttttctagcttctgagcctcagtttcattatctgtaaaatggggaaggtagggcata

SEQ ID NO: 307938 - DNA, 201 bp, Homo sapiens
acggatatgaccaagttccaataaaactgtttataaaaacaggttgtgggctggatttgattcacaggccatagtttgcaaatgcccgttttggagcatgktttagtcccgtagatctggaattgactgtttgatcttacacatactacacgagggcaagttttctagcttctgagcctcagtttcattatctgtaaaatg

SEQ ID NO: 307939 - DNA, 201 bp, Homo sapiens
tttttctttaacgcaaaacataaggggttgcattttccatactggcagaatgtggaatgggtaggtgacttgaatgttgtcttttccacttagtattaccrttcaaaacccacgtacaccaaggaattggaatattcgaatgtgagacagaaagatgacattgcggttagcactgtctgtatccaccaaatcgtgaacctt

SEQ ID NO: 307940 - DNA, 201 bp, Homo sapiens
aagggcagatgataaatattttagactttgctgtctcttttaaaactactcaaatctgatctttagacaatatatgaatgaacggatatgaccaagttccrataaaactgtttataaaaacaggttgtgggctggatttgattcacaggccatagtttgcaaatgcccgttttggagcatggtttagtcccgtagatctgg

SEQ ID NO: 307941 - DNA, 201 bp, Homo sapiens
aacagggtttgtttgttttttttttttgggggggcgggagagatcacttttaggcgacattatgtgtttgtaggggcttgtcttcaaataaaaggcataaytgaaatacagctgaataggaatcaagagtgtgattcaagtgtaaggtaaaattgatggcatctcttattgcttcgtagatgaattactttatggcagctt

SEQ ID NO: 307942 - DNA, 201 bp, Homo sapiens
ccatcaatgaggctgacctggagggactggattcaaatagggagcagcatccagttccctctacctagagattgccaacttctctgaagcatttccatgamatttataatttaatttctattttggctcaagagcatcttggtacaaatccttgggtgtggccctcttttgtaagaagtacagaatgaaagaccatcttgc

SEQ ID NO: 307943 - DNA, 201 bp, Homo sapiens
agtaaggtcgtctagttttggaccattgcatagtattatgtaataaaataagtttgtaataaaataagtggtggatatttgcattattgccaattctttcrtattataaacattgctgaaatttaatatgctttcttgtaaacatatgtattaagttgctggtacataaggtatgcagatgtacatattacctatgtgctg

SEQ ID NO: 307944 - DNA, 201 bp, Homo sapiens
tcttttgatgttttttaccgtagttcctccaaagcagaacattaagtattctttattgtatttgattttatcagtcttttttggcttctagttaatatgtrgaaatgctttccctactctaattcttcccacaactgcttcttatacttttatatatttattttaaacatttaaatcttggattcatttgaagtttgtcct

SEQ ID NO: 307945 - DNA, 201 bp, Homo sapiens
taatatgaatctgtgtcaacacaggttttaattttttaatttttatgtattcattttttgagatagggtctcactctgtttcccaggttagagtgcaatgstgtgatcatggctcactgcagccttaacttcttggggccaagcaatcctcccacgtcagtcccccagttagccaggaccacaggtgcaccaccacacctg

SEQ ID NO: 307946 - DNA, 201 bp, Homo sapiens
agtatggattgcaaatgtgttttgctggtcatttgtcttttgatgttttttaccgtagttcctccaaagcagaacattaagtattctttattgtatttgaktttatcagtcttttttggcttctagttaatatgtggaaatgctttccctactctaattcttcccacaactgcttcttatacttttatatatttattttaa

SEQ ID NO: 307947 - DNA, 201 bp, Homo sapiens
tctctttgcgtactagagaacttttacttttgcagtatggattgcaaatgtgttttgctggtcatttgtcttttgatgttttttaccgtagttcctccaawgcagaacattaagtattctttattgtatttgattttatcagtcttttttggcttctagttaatatgtggaaatgctttccctactctaattcttcccaca

SEQ ID NO: 307948 - DNA, 201 bp, Homo sapiens
cccccaatgaattccagactatttcaggcttctgagtagctgggattgcaggcacctgccaccacactcaactaatttttgtatttttagtagagacgggrtttcgccttgctggccaggctgttctcaaactcctgacctcaagtgatctgcccgcctcagcctcccaaagtgctgggattacaagtgtaagccaccatg

SEQ ID NO: 307949 - DNA, 201 bp, Homo sapiens
atgcatgtaaaaaggaatctgtgtggccacttattttctcatattagaaacacaaatggtgtaacataatgcatgttgggtttttcaattaaaaatgtaayttagaggtcttttaatttgagtttaaagaggtttactttttcccccaatgaattccagactatttcaggcttctgagtagctgggattgcaggcacctgc

SEQ ID NO: 307950 - DNA, 201 bp, Homo sapiens
taaaataataagtagtaaaaaattgctcctatttcctctccctgtgttaatgttatagtgtcttaaatatgtttacagagatactgtatgcatgtaaaaakgaatctgtgtggccacttattttctcatattagaaacacaaatggtgtaacataatgcatgttgggtttttcaattaaaaatgtaatttagaggtctttt

SEQ ID NO: 307951 - DNA, 201 bp, Homo sapiens
cactcaagagaataaatacttgtttagttgatttatgtaagtacagaaactaaaataattattttttatttgttaaagtaaaacttctgttctctactgtyaacctaatttgaatgcctgtgaaaatataaaatatcagaagttattatttggttggtgcaatagtaatcgcggtttttgccattactttttttttttttt

SEQ ID NO: 307952 - DNA, 201 bp, Homo sapiens
tctgggtgtatctttataaggtttcccaataaaatgcgtttatctcactaggtgatgagtgaagagggttttttggatcattttgctaattttctttcccrttgtctctgcctctttcttgcatttttctttactagggttcctctatgatagttgatgagttagcttctgtgtgttttagttcatctgttaactttttct

SEQ ID NO: 307953 - DNA, 201 bp, Homo sapiens
gaaagagagccataggatcgatgtctctctctctctctctctctctctctctctctcacacacacacacacagacacacgcacacacgcacacacatgcasgcacagcgtaactccggcctataattcatgaattttagctaagttactctagctaaattgatcttgcagtcttgagttcaaaggctggaaacctgagctc

SEQ ID NO: 307954 - DNA, 201 bp, Homo sapiens
aaacatctgtgcttgataggagttgctaaaaaataaaaaaataggagaacgtggcagagtgacagggaaatagttttgaagggtctcctactgggcaaatstgggacaatctgagcatcaaaatacataatgttagtaatggaatctgatatctgataatggattgaataaatagaaacaaaaataaacaagtccatatgg

SEQ ID NO: 307955 - DNA, 201 bp, Homo sapiens
atcttgtaaattactttcctcttgcaatggaaagtgcttttctctgatttattatacaaataattgcaaatccttataactgaacaaggtaaaacttttcrtgtcttttggaatctgttttctggttttgtgccttcagtaatagtcttaccttagtagacaagatgtataaattgtgtaaattactaagcaaaggtgaag

SEQ ID NO: 307956 - DNA, 201 bp, Homo sapiens
cttaggtgttcttttactttccttttcccgcctaagttaactttctagagggaggaaaccaagtcttcactttattttgtggttgacttttcttgcctccstctccaacacctcgctcaacaggtaatcaaataactaatttttagttgtcaggtaaaaagacatttttgtgtttaagttcttcaaaccttagcttttggt

SEQ ID NO: 307957 - DNA, 201 bp, Homo sapiens
gtgccaggggagattgggacacagtattttccaaatatatttatcctctcaggtcagttggagtttgtgggctaagagtatgagatttgaagttaggatarttatagtatttggatgagtgaatgaatgaatcaatagatatgtcccttcatccaaactatgctggttaggtgattggtgggcaagctggtaagttcctct

SEQ ID NO: 307958 - DNA, 201 bp, Homo sapiens
tcctccctctttctctctctgtcttccttaactccttcactctttctgttcttcctttattcgtgccaggggagattgggacacagtattttccaaatatwtttatcctctcaggtcagttggagtttgtgggctaagagtatgagatttgaagttaggataattatagtatttggatgagtgaatgaatgaatcaataga

SEQ ID NO: 307959 - DNA, 201 bp, Homo sapiens
ttgcctattacgtgttggcagtaatctttcaaaaaaaattttatgtttcaaaatcaggcagccaacagcagtagccagtgatatatggggctattgatgcrgattgaatttgcagagggaaaatgggatttggttgccatatgaactcataatgaggtggcctcacagatttgtaatggtcaaccattatttgcacctgga

SEQ ID NO: 307960 - DNA, 201 bp, Homo sapiens
aataagggaggaagatgtcatggggcctctaaacagctgataacaacagggttcatttacattttgtagcttgtgtgtcccccctacttcaagcacatgcrtagggaattgaaattgcagtttgcctattacgtgttggcagtaatctttcaaaaaaaattttatgtttcaaaatcaggcagccaacagcagtagccagtg

SEQ ID NO: 307961 - DNA, 201 bp, Homo sapiens
ttaattcttatgcataaaaatatacagagtgctattaaattagatatgaatcttacagcacttaaatcccttagcccaaatgcagtcagttacatttgccrtgtaagacattttgatttaaactttagtcaggaagctgaggaaacagtctcctcttgagcctaaacattaaaagttggctgcatgtttttctttgttggc

SEQ ID NO: 307962 - DNA, 201 bp, Homo sapiens
atatatttctgtaataatagttctgcaactagctttttttttcacagaatggcattagatacttctacctccatttgaaatttatatggttttttaaaaartttaacttttaaattggtaagatatttatatgattcagtgttcaaagagtataaaataataagtagtaaaaaattgctcctatttcctctccctgtgtta

SEQ ID NO: 307963 - DNA, 201 bp, Homo sapiens
ttccctgccctacgtgactggacgaataagggaggaagatgtcatggggcctctaaacagctgataacaacagggttcatttacattttgtagcttgtgtrtcccccctacttcaagcacatgcgtagggaattgaaattgcagtttgcctattacgtgttggcagtaatctttcaaaaaaaattttatgtttcaaaatca

SEQ ID NO: 307964 - DNA, 201 bp, Homo sapiens
gatgtgatatatttctgtaataatagttctgcaactagctttttttttcacagaatggcattagatacttctacctccatttgaaatttatatggtttttwaaaaagtttaacttttaaattggtaagatatttatatgattcagtgttcaaagagtataaaataataagtagtaaaaaattgctcctatttcctctccct

SEQ ID NO: 307965 - DNA, 201 bp, Homo sapiens
ccactactgcttcattttgttgcattttgtatacacagttcagaaaattaagagacaagggaactagtattgagtagaataataaaaggactttcttgaaygatggcacttctgattttttttttccctgccctacgtgactggacgaataagggaggaagatgtcatggggcctctaaacagctgataacaacagggttc

SEQ ID NO: 307966 - DNA, 201 bp, Homo sapiens
ctaggaagtctagctttttttgggtaaacatcacctcttaaatgttaactcttctaagtgatggattattaaacaggtgctgatgaaagcatcttaataaracacatcacacagttgtgttactccttcacgctgagctctgcctaatgaagattggctgtgtagagccactactgcttcattttgttgcattttgtatac

SEQ ID NO: 307967 - DNA, 201 bp, Homo sapiens
gatcatgcatgtgttttgacttccagaagtcatcatcattaatggtttaggaagttgccttgtaatttttgtgtatataccgttactggttttgatttgtrtttattttttctttacatgatgtgatatatttctgtaataatagttctgcaactagctttttttttcacagaatggcattagatacttctacctccattt

SEQ ID NO: 307968 - DNA, 201 bp, Homo sapiens
gggacaatgttataaaagatttcactcttgaagttaagctaccaactgaaacaagtcacatggtcaagctccaagtcaagggacaggaattacactgtgtkggaggaactgcaaagttgcctgtagaaggacccggatacagacagggccaattacccagtctactatagagaggtcaacttgtttgccaagggctaactt

SEQ ID NO: 307969 - DNA, 201 bp, Homo sapiens
cctcaggggtttcagagttcattgagaatgtcctgagatccaggtctcatgagttctctaattgtgtgtctaattttttaacatgtttttggttaattatrgaagtattacatgtattttcaaaataagtatctccctggatcatgcatgtgttttgacttccagaagtcatcatcattaatggtttaggaagttgccttg

SEQ ID NO: 307970 - DNA, 201 bp, Homo sapiens
gctatgatgtgataaaacctcaggggtttcagagttcattgagaatgtcctgagatccaggtctcatgagttctctaattgtgtgtctaattttttaacaygtttttggttaattatagaagtattacatgtattttcaaaataagtatctccctggatcatgcatgtgttttgacttccagaagtcatcatcattaatgg

SEQ ID NO: 307971 - DNA, 201 bp, Homo sapiens
catccagtggcacgatctcggctcacagcaacctctgcctccctggttcaagcaattttccttgcctcagcctcccgagtagctgggattacaggcgcccrccatcatgcctggctaatttttgtatttttatatagatagggtttcaacctgttggccagcctgtccttcaactgctgacctcaggtgttctgccatgcc

SEQ ID NO: 307972 - DNA, 201 bp, Homo sapiens
gagggagtctcggtgtcttgcccaggctggcatccagtggcacgatctcggctcacagcaacctctgcctccctggttcaagcaattttccttgcctcagyctcccgagtagctgggattacaggcgcccaccatcatgcctggctaatttttgtatttttatatagatagggtttcaacctgttggccagcctgtccttc

SEQ ID NO: 307973 - DNA, 201 bp, Homo sapiens
acatcaaggagcacaggataggaattagggttgtgacctttatcctttgacccacatcttaaaaagggtcaaatcttttacttacgtacaattaagcacaygtagtaaaaataaatttccaactggaaggtactctttagggtacaattttttttattaagtgacgtgtcaagattattgggctaagttggggtaagttca

SEQ ID NO: 307974 - DNA, 201 bp, Homo sapiens
ggtattactcatctctgattccaggtctcaccttttctttctgtatcatgaatttttaagcatggtgttcttttgcctgaaattttcttcctcccgcaccsccaccctgcatggccatttgatattgtctcttttcctttgggtctcagcttagctgcttcatcctagaaggcttcagggtctcctccaacctccactcca

SEQ ID NO: 307975 - DNA, 201 bp, Homo sapiens
cagttgcttctggggctctaggatttggggcaagctcagagatgcacaagtataacctggagcttccacaccagttatggagtcagagatgtgaacagtartatttccagccttgccctggcctgtcataaagccatgcccagcgacaggtatggaataaacctgggcttcaccagtaggatccaagtgaccctgtgcctt

SEQ ID NO: 307976 - DNA, 201 bp, Homo sapiens
tgactgacttaggctatgcactggaggcaacatgggagacagacatagaggtcaagcccctgggatgcagatgaacagaccaaactttgagtcctggctcygcccacttttctttgtgaatctgagtcaagacttcaccattcagtgtctctgtctcttcctctgtaaaatgtgggtagtaatacctgatgcttgtggtgg

SEQ ID NO: 307977 - DNA, 201 bp, Homo sapiens
agggacatcggggctagctgtgaacacactttgatttctattttgagcctgggtgtggcctctgcatatatagaggagtttcagcagttttgccatctttsggtgactgacttaggctatgcactggaggcaacatgggagacagacatagaggtcaagcccctgggatgcagatgaacagaccaaactttgagtcctggc

SEQ ID NO: 307978 - DNA, 201 bp, Homo sapiens
cacccaaatgagcctatgtacatatatggagatatatatagagagattttttttttccaacttcctctattttttaatttattttaacttcaggagtacakgtgcaggcttgttatatagctaaacttggatcatggtagtctgttgtatatttagtcacccaggtattaagcctagtactcattagttatttttcctgat

SEQ ID NO: 307979 - DNA, 201 bp, Homo sapiens
tagcatcacgccttttggaaaagtagggaaatagaggtcatgaaagaactaattatatagaagatactgttttctgtaaggagtaccatcattctagatgrttcagtggaatcacactcttactagaaatgttaagatgtttgccaaatgttaatcttaaaatatgatgatgatgatgatgaccaggcgcagtggttcgtg

SEQ ID NO: 307980 - DNA, 201 bp, Homo sapiens
tataggctgtatggaaatactacaccattttatataagggacttatgcatctgtggatttgggtatctgtggggttcctagaaccaatcacctgtggatastggggataactgtgggcaaataaggcattgtcaattttatcccaccctccaccttggccccagcttttattctggccattaaaaaaaacagagttggggg

SEQ ID NO: 307981 - DNA, 201 bp, Homo sapiens
catagattgaacttcttgggggatttcgttagtgtatttctgcaaacagtccattgatgtctaatacataaaaatgacagtcagcatttatatagtatcayattattctctccaccctcagagtttcaggacagattgatgaccaggctgaaacctgattataattatccaaataaaagaacaaattaggtggatggttcc

SEQ ID NO: 307982 - DNA, 201 bp, Homo sapiens
gattttatcttcttatataggaggaagggagtttgtttcaggctctgggagcatgcatttgaaccaacttggtgactcatgaaaataacgcttctggaggrtgaaagcaggtcagaaggggctttagaaatgctgctcactatcaggtttatagaaacactgttattgttttgatactggcaatttttctgagctcacttt

SEQ ID NO: 307983 - DNA, 201 bp, Homo sapiens
gactgatataaaaaaaaaggtgtttttttgagcaactttaaaatttgacattacttgcaagtaagttaataaatagcatccgtcacttttctaaagagacsccctctctttccctctcagaaatccccatagtaactaaagtttttgttgcaactatctctgtgttggtacatttatgaactcttatccttctgtcctctc

SEQ ID NO: 307984 - DNA, 201 bp, Homo sapiens
gagagagttgagctggagagaagtaggggaggacacatgggcacccctttggcaaaaagaggagagatggtggtagctgggacctcgggaaaaatgatatstttctattaccaagattgtaaggattttatcttcttatataggaggaagggagtttgtttcaggctctgggagcatgcatttgaaccaacttggtgactc

SEQ ID NO: 307985 - DNA, 201 bp, Homo sapiens
gaccagagagaaagccctcaaggctcaagctagagcattgacttcactagaccacaaaaagagccttgaaggccatcagccctagacttttcttggggagycaatgaaaaactggcagagcaaggggactaacttggttggcattttgagcagataaggagcactaccgagagagttgagctggagagaagtaggggagga

SEQ ID NO: 307986 - DNA, 201 bp, Homo sapiens
ggctgagcagaggagattctcagctactagcaatagcatgagcaatggccccaagcaggagaactgagtgctcaaggaccagagagaaagccctcaaggckcaagctagagcattgacttcactagaccacaaaaagagccttgaaggccatcagccctagacttttcttggggagccaatgaaaaactggcagagcaagg

SEQ ID NO: 307987 - DNA, 201 bp, Homo sapiens
tacaggctgagcagaggagattctcagctactagcaatagcatgagcaatggccccaagcaggagaactgagtgctcaaggaccagagagaaagccctcarggctcaagctagagcattgacttcactagaccacaaaaagagccttgaaggccatcagccctagacttttcttggggagccaatgaaaaactggcagagc

SEQ ID NO: 307988 - DNA, 201 bp, Homo sapiens
tagtataacctggcctccttcagtattcattcatcagctatttcttgtagccaactgtatgccaagcactgtgctaggcactgaggctgacctgattagaraatacctgtgtggccttggtctttgtggacatcacaggctattgggggaatagaagtttatcatgtaaatgtgccaatggacatatgattcaacatgtgt

SEQ ID NO: 307989 - DNA, 201 bp, Homo sapiens
acattcacaagttcaacaacacatgctttattttagttttctctttcatggatttgtgggactccttctgtgacaaggtgaaactgggctccgactgtttkgaatatgtttatttactcagtccatcccactgtgtgttggaatactcttccgtgtagacacttctcaactccctcaaacaccaacctccacgccaagccc

SEQ ID NO: 307990 - DNA, 201 bp, Homo sapiens
gacagaaggaaccatttagaatcacgtgtctgttgttagtctctttcaggtctggaacagtttctcggaatttccttggcctctatgacctcgatactttygaaggtaacacaccagttgtttagctagactgtcactcagttttggtttgtctgaggtttcctcgtgattacgttcaggttatgcgttgggacagaaaca

SEQ ID NO: 307991 - DNA, 201 bp, Homo sapiens
catcagtattgtgaaattaactttataccacactactgtctaatcctcagacctcattcaaatatgccctaattgtcccaatgacagaaggaaccatttagaatcacgtgtctgttgttagtctctttcaggtctggaacagtttctcggaatttccttggcctctatgacctcgatacttttgaaggtaacacaccagtt

SEQ ID NO: 307992 - DNA, 201 bp, Homo sapiens
agaatgatcctcacatcctgttggtttcacctcccaaataaatcttgaatctccctgagcagtgctctctaaatttactgctattgacttggtgagctacyatcctccctgggttaaaatatggtggtagccctctaagtgatcttcctccttttagaaacatcttcctagtacagatgaaaaaatccaaactctcaccca

SEQ ID NO: 307993 - DNA, 201 bp, Homo sapiens
gggtctttttaaaaaatttttttttgagagggagtctcggtgtcttgcccaggctggcatccagtggcacgatctcggctcacagcaacctctgcctcccyggttcaagcaattttccttgcctcagcctcccgagtagctgggattacaggcgcccaccatcatgcctggctaatttttgtatttttatatagatagggt

SEQ ID NO: 307994 - DNA, 201 bp, Homo sapiens
taaacttgggtctaaatcacagcatcagcttaattgtttacttgtactaatgggtatattagcaacctacagggttctcatatgtggttaacataaaatasaatattgacttcctttttaataataaattgtctcatttttagtttcaaatgaagtatttgttttaatatggatctgatataacatcacatggaaaagact

SEQ ID NO: 307995 - DNA, 201 bp, Homo sapiens
ccacatctcaccatggaagtcctaaaatgaaactgtgtttcacttagaaatagaattctacctatttttctgaagaatacttttttttttttatggtggcmactttgtttgctgtcaatataaatatatcgcttctgtaactctcacagttgcatgtgtttctcctccatcaatgatctgtttagcccctaaaattataat

SEQ ID NO: 307996 - DNA, 201 bp, Homo sapiens
actgcaaatctcccagcactagtctttttggtttagcatttcggaaacactgtcttcgtcatccatgaccattgtcagtgagctgccacatctcaccatgkaagtcctaaaatgaaactgtgtttcacttagaaatagaattctacctatttttctgaagaatacttttttttttttatggtggcaactttgtttgctgtc

SEQ ID NO: 307997 - DNA, 201 bp, Homo sapiens
gacataaatactaggagagtaggtgccttgtgtgtcttgtttatcattgtgctcccagctcctcactgcagatagatcaaggaatagtgaataaatgaggraaagtatacagggatagacctcaaaatattaatagtgatcatcactaggaggaagattttgggtgtttttaattgatttttttctttttgttcatttgtc

SEQ ID NO: 307998 - DNA, 201 bp, Homo sapiens
ctgaactcagctgtaagacacagacctgaagtctgtgttgaaattgtccttcagatttgcctaacatcctaactgcccaccagtaccaaccatttaaataktgctatagcaagaagtttaacgagagtctctggagccatctctctgagtttgaatcttgctttcactacttgcttgatggtgtgatctaaataccaaata

SEQ ID NO: 307999 - DNA, 201 bp, Homo sapiens
catttacatgtgatatttggttatcgagtttaactaaggaatcatctcgcatgcttaactatctgctggcgaaatttttgatgctgtggaatgtgtcagcrccagtggagtattataagttaattacttgtgtgcacagcaggcaacactgatacaggtggcctctagcaatgtggagatgagacattacttgagacacct

SEQ ID NO: 308000 - DNA, 201 bp, Homo sapiens
cttccatattgactgacatttacatgtgatatttggttatcgagtttaactaaggaatcatctcgcatgcttaactatctgctggcgaaatttttgatgcygtggaatgtgtcagcgccagtggagtattataagttaattacttgtgtgcacagcaggcaacactgatacaggtggcctctagcaatgtggagatgagac

SEQ ID NO: 308001 - DNA, 201 bp, Homo sapiens
ctccgccctgaatatgtgacttgcatgtcaacaaggtcttccatattgactgacatttacatgtgatatttggttatcgagtttaactaaggaatcatctygcatgcttaactatctgctggcgaaatttttgatgctgtggaatgtgtcagcgccagtggagtattataagttaattacttgtgtgcacagcaggcaaca

SEQ ID NO: 308002 - DNA, 201 bp, Homo sapiens
agggtctcactctgttgcccaggctagagtgcagtagtgccatcatggctcactgcaacctcaacctcccgggcccaagtgattctcccacctaagcctcrcaagtagctaggaccacaggtgcacacataccatgcctatcttcccccccccaccccccaccagagatagggcctccctgtgttccacgctggtcttgaa

SEQ ID NO: 308003 - DNA, 201 bp, Homo sapiens
ttctttgaatttgtctttgtctctgattgcctgtctctatctctttcatcatcattctttgtgtcatttattggaagggtataagtgggtactgaaatacytaagcatatatagtcagcacccatcgaaaaagatggccccagcatattttctggattcatcttattctatctaaattatctgcctaaaagttgacttagg

SEQ ID NO: 308004 - DNA, 201 bp, Homo sapiens
gtctgaggcttagggggcctttgcatgaacaatgtggtgctattgtgtacttgggctgtttgatgacgatgttggaaggggatataaggtgtggttttgawcttggtgctggggatttagaatagcaaattattcctctgtaacgtaccaaatttagaaatattgtgagataaccctagcactctgtgtggtaggtttact

SEQ ID NO: 308005 - DNA, 201 bp, Homo sapiens
ctctcttccttgctgagatttggtatccctggtatctactctcaactgctccctatacatttttttttttttttttttgagacagggtctcactctgttgmccaggctagagtgcagtagtgccatcatggctcactgcaacctcaacctcccgggcccaagtgattctcccacctaagcctcgcaagtagctaggaccac

SEQ ID NO: 308006 - DNA, 201 bp, Homo sapiens
taaaattcagtatttcagggaattttctgagttcatgcctctgtgttcagcatgccctgattagggaagacttggagtgagagaaacctcacgcactcccyttgctatttcttagcctgcctctgtgtttgcttctttgaatttgtctttgtctctgattgcctgtctctatctctttcatcatcattctttgtgtcattt

SEQ ID NO: 308007 - DNA, 201 bp, Homo sapiens
ctgaaagtcatgtggggacagggactgaaatggaattcagctacaagaaagctctttagtgacctttccccaagcaattgctttagatttagtcaatatgkatttgagtaaaaatatccaacacaccatttgctgagcaaattgaataccgaatatactattgtaggaaattctggagtttccagtggctaaactggcaac

SEQ ID NO: 308008 - DNA, 201 bp, Homo sapiens
tattaaaaccttcactctgttcatttctaaaattcagtatttcagggaattttctgagttcatgcctctgtgttcagcatgccctgattagggaagacttrgagtgagagaaacctcacgcactccccttgctatttcttagcctgcctctgtgtttgcttctttgaatttgtctttgtctctgattgcctgtctctatct

SEQ ID NO: 308009 - DNA, 201 bp, Homo sapiens
tggtttgtgcaactaggtccaaaggcagtgctccattgagacagtgagctctgtggaagtggcgggtgtaggaggaagaggatgaattctgttttagatawatgtagatatatccagttggaaatgtctaagaaaccagttggttagatgggtctgccactcaggacacaagtcagaactggaaataaagatttgagaggc

SEQ ID NO: 308010 - DNA, 201 bp, Homo sapiens
ggaatgacctgcagtgtaaaattaccttgggaggctcttaaagtaatacagctaagtgatggtggttactaatctagatctgattggaggcaggggctggsttaagaagtggactgatttaagggatgtttggcaaatgaggttgacaattcttggtgttagttatggagagaagatagagacattatttcaggggttttg

SEQ ID NO: 308011 - DNA, 201 bp, Homo sapiens
tcatatttaagccttgccaccgtattatgttatgttgcatgttggccatcaaggaggtcgggtcacaatttggaagaacattgttttataccaaggctttrttagcattcctgggttgcacataacagaaacacactcaagtcagcctaaacataaaaagattgtttatttttaaaatataggagtgtctaatgaaactca

SEQ ID NO: 308012 - DNA, 201 bp, Homo sapiens
aattttccttgttataataaaaaatcacatcacttgttggaaatctggttggtgcccaactgctccgggcaagtgtttgcaactcgtgattatttattccycagatctttttagatgtgttatgtgtgaatcagcccagcctgcatttaaggcttgaaaaatgttctttaggattccttggtatcaaagcatccattaatt

SEQ ID NO: 308013 - DNA, 201 bp, Homo sapiens
gcctcaaacctgtaaagtagggacttctatccccaactgacaaatgaaaccaaggaacagagatattcaatgatttgcccagggccactcaactagaaaayggtaggatttgaagccatgtctttcttactctggaggctctttccctcttctgaacttcaatattaggctgcctcctaccctcctggaaactccctaccc

SEQ ID NO: 308014 - DNA, 201 bp, Homo sapiens
ccagtaatattaaggaagaaaactttgtttctgtgtgccagttcatatccattatctgctttgatgcctcaaacctgtaaagtagggacttctatccccarctgacaaatgaaaccaaggaacagagatattcaatgatttgcccagggccactcaactagaaaacggtaggatttgaagccatgtctttcttactctgga

SEQ ID NO: 308015 - DNA, 201 bp, Homo sapiens
ttaatggaaattgcaatgctttattgtcatgatgcttaagtgatttctttttcaataaagggtatgttattaaagagaaaaatgattttgcgacctaggcwttaaagtatgcagtgccatctgtcttaagcctgggtaatcaatggtgtaagtgaggccagtttatttctcatagatttactagcatcactgcataaatag

SEQ ID NO: 308016 - DNA, 201 bp, Homo sapiens
gacctatccttaccttggggagaggtagctgggggtagagagggaagaaagacagctttttttccaagcactttggaataaattagttttgctacaaattrctacatctggtgagagaggaagggcaagttcttaccttctctcttccttttcctcctgcttctcctattaccagtaatattaaggaagaaaactttgttt

SEQ ID NO: 308017 - DNA, 201 bp, Homo sapiens
ccctcaggtatctacctgtccttaaaaattgccaagcttcagaacaattcttttatgaactaatgtaaaaattgtaaatgttttcacataaaggcacaatraaaaattatctagtttgaaaaaattgtttaagtaggctctgtatagtcttcagtgatgacctaactaatttttactagagttagaagagaaaatctctag

SEQ ID NO: 308018 - DNA, 201 bp, Homo sapiens
taatctcacaggtggaggggagcgtggtcatttgtcccacctcattggcaccaaaagaaacccaggtatgagatttgctcataaggtggattggaggataygactggcaccagaggacggtatacgttttcatgcttcctcccttggagatgagcatgtggaacaaggcctgcctggcctatcaactcaggtacaagggat

SEQ ID NO: 308019 - DNA, 201 bp, Homo sapiens
cttaggcggttgatgattcatttaggccatactctggggactctagttttcttaaagagcatgttctcaactcctgaggttcatgatcctcccgccctctrcttcccagagtcacaccagtccaacttgaattctcttctcattttatagtgaacggcaggaagccaagtgatcagacgtgccattgtctgttggtttccc

SEQ ID NO: 308020 - DNA, 201 bp, Homo sapiens
gagatcccttggggtcccttaattgccctccatcccggctcctatcaggctagcttgctgcttaggcggttgatgattcatttaggccatactctggggastctagttttcttaaagagcatgttctcaactcctgaggttcatgatcctcccgccctctacttcccagagtcacaccagtccaacttgaattctcttctc

SEQ ID NO: 308021 - DNA, 201 bp, Homo sapiens
caggagatggcctgaacatcggtatttttaatagctgcttgcgtgattctaaatagtgcacacaggttgagaactagcagagcttatcagagatcccttgrggtcccttaattgccctccatcccggctcctatcaggctagcttgctgcttaggcggttgatgattcatttaggccatactctggggactctagttttct

SEQ ID NO: 308022 - DNA, 201 bp, Homo sapiens
atggctccacactggaatcactgagcaagctttaaataataccgatgctcaggttccacccctgggatttagatgtaattggtccaggagatggcctgaayatcggtatttttaatagctgcttgcgtgattctaaatagtgcacacaggttgagaactagcagagcttatcagagatcccttggggtcccttaattgccc

SEQ ID NO: 308023 - DNA, 201 bp, Homo sapiens
gaaaggcattctcacctaacaggtttgtgatgtgttactattttctgtttcttcctctccaaactcagtgggccgagaaagtgtaaaacaactttcctcartcatggctccacactggaatcactgagcaagctttaaataataccgatgctcaggttccacccctgggatttagatgtaattggtccaggagatggcctg

SEQ ID NO: 308024 - DNA, 201 bp, Homo sapiens
agtcctcagtaaatactagctctcattataatttaaacaatagcatgtgcctgtcatatgtgtagtgataaacataagttaccatgtacaacagttgtgcrgtgggaagggtcgttaacctgcatgtgtgagagaggaaaggcattctcacctaacaggtttgtgatgtgttactattttctgtttcttcctctccaaact

SEQ ID NO: 308025 - DNA, 201 bp, Homo sapiens
gttaccttgtcaaagtcgctctttttttggaaggcagggtggagtggggccaggtctcactctgtcacccaggctggtagtgcagtggcacaatcacagcrcactgtagcccctacctctcaggcttaagcaatcctccccaccccagcctctcaagtagttgagactataggcatgtaccagcatacctagctaatttct

SEQ ID NO: 308026 - DNA, 201 bp, Homo sapiens
ttgaaatagttaccttgtcaaagtcgctctttttttggaaggcagggtggagtggggccaggtctcactctgtcacccaggctggtagtgcagtggcacartcacagcgcactgtagcccctacctctcaggcttaagcaatcctccccaccccagcctctcaagtagttgagactataggcatgtaccagcatacctagc

SEQ ID NO: 308027 - DNA, 201 bp, Homo sapiens
ttgacatgtttttctcttttctacacagaaaatgttttcagactgctcatttctatgtggaagacagcagttcacctcgagtggtccctaatgaaagtatycctattattcctattccgggtaagtaagacactgctcttatttccaatgggctaattgtttttctcttttattctcagttttatgtgataaaacaacaaa

SEQ ID NO: 308028 - DNA, 201 bp, Homo sapiens
cttacgtgccaccttctcaggagtcgctgtattctgtagggtctccttgatatttttatttcacattcaattatcttatgttgtttttcacaagctgcatktacacaagtttgtgttagtttacttgcttcatacctttctcccccactggaatgcaaacccctgaaggctgttctgccttgttcatcttggatctcggtg

SEQ ID NO: 308029 - DNA, 201 bp, Homo sapiens
ttaggaatcagaaaacctaggtccaccctgaaatctttgttcagtgccttcacctctctgaaccttagtttccagaatctgtaaattaattaggatgcctrttctccttgccttttgaggtaactgtcaagacaacagtagatgatatttgtaaaagcactttggaaaccatacattaagcgaaacgtgtaagctgttgca

SEQ ID NO: 308030 - DNA, 201 bp, Homo sapiens
taaaagaactctcattgtgtcattcaaggatcatttagtggcaagaatggaaatccacacgaacttactttaggcaaaggcaggaggttctttggagaatwcaaggatgtctctcacactcaaggctgggcagtacatctagccaggactcagtggagagaggggccacttctgggaaagtcctaggagccccactcctgt

SEQ ID NO: 308031 - DNA, 201 bp, Homo sapiens
acatttattctacagggaagaagagacagttggagacactaatattccagctgtcggcagcagaatcatttcacaaccttcttcccagaacttttggtcahtactattcttgcccctcagcctcactactcactgaaaaaatatttaatgtggatctagtcagttccagtttggttagtttaaagagatccaggaagactg

SEQ ID NO: 308032 - DNA, 201 bp, Homo sapiens
attgaatgtatactgtggtttaggctgaaaacatgatggataagaattactgactgctttggatctgtatacgatatgtcatagccttgaactttattctrttctgcttcagtctttttcagaccttcctgtacgaacccaagtctttattatttgtgacccaatagcatgttagatgtttttaactggaaaatgtgaatg

SEQ ID NO: 308033 - DNA, 201 bp, Homo sapiens
taaattgccccctagctcttaaagacagtaagtcattcattgttagcagtgataatgcatgcctatacagattttaggagtgtttcagttctgatctttcrtgttagaaaagtaatctcccttcccagttgaactctttttcctagttactagaattggaagtggcaatcacttctattccagcctgtccagtgttttctg

SEQ ID NO: 308034 - DNA, 201 bp, Homo sapiens
ttcagaactttactgcttggagaatgagaaaaacaattcactggtacctttgactctttgtctagaagtgttgctgtaagccagctttttgttcttgtcarataaattctagagaccgtgaaaagcaacatcatacagtatttgcagtcactagaaataacatcagtccttttcttgtgatagcgttggatgacaccatta

SEQ ID NO: 308035 - DNA, 201 bp, Homo sapiens
ctggttaaaatatcattttcgtaagcagtacaagaagctgtaaattgccccctagctcttaaagacagtaagtcattcattgttagcagtgataatgcatrcctatacagattttaggagtgtttcagttctgatctttcatgttagaaaagtaatctcccttcccagttgaactctttttcctagttactagaattggaa

SEQ ID NO: 308036 - DNA, 201 bp, Homo sapiens
agctttttgttcttgtcaaataaattctagagaccgtgaaaagcaacatcatacagtatttgcagtcactagaaataacatcagtccttttcttgtgatarcgttggatgacaccattaccttggctacctgagctaacttcaacctcattgtccttcccagggagtagtttcccagagtagtattaaaagattgacagcc

SEQ ID NO: 308037 - DNA, 201 bp, Homo sapiens
gaacgggatttctggaaaaactcatggggattttgcagtaatcctatgtcctgtcatgtggacaagtatttcaacccagctgtccccaagacatgccatcrctccctttcagcccattggctctgtggaattttcattgcaggaacatggaactggttaaaatatcattttcgtaagcagtacaagaagctgtaaattgcc

SEQ ID NO: 308038 - DNA, 201 bp, Homo sapiens
tacctgagctaacttcaacctcattgtccttcccagggagtagtttcccagagtagtattaaaagattgacagcctcttccttggcccccacaaacataaygcagaaggcttccaaaagaccagtgctagcatactctttcaaaaggaaggcactccaaagctccatgagtcagaagaattaacaggcagggactggtaga

SEQ ID NO: 308039 - DNA, 201 bp, Homo sapiens
caagatacttttacagaactcccatctccccacttgtccatgatataattattttggcaatagtgataatgaaaggtcactattttgtgagatttttgttraaaaggaatagagcatacactttttaatgccaggtaacttcaaaagaatatttgacactgctactgtgattaagtgattttaattttctactccatcacg

SEQ ID NO: 308040 - DNA, 201 bp, Homo sapiens
agctggggcctcagcacccaggctaacagcaggagctaaccaggtgctcatctgtttcacataattcagggtagattttctaaaatcaaattcctgaggtycctctgcgacctcctgaatcagatgttgaacagtaagagatattccccatacttctatcaaaaacaattcctcaggccggatgtagtagctcacacttgt

SEQ ID NO: 308041 - DNA, 201 bp, Homo sapiens
tgtaccaccatgcccggctgatttctgtattttttgtagagacagggttttgccatgttgcccaggccggtctcaaactcctggtctcaagtgatccactygccttggcctctcaaagtgctgggattacagggtgtgagccactgcacctggcccttattttgttttatttattaattttttggtgctgggaatgctgaa

SEQ ID NO: 308042 - DNA, 201 bp, Homo sapiens
tcccagaatgaaaccaggacctgcagaagctgaccttactgaagaaactggttacagctggggcctcagcacccaggctaacagcaggagctaaccaggtrctcatctgtttcacataattcagggtagattttctaaaatcaaattcctgaggtccctctgcgacctcctgaatcagatgttgaacagtaagagatattc

SEQ ID NO: 308043 - DNA, 201 bp, Homo sapiens
atgggttgggagaggaagcattaggtatagaaggcacgctggatttatgacagacagtaagtgagcctgccccagtgctagaggaaatgattggaatggayagtggtgtgcaaatagagtgcaagagtgggtcttgatgtttttgaagggatcctcttagaagaaggaatcaacttggtctttggggtcccagaatgaaac

SEQ ID NO: 308044 - DNA, 201 bp, Homo sapiens
tatggatcagtgtatgggttgggagaggaagcattaggtatagaaggcacgctggatttatgacagacagtaagtgagcctgccccagtgctagaggaaaygattggaatggacagtggtgtgcaaatagagtgcaagagtgggtcttgatgtttttgaagggatcctcttagaagaaggaatcaacttggtctttggggt

SEQ ID NO: 308045 - DNA, 201 bp, Homo sapiens
ctacatgagccacatcccggggaagcaggaggacccacccacagttatggtatggatcagtgtatgggttgggagaggaagcattaggtatagaaggcacrctggatttatgacagacagtaagtgagcctgccccagtgctagaggaaatgattggaatggacagtggtgtgcaaatagagtgcaagagtgggtcttgat

SEQ ID NO: 308046 - DNA, 201 bp, Homo sapiens
cagatgcctccagatggtggtgaggccattagaacgtaaaagggccctataagattttcccctggaccccaaggaactgcttaattcctagtagtgagttyctctccagggtcaaagtcataaaacggggatcctttatgtggccctatgtatgctggaaatgtatcctttcctgtgagcttccttattagtgtctacttg

SEQ ID NO: 308047 - DNA, 201 bp, Homo sapiens
aataggatgcataggaggtcaactctgataggacaaaatgtgggcaggtctacatgagccacatcccggggaagcaggaggacccacccacagttatggtrtggatcagtgtatgggttgggagaggaagcattaggtatagaaggcacgctggatttatgacagacagtaagtgagcctgccccagtgctagaggaaatg

SEQ ID NO: 308048 - DNA, 201 bp, Homo sapiens
ttggagcagccaagtcggctgagagagagacaagtaacacattgatatggacccagatgcctccagatggtggtgaggccattagaacgtaaaagggcccyataagattttcccctggaccccaaggaactgcttaattcctagtagtgagttcctctccagggtcaaagtcataaaacggggatcctttatgtggcccta

SEQ ID NO: 308049 - DNA, 201 bp, Homo sapiens
cagcagtagcattacaaagctcaaggcatcccttggaataggatgcataggaggtcaactctgataggacaaaatgtgggcaggtctacatgagccacatyccggggaagcaggaggacccacccacagttatggtatggatcagtgtatgggttgggagaggaagcattaggtatagaaggcacgctggatttatgacag

SEQ ID NO: 308050 - DNA, 201 bp, Homo sapiens
cactcttcaaaggtggctgccagacactagttctagtttttttttaaactgaaccgattatagggtttagtgccagatgcttcagaaatgcaagcagctarctaacacaaagccaatacctaagtcttttaggaaaagagatgaatgtttagggtcatatctgaacttagtagcacagctactcccccgctgcccttttta

SEQ ID NO: 308051 - DNA, 201 bp, Homo sapiens
aaaccttcagctgacagtctgcttttccacgttcagataaaaagccgtgcatctttaatgtggatatgatgcctctccattgtgctcaatctcaccgtttmccttctaaagtttactagaatcccacaatgtcagcaggaactggagtcaaataatagatgatttgtaggcttcaggggtgtcaccactctctttccagtt

SEQ ID NO: 308052 - DNA, 201 bp, Homo sapiens
ttctctgagtatgtattaagttgtatgatttttttgtgagtgtgcaaattcctaggtagctgtataaaaatgatagaagagagctaactaatttaggtctygcgtatttagaatttggatttgtccaaagttgatgtaagccaagaattacttatgcatttttaagaaggcattttattagacacatcaggactgtaaata

SEQ ID NO: 308053 - DNA, 201 bp, Homo sapiens
taaccaagacttggacaactgggattccaacataaggtgcaaaacttgcatgccaaaatatttaaatctgccctgttcctacatatcctaggtttacctcygccctgttaaattaaagcacccacatgggtatttgtttgcagacactgcagtgatttttgaaacaagcaccaatttaatagaacattgacttagatgtag

SEQ ID NO: 308054 - DNA, 201 bp, Homo sapiens
ccattcagtattccattttccctacattccctgttatgttatgttatgttatgttgtgttgtgttgtgttgtgttgtgttgtgttatgttatgttatgttrtgttatgttatgttatgttatgttatgttatgttatgttatgttatgttaatgttatattttaagacagggtcttggtctgtcacccaggctggagtgca

SEQ ID NO: 308055 - DNA, 201 bp, Homo sapiens
tcctaagaactccagtagtccctggctaaccaagacttggacaactgggattccaacataaggtgcaaaacttgcatgccaaaatatttaaatctgccctrttcctacatatcctaggtttacctctgccctgttaaattaaagcacccacatgggtatttgtttgcagacactgcagtgatttttgaaacaagcaccaat

SEQ ID NO: 308056 - DNA, 201 bp, Homo sapiens
ctgcaggccgaaggccataagaataactaataatcccagtcctaagaactccagtagtccctggctaaccaagacttggacaactgggattccaacataargtgcaaaacttgcatgccaaaatatttaaatctgccctgttcctacatatcctaggtttacctctgccctgttaaattaaagcacccacatgggtatttg

SEQ ID NO: 308057 - DNA, 201 bp, Homo sapiens
ttagggctatttgggttattttctgcaggccgaaggccataagaataactaataatcccagtcctaagaactccagtagtccctggctaaccaagacttgracaactgggattccaacataaggtgcaaaacttgcatgccaaaatatttaaatctgccctgttcctacatatcctaggtttacctctgccctgttaaatt

SEQ ID NO: 308058 - DNA, 201 bp, Homo sapiens
ctctggggctcaagaaatcctcccacctcagccttccaaagtgctgggattacaggtgtgagccaccatgcctggctgtatacatctttttaaacattgcrcagaggtgctccggcctcattgtttgcccttatgctgctgcttttttctgtcttcctcttcttctgactttatccttgtttctcttattgtatctctaga

SEQ ID NO: 308059 - DNA, 201 bp, Homo sapiens
ttgaatgagaatgtatataaggacttagtgctgtgcatggtaaacagtaagtgctcaataaccatttttttaaatcaaaagttttatatgtttatttttayagagaccgggtctctccctgtgttgcccaggctggtcttaaactcctgacctcaagtgatcctcctacctcaacttcccaaagtgctaggattacaggcc

SEQ ID NO: 308060 - DNA, 201 bp, Homo sapiens
gtcacctaaatgctccttcttgtgattcgactctcatcctatatacctagtgccaccatgaccccatcaccctacgtcccctcccccttcgacttgtcctsatcactgcatattgagctttcacttggcaaagtcttcacctcccagtaccatcaccttggggcttaagtttcaagatatgaattgtgggaggacacaaac

SEQ ID NO: 308061 - DNA, 201 bp, Homo sapiens
tcgcttgagtccaggaggtcaaggccgcagtgagccatgatcatgccattgcactccagcctgggtgacaaaatgagaccctatcttagaaaaaaatacayatgtatatatggtgatgatgatggtgatttgttgagcatcgatgaggtctaaccatggtgcttcatgttatacactacgttaacttatttgagcctcaca

SEQ ID NO: 308062 - DNA, 201 bp, Homo sapiens
aaagacaagccaagaaaaaaaaaaaaaagccatgggaccttagcatgtgatggcttttaatgggaatgctcagatggtcttgccaacggcctggttttcgycaccaagggattagtagagtatgacctgatggcttaaaaaaacaactcaaaaaaaccaaatcaaccaaccaaacaaaaaaaccaggtgtgctggggtatt

SEQ ID NO: 308063 - DNA, 201 bp, Homo sapiens
aggcacttaacaaaaaagacaagccaagaaaaaaaaaaaaaagccatgggaccttagcatgtgatggcttttaatgggaatgctcagatggtcttgccaayggcctggttttcgtcaccaagggattagtagagtatgacctgatggcttaaaaaaacaactcaaaaaaaccaaatcaaccaaccaaacaaaaaaaccagg

SEQ ID NO: 308064 - DNA, 201 bp, Homo sapiens
aagaaggaaggtcaaatcagcggtctttctccacacacaacagaagccctggttttagtagcaaggtttcatggcatccttttccccaccttagttccctsactctgcatttgattcatttctgagtgcaggctgtgcgtagctctggggctttttgtcttctgtggtgttaggtttgtgcttctcagttttagagcgtgt

SEQ ID NO: 308065 - DNA, 201 bp, Homo sapiens
ctttcatagtctcacaatactgtccctatcagttccattacttgagtctctgatgctattgatatcacccttcaattgtactgtctgtggcggtgtggtaraaggttttgaaaatgtttttagtaacctcattaatatatgactacaccaacctcttccctgctgtatgtcacttttgaaaagtaaataattgtagcttac

SEQ ID NO: 308066 - DNA, 201 bp, Homo sapiens
taggtctgttgacctaattataaaaacaatatactagaactcaatattttctttgccatcagaaatgtaagctttgcaatgtgttgcacagatgataatamtaagtttttttaagtaaatattttgctgccttcttgtgggatgagtaagcatgggggggctcttatattagtaatttaaaggatgagccccttccttgtt

SEQ ID NO: 308067 - DNA, 201 bp, Homo sapiens
catcatcaaagctcagtgtaaccccaaactcctgggctcaagcgatcctttcacatcagcctcccgaatagcaaagactataggcatgtaccatatgactrgttaatttttttttttttttaatttttttagagacagatctccctgtgttgcccaggtgggtcttgaactcctggcctcaagcaatcctcccaccttggc

SEQ ID NO: 308068 - DNA, 201 bp, Homo sapiens
gctccttgacctcatagaacctgagagaccaacagagtgaatcttaacccaaatgtacatcagaattaagtgggtacttttacatgttccaaagccaaatwtgagtaattttcgttcattccttattactggtaaatgaaaagaaaaataaaaaccttcagctgacagtctgcttttccacgttcagataaaaagccgtgc

SEQ ID NO: 308069 - DNA, 201 bp, Homo sapiens
gcaaagctccaaaaaaaaaaaaaaaaaaaaaaagaaagacgaaatacatgtgcattatacgtcgcttctcgtcctttcggctaagatcgagtatgtgtgcrttatgtcctgtgtcagttaagaggtgtgtgttttttcttttcatgttgttggaatacataatttgtcttcctttttatagtgctcactccaggaaaatcc

SEQ ID NO: 308070 - DNA, 201 bp, Homo sapiens
atcagaggaggggatcggtctgtctgtctactgttgaatcttggctgctaatgaacatagtcccataacagcgtaagcagtgttacccattaggaaaccarcattcttgtattgtattcttatcttgtgggcctgctggtttaaagggtaagaaactctaattcctgagaatgaaaacttttaattcttcataaaaagaac

SEQ ID NO: 308071 - DNA, 201 bp, Homo sapiens
aaggtgaaaggatagaaagtagcaggtatgtacagtgaacaaatctgaagaactaatgtacagcagagggactatagttaataaaaatgtattgtatgcartattcaggatttttgctaaatgtgtggattatctctgctcttgcagcagggcttgggtagctatgggaaatgatggatatattaatatgtttcactataa

SEQ ID NO: 308072 - DNA, 201 bp, Homo sapiens
taactgttgcttattgtaccagttgagtgttcctcatctgaaatgtctgggaccagaaatgtttaatttttaaattttttttatttgggaacatttacttrtatataatgaggtttcttggggataggattcaagtctaaacacagaattcatttatgtttcatatgccccttaaatacgtagcctgaaggtaatttttta

SEQ ID NO: 308073 - DNA, 201 bp, Homo sapiens
attcttttgaaacctatggcttttgatgaatatttcagttttacatttctcagagggagccattgaattcagaagctaattagaaatggcagccaccatgmccaggcttattgtttgaccaggttgtttggatgtttttcttttaagtaatgtcagatggtaaggctgcctatatcaattgggtttctcattgaggtccat

SEQ ID NO: 308074 - DNA, 201 bp, Homo sapiens
gaaccttgcctctgtgtaattacatttcctcatgccaaaaatggccagtttcctctttacatttgattctgggaataacgtatcaaagacattaatatccyttttttttttttttttttttttttttgagatggagtctcactctgttgcccaggctggaatgtagtggcgcatgatatcagctcactgcaatctccgcct

SEQ ID NO: 308075 - DNA, 201 bp, Homo sapiens
atcatgttcttaagtgtaggattttccttctggtcttgctgacaggttcccattggcaatatgagttgaaggggtagctttgtgtccagcaagccttgctytgaagcctctttgtcttagaattgggtttccgtttgttcatttaatgtcgttttggacaaaagacctgtcctgaaagtttaaaaacttaatcagatggct

SEQ ID NO: 308076 - DNA, 201 bp, Homo sapiens
tctctacacaatatgaaagtaatgtttatttttctatagatgcttatatggccatgtatatttgtttcttatccactgttcctggagaaaccagagataaytactctgagaaaatgcttcatgttttttcttgtttagctgacaaattctcagtatcagaattcttcctgcattaggactcctctatctgtgggacttcct

SEQ ID NO: 308077 - DNA, 201 bp, Homo sapiens
caaggacgttaccaagtactttgcttttgtacatcattgaatgatagtttaaaattgttttggccattagttttcatgtaagtcacagaatgtgattttcrtaaactcagagaagatcttaggcactctgtagtaaccttactatgacagatgacaggcctgaccctctgaaaggttaagtgattgaccgtggtcccctag

SEQ ID NO: 308078 - DNA, 201 bp, Homo sapiens
gagttccttcctcaggaaaggaccttcaggcctctcaaaaaagtatcaaagggctgaagttcaccagaccattgcaccaaatacctccttgcccctccttrgttcttgttttcttacacattgttacatttcttccttgctatataaatctctagttttagtcagtcggggagctggatttgagactgagcttccatctct

SEQ ID NO: 308079 - DNA, 201 bp, Homo sapiens
attgcacttcaaggacgttaccaagtactttgcttttgtacatcattgaatgatagtttaaaattgttttggccattagttttcatgtaagtcacagaatstgattttcgtaaactcagagaagatcttaggcactctgtagtaaccttactatgacagatgacaggcctgaccctctgaaaggttaagtgattgaccgtg

SEQ ID NO: 308080 - DNA, 201 bp, Homo sapiens
cagaacattggtagcttagaggaataatagtaaaagtaacaacaatgagagtaagaataatatctatcacgtatgagatgtttactgtgttcccagctctytctgaacctctttcttttattgacttatttataatcttcactactgcagcctaggaaggtttcgtaacttgcctatgctcacacagctcacagatagcgg

SEQ ID NO: 308081 - DNA, 201 bp, Homo sapiens
atgccaaccttatatatttcctctaatcatgattgttgtgtgaatattcttttgttgtgatgaacatgtttgtttcttggtaggtcccccatgtggtaagycttagaagtgtgtggaagaacaaaatagatgtggttctgaaacctgcccaatagtcctatagacagttgctttggataaacatagaaattgacccttctg

SEQ ID NO: 308082 - DNA, 201 bp, Homo sapiens
gaaggccagagtcattcttaatgttcaattgcagttttggaatagatttgtggatgtacaacattgaatttatagcctatcaggtgttttcagcacatctycttctgcaaatggcctgtaattcaaatttcctcttagtggacattacagaggactatttaattattggcgaagcattacataattaagagactttgaatt

SEQ ID NO: 308083 - DNA, 201 bp, Homo sapiens
ggttttatccagatataagttcaattctttcactacattacctagaagtgcaatttcagaatgttttgggttgattaagaagacttttttttaatccacamacaaaaattaaaatacatatgttccaattaaactattttaacagctaattgatttcataggacttaccattaagtgaaggccagagtcattcttaatgtt

SEQ ID NO: 308084 - DNA, 201 bp, Homo sapiens
aagggcctttaactctggagagagagagagaagggataaattagtaattttacccatctaccaaattcccaccctaaccccagacccccagaaaaaaacamgaactatttttgagtctgagaaaattgagtttgtgttggagaatggtggtagattatttagaacttccttcttagactgctttacaagataatgacggta

SEQ ID NO: 308085 - DNA, 201 bp, Homo sapiens
taatgcaagaattatgtcttatgtatatttttaaaatgataaatatttcagtttgagagtatgaagtttcgacttgtaaattttagaattggactcttctktctccatttttcttctgttctggtataaagcagaacaccactattaaagtataattcattccttttatttatggtgacctaaattaatctttttattctt

SEQ ID NO: 308086 - DNA, 201 bp, Homo sapiens
aattctttcttcaaaagtagcttcattttatctttgggagctaggggaggacagatcaagtcaggcagataaaatctcaagagaataatgcaagaattatrtcttatgtatatttttaaaatgataaatatttcagtttgagagtatgaagtttcgacttgtaaattttagaattggactcttctgtctccatttttcttc

SEQ ID NO: 308087 - DNA, 201 bp, Homo sapiens
tcccgggttcaagcaattctcatgcttcagcttcccaagtagctgagaccacaagcgtgaaccaccacgcctggctaatttttttgtatttttagtagagwtggggtttcgccatgttggccaggttagtgtcgatctcctgacctcaggtgatctgccctccccagcctcccaaagtgctaggattacaggcgtgagcca

SEQ ID NO: 308088 - DNA, 201 bp, Homo sapiens
tcccaagtagctgagaccacaagcgtgaaccaccacgcctggctaatttttttgtatttttagtagagatggggtttcgccatgttggccaggttagtgtygatctcctgacctcaggtgatctgccctccccagcctcccaaagtgctaggattacaggcgtgagccaccatgcccagccccagcttcctattatttaaa

SEQ ID NO: 308089 - DNA, 201 bp, Homo sapiens
cggtctgctagatgagaaaatggaactggaggggaataaaatgaactttgtacacagagctggtaaaggggacaactgacgaggtagcccaggtctcttcrgacctaaaggcctttcttgttggatcatgccacactctgtccttcagcacatccaacatctgataaactggcatctcccattcgctatccttctctttgc

SEQ ID NO: 308090 - DNA, 201 bp, Homo sapiens; identical to SEQ ID NO: 64290

SEQ ID NO: 308091 - DNA, 201 bp, Homo sapiens
ttttttccccctagaaccctattagctgtgccacggccacatggagggttcattgtggcaaagtaggagagaaggagtatctgtttttcaataaaactccytgtagattcagggtccaggcagggtgccctgatatatattacctgatttgatcttcatgacaactttacaagtcactcggtctgctagatgagaaaatgg

SEQ ID NO: 308092 - DNA, 201 bp, Homo sapiens
gtattattctttgtcacatcagttctcctttaaccctctcaaccagcctgtaatgtaagtaccattttttccatttaccaaataaggaatttggtaaactsagtaagctggaataattgtcctggctaacaagtagcatacttggtagttgaacgcaggtctgtgaccttttgtattgtaacactgccattcatcagcttg

SEQ ID NO: 308093 - DNA, 201 bp, Homo sapiens
catacaaataaacattaaaggcccatatgtctaagaactttagtggcttactatgcatcaggtattattctttgtcacatcagttctcctttaaccctctsaaccagcctgtaatgtaagtaccattttttccatttaccaaataaggaatttggtaaactgagtaagctggaataattgtcctggctaacaagtagcata

SEQ ID NO: 308094 - DNA, 201 bp, Homo sapiens
ttttctttttaattccattgaccatttgtgcaataggaattagacataattagtcactgaaaacattcgtcacattgacccatttggaaaaagtgtgcttwttttttttttttaaatttgttcagggggaggggttttgtaacctgaaatttttccctttttcttctgtttaaactatatcaaatcattctattatagtgt

SEQ ID NO: 308095 - DNA, 201 bp, Homo sapiens
aattagtggaaggctggaactagagccagtgcattctgactttcagacaacagcgtttcccttttaccaggagtcccagggcaaccctctgatgtcacaartattgtggaaggtggtctggggatcccatcattagggtccaataatggtaggcttttttttctaccttatactcttggcaacggtgcatcagggtaggag

SEQ ID NO: 308096 - DNA, 201 bp, Homo sapiens
tgttactactactgagtcaaatcatttagagtcagtatagatattctctgtttaaattctctccccgtgccctgttttcttttttttaagcatagatcccmcttctccatggctagttagtagaacaaactggggatgacgcttgttacattaatctaaaatggtttttctgcaaatgatttaaaaatcactaactgatag

SEQ ID NO: 308097 - DNA, 201 bp, Homo sapiens
aggcccacattctttggttctttcattctaatactatccagctttgcctgaaccctggaattgagcttggagctatttcactgggtcactctttggctagrtactctgcaagctgtgtttcctgtctgctaagctccattttctttgttatccccacagcctcagtccccaagttcagtagtaggaactagtttctgtgta

SEQ ID NO: 308098 - DNA, 201 bp, Homo sapiens
gttactactactgagtcaaatcatttagagtcagtatagatattctctgtttaaattctctccccgtgccctgttttcttttttttaagcatagatccccmttctccatggctagttagtagaacaaactggggatgacgcttgttacattaatctaaaatggtttttctgcaaatgatttaaaaatcactaactgatagt

SEQ ID NO: 308099 - DNA, 201 bp, Homo sapiens
gtaccaatcattacttttatttttaattataacgcttccagtagcctcctcaatgtaatgatccttaataggtgtaaatatgggatgatgatggtagaccrttgtggagtcatcattccttgatcaacagttgcttttttactctgagttttgtttatggcactgatgaataggtcatttcacctacaaagagactgccaa

SEQ ID NO: 308100 - DNA, 201 bp, Homo sapiens
gagtcaaatcatttagagtcagtatagatattctctgtttaaattctctccccgtgccctgttttcttttttttaagcatagatcccccttctccatggcyagttagtagaacaaactggggatgacgcttgttacattaatctaaaatggtttttctgcaaatgatttaaaaatcactaactgatagtgtggagaagacc

SEQ ID NO: 308101 - DNA, 201 bp, Homo sapiens
cacgagcctttacattttttgttgtttcattctctcccgcatttcctcctgtgtcttcttgcatttgcctccgctggggcatgtctctgtctctctgcctsattctgcctgttttcactccttgctcctagcattggcccccttctctcccttcttcctgtcttctttccttagagctggccatagaagagaactgaagtt

SEQ ID NO: 308102 - DNA, 201 bp, Homo sapiens
taaactgacctccagtccctatactttattctgatcctggtcatagaaggtgactggcggcctcatttctattgcattcctcctgccaccccaccatcccytgaaaaatgcagtgggctgtgtcagcataaatcagctcctcacataccccattcagcagccagtgtcttcagtgtttgagatcctggctgaaagcaagtg

SEQ ID NO: 308103 - DNA, 201 bp, Homo sapiens
atactttattctgatcctggtcatagaaggtgactggcggcctcatttctattgcattcctcctgccaccccaccatcccctgaaaaatgcagtgggctgygtcagcataaatcagctcctcacataccccattcagcagccagtgtcttcagtgtttgagatcctggctgaaagcaagtgtctgcttaaaaataatttgt

SEQ ID NO: 308104 - DNA, 201 bp, Homo sapiens
gaagtttaacgagagtctctggagccatctctctgagtttgaatcttgctttcactacttgcttgatggtgtgatctaaataccaaatagcataacctttytggctgcaatttcttcattcagaaaatgagggtagtattgtcaggagcaaataaggtaatctgtggacgttggtccattgtcagtggcctataaatgtta

SEQ ID NO: 308105 - DNA, 201 bp, Homo sapiens
taaagcttcagttcaaatgtcactttcagaggaaggcttctctctcttccttgctgagatttggtatccctggtatctactctcaactgctccctatacatttttttttttttttttttgagacagggtctcactctgttgcccaggctagagtgcagtagtgccatcatggctcactgcaacctcaacctcccgggccca

SEQ ID NO: 308106 - DNA, 201 bp, Homo sapiens
aaagcttcagttcaaatgtcactttcagaggaaggcttctctctcttccttgctgagatttggtatccctggtatctactctcaactgctccctatacatttttttttttttttttttgagacagggtctcactctgttgcccaggctagagtgcagtagtgccatcatggctcactgcaacctcaacctcccgggcccaa

SEQ ID NO: 308107 - DNA, 201 bp, Homo sapiens
aagcttcagttcaaatgtcactttcagaggaaggcttctctctcttccttgctgagatttggtatccctggtatctactctcaactgctccctatacatttttttttttttttttttgagacagggtctcactctgttgcccaggctagagtgcagtagtgccatcatggctcactgcaacctcaacctcccgggcccaag

SEQ ID NO: 308108 - DNA, 201 bp, Homo sapiens
ctggttcctgtaatcccagctactcgggaggctgaggcaggagaatcactggaacccagaaggcagaggttgcagtgagccaagatcatgccgttgcactmcagcctgggcaacaaagcaagattccatcttaaaaaaaaaatttttttttaaatatgtcctttatggaacactgtgccttttcgtgactgactgtcttta

SEQ ID NO: 308109 - DNA, 201 bp, Homo sapiens
agcttcagttcaaatgtcactttcagaggaaggcttctctctcttccttgctgagatttggtatccctggtatctactctcaactgctccctatacatttttttttttttttttttgagacagggtctcactctgttgcccaggctagagtgcagtagtgccatcatggctcactgcaacctcaacctcccgggcccaagt

SEQ ID NO: 308110 - DNA, 201 bp, Homo sapiens
atatcaaaagtagccaggcctttaatcccagctacctgggaggctgaggcaggagaatcgcttgaacccaggaggcagaggtttcagtgagccaagatcgygccactgcactccagcctgggcaacagagtgagactctgtctcaaaataataataataatttttaccttgtaagtttacattgcctgggcaatactgaag

SEQ ID NO: 308111 - DNA, 201 bp, Homo sapiens
aaaaaaaaaaatggaaaaaacataaatggaggtgagctggaagattgagtgaactcatctgagccagaaaggatacatctacaaatttttctgggagagtrtaatagcaggctgcaaacataaatatgtcatctgtacttaagtaattttgctaaattaataagatcaacaatggctaccatttagagaacacattgcata

SEQ ID NO: 308112 - DNA, 201 bp, Homo sapiens
agatgcaaaccttcaaggagacctaacctgtgtgagagattgctttctggagagtcaacctaggcaagcaaagtgcttgaatatgcccaccagatttggcrtccctggccttccttttaatgtgagaactgctggccatttcattttgaccctggtttcactgctgtcgcaaagtgtccttttgaatcccgtggtagcttg

SEQ ID NO: 308113 - DNA, 201 bp, Homo sapiens
ggacgtcccatcttctaggaccatgagaaatagatttctgttctttatcaattactcagttgcaggaattttgttacagcagcacagacagactaagacarttaccctgtgggacaggtactagttctatcctctttaagtgaggtgagtaacttgcccatgaattcttttcagagatgagattcagtaccaggtgacttg

SEQ ID NO: 308114 - DNA, 201 bp, Homo sapiens
aaaagagattaaagttgaatgaagtgctgtcttgcccttctattccctctgccacatgaggaaacagcgttcctcttctctggagattgcaatacaaggcrccatcttggaagcagagaacagctctcatcagacatcagtcctgttggtgccttgactttggacgtcccatcttctaggaccatgagaaatagatttctg

SEQ ID NO: 308115 - DNA, 201 bp, Homo sapiens
agatagtaatagggatacctacatcaaataactggcaatagttgaaaggttttttaactatataaactagggcaaggctatatctgccttatttgttgttyctaatcttattacagtgcttggcacatacgtgctaaatattcagttcttacgtggttgtttatcaataaagggaaaattgattcattcattttgtcattc

SEQ ID NO: 308116 - DNA, 201 bp, Homo sapiens
tttagagaacacattgcataactaggcactgtcctgagaactctgaatataaaatgaatactgacagtgactctgagaggaggcatggcagcagacaagayggctatttctgtcccattaggtgagaaaaacgaaacacagagacgtgaagtggcttgcccaagctatatgctcattaaacatcactggtgaaatgagctt

SEQ ID NO: 308117 - DNA, 201 bp, Homo sapiens
ggtagtattactgtataatggtttgctactgcacatctttcctccttcacatttagtgatgttacttcattttggtgctttgaaatgggtcatcatgggartatttataccatggaaatcagcaaacactataaatcagccaccctgctggaactggatggtaagtgtttaccaaaccaccactgacttggggcatcctct

SEQ ID NO: 308118 - DNA, 201 bp, Homo sapiens
tgtaataaatgtgattgttgtggtggttctatggggaggggagactcttcccacaggctgggttcctttcctgctgcttgtctaattaacataatttctasccccaaggctcactgctgcattttcttctccaatgtagaagggtgatggagatgcaccttccattctttcagcacgtcagtcatactaaactacactctg

SEQ ID NO: 308119 - DNA, 201 bp, Homo sapiens
ttactttttctactatgtgtcttttattgctgcaaaagtcagttgtacttgagacagtttggcactgagaggggaatgtggcatatcttggcactgtggayagctggttgggtgttgatgtggtgacagggaggagggaagggctcacagaccagacacgtgctgcctttgaatgcaggtggtgatcagtgtgcttagtca

SEQ ID NO: 308120 - DNA, 201 bp, Homo sapiens
aaataatagcattcgtaggcacacagatatctctatgtgtatactgatatacttgagaaagttctcctttaacaacaggtgattttaatattatctgaaawgaaataaaaatactttgtttcatagcactgtggagtgtcaacagaaatcttatttgttctttactcctaaaataggagtataacacaaagtaatatgtta

SEQ ID NO: 308121 - DNA, 201 bp, Homo sapiens
gtatcaagaggctcagaggaacattggatgtgtccctagtaatgacagcacagtcacagctggtctgtggcttaacagtgtctgcaggggcatccattccyatccctcttactccttcttacttctcttcctagactttactgtctctgttaattacagttccatttcagatagagagttaattgatttaagtttatgact

SEQ ID NO: 308122 - DNA, 201 bp, Homo sapiens
gtgtagttaaataaaaagtatgagcagaagtgtttgtttcaggcaagattttttcagggcctcatttccagtggggttgatggatgatttttgtggcttaragcttgagacattatgagttgttcaccgagacccagaatcaggtcagaggactgactccaaatactgtaatgtgcttggatgctggtaccggtatcaaga

SEQ ID NO: 308123 - DNA, 201 bp, Homo sapiens
cagagtgagtctgcctacccatacagaagaccattctcatccatatgtatagtccagaaaggtaggaacaaatttttaaaaatcttaattccatatacttycaaataagattgagttaaaactcatacattgaaggtccaagtatttggtgccattctccagtgttatgatgaatgtgaaatcatttacaggacacccctc

SEQ ID NO: 308124 - DNA, 201 bp, Homo sapiens
tgtacatggaactttttttgtaccagtttttatttctaccttaatcttgcaacgtttatgtcattaatcttctcaaatttagtatgtcctttgggaggctraggtgggcagatcacctgaggtcaggagttcaagaccagcctgggcaacatggtgaaaccccatctctaaaaaaatataaaaatcagccgggcattatgg

SEQ ID NO: 308125 - DNA, 201 bp, Homo sapiens
aaatgttgtgatgacaggcatgagccaccacgcctggcttccctgtacttttttggagtggatgcaaattacagagggagagagtttagtaacaactaccwtgactactcttttgaggtttccagcaaccctcattgttgactgatgattcttcttttttgagacggagtctcactctgtcctccgggctggagtgcagtg

SEQ ID NO: 308126 - DNA, 201 bp, Homo sapiens
agactgtcttagtacacaaaggcctatggtttcaattagttgtacatggaactttttttgtaccagtttttatttctaccttaatcttgcaacgtttatgycattaatcttctcaaatttagtatgtcctttgggaggctgaggtgggcagatcacctgaggtcaggagttcaagaccagcctgggcaacatggtgaaacc

SEQ ID NO: 308127 - DNA, 201 bp, Homo sapiens
tgtcgcattaattcagggatgtattcaacatattaccaagtgctttctatgtgccagacagtgctctgtgcatttggaatgtgtcagtgaccaaaaaaaaaaaaaaaatcctgccactgtggagcttctattctagcaaggggtagacagatacaaaaacatcataaataattgcatatgttagaaggtgagaagtacttt

SEQ ID NO: 308128 - DNA, 201 bp, Homo sapiens
gcctgactaatttttgtatttttagtagggacggggtttcactgtgttggctaggctgctcttgaactcctgacgttaagtgatctgcctgccttggcctmccaaagtgctaggattataagcgtgagccaccacccctagccaagagttatggtttttttttttggttttgtttttgtttttttttttaaagagaagtgt

SEQ ID NO: 308129 - DNA, 201 bp, Homo sapiens
gtctccagtggagcagagaaccttgtccctcaacaatgttccaaggtaccctggatgcagagctcagtacatgtaaggtctggggtagagggaaccttgartgaatatttgcatcaatgaatatataataggagtagtataacaaataatttgtgaatgaattaatttttcttcttggggaattttaattaaagacatgaa

SEQ ID NO: 308130 - DNA, 201 bp, Homo sapiens
agtgatctgcctgccttggcctcccaaagtgctaggattataagcgtgagccaccacccctagccaagagttatggtttttttttttggttttgtttttgtttttttttttaaagagaagtgttgtatgtctactcttctaacacgtatatacaacttaagttaaaaaaaatttttttaagctagtaagaaatttctggga

SEQ ID NO: 308131 - DNA, 201 bp, Homo sapiens
tcttaaatgttaactcttctaagtgatggattattaaacaggtgctgatgaaagcatcttaataaaacacatcacacagttgtgttactccttcacgctgwgctctgcctaatgaagattggctgtgtagagccactactgcttcattttgttgcattttgtatacacagttcagaaaattaagagacaagggaactagta

SEQ ID NO: 308132 - DNA, 201 bp, Homo sapiens
ttagcaatggtgacagcaagagtggcaacaggtgtgcacatgacaatgtggtctccagtggagcagagaaccttgtccctcaacaatgttccaaggtaccytggatgcagagctcagtacatgtaaggtctggggtagagggaaccttgagtgaatatttgcatcaatgaatatataataggagtagtataacaaataatt

SEQ ID NO: 308133 - DNA, 201 bp, Homo sapiens
ctctcttaacttcttctcagaacctttcctgtatactgccacaatctcaaatgcttggcattagccagaggctggagtgcaggaatctgatgaagagtgcmgctttttagccttggcctttactaactgagcactactgagcaagtcacttaacctctctctgctcagtttctctattttgaaaatggctcttggccgggt

SEQ ID NO: 308134 - DNA, 201 bp, Homo sapiens
aataatagtatgtgagtaagtttagatacaaaattttggtcctctggcggggagataaaggaggggaatatggatgttaaaatatatcaagcacgtcttaytggaagttgagaaagaagagagaaattccttacagtgacatgttactcttccatgaaataatgcttctgacattaagctaaatggatgatgtcattttgg

SEQ ID NO: 308135 - DNA, 201 bp, Homo sapiens
ttaacttcttctcagaacctttcctgtatactgccacaatctcaaatgcttggcattagccagaggctggagtgcaggaatctgatgaagagtgcagcttyttagccttggcctttactaactgagcactactgagcaagtcacttaacctctctctgctcagtttctctattttgaaaatggctcttggccgggtgtggt

SEQ ID NO: 308136 - DNA, 201 bp, Homo sapiens
actgacttctagattttctctagtaaacatgtaaaataagtatttttaataataataatagtatgtgagtaagtttagatacaaaattttggtcctctggyggggagataaaggaggggaatatggatgttaaaatatatcaagcacgtcttattggaagttgagaaagaagagagaaattccttacagtgacatgttact

SEQ ID NO: 308137 - DNA, 201 bp, Homo sapiens
tgttgttatgtggaaagatgttttagacctgcagtatgcgtggagaaaagtatgctagtaacaactactaccatttatggggcacttacaggatgcaagaytgtgcactgagctaattatgaacattatgccattctctcaatgtgctaagcaggtaatattaccatcctgtattatggaagatacaagtggggcttagag

SEQ ID NO: 308138 - DNA, 201 bp, Homo sapiens
gatgtctaaattcattcccttactgggaaggaaaggtatatagttaaaagcagaaaagggctaatggcataataatttataatcatggtgttctgattagraatgagtgacattcttccaaatttagtgcatgtaactgccactgaacactgattataaatttggctaatttgaacaaaggctttccttgttggttaagac

SEQ ID NO: 308139 - DNA, 201 bp, Homo sapiens
agtatgcgtggagaaaagtatgctagtaacaactactaccatttatggggcacttacaggatgcaagattgtgcactgagctaattatgaacattatgccrttctctcaatgtgctaagcaggtaatattaccatcctgtattatggaagatacaagtggggcttagagagggtaatttgcccatgggtattagtgcagag

SEQ ID NO: 308140 - DNA, 201 bp, Homo sapiens
tcttgccttatgctgtatttgaaagtagcttctagaatgcagggattttttggattctttgtttcacttgctgagcttcctattatttatttatttatttdtttatttttattgagatggagtcttgctctatcgcccaggctggagtgcagtggcatgatctcagctcgctgcaacctccgcctcccgggttcaagcaat

SEQ ID NO: 308141 - DNA, 201 bp, Homo sapiens
acaggaaaagagtgtgaaagcccaagaacttaaagctctggatgtacagttgttcttttttgtggagtcaagcgtcattgtggcatcctctatgggtgttycaaaattacaattatagttagagaaataatataggtaattatgctgtcgaaccactgtaaaggagagcacgtaaaagaaggcagtgcggccaggcgcagt

SEQ ID NO: 308142 - DNA, 201 bp, Homo sapiens
gttgataaccttgaaatggagtaagaaggtgaagatcctaaaaagtaaaaacaaaacaaaacaaaaaaaaaaacggaagccggggagaaacgtatctcatygtccctcttttgtatccttcagctgactcagtactcaagctattccctgtccacttaagatctgtgtaatgcgagcagcatgttcactgttttaaggtta

SEQ ID NO: 308143 - DNA, 201 bp, Homo sapiens
gaccctaacatgctgagaataggaactgttactttcttcattttagagaagaggattttgaggcccaggaaataaagtaactgactgtaagtccctcttakggagagttacatttttacaaaacttttcattaaacaattaaaaaaatttagtttgagttaaaacgtttatacacacgtgtacacacacacacaggcacag

SEQ ID NO: 308144 - DNA, 201 bp, Homo sapiens
tgcccaaaaggtgggggaccgctggtataatacatttattgaaacttttggaagttgtcatgtagtgtagtggcctcctttggccaaggaaccataactartattaaagattatttctaatgtaggtattactcagacttttttttttttttttttgagatggaattccgctgttgttgcccaggctggagtgcaatggcg

SEQ ID NO: 308145 - DNA, 201 bp, Homo sapiens
ttaaaactcttcaacagtttatggctgggcatcccttaaataaaaacagtctgttaaataagtgatggtataaatctgcttgtatttggaccttttgaacsaaataccagaatgactttttaaaaatagttgactaagttttatttcaataacactgtaatgttccatatcaaatgactggtcaaaaagtgacatattggg

SEQ ID NO: 308146 - DNA, 201 bp, Homo sapiens
aatgcatactccattggccagtgtctctttaaagggtttttaacacactaaaatcctgttaactttgaaatggcagttctgatagagaaaagccactcccrgatcagatgatattatcagcatctaaatgagccaggcagtactgcaaggaattacagatgacattattatctacatgacaaaatcagaaggcctcaggca

SEQ ID NO: 308147 - DNA, 201 bp, Homo sapiens
gagaattggcaagttcctaaacatccatatccctttcttccccattgatattgtttggctctgtatctccacccaaatctcatctggaatataattcccaygtgtcgaaggagggacctggtgggaggtgattggatcacgggggaggtttccctcatgctgttctcgtgatagtgagggagttctcatgagatctgatgg

SEQ ID NO: 308148 - DNA, 201 bp, Homo sapiens
agtctgagatatcaccttgcccacattgcaaaggaggtctctgctttctcagcttaaagtgggaaaaatgctttctgtgggcttaaaatgtgtctcataartcttccaaatccctgtgtagaaagagtcgcctagtcctgcaccctcagatgttaattcctcttctcaggctttatggacagtgtggtaatggagggaaat

SEQ ID NO: 308149 - DNA, 201 bp, Homo sapiens
tgagggagttctcatgagatctgatggtttaacagtggcagcttcccctgtgctctctcttctcctgctgccttgtgaagaagatgcctgcttccccttcmccttccaccatgattgtaagtttcctgaggcctccccagccgtgcggtactgagtcaattaaacctcctctctttataaattacccagtctcaggtgata

SEQ ID NO: 308150 - DNA, 201 bp, Homo sapiens
tgaatgtgtatttcctacaaacaagaacagtcgtgtatcacaatacatccatcagtattgtgaaattaactttataccacactactgtctaatcctcagamctcattcaaatatgccctaattgtcccaatgacagaaggaaccatttagaatcacgtgtctgttgttagtctctttcaggtctggaacagtttctcggaa

SEQ ID NO: 308151 - DNA, 201 bp, Homo sapiens
tacttttatctagagcaaaactacaaaaacatgcatgaaaggtcatatatagcagcttctgcatatgacattgtaatcaatggtatgttgacattttttgwgtcagtacacagtgggaggtgacaagattaagagaatgagctctcttgatgttcatggaggggtaggttgtaggcatggtattagtaacataccaacttc

SEQ ID NO: 308152 - DNA, 201 bp, Homo sapiens
tttataatggtgtttcctaggttttcttctaggattcttatagttcctgatcttacatttaaatctttaatccatcttaattttcatatgtggtgaaaggkaggtgttcactttcattccgctgcatatggctagccagttatcccagtatcattaattgaatagataatcctttccctattgtttatttttgtggacttt

SEQ ID NO: 308153 - DNA, 201 bp, Homo sapiens
ggcttcatgtttgattaaaccagtcctatgcattgtcacctgagaatatcctgacagtggaattagtaaaggagactactgcagggtgttgtggacccccrtggtgatgaagacactctgagattaaaataacatattaggagattcgttaacatagttgtccattcgttacccaggcaatccttgtttcattcataaggt

SEQ ID NO: 308154 - DNA, 201 bp, Homo sapiens
ggtcatatatagcagcttctgcatatgacattgtaatcaatggtatgttgacattttttgagtcagtacacagtgggaggtgacaagattaagagaatgarctctcttgatgttcatggaggggtaggttgtaggcatggtattagtaacataccaacttcaggaatttttatctggcatcccaagtaccccctttcatca

SEQ ID NO: 308155 - DNA, 201 bp, Homo sapiens
gcattttctacgagagagaaggattgaaaaggagagatgagtgtcttaacactcaagtgtacaaatgagggccaaactgaaaaatctttcacaattagccraaggaaaaacctgcctttattgcctccatgatttgtaatgcctctcatctagttttctgttgcctttaattttttttccctttttcatgtttacagtctt

SEQ ID NO: 308156 - DNA, 201 bp, Homo sapiens
caagtgagatttcctactgttcctttcactgacttgccctttcactagatatgctatcttttctcagaaacactaaaaaggatttttgtgtttgcaaagartaggaatgaaatggggtttttctaccccttctgataactgggtacttttaatggcaaggctattcttggtttcattccttggccaattttgagataattt

SEQ ID NO: 308157 - DNA, 201 bp, Homo sapiens
aggaactatttttggatgtctctggtgttttccttaaccatgacttgctccttaaatagtgcacattgctgtggggagcctaaatcagtccttagtttcaraacaagttatgtaactcagtaaatcactctgtggctaatcaccctgtgtcttcatttttttaaaaatataaactatagataataaagtattatacatcta

SEQ ID NO: 308158 - DNA, 201 bp, Homo sapiens
ctccctcccattacttgacagtattgggattcatgcaggcatttgccatatatgtattttaggacatgtttcctggtcgatgatgatgcttttaatgtgakttgttttgcccctgtaaaattccattttccaaatgtcaaattatgctatatgatactctatgttatccatcaccttgatctggctagaaaaacacctgga

SEQ ID NO: 308159 - DNA, 201 bp, Homo sapiens
tcacttcaagggacttgattcataggtaaaatacaattcacaagtaattctggaaagcattcttctcctggatatctgccctgcatgttcacttagaaagrtcgtttagtcattcaacacacatttcatgaatgtttgtgctaaatgcttggcatgcaggcttcctgccttcaaaagatgtgcgctctggttggggagatg

SEQ ID NO: 308160 - DNA, 201 bp, Homo sapiens
ttaattccccttattcttgtcaatcgggaccaagatttgggaggttggcatttctttattctccatgcagttaggagtttcttgtaaaacatttgaattaygcagagcctggaatcattttaagagtggtttgatgtgggtattttagtttactggcaggaaacagactctggaaacaagtcattgatgtttaggttttat

SEQ ID NO: 308161 - DNA, 201 bp, Homo sapiens
tgggggcagaattaagatatgacacaagcagaggtgaaaatggtaaacatttgtgtgcaagttgtatcatcatgtaataatacaggggtctccaactccayggattggtaccggtccctggcctgttaggaactgggctgcacagctggaggtgagcagctatgagtgagctccgtctcctgtcatatcagtggtggcatt

SEQ ID NO: 308162 - DNA, 201 bp, Homo sapiens
tgcttagtgctacctggggttctgttgatgcctaaagatatttttcactcttattacttaactacttataactttggcccattaaagcaagtttttttttytctttctcttcttaaagtgaaccctttgtaaccaaggatgtcactgtgaaccactgttagtaatccctttcaggagccttggctgtcagagccctcatgc

SEQ ID NO: 308163 - DNA, 201 bp, Homo sapiens
tggaggttgcagtgagccaagatcacgccatagcactccagcctgggtgacagagcaagactccgtctcaaaaaaaaaaaaaaaaaaaagttaagcttaarcccttagggtggacttactttaatgagcagaaaatgtgtgagttgttcaagagtgttcttctaaagcacttgcaaaaatagctttgggtatgctcattca

SEQ ID NO: 308164 - DNA, 201 bp, Homo sapiens
tgctctgaaggggcacagattgtagagtcactggatccctaactgttcaccagctatgttcttgaagcagtttcttaaccttcctaaaattccctttcccwgtctttaaaatggggataatagtaacacccgctatgtagaattgtcatgaagataaaatttcctaatcttcacgaagcacatgtcctaggggactccttc

SEQ ID NO: 308165 - DNA, 201 bp, Homo sapiens
ctaaaaaataaaaaaataggagaacgtggcagagtgacagggaaatagttttgaagggtctcctactgggcaaatgtgggacaatctgagcatcaaaatayataatgttagtaatggaatctgatatctgataatggattgaataaatagaaacaaaaataaacaagtccatatggatgtaaatgaatgaatgaataagtg

SEQ ID NO: 308166 - DNA, 201 bp, Homo sapiens
cttccccctccaccatgattgtaagtttcctgaggcctccccagctgtactgaactgtgagtcaattaaacctctttcctttataaattaccagtcttggrtatgtctttattagcagcatgaagacagattaatacacaccatctctacaaaaaaatacaaaaattagctgggcatgatggcacaagcctgtagccccag

SEQ ID NO: 308167 - DNA, 201 bp, Homo sapiens
agtcaattaaacctctttcctttataaattaccagtcttgggtatgtctttattagcagcatgaagacagattaatacacaccatctctacaaaaaaatamaaaaattagctgggcatgatggcacaagcctgtagccccagctattccccaggcaggaggatcgtttgagcccaggaggtcgaggctgcagtgagccatg

SEQ ID NO: 308168 - DNA, 201 bp, Homo sapiens
ttctgggggtcatagttcttcaagctgatctgcaactccaccgtctccaggaacttgcggcgcttgcgctggttccggtgcaggacttcccgcaccgcctygtacagggtgttgcgagagactgctgctcatggcttctcacgccgcgctaaccggaaaagagcgggtctggtaatatttttatctttttttgcttcgggc

SEQ ID NO: 308169 - DNA, 201 bp, Homo sapiens
aaaaaaaaaaaaatccagaatgactacagtgttaagctacggtggctcacacccaacatggtgaaaccccgtctctactaaaaatacaaaaattagctggrcgtgctagtgcacgcctgtaatcccagctactggggagcctgaggcaggagaatggcttgaacccaggaggtggaggttgcagtgagccaagatcacgcc

SEQ ID NO: 308170 - DNA, 201 bp, Homo sapiens
aattaaacctctttcctttataaattaccagtcttgggtatgtctttattagcagcatgaagacagattaatacacaccatctctacaaaaaaatacaaawattagctgggcatgatggcacaagcctgtagccccagctattccccaggcaggaggatcgtttgagcccaggaggtcgaggctgcagtgagccatggtca

SEQ ID NO: 308171 - DNA, 201 bp, Homo sapiens
gagtctgaggcaggagaattgcttgaacccgggagacggaggttacattgagccgagatggcgccattgcactccagcttgggcaacaagagcgaaactcygtctcaaaaaaaaaaaaaaatccagaatgactacagtgttaagctacggtggctcacacccaacatggtgaaaccccgtctctactaaaaatacaaaaat

SEQ ID NO: 308172 - DNA, 201 bp, Homo sapiens
ctttcctttataaattaccagtcttgggtatgtctttattagcagcatgaagacagattaatacacaccatctctacaaaaaaatacaaaaattagctggrcatgatggcacaagcctgtagccccagctattccccaggcaggaggatcgtttgagcccaggaggtcgaggctgcagtgagccatggtcacaccaccgca

SEQ ID NO: 308173 - DNA, 201 bp, Homo sapiens
tgatctcaaagtgagaatatatctaaagtctgtatttgtaatagacaaggtttgaaggaaagctgagaccttgtaaaattcacatatggacttcctgagcrtgcaataaagacttaacttctacttgatggagcctgtcaaacagccatattacaggcatgatttggttgcatgggacttctattcttaatgttaaaataa

SEQ ID NO: 308174 - DNA, 201 bp, Homo sapiens
ccaggcaggaggatcgtttgagcccaggaggtcgaggctgcagtgagccatggtcacaccaccgcactctagcctgagcaacagagtgagaccctgtctcaaaaaaaaaaaaaaaaaaaaatccttcctgctgatttcctgtatcttgatgagaatgagttgcacctttagtggctgtagcctaagaaggaaactgaagaa

SEQ ID NO: 308175 - DNA, 201 bp, Homo sapiens
agaccataagtcagttataaagagtccttaggagtgttgggccgtggatgggaggggaagggaagtgactggtagagtttcaaaaggtagcttgtgtacascccttcctcatgaattaaaatttatgaaagctgtttgggaaattcgatacccagaggtgcagacaccacatttggtaacacaacatgctgtgtgcagaac

SEQ ID NO: 308176 - DNA, 201 bp, Homo sapiens
ctacacagaaaatctggaggaacctttaaaaatgggaatatgaatgtatcactcctgtgtcagtaactattctgggaccatttttgtggcttccaataggyctcaggatacatcctaggatccagcaatgacttttcttaatttctcgccctttctacttaccgtgccccaggtcaagcccacaattttccctacacctac

SEQ ID NO: 308177 - DNA, 201 bp, Homo sapiens
caggcaggaggatcgtttgagcccaggaggtcgaggctgcagtgagccatggtcacaccaccgcactctagcctgagcaacagagtgagaccctgtctcaaaaaaaaaaaaaaaaaaaaatccttcctgctgatttcctgtatcttgatgagaatgagttgcacctttagtggctgtagcctaagaaggaaactgaagaac

SEQ ID NO: 308178 - DNA, 201 bp, Homo sapiens
tttgctatctgtatgtcgtctttggtgaactattcgtgtcttctgccgattctcttttctaattgtatttttttccttcttactattaaattttgagaggttttttttttaatatattctgaatactagtcctttgttgaatttgtggtgtgcaagtatttttcccagtctgtaacttgtgtgtttatcctgtgttatttt

SEQ ID NO: 308179 - DNA, 201 bp, Homo sapiens
ggacttttaagagtagctccaacagaagttttgccttctgagtagtaaggtggtcacaacttgtcctgtttcccctatgggagtgtatatgctggtggtgrtggtgggggatctcacctttgtttccacatcagtatgctgctgccagctcccctccaggctgtgctgtcgggacacatctgtgtgcctgtatgtggctca

SEQ ID NO: 308180 - DNA, 201 bp, Homo sapiens
aggcaggaggatcgtttgagcccaggaggtcgaggctgcagtgagccatggtcacaccaccgcactctagcctgagcaacagagtgagaccctgtctcaaaaaaaaaaaaaaaaaaaaatccttcctgctgatttcctgtatcttgatgagaatgagttgcacctttagtggctgtagcctaagaaggaaactgaagaact

SEQ ID NO: 308181 - DNA, 201 bp, Homo sapiens
gtgtccctggacaacttgctcaatcccttgttatttatttgtctgtctgtctgtttagagacagggcttcactctgtcacccaggctggagtgcggcggcrccatcttggctcactgtagccttgagttcttgggctcaagcgatcctcccacctcagcctcccaagtcactgggactataggcacattccaccatgcctg

SEQ ID NO: 308182 - DNA, 201 bp, Homo sapiens
gaaagagagtaacattttggataacttttgaattgaatggaaagaagtattggtggggtccatgtcttggcttccttactgacttgtcttttttttttttwtttttttttttttttttttttttgagacagtcttgctctgttgcccaggctggagtacagtggcgacctatctcagctcactgcaacctctgcctcccag

SEQ ID NO: 308183 - DNA, 201 bp, Homo sapiens
ctggacaacttgctcaatcccttgttatttatttgtctgtctgtctgtttagagacagggcttcactctgtcacccaggctggagtgcggcggcaccatcwtggctcactgtagccttgagttcttgggctcaagcgatcctcccacctcagcctcccaagtcactgggactataggcacattccaccatgcctggctgat

SEQ ID NO: 308184 - DNA, 201 bp, Homo sapiens
aggttggccaggctggtctcgaattcctgacgtcaggtgatccacctgcctcgctgggtggatgaagtgctgggattacaggcgtgagccaccgtgcccasgcactgacttgtttttaatgtggttgcattacttacttttctgcaccttctttaactttaaatgaaaaataacctttcctagcaaaatactgagtgcgta

SEQ ID NO: 308185 - DNA, 201 bp, Homo sapiens
aaatcagcccagtaattttaccctgggttttcatcctagtaaagaaaattgttaaatattaccaaagtataaagtgatctttgattctaattggaaagcctttttttttttgatgctcaaaagtaatgttgtaaatgggtagaaaattgtccatttggttcctgctgtctgtcttttcctgcactttgatgaaggaaaggc

SEQ ID NO: 308186 - DNA, 201 bp, Homo sapiens
acatgggtctgggagatcaagtctgcaatgtgttgtaattacaccactgtattctagctgggctgggagacagagtgagaccctgtaggtaggtaggtagdgtaggtaggtaggtaggtaggtaggtaggtagaattgtgttcatattgtagaaatccatatatctgagttagatttttaaaacgctgtctgactactgtt

SEQ ID NO: 308187 - DNA, 201 bp, Homo sapiens
aaagcgggaacgtatttattgagtaatcaataagctatatattttgtcatgtatgaattatgtatgcattatttataatacctcacacatgaatcatactyatagtaagcattttttgaatgcttagtatgtgtcaggcactgttctagaagctgggacaccaaagagagctgtttagataagatctgtgtttttacggta

SEQ ID NO: 308188 - DNA, 201 bp, Homo sapiens
agcactttgggaggccaaggcaggtggatcacttgaggtcaggagttcgagaccagcctggccaacacggtgaaaccctgtctctattaaaaatgcaaaamttagccaggcatggtggcgcatgcctgtagtcccagctactcgggaggctgaggtggggaatcgcttgaacctgggaggcggagtttgcagtgagccggg

SEQ ID NO: 308189 - DNA, 201 bp, Homo sapiens
gctactcgggaggctgaggtggggaatcgcttgaacctgggaggcggagtttgcagtgagccgggatcgtactactgtactccagcctgggcaacagagcaaaaaaaaaaaaaaaaaaaaaaatcagtttttcagaagtggaaatctagttgtgaaatatatattgggaggtcattggctgcatttggccacagttccaca

SEQ ID NO: 308190 - DNA, 201 bp, Homo sapiens
ttcctaaattacagttgtactcttatactgatgttatatctatcataaaacattccagaaatacaaaatttaaggataatttttttttttttatcttgagrcagagtcttgccctgttgcccaggccggagtgatgttggctcactgcaacctccacctcttgagttcaggcaattctcatgcctcagcctctggagcagt

SEQ ID NO: 308191 - DNA, 201 bp, Homo sapiens
gtttcaactctttttgatctggtactcttactgcagggagaaagttttgaacatatacccctattatacatactttcctaaattacagttgtactcttatrctgatgttatatctatcataaaacattccagaaatacaaaatttaaggataatttttttttttttatcttgagacagagtcttgccctgttgcccaggcc

SEQ ID NO: 308192 - DNA, 201 bp, Homo sapiens
cccgtagtcctagctactcggagagactgaggtggagtgtatcactcgagcctgggaagtcgaggctgtagtaagtggcgatcgtggcacctgcactccarcctaggcaacagagcgatactctgtctcaaaataaaatggaagaaaaaagataaaacaaataaataacaagctataagttgtccctgcatgtaaaacaaa

SEQ ID NO: 308193 - DNA, 201 bp, Homo sapiens
ttgaggtgagcatacattttgatttttcttttggcatcttttggtttggaacatttacagccctttttaaaaatatagtcatttctgtgtgggttttctcygagccagtatttgccacactccagtgatattgagagaaacaaagggaacacgtccaagcccagaggggctctgtcttaacatctgacaggagcttctaag

SEQ ID NO: 308194 - DNA, 201 bp, Homo sapiens
aacagagcgatactctgtctcaaaataaaatggaagaaaaaagataaaacaaataaataacaagctataagttgtccctgcatgtaaaacaaaaattgttsctgcatgtgaatcacagtctttgcgctttctggaaagtaatagaaatttctgtggatgagccacttggcaaaggttatttctaaaactctgtgttagaga

SEQ ID NO: 308195 - DNA, 201 bp, Homo sapiens
ttatatattactcttttaggttatttgtcaaagaacacatttgccttggaaggatgtttgttacagcatcttttcttctttctttgacatgttgcctctcytgagtcatttcttcacaaaaagtctcttgtggttgcaactgttagatggagctttgataaaaattggtctcagaatcatctggaatatttatattgtcaa

SEQ ID NO: 308196 - DNA, 201 bp, Homo sapiens
tagtcaaatgccttctggcaagtgggggattctcccctaatagagaaccattcttctaatgtaactgccagctatttgtcactgggtgaagggtcagaagyctgtttggcagctgcagaatctttgtatcaaagtgctatggagtggagatttacactacaaccaccagatatcatgggggtagaaattatgccaaacaac

SEQ ID NO: 308197 - DNA, 201 bp, Homo sapiens
tacacagcgagacttcatctcaatatatatataaaagtaggccaggcgcagtagcttatgcctgtaatcccagcattttgggaggctgaggcaggtgggtcacgagatcaggagttcaagaccagcctggccaagatggtaaaaccccatctctactaaaaatacagaaattagcagggtatggtggtggatgcctgtaat

SEQ ID NO: 308198 - DNA, 201 bp, Homo sapiens
tgtcggtctgcggaaatgcaggtgagcaagggaatgcagaacagatgcagagtatacacataggcgtctgatgcaggttcaagtcgagtagcttccgataygactgttttctttagttttcacaaccattgaaaagagcaggccaggtatggtggctcacacctgtaatctcagcactttggaaggctgaagtgggtggat

SEQ ID NO: 308199 - DNA, 201 bp, Homo sapiens
agcatcttacgcttggtttatttcttttcatataactacattgttttccatataactacattgttttcattcttaaaaactagaatgaaagtaagaaaatwtaatttatcatggagcaatttatcagcattgggggcattaattatttgtcttgcatgcagtatgtatgagggctacagaagaatcattgttgaagattgt

SEQ ID NO: 308200 - DNA, 201 bp, Homo sapiens
tatggacaaaagtgctctcctggctgggcgcggtggctcatgcctgtaatcccagcactttgggaggccgaggtgggcggatcatgaggtcaggagatctrgaccatcctgctcaacatggtgaaaccccctctctgctaaaattacaataattagctggatgtggtggcacgtgcctgtaatcccagctactcaggaggc

SEQ ID NO: 308201 - DNA, 201 bp, Homo sapiens
gtgggcggatcatgaggtcaggagatctggaccatcctgctcaacatggtgaaaccccctctctgctaaaattacaataattagctggatgtggtggcacrtgcctgtaatcccagctactcaggaggcggaggcaggagaatcacctggactcaggaggaggaggttgcagtgagccgagatcacgccactgcactccag

SEQ ID NO: 308202 - DNA, 201 bp, Homo sapiens
ggaggcaggagaatcacctggactcaggaggaggaggttgcagtgagccgagatcacgccactgcactccagcttggcgacaaagtgagagattctgactsaaaaaaaaaaaaaaaaaaaaaaatcaactgctctcccagtttcaagctccctcacagcagacttgatcctccccctcaaggttcagtagtggtgtgaaag

SEQ ID NO: 308203 - DNA, 201 bp, Homo sapiens
gaactcctgggctcaagtgatcctcctgcctcagcctcctgagtagctagaactactggtctatgctatcatgcccagctagtgtttttgttttgttttgktttggtttggttttttgagataaggtctccctatgtttctcaggctggtctcaaactccttggctccaggagatctcaaaaacatcctggcacccaagta

SEQ ID NO: 308204 - DNA, 201 bp, Homo sapiens
gctccgtcaagcaggtaagttcaatctgaccatactgtcagatttaaagtagcttatattaaatggaatgaatgcaaaacagggcagtaaactcggccctrctctgttttggtttgtttgtttgtttttaattgaagcagagtctcactgtgtcacccaggttggagtgcagtgatgcaatcacagctcactgcagccttg

SEQ ID NO: 308205 - DNA, 201 bp, Homo sapiens
taaaataggtattatgtgatggtgaatcacgtcttcctctatactgtgaagaggttttggagtacctttgtattattttataatttcaaacttagagaaargttgaaagaaaagtacaaaaaccgtctgtatacttttgatctagtttcactaatttttaaatctttgtgtgtgtgtgtgtgtgtgtgtctgtctgtccgt

SEQ ID NO: 308206 - DNA, 201 bp, Homo sapiens
agcttgattagaaaaatacgtttcccaggtttgtcaaagtaacctgcacaatgtgcacatgtaccctaaaacttaaagtataattaaaaaaaaaaagaaaraaaaagaaaaatacatttccacctcctcagttctgttgtctgctgcctcctatgtgatttttaattctgctgttgcctttttggttaccctctttatctc

SEQ ID NO: 308207 - DNA, 201 bp, Homo sapiens
tgattttagggggtgtattagtcagggttctccagagaaagagagccataggatcgatgtctctctctctctctctctctctctctctctctcacacacasacacacagacacacgcacacacgcacacacatgcacgcacagcgtaactccggcctataattcatgaattttagctaagttactctagctaaattgatct

SEQ ID NO: 308208 - DNA, 201 bp, Homo sapiens
gttttgctttacttcatttttctctttcactcatattccattcttttttccccaaagatgctgattagtagtatttttaattcacttatttttgtgtgatrtatctcattatgctgttatgcattttaaatcaatgccaattttcaaagtctgttcacatgccttacgtacctcttcattgcttttgaatgctgtgtccta

SEQ ID NO: 308209 - DNA, 201 bp, Homo sapiens
caccatgcctggctaattttgtattttttgtaggaacagggtttctccatgttggtcaggctggtctcgaactcccgacctcaggtgacctgcccgccacrgcctcccaaagtgctgggattacaggcgtgagccactgcatccaactgttctctgcatctttttaaatgtcaaaatgtgtgccagcattaaagttgtata

SEQ ID NO: 308210 - DNA, 201 bp, Homo sapiens
ctctctctctcacacacacacacacagacacacgcacacacgcacacacatgcacgcacagcgtaactccggcctataattcatgaattttagctaagttrctctagctaaattgatcttgcagtcttgagttcaaaggctggaaacctgagctcaatctgtgttgcagtgtagaggcagaattccctcctcttaaaaaga

SEQ ID NO: 308211 - DNA, 201 bp, Homo sapiens
cctttgtattattttataatttcaaacttagagaaaagttgaaagaaaagtacaaaaaccgtctgtatacttttgatctagtttcactaatttttaaatctttgtgtgtgtgtgtgtgtgtgtgtctgtctgtccgtctgtgtgtatttattagtgaagttttagacgtattatgcccctttacttttaaataattttcta

SEQ ID NO: 308212 - DNA, 201 bp, Homo sapiens
gaccccatggtatacatattatctttttatgaacagaagtatgttctggacactgccctgttggcagatgacttgagttctgtctggaccccttcggttcwttttttttttttttttttttgagatggagtttcgctcttgttatgcccaggctggagtgcagtggcactatctcagctcaccacaacctccgcctcccgg

SEQ ID NO: 308213 - DNA, 201 bp, Homo sapiens
ttgtattattttataatttcaaacttagagaaaagttgaaagaaaagtacaaaaaccgtctgtatacttttgatctagtttcactaatttttaaatctttgtgtgtgtgtgtgtgtgtgtgtctgtctgtccgtctgtgtgtatttattagtgaagttttagacgtattatgcccctttacttttaaataattttctattt

SEQ ID NO: 308214 - DNA, 201 bp, Homo sapiens
cttcggttctttttttttttttttttttttgagatggagtttcgctcttgttatgcccaggctggagtgcagtggcactatctcagctcaccacaacctcygcctcccgggttcaggtgattcttctgcctcagcctcctgagtagctgggaattacaggcatgtgctactatgcccagctaattttttttttttgtattt

SEQ ID NO: 308215 - DNA, 201 bp, Homo sapiens
tgtatttattagtgaagttttagacgtattatgcccctttacttttaaataattttctatttctgttctaggaaaatgggttgttttttttgtttgtttgtttgttgtttttgagaggggctcttcctctgtcgcccaggctggagtgcagtggtgcaatctaggctcactgcaagctccacctcccgggttcacgccatt

SEQ ID NO: 308216 - DNA, 201 bp, Homo sapiens
tgttctctactgttaacctaatttgaatgcctgtgaaaatataaaatatcagaagttattatttggttggtgcaatagtaatcgcggtttttgccattacttttttttttttttcttcctttttgtggagaacggggtctcactatgttgctcaggcaggtcttgaactcctgggctcaagctgtgctcctgcctctgcct

SEQ ID NO: 308217 - DNA, 201 bp, Homo sapiens
gttctctactgttaacctaatttgaatgcctgtgaaaatataaaatatcagaagttattatttggttggtgcaatagtaatcgcggtttttgccattacttttttttttttttcttcctttttgtggagaacggggtctcactatgttgctcaggcaggtcttgaactcctgggctcaagctgtgctcctgcctctgcctc

SEQ ID NO: 308218 - DNA, 201 bp, Homo sapiens
cccctttacttttaaataattttctatttctgttctaggaaaatgggttgttttttttgtttgtttgtttgttgtttttgagaggggctcttcctctgtcrcccaggctggagtgcagtggtgcaatctaggctcactgcaagctccacctcccgggttcacgccattttcctgcctcagcctcccgagtagctgggactg

SEQ ID NO: 308219 - DNA, 201 bp, Homo sapiens
caagaagtttaacgagagtctctggagccatctctctgagtttgaatcttgctttcactacttgcttgatggtgtgatctaaataccaaatagcataacctttctggctgcaatttcttcattcagaaaatgagggtagtattgtcaggagcaaataaggtaatctgtggacgttggtccattgtcagtggcctataaatg

SEQ ID NO: 308220 - DNA, 201 bp, Homo sapiens
acgccattttcctgcctcagcctcccgagtagctgggactggcccctgccactatgcgcggctaatttttttgtatttttagtagagacggggtttcaccktgttagccaggatggtctcgatctcctgaccttgcgatccgcccgccttggcctctcaaagtgctgggattacacgcttgagccacagtacccagccaaa

SEQ ID NO: 308221 - DNA, 201 bp, Homo sapiens
agtactgaggataggaaatagtatggaaaagctccttatatttagtaaaagccatacatgttgtctaattattgtaactttaagctcaaaaatcacatggmcaagaaaggtggcaaggatagcttcctttactcctttaaggttttgaaagggctgtatttgaattagataccacaggtggactggggagcggtgatggga

SEQ ID NO: 308222 - DNA, 201 bp, Homo sapiens
cctttgttgtcattctactggaaagaagcactttatttcctcctctagttatttattcgtttgactttatcattggggctcatgtattcttgccttattcrgtgggttataatatattactattgttattttgctgttcaaattgattgtcccagatttggcgagtgtgctctcttcaagctgatcattgtgttatatatc

SEQ ID NO: 308223 - DNA, 201 bp, Homo sapiens
tgtcatcagtacagaattgttggagtctctctttgccagcctcagtactgagtctgtgtaggaagtccccggcaagtagctaagtatgggttgttgctcgsagagcattttctcaaaatctgtgtctggaacattagttgaggaggctgttcacaggctttttatggcaggagggttctgtgaccatggaagattgggaaa

SEQ ID NO: 308224 - DNA, 201 bp, Homo sapiens
tattattattatacttcaagttttagggtacatgtgcacaacgagcaggtttgttacatacgtatacatgtgccatgctggtgtgctgcacccattaactygtcatttagcattaggtatatctcctaatgccaacccttcccctccccccaccccacaacagcccccggtgtgtgatgttccccttcctgtctccatgtg

SEQ ID NO: 308225 - DNA, 201 bp, Homo sapiens
cttggagatgatgatttgtcataattctatcttggtggcagagttagtatgaggtactaagggcttttatttaagctgtgtgccatctcacttatttgtgyttttctacaaaagtcctgcatacttccatgaatgtcaaaagtgatgtcttagaattacatatctaaataccttgcacatcatgctagttggcctcttaat

SEQ ID NO: 308226 - DNA, 201 bp, Homo sapiens
tgctcaataactgtttcccaaatggctactcaggggcctttcagaattcacgagagctgtcagttgttatagtaaccggccccctgctgtcgaattggccytgagatgccagtggaagctcttggaacaagctaacacatagtcattagacaaaagcggaaagagattcactgctaaaggttgccagttaaacatgctcca

SEQ ID NO: 308227 - DNA, 201 bp, Homo sapiens
cttagcccagatacctatcctcttggcttccttttcattgtcttagatggtgcctgatgagcctcttcagaaccattggacacagttggaaaatcacaggytctgatatactttgtagatctgtattcctccataatagtgtttcccaacctcaacactattgacattttggttcccctgacagtcctgcccaactctttc

SEQ ID NO: 308228 - DNA, 201 bp, Homo sapiens
tcctaataaataaaaatatgacgttaaacacaagaactttccacactagaatagagattgtgtttttgtaaatggcttttctgaaaggttcttctaaatamcaatatttatagtatatatgaaaatatttcatttttaaatttttagtttaaatgttccatataaaataccttttcaaaagcactgggaaatccttgtata

SEQ ID NO: 308229 - DNA, 201 bp, Homo sapiens
ccagcgtcctcacgacattctggcaaatgctgtaactgaaatttgttaaatgataatgaagagacagattcattcttttagggcttgcagtaatttacagrtttgtattagaagatattctgacaatgatcctattctacggatcacagttttccatttctgtatggatcttaacatttggattcctaaataactacacaa

SEQ ID NO: 308230 - DNA, 201 bp, Homo sapiens
cttagatcatatatctgggataaacttaggtttaataggagccaggtgtatatgacatgaagatgaaaggtaggagagatgtctaacatgctatttgactkgttgacatttgagaatataagccaacattagtcagaacatctgacattttcaaaagaagctaataacttgtttgaaaaagccaaaaatatatgtttatgt

SEQ ID NO: 308231 - DNA, 201 bp, Homo sapiens
caattggctatggccatggaatgcacaacatacatggcagacatgggcctatacctgtgatcctgtttccggaaaatggggcacttagcagactccctagygtgtgtgagtgtcttctctcacacacactaagaatgtgtgtattctgacttgtgaagggccagatgcatctaggatagcctcaaatctcaaggtcttgca

SEQ ID NO: 308232 - DNA, 201 bp, Homo sapiens
acttacccaaatttatgcatttagaatagatgttaatgtaacaaaagtgatgaaaaacttaaagattattatggtaatttatatattttttaattttgtakactagcttaataaggtgaaaggaaaaacaacttgttcttcatggagtttaagttcacatggatttatagtgcaagtagaaatcaataatgtaggacaacg

SEQ ID NO: 308233 - DNA, 201 bp, Homo sapiens
gaaggctccttactggtgtgaaggtgatgagatttctcttctgttatctgtctgaattacttctgggcttgacagagatgggaactctcatttgatagcarttcacagactttggatatcttatttcccttaagttaaacttaccagtcttcatttgccaaataatttccccttctgggaagggtgtgtggcaaatctgac

SEQ ID NO: 308234 - DNA, 201 bp, Homo sapiens
gatattctggaaaatgcttagatcaaacaagaccacattcattcatggagaaagagtggaatgcaggttcgtagtaaagaaaaataatttccagggctcckgggaaaaagctttggtcacttaaatgcccttgggctttctgtaagtaaacatctgcagtcctctctattggttttctagcatatttcacacaaaagcagg

SEQ ID NO: 308235 - DNA, 201 bp, Homo sapiens
accctgggtaggcaaactagggcacacaggccaaattcagctgtctgatgaactaatattggaacatagccacattcatttgtttacatattatccatggstgctttagcaccatagacagagccagagcctaaaatatttcctgtcaggcacttacagaaaatttgctgtgagtagaaatctgtgagccatcaatgccag

SEQ ID NO: 308236 - DNA, 201 bp, Homo sapiens
aaaggtaattcaagttcagatctgtgcaaaacccacgctggatgcaaaaacacatttgctggccaaattcagatcacaggcacctggtaggttcatcttcytctttatagggaactgttaatgttctagaccctgggtaggcaaactagggcacacaggccaaattcagctgtctgatgaactaatattggaacatagcca

SEQ ID NO: 308237 - DNA, 201 bp, Homo sapiens
tacgtctcatctccatctgttcttttctgtagcttttgcctgtgtgttcttccactttaataaaaatccccagcagtatcctggaaatgtctattgagtckttcagtagattgccttccccctgagctatctgcatgctgtttccttacttactccgtcatgattttttttcttggaccatgtgtggggggcacgtgggag

SEQ ID NO: 308238 - DNA, 201 bp, Homo sapiens
catgtatctagatggctgtgtaagcgtcacccaaaaaggatgctgtttgtgtcagaagtgtaagattcttgagctggtcaaggacattgaacatgaagactgtgtaacgattcattgaggttggtacctctctttcctggggctccattggatcaaacatgttaaagggatgcatctccattctatagtgcgttcagaggc

SEQ ID NO: 308239 - DNA, 201 bp, Homo sapiens
atgtatctagatggctgtgtaagcgtcacccaaaaaggatgctgtttgtgtcagaagtgtaagattcttgagctggtcaaggacattgaacatgaagactgtgtaacgattcattgaggttggtacctctctttcctggggctccattggatcaaacatgttaaagggatgcatctccattctatagtgcgttcagaggcc

SEQ ID NO: 308240 - DNA, 201 bp, Homo sapiens
ttatcccaatgtgggcatcggtgttgaacacaacagaccataaaattccatttcatttctgttgcataaacataggatcacaaatagtgtgattatttctrgcagcctcaggcgtcttagccagggggaacatgtaggagactatgaatacttaaatatattataagcttccccacatgagctgaccaagtacctttgaca

SEQ ID NO: 308241 - DNA, 201 bp, Homo sapiens
tggtgacctaaattaatctttttattctttttaactatcccaaaagagtctttttctttttttgatgaagaataaattttctatcgtgttatggttttaattttttttttttcttttcatggttctgatggcagtgtgaaacaagggcctttaactctggagagagagagagaagggataaattagtaattttacccatct

SEQ ID NO: 308242 - DNA, 201 bp, Homo sapiens
gaggcaggagaatttcatgaacctgggaggcggaggttgcagtgagccaagactgtgccactgccttccagcctgggtgacagaatgagactctatctttaaaaaaaaaaaaaatcatcattggtcaaagttgcagcacctgccaacctatacgccagtgttcaccagaggggattaggattcttataactggcttgtccc

SEQ ID NO: 308243 - DNA, 201 bp, Homo sapiens
catcttaaaagtgaaattatgggccaagctggcttaagttgacaacattagcaacccactgtcagaaacacaaagacacccccagccagccattactattatcacgcgcttaagcaaagggcaaactcagagtttctttggaaccgattgcctttgttccacttagtatcataaaggagatattggctgtaaaacctaatg

SEQ ID NO: 308244 - DNA, 201 bp, Homo sapiens
ttttaaaatggaatcttcctgtaggtggatggtttttaaggagggatggcatcacactcttccccagaaatcaatcatgccttcttaaactatttccatcmtaaactgcagatgtgatttagtgtgtattttcttcttgttattttaatgtttagcttatttcccttgtcagttctggagaaggccaatattcgtaatctg

SEQ ID NO: 308245 - DNA, 201 bp, Homo sapiens
aacacgtatatggttcttattacaaggcactcatcaaagcatttaatatatatatcaagtgactttgaggtaagtagtcatagtacttaagtgttaaatctttttttttttttttttttttttgaggcagagtctcactctgttgcccaggctggagtgcagtggcgcgatcttggctcaccacagcctccgcctcccagg

SEQ ID NO: 308246 - DNA, 201 bp, Homo sapiens
cacactcttccccagaaatcaatcatgccttcttaaactatttccatcctaaactgcagatgtgatttagtgtgtattttcttcttgttattttaatgttkagcttatttcccttgtcagttctggagaaggccaatattcgtaatctggatttaattaaaaacaccaacttataatacagagacatacctgcaaacaaga

SEQ ID NO: 308247 - DNA, 201 bp, Homo sapiens
ttattttattttgtgtttccagctattggaacattcaacctcaagactgtgatctctctgtggcatgcttggactcatagcacgcggaaaggaagcctgtcttgtgcattgttctaggacaaagtccattaagtgaaggtcttaataaaatattgaaggtcttaatgaaatactctcaaccctcaccagctccccaccagt

SEQ ID NO: 308248 - DNA, 201 bp, Homo sapiens
tgtatcttagtctgtttgattaaccaagcgcagcactttgctgtgcaaggcgatggtcagtggaagtatttatgggttttgggcgggtttcttgttctttkttttttttttgtttttttttttttttagggtcaggttttttcaattttcctttcaggtcctaactcagtaactccatagtctttgagcaaagatgcctgg

SEQ ID NO: 308249 - DNA, 201 bp, Homo sapiens
ctttcagataagattagtttacttgtctagagaggcatttaagaatagaaggtttcctgaagactttctggaggagaggctgatggaattgcctctgggtkcgtaagaaattagcttaaagggaacatatgctagagccacaatatgggtggatttggtattattcagtctgggcagttgaggttctacaaatcacagatt

SEQ ID NO: 308250 - DNA, 201 bp, Homo sapiens
cacattttctaaatccgttctatcattgatggacatttgggttggttccaagtctttgctattgtgaacagtgcctcagtaaacatatgtgtgcatgtgtstttattgtagaatgatttataatcctttgagtatatgcccagtaatgggattgctgggttaaatggtatttctagttctagacccttgaggaatcaccac

SEQ ID NO: 308251 - DNA, 201 bp, Homo sapiens
ctgtttgattaaccaagcgcagcactttgctgtgcaaggcgatggtcagtggaagtatttatgggttttgggcgggtttcttgttctttgttttttttttktttttttttttttttagggtcaggttttttcaattttcctttcaggtcctaactcagtaactccatagtctttgagcaaagatgcctggaagctttggca

SEQ ID NO: 308252 - DNA, 201 bp, Homo sapiens
cctttgcccattttttgatggggttgtttttttcttgtaaatttgtttaatttctttgtagattctagatattagccctttgtcagatggatagattgcagaattgcagattttctccaattctgtaggttgcctgttcaccctgatgatagtttcttttgctgtacagaagctctttagtttaattagatcccatttgtc

SEQ ID NO: 308253 - DNA, 201 bp, Homo sapiens
tgtttgattaaccaagcgcagcactttgctgtgcaaggcgatggtcagtggaagtatttatgggttttgggcgggtttcttgttctttgttttttttttgtttttttttttttttagggtcaggttttttcaattttcctttcaggtcctaactcagtaactccatagtctttgagcaaagatgcctggaagctttggcaa

SEQ ID NO: 308254 - DNA, 201 bp, Homo sapiens
ttgcccattttttgatggggttgtttttttcttgtaaatttgtttaatttctttgtagattctagatattagccctttgtcagatggatagattgcagaattgcagattttctccaattctgtaggttgcctgttcaccctgatgatagtttcttttgctgtacagaagctctttagtttaattagatcccatttgtcaat

SEQ ID NO: 308255 - DNA, 201 bp, Homo sapiens
caggtcctaactcagtaactccatagtctttgagcaaagatgcctggaagctttggcaacaacaaaagaacaaacattccttgaagcagctatttttatawtaatgttaatattttaacaggtattttactaccttctatccatttttgttctaaacatgcagtgacttgaaataatttccacctccaactgctgaatttg

SEQ ID NO: 308256 - DNA, 201 bp, Homo sapiens
ttcactaagttttcttttctttttttttttcagtaaattaatacaaactgatatgcattttcagtaaataaatttaatctttaaaataattttatagctgmctttatgaaaataatagtgcaaatttactaactgctggtaatgtgctaggcactggaccattttgaagaaagatttttcattcagtcttcataatggctc

SEQ ID NO: 308257 - DNA, 201 bp, Homo sapiens
tcctggcctactgtagcctcagcatcctgggctcaagtgatcttcctgcctcagtgtcctgtgtagctgcacaccacgatgcccagctaaccttttgattktttgtagggatagggtcttgctttgttgcctaggcacatctcaaactccttggctcaagtgatcctctcacttcagcctcccaaagcgctgggattacag

SEQ ID NO: 308258 - DNA, 201 bp, Homo sapiens
gcagttcccgcctcagcatgagtaactgggactataggcatgtgtcacctcacctttcaccacctttttgttgggtctaaatcttgggacctgtttaatayagagctggggtaggtagggtagattcttattcagccagctacactgatagtcattttcttacacttctggtgccttcagaatggaccacaggtagatgga

SEQ ID NO: 308259 - DNA, 201 bp, Homo sapiens
gtgtttagtaacatctatcctagatgccagtagcacactcatcctctttgtaataccagagatgtctcaagagtaatttgtttctgaccactgacagaagyctacttaagaaaagctgacagctgatgtcaggtgttttctttgttcaaaaatggtgtagaacagtacttggagtgaatgggtgacttcaatttagtaatt

SEQ ID NO: 308260 - DNA, 201 bp, Homo sapiens
aggacagaggtggttgattcccagccaggaatgggtctccttctccctggaaatatttggcaatgtttgaaggcaattttgattgttaggctttgggacarggggagtgtgctgttaacatttagtgggaggagtccagggacgccataaacataaagcacaggacagtcctccacaacaaagaatgatctagcccaaaat

SEQ ID NO: 308261 - DNA, 201 bp, Homo sapiens
ctgcaacagcttcagaatagaaactgacaggcccattttagtagaaagcaaatggcagtgtgtgggtggcgccttataacacagcaactcaaggttaggtsgggggagaccaagaattgagtttcttttgttaaatcagaaattatgcaaattttacaaaaagtattagaggaaatgtgtaaggctttaattggttttatg

SEQ ID NO: 308262 - DNA, 201 bp, Homo sapiens
tctctggtataagaaaaactgaatgatgattaagttcagttgacgcagtataaatgattagctaagtgatcagggctctgaggctgcctttctgggtttatgtcccagctctcattcttactggctgtgagataggaggcaagagactcaacctcctcctgccctgttgcttcccctttaaaattgttcagtagagcagtg

SEQ ID NO: 308263 - DNA, 201 bp, Homo sapiens
tatttaattttgatctctcactacggaacagaatagatttatgcattgggaggataggaaatataataattagagatatattaattgattttagatttttrtctgtaaaatactagtcataaatgcagttactagaatccatgtttatggtctttgaatttgatcaagacagagagttattcatcaaaaagccactagacc

SEQ ID NO: 308264 - DNA, 201 bp, Homo sapiens
ctctctggtataagaaaaactgaatgatgattaagttcagttgacgcagtataaatgattagctaagtgatcagggctctgaggctgcctttctgggtttrtgtcccagctctcattcttactggctgtgagataggaggcaagagactcaacctcctcctgccctgttgcttcccctttaaaattgttcagtagagcagt

SEQ ID NO: 308265 - DNA, 201 bp, Homo sapiens
gattggatcttgctctttcacccaggctggagtgcagtgcctcgatctcagctcactgcaaccccccaaccccctgcttcctgagttcaagcaattctcaygcttcagcctctcaagtagctgggattataggtgtgcacaatcacactcccagctaatttgtgtatttttagtagagatggggtttcaccatgttggcca

SEQ ID NO: 308266 - DNA, 201 bp, Homo sapiens
aactagaagtgaactgcacatggagagaaaattgtctgcacagtgctagcagaagtacatctaaaaattagccaaatgtaccgaatgcctttctcaattaytttagtgtagtcaaaacagtgctatcttatttcatgaatatattttactaccacaaagttagaataaaacactcatattcactgattttttttgtcttcc

SEQ ID NO: 308267 - DNA, 201 bp, Homo sapiens
aaaagttctatcccttaccatttattagcagagtgattttagataatttatgggccccctccccaaggccttgtgtcctcatctgtaaagacaggtgatamaaaatctcctcagggttaatatacaaaatttgtacagaactcatacaactcagtagtagaatcatgaaatacctgatttaaatatgggcaaaagacctga

SEQ ID NO: 308268 - DNA, 201 bp, Homo sapiens
aaagtgagatgatgggtatgttaatttgctcctaattatagtaacctttttactatctgtatgtatccaacatcatactgaaaatatacaagaaaacttayagtgtttatgaaagtcctttgcaaaatgcagttcaactacagaattattaacataatccacaggaaataattagcatgtcttgattgcttaagcaattgt

SEQ ID NO: 308269 - DNA, 201 bp, Homo sapiens
aactatgtccggtggctctgggaaattaaatgaggcacgtaggaaacagttgcgttgatatcttcagtagtaggtgactcttaggacatttttataggaaraaattgggcctttgggtctggaattttttttttttttttttttgaactggtaatagaatttattcaaatgtgccttaatataggcgctggggcttgccca

SEQ ID NO: 308270 - DNA, 201 bp, Homo sapiens
gtgctgggattacaggcatgagccaccgcgcccggcctatgctgaggttttaaaatgggtacccaaccacatttaaatagggcttctttgtccatttttawatatatatatatatacatatatatatatatatatatatatgtatatatatatataaacctatttcattcaatatttcacatggaatgtgcatgtaaaaat

SEQ ID NO: 308271 - DNA, 201 bp, Homo sapiens
tgcccattttttgatggggttgtttttttcttgtaaatttgtttaatttctttgtagattctagatattagccctttgtcagatggatagattgcagaattgcagattttctccaattctgtaggttgcctgttcaccctgatgatagtttcttttgctgtacagaagctctttagtttaattagatcccatttgtcaatt

SEQ ID NO: 308272 - DNA, 201 bp, Homo sapiens
gcccattttttgatggggttgtttttttcttgtaaatttgtttaatttctttgtagattctagatattagccctttgtcagatggatagattgcagaattgcagattttctccaattctgtaggttgcctgttcaccctgatgatagtttcttttgctgtacagaagctctttagtttaattagatcccatttgtcaattt

SEQ ID NO: 308273 - DNA, 201 bp, Homo sapiens
cccattttttgatggggttgtttttttcttgtaaatttgtttaatttctttgtagattctagatattagccctttgtcagatggatagattgcagaattgcagattttctccaattctgtaggttgcctgttcaccctgatgatagtttcttttgctgtacagaagctctttagtttaattagatcccatttgtcaatttt

SEQ ID NO: 308274 - DNA, 201 bp, Homo sapiens
agctgaggcgaaagaattgcttgaacctggaaggtggaggctgcagtgagccaagattgtgccacttcactccagcccgggcaacagagcaagactctgtstcaaaaaaaaaaaaaaaaaaaaaaaaaaaaaggtcagcttttatcttatctggtgctggaggagttggaaactatttaaaagagtaaccaaatttaatct

SEQ ID NO: 308275 - DNA, 201 bp, Homo sapiens
cattttttgatggggttgtttttttcttgtaaatttgtttaatttctttgtagattctagatattagccctttgtcagatggatagattgcagaattgcagattttctccaattctgtaggttgcctgttcaccctgatgatagtttcttttgctgtacagaagctctttagtttaattagatcccatttgtcaattttga

SEQ ID NO: 308276 - DNA, 201 bp, Homo sapiens
ttttttgatggggttgtttttttcttgtaaatttgtttaatttctttgtagattctagatattagccctttgtcagatggatagattgcagaattgcagawtttctccaattctgtaggttgcctgttcaccctgatgatagtttcttttgctgtacagaagctctttagtttaattagatcccatttgtcaattttgact

SEQ ID NO: 308277 - DNA, 201 bp, Homo sapiens
gtctcccttgatgctaactaggagcacttttctttcatcgttatcctcatgtagaatttggcagtggcctccagtggcctgtgaataaaatccagatgttktagtttggcccaaacctacccctgctgattgatttcttctcctgtgaaccacttcctgggaatggaaccacatagagcaaaaataatgaactatttaaaa

SEQ ID NO: 308278 - DNA, 201 bp, Homo sapiens
gattttctccaattctgtaggttgcctgttcaccctgatgatagtttcttttgctgtacagaagctctttagtttaattagatcccatttgtcaattttgrcttttgttgccattgcttttgatgttttagacatgaagtctttgccaatgcctatgtcctgaatggtattgcccaggttttcttctaggatttttatggt

SEQ ID NO: 308279 - DNA, 201 bp, Homo sapiens
atggccagaatctttcataacattgcttttgccttattctactgaataaaactaagccactagatctagcccaccctcaagggaaggtgattacataaggrtctgaatacctggagtcaggggtctttgaaggatcatcttagagtgagcccatcacagtctgcagtagaattcagtacatattggttgaatcaatgagtt

SEQ ID NO: 308280 - DNA, 201 bp, Homo sapiens
atccatcttgagttgatttttgtataaggtgtaaggaaggggtccagtttcagttctctgcatgtggctagccagttttcccaacaccatttattaaatayggaatcttttccccattgcttgtgtgtgtcaggtttgtcaaagatcagatgattgtagctgtgtggtgttatttctgaggcctctgttctgttttattgg

SEQ ID NO: 308281 - DNA, 201 bp, Homo sapiens
tccacactcattcctgttctgtggttggtaacttaaataaaggttcatataacactaatagaaattgaatcatgctgtatttccactaataaccaaagttrcagttaatgcaaagagaaacctccagataaaacctttgagaactccattaaagtggggggttcattgcatgcttgttgtttgaggtaattaaaatcttat

SEQ ID NO: 308282 - DNA, 201 bp, Homo sapiens
ataaatgccctcttatgcttccataatatgaaggcatttatccactcagtagagatttattcagtaacgtctgcaggcttggcattggagtagatgctttaaaaaaaaaaaaaaggaatgatacgctctaccttgcaagtttttcagagagacaggacttgtgtgtgtgaaaagtgcaatagagtttgcaaggcagcatac

SEQ ID NO: 308283 - DNA, 201 bp, Homo sapiens
aagtcatgattattcagccacacagtgctttcctgtcatttgacattaactccgaagggaattcagaagcctgcaaggacaggatgctgatgtccgtgttragggtggtcagcggcatcctggatgcctggttctgcccgggtctctggtgatgcaggctgacaatagtgggatgcaagtccagggtgatctgcaggtcca

SEQ ID NO: 308284 - DNA, 201 bp, Homo sapiens
aagcaaatgtgggcagtgcagatcaagcctgcttcccaggactttttgagagtgacggtggtacagtatttcactgtttgtagcatgcctatagactgccratttacaggatttaaaaccttcctggcagatgtccagaggcctctggctcatatctacctagtttcatggttggctttctaactcttacataacagctgg

SEQ ID NO: 308285 - DNA, 201 bp, Homo sapiens
gatctctacctaaaagaatcaggttatcttgcagaggacagagggtgacacctattcctcatcccctgatgttgaagggcattagagccattatatgatgkgtaaagagcatgcccatttattacctgcaaatgggtctgtgttaacagtaagcagtttgtttcttttcaggtactagtttgaatgcatatgttataaatc

SEQ ID NO: 308286 - DNA, 201 bp, Homo sapiens
ctgtcccgtgctgttctctccatctggtattttgtgtcccccaccatgaacatgcagattccccagcgaatcccatgagctgctgctctcctgatgccttwcctcgtcctttcatctgagtgtaatttaccacctcaggctttctgcatgacactgctttacatctgctcctctgagggtactcacagaatgcgatactga

SEQ ID NO: 308287 - DNA, 201 bp, Homo sapiens
gatgggaaggtactctattgtcctaccagcttggtgtggagaaaataaaatgttaggtatacactgaattgttggttatcacccagtatgaattgtccttstcaccatggggtgtaccatatgcagactgttagcctgctctggggacctggagagatgccacattcttctgtttccaggctgattggaactgaaagggtt

SEQ ID NO: 308288 - DNA, 201 bp, Homo sapiens
tgatgaaggtttttgtcttgtaatgaaacgtggtaataaagagcatattggatgggaaggtactctattgtcctaccagcttggtgtggagaaaataaaaygttaggtatacactgaattgttggttatcacccagtatgaattgtccttctcaccatggggtgtaccatatgcagactgttagcctgctctggggacctg

SEQ ID NO: 308289 - DNA, 201 bp, Homo sapiens
ttttgtagagatggagtcccattctgttagccaggctgtaagttttttaaatttgtgaaatggagacatctctctgggtgggttaaatgaaataatacaasttacctactctgcctagtgcctaggttccttgtgtgccctccataaatgatggttagttctgataatggtgtgttagttacacatggaatgggtgaataa

SEQ ID NO: 308290 - DNA, 201 bp, Homo sapiens
gtatggctgttgattctgttgtttctgggcatttgcagcatttcttacttttagatagctgtcggaaaagaaaaatactataggatgggttatgggttgcmtttggcatttatttttaatgttatacaatattgtatttttgaggaaaataaattggtaatgtgtggaattgggtaactggggggaggggtagtttttgtc

SEQ ID NO: 308291 - DNA, 201 bp, Homo sapiens
agaaatgaatcgtgtgtgaatagcatttaccatggagtctgggatgtgggagtcattcaagagaatggggctgctcttgtgctttaaccaacacctgcccsccaccccctgcacccatatgctagataattgatgtgcgttctcaagtcttcatagcacatttaggagatataggtggaattttgttagtttttgcttcat

SEQ ID NO: 308292 - DNA, 201 bp, Homo sapiens
gttgtccagggaagaaatagtcaacatgtgttttacaatgtctggcgtagttgtctagtctttacaagtagaggtgtctgaatacacagcaggggagtcargaattcggaggagtcgggtggggctggaattgacgggaacaacctgatggtatctccccacattcccttcttatttggaaagaagtgcagtccattgtag

SEQ ID NO: 308293 - DNA, 201 bp, Homo sapiens
aatccacaggaaataattagcatgtcttgattgcttaagcaattgtgaaataacaaaattaactgacctagatcctgctttcttttttactatgtcaataktacagaatacttctcaactgtaataagtcccctatagtgggagtgtttcaggttgctacactaacaggtgagagatgctagaaaatgattatcaaaatat

SEQ ID NO: 308294 - DNA, 201 bp, Homo sapiens
gaagagaccacaatttaggaatatgctgagaaggaggcatggaagaccaggggttccatctcctcgtaatgtgtggtatctgttctctcattcttcccagwttgctccacaatgttcctctccccacttctatttaaatggtccaggggaagctctgtcatgatatttcaatgtctcaggaaggcccaccatgccagcatg

SEQ ID NO: 308295 - DNA, 201 bp, Homo sapiens
ccaagtctgattggccaccaagtcttcttggtgccatcgattctttcagtagacttttgaaaatcttttacaatctagtgtaaagtttacatttccagttrtcatcccaatctgccactgaagtacttcctgcatgccaccttgcccctgcaaatcctctttcctctgagcaccctttcattcaatacacagttcaaaagt

SEQ ID NO: 308296 - DNA, 201 bp, Homo sapiens
attctttaatcccacttagttcctaaacttttgaaagagaatggccctttttgtctttgctctgtcattatgtttggtatgcagaagatatttaaaagtayctgtgcatttgattgatttgacttgcgagtttcttgtcatgtttaagccatattgtataaatacttttaattttactgcttatttaaccgtggctaaata

SEQ ID NO: 308297 - DNA, 201 bp, Homo sapiens
tagaactactaataccctaggaatcacatttttgtggaaatactgttttcaggttatctcagtttctttttcaaaatccactgtcacaacaaatatcctakatcaatcatcacagcagtacacagtctccccttaattgtggaaggtatgtttcaagacccccggtggatgcttgaaacctcaggtagtactgaagcctat

SEQ ID NO: 308298 - DNA, 201 bp, Homo sapiens
gcctgtaaccccaacattgtggggggacgaggctggtggatcccttcaggtcaggagttcgagaccagcctggctaatgtggcaaaaccctgtctctactaaaaaaaaaaaaaatacaaaaattagctgggtctggtggtgcgtgcctataatcccagctacttgggaggctgaggcatgagaatcacttgaacccaggag

SEQ ID NO: 308299 - DNA, 201 bp, Homo sapiens
tgctgatggagagtgtttcacaggcaaaagtaaattccatacctccatcactgcatggagttggccctattcatgctcatatgtattgcctgttgcttttaaaaaaaaaaaaaaatacgccgccctcatataggagtgcaggggttggcaaaatttctctgtaaggtgactgatagcaaatattttaagctctgtcagcca

SEQ ID NO: 308300 - DNA, 201 bp, Homo sapiens
tgccagctcaggtgctgaaacctaagacattttttccccttcctaagcctttgggtttctgttttgtttttaaagcctttggattctttgttttttttttktttgtttgtttgttttggagaagaagtctcgctctgtcactctgtcacccaggctggagtgcagtggcgtgatctcggctcactgcaacctccacctcct

SEQ ID NO: 308301 - DNA, 201 bp, Homo sapiens
ttttcctaatttttctgtcatgtcttgcctttcctttgctgtaaataaagaaggaatagcagaaagaataggaaggcaggcagatgctacctagagacactatgagtttttatgatagtaaagtaactcagagaattgaagtaacacaagagtaacaggctgctttggcttttaggctggttgtgaatccgtcctggttct

SEQ ID NO: 308302 - DNA, 201 bp, Homo sapiens
tttcctaatttttctgtcatgtcttgcctttcctttgctgtaaataaagaaggaatagcagaaagaataggaaggcaggcagatgctacctagagacactatgagtttttatgatagtaaagtaactcagagaattgaagtaacacaagagtaacaggctgctttggcttttaggctggttgtgaatccgtcctggttcta

SEQ ID NO: 308303 - DNA, 201 bp, Homo sapiens
tgggccagaaacagttcattcagcttttctcttcattctattttcttctcctattagtatttttggtggctgcatatttcaaattacagttctttttttttttttttttttttttttttttttggtgacaagaataactttgtggcctgttgaggacaagtctctgtcactcagttgctgttccattcctcatatgtaata

SEQ ID NO: 308304 - DNA, 201 bp, Homo sapiens
aaactataaatggtaggtttcagagggttaattgttcttggtatttctttcagacagaagcccagaggaactttaggagcagcaaccatgccttaaatggtttttttttaatacatttttttaaagcattggttataggttctttctgtacagttgtgttagaggcagattacatttactttcttgcacctctggtaactg

SEQ ID NO: 308305 - DNA, 201 bp, Homo sapiens
taggcagggtctcgttgtctgggctactctccaactcctgggttcaagcgatcttccacctcagcctcccaaagtgctggaattataggcttgagtcaccrcacctggcccaaagaatcccttttgataatagaaatatgatttgggcaccctgatttttttcctttactttccataaaagttagatcggcagtcctgtaa

SEQ ID NO: 308306 - DNA, 201 bp, Homo sapiens
gggaacaatgggagaattaagaagctcacaaacctgtgaaatatcttaggttgggctgccgtggaaaacctcacatgaactaattttttttttaacctagytaaaaaaaaatgaagaaaataacccaactagaaagctttctcccaagagaagttgactgagaaaatcaggtctcctggggattttgtgagagttatatgc

SEQ ID NO: 308307 - DNA, 201 bp, Homo sapiens
ccccatcatcccccttcctaatcactctgtgttcccaagggtaaccacttccagaaattcacttagcctgtttaataaattgcataaagttagaatcattyagtatgtcctcttttgtgtcttgcttcttttgctctacagtgattttaagcatcctctctgttgtggcctgtagttgtagtttgttcttctgtattgcta

SEQ ID NO: 308308 - DNA, 201 bp, Homo sapiens
acatgaactttcttccccctatgcctctgtcccccttttgttccttcctttggctttggaaaaatttgtttaagcgaaattctatgagcccccaggacaaytgacacaaggagagtttcttatttgagatcttggtttgatagtccatagtttttttttttttggtcattgttgtttgtttgttatttatgagcaaggaac

SEQ ID NO: 308309 - DNA, 201 bp, Homo sapiens
gaccaggatacatttgatcagtagcattcagagagatttgaataccacagttaacaagcgtgatctaatagtgatatagagaagttcgcacccaagagagwctgcacagagagacctagagtctcttcaaacacaaatggtttatttatatacataggccataaatggaatttcaatacattcccccaaaacagataccat

SEQ ID NO: 308310 - DNA, 201 bp, Homo sapiens
aaaaaaaaaaaaaaaaaagccatattagtactctataaatactccattaaaaaaaggtgggaggtaggagacgattccccagttgtccaaaaaattcgatygatgtgctgctgacttctgtttggtttagcagatgtttgttgagcagctgtttgttgaattggttgaaaatgaattaaaaataattttatcttgaccttt

SEQ ID NO: 308311 - DNA, 201 bp, Homo sapiens
caccgggggctgttgtggggtagggggaggggggagggatagcattaggagatataactaatgctaaatgacgagttaatgggtgcagcacaccaacatgrcacatgtatgcatatgtaacaaacctgctcgttgtgcacatgtaccctaaaacttaaagtataataataataaaattaaaaaaaaaaaagaattcaaggt

SEQ ID NO: 308312 - DNA, 201 bp, Homo sapiens
ccatcttaaaagtgaaattatgggccaagctggcttaagttgacaacattagcaacccactgtcagaaacacaaagacacccccagccagccattactattatcacgcgcttaagcaaagggcaaactcagagtttctttggaaccgattgcctttgttccacttagtatcataaaggagatattggctgtaaaacctaat

SEQ ID NO: 308313 - DNA, 201 bp, Homo sapiens
tggatacttattagacggaaaagatgagttggagcttcctagtagaataaggatatgcaaaagccctgaggcaggtggtgtttgttaagtttaaggaataragaggccagtagagattttggtaggcaagataatgtctcttcttccaaatgtctgctgtaaatacgttactttatgtggtacaacagactttgcagatgt

SEQ ID NO: 308314 - DNA, 201 bp, Homo sapiens
cctggcctcaagcaatcctcccaccttggcctcccaaagtactgaattacaggcatgaaccactatgcctagccatgctttttttaaaaaacaaaaaaacaaaaaaaaaaaaccttcctggtatttttcttctttccagctgtggtttggttaacacaacattgttgagagttacctataacacatggctttctcaggagc

SEQ ID NO: 308315 - DNA, 201 bp, Homo sapiens
ccacttcttctgcaggtcgctctctcctgaaatctggatggtgctatggtcgtgagagcttcgtgttttccactagtccacctccagacattccgttgaawacctatggaatctcacttcaagctcatacaaattggttgttgacggttattgccatgcagctcccctggtcccattgcttcagtaaaagattttggatat

SEQ ID NO: 308316 - DNA, 201 bp, Homo sapiens
ggcagagagttgaacttttagtgtgcaaatgttgtgacatctatttggtcttcatagagatctttttaacacctacttttgggggtggcaggtggttgttggggggggggggtctcaggtgtgtcccaggtggatgacatttctagataagtgagctaagaataaaattcctaaccaaaaagtaaactgcttctatttgag

SEQ ID NO: 308317 - DNA, 201 bp, Homo sapiens
agattgatacttattccagcttcaatttttttgttttcctttctgccctactgatttcaaaaggaagctgcatttcttcacagtgtcagggttataactcyggatagcaatcttggttatgattttaaaaacaacgtattaaaagctacaataataagtaaatatatgaaatagtgaaaatggttaaatgctcacaggtat

SEQ ID NO: 308318 - DNA, 201 bp, Homo sapiens
attatcaaaagtttatcagtgaattcaggacattttaagagacatttcaaaaaaaaatcgatattgaaaagcgtacaataaaacaacacccattcatgatcccccccccccaaaaaaaacacttagagtaaaaatagaaagcatcctctttacctttataattgttatttaccagatgtatattagcaaacatttaaattt

SEQ ID NO: 308319 - DNA, 201 bp, Homo sapiens
aaaacaacacccattcatgatcccccccccccaaaaaaaacacttagagtaaaaatagaaagcatcctctttacctttataattgttatttaccagatgtwtattagcaaacatttaaatttaatattaaaaacttagaagcttgaacatttaagatacatgatacttgctttcagttctagcacgtaagcctatctaggt

SEQ ID NO: 308320 - DNA, 201 bp, Homo sapiens
aatttagtggttatactggaaatgcattttcaactcctatgttctaaagtttatgttcaaatggtgccagtgaatttttatatgaagggaaaatgcctgctttttttttttttttaacagatgtaatttcacttaaccctttgcgctttcccttagttgtcatttaacatacaatactggctttacttatctctagaaaga

SEQ ID NO: 308321 - DNA, 201 bp, Homo sapiens
aaaatacaaaaattagctgggtgtggtggtgcgtgcctgtaatctcagcgacttgggaggctgaggcaggagaatcacttgaaccagggagtcggaggttrcagtgagctgagatcacgccacagcactgcagcctggcgacagatcgacactccacctcagaaaaaaaaaaaaaaaaaaaaaaagacagtatcagaatcc

SEQ ID NO: 308322 - DNA, 201 bp, Homo sapiens
aggaaacaaaaacccttctgtgtatgtagagtaagaagttctactctaaagcacaaatgctccagagaaaatacaagggagtgtattttctgctgctgtayaatctgctgctctcttcagatgctttgacctgttcctatagtgactttgtcacatgattctgaatttaaggatacatctacttcctacataagactaagt

SEQ ID NO: 308323 - DNA, 201 bp, Homo sapiens
tttttaattttcattccgttaattacttgtgtaacatatgtatgtccccataacagccagtgctcactcgcgtgcacgctgtctctctctctctctctctcacacacacacacacgcttactacatattcatacatttattctacagggaagaagagacagttggagacactaatattccagctgtcggcagcagaatcat

SEQ ID NO: 308324 - DNA, 201 bp, Homo sapiens
ttttaattttcattccgttaattacttgtgtaacatatgtatgtccccataacagccagtgctcactcgcgtgcacgctgtctctctctctctctctctcacacacacacacacgcttactacatattcatacatttattctacagggaagaagagacagttggagacactaatattccagctgtcggcagcagaatcatt

SEQ ID NO: 308325 - DNA, 201 bp, Homo sapiens
ggagcctgaggcaggagaatggcttgaacccaggaggtggaggttgcagtgagccaagatcacgccatagcactccagcctgggtgacagagcaagactcygtctcaaaaaaaaaaaaaaaaaaaagttaagcttaaacccttagggtggacttactttaatgagcagaaaatgtgtgagttgttcaagagtgttcttcta

SEQ ID NO: 308326 - DNA, 201 bp, Homo sapiens
aagcaagaaccatcagaaataacttgaaaaaacaaaacaaacaaaatcaagggtttatactgtaagaaaaagcatagaataaagttggtatttaaaacagygtggtactgccaatatagattattatattgtatatatacacacacatgtatatcacacacatacatacacacggatcatagaaacagacccatgtacaaa

SEQ ID NO: 308327 - DNA, 201 bp, Homo sapiens
tgaggcaggagaatggcttgaacccaggaggtggaggttgcagtgagccaagatcacgccatagcactccagcctgggtgacagagcaagactccgtctcaaaaaaaaaaaaaaaaaaaagttaagcttaaacccttagggtggacttactttaatgagcagaaaatgtgtgagttgttcaagagtgttcttctaaagcac

SEQ ID NO: 308328 - DNA, 201 bp, Homo sapiens
cttctaggcctgacccataaaatgttcccagttagatggggatggcagagctacaagacagaaggagacttggtccctgaatgacaacctggaggggagcmtactgactcaccatacctgtgctactaactttgcataagttaagaacaaacttttattctgttgaaccactgagatttgagagcctattacggccaccat

SEQ ID NO: 308329 - DNA, 201 bp, Homo sapiens
actgcagccttgatctcccgggctcaagtgatactcacaccttagactcctgagtagctgggaccgctggcgtgtgccaccatgcccagctaatttttaatttttttttttttgtagagacagggtcctcctatgttgctcaggctggtcttaaacttctgggctcaagtgatcctcccaccacagcctcctaaagtgttg

SEQ ID NO: 308330 - DNA, 201 bp, Homo sapiens
aagggtggaacaagagaacttgggtcaccacacaactctatgacagtcattgtagatggtatgcacagagtttgttgtgacacagcaaccctgataagtawacaagaaatgaaagccttagctaaatgtttctttataggattgcaatttctagttttatttaataaacacagttataagaaccaatgcagcactgaacag

SEQ ID NO: 308331 - DNA, 201 bp, Homo sapiens
ttttaaactattttttaatcttttgataccttaaatagggcagactgtcttagtacacaaaggcctatggtttcaattagttgtacatggaactttttttktaccagtttttatttctaccttaatcttgcaacgtttatgtcattaatcttctcaaatttagtatgtcctttgggaggctgaggtgggcagatcacctga

SEQ ID NO: 308332 - DNA, 201 bp, Homo sapiens
gtgccagggcgacagagcgagactccatctcaaaaacaaaaacaaaaacaaaacaaaacaaaacaaaacagactttttgtaccagagctctaagagttaawaatttcaggcaaattacccataaaaatcccgatggtggaagggtggaacaagagaacttgggtcaccacacaactctatgacagtcattgtagatggtat

SEQ ID NO: 308333 - DNA, 201 bp, Homo sapiens
cattatggctggttcctgtaatcccagctactcgggaggctgaggcaggagaatcactggaacccagaaggcagaggttgcagtgagccaagatcatgccrttgcactacagcctgggcaacaaagcaagattccatcttaaaaaaaaaatttttttttaaatatgtcctttatggaacactgtgccttttcgtgactgac

SEQ ID NO: 308334 - DNA, 201 bp, Homo sapiens
gaatcactggaacccagaaggcagaggttgcagtgagccaagatcatgccgttgcactacagcctgggcaacaaagcaagattccatcttaaaaaaaaaatttttttttaaatatgtcctttatggaacactgtgccttttcgtgactgactgtctttaggcaacaaaagcaattgcttactcacttaatttccttttatc

SEQ ID NO: 308335 - DNA, 201 bp, Homo sapiens
acaaacctctgtcagattttagtatatggtgacctaatttggtgggatgattgctaaagttctggaacaggccctttgtagctgatttttgttgaattgayaagcatcgaatatactaaatataattttttgtgcctaggtctcttccaaaacttgcataccatttttagcctgaactcagtgttatcattttggtctttt

SEQ ID NO: 308336 - DNA, 201 bp, Homo sapiens
taaatctggcaaccctagtttctagaacaatttcatcagactttaaagggacattgaatggttagatagtaatagggatacctacatcaaataactggcartagttgaaaggttttttaactatataaactagggcaaggctatatctgccttatttgttgtttctaatcttattacagtgcttggcacatacgtgctaaa

SEQ ID NO: 308337 - DNA, 201 bp, Homo sapiens
agattgatactaaactatgaccttttccatttatgaaaattactcttcaggacgatataccttcatcaaggtataggaagttattggacttcccttaggcygtgtccccttatctgtaaaattgggctaaccatccctctataccttgctgtgtgggtcgaatgaagttatgtatgtaaagtgatgagcacagtgcctttc

SEQ ID NO: 308338 - DNA, 201 bp, Homo sapiens
aaggtgggaggatcgcttgagcgtgggaggcggaggttgcagtgagccgagatcatgcactccagcctgggtgacagagtgagaccctgtttcaaaaaagaaaaaaaaaaaaaatgatagaaataccacagaggtggtattgccagtgattgtttagggatataagtgtgagggactattttggccaagagttcctttctg

SEQ ID NO: 308339 - DNA, 201 bp, Homo sapiens
actttgagaggccgaagtgggtggatcacttgaggtcaggagttcgagaccagcctggccagcatggcgaaactctgtctctactaaagataccaaaattrgccaggtgtggtggtgggtacctgtaatctcagctacttgggaggctgaggcatgagaattgcttgaatccaggaggcagaggttgcagtgagccaagat

SEQ ID NO: 308340 - DNA, 201 bp, Homo sapiens
cactacaagttattgccaacctgagagctcctccacagaaattaccatttggagactgtccacagtgggatttcagataggctccaaccccctacgggaaccccccccccccgccaattattacacactttcaccaaatgttagagggagaaatgactccattgtggaaatcaagtttgagcccagctctgacctgggctg

SEQ ID NO: 308341 - DNA, 201 bp, Homo sapiens
ggttgcagtgagccaagattacaccactgcactccagcctaggcgacagagtgagactcgtctcaattaaaaaaaaaaaaaaaaaagaatggcacagaatraaggccttggtgggtgggcactatagcagcaatctgtatatttccagcatcctgtcactccttgaaggaccatgagctccctatgcgtttctgatggggg

SEQ ID NO: 308342 - DNA, 201 bp, Homo sapiens
tgtgtgtgccaccatacccagctcattttaaaactatttttagtagagatggagctttgccatgttggccaggctggtcctgaacgcaagtgatcctcctstcttggcctcccaaagtgctgggattacaggcatgagccaccgagtccggtgtattctttctttttctaaacggcaaaagcaagtttttgaacagagatc

SEQ ID NO: 308343 - DNA, 201 bp, Homo sapiens
gttaaaaaccgtttactaggggaatgatcttggacaggttatttaaccctctgccctcacatgcctcatctataaaatgggggtaatatggaagtttatgrcctacagtgaatttgagaattatgtgagatgactctttgaaagcacttagcacaaatgtctggtaacagctagtactccatatcagcctgtcatattgtt

SEQ ID NO: 308344 - DNA, 201 bp, Homo sapiens
tgaccattgtcagtgagctgccacatctcaccatggaagtcctaaaatgaaactgtgtttcacttagaaatagaattctacctatttttctgaagaatacttttttttttttatggtggcaactttgtttgctgtcaatataaatatatcgcttctgtaactctcacagttgcatgtgtttctcctccatcaatgatctgt

SEQ ID NO: 308345 - DNA, 201 bp, Homo sapiens
agcatcgaatatactaaatataattttttgtgcctaggtctcttccaaaacttgcataccatttttagcctgaactcagtgttatcattttggtcttttaragtggagggagggggagagggagaatccaattatagcaagcctgacttgattgaatgatcttagaatgaaccttgtgggaaataatgtgttggcgagaaa

SEQ ID NO: 308346 - DNA, 201 bp, Homo sapiens
gaccattgtcagtgagctgccacatctcaccatggaagtcctaaaatgaaactgtgtttcacttagaaatagaattctacctatttttctgaagaatacttttttttttttatggtggcaactttgtttgctgtcaatataaatatatcgcttctgtaactctcacagttgcatgtgtttctcctccatcaatgatctgtt

SEQ ID NO: 308347 - DNA, 201 bp, Homo sapiens
aagcctccctggaatgattcaaaaggtagttgtaatggatgggttaaagacttcatttcaccatcatccttatccaggttctgaatacacatgccctgtckggtctgtggctcattttagatacagtgagtggaaaattgaatttaatgattaagtctttttggtttctgatttgtggattttcttgtgatttttgtactt

SEQ ID NO: 308348 - DNA, 201 bp, Homo sapiens
gagctgccacatctcaccatggaagtcctaaaatgaaactgtgtttcacttagaaatagaattctacctatttttctgaagaatacttttttttttttatkgtggcaactttgtttgctgtcaatataaatatatcgcttctgtaactctcacagttgcatgtgtttctcctccatcaatgatctgtttagcccctaaaat

SEQ ID NO: 308349 - DNA, 201 bp, Homo sapiens
cagtttcagagatagaggacataggacgtcccttacggaactcaaaattgagtttgcagagacaaccttaacctttgtaaggtgagggaagcctagagtckcatgtggtgtgtggggcccagggatgcgtttgtaaagcttgggtgcagtggtctttcttccacagggagtctgagaccttggtctgcttacctttctcta

SEQ ID NO: 308350 - DNA, 201 bp, Homo sapiens
ttggattacaaaggtgaagttctatgtcctacccttgaagaaccgtgttctaatattccccaagggaggtcccttgttacctactgttgggaaccctgcartgtgctggaaaacattactacattttcaagtgcaactgacatggatgcatttcagcgagatccttgacagaatatctcttgatattctcagagttgacat

SEQ ID NO: 308351 - DNA, 201 bp, Homo sapiens
aaaggtaaaatgaagtacccaaagtcacacattttagtgagtggcaaaaatgggatctcagggcatggttcctatctcttgacaatctaagctcttcaccytgtacctcttttccatctctgcagccctctctccctctcttctttatagatactctgagcgtttatcttgcatccagttagcaatgcagtttcagagata

SEQ ID NO: 308352 - DNA, 201 bp, Homo sapiens
tccccaagggaggtcccttgttacctactgttgggaaccctgcaatgtgctggaaaacattactacattttcaagtgcaactgacatggatgcatttcagygagatccttgacagaatatctcttgatattctcagagttgacatggagaaatgaggattcataatagattgaaaaacccttccctgggaattctagataa

SEQ ID NO: 308353 - DNA, 201 bp, Homo sapiens
aggaggaagtcctagagggcagaaaatgctgtcttccttttgctgtcttgccacagttccctgttattagagtcctgtcctttgtcttcaaagctttggaraagtgcttcacataaaagacaatgaagcaggggccacctaagaggcttgtctttgttgttgtttatgcagaaagtactgttctctgctattggcaaagta

SEQ ID NO: 308354 - DNA, 201 bp, Homo sapiens
ttttaaacatttaaatcttggattcatttgaagtttgtcctagagtaaggtcgtctagttttggaccattgcatagtattatgtaataaaataagtttgtaataaaataagtggtggatatttgcattattgccaattctttcgtattataaacattgctgaaatttaatatgctttcttgtaaacatatgtattaagttg

SEQ ID NO: 308355 - DNA, 201 bp, Homo sapiens
tagctcagtggagtagactggtgtgatcacttagccgtgtctgtcatgggcagtggagtacagagggtggttgccctctctccatttcacacttgtactgkaggaaccctgaggctagatggtttttctgttaatttagaaaatctttgtcccctaatgttgctggacttgctggggtggtgaaccattcgagttgttgcc

SEQ ID NO: 308356 - DNA, 201 bp, Homo sapiens
tttaaacatttaaatcttggattcatttgaagtttgtcctagagtaaggtcgtctagttttggaccattgcatagtattatgtaataaaataagtttgtaataaaataagtggtggatatttgcattattgccaattctttcgtattataaacattgctgaaatttaatatgctttcttgtaaacatatgtattaagttgc

SEQ ID NO: 308357 - DNA, 201 bp, Homo sapiens
ttaaacatttaaatcttggattcatttgaagtttgtcctagagtaaggtcgtctagttttggaccattgcatagtattatgtaataaaataagtttgtaataaaataagtggtggatatttgcattattgccaattctttcgtattataaacattgctgaaatttaatatgctttcttgtaaacatatgtattaagttgct

SEQ ID NO: 308358 - DNA, 201 bp, Homo sapiens
tgaactgtcaaggttttttagtgggtgcagaagactgagggagggtcccagtttgggatgtgaatttgggttccagatgtaacattaatttgcgctgtcaycttgagcaaagtgcttaacctttgaaagcctcagcttgctcatccattaaatagggataataatagtaattattgtgaagattaaagaagatctgcctaa

SEQ ID NO: 308359 - DNA, 201 bp, Homo sapiens
taaacatttaaatcttggattcatttgaagtttgtcctagagtaaggtcgtctagttttggaccattgcatagtattatgtaataaaataagtttgtaataaaataagtggtggatatttgcattattgccaattctttcgtattataaacattgctgaaatttaatatgctttcttgtaaacatatgtattaagttgctg

SEQ ID NO: 308360 - DNA, 201 bp, Homo sapiens
gccctgcaaatagtcgacagtgtaagtgatctcaaagtgagaatatatctaaagtctgtatttgtaatagacaaggtttgaaggaaagctgagaccttgtwaaattcacatatggacttcctgagcgtgcaataaagacttaacttctacttgatggagcctgtcaaacagccatattacaggcatgatttggttgcatgg

SEQ ID NO: 308361 - DNA, 201 bp, Homo sapiens
attcattcattcattcattttgtcaatccatctgtgagccattcagcaaatatttattttccaccttcttttcaggatgtgatcaatttttcttttgtatrtaataatctttcacactttgaagatcattcaaaacgggtatgtacatttttgtggtgtaatgaaaacccaccagtttaagcccagatttgtcattaaact

SEQ ID NO: 308362 - DNA, 201 bp, Homo sapiens
ggacttcccgcaccgcctcgtacagggtgttgcgagagactgctgctcatggcttctcacgccgcgctaaccggaaaagagcgggtctggtaatatttttrtctttttttgcttcgggctggaaatgaggtaggctcagtagaagttctgagaagagacagagtttatggaaactccctgatgaaaatacctgtcactcat

SEQ ID NO: 308363 - DNA, 201 bp, Homo sapiens
tactctttttaataccctccttttccagaacagtaaaacaggctccagagaagctttttaccatcaggattagagtctgggacctccagtttaggcattgstactgaatgaaattttacctgaaatagttttaacatccagtcctaaaatagacaccctgggaaattagacagataatggtattaaaaaatgaacaaagta

SEQ ID NO: 308364 - DNA, 201 bp, Homo sapiens
tttttctttttttcctttcttttcttttctttctttttttttttttttttttttgagacaggatcttgctctgtcactcaggctggagtgcagtggagccmtcagtagcctcaatagcctcaacctcctgggctcgagcaatcctctcacctcagtctcctgaataggtgggactacactcaccactcctggctaattttt

SEQ ID NO: 308365 - DNA, 201 bp, Homo sapiens
cctcacgtgatccgcctgcctcggcctcccaaagtgctgggattacaggtgtgagccactgcgcccagcccccttctgttcttaaactgtgattggtttgygtttggtagaactgggaccacacaaactgctcttaaaacagttcccacatgcctggctaacacctggttttctgtcatcgttcccttagcatgctgcttt

SEQ ID NO: 308366 - DNA, 201 bp, Homo sapiens
aaacatttaaatcttggattcatttgaagtttgtcctagagtaaggtcgtctagttttggaccattgcatagtattatgtaataaaataagtttgtaataaaataagtggtggatatttgcattattgccaattctttcgtattataaacattgctgaaatttaatatgctttcttgtaaacatatgtattaagttgctgg

SEQ ID NO: 308367 - DNA, 201 bp, Homo sapiens
agtcatggcagaaggcacctcttcactgggtggcaggacagagattgagtgcccagcacagggggagaccccttataaaaccgtcagatctcgtgagaactcagtcagtatcactgcaacaggatgggggaaaccgcccatatgactcactttcctccacctagtcgcttccatgacacatggagattatgggaactacaa

SEQ ID NO: 308368 - DNA, 201 bp, Homo sapiens
gtcatggcagaaggcacctcttcactgggtggcaggacagagattgagtgcccagcacagggggagaccccttataaaaccgtcagatctcgtgagaactcagtcagtatcactgcaacaggatgggggaaaccgcccatatgactcactttcctccacctagtcgcttccatgacacatggagattatgggaactacaat

SEQ ID NO: 308369 - DNA, 201 bp, Homo sapiens
tcatggcagaaggcacctcttcactgggtggcaggacagagattgagtgcccagcacagggggagaccccttataaaaccgtcagatctcgtgagaactcagtcagtatcactgcaacaggatgggggaaaccgcccatatgactcactttcctccacctagtcgcttccatgacacatggagattatgggaactacaatt

SEQ ID NO: 308370 - DNA, 201 bp, Homo sapiens
ttaggagtttgagaccaacctggccaatatggtgaaaccccatctctactaaaaatataaaaattagctgggcatggtggcgggcgcctgtagtcccagcyactcgagaggctgaggcaggagaatcgcttgaacccaggaggcagaggttgcagtgagcccagatcgcaccactgcactccagcgtgggtgacagagcga

SEQ ID NO: 308371 - DNA, 201 bp, Homo sapiens
tccacagtgaccctatttccaaatcatgtcacattctgaggtactgggcattagaactttagcatggctgggcacggttttattgacatatatttgtcaayatatgcctgtaaacccagctcatgcctgtaatcccagcactttgggaggccgaggtggcagatcgcttgaggctaggagtacaagacctgtctggccaac

SEQ ID NO: 308372 - DNA, 201 bp, Homo sapiens
catggcagaaggcacctcttcactgggtggcaggacagagattgagtgcccagcacagggggagaccccttataaaaccgtcagatctcgtgagaactcagtcagtatcactgcaacaggatgggggaaaccgcccatatgactcactttcctccacctagtcgcttccatgacacatggagattatgggaactacaattt

SEQ ID NO: 308373 - DNA, 201 bp, Homo sapiens
taaccagttatatccacagtgaccctatttccaaatcatgtcacattctgaggtactgggcattagaactttagcatggctgggcacggttttattgacayatatttgtcaacatatgcctgtaaacccagctcatgcctgtaatcccagcactttgggaggccgaggtggcagatcgcttgaggctaggagtacaagacc

SEQ ID NO: 308374 - DNA, 201 bp, Homo sapiens
cagtggcatgatcatggttcactgcaacctccacctcctaggttcaagcgattctcctgcctcagcctcccaagtagctgggattacaggcatgtgccacmacccccagctagtttttgtgtttttagtagagacggaattttgccatgttggcctgactggtctcgaactcctgacctcaggtgatctcctcgcctcgac

SEQ ID NO: 308375 - DNA, 201 bp, Homo sapiens
catgtgccaccacccccagctagtttttgtgtttttagtagagacggaattttgccatgttggcctgactggtctcgaactcctgacctcaggtgatctcytcgcctcgacctcccaaagtgctgggattacaggcatgagccactgcacctggcctgtacgtaccttttcatcctcacctctctaccaccccagcacaga

SEQ ID NO: 308376 - DNA, 201 bp, Homo sapiens
ccgggttgaagcaattctcccacctcagcaacccgagtagctgggaatacaggagtgcgcgccaccacccctggctaatttctgtatttttagtagagacrggatttcaccatgctggccagactgctctggaactcctgacttcaagtgatctgcccgtctcagcctcccaaagtgctgggattacaggcgtgagccacc

SEQ ID NO: 308377 - DNA, 201 bp, Homo sapiens
ttggtttatttatttatttttttgagatggagttttgatcttgttgcccaggctggagtgcaatggtgtgatctcagctcaccgcaacctccgcctcccgkgtttaagcaattctcctgcctcagcctcctgagtagctgggattacaggcatgcgccaccacacccggctaattttttatatttttagtagagacggggt

SEQ ID NO: 308378 - DNA, 201 bp, Homo sapiens
gcttctagaaatatttttagctctccatctccaggcgtatggtagccttacttatcccgccctcttctaagttgagcatgactctcaaactcaatcaggcractagaatgagaatatcgatatgaatgaggatatagacgtttgttgcctttagttggaatctttcagagtaagggcatgctttgctgtgttcttctatcc

SEQ ID NO: 308379 - DNA, 201 bp, Homo sapiens
gcctccgcctcctgggttcaagtgattttcctgcctcagcctgccaagtagctgggattacaggtgcccgccaccacacccggctagccttttgtactttyagtagagacgtgatttcaccatgttggccaggctggtctcaaactcctaacctcaggtgatccgcccccctcagcctcccaaagcgctggggttataagc

SEQ ID NO: 308380 - DNA, 201 bp, Homo sapiens
attttcctatttctgtgtgtgtctagtatctttttttttttaccccctctctcaacatagcctcatttagtatttggcagttttgcagttgaggtaaccartgcctcatcactccagaaatctcatattgtaaaatctttagaattaaaaaatccttatacaactgaagaaaatacaagagagtttcaatgacttgctcaa

SEQ ID NO: 308381 - DNA, 201 bp, Homo sapiens
tggtttgagtagactcactactggttgatgatgttcatcatgtgtttcatttgacacagtttcttttcactgtctgttcccatttttgaaaggtgacattytgtacgaaactgggttgacttcattttcacccttaagaaaatagaaaagttggcaacatgaagaggagtctctctcagaaccttctcttggtagcaaagt

SEQ ID NO: 308382 - DNA, 201 bp, Homo sapiens
aatccacattttctttaatctacccaggtgaattctgatacgtgataaaattattctccaaagtggaatataaaatgttgaaccatggtggctcagagaarggttttagaatactagttttatgttttgtcaattaaaagaaagctgtgttaatatttgatgtatatgttgcagccggcgccctcatgtggtctgtgtgcc

SEQ ID NO: 308383 - DNA, 201 bp, Homo sapiens
tttcagtgtttctttgagtttcatttagaccatacaagctgaccatgacatatgacttctatgtgttcagtcacttaagatcatcaaatgcctagactttktatttgaaatctttggcatcccttctaacttgtgttttgcagttaaattactttggagatgagatagaaatctgaaccaaaaataattattgtaactatg

SEQ ID NO: 308384 - DNA, 201 bp, Homo sapiens
atggctgaggaactgaattttgaattaaattaaatttaaatttaaatagccacatgtggctagtggctaccatattgtacagcaaaggcagagaaataagytttcaatcttgatcttttcctctttcatttcagcaatctttattaagcacctattaggtggcaatacattttctaggccctgggaataccaagatgcatt

SEQ ID NO: 308385 - DNA, 201 bp, Homo sapiens
taagggaaaatttagtaataatgtatattctttcttttccttattttctctgtgaatacttgtatttggcttgattctcattaactattatcttttttttyccccattgatctgtctaagcagttcattttgtgaacaatcctaattcagatgaagaagggtgaaggtgaagtttgtaaaaataatatcaaaagaaatcta

SEQ ID NO: 308386 - DNA, 201 bp, Homo sapiens
ttttattttgctccaccccttaatttgaattaattattgcacgcctgtataactttacttactatttctgcactgaactgtagctaactattgactggtaygttttctttgcatactggtttgtgaaatttgtgggggtcgaggttcaagtctcattcctctttgaatctttcctgggcctagatcagtactgcatatgaa

SEQ ID NO: 308387 - DNA, 201 bp, Homo sapiens
tggccagcacaccgggaatgtgtgcctgggaccaggagtagtagttattcatttatatgcattcagctaatcatttttgcagacgattgcatgaatataartaccccatttggagtttgcttgctggcacttgaaaatttggctgtcttatatatacgaaatgtgagagttggtactggaactgttgcataagagtccaaa

SEQ ID NO: 308388 - DNA, 201 bp, Homo sapiens
ttgcaaagtgggcggattttaagtgttccttaccaattgttaaatgtggtgagatggattttatttcccttggattcgtgctatatctgccatggaaagcmtgggtggtgttgattgtagctcagattgaaaatgacagccaggagttgcttagttaatggggtatatgttggtcctcaatttgtgcaattcattgtttaa

SEQ ID NO: 308389 - DNA, 201 bp, Homo sapiens
ctagaatccatgtttatggtctttgaatttgatcaagacagagagttattcatcaaaaagccactagacccaccatttatcacaactaatcgtgaacttawatctctgtaactcacaggtatgatgtatgtcttttttttggtagggatatttactacaggaattaatttcagacattgggagacttttatagccatttaa

SEQ ID NO: 308390 - DNA, 201 bp, Homo sapiens
agatttatgcattgggaggataggaaatataataattagagatatattaattgattttagatttttgtctgtaaaatactagtcataaatgcagttactaraatccatgtttatggtctttgaatttgatcaagacagagagttattcatcaaaaagccactagacccaccatttatcacaactaatcgtgaacttaaatc

SEQ ID NO: 308391 - DNA, 201 bp, Homo sapiens
atcttggtatttaattttgatctctcactacggaacagaatagatttatgcattgggaggataggaaatataataattagagatatattaattgattttaratttttgtctgtaaaatactagtcataaatgcagttactagaatccatgtttatggtctttgaatttgatcaagacagagagttattcatcaaaaagcca

SEQ ID NO: 308392 - DNA, 201 bp, Homo sapiens
gggaaagctagaatataaaaggtagaaaatatatacattttcagtgttccaagacactttggtggactatagaatgctttaaatgcaagttaagatgaatrttttatatttggctgggcataatggctcatgcctataatctcagcactttgggaagccgaggtgggaggatcgcttgagcccaggagttcaagaccagcc

SEQ ID NO: 308393 - DNA, 201 bp, Homo sapiens
atttaaataatttgtccactggtaacctcagctgagcgctgcccttggcagaatatgttttacaggatattaaatgtgtttaaaatattctttcatattamttggttggcatttagatgtcttaagttgttttaataaattagggaaagctagaatataaaaggtagaaaatatatacattttcagtgttccaagacactt

SEQ ID NO: 308394 - DNA, 201 bp, Homo sapiens
ttgactgctgtcgctcaagctgatgactttcaagtcttctactgcattttctctacatgaggctcctttattttcaaagaaaaaaaatgccctttatgtgkgctatttctttttctgatcatttcccatcctattttcctatttctgtgtgtgtctagtatctttttttttttaccccctctctcaacatagcctcattta

SEQ ID NO: 308395 - DNA, 201 bp, Homo sapiens
tgcttgcagggccaggcttggtttagacctataagggtggagggtttgggcttctcatctgttgtctacttccttccctgggtcactgcttgtgccggctsgtgagaactgattgttacattttcaggaattttgagagccaattattaaacacagtcttttaaaacatagacttatgtaaacttacaattaaattacatt

SEQ ID NO: 308396 - DNA, 201 bp, Homo sapiens
cagaagctctagagcatgtggtcgggtggagaaagttaagggcttaatgaagaggattggagttagactatggacagccttatgatattattctactagtgacatagaacttctttctaaggatgatagggagtaattaaagagcttcacctggaattggactacagttggttttatgtttaagaccactggttgtagggt

SEQ ID NO: 308397 - DNA, 201 bp, Homo sapiens
tgagaccctgtctcaaaaataataataataagaatactaacaatgtattccttgagtgtagtattcattggcatttttatgtcatgtgaaaaatgactctrtgactctcctgtgatacaaatatttgactttcacataataaagtcatttcttcttgaggttttttttttttaaatcaaggagaaagtgagttttgtacta

SEQ ID NO: 308398 - DNA, 201 bp, Homo sapiens
cagattccagtcttcaaagacaggcaggtgtttgccaggacacacataggccttgagcctggagggctctggcagtgattagagaaccagaagcagctcagaagctctagagcatgtggtcgggtggagaaagttaagggcttaatgaagaggattggagttagactatggacagccttatgatattattctactagtgac

SEQ ID NO: 308399 - DNA, 201 bp, Homo sapiens
ccatgttgtttaggctttgccatccttagtgggtaggcttggtccttagaatcactttccctgtgttcttaacatggcttccagaattctagatgtcaaayactgagtacaaagttcagaggagaaagggaacgtgtccctttcttatgtctctgttgaagagcatgtaacatgttcttcaaagcatcccacccctggtga

SEQ ID NO: 308400 - DNA, 201 bp, Homo sapiens
gctggagtgcagtggcatgatcttggctcactgcaacctccacctcctgggttcaagtgtctctcctgcctcagcctcccaagtagctgggattacaggcrcgcaccactacacccggctaatttttgtatttttagtagagacgggtttcactgtctgccactacagcacctcccagtttcaagcaattctcttgcctca

SEQ ID NO: 308401 - DNA, 201 bp, Homo sapiens
ctaatgagttatcttttctctcaccatctactagggtgtgaaaagggagtttcaacactcaaggccaattgagctgcatacctgctgtgccagaaagaackagttaagatttgcttctggctgggcatggcggctcatgcactttgggaggctgaggcgggtggatcacctgaggtcaatagttcgagaccagcctggcca

SEQ ID NO: 308402 - DNA, 201 bp, Homo sapiens
caaaccgtcatcctgactggcatggcgtggtatctcactgtagttttgatttctgcaacccatttcttgaattgagttgatcttgagagtttccttggacwcgggaagccacttaatccagatttcctatttctgttgatccacattcttccagcttgaaagcctttttctgggggaggaaaacaaccttcttcttaaagc

SEQ ID NO: 308403 - DNA, 201 bp, Homo sapiens
gtggtggtgttagtttcagtgtttggctgatcttgaaatgaccatcacttctctctctcagctggtaatctcctatgaccctgtttgagatcagctacctkaagggtggttatcttcttggttgtctttcttgctattaaaacttaactgtcctatgtttcgtttactttaaggcccattttctgttatgtaactgataac

SEQ ID NO: 308404 - DNA, 201 bp, Homo sapiens
ccctggagtttgatgtaaattgaaatttattatgaatcaaattcaattttaggtgttcttgaggaatctgtaaatgccagttgagaggggaaattgatttygcgttcagccctctatgatgaatatccccgtgtttgacacgtgtaagtgttccgcttatgttagttatttttcctaataacctttcagaagtgtctgcta

SEQ ID NO: 308405 - DNA, 201 bp, Homo sapiens
aaaacctaaaagggaagccagaaggaaagcaaaaacctttttgtctctttaattggctgtatctaaattttttaggtgaaacattgtcagtggcatttcawttttttataaaatgctgatatgaaccttgcagaaattaatgaactgatattgacttagtttgaaatgaacatcaagatttattgagcaaagcagtaaata

SEQ ID NO: 308406 - DNA, 201 bp, Homo sapiens
gtggagtctgactttgggtacctggagtattgtatcaagcacagagggatttagcgtaggtgtgtaaagagcctttttgttaattgggagtgagagttaaygtatttacctttgagaatgcagtcatgatactgtgttattttagatgctttgcctgccctggaagaagcactgagttgatgatctaatagcttgttacca

SEQ ID NO: 308407 - DNA, 201 bp, Homo sapiens
catttctgcctaaactcctcagtctcccctttatttatttttaaaattaatgtttatcttttctacatatccctattaatcttacagttttaaagtagaakttctttacttatttgtttaccacacttactaattgtctactgtgtgccaggtgttgtgctaaatgtgaagggccagagaagctgcccataaaattgctgt

SEQ ID NO: 308408 - DNA, 201 bp, Homo sapiens
aatcactacagataaaaacttgtactgtgaatgcatgctgcttgtctataaatatcacctgaaacagcaaataaagccatgtatgtttaactgagaagagytgagaattaatgctaaattaaaatattgtcacacagattaggagaggcatacacacacacagtctctgatgcctttctctttactgtgaacactgaataa

SEQ ID NO: 308409 - DNA, 201 bp, Homo sapiens
tgaggcaggagaatcacttgaacccaggagacagaggttgcagttagctgagatcatgccactgcactccagcctgggtgacagagccagactgtatctcaaaaaaaaaaggaaaaaaaatggctaaggaatgcttacctcatgagattattttaagattaaatgagctattgtatttaaagcatttaatacacacagtaa

SEQ ID NO: 308410 - DNA, 201 bp, Homo sapiens
gaagcattatttcagacacagctcgggctctgcactccccagttacagttctttgcccttctttgctgtcttacacccagctccctacactgagttaaatygcctccctggtgccatgaagtatttttttgtctagggactgctaaggattttagggttgggttttaagtacgttgatttctcttctgcgtcaatatatct

SEQ ID NO: 308411 - DNA, 201 bp, Homo sapiens
aaaaggtatatgcagagaagtcttatttccaccatgttggtgaattctatattccgtccccaccctatcctcccacaggtaaccatatttattagttttcrtttatccttccagggtttctttatgcaaatataattaaattatatatgttcgtaatttctgccttaataaaaggtagcatactatacatgctgttctgca

SEQ ID NO: 308412 - DNA, 201 bp, Homo sapiens
aatataattaaattatatatgttcgtaatttctgccttaataaaaggtagcatactatacatgctgttctgcacttttaaagtaggagttcttaaccagcrtaagactttaaggggttattaaacatactccctcaaggttttaaataccattttatatgtatctgtcaataactttcatcatattttcaaagtcatctat

SEQ ID NO: 308413 - DNA, 201 bp, Homo sapiens
ctcaaggttttaaataccattttatatgtatctgtcaataactttcatcatattttcaaagtcatctatgacccccaaaaagggtaaaaatcattatttcrtaagagtttacagattaccagatacctggatttgtaacaaaccatgaactgcagtaaaagatatatatggcatctagaaaaaaaatcagaaaaagatgcc

SEQ ID NO: 308414 - DNA, 201 bp, Homo sapiens
gataatttgaactgtagaatatactttgtagaagatgggttttttgttagtttcttttacctaaatgaacatattcatgacaagttgaagccttgatctgkgcttgtcctttgggagaaaattaaatcttaacctaaacaatggaaatactaaaggaatgcttgttgaaaatatgtgcaatatatattttaaaaaaaaaag

SEQ ID NO: 308415 - DNA, 201 bp, Homo sapiens
gatttctttctttattgaacttgtcatctagtcagatctgacccgtgcagttttgttttcaggactctcaaagcaaacttttctttcatggcaaaaacaartctattctagctccatctgcattaccacagaatccagattagtagatttcaaaagaaggaggtttaaccatagctactatacctccgccctgaatatgtg

SEQ ID NO: 308416 - DNA, 201 bp, Homo sapiens
tctcactttccttattcaagaatgatttgctgggtgtttattatatgccagtactttttgctacactctgtgggaacaatgggaagccaaatagacaggtrgctctagaatttctatataagattctgccactgcagagtgggtagaagcggatctagttggatttgtcttgaatcaacactggcatagcaagcactttgt

SEQ ID NO: 308417 - DNA, 201 bp, Homo sapiens
gtagagtaggtattacctgtgtggctcttcattatatgccacctcactacactgttcatataaacatcttgttttataacatgcatgtgtgtgtctgggcrtgtgtctcatttccccggctaagtgtagaatccttgaagacaaggattattgcttataattccttgtttctcctgcagcgtgccagtgtgtcttgttttg

SEQ ID NO: 308418 - DNA, 201 bp, Homo sapiens
ctgtaaaatggagatggctttgaggattaaaggtaatatatattggcacctgtagtatgtactttttggcctccaccctggagtagagtaggtattacctrtgtggctcttcattatatgccacctcactacactgttcatataaacatcttgttttataacatgcatgtgtgtgtctgggcgtgtgtctcatttccccgg

SEQ ID NO: 308419 - DNA, 201 bp, Homo sapiens
tcatttttcacaattttaataatctctatctcattttcccctgtgtagaaatagcttctaagaatcagtacaaggagaccatttctcattgttagagaaayccagaattgaaataggcagtgaccaaaattccccgtaagacatttctggcattgggctgggtgaaggtcaagcaggattattctaagaggcattcctgcc

SEQ ID NO: 308420 - DNA, 201 bp, Homo sapiens
tttaactatataaactagggcaaggctatatctgccttatttgttgtttctaatcttattacagtgcttggcacatacgtgctaaatattcagttcttacrtggttgtttatcaataaagggaaaattgattcattcattttgtcattctctttcttttgggtttgtcacactttccccagcaacctaccttaagcatttt

SEQ ID NO: 308421 - DNA, 201 bp, Homo sapiens
attcagttcttacgtggttgtttatcaataaagggaaaattgattcattcattttgtcattctctttcttttgggtttgtcacactttccccagcaacctrccttaagcattttatgagtggagttgtttcatgttcttcttttgtgtttttaaagtattagtgatttaaaaggcacctgccaaatacctggtaggtgctt

SEQ ID NO: 308422 - DNA, 201 bp, Homo sapiens
gttagtggcccaaaggatgtggaagactggtactaatcacaaggagtctcctaggtttcagattgtcctgtgtttgggtggctggctttgatgcagggatkcttaagtctggttttctcatctactgcatacctactgggtgacctggggccagttactttgtgtctctgctccttagttcctccatctgtaaaagagata

SEQ ID NO: 308423 - DNA, 201 bp, Homo sapiens
aagctctccataatgggtgagagtagtatttttgctgttgcttggtggattgaaatgattttgagatttcaaatatacatcactaatcagtgtttcttttstgggcattgtgggccttggaggctttcttgtttcatatcttctggcaccacaggtgactgttagtggcccaaaggatgtggaagactggtactaatcaca

SEQ ID NO: 308424 - DNA, 201 bp, Homo sapiens
ttaagattcctcctgctgagtgagacgtaagcatcattggctagttaatactattggttttgaaatctccactcttaccttgtcaaaatcgagagactcarattttcctgtatgatgggagtcactgtattcttcctttctaaacccatttcattattacactattcagactacttaaatgtgatattcctgatgctcagg

SEQ ID NO: 308425 - DNA, 201 bp, Homo sapiens
tatggatatattatgtaacaacatttattcatattcaatatagactcagtgaccctttcatctctctgagagtaaaacttaagaaaaaacatctatgtcamgaatgctgtttcatgtggtattcagaggagccgggctctttgtatgaaaaatgtttagactgcaaattaacacagaagagttaacacagcttgcaagtct

SEQ ID NO: 308426 - DNA, 201 bp, Homo sapiens
agagtcgaatgttaaaaacctccattagaaacattttattattactcattttatcagcaagaccttcagttcatctcacctttttcaactccttaatctcyattctacttgtcagaagtagtaagaaatattaacccaccataggaatggtctcacgcctcatttcaaatgttagtaatgcatcaaaaccctaagacttat

SEQ ID NO: 308427 - DNA, 201 bp, Homo sapiens
ctcagacttccattgacattcatatacacaaatctatatgtaaatggaccacctttgtcaaaaacagtaagacattcattgtactctaatttcaatcatgmatttgcaatcttgtaggaaaaatattccctatggatatattatgtaacaacatttattcatattcaatatagactcagtgaccctttcatctctctgaga

SEQ ID NO: 308428 - DNA, 201 bp, Homo sapiens
tgtgtgttttagaatacttattgacccatgtgtatgcagcaatgcatataatgggcccatcgctgtcattttagaatttcccttggggcagtgagtgaacratagacaatatacgaaacaaataaatgtgtactgtatattagaaggtgtgcgctacaaagcaaaaaataaaaagaggaagaaagcacaatggaagacggt

SEQ ID NO: 308429 - DNA, 201 bp, Homo sapiens
cagtcagatgaaccagtgttgtggatgaatgccggggttattttggaatcctttgtggccatgtatcttcttttcttggtggacacctcagacttccattsacattcatatacacaaatctatatgtaaatggaccacctttgtcaaaaacagtaagacattcattgtactctaatttcaatcatgaatttgcaatcttgt

SEQ ID NO: 308430 - DNA, 201 bp, Homo sapiens
ggtggcctgtttggcttctgtagagggatccatggggagagaagtagaagctgtgatcagggaggtaaatttgggcagaggccagatgtgtagggccttakagatgatttttcaggtctttgtcttttactctgaatgatgtagcatgctgttggggggtttcatgcaggtgagtgacatgatctgacttaagttttaaca

SEQ ID NO: 308431 - DNA, 201 bp, Homo sapiens
tcctaaaatgaaactgtgtttcacttagaaatagaattctacctatttttctgaagaatacttttttttttttatggtggcaactttgtttgctgtcaatrtaaatatatcgcttctgtaactctcacagttgcatgtgtttctcctccatcaatgatctgtttagcccctaaaattataataattcctgtggtctgtaaa

SEQ ID NO: 308432 - DNA, 201 bp, Homo sapiens
tatgtcgatcacaaatttagacacaatgaaaaacaagaaagccggccatttttacgttttcactgatttgctcttttttatatattctccttgtatacccstatttatttgatgcaattttatttgccaaatgcccccactgtcatgtgttggattacaaaggtgaagttctatgtcctacccttgaagaaccgtgttcta

SEQ ID NO: 308433 - DNA, 201 bp, Homo sapiens
cttgtatacccctatttatttgatgcaattttatttgccaaatgcccccactgtcatgtgttggattacaaaggtgaagttctatgtcctacccttgaagmaccgtgttctaatattccccaagggaggtcccttgttacctactgttgggaaccctgcaatgtgctggaaaacattactacattttcaagtgcaactgac

SEQ ID NO: 308434 - DNA, 201 bp, Homo sapiens
taaaataaatatgacaatgatcatattgaacaatcatatttaatacgacaatcatcatatttaatatgattgaatcatcatattaaagagtggaactctgycactctttaatgtcttctttcagttctctcttctttcaattcattcatttgtacctaaaaatatgttttaagggcttactgtatgtgagcccctgtgata

SEQ ID NO: 308435 - DNA, 201 bp, Homo sapiens
tatgaacccagattatatttttatagagtgataaattgtattttacccatgtctggaaggttatgagaactaatatgaatggcaagtacttttctgacatygcagagtattttttaaattgttagtagtaggaggagaattatcaggtatctgtttttacaaatgatggcttgcatctattatttgagtcatatgtatttg

SEQ ID NO: 308436 - DNA, 201 bp, Homo sapiens
cgtgtcctgctaacaatggacatttaattaaggttgcttttcagaagaatccaagcaaaggcggggcgtggtggctcacgcctgtaatcccagcactttgsgaggctgaggcaggcggatcacctgaggtcaggagtttgagaccagcctggccgacatggtgaaaccccgtgtctttactaaaaatacaaaacattatcc

SEQ ID NO: 308437 - DNA, 201 bp, Homo sapiens
ctccctccctccttctttttctttttctttttttgatggagtctcactctgtctccaagctggagtgcagtggtgcaatctctgctcactgcaacctctgmctattctttgtattctgttggactcgatatgtctttctctacggatctctccacgagcctttacattttttgttgtttcattctctcccgcatttcctcc

SEQ ID NO: 308438 - DNA, 201 bp, Homo sapiens
tggagtctcactctgtctccaagctggagtgcagtggtgcaatctctgctcactgcaacctctgactattctttgtattctgttggactcgatatgtcttyctctacggatctctccacgagcctttacattttttgttgtttcattctctcccgcatttcctcctgtgtcttcttgcatttgcctccgctggggcatgtc

SEQ ID NO: 308439 - DNA, 201 bp, Homo sapiens
taagtttaaacattataacattctgaaaatgtcaaaataataagtcgaaattgatggtgaatgatgcccattcttgtggataatttttccttgcattctgwgctgttttcttctgaagccttcgacctctcttcatcctagcgatgtggggactggaatgctacggaatcagctctactggctgatggcagatgcgttttg

SEQ ID NO: 308440 - DNA, 201 bp, Homo sapiens
tgaagtgagccgagatcatgcccctgtactccagcctgggcagcagaacaacactgttgcttctctttgacgtatgagtacaccatagctagcaatattastaggatttttctcctaaattcccacggaagtcatttccgggagtatgaatgagtataaggatttgtttttggatcagttttagcctctagaaaagacccc

SEQ ID NO: 308441 - DNA, 201 bp, Homo sapiens
aggagtactggtttttacatggagtctagccatcagataccggctcatctcctgcttcattttcggtgctgcgttgaggttggagatacagatgtggttgrtcatgcacagttaagtaggggagtgttttgggtctctgcaaagtaaggatgtggtagaaatagcaatacatctagagaatgatcacatggtgagtctgtt

SEQ ID NO: 308442 - DNA, 201 bp, Homo sapiens
gtactccagcctgggcagcagaacaacactgttgcttctctttgacgtatgagtacaccatagctagcaatattactaggatttttctcctaaattcccayggaagtcatttccgggagtatgaatgagtataaggatttgtttttggatcagttttagcctctagaaaagacccccttactctcctggcctaagcgtaag

SEQ ID NO: 308443 - DNA, 201 bp, Homo sapiens
cattcattttgtcattctctttcttttgggtttgtcacactttccccagcaacctaccttaagcattttatgagtggagttgtttcatgttcttcttttgwgtttttaaagtattagtgatttaaaaggcacctgccaaatacctggtaggtgcttggtgaatgaactgtcaaggtttttaatgggtgcagaaaactgagg

SEQ ID NO: 308444 - DNA, 201 bp, Homo sapiens
attcattttgtcattctctttcttttgggtttgtcacactttccccagcaacctaccttaagcattttatgagtggagttgtttcatgttcttcttttgtktttttaaagtattagtgatttaaaaggcacctgccaaatacctggtaggtgcttggtgaatgaactgtcaaggtttttaatgggtgcagaaaactgaggg

SEQ ID NO: 308445 - DNA, 201 bp, Homo sapiens
gcagccatattgtagatggaactttgggatgttctcatcacagacttactctgctttcacctttgcataacctttgtcatataatcacttttccctgtagragataatgacatagcagaggtcaagtcgacatggctggttcaatacagtcagatgaaccagtgttgtggatgaatgccggggttattttggaatcctttg

SEQ ID NO: 308446 - DNA, 201 bp, Homo sapiens
tatagctcatttttacaatgcttttttttctgtttgtttttccctctaggatacgacattgctgtgtgattcctctttcccttgaattgcctctgagtttyagtactttattttacttaaaaaacatcatggctctatattaggtctctttattcatgtaaggtgatgaaaaaaactttttatagttgaaacagtaagtat

SEQ ID NO: 308447 - DNA, 201 bp, Homo sapiens
ttgtttacctttgagcaagtggagtagctattcatattaactcacagatatttttatgatgcctaaaattcaattttgtgaagtatagttgtagtgtagtrtcagttatagaggactgagagtaatatctggttcagacctatgtgttcttatgtaagtaacataccttttctgaataattgtacctaagctacaggacta

SEQ ID NO: 308448 - DNA, 201 bp, Homo sapiens
acagccaggtgaatgttatacacaagctcatcggctgtcatcttcacgtgaccaacagctacagccagacataacaccttcttcatttggaacttgattgkggacttcacctcacccactttggccaccatgttttcgttgtgtgtgagcagggaagggaactttcctgccttatttagacctgggccgaggattcgtgga

SEQ ID NO: 308449 - DNA, 201 bp, Homo sapiens
cttgactcaccctggggatcggagtgaggagccactgtttctgctcttgcccgcctccctccaatctgttccctgcccagcagagttgtttttacaaagcrtatattggttaaaatgttctaaaattagattacagcaatggtttatgcaagtctgtaattatactaaaaaccattatatctcaataacgctgctttaaag

SEQ ID NO: 308450 - DNA, 201 bp, Homo sapiens
gatctttatgcctgaatctcagcctataccacatagtcttgataactttagatatagaacaagtcttgaatttggatagagtgattctacccactctattyttctctttttgaagatttgattccctgcctacctccaccactacccccaccttttttttttttttttggcttggaatggctactgtgttcattgcaaatg

SEQ ID NO: 308451 - DNA, 201 bp, Homo sapiens
tggttaatactttagtattgtgtgctttcctattaatatgacttttttcccaagtaaaagatgttttctcctgtcttcctctctgatcagggaaaagaaaacagtttctgtttttctttggagagctcttcaggggatctttttaaggattgactcaactttaggaatttttcagttgagctgacattcattgcaatgtgt

SEQ ID NO: 308452 - DNA, 201 bp, Homo sapiens
ggtgtaaatatgggatgatgatggtagaccattgtggagtcatcattccttgatcaacagttgcttttttactctgagttttgtttatggcactgatgaayaggtcatttcacctacaaagagactgccaagcttctgattaagagcagaacatcagccaagtagacagacatttggaaacatctgggcccttggcattgt

SEQ ID NO: 308453 - DNA, 201 bp, Homo sapiens
atatcaaggacttcccatttctcttgggacaaacacagactgctcactgtccgtgcctcatgctctgtcctcgtgtcccatcctgctctctgggtacctgwcaccttggctttctcttactcgttaccactaccacagggccattgattctttcttgatgttctcccatcttgttggcacttccccggggtagctccttta

SEQ ID NO: 308454 - DNA, 201 bp, Homo sapiens
ctgacccacgctttgccctggccctttgcatagcctggagcgtctttacatcatggggagccccagacatagggagaatctggtgaaatctgtggatcctwccctaggataataaccttcctaaaggttgcataacaccagtgctattctatgatgtgtatgaattgctgctgtgagcattcgtcgtatatcagcccttgt

SEQ ID NO: 308455 - DNA, 201 bp, Homo sapiens
gccttctcacttgcctgctcttcagaaccgacagaggtagatgccatctcaaaaaaagtaaaataaaagatctcctcccaaatagtatttgagccaccccygctcttcctattgtccctgcctaatgacacttgttattgtgtgagaaagtgttgctttaaagtataactttctctgaaaacagagagttacacctgtgtg

SEQ ID NO: 308456 - DNA, 201 bp, Homo sapiens
atttcccacttgtggcatcatatcagagctcaaaaagtgtcagattttcaagcattgaaaagattttggatttttaagatttgggatgctcaatctgtatygtaggaaagaaaaaaatgaaagggcttcaaatgttcagagatggctgaacctgtagtaaaatatacagagagatacgaagggaatagaaattagtcagca

SEQ ID NO: 308457 - DNA, 201 bp, Homo sapiens
attgtaacatttcaggagagaggatggttgggtgggccacagaggagtgttttgagaaaaacatctgattccaattgttttgaaggcagaagatgctcgtsgaggggatatcatgttgatgttatctcagggcatgcggtttatacttcttggtttaaaaaaagaacaatttgaggagagaaaatcatggacaacttacca

SEQ ID NO: 308458 - DNA, 201 bp, Homo sapiens
cgccttggcctctcaaagtgctgggattacagggtgtgagccactgcacctggcccttattttgttttatttattaattttttggtgctgggaatgctgartatatcatatattcatacatgtcattatatataaatgataaaaatcacaagagtagcaaccacatgtagccaaagtggaaagctgtccagtacattcttt

SEQ ID NO: 308459 - DNA, 201 bp, Homo sapiens
tcggccttcatgatgtacttatgggctagaattagtgatcagtcagggttttaaatccagaatgtttcatctcaaagtggaagttctttgtgttacagtgygcttgtctacctttaccttcgtgaattgagaagtttgggttgctatgctaaaagttaattcatttgatattatgtgatgtagctttatatgtcagctctg

SEQ ID NO: 308460 - DNA, 201 bp, Homo sapiens
atggcacaagcctgtagccccagctattccccaggcaggaggatcgtttgagcccaggaggtcgaggctgcagtgagccatggtcacaccaccgcactctwgcctgagcaacagagtgagaccctgtctcaaaaaaaaaaaaaaaaaaaaatccttcctgctgatttcctgtatcttgatgagaatgagttgcacctttag

SEQ ID NO: 308461 - DNA, 201 bp, Homo sapiens
catttttatattctttcccatattttactgatacatttctaatcacaagtttttgaaaaggttaatggaaattgcaatgctttattgtcatgatgcttaartgatttctttttcaataaagggtatgttattaaagagaaaaatgattttgcgacctaggcattaaagtatgcagtgccatctgtcttaagcctgggtaat

SEQ ID NO: 308462 - DNA, 201 bp, Homo sapiens
gggtgtgagccactgcacctggcccttattttgttttatttattaattttttggtgctgggaatgctgaatatatcatatattcatacatgtcattatatmtaaatgataaaaatcacaagagtagcaaccacatgtagccaaagtggaaagctgtccagtacattctttttggtcctggcacaactctgagattgatgct

SEQ ID NO: 308463 - DNA, 201 bp, Homo sapiens
tatcatatattcatacatgtcattatatataaatgataaaaatcacaagagtagcaaccacatgtagccaaagtggaaagctgtccagtacattctttttsgtcctggcacaactctgagattgatgctgtttctctaggggggaatggggacagcatgagatagaacaatttatccgaagtggcgagtgcagccaggacg

SEQ ID NO: 308464 - DNA, 201 bp, Homo sapiens
cacccaggctgagtgcagtggtgccatcacaactcactgcagccttgacctcctgggcttaagtgatcctcccacctcagctccacaggcacccacccccstcacccctccgtagctgggactgcaggtgtgcgccaccatgcccagctaatatttttaagttttttgtagagatagggactcactatgttgtccaggctg

SEQ ID NO: 308465 - DNA, 201 bp, Homo sapiens
acttccctgctgagatttatctatcagagtctcaagatgctctcattaataaagttattaacccctttgctaaccagcagcatccaaagcctaaaaaacaytacttggctttctcttttcttttcttttttttttttttagatggagtctcgctctgtcgcccaggccggagtgtagtggtgccatctcagctcactgcaa

SEQ ID NO: 308466 - DNA, 201 bp, Homo sapiens
tggctttacttctccgttgagcctacacttagtgggcccacgttgggctatgccacattcttctcagttcttggcccattccaccaatgaattcaggaatktgggttcatatctcaggtgtgctatgtcacatttttcttagttctgtttcccatggaaaacataacttttttgtgggttttctttctttctttctttctt

SEQ ID NO: 308467 - DNA, 201 bp, Homo sapiens
agacatctattttttgaaaagaagttttgtagaaattacaattatactaatgatgagtaagaagataatgttgatctcatctcatagattttatggcattgttttttttaaaggcaggatctcattgtgttacttaggctggtgggcaatcatggctcactgcagcctgacctccttctgggctcaagtgattgctctact

SEQ ID NO: 308468 - DNA, 201 bp, Homo sapiens
gaaaagaaaaacgctgccaaagcaaaagccatgcagtatgttcataataaattaccttttaaaacaaatcccaggcctactcttcccgaaaatgggaaagmcaaaaaaaaaaaaaaaaaaaaatcaaagtgccccatggcacaagttatccactgatgacatttccctctgaggactgttttctgggttagggtaattacc

SEQ ID NO: 308469 - DNA, 201 bp, Homo sapiens
atgcttgggttatttatttattaatttatccatcttcattggaaaacttaccatctggatgctgtccacattttaaaaacacataaattaaaacccaaggsaaattgactacaacatgggtgaccttcaaacctcttttattccagccagtcatttcccattctgattgtgccaaaaggaggcaggatgaagggaaaacat

SEQ ID NO: 308470 - DNA, 201 bp, Homo sapiens
agatgggctcattatcaaaaggtgaccagaggtatctgcttacaattcacattcctagcgcacccttaaaaacgctaaaacactagatattatttatgaasaagtcaaaatatcagcatgtcctctgaaaggatgcttgggttatttatttattaatttatccatcttcattggaaaacttaccatctggatgctgtccac

SEQ ID NO: 308471 - DNA, 201 bp, Homo sapiens
atgtgcgtcccagaaaggaagagaaagctgtctattatttaaagatgggctcattatcaaaaggtgaccagaggtatctgcttacaattcacattcctagygcacccttaaaaacgctaaaacactagatattatttatgaagaagtcaaaatatcagcatgtcctctgaaaggatgcttgggttatttatttattaattt

SEQ ID NO: 308472 - DNA, 201 bp, Homo sapiens
tgcttccttaactcaagttgtaacttaatgcttacttctttatttttattttatttttgagacaaggtcttgccctgttgcccaggctggagtgcagtggwgccatcacggctcatggcaacctcagactcctgggcacaagtgatcctcccgtctcagcctcctgaatagctggaaccaccttgcctggctaattttcat

SEQ ID NO: 308473 - DNA, 201 bp, Homo sapiens
attttattatgtatgtcctggaaacttgggagcattccttacccatccttttaatcaagactgagcatagtaattattttaaattaaatagcattgtggtrgaggagaggacaaaagagtgtgacccggatgagtgttttaatttgcattcattgtaagaatggggaaggggtgttggtgtggggtgagggcagccatttc

SEQ ID NO: 308474 - DNA, 201 bp, Homo sapiens
tcgtgtcagttatggccaccagaaccctgtaggggagaaaggcaatcaatgaaactgttcagtgataatattgggtttttgtcactgtatgactctatatmatttaaatgtcatgttcatttccttaattgttgacaagactgctatctttatgtgctttctctttggaaatattaatgtcaacatacatttcatttaaac

SEQ ID NO: 308475 - DNA, 201 bp, Homo sapiens
aagaaatacaagtattcctgttcagctcagtccctagccctgtctctgaagtcctttattattgcaaagtgacatatgtgaaaccttgccactgacattcwtagacttataatcctactccttcaattgctttattaatgctttggctttcagcataaaagcaagcacattggaaaccacggaaaatttctgattatgaca

SEQ ID NO: 308476 - DNA, 201 bp, Homo sapiens
ataatacctaagccttacatggttgtaggcctatgtccagcaattggtgggagcactgttaatttttaactgtaggttttatgggtgaagaattgatgtcscattaattcagggatgtattcaacatattaccaagtgctttctatgtgccagacagtgctctgtgcatttggaatgtgtcagtgaccaaaaaaaaaaaaa

SEQ ID NO: 308477 - DNA, 201 bp, Homo sapiens
gatgtattcaacatattaccaagtgctttctatgtgccagacagtgctctgtgcatttggaatgtgtcagtgaccaaaaaaaaaaaaaaaatcctgccacygtggagcttctattctagcaaggggtagacagatacaaaaacatcataaataattgcatatgttagaaggtgagaagtactttggaaaaatacagcatag

SEQ ID NO: 308478 - DNA, 201 bp, Homo sapiens
ggaaacctgctgaaagtcagacaattacctctgcaagctacctctgagtgtttcgtatttaatagaacatgttaacataataatgctgttttatggagaaragaggatgaattttgtactgataataaaaagcccacttaaaaaaaaaagaaagaaaacaaggaggtaatgaatgttgctctttcctagaattagagaaaa

SEQ ID NO: 308479 - DNA, 201 bp, Homo sapiens
agtgtttcgtatttaatagaacatgttaacataataatgctgttttatggagaagagaggatgaattttgtactgataataaaaagcccacttaaaaaaaraagaaagaaaacaaggaggtaatgaatgttgctctttcctagaattagagaaaatatatccacatgaggcagtgtctacacaagccaaaaacaggtccag

SEQ ID NO: 308480 - DNA, 201 bp, Homo sapiens
gaatattgtacgttttaaaattcagcagtgagtaggcaaatatcaggatatgaacatcccatccagacaggattgacttcgaatatgccctggtaagaagygttagtccagttgtcatggaattgtagatgtttgctgtccactgagatatgtgttatgtgcttcgttctgtacaaagggtataggagtgatattctattt

SEQ ID NO: 308481 - DNA, 201 bp, Homo sapiens
atgtggcccaacacaaatttgtaaactttcttaataccttataagatttttttttttaagcacatcattagtgttagtgtattttatggtagcccaagacmattcttcttccattgtggcctagggaagccaaaagattggacacccctggtctaaatacaaaacattgtatctcaacctcagcattttgggcttaataag

SEQ ID NO: 308482 - DNA, 201 bp, Homo sapiens
agttacttagacaatggtttgactttcttgtgaattaaagagaaagtaacataatctgtatttagcagaaccatacctggagtcacttggccatttcacaktgattttggcttgtatttgcacctttctgagcatttactccagcagtttaaattccttcattctttcaatatcttgagccctccttgccactgattttgt

SEQ ID NO: 308483 - DNA, 201 bp, Homo sapiens
agctgtattaagctgcttcctttgtccttcttatttatttatttagatacaaatctccctgttgcccaggcggaagtgtagtggtgcaattatggctcacyacagcctccaactcctgggttcaaggggatcctcctgcaacagcctcttgagtagccgggactacaggtgcaggccaccatgtccggctaattttcttat

SEQ ID NO: 308484 - DNA, 201 bp, Homo sapiens
tgatcactgatggctttttgctgcatcttgaggggagacattgcccatgaaacagttttctgagctgagcccagaagaataaccctaaaggagtgggacaratagaaaatccaactggaagaggaagtggtatggtgtactagtgtctgacacacagaagatacccaagaaataagggttgaaaaacatgaggctttatgg

SEQ ID NO: 308485 - DNA, 201 bp, Homo sapiens
tgtgctgctgctttatttcatgcataagcaaaaggagaagtaacctgtataaaaacttgtgtgccatgataggatattgctcttgctttctatcttatctsacttttttcttctttgtattcatctaggatgactgggaggggctcagggaaataaatgtcgttgcatggctgctttgtgccaagcatattgttaagtgat

SEQ ID NO: 308486 - DNA, 201 bp, Homo sapiens
gttttttttacacaatattgctgccctcctaatttttgcacatggatttccaataaatgatagaaatagtgcacattttaatttttacaacaacaacatgygaaagcctgaactttgtacaatagagtggctagcttttgactattacagatggaagatttgaggggatgattccttcacccttgttttagtacatgttca

SEQ ID NO: 308487 - DNA, 201 bp, Homo sapiens
ccccaaagatacaaaatgactcttcaacgttagtgtatttattaaaaataaaaaaggaaactgcctttttgttctccttcctatcccaagtttgattgacygtattgcagagtcataaaaggatttatattcagagttgaaaagtctccctgaaattgatttcacctagcttcttgtatataaatagatattgagaggggg

SEQ ID NO: 308488 - DNA, 201 bp, Homo sapiens
tgtcgggggacaagggggggaaagccagtgactattaatagagtaggatctgagtacattaatattggagatgccatattagtgggtcccttgctacttakttttttttacacaatattgctgccctcctaatttttgcacatggatttccaataaatgatagaaatagtgcacattttaatttttacaacaacaacatgc

SEQ ID NO: 308489 - DNA, 201 bp, Homo sapiens
aggcagtttggaagggttatggtctttttgcagtatgcaagtcagatgcccaggacacactgtgatttgtgaggtgcacttgttgactttttcctgtgagrgtttgcttcctaaggcgttgagaacccttccattatcttgctaaccttgctacggattatcctgagggagtagcagacaaggtggtgagtggaacttggt

SEQ ID NO: 308490 - DNA, 201 bp, Homo sapiens
tgcctcacccttcactaaatggcttctaaaatttttttctggaattttagagattgttgattccaggctaggcagtttggaagggttatggtctttttgcrgtatgcaagtcagatgcccaggacacactgtgatttgtgaggtgcacttgttgactttttcctgtgagggtttgcttcctaaggcgttgagaacccttcc

SEQ ID NO: 308491 - DNA, 201 bp, Homo sapiens
gacatccattttcccccacaagttcccataaaagccgtggggctgacccttactggactcaacttggggcatggccccatccttgacctaagtatggcccrtggggctgtgctgaaggtggttccttagaataaatactgggcaggcaaaaacaatataggtgctgactgggcctagggtattctaggatattctatgtct

SEQ ID NO: 308492 - DNA, 201 bp, Homo sapiens
tttctcaattgtggtaaagctaaggagccgatttcctttgtaactgctgagcagagaccaaggtacaggtctgaaggaacttataaagtcagtattttggractggatgcagcggctcatacctgtaatcccagcactttggaggccatggtgggaaaaatcacttgaggccaggagtttgatgccagcaacatagcgaga

SEQ ID NO: 308493 - DNA, 201 bp, Homo sapiens
ctcagggtctagagtattaggtatatttttgttactttatggagcctaagcttgctgctacatgggagggagctctacttgctttacttcctgccaaaacrcaagatgcactttatgacaatactgatttggaaccttctagggatttttttgttttaattgccaatggcagaaggacactattatggtactattttatac

SEQ ID NO: 308494 - DNA, 201 bp, Homo sapiens
gagaaatgtagactagtatttgtgtttacgccagttgaggacctttttaaatagtggacttgagcttaactctctgcttcttcttgcttttgatgaggaamagaattcacttacacatttcactgggaaaagaccttcccatgtgcattactactagcgggaacaaaagctggaactgatggtctgcaaggtcatatgtca

SEQ ID NO: 308495 - DNA, 201 bp, Homo sapiens
gcttcttcttgcttttgatgaggaacagaattcacttacacatttcactgggaaaagaccttcccatgtgcattactactagcgggaacaaaagctggaaytgatggtctgcaaggtcatatgtcatcatatgtcaaaaacttcagagctttgcagatttttttaaccttgcattatgctgggattattgcattgttctag

SEQ ID NO: 308496 - DNA, 201 bp, Homo sapiens
gtgaccttactaatctatatatgtgtgtctcccagataaaacttttatctatagcaaaactgaaaagaaggtgatatgggcagattttctaaatctatatrgttttgccatcatggaaacagaggtagaagaacctagagaaggttggggagggcatcaccaattcacagtgagtgaactttctttgttactggactctaa

SEQ ID NO: 308497 - DNA, 201 bp, Homo sapiens
ttcacagtgagtgaactttctttgttactggactctaacatcacagttgggtagcacctttgtggtacatctcagcagacaccatacactaagcagggcawtgctgaaagtcataactcaggaaagtgagatcagagtgcgggatctcttgtcagatatccaacagctaaatgttgtctgtcctggggcattaatagataa

SEQ ID NO: 308498 - DNA, 201 bp, Homo sapiens
tgtcttatagtcctagtcctgaatttttttggtcccctgcaaactcttaaaggctttttttttttttttggcttgatctcactctgttgcccaggctgggrtgcagtgacgcaatcacggttcaccgcagccttgacatcccccaggttctagcagtcctcccacaccagcctccccagtagctgggactacgggcatgtg

SEQ ID NO: 308499 - DNA, 201 bp, Homo sapiens
gtcttgtgtttcatctggcctggcttcctctgatggaagtcatatacctaagagtattttaattgtatctatttccacagcactgagtatctttgggtgtrtgacttatatccagtctcctttctaaggaatcatatggtttccataggaagaatataatgatcgatattaatacgggaaccttattgaagaggaaaatga

SEQ ID NO: 308500 - DNA, 201 bp, Homo sapiens
agaggtgttccaattaagagaaatgtgaaacagttatagaaatagaaacgacagtcatatggttggttatatctcacttttcacagttggcatccctgttragaattatgtttccatccaaatcttgtcactagaatcagattcgtagttacatcatgggagccaactgttccagtgatctatatggcaaatcactcatac

SEQ ID NO: 308501 - DNA, 201 bp, Homo sapiens
gatattttgggacaaagagtattcttgaaaagttgcttatctttgaaatgcttaggttaacgtagaaattttatcgttgtcaccccctcattcctgaaccycgcagtctcaacttgttttccattgtaagaagacagtggatatgtacatttagcttaaattaagtggaattgtaccatagtttcacattacttttattgt

SEQ ID NO: 308502 - DNA, 201 bp, Homo sapiens
atgggagccaactgttccagtgatctatatggcaaatcactcataccatgaagcatacttctataatatgattagtcacctcctaatttgagatttttgtktccccaagttttcattaaaaggaagcttctgggctattaaagatgcattgatatgcctacagcatgatagatgcacatgaaatactcctataacagataa

SEQ ID NO: 308503 - DNA, 201 bp, Homo sapiens
tattttgggacaaagagtattcttgaaaagttgcttatctttgaaatgcttaggttaacgtagaaattttatcgttgtcaccccctcattcctgaacctcrcagtctcaacttgttttccattgtaagaagacagtggatatgtacatttagcttaaattaagtggaattgtaccatagtttcacattacttttattgtgt

SEQ ID NO: 308504 - DNA, 201 bp, Homo sapiens
gggaataacctagcctgggaacagtgattagggtgaatgtgatcagtggtcatgtgtcctgacacccttacattatttttttccagaatgtccaccccccsgcttaaagacatcttttttcacttttctcacagggtcagaagggaaatcccaagggtcgtcagaatgaaagggtagtgatccagtatcactatacacagt

SEQ ID NO: 308505 - DNA, 201 bp, Homo sapiens
aattttatcgttgtcaccccctcattcctgaacctcgcagtctcaacttgttttccattgtaagaagacagtggatatgtacatttagcttaaattaagtsgaattgtaccatagtttcacattacttttattgtgtgagtatgagacaacatacatattcatttataaaaacaacaggaatttttgcaagagaaaaacag

SEQ ID NO: 308506 - DNA, 201 bp, Homo sapiens
ggagcaggcctggtggctcatgcctataattccaacactttgggaagctgagatggaaggcttgcttgagcccacgagttcgagcccagtctgcgcatcayagtgagacctaatctgtaccaaaaaaaaaaaaaaaaaagaaagaaagaaagaaaaaaattagctggacatggtggcatgttcctgtagtcctggttactt

SEQ ID NO: 308507 - DNA, 201 bp, Homo sapiens
acctcgcagtctcaacttgttttccattgtaagaagacagtggatatgtacatttagcttaaattaagtggaattgtaccatagtttcacattacttttaytgtgtgagtatgagacaacatacatattcatttataaaaacaacaggaatttttgcaagagaaaaacagatttcactagtggttttcaaaacacagaatc

SEQ ID NO: 308508 - DNA, 201 bp, Homo sapiens
gtgtgtgagcagggaagggaactttcctgccttatttagacctgggccgaggattcgtggaatctgcttgatcagagactctgaggccaaaaacgcatcayacttcttggccagcttcttgaccagttttttattctttttgagttttttcagcgcctcgatgtccatgtgggggatatccacggccttagcctcgtcaca

SEQ ID NO: 308509 - DNA, 201 bp, Homo sapiens
atcagagactctgaggccaaaaacgcatcatacttcttggccagcttcttgaccagttttttattctttttgagttttttcagcgcctcgatgtccatgtrggggatatccacggccttagcctcgtcacagtgctgctggtcccccaggacacacacacacaacttagggcggggagtggacttaagtctgacggtgccc

SEQ ID NO: 308510 - DNA, 201 bp, Homo sapiens
acttcttggccagcttcttgaccagttttttattctttttgagttttttcagcgcctcgatgtccatgtgggggatatccacggccttagcctcgtcacartgctgctggtcccccaggacacacacacacaacttagggcggggagtggacttaagtctgacggtgcccgagaagcacttgtccttctgggggtcatagt

SEQ ID NO: 308511 - DNA, 201 bp, Homo sapiens
ggggatatccacggccttagcctcgtcacagtgctgctggtcccccaggacacacacacacaacttagggcggggagtggacttaagtctgacggtgcccragaagcacttgtccttctgggggtcatagttcttcaagctgatctgcaactccaccgtctccaggaacttgcggcgcttgcgctggttccggtgcaggac

SEQ ID NO: 308512 - DNA, 201 bp, Homo sapiens
ggagtggacttaagtctgacggtgcccgagaagcacttgtccttctgggggtcatagttcttcaagctgatctgcaactccaccgtctccaggaacttgckgcgcttgcgctggttccggtgcaggacttcccgcaccgcctcgtacagggtgttgcgagagactgctgctcatggcttctcacgccgcgctaaccggaaa

SEQ ID NO: 308513 - DNA, 201 bp, Homo sapiens
gacggtgcccgagaagcacttgtccttctgggggtcatagttcttcaagctgatctgcaactccaccgtctccaggaacttgcggcgcttgcgctggttcyggtgcaggacttcccgcaccgcctcgtacagggtgttgcgagagactgctgctcatggcttctcacgccgcgctaaccggaaaagagcgggtctggtaat

SEQ ID NO: 308514 - DNA, 201 bp, Homo sapiens
tagttcttcaagctgatctgcaactccaccgtctccaggaacttgcggcgcttgcgctggttccggtgcaggacttcccgcaccgcctcgtacagggtgtygcgagagactgctgctcatggcttctcacgccgcgctaaccggaaaagagcgggtctggtaatatttttatctttttttgcttcgggctggaaatgaggt

SEQ ID NO: 308515 - DNA, 201 bp, Homo sapiens
cgcaccgcctcgtacagggtgttgcgagagactgctgctcatggcttctcacgccgcgctaaccggaaaagagcgggtctggtaatatttttatctttttytgcttcgggctggaaatgaggtaggctcagtagaagttctgagaagagacagagtttatggaaactccctgatgaaaatacctgtcactcattcagctct

SEQ ID NO: 308516 - DNA, 201 bp, Homo sapiens
gttaaaatgtcattagagatgacctctttgaggaggagaatgcagcaatgtacagcatatactgctgggcttctctgtgtcttacataactgatattccartttctcgctgtgctataacatgactaaaagtcctcctaagcttttcactgaaaaacgacttcccctccataaaccatagtgggcttggtgctgtaacact

SEQ ID NO: 308517 - DNA, 201 bp, Homo sapiens
aggtaaaactgatcccagtaaaaatagaccctcagagagggctagcttcaaatcagctttgtcgaaggtttaaatattttattttagttattttattaaaytttctttctttttcttttctttttttttttttttgagacagggtctcactctgttgcccaggctggagtggagtggcacaatcacggctcacttgagcct

SEQ ID NO: 308518 - DNA, 201 bp, Homo sapiens
acataaaacatgaagcactaaataatattgagagagcctcgctgagccctccacaaatagtacattaatgtcaaggaagtgttgaggaattcccagacagygttgtagttcaataatgaccgttatttatcacaaacgtgcactctgtttgttcacattgggtaatgaatgacctttctgtttccgtggccagggccaaac

SEQ ID NO: 308519 - DNA, 201 bp, Homo sapiens
tttatttctgtttttttttcttatcttctatagatgatcacagtagggtgaagttaagacctttaccaggaaaagactctaagcacagcgactacattaaygcaaactatgttgatgtaagtcagaactgttattataaacctgtttctagaaattgaagactgcagcagaaactgtttaatatattttaatactgtacag

SEQ ID NO: 308520 - DNA, 201 bp, Homo sapiens
ttatttctgctataaataccagtgtataaaatgggttaagacccctctggagatttttttccatgtgaattgaattttgaataatatatggtacgtactawagtgaaagtttcttaactgatcttgtaacagagaaaatgtacaaaacacatattttggtgtctgaatactgatattctcttctcaaactggaaaactaac

SEQ ID NO: 308521 - DNA, 201 bp, Homo sapiens
agaattaaaagaagatgaactcaaataaagtatattctattattgacatgtttttctcttttctacacagaaaatgttttcagactgctcatttctatgtsgaagacagcagttcacctcgagtggtccctaatgaaagtattcctattattcctattccgggtaagtaagacactgctcttatttccaatgggctaattg

SEQ ID NO: 308522 - DNA, 201 bp, Homo sapiens
aacacatattttggtgtctgaatactgatattctcttctcaaactggaaaactaaccagagtcacggtcaaagataaaacagtaaaaactcatatttgttkattcatccattcattcattacatgtttattgagcacctatttgtgctagccaatgtactaactacttactaaattcccattcttctgttactgagagaaa

SEQ ID NO: 308523 - DNA, 201 bp, Homo sapiens
cttggtggccaattgaaaatactgtattctacacctgttctcttttgttttttgtccatttagagggtgtaacaaaataaagtccaagggctttcccagaygtttccgtgaagtgccttcttctggggagagaggagagaaggggagcaggtgaggggcggtcaagcttaagtggggggcgtcttgatggccgggactggc

SEQ ID NO: 308524 - DNA, 201 bp, Homo sapiens
ttatgtctgagtagtattccattgtgtgtgtgtgtgtgtgtgtgtgtgtgtgtgtgtacacagtttctttatccacgtgttgatttatgagcattacctcrttctccttctttttatttgaagggtggagtagagttagcctgaggtgcaggtagagtctcctgactgaaagttataaattgaattctacatatgacccta

SEQ ID NO: 308525 - DNA, 201 bp, Homo sapiens
gtcactgtgagttggtgggagaagtgagtttgaacccaggtctcctctttgctagtttgtaattgtttcctttttcacaagtagaaaagacaatgaacaamaatgagaattgcatgaatatgagtttagagtctcaattagtttattattattattattattatgtttactcttattccctagtgagacagaattactttt

SEQ ID NO: 308526 - DNA, 201 bp, Homo sapiens
agtatgccagttagtcatttattacctctcagttacaagtttgccttttcttgcccaactttgtaatcttggtgtagaaccctggaaacatttctctctckctctttttttttttattattattaaagttctgggttacatgtgcagaatgtgcaggtttgttacatacgtatacacgtgccctggtggtttgctgcaccc

SEQ ID NO: 308527 - DNA, 201 bp, Homo sapiens
aagtatcccttctggtcataaagaaagtcatcaggacatattgtaagagaaaaatgagagctgtttcatcagtttttacttctccaaagcaagcgcttagygaaaatgtattacaacagccccttgaggtgtgagtattacctctatttcacagaaggggacactgggccttagaaatctccaggctcttcaatatacaaa

SEQ ID NO: 308528 - DNA, 201 bp, Homo sapiens
aaggcaaagagaaggcgaggtagggaaggggcaaactagtccttttataaggaacttactctcccagtaacaaacccactccctccttaatgacattaatycattcatgagggcagtgctcccatgacccaaacacttcccattatgctccacccaacactgctgaattggggagcaggtttccagcacatgacctttggg

SEQ ID NO: 308529 - DNA, 201 bp, Homo sapiens
ttagaaatctccaggctcttcaatatacaaatccggtcttattctatagcaaatactcttagatcttcatctaatactgccaactttatggatatttttcygtaagctgtaagagtgtgaactgggctgtaacaggggctacattctccaaggtagaagcctgttagaaagaagtgagagaagatgatagagttcagagct

SEQ ID NO: 308530 - DNA, 201 bp, Homo sapiens
cctcaatgctgctgttttctgtacctgtcaaatgtccttagtaatttgttaaaatagtttaatatacatagaatggtaacagtcaccagtgccagtcattmccttgaataaaatgtgttaggtcttctcttaacaggtcatgacctgaacacaaggttctgagcatccccttcccactaattctgatggtatgccattgaa

SEQ ID NO: 308531 - DNA, 201 bp, Homo sapiens
gagtattgattctaggactccctgtggataccaaaatttgcagatgctcaagtcccttatcgtcggccctctagatccttggattttgatctgctgttgaytgaattcaaggatgtggaacctgctgctgttagggaggcctgactgcatatttgatggaaataaatggtatagaacatttaatgttgaattttactttcc

SEQ ID NO: 308532 - DNA, 201 bp, Homo sapiens
tatcgtcggccctctagatccttggattttgatctgctgttgactgaattcaaggatgtggaacctgctgctgttagggaggcctgactgcatatttgatkgaaataaatggtatagaacatttaatgttgaattttactttccctggtctattagtttagaataccaccagctgcccacattatctagggcatgtaagtc

SEQ ID NO: 308533 - DNA, 201 bp, Homo sapiens
tgagcccaggagtttgagaccagcttgggcaaacaaaaattaactaggtatggtggcacatgcctgtactcaagaggctgaagcaggaggatcagtcaagyccaggaagtcaaggttgcagtgagctgtgaccttgccattgtacttcagcctgggcaacaaagcaagacctcatgtcaaaacaaactgtgatttctccac

SEQ ID NO: 308534 - DNA, 201 bp, Homo sapiens
ctattagtttagaataccaccagctgcccacattatctagggcatgtaagtccatttgttaaagggtctgatttaatctttttaccatgtaggatttggtkttaggtcattgtcctgaacttaataaattggtttggatttcctgtgtgttgtgggcttatgtcatctttaatttaatctattaaaatggataaatctgca

SEQ ID NO: 308535 - DNA, 201 bp, Homo sapiens
attactaattaagggaaacccattgagcttactattctcccatgttttattttaaagaccagtaagttaaatgcttcaagtgtaagactggtcatactgarcacagattaaatagacaaactacagaaaaatgcaaataagtggttgaggttgcttctggttatgatccatagaaattgtaaacaccagaacataatacaa

SEQ ID NO: 308536 - DNA, 201 bp, Homo sapiens
ctgtccccgtcctgtctcttattttggggctttattacttgatgatagagtgaagagctataagacacgctcattaaactcggccatcagttaaggtgtgrctccgcttagagtcggggaccagtgcccaagagatgtgatgccattgagtggggccacaagagaagatgtgagcttggatggtatattcgtttgctaggg

SEQ ID NO: 308537 - DNA, 201 bp, Homo sapiens
tgatacatttaaactgtggaggcatcaggggaccaacctgcagtgatgctaagtggaactgacaagataatgacatgcgggttattgttgattaatccagktcactggagaatcattgggaaatgcatttatcctttcacctgaccctcccaaccccacaaaaatgatttacagtaatcttggagtcacccagtcctttct

SEQ ID NO: 308538 - DNA, 201 bp, Homo sapiens
atgttcacctggtgttctccctggctgtgtgtgtctgtgtccaagtttctccttgctgtaaggataccagttgtactggaataaggcccaccctaatgacytcatcttaattaatgatatctgcagtgacccaatttcaattcaacacatacagatggataggaagatagctagttttgtgtctctaaaatcttagttaag

SEQ ID NO: 308539 - DNA, 201 bp, Homo sapiens
gtgtgatctcggctcactgcaacatctgcctcctgggttcaaacgattctcctgcctcagcctcccaagtagctgggattataggcacctgctaccatgcmcagttaatttttgtatttttagtagagacggggtttcgccatgttggccaggctggtgtcgaactcctgaccttaggtgacccgcctgccttggcctccc

SEQ ID NO: 308540 - DNA, 201 bp, Homo sapiens
aaatagaccctcagagagggctagcttcaaatcagctttgtcgaaggtttaaatattttattttagttattttattaaactttctttctttttcttttctttttttttttttttgagacagggtctcactctgttgcccaggctggagtggagtggcacaatcacggctcacttgagcctccctggctcacgctatcgtcc

SEQ ID NO: 308541 - DNA, 201 bp, Homo sapiens
ctaagttgggaggactgcttgaacccaggggttaaggttgcagtgaaccatgatcttgctactgcactccagcctgttcgacagagcaagaccctgtttcaaaaaaaaaacaaaaccaaaagcagtgtatgcccagtgctgagttaggtgctctgctcaccataacttgcgttatctttgtaacagtcttagaaggctggc

SEQ ID NO: 308542 - DNA, 201 bp, Homo sapiens
atgaagtgcttagtgtactgcacttcttggcacaaagtaaaggttccttgtcaacgattcctaatattaataataataatttgtctggactttcctatagttttttttttttttgtaaaataagttggttctagtcagtcatcctcaaggactatgattctacgaagtcacccaatggtgttcatttgacacccttcctgt

SEQ ID NO: 308543 - DNA, 201 bp, Homo sapiens
attgttaatttcacacatctagtctttgaataaatgttgaaatttcccttaagtgaaaacagcagggttaactagaagtgaactgcacatggagagaaaaytgtctgcacagtgctagcagaagtacatctaaaaattagccaaatgtaccgaatgcctttctcaattattttagtgtagtcaaaacagtgctatcttatt

SEQ ID NO: 308544 - DNA, 201 bp, Homo sapiens
tttgaacctgggaggtggaggttgcagtaagctgaaatcgtgccactgtatattccagcctgggtgatagagcaagactgtctcaaaaaaaaaaaaaaaaraaaaaaaaaaaaaagaaaatatttgccaactcctgcttatagtaatatagcctgggtttttagcagatgttagtctggtataacttttcacttctcattt

SEQ ID NO: 308545 - DNA, 201 bp, Homo sapiens
ttgaacctgggaggtggaggttgcagtaagctgaaatcgtgccactgtatattccagcctgggtgatagagcaagactgtctcaaaaaaaaaaaaaaaagaaaaaaaaaaaaaagaaaatatttgccaactcctgcttatagtaatatagcctgggtttttagcagatgttagtctggtataacttttcacttctcatttt

SEQ ID NO: 308546 - DNA, 201 bp, Homo sapiens
tctctgtggaggtggtttcacaagtgattgtaaagttaatggatgctaatgcattaatatattatcagaggacatgaatacattccttaggggccttgtgrccattggaaaagtctagcagtaagatgaaatactgtttagtgctgtgttgttatcaagtggtacatatcagtggtaacaagatttcaattgttgctgtga

SEQ ID NO: 308547 - DNA, 201 bp, Homo sapiens
gattcataattttttttaatgacctttttattttagagtagatggctaaatggtatcaaattcaggcagttttctttgtaacaattttgagggggagaaamagaaaaaaacctaaaagggaagccagaaggaaagcaaaaacctttttgtctctttaattggctgtatctaaattttttaggtgaaacattgtcagtggca

SEQ ID NO: 308548 - DNA, 201 bp, Homo sapiens
ttcgagaccagcttgggaaacaaagtgaggacctgtctctacaaaaaaattaaaaaattagctgggcatggtagctcacgcctgtaagtcccagctactcrgaaggctgaggtgggaggatcgcctgaacccagtcaaggctggagtgaaccctgatcacaccactgcattcccagcctgcgtggcagagtgagaccctgt

SEQ ID NO: 308549 - DNA, 201 bp, Homo sapiens
aggttgaggtgggcagatcacttgaagtcaggagttcaaaacaagcctggccaacatggtgaaacttcatctctactaaaaatacaaaaaaattagccagrcgtggtggtggacacctgtaacccagctacttgggaggctgaagcaggagaatcgcttgaaccctggaggtggaggttgcagtgagctgagattgtgcca

SEQ ID NO: 308550 - DNA, 201 bp, Homo sapiens
tgggtgcctgtaatcccagctacttgggaggctgaggcaggagagacgcttgaacccaggaggtggaggttgaagtgagccgagatcatgcccctgtactycagcctgggcagcagaacaacactgttgcttctctttgacgtatgagtacaccatagctagcaatattactaggatttttctcctaaattcccacggaag

SEQ ID NO: 308551 - DNA, 201 bp, Homo sapiens
cttttaacaaaagatacctaatcagtgctggtacaaaaatgcttaaattaagcagaatgcttcttaaggaattaattttattgttaatttcacacatctartctttgaataaatgttgaaatttcccttaagtgaaaacagcagggttaactagaagtgaactgcacatggagagaaaattgtctgcacagtgctagcaga

SEQ ID NO: 308552 - DNA, 201 bp, Homo sapiens
cattccccaccctgggggagggtgttcacccccgttctgctaaagatagagctagggccctccccaggaacttcctggcttttattagtttgtaatcccawacgtaacttttcaaaggtttttcttttggaagtgtgggtgtgaaaatgcttccttaatcacatcgaacgggaggatctccgaccatctgtactttatttg

SEQ ID NO: 308553 - DNA, 201 bp, Homo sapiens
gacggtaaccataagccctttagtgctgcagaccagcaagtttatgaagtatgttgtattttggggtgagcataggaacactagactcaccttcatgtcaycccttctccaggaaaaagtattgtgcaaatatgtttgaagcccattggtaaactggaggccacctagtgtgagtttaactaatcaagtgaggttaacaag

SEQ ID NO: 308554 - DNA, 201 bp, Homo sapiens
acacacacacacacagacacacgcacacacgcacacacatgcacgcacagcgtaactccggcctataattcatgaattttagctaagttactctagctaarttgatcttgcagtcttgagttcaaaggctggaaacctgagctcaatctgtgttgcagtgtagaggcagaattccctcctcttaaaaagacctcaggtctt

SEQ ID NO: 308555 - DNA, 201 bp, Homo sapiens
tgaggcaggagaatcgcttgaacctgggaggcggaggttgtagtgagctgagattgagtcactgcagtccagcgtgggcaacagagcgagaccttatctcaaaaaaaaaaaaaaaaaaagttagcaaaggaaaaatatgaacaggtgaataaatttggcaaaatcttattagcaactggggaatatacatttatggtacta

SEQ ID NO: 308556 - DNA, 201 bp, Homo sapiens
tgggggcactgcagagggaagtcagaggtggggctttccctcctgctctctttgttgcttaagggccctgtaggcagctgatcagcaagagggaggcccarccagtgccactcatctcagcagctctcaaaacagctgcagcccacaccctccagcagatgtctttctgggctgctccttctaatctatgctttctggtaa

SEQ ID NO: 308557 - DNA, 201 bp, Homo sapiens
ccctccagcagatgtctttctgggctgctccttctaatctatgctttctggtaaatttttccacaacccagtgagtcactcttctgggtatgtgctggtcmgctctcactccacagagtttcttcatcacctagtgggccattcctataaaccatcaccagcacaccctctggcagtttctttgccagaggttccatgttc

SEQ ID NO: 308558 - DNA, 201 bp, Homo sapiens
agaagccacctacaaaaagaattgccaccaaactaccaacttgtgaccaacagctattttgttcagcatgctcaataattgattttagtctgattacatcrgacgttccataatcaggtgctgaatattttccccagcgcgactttattgagtacaaaataaataaatgccctcttatgcttccataatatgaaggcattt

SEQ ID NO: 308559 - DNA, 201 bp, Homo sapiens
cttgtgaccaacagctattttgttcagcatgctcaataattgattttagtctgattacatcggacgttccataatcaggtgctgaatattttccccagcgygactttattgagtacaaaataaataaatgccctcttatgcttccataatatgaaggcatttatccactcagtagagatttattcagtaacgtctgcaggc

SEQ ID NO: 308560 - DNA, 201 bp, Homo sapiens
cctgttgcccaggcggaagtgtagtggtgcaattatggctcactacagcctccaactcctgggttcaaggggatcctcctgcaacagcctcttgagtagcygggactacaggtgcaggccaccatgtccggctaattttcttatttttttgtagagacaaggtcttgctttgtggcccagcctagtctggaactcctgggc

SEQ ID NO: 308561 - DNA, 201 bp, Homo sapiens
ggtagacctttacgagtcctatctgggcattagaggcagggactgcagtcatttttgctaagttttcagaggttctgttggtgaaatgaaagagatcacarctgatatcagggtaacacctggaaacattaccatctccctaagatgtatgtacgttcgtgtctgtgagtagtggtcctgaaggaatgggaaagaaaaaca

SEQ ID NO: 308562 - DNA, 201 bp, Homo sapiens
aatcatgtcttgatattagaagatacagattttcctcatcctttttaactacttcatagttgacactaaatggcggtgccataattcatagtaggtagctrtttatggatttattagagtaacttcagattgtcatcctctgataaaaaatactgatatgttgtattgatatgtttatgcccgtatccacttatccacatt

SEQ ID NO: 308563 - DNA, 201 bp, Homo sapiens
cacaagtttcttgtgcttttatgatattctttctctttcctacatgtagtagccaaagtacttcatatacttcaactgtttgagttatgtaacagagtcaktaagaagcagaataaggaatgttaacctctaaacataccaagataattttttaaatgtgtttatttatttatttgagacaggatcttgctctgtctctga

SEQ ID NO: 308564 - DNA, 201 bp, Homo sapiens
gacaggtgcatgccaccttgccctactaatttttagttttttgtagagacagggttcactatgttgtccaggttggtcttgaactcctggcctcaagcaakcctaccatctcagcctcccagtgtgctgggattacaggcataagccaccacacccagccataaaaatgttagtaactattttaaagccccaaatcactat

SEQ ID NO: 308565 - DNA, 201 bp, Homo sapiens
gtgatgactcttgcaggattttttgttgttttgttgctgtctgacacagcttccttttggtttttttaattgagaatttctgtcatccttcaagtgagagkcatacagtcaagaaaatcacccggtagattaatttagctggtgtaacatggtcctgaacttggaatgaaaggagacagagcgcctgtgtattttggagga

SEQ ID NO: 308566 - DNA, 201 bp, Homo sapiens
actttaggggcttctccaggtttgctgattcttgacagatttgtccacaatgttctcatctttgaatcttcgacttacgacttacttaaaactggtgatgkttctttttgtttttgtttttttttttttttttttttggagatggagtttcgctcttgttgcccatgctggagtgcaatgccgtgatctcggttcactgca

SEQ ID NO: 308567 - DNA, 201 bp, Homo sapiens
aactcccgacctcaggtgatccacctgcctcggccttccaaagtgctgggatcacaggcatgggccactgcgccctgccgatggatctctttatcgggagrtataaatgcatcaaaatttgtggagctgtagtgaaatttgtgctttgtttttacttggtggcttcctttcttttttcaaagacctaatgagaatgtttaa

SEQ ID NO: 308568 - DNA, 201 bp, Homo sapiens
ttttcatgtgccctaagggacagttatgttgtataaagagcaagtcccccaagtgtcctccccacttcgggtctgcagaaaaatgattgattatgaggaakgtgatttcagtaatgcaggcaggattaaatgcttgccatctatcgacactttgcagtgccttaaagagagcttttaaaattttgggctatcactaaaaaa

SEQ ID NO: 308569 - DNA, 201 bp, Homo sapiens
acataggaggattgcttgagcctgggaggttgaggctacagtgagctgtgattgcaccagtgcactccagcctgggtgacagaaagcaagaccctgtctcaaaaaaaaaaaaaaaaaaaaaatcttggtatttaattttgatctctcactacggaacagaatagatttatgcattgggaggataggaaatataataattag

SEQ ID NO: 308570 - DNA, 201 bp, Homo sapiens
ctgaggcaggagaatcacttgaacctgagaggcggagggtgcagtgagccgagacgatgcctctgcactccagcctgggtgacagagtaagactctgtctaaaaaaaaaaaaaaaaaaaaaaaaagaatgaatgaatattgtgatgatctctgaatcatcttcatgttccttctttgccaattcccatcggggccaaccag

SEQ ID NO: 308571 - DNA, 201 bp, Homo sapiens
gtgtgatcttggctcaccacaacctccgtcccccgtgttcaagcaattctcctgcctcagcctcccaactagctgggattacaggcgtgcaccaccacgcstggctaatttttgtgtttttaatagagatggggtttcaccacattggccaggttggtctgaaactcctgaccttgggtgatccaaccgcctcagcctccc

SEQ ID NO: 308572 - DNA, 201 bp, Homo sapiens
gatcatagctcactgtagcctcagcctcccaggctcgagcgatcctcctgcctcagcctcccaagtagctgggaccccaggcatgcaccaccatgcccagttttttttttttttttttttatggtagagatgggatactactatgtttcccagggtggtcttgaactcctgggctcaagcaattctctttcctcaacctcc

SEQ ID NO: 308573 - DNA, 201 bp, Homo sapiens
ccatttgctctcattatgaattacaattcttttaaagaatttagtatgcatatccttgaccttttttgaaattaaaaattatcttgaaaatttacctctcygtctgtaatttctgtggtgtgctcaagaacagcttaatagtctgaaaacggatgaatttaaaattagagagttgaaggtcgtaacccagcagtgataact

SEQ ID NO: 308574 - DNA, 201 bp, Homo sapiens
ggttacagagggaactaattttattgagttatcaaaatattaaaatttgtgattggcaatgcgtgaacattttattaacacattacaagatctactagcasgtataacaactatcataatattaaagttgtcatgaatgcctgtgacattttgagatacctgcagcaactgtaatgtgagtgatttctcacaatgacaaat

SEQ ID NO: 308575 - DNA, 201 bp, Homo sapiens
actttacccttggtttcacaaatagcttcactgaaacattacaagagaaattctcagtctcagaatccctttcatttcagaaattctttgacttctgtgatttttttttttttttggtttggtaatttttcctgaaattcagttattcactttgtgatttaattatttcatctaggaaaatatgtcgaataagtcattcat

SEQ ID NO: 308576 - DNA, 201 bp, Homo sapiens
tcatatctcaggtgtgctatgtcacatttttcttagttctgtttcccatggaaaacataacttttttgtgggttttctttctttctttctttctttctttctttctttctttctttctttctttctttctttctttctttctttctttctttgagatggagtctcgctcgattgccaggctggagtgcagtggcgtgatct

SEQ ID NO: 308577 - DNA, 201 bp, Homo sapiens
tgaggttgagcgtcctgtgctgtccccgtcctgtctcttattttggggctttattacttgatgatagagtgaagagctataagacacgctcattaaactcrgccatcagttaaggtgtgactccgcttagagtcggggaccagtgcccaagagatgtgatgccattgagtggggccacaagagaagatgtgagcttggatg

SEQ ID NO: 308578 - DNA, 201 bp, Homo sapiens
ggtgcatgccaccttgccctactaatttttagttttttgtagagacagggttcactatgttgtccaggttggtcttgaactcctggcctcaagcaatcctmccatctcagcctcccagtgtgctgggattacaggcataagccaccacacccagccataaaaatgttagtaactattttaaagccccaaatcactatggta

SEQ ID NO: 308579 - DNA, 201 bp, Homo sapiens
gatgactggcccggaccccagtaactctgaatggcagctgatatattttggtaatggataagagttgagggtcagtctcagtgctaaaaggtgaagagccwggtctgctgttgagcacaagtgaaggaaggaagaacaacctccatgtgtggaagacggtgaatcagggcagccacatcttggcccagacagctctagaag

SEQ ID NO: 308580 - DNA, 201 bp, Homo sapiens
gagttaaagctcagattttcaggtcatcagaaaaatagagattttcagagcatcgtcacatgtttctcatctcttatcttcctacctcttgatccataccygagtgacctgactaccaaccagacagagttttaatctccctcaggtttcatggaaggtggtgtacagagtatctaaaattcatagataaccttcctattg

SEQ ID NO: 308581 - DNA, 201 bp, Homo sapiens
tttagtaattcaaaactcctctcgttccagaaaaggaattaaaatagcttacaggaatatgtaagagtcaataagaattccatggggacaaaaaaatagtrtctgtgtgttaggatataaaacagggccagaaatgagattaatataaaaatacatatcatgaagtttgagataccttttatgggttgaaatagttacctt

SEQ ID NO: 308582 - DNA, 201 bp, Homo sapiens
agcacaagtgaaggaaggaagaacaacctccatgtgtggaagacggtgaatcagggcagccacatcttggcccagacagctctagaaggtgcgctcccttygtagccactggttaagtgtaatattataattttccatcacatggtagtaatgtgtctggaggaaggatcacctttttctagatcatgcagatcacctttg

SEQ ID NO: 308583 - DNA, 201 bp, Homo sapiens
ggggtgtttattcgataagtggattattgtagcaactctcatgacagctgtaagaggtttattgtcagtgttgtctttattgtcagttgttgtcagagttkggggaattgagtctcaaggaggttaagttacttgcccaaagtcaaccagctaaccagagcccagaacccaaacctgaaggtctgcccaactcttaaagtc

SEQ ID NO: 308584 - DNA, 201 bp, Homo sapiens; identical to SEQ ID NO: 64277

SEQ ID NO: 308585 - DNA, 201 bp, Homo sapiens
ctctagcataagaacaagccaaaagaaacagttacatggaaacgaagcccacagtttgcaccatgatttcattcttcttttcatcatttctgatttgccayctcaaccttggttccaaaacattttgaaatatatccttccatactttttttctcattgcatgcatacaagtgtattcccgtattttgattcattttctgc

SEQ ID NO: 308586 - DNA, 201 bp, Homo sapiens
tgttttctttgcttacaagcttttggtggtttaaaatggcagaagacattggacaatccatgacatacttaggacatttatagtcacctctttcttcttgrctctgctaaattgttttgggagttttacattttttctcctgagccgtttctttatccccctttcgaaacctagctgtatggttgctaaattgataattat

SEQ ID NO: 308587 - DNA, 201 bp, Homo sapiens
tacactaaaacacacatactacattcactagagagctcttcagggttctgtgtgtctttactttctatgacacttgcagaagaacgtgtaccctgagactkctgctttattagaacctggtgacccaattattattcaaacggaccatctttagtcatttatagagggttaaattatgtttaaggaggcaatgaagcatgc

SEQ ID NO: 308588 - DNA, 201 bp, Homo sapiens
gaattcttgccatgtgcctggcatcgtgtgaagtattttatgtggattatctcattggtctctcctcagccctctgaggaaagtacagccctaagagggargtattattaatatctccgttttccagactgaagaatctgaggcttaggacagttaagtaatttgtttgtgtaaaactggaattggcaaactttttctata

SEQ ID NO: 308589 - DNA, 201 bp, Homo sapiens; identical to SEQ ID NO: 64278

SEQ ID NO: 308590 - DNA, 201 bp, Homo sapiens
gggatttaggggagagagttgttattttagcctgggaagacctctctgatcaggtgatacttgagcagacatctgaacacagagggactgagccttgtggstatgtgaggtaagcattgcaggtagagggaagcgggggagataatagcacttggaaaggttcaatgttataccttaaactactctgtgaattttaattag

SEQ ID NO: 308591 - DNA, 201 bp, Homo sapiens
ttcaccatgttggccaggatggtctcgatctcctgacctcgtgatctgcccaccttgggctcccaaagtgctggaattacaggcgtgagccaccgtgcccrgccagatttatttttaaaagctcattctgactcagtggttctcatccctgcctgcacatcagaatcatcaagggagcttttcaacatccagatgcccagg

SEQ ID NO: 308592 - DNA, 201 bp, Homo sapiens; identical to SEQ ID NO: 64280

SEQ ID NO: 308593 - DNA, 201 bp, Homo sapiens
gacagtggtgttcagaggatataggcattatagaggaaccagcaggtaacatattattgagtactgaagatgtgggtataagacctttctgaaaagcttgyatagtgccccagttgtacaagcttctaaaattcaggtagacctccctgttccttttggaggtcttgagaagttgacctagggtatattttctgagccttg

SEQ ID NO: 308594 - DNA, 201 bp, Homo sapiens
gaaaacaaattgcacaatctccatttgtatttggttttagaaatggaaaatgtactcttcttaagtcagttttcagtaacttttggccaaaggatattttrggacaaagagtattcttgaaaagttgcttatctttgaaatgcttaggttaacgtagaaattttatcgttgtcaccccctcattcctgaacctcgcagtct

SEQ ID NO: 308595 - DNA, 201 bp, Homo sapiens
aagcacagagtaaaactaccccctcttaaaagaaaaaaaagctttaggatatgtaattagtttacacttaattgctgtggatatgaaacagcagcacccaygccactgcataacactctgtgacttgttcagtggcacctttcacttaggttctgtgctgcaattaattggttttctatgtttgtttaaacataaaagcta

SEQ ID NO: 308596 - DNA, 201 bp, Homo sapiens
tccatctggtatcttcttactttgttaattcagttattctatctacaattgtttctcacattgatgacttaggaatttcaggaatggatgagttaggaaartgccaatgaccatggaaatagagaaaaaggtataccaaattttgggtgctttttgagttttctgtcttatgggtaaatgatatttttgtgcctttttctc

SEQ ID NO: 308597 - DNA, 201 bp, Homo sapiens
actaccccctcttaaaagaaaaaaaagctttaggatatgtaattagtttacacttaattgctgtggatatgaaacagcagcacccacgccactgcataacrctctgtgacttgttcagtggcacctttcacttaggttctgtgctgcaattaattggttttctatgtttgtttaaacataaaagctactgaaaattctata

SEQ ID NO: 308598 - DNA, 201 bp, Homo sapiens
attgctggttcaaactgtatatagataaacacacacataggatagatattgatgggtggtaaaagttttctaattggttcagatgagaagatttaaaaatyacttaaaagagaataaacaacatcttgtctataactattctaggtggtttgtttttctaaaaataatgtaatattttaaaaatgtttctagatgatttca

SEQ ID NO: 308599 - DNA, 201 bp, Homo sapiens
tgggttcattacagaagccagggcccccaacctgtcttgtgggagctagaactagatcatcagttctatgagggcagagcactgtgatttgttcaatgacrtattctattccgctactcagttcttggcatacggttatctactgatatggagcaaattactacaaactcagcagcttaaaataacacacatttatcatct

SEQ ID NO: 308600 - DNA, 201 bp, Homo sapiens
cggcactcaggtttggctttagaatgcaaagtgtgccttggccttcaaaactaactcactgctttttccttctttacttacagaaagccaccattagccaygtctcacccgatagcctttacctgttccgagtccaggccgtgtgtcggaacgacatgcgcagcgactttagccagacgatgctgtttcaaggtgaggctg

SEQ ID NO: 308601 - DNA, 201 bp, Homo sapiens
gggcatggtggcgtgtgcctgtagtcccaactactcaggaagctgaggcaggagaattgctttaacccaggaggtggagtttgcagtgagctgagatcgtkccactgcactccagcctgggctggagtgagactccatctcaaaaagaaaaaaacatgaacattttggttctgatgtgagctgccaattttttctcatcct

SEQ ID NO: 308602 - DNA, 201 bp, Homo sapiens
atggtgacctaatttggtgggatgattgctaaagttctggaacaggccctttgtagctgatttttgttgaattgataagcatcgaatatactaaatataattttttgtgcctaggtctcttccaaaacttgcataccatttttagcctgaactcagtgttatcattttggtcttttaaagtggagggagggggagagggag

SEQ ID NO: 308603 - DNA, 201 bp, Homo sapiens
cccgggcaacatggcgaaaccctgtctctactaaaaatacaaaaaaaaaaaaaaaaaatcagttgggcatggtgatgtgcacctgtaatcccagctacgtrggaggctgaggagggagaaccacttcagcctgggaggtggaggttgcagtgacctgactgtcacactccagactgggcaacagaacgagaccgtctcaaa

SEQ ID NO: 308604 - DNA, 201 bp, Homo sapiens
gaaagtatgggtcattcatgaaaaggaaaaacaaaaatcctttgagcatcccagcaaaaagactctgtcactataaggaaaggaaaattggattcttgtgmaactttttttttctttgacagtagtgttatatgccaaaaagacaatggagtatcatatttaagatatgcaaggatagaaaatgtgaaccatgaattttat

SEQ ID NO: 308605 - DNA, 201 bp, Homo sapiens
tttgtctgctcttcttgttttctttttttttttgagaccgagtctggctctgttgcccaggctggagtgcagtggcgtgatcttggctcactgcaagctcygccgcctgggttcatgcccttctcctgcctcagcctcccctgtagctgggactacaggcgcctgccacctcgcctggctacttttttgtatttttagtag

SEQ ID NO: 308606 - DNA, 201 bp, Homo sapiens
cctagttgacctggcgcattttagaacccttcgttttaagctgaaggttatgatatgctctttcattcatggtaataattgcttgagtctggatgagtatmgtgttttgttttgttttgttttgttttttaaatagagctagggtctcattctgttgcccaggttggagtgcagtggtacagtcatagcttactgaagcct

SEQ ID NO: 308607 - DNA, 201 bp, Homo sapiens
cagggagcctgcattcttccctgacagcagtgtctcttcctagtcagtccctactgatgagtgatattgtgaacttagccatttatatgatctgccacacyccatgagacagttgtatttgcatccatgatctaagaatttgttttcagttcattaaccatttgaaaaacttaattcttaggcactcctgccaatgagctt

SEQ ID NO: 308608 - DNA, 201 bp, Homo sapiens
gcagcagaacaacactgttgcttctctttgacgtatgagtacaccatagctagcaatattactaggatttttctcctaaattcccacggaagtcatttccrggagtatgaatgagtataaggatttgtttttggatcagttttagcctctagaaaagacccccttactctcctggcctaagcgtaagggcagtttatcgcc

SEQ ID NO: 308609 - DNA, 201 bp, Homo sapiens
tatagtattctattgttgaaaatatgttgcagaggtgccatatgcagtggctcatgcctgtaatcccagcactttgggatgccagatcactcgaggtcagragttcaagaccagcctggccaacatgatgaaataccatgtctattaaaaatacaaaaattagccaggtatgatggtgcatgcctgtaatcccagctattt

SEQ ID NO: 308610 - DNA, 201 bp, Homo sapiens
atttctgcaacccatttcttgaattgagttgatcttgagagtttccttggacacgggaagccacttaatccagatttcctatttctgttgatccacattcytccagcttgaaagcctttttctgggggaggaaaacaaccttcttcttaaagctgcatgaaattttgctgctcccaaaggcatcatttagtagctctgccc

SEQ ID NO: 308611 - DNA, 201 bp, Homo sapiens
ggccttcaaaactaactcactgctttttccttctttacttacagaaagccaccattagccatgtctcacccgatagcctttacctgttccgagtccaggcygtgtgtcggaacgacatgcgcagcgactttagccagacgatgctgtttcaaggtgaggctggcttcccctcctgtggccggggtgcccctgagactccct

SEQ ID NO: 308612 - DNA, 201 bp, Homo sapiens
aaatacatagattatttttacatgaataatatgctgtatttatcattgtattgcttgtttttttcatttggtaatagtttaaaaaatacttgattgttgayccctaatacatttagcatagtctttttagttacagtatagtattctattgttgaaaatatgttgcagaggtgccatatgcagtggctcatgcctgtaatc

SEQ ID NO: 308613 - DNA, 201 bp, Homo sapiens
acaaagggaaagtgcgcctggtgatttgctgcacctatcaacccatcacctgggtattaagcccagcatgcattagctattcttcctgatgctctccctcrcccctccctgctctccaggccccagtgtgtgttgttcttttccctgtgtccatgtgttcagctccctctttaagtaagaacatgcagtgtttggttttct

SEQ ID NO: 308614 - DNA, 201 bp, Homo sapiens
agtccgagggacaattctgcactggatcctattatccacgggttgaagggtgtcgtacatcatggtaagtatgccacatacacttccttttgctgggatgygaagggctcagatctctacctaaaagaatcaggttatcttgcagaggacagagggtgacacctattcctcatcccctgatgttgaagggcattagagcca

SEQ ID NO: 308615 - DNA, 201 bp, Homo sapiens
tgggatatgtattatactctgcaacccattcctttgtttttttacattttattttaagttcaggggtacttgtacaggatgtgcaggtttgttacaaaggkaaagtgcgcctggtgatttgctgcacctatcaacccatcacctgggtattaagcccagcatgcattagctattcttcctgatgctctccctcgcccctcc

SEQ ID NO: 308616 - DNA, 201 bp, Homo sapiens
aaaataacacacatttatcatctcagtttctgtgtgtcctcagattcaaggtttctcacaaagctacaatcaaggtgtcaactgggactatgatctcatcygaaagttcaactggggaatgattcacttctaattttacttagattgctagcagaacccagttcctcaagggctatttgactgaggagcttagcttctctt

SEQ ID NO: 308617 - DNA, 201 bp, Homo sapiens
gggaatttcagagtgataggcctgacttggtagggttttgggatatgtattatactctgcaacccattcctttgtttttttacattttattttaagttcargggtacttgtacaggatgtgcaggtttgttacaaagggaaagtgcgcctggtgatttgctgcacctatcaacccatcacctgggtattaagcccagcatg

SEQ ID NO: 308618 - DNA, 201 bp, Homo sapiens
ggactgaaggctttcatgctgaccgcgagggaaggtgagaccgggagggagctggctgtcctgaagctcaggccaccgctgccgcctgctgagctagctgygcttggcaccggacttggctcagaatcacactggctaatttttaaaattcttttctagagatgttgtgttgcccaggctggtctcaaactcctggcctca

SEQ ID NO: 308619 - DNA, 201 bp, Homo sapiens
gtttgccctcgatgtgtgaggttgggtcagcctgaacatgatacggaagcctttggtctctagagagggttagatatagattgatactaaactatgacctyttccatttatgaaaattactcttcaggacgatataccttcatcaaggtataggaagttattggacttcccttaggctgtgtccccttatctgtaaaattg

SEQ ID NO: 308620 - DNA, 201 bp, Homo sapiens
cttgtctcttatatttttcatgctgcatgcatgatgggaatttaaagccatccccactcagtgttttctggatttcgagccttttgtaaatggagtgcccytgagtagctttttgcttccagggaatgaaaaaacaagggtgagagttcacatctaatgtgttttggttgaagtcacttgctacatgtgaaaacagtcggc

SEQ ID NO: 308621 - DNA, 201 bp, Homo sapiens
agtggggaagagcataatcacttacatctgccatgggggctcagcatgaggagtggcaggagtaccagtgtttgccctcgatgtgtgaggttgggtcagcytgaacatgatacggaagcctttggtctctagagagggttagatatagattgatactaaactatgaccttttccatttatgaaaattactcttcaggacga

SEQ ID NO: 308622 - DNA, 201 bp, Homo sapiens
aaaattcatttcctcaagtggccttctctgaccatgaatctcaattctctggagatgaataacctgtgaattaactagtttccattaatattatgaattamcagtaagtaagccatgtccgtgctcaagctgcgtttgaagtggggagggtgaatcctattagcatttataattgtgtttcgttttcatattaatcccttc

SEQ ID NO: 308623 - DNA, 201 bp, Homo sapiens
taataaaagttaacatttgctgaggacttaactgatgtaaaatgctaatgacaactactatacagtgtctcacttaatcttcactgggacccctcaaggtrttattacctccattttatagatgtggaagctgagacatggagcttttttcagtataaattactcaaaattacacaggccactaagtgttggagccagcat

SEQ ID NO: 308624 - DNA, 201 bp, Homo sapiens
ctagtttccattaatattatgaattaacagtaagtaagccatgtccgtgctcaagctgcgtttgaagtggggagggtgaatcctattagcatttataattrtgtttcgttttcatattaatcccttcccaaggctgaggaattaggagttttctcatctgccgatggaaaccagtcctaggagtctgtccctgtcaaatcc

SEQ ID NO: 308625 - DNA, 201 bp, Homo sapiens
agatcattctctggaaagtatcatgatttagggccaactggtgctctgagagcattctgcagctagaatgaactaatttattcaggcgggtgtgttcaacrtattttttcataggtacatgaggacataattcatatcatggtaatggtgaactttattagaagtaacagaaaaactccatttggttttgaaactcacttt

SEQ ID NO: 308626 - DNA, 201 bp, Homo sapiens
attggtcaggttggtctgacccctcccacatctccaggtttgtatctagaatgttagcatcaagagtgagtgggagcgtaaagaatactgtttgctaaggkaatggaactgctggccaatccagaagtctttggtcagtttatttctttgggtgagtgagacctatgagcttgacttacttccttaaaggttagatgattt

SEQ ID NO: 308627 - DNA, 201 bp, Homo sapiens
taaaatgctaatgacaactactatacagtgtctcacttaatcttcactgggacccctcaaggtattattacctccattttatagatgtggaagctgagacwtggagcttttttcagtataaattactcaaaattacacaggccactaagtgttggagccagcatttcaatggcaaccatatatctccagggtctgtgctct

SEQ ID NO: 308628 - DNA, 201 bp, Homo sapiens
ttgaagtcagaatgaaagaagctacagcatccttgccacgtggctctttaggtaagagccacggaaggaggggagattcagatgtgaaatcaaacatcctsagaagtgcttgcccttgtcctcatacagcaaattagcttctgaatacacagttacctgctaactgctggggtgggtgaatcctcttctctgcaattctgg

SEQ ID NO: 308629 - DNA, 201 bp, Homo sapiens
ttgtcttctttcaacaggtgcctatggtcctgagcactgggtcacgtctagtgtcagctgtgggggccgtcaccagtctcctattgacattttagaccagyatgcgcgtgttggggaagaataccaggaactgcaactcgatggcttcgacaatgagtcttctaacaaaacctggatgaaaaacacagggaaaacaggtag

SEQ ID NO: 308630 - DNA, 201 bp, Homo sapiens
tggtttggagatggccaccttctctgtgtgtcttcacatggccttccctgtctttcttcttcctcttacagggacatcagccttaatggatcaggcccccsacacttttgcccacatttaaccttattcacccctttaaaaaccctgtctccaaatacagccctgtgagggcttcaacatatgaatgttgcaggggaggca

SEQ ID NO: 308631 - DNA, 201 bp, Homo sapiens
tttctccctagaattggcatcttgagccacgtgacatgaagacatcctcatctttctcaattcctgctccctgaagctcagagccactctgatccttgccytttcaaagctggattgtttggttcttggttggtgtctctgagatgtccaaggttctctcaatacattcttttaatgcctacgttaaccaagggttgattt

SEQ ID NO: 308632 - DNA, 201 bp, Homo sapiens
cactgggacccctcaaggtattattacctccattttatagatgtggaagctgagacatggagcttttttcagtataaattactcaaaattacacaggccamtaagtgttggagccagcatttcaatggcaaccatatatctccagggtctgtgctctcagtgaagaactgaatgggaaaagttgggttttctgttgaagag

SEQ ID NO: 308633 - DNA, 201 bp, Homo sapiens
tacagcatccttgccacgtggctctttaggtaagagccacggaaggaggggagattcagatgtgaaatcaaacatcctgagaagtgcttgcccttgtcctmatacagcaaattagcttctgaatacacagttacctgctaactgctggggtgggtgaatcctcttctctgcaattctggaaggccatgtggagtctctggt

SEQ ID NO: 308634 - DNA, 201 bp, Homo sapiens
cctctcttccagcgttgacagaaggctacgttggggccctgcacgagaatagacacggcagcgcagtgcagatccgcaggcgcaaggcttcaggcgacccrtactgggcctactctggtaagtccagttgttctaatggagatcacacaggccagttaacatcccattcaactcacttgaaagcacactttgaatcacttt

SEQ ID NO: 308635 - DNA, 201 bp, Homo sapiens
gaatatccaggacccatttcgatctgtattctttagttactaaatctttaaaatttaaaatattagggtttttaagcccatataattcaagaagtaaatgytttatatgttgaattatgatttgggcaaatgcatcttattgttttagggcaaaaaacttaagctttcttctattaaagtgatttaataagcactttgtaa

SEQ ID NO: 308636 - DNA, 201 bp, Homo sapiens
agatatattgtttcaaaaaactactggtatcatagcctgtttctcattttttacctttgcatacaactcatggaaactaatggctaaattttgctgtgtascaaatgattccagttagttaaaacagatcgttttatgggtcagtaggttggctggtcagttgtgggtatggctagttcagcccatctctgtggactgcag

SEQ ID NO: 308637 - DNA, 201 bp, Homo sapiens
atctttaaaatttaaaatattagggtttttaagcccatataattcaagaagtaaatgctttatatgttgaattatgatttgggcaaatgcatcttattgtyttagggcaaaaaacttaagctttcttctattaaagtgatttaataagcactttgtaagtgtgtaatgaggatgatttgggttttattacaaatgatgtca

SEQ ID NO: 308638 - DNA, 201 bp, Homo sapiens
aacgtctccagacatggtcacatgtccctcttgtagggcaatatctcccccatttgagaaccactgctctcttctggagatgctgaggcttaggagagatrgaagtgtgtgcagtgtgtgttattgtcagagaggacacactaggaacagcaacccaacagggaaaatttgtaagagtaaaaaggaatgtggaaaattttc

SEQ ID NO: 308639 - DNA, 201 bp, Homo sapiens
tttttttttttttttttgagatgaggtcttgctctgtcacccaggctggagtacagtggcaagatctctgctcactgcaacctccaccacctgggcaagcrattcttctgcctcagcctcccgagtagctggatctccaggggcctgccgctatgcctggctaatttttgtatttttagtagaggtggggtttcaccctgt

SEQ ID NO: 308640 - DNA, 201 bp, Homo sapiens
aactggacatttctttaaaaaaaaaaacaaaaaacccagttttccaagtcaccaattccatgcacttaaaatgctgcaaatttcaggtgaagtaaaataayattatagtttatgttcatgtcattgatagcttggaaaattcacattttacaactctttttttttttttttttgaaatggagtctcattctgtcgcccagg

SEQ ID NO: 308641 - DNA, 201 bp, Homo sapiens
ctggtataaccatacagattgtttaaaatctttaaataaatacttggcccaatcccttttgttccccctttctcgctgccctggaaactccttctcttatyttgggaccttttaaaaatcctaccttagacctgtaaacccactctgtaccatctgctgtgactgattattatctctgatttgttaaatgatttaagtttc

SEQ ID NO: 308642 - DNA, 201 bp, Homo sapiens
ccactgcattcccagcctgcgtggcagagtgagaccctgtctcaaaaataataataataagaatactaacaatgtattccttgagtgtagtattcattggsatttttatgtcatgtgaaaaatgactctatgactctcctgtgatacaaatatttgactttcacataataaagtcatttcttcttgaggtttttttttttt

SEQ ID NO: 308643 - DNA, 201 bp, Homo sapiens
gtaaatattgacccagccaaagataaggtcaatatttactttgacatagcataaatcctaatattcattaatgtataaatttattgtgtcaacacaaggcmtacagaagttgtatataaatatttttttcatatctgcgatgaatcagagtcaaacatcttttttcttggttataaatttaaaaggacaatgttctcttct

SEQ ID NO: 308644 - DNA, 201 bp, Homo sapiens
tggtcccattaatgaataaagctgaagaatccagagactacacccaaaagttaattgcggttatcattgagaaatgagggatactaccttttaatacttayatttctataatattttaatattttatagaagcatatctagaatatttcaatttcttctaccagtagattcataattttttttaatgacctttttatttta

SEQ ID NO: 308645 - DNA, 201 bp, Homo sapiens
cttctgcttctcagaatttctctttctgaaacacgtgtgcatgtctccaaagtagcattgtgtttaacagcctaagtgaccaaaatagggacttgggtaaytataatacatgcttacaatgaaatgcttacctgaacatccaccaaaatggaggaggttgaactacaggatgtattaaaataatatgggtaatatggtccc

SEQ ID NO: 308646 - DNA, 201 bp, Homo sapiens
ctgtgatggggtatttaaaacatgggtaaatggaatactgagagtttgggttttaaagtgactctgaaggtagtggggtgatggatcctttttggaggagrgctttttggcaatatctgtgaaaatgttaaatactgctcatctttcatccagcacttctgcttctcagaatttctctttctgaaacacgtgtgcatgtct

SEQ ID NO: 308647 - DNA, 201 bp, Homo sapiens
aataagtaaatgaggagtggtgggttggttgaaaagatgaagaattttgactagaacctattaagatgtgttatagtgttttgtctgcatttcttatgccstttagagttcatgctctttgaacagaacctttgtctgtaattagtcattgtatttccctgttgctacctaaatgtttttggataggagggcttcaagata

SEQ ID NO: 308648 - DNA, 201 bp, Homo sapiens
agtgaagaactgaatgggaaaagttgggttttctgttgaagagggtagagggagaagtatatattattggtcccagttattgtcatctgcatataattgcsttcaggcctctcagttttgctgatagctgaagaggtattttcttgtaacttaaaattatgttcttctttttgtccatagttacaatcttcgatcctaaat

SEQ ID NO: 308649 - DNA, 201 bp, Homo sapiens
tttgggtttgtctaagtttgtttttcattgttacacgagtatgccggagactggttaatttattttacttcctccctccctccctcccttttcccttttcrcttccctccctcccttctttccctccctccttccttcctttttctattttcttttaagagatgaggtcttacagtattgcctaggctggtcctgaactcc

SEQ ID NO: 308650 - DNA, 201 bp, Homo sapiens
agcaacccaacagggaaaatttgtaagagtaaaaaggaatgtggaaaattttcagtcaccttaaaattaattctaggggtggctcttgattcctctgaatkgacctgaaaacatcaaattggattgtgctacacagtgaaaggttcatcaatatctcaacttcattatgtgagaagtggattagatataaatactatcaat

SEQ ID NO: 308651 - DNA, 201 bp, Homo sapiens
tcatcctcaaggactatgattctacgaagtcacccaatggtgttcatttgacacccttcctgtatccagtggggtgctgcctttgtctcattgtgggtttycctctcttccagcgttgacagaaggctacgttggggccctgcacgagaatagacacggcagcgcagtgcagatccgcaggcgcaaggcttcaggcgaccc

SEQ ID NO: 308652 - DNA, 201 bp, Homo sapiens
gtaagagtaaaaaggaatgtggaaaattttcagtcaccttaaaattaattctaggggtggctcttgattcctctgaattgacctgaaaacatcaaattggwttgtgctacacagtgaaaggttcatcaatatctcaacttcattatgtgagaagtggattagatataaatactatcaatgggggatgggggaagcaggagc

SEQ ID NO: 308653 - DNA, 201 bp, Homo sapiens
caactggtttttattggaagaatttccctgcaactgtattatctgcactgcatcattacctatgacatcaagatcctctaatttcaaaagtacccttgtcrcagtgaggtgtgtagtcgagatgtaatgtaatgatttgcaaagttttaataatctaattagaattccagagacgttgacagaaatagcattagtaaccat

SEQ ID NO: 308654 - DNA, 201 bp, Homo sapiens
cagatggatggcatctagaggatacaagccagagatgctgctaagcaaactacacagcacaagacagccctcaacaccatagaattatgtggcccaaaatrtcagtagtgctcaggttgagaagccctgctttagaggatagtattctctggttatcttcattaaccagatattaaccagatattggttatcttcattaac

SEQ ID NO: 308655 - DNA, 201 bp, Homo sapiens
tgcatggtgaactgaatttgtttcagctcttaattttttaccttgtagctataattctctggctgctgttgctgtctttaaatccggttcaccagccaccyggagcattccaataacacaggcgttttaaggttttcacttcaacatctgtgctttggaaattgagaagagaccacaatttaggaatatgctgagaaggag

SEQ ID NO: 308656 - DNA, 201 bp, Homo sapiens
cagcttcaatgattgctctcaattggtcattgtcaacttatgcttctcatcttcaaggctctcttctcttttgcagaacttcttagaccactgctgcactrtatgttcattagcagttcctgggccaaatgcattgttgatgttgtgagttatatctgccgttttacaacccattttggactcaaataagaaaattgcttg

SEQ ID NO: 308657 - DNA, 201 bp, Homo sapiens
cagtttagagcagtagttctcaattgggggtgattttgccccccaggggacatttggccatgtctggagacttttttgcttgtcacaactgcagatggatrgcatctagaggatacaagccagagatgctgctaagcaaactacacagcacaagacagccctcaacaccatagaattatgtggcccaaaatgtcagtagtg

SEQ ID NO: 308658 - DNA, 201 bp, Homo sapiens
aatctttaactcctttgaagggccagcgtgaggatactgggaaggttcctgtgggacagttttataattgaaccagggaactcctctgtgcctgctcataygtgatatggataagtcatgcagcaccggtcctcctgcatccaggaatgggctgacattgatctgttcactcttcagggatgctgtctcaactacttgcac

SEQ ID NO: 308659 - DNA, 201 bp, Homo sapiens
gaaatgtgtttaccctgcgaacattccaaagttgtctgtgctttgtccagaatccctggatgccattcattaaccctcccctcccctcccctcccctcccytcacctctttgtctgacagagtcttactctgtcacccaggcgggagtgcagtggtgcattcatggcttactgcagcctcaacctcctgggcttaactgat

SEQ ID NO: 308660 - DNA, 201 bp, Homo sapiens
gctttctcagcttaaagtgggaaaaatgctttctgtgggcttaaaatgtgtctcataaatcttccaaatccctgtgtagaaagagtcgcctagtcctgcaycctcagatgttaattcctcttctcaggctttatggacagtgtggtaatggagggaaataggttactcattactgggattcaatttggctccactgatggg

SEQ ID NO: 308661 - DNA, 201 bp, Homo sapiens
tacacatacatattcatggacatatgaatacatgctttttaaaacgtgcactattagggaaactgtactggtgcactgtaatatacatgcagcattgtcartctgctggcttatcaagcactgtgctagtggactagatatagatgagatacaggaaggtcttttcccgtaagaagagcagtctcatgtgagtgggcaata

SEQ ID NO: 308662 - DNA, 201 bp, Homo sapiens
ttattaacagtattcccaacttcttcattttatttctcttaaaaaagcatattctgctttaacagtccttctaaagctaattttatttttaaaaatgagcrtaaatttgccatttgctttgcaaaacaaacctgcaatcaatatagtatttataatagagatgtcatataattgtgggattaaaccagattaactttgatg

SEQ ID NO: 308663 - DNA, 201 bp, Homo sapiens
ggtctgtcacccaggctggagtgcagtggcacagtcacaactcactgcagcctcaacctcctgggctcaggtgttcattctgcctcagcctcccaagtagrtgggaccaaggcacatgtcaccacatctagctaattaaaaaaaatttttttttggagagatggggtcttactggtctcaagcaatcctcccaccttggct

SEQ ID NO: 308664 - DNA, 201 bp, Homo sapiens
tctgacttgtttaggagttgatttttttaagactttaagcaaaataaagcttaatctagtggagactctcaaaaggaatgatgtgtcactccttttcaaartatatgtgctttaactatatagtaatgttttaaagcttttattaatgctggggttctttataatgagaataccattcattggtcatttattacaaaccta

SEQ ID NO: 308665 - DNA, 201 bp, Homo sapiens
tgtgcacagtggctaaggtattagagaataaagtgagtgtcatggtgttcaatcatctttggagattaaagagtagaaatggaaagcttggcaagttgacsatttcagaaatctgtgcatgaaatcataaaggaatgaatcacacttctggtcgtggtgaaaagcctacctcgtaatgtcacatggaggtgatgaatgttg

SEQ ID NO: 308666 - DNA, 201 bp, Homo sapiens
attctcttcctaatagagacctccttcttcttcttctttttttttttcttttgagatggagtcttaccctgttgcccagatctcagctcactgcaacctcygcctgtcgccctgatctcagctcactgcaacctccgcctcctgggttcaagctattctcctgcctgcacctcctgagtgtctgggattacaggcatgtgc

SEQ ID NO: 308667 - DNA, 201 bp, Homo sapiens
tgggattacaagtgtgagccaccacacccggccagaggcatttttatatataaagttattttctctcttgccactcaaagactagagaaaaacaggtggtmgtttcttcccttcctctgcttttttttgttttaacttaattctgtttcatttttcacaattttaataatctctatctcattttcccctgtgtagaaatag

SEQ ID NO: 308668 - DNA, 201 bp, Homo sapiens
acaaaaattagctgggtgtggtggcgggcacctataatcccagctactcgggaggctgagggaagagaattgtttgaacctgggaggtggaggttgcagtragctgaaatcgtgccactgtatattccagcctgggtgatagagcaagactgtctcaaaaaaaaaaaaaaaagaaaaaaaaaaaaaagaaaatatttgcca

SEQ ID NO: 308669 - DNA, 201 bp, Homo sapiens
tgccaggctggagtgcagtggcgtgatctcggctctctgcaagctccgcctcctgggttcaagcgattctcctgcctcagcctcccgagtagctgggactrcaggcgtgccaccatgcccagctcatttttgtatttttagtagagacgaggtttcaccatgttggccaggatggtctcgatctcttgacctcatgatccg

SEQ ID NO: 308670 - DNA, 201 bp, Homo sapiens
ggatccgtaaaggcattcatttgcataatttaattttctgcacagaagatattgaaaatcaatagcatgattcatagccataccatatcattgccacaccrcctttggttgtctgtctgagcttagaagagtacaaagagtattaaaattgattgaattttggtgtgctgactctgtatctttacttgggaaccacagact

SEQ ID NO: 308671 - DNA, 201 bp, Homo sapiens
tgtatagacaactttttgaaaaattgtataaacatacgtgatgggtttttgtatctgtctttgctgttgagggtgaggaggagtagggatcagcatggggrcattctatgtaagattactaacaggttacattttgaggtttaaataaatgagaaagtcctcatgaagtctgagatatcaccttgcccacattgcaaagga

SEQ ID NO: 308672 - DNA, 201 bp, Homo sapiens
acttcatgtgtcagccagttgatgagagttgccatactattttgtcagcatgtagcaggaagaaaaatcttttaggagcctggaacttgttaatgcttttytatttgttttctaaactaggtggctattgagagttatacagaacatagcaaaataggtaagaatatggcctctggagccagcctacctgtgccattgcta

SEQ ID NO: 308673 - DNA, 201 bp, Homo sapiens
tgctgtggatgttttccaggttgcaaaaatgatcaatcttatgaggcctggagtattcacagacattgtaagtagtttgcttatgtgtaaaacctgtactrcatcagttgaaactcagactcacagtttagagcagtagttctcaattgggggtgattttgccccccaggggacatttggccatgtctggagacttttttg

SEQ ID NO: 308674 - DNA, 201 bp, Homo sapiens
tttaattagcaacatgtttcctttattagtggtattggaataatgatgcatctcacgattgatgttgacttggagatgaggaaaacagtatctgggacttrtttgttatttaaaatataccaatagctactgtgcttgtttgtttcttcattctcttttcacataattattaggcacctactgtgttctggggaagtgttt

SEQ ID NO: 308675 - DNA, 201 bp, Homo sapiens
ggtttctgtgtttacttgttttgtattgacttaacgatccagcatggctagagtataccactaaggaatttgttcttgatcctgtgcatatcattgattcytgcagtctttcccacaaacatgtttttgaacccaagaactgcaagcgatagaatgtggtttcttagccgcaaatgaaattaactcactaaagagaattgc

SEQ ID NO: 308676 - DNA, 201 bp, Homo sapiens
acggaattgggtagtgtttcacttgtacttgtggtgggtgtggggatggaggtaacttacacattgaatgaaaacttcatgtgtcagccagttgatgagarttgccatactattttgtcagcatgtagcaggaagaaaaatcttttaggagcctggaacttgttaatgcttttctatttgttttctaaactaggtggctat

SEQ ID NO: 308677 - DNA, 201 bp, Homo sapiens
gtgtaacaaagaaaagaacagaaactcttcagttgtgccatgtaagactttaaaacagtttgttagtgatcttttatactggattgtatgttaggtacagrggcagccactactctgatgctattgatagcacccttcaattgtactgtacgtggccgtatggtagaaggttttgaaaatgtccttttagtaacctcatta

SEQ ID NO: 308678 - DNA, 201 bp, Homo sapiens
tttgttaatacttctcatatgattttaagaagttattttctctgagaaatcagaaacctgctctcacatttgatgcattcagttctgactttggtagtccygtcaagtgagttcatatcatgaggtggaggtgatttttcagcatctttagttgtcttcatttgagtggctcacatttggacaaagtaatcagtccaattt

SEQ ID NO: 308679 - DNA, 201 bp, Homo sapiens
caaaatatgtggaatgtttcagtgctcagaaagagtgtaacaaagaaaagaacagaaactcttcagttgtgccatgtaagactttaaaacagtttgttagygatcttttatactggattgtatgttaggtacagaggcagccactactctgatgctattgatagcacccttcaattgtactgtacgtggccgtatggtaga

SEQ ID NO: 308680 - DNA, 201 bp, Homo sapiens
ctgagaaatcagaaacctgctctcacatttgatgcattcagttctgactttggtagtcctgtcaagtgagttcatatcatgaggtggaggtgatttttcarcatctttagttgtcttcatttgagtggctcacatttggacaaagtaatcagtccaattttcctaatttttctgtcatgtcttgcctttcctttgctgtaa

SEQ ID NO: 308681 - DNA, 201 bp, Homo sapiens
atttctcgcagagatgtaactggagaacaaagcttgcagaggcagttggatatatattctttttactcccaccttctgcctggaatgaagatgaggtatargctgcactccgtttcatttttgacccactttgataagaatccaaggtgagggacccaactgggcctcactggtttcccactggggaaaccttataactga

SEQ ID NO: 308682 - DNA, 201 bp, Homo sapiens
tagttccagctactccagaggtggaggacaggactttggggctgcaatgagctgtgatggtgccactgctctccagcctgggcgacatagtgagaccctgyctcaaaaaaaaaaaaaaaaaaaaagttcatttgccagtctgagaaatgggagcaaccatcttacttggaaacaaactatatccaggactagggcaacatt

SEQ ID NO: 308683 - DNA, 201 bp, Homo sapiens
gaccgtgaccctatgtttcttgctagaatggtaaaggcttttccagcagggcactgcagaaagactgggactctctcatgggaggcacaaactcagagtgyggtatagccctcaaatgaagtgttttgctggttagttggcaggacagaaaccacagccagatgagcctgttggcagtgtttccagcaggcagcctcaggt

SEQ ID NO: 308684 - DNA, 201 bp, Homo sapiens
aacatcctacaatgtacagaacagcccccacaataaagaattatctggacccaaatgccaatagtgccaagattgacgaaccctaaactgaaggctcaccrgaatccatcgtttttacacagttggtctccatgctgctgtgaggttctacctttctagccagtccttaattgaatgagtacgtggcacaaacacagcaag

SEQ ID NO: 308685 - DNA, 201 bp, Homo sapiens
tgaccctatgtttcttgctagaatggtaaaggcttttccagcagggcactgcagaaagactgggactctctcatgggaggcacaaactcagagtgcggtayagccctcaaatgaagtgttttgctggttagttggcaggacagaaaccacagccagatgagcctgttggcagtgtttccagcaggcagcctcaggtcctgc

SEQ ID NO: 308686 - DNA, 201 bp, Homo sapiens
ttggtggtatgcgcctgtagttccagctactccagaggtggaggacaggactttggggctgcaatgagctgtgatggtgccactgctctccagcctgggcracatagtgagaccctgcctcaaaaaaaaaaaaaaaaaaaaagttcatttgccagtctgagaaatgggagcaaccatcttacttggaaacaaactatatcc

SEQ ID NO: 308687 - DNA, 201 bp, Homo sapiens
gtgaaataaagtgtaaagtgaggtggtgcctagagagggatttaggggagagagttgttattttagcctgggaagacctctctgatcaggtgatacttgarcagacatctgaacacagagggactgagccttgtgggtatgtgaggtaagcattgcaggtagagggaagcgggggagataatagcacttggaaaggttcaa

SEQ ID NO: 308688 - DNA, 201 bp, Homo sapiens
tgggggttttattgagtggcggagttggctctcagcaggatgtatagggagctggaaggggtatcaagtgagaagatgatggagttcggccattcggtggscagtctcctctctgattgtcccttgacattcagatgctccttctcttctccctgccacgccattctgctgttcttctgctcttctattctatccctctcg

SEQ ID NO: 308689 - DNA, 201 bp, Homo sapiens; identical to SEQ ID NO: 64288

SEQ ID NO: 308690 - DNA, 201 bp, Homo sapiens
ttttggaggtcttgagaagttgacctagggtatattttctgagccttgtttttaccaaggttctgaatctttggagaaatacagtgagtggagcgtagaartgaggaggcatgagggcatcctcataccagtcttcattcattgagtcattcagtaaaagtgtttatcaagcacaagccaggtggcaaactcagttcgaga

SEQ ID NO: 308691 - DNA, 201 bp, Homo sapiens
tgcccgggaactgcccgcttctagccagtatttccctgtctcctgtccatatcatcaggacctttgaattgctcccaacaccccagtatatagcagtcttrctaccatccacccccggcaagaactcccataccagcctcacccctactggaaatcacttgcttattatttttttaacctattatttaacagtttaacccc

SEQ ID NO: 308692 - DNA, 201 bp, Homo sapiens
acactagccaaatttcaagttgtcaggagccacacatagctactgactacccttttgtattgcacagatatgaaacatttccatccttgtaggaagctctrtgtgacagtggtgttcagaggatataggcattatagaggaaccagcaggtaacatattattgagtactgaagatgtgggtataagacctttctgaaaagc

SEQ ID NO: 308693 - DNA, 201 bp, Homo sapiens
tttttgtatttttagtagagacagggtttctgcaggttggccagactggtctcgaactcctgacctcaagtgatccacccgcctcagcctcccaaagtgcygggattacaggtgtgagccactgcgcctagcccattttttaaaattaaagcttttcaggtaactgttgtttcacatgcagttgtataaaataatacagag

SEQ ID NO: 308694 - DNA, 201 bp, Homo sapiens
acctaagaggcttgtctttgttgttgtttatgcagaaagtactgttctctgctattggcaaagtaattttcagctctagatgagcccagatcagtcacaayagttttcacaagcctgataggaaggcctagagtggtgttaattagtcagagatgggagaaggaggacatgtgttagcatattcaatcaatgcagagtttc

SEQ ID NO: 308695 - DNA, 201 bp, Homo sapiens
taaaattacttcaactttgttttatgtttgagcattttcatagtattagatagggaaaaaaaactagtggaaattgaattgcttaaactttgggagcaagkcaattagaatgtgtgcgtagctgcagatcccagtagcctagacttaattcctggccttctctcagatgtcaagtgtccacaggacaggaatttgtaatgg

SEQ ID NO: 308696 - DNA, 201 bp, Homo sapiens
gtcaaaggtaaggccacctttgaatgtgcagttcaaccttttcccactttccatagaaaagagacagttcagcaggttgagggaatgacctagtatgaacstcagtgttgttctatgtatttagcagaactcttttaacaacatcaattctgaacaagttacccaaggttaagttcatgctggttgaggagaatagtgctg

SEQ ID NO: 308697 - DNA, 201 bp, Homo sapiens
taacgatgcccatgtatgataggtggataaggggacagtgcttctccttgtgtcccgatcgctgagtatggagaatcccgggcttctaattctctccaackgcaagcaaagtaacggaactgagcattcaaggattttgggagaattaaggcaaatcccagggggattaggaaaccagagtcatttggttgtcccttgatc

SEQ ID NO: 308698 - DNA, 201 bp, Homo sapiens
tctcaggaaggcccaccatgccagcatgccactgtcatggggtcacattcagtcattcattcccttgctcacgtgctcagagaccattttatgttttgccygttcctaggctgcatgttcaagcacttggctgtgtttgggtttctggagactggaagtcatttttgctgattaatggggatgatggtatttttgtccagg

SEQ ID NO: 308699 - DNA, 201 bp, Homo sapiens
gacctagaattggacatacagttaatgagaaatacccttatgtgttactacgctgttttgctttgatcataggatgtgcagccatattgtagatggaactytgggatgttctcatcacagacttactctgctttcacctttgcataacctttgtcatataatcacttttccctgtaggagataatgacatagcagaggtca

SEQ ID NO: 308700 - DNA, 201 bp, Homo sapiens
tctgagatctgttggaaagtgtgtattttttaatttctgaagttttaaaactgacagagttaatggcagaggaatgactccaatgttttgtccattttagyccttatttatttttttttaatagattctgccctttgtaactgacactatttaagagtaaaataatagaggacttcagtattttgttctctgcctggctta

SEQ ID NO: 308701 - DNA, 201 bp, Homo sapiens
tatcttttctgagatctgttggaaagtgtgtattttttaatttctgaagttttaaaactgacagagttaatggcagaggaatgactccaatgttttgtccmttttagcccttatttatttttttttaatagattctgccctttgtaactgacactatttaagagtaaaataatagaggacttcagtattttgttctctgcc

SEQ ID NO: 308702 - DNA, 201 bp, Homo sapiens
aagagatgccacaattgtaaaatggaaagtacaggtctgtggcctttgatattacaccaacactgtctgtcactgatcttcattttcctggtaatattatrgaatcaggagatttgtttccttgagaatcaaacagtagtaaaatggcctgaaagagtagtcattttatttctgtctgatatttgatgccgtgagcccaaa

SEQ ID NO: 308703 - DNA, 201 bp, Homo sapiens
tgcatacatgtacagtgggtgaaacaaaagttcagatgggtggccgtgttcagcatggtggccaccagcatgtaatctctctgctgtttgccatttctgcyggccattaaagatataaagagatgccacaattgtaaaatggaaagtacaggtctgtggcctttgatattacaccaacactgtctgtcactgatcttcatt

SEQ ID NO: 308704 - DNA, 201 bp, Homo sapiens
tgctgactctttaagacatgggaatattaaaatgttttctgatatttttagagccaaagagagagcaggatctagatgcagtcctatttgtgtgtttaacktattattggagagctacacgtacataaaagtgcagtacccgtaatacgtgcacagcttgatgaattttcacaacctgagcacacctgagtaacaagcacc

SEQ ID NO: 308705 - DNA, 201 bp, Homo sapiens
gctgaattcagcaaccagtttgagattgttgaaaataaagattgtttctttttcaatgcaagttcacagatcactggagttctagctacagtttgttctasaccagaggttgcagatatttttgtcctataaagagacacatggttaatatttttggctttgtgagttgtatagttttcgttgtagctgttcagctctgct

SEQ ID NO: 308706 - DNA, 201 bp, Homo sapiens
ggaaaaggggatgtctctgctgctggacatggtgggagtaaactggtttggaaggccagatataaatcatcctttgttttggatttgccaaaatcatgtgraagaaaacttaagaaaccaattatattttcaggtgttctggaagctaactagtggtactcactcagttacatctccattatttgagaagatttttatgtt

SEQ ID NO: 308707 - DNA, 201 bp, Homo sapiens
ggaatattaaaatgttttctgatatttttagagccaaagagagagcaggatctagatgcagtcctatttgtgtgtttaacttattattggagagctacacrtacataaaagtgcagtacccgtaatacgtgcacagcttgatgaattttcacaacctgagcacacctgagtaacaagcacctagatcaagaaactcccgtc

SEQ ID NO: 308708 - DNA, 201 bp, Homo sapiens
ggtgtaggggtgggaaaaaagttttattggaatagagcccctgctatttgttgacttattgtctatggctgttttcttgctacaacagtagaaatgagtgkttgcaacagagaccatatggcttgccaagcctaaaatatttactgtctggctgttagcagagtgagtctgcctacccatacagaagaccattctcatcca

SEQ ID NO: 308709 - DNA, 201 bp, Homo sapiens
tgtttatttgctccatttggggttcgctcattatttttgccaagttttcttggttggaacttggattttaaacaaactgcttcttttcaaactctagaaasggtgacatagcagctgaggtccatgaggggcaagaactcatctagaaggaggggaaatgccttttgatagctgatgcagcagtgtaaggaaaatggtgtt

SEQ ID NO: 308710 - DNA, 201 bp, Homo sapiens
atattaaaatgttttctgatatttttagagccaaagagagagcaggatctagatgcagtcctatttgtgtgtttaacttattattggagagctacacgtamataaaagtgcagtacccgtaatacgtgcacagcttgatgaattttcacaacctgagcacacctgagtaacaagcacctagatcaagaaactcccgtctag

SEQ ID NO: 308711 - DNA, 201 bp, Homo sapiens
tgaaattccttctcaaggagttgacttgagctaacttgcatgttaacaaataccactgttctggctttccaccatcctgtatgaatatggaagttacataraaataaaacatttaagttttcttagcgtttaaagcactaaactgtaacatatctggttaatactttagtattgtgtgctttcctattaatatgacttttt

SEQ ID NO: 308712 - DNA, 201 bp, Homo sapiens
cagcatcgactaactttctgataactgtcaaaagcacttaactcttgtatatcttggttttcctttgtgaattaggtcattgactgagcatcaaaaggaarctaaaagaatgtacacgtcgtgtcagttatggccaccagaaccctgtaggggagaaaggcaatcaatgaaactgttcagtgataatattgggtttttgtc

SEQ ID NO: 308713 - DNA, 201 bp, Homo sapiens
atgtgccactttacacttttgccagcagtttaggaaattttcctatttttacagcatttttttaaaggcataatttacataccataatatacagctatggkaaatgtataatttgataattttagcaaatttatacttgcgcagccatcactgcagtccagttttagaatattttcatcgccacagaaagttccttcctgc

SEQ ID NO: 308714 - DNA, 201 bp, Homo sapiens
tgtgttactccttcacgctgagctctgcctaatgaagattggctgtgtagagccactactgcttcattttgttgcattttgtatacacagttcagaaaatyaagagacaagggaactagtattgagtagaataataaaaggactttcttgaatgatggcacttctgattttttttttccctgccctacgtgactggacgaa

SEQ ID NO: 308715 - DNA, 201 bp, Homo sapiens
aagaatgtacacgtcgtgtcagttatggccaccagaaccctgtaggggagaaaggcaatcaatgaaactgttcagtgataatattgggtttttgtcactgkatgactctatataatttaaatgtcatgttcatttccttaattgttgacaagactgctatctttatgtgctttctctttggaaatattaatgtcaacatac

SEQ ID NO: 308716 - DNA, 201 bp, Homo sapiens
taatatacagctatggtaaatgtataatttgataattttagcaaatttatacttgcgcagccatcactgcagtccagttttagaatattttcatcgccacrgaaagttccttcctgcccatttgcagtcagttatttctcctgccctcaaccccaggcaacctcaggtctggttttgtctttcacttggtgttaatgattt

SEQ ID NO: 308717 - DNA, 201 bp, Homo sapiens
ttgaccttaggtcttttacttcatcctggtcttctatttatccagccctaaagtcaaagaattggactaaatcgatggttttcaaaatgtccctggatccmctactcggcttcagccaccagggctgacttaacttatttgagttgctggggtcttgagcaagattttgtttgaagagaccatcctttggcctccaaagcc

SEQ ID NO: 308718 - DNA, 201 bp, Homo sapiens
tttattgagatttaattcacataccatgaaattcattcttttaacgtgtacacatcagtgttttttactgtagtcacaaagtcatgcacccattgccaccrtttatttctggaacattttcatcaccccaaaaagaaactccatctgtagcaatcactcccattctccttcccttcgtctgccctgtatgtccctccctcc

SEQ ID NO: 308719 - DNA, 201 bp, Homo sapiens
cattgatctgttcactcttcagggatgctgtctcaactacttgcacaggtataattttattatattacgctgcatattaaatacctgcacttcccttttcycatcctgatacagatgatttcattttgcccacagtaacacatgcttctgtttgcacgtgaccatgatcattttctctacctctaggcttacagaagggcc

SEQ ID NO: 308720 - DNA, 201 bp, Homo sapiens
acactcagccagagcagagaacaagtaggagtagcaagtggccaggaagtagcagagatgcagagttaacaggtaaatgccatgcgtgagccaggacactrcttttaagcatagtaggtaccaagccgagcagactacctgtttccaagagaaattattttaaggctcagatggaaaacaaatgagggcaccttaaccatt

SEQ ID NO: 308721 - DNA, 201 bp, Homo sapiens
atagttctgatttccatctccttaatgactgatgatctccctgtttgtttttaaatgcacatgtcatggaaccacagcccacatgaccaaatgttcctccttttttttccctacgaagactcaggtaactcagcgccactataggccaaaagatgctgacacatcatcaaacagcctggagggcttagattattgacctta

SEQ ID NO: 308722 - DNA, 201 bp, Homo sapiens
atgctacaggactggcagtgaaaagcctcttaggcttggggtagaggtgaaaacctccctccatgtttgcactctctctcgccatgcccccaccttcacgygtggttgtgactgctgggtggggctgaagtcacagccttgctgcagtctttgccctaggcaggctctgtatgatctttggtcaagggaaagcactttgtg

SEQ ID NO: 308723 - DNA, 201 bp, Homo sapiens
atttttgagtgtgttttctccaagttgttgatactacaacttaataggttcatgaaatagtggaaaactacactcaaggtctctgaattctgtctcttccmagtctcccgctgtacagtggtgttagtgctaatgttcagtgagtccttttgagtgccaggcactgtgccaagcacttgggtggcaccaactcatgtgatt

SEQ ID NO: 308724 - DNA, 201 bp, Homo sapiens
ctaagtctcccaaactgttgggatcacaagtgtgagccactgcacctggtcctgggtgccattcttgactacgtcacctaaatgctccttcttgtgattcractctcatcctatatacctagtgccaccatgaccccatcaccctacgtcccctcccccttcgacttgtcctcatcactgcatattgagctttcacttggc

SEQ ID NO: 308725 - DNA, 201 bp, Homo sapiens
aatatgaatgtatcactcctgtgtcagtaactattctgggaccatttttgtggcttccaataggtctcaggatacatcctaggatccagcaatgacttttyttaatttctcgccctttctacttaccgtgccccaggtcaagcccacaattttccctacacctactgctgtctctactcagaaacgctttccctcctccca

SEQ ID NO: 308726 - DNA, 201 bp, Homo sapiens
caaatgttcctccttttttttccctacgaagactcaggtaactcagcgccactataggccaaaagatgctgacacatcatcaaacagcctggagggcttasattattgaccttagagatgtaagcaggaaagagccaaagcatggaacaagtccttttccttcctctactcttctgcgaaaaaaagttttaaaaagagaat

SEQ ID NO: 308727 - DNA, 201 bp, Homo sapiens
ggagtgtttgtgaaataatgatttcattaaacattgttcaaacctaaattgcgtttgttcttgcagtctttggagtacactgggccttttgcagttgggasaaacccatttcctctctcagtgggaaacactccaagtattcctcttgaaacaaaacgtcaaagattatttttgcagacttctgtggagtcatttttggac

SEQ ID NO: 308728 - DNA, 201 bp, Homo sapiens
caaggaccttttttctgtccaacttttaaaaaattattattaatgcgaaagaagaaagcattggggagctcacatagaaaattggtaaatacagaggagamatgcgtttccctttggcaatgcagttttttagctagaacaacagtgcttttcttctgccttttgaggcacagtaagactggatgattggcaaacagactt

SEQ ID NO: 308729 - DNA, 201 bp, Homo sapiens
gtctcccaaactgttgggatcacaagtgtgagccactgcacctggtcctgggtgccattcttgactacgtcacctaaatgctccttcttgtgattcgactmtcatcctatatacctagtgccaccatgaccccatcaccctacgtcccctcccccttcgacttgtcctcatcactgcatattgagctttcacttggcaaag

SEQ ID NO: 308730 - DNA, 201 bp, Homo sapiens
atagagtgcatttgaaaaatgagcacaggttgtttatgagccgtcgtgtcggcatcacacttcagagtcggtgtagatgtctaccgctctagccctatggrctgcagtgattcaggagcaagagcgagcagtgggttctttctaacgtgtcagccttttgaccttgagctgcattaaggctttcacatgtgcagttgatta

SEQ ID NO: 308731 - DNA, 201 bp, Homo sapiens
tcagcgccactataggccaaaagatgctgacacatcatcaaacagcctggagggcttagattattgaccttagagatgtaagcaggaaagagccaaagcayggaacaagtccttttccttcctctactcttctgcgaaaaaaagttttaaaaagagaatgagtggtattctgtaatcttcaggtaattcaaaacgagcaaa

SEQ ID NO: 308732 - DNA, 201 bp, Homo sapiens
agcttgctgttttattagggccacaaattgagtcagggagcaggacgggtatttcttctgaaggacacagcaagaagtacgggggccgtgcacagtggctmacacctataatcccagcactttgagtgggggctgaggcaggaggatcccttgagcccagaagttcgagaccagcctgggcaacatatcaagaaagtgtct

SEQ ID NO: 308733 - DNA, 201 bp, Homo sapiens
tgatgcaatatggttgattattgatttttccttttggttcagagtccaatagtctttgcacagcaccgttactgataatatctttctttgcctgctcatcmcagatgttttgaactcatttaaaattttatgacacttttgaaatattatttgttttgataactgaatttttggtgaatgccttgtttgccttaccctagt

SEQ ID NO: 308734 - DNA, 201 bp, Homo sapiens
agcaggcagcctgtgcactcacacaggccctgtgctcagaagggcctatgcttgctttcatactgtctcatactctactgtcaccttctcaaaactctttwataactttcgaatgggccccatgatttcattttgcatttggtcctataagttacatagccataacttacatagtctgttttcacacggacgatctttttt

SEQ ID NO: 308735 - DNA, 201 bp, Homo sapiens
gaaagggtttcagttctgttttagggatttctcttagaaatctccagcaatttcacttagggagcttttgaagccatctgccttagtgagctgtgctagtktgctctttttgaaaggtaagcaatctttgggccagtttggatatgactcttttacatgtccagtccatatattcccagaagaatccagaagtcatggcca

SEQ ID NO: 308736 - DNA, 201 bp, Homo sapiens
gactgggtggggtcgggggttcagaatgaaactgttccacctcagatcatcaggcattagttggattctcaaaaggagcatgcagcctagatccctcgcaygtgcagttcacaatagggtttgtgctcctatgagaatgtactgctgctgatttgacaggaggcagagctcaggtggtaatgctccttgcccaccactcac

SEQ ID NO: 308737 - DNA, 201 bp, Homo sapiens
tagatgagttgaatatttgttttgctttccaaactttttcttccaggagcactccctccacagtcccctgtgcacaggtggaagtacacacttaacaatgmttcgtcttgactcaccctggggatcggagtgaggagccactgtttctgctcttgcccgcctccctccaatctgttccctgcccagcagagttgtttttac

SEQ ID NO: 308738 - DNA, 201 bp, Homo sapiens
agcttagaggaataatagtaaaagtaacaacaatgagagtaagaataatatctatcacgtatgagatgtttactgtgttcccagctctttctgaacctctwtcttttattgacttatttataatcttcactactgcagcctaggaaggtttcgtaacttgcctatgctcacacagctcacagatagcggagctggtatttg

SEQ ID NO: 308739 - DNA, 201 bp, Homo sapiens
caagtgctgggggtgctggtgcaggcagtggttagatgtcagttttcagccctgaatgatgttttctgctctccaggcatactgtttcagattccctgaaraaagaatcccatgtgagtctctgtattcttcacatgtttttgaccttaggtcttttacttcatcctggtcttctatttatccagccctaaagtcaaagaa

SEQ ID NO: 308740 - DNA, 201 bp, Homo sapiens
tgtgccatgctccatggaaatcatgaggtatcctcagaattgtgtcctgccctcaaagtagttgagggacagtaagttttcagaagggccttaaaattctytcttcaaaagtagcttcattttatctttgggagctaggggaggacagatcaagtcaggcagataaaatctcaagagaataatgcaagaattatgtcttat

SEQ ID NO: 308741 - DNA, 201 bp, Homo sapiens
actcatttgttcactctgcatatttcttaagcaccttctctgtgccatgctccatggaaatcatgaggtatcctcagaattgtgtcctgccctcaaagtarttgagggacagtaagttttcagaagggccttaaaattctttcttcaaaagtagcttcattttatctttgggagctaggggaggacagatcaagtcaggca

SEQ ID NO: 308742 - DNA, 201 bp, Homo sapiens
tgttaaagggatgcatctccattctatagtgcgttcagaggccttaaaggactgttttactgtaaagagtatctgggtgtatctttataaggtttcccaayaaaatgcgtttatctcactaggtgatgagtgaagagggttttttggatcattttgctaattttctttcccattgtctctgcctctttcttgcatttttct

SEQ ID NO: 308743 - DNA, 201 bp, Homo sapiens
atcaaacagcctggagggcttagattattgaccttagagatgtaagcaggaaagagccaaagcatggaacaagtccttttccttcctctactcttctgcgaaaaaaagttttaaaaagagaatgagtggtattctgtaatcttcaggtaattcaaaacgagcaaagcctgcctgattggtattctctatctgataattatt

SEQ ID NO: 308744 - DNA, 201 bp, Homo sapiens
acattgaacatgaagactgtgtaacgattcattgaggttggtacctctctttcctggggctccattggatcaaacatgttaaagggatgcatctccattcyatagtgcgttcagaggccttaaaggactgttttactgtaaagagtatctgggtgtatctttataaggtttcccaataaaatgcgtttatctcactaggtg

SEQ ID NO: 308745 - DNA, 201 bp, Homo sapiens
ctggagggcttagattattgaccttagagatgtaagcaggaaagagccaaagcatggaacaagtccttttccttcctctactcttctgcgaaaaaaagttytaaaaagagaatgagtggtattctgtaatcttcaggtaattcaaaacgagcaaagcctgcctgattggtattctctatctgataattattggaagctttc

SEQ ID NO: 308746 - DNA, 201 bp, Homo sapiens
tactcttgtgtagtattttccactgaaagccccaagggaagaacatctccttcaccgggggtgagggagggcatcctgaaattctgctgctattccgacasgtgttttttacaatgtggctaacacaaaccattttttgagcacctactgtgagcatgagctggtaaaataaaataacttcatcttaggggctggacacac

SEQ ID NO: 308747 - DNA, 201 bp, Homo sapiens
tggagaagaaggtcatttgcaagggccctgaggcatgggatccaacctagagcgaggtaaacaaagggggaagcaagatcagagagaagagctggagaagyaggcaagagcaactctggcaaagacttctcttggtaaagagttaagactgttaggagttaagatcttctagcagtgggaagcctctggagggttttaaag

SEQ ID NO: 308748 - DNA, 201 bp, Homo sapiens
actgagttaaaggaaacctctgtgttttatcacattattaattatttgggtttttgaaaagcatgtatctagatggctgtgtaagcgtcacccaaaaaggwtgctgtttgtgtcagaagtgtaagattcttgagctggtcaaggacattgaacatgaagactgtgtaacgattcattgaggttggtacctctctttcctgg

SEQ ID NO: 308749 - DNA, 201 bp, Homo sapiens
gacagctccctctccccgtgtcccttcatggggtctgggagttttactcttgtgtagtattttccactgaaagccccaagggaagaacatctccttcaccrggggtgagggagggcatcctgaaattctgctgctattccgacaggtgttttttacaatgtggctaacacaaaccattttttgagcacctactgtgagcat

SEQ ID NO: 308750 - DNA, 201 bp, Homo sapiens
tcttggtaaagagttaagactgttaggagttaagatcttctagcagtgggaagcctctggagggttttaaagaggactctggaataatcacaacgtctataaacttattgttctggctgttatgtggcgaatgcttgcagaggacttgcactggagtctgcaggaccctgcaagaggctgatggaaatatcgcaggttgga

SEQ ID NO: 308751 - DNA, 201 bp, Homo sapiens
cctcaattattgctcaggaaatatatactaagtaaaactgagttaaaggaaacctctgtgttttatcacattattaattatttgggtttttgaaaagcatrtatctagatggctgtgtaagcgtcacccaaaaaggatgctgtttgtgtcagaagtgtaagattcttgagctggtcaaggacattgaacatgaagactgtg

SEQ ID NO: 308752 - DNA, 201 bp, Homo sapiens
gttaggagttaagatcttctagcagtgggaagcctctggagggttttaaagaggactctggaataatcacaacgtctataaacttattgttctggctgttwtgtggcgaatgcttgcagaggacttgcactggagtctgcaggaccctgcaagaggctgatggaaatatcgcaggttggatgaggatgatcatagtaaaag

SEQ ID NO: 308753 - DNA, 201 bp, Homo sapiens
ttccatcttgtattaaagctgttattttacttgctttcttctgcattaatactgtgagatcattgaggcttgagagtcttcattcatcattatgtctcttrcacacggctaaaactgtggcttgattgtgtaaatacttagctgaatttcatggaaacacatttaggctccattgtctagattggaaagggacagcctaat

SEQ ID NO: 308754 - DNA, 201 bp, Homo sapiens
ttcagggcttgttcatggaaagggagatgtcattgtactgtgtagaagaaaagtccgcaggtaacaggtggcatcagtgaagacaccatggatttaaaacytgaaagcagttgtcctagcacttaggagaatctgggggcaactccgcaccagggtcccacatcggaagaaggtggcgggctagccagcaaattctggcct

SEQ ID NO: 308755 - DNA, 201 bp, Homo sapiens
cattctttatatcatgtcggtgttacagactgcttaattatttttctccatctggagaggcttagtaattaaatgaattgcagcacctgggattatttatmgacattgagaaggcaggaggagttcttgatgactcatccatccagggctggcgaggaagcctttctctccacttccctgcatttcaccttccccctcctt

SEQ ID NO: 308756 - DNA, 201 bp, Homo sapiens
tttttttctgtctgacatacccaagcctccttttttcctctttcctctataaacacctactcattgttgagatttcagttcaaactatgctcagtaagttytctaagcaactccccaagtttaggtcagggttccttattaaacctttatacagaactactataacattttccttaaaaagcgtgtaattatatatgcctt

SEQ ID NO: 308757 - DNA, 201 bp, Homo sapiens
tctgaatctttgcatcagaaacaaagatataaaatgattgtcatgtctgtatccagagatctagtcaataggtatatttctgaatacatttaagaagtaaktgaattgcatctgatttattcatcattcttaaactatttctttttgacaaactgtcgtcaccaactctactgcagtttcctcatttaatgttctccttct

SEQ ID NO: 308758 - DNA, 201 bp, Homo sapiens
ggccaggcagtccccaagaaacaggcatctcccccacggtcgtctgctggcttaagccaagctgttccctctgacaccgcccctgtgtggcatatgatgtygcaacacctcccacccaggaagcagcagtttcatctgtgttgacaggcactgtgaaatagtgaatctgcaccgaattggtttgtttgagtagtagtactg

SEQ ID NO: 308759 - DNA, 201 bp, Homo sapiens
taatgagagagatgtaagtccatacccgtaactgaattcccagacttcttcaccatggcattgctccagcgttgagtaaatctggcatcacaaaatttgtsttatgtagagctggagacaaagcagggaagaagagaagcaaacctgttaagtcccacgtagtctacaactccatcaggtatatgggatgagcaggaacag

SEQ ID NO: 308760 - DNA, 201 bp, Homo sapiens
tgactcctgatcaatatttggccagttgcgtcgggtgtgaaactccgagggggcaggtgctggaagaaggcccctggaggaaccttgaactgcagatagtktaaggcacttggaaattacactgactttcagacagagcatatcacattagtttatctaaagccccaaatgaagaggatggggtgggggtggggagcctac

SEQ ID NO: 308761 - DNA, 201 bp, Homo sapiens
acagctaaatgtaatgtgggatcctggataagatgctggaattgaaaaaggacattaagggaaaatctagtacaattcaaataagatttttcattcagttkatgagttaattctgtcacgctcgtgtcaatttcctggttttgatcattgtactgtggctgtgggccacagtcaacatttggggaagctgggtcagggata

SEQ ID NO: 308762 - DNA, 201 bp, Homo sapiens
gagtaaaaggtggcctccctgtcaaaaccaatctacttttctccaccggccaggtcctcaaagctgggccatgcgtctctggcaggaaagccatcctgtcsccagagctgccttgggttttgggttcttgagtaggaaatacgggagtctggttcctggtgggctgcagggcatgtgggtggtctttggaagatgccagcg

SEQ ID NO: 308763 - DNA, 201 bp, Homo sapiens
tggtgagccaagatcgtgccactgcactccagcctgggcaacagagcaagactccatctcaaaaaaaaaaagtataatacataaatacgtttttttcttaraacatttcaactaaggcttacatctgttgactacttccctcttgtcctgctgccctagagtatgaagagatttgaataggtttacaaaagtatatttata

SEQ ID NO: 308764 - DNA, 201 bp, Homo sapiens
tatgtgaaggctgtggattgagagtttacagtgttagtgatctcttgtcatcctcacaacagctctatgcagtggaccctgttagatcttatatcacggargaaaagctccaagatcagagtttcaggtatcttttctgtttcatctctgcttacaatcttctcacaatttcttgcctctctcagatttgattccgaaatc

SEQ ID NO: 308765 - DNA, 201 bp, Homo sapiens
ctgtaaaatgatatagatgctctgattgtagcctggattggaggcagtgggagccacatatagggagtgatcaattctgcaaaggtaagatttcggtcaaraatctatagtcagctgggtgccgtggctcacacctataatcctaacactttgggaggctgaggtgggcagattgcttgaacccaggagttcaagaccagc

SEQ ID NO: 308766 - DNA, 201 bp, Homo sapiens
ctttatttttatgattgatttttaattattctaagcaatacatagttattttctctgggcgaaaagttgaaatgtttcatacaaacctcatttccttgttkcctaaccccagacccttctccccttcttctcaaataaaagctagcactagttttgtgcatatactactagtttgcttttaacgtgtatgtatgtttatat

SEQ ID NO: 308767 - DNA, 201 bp, Homo sapiens
atttttgggtttttagtagagatgaggtttcaccatgttggccaggctggtcttgaaactcctgaccttgtgatccgcctgccttggtctcctaaagtgcygagattacaggtgtaagccactgtacccggcccctgagttagatttatacctcaaatgttttctgggtaaaagagggtcctaggaaggacagacactatt

SEQ ID NO: 308768 - DNA, 201 bp, Homo sapiens
aaataggtgatgatgcagtgtgagggaagcccacacagtcatcaaaagataaatgcactgagacattgtatttttcttttctttgctacagaggagtagcwacaactacacatagaacaaatccagaggagtagctacagctacacatagaacaaatcctgcgtatacccatagcaggtccggaaggactggggtgcttaa

SEQ ID NO: 308769 - DNA, 201 bp, Homo sapiens
ttaggtatttggaaaagtgacaaaaccaacaaataatatcagcctttatggagcttgtattttagtggggggaaacagactaacatgatagaaggtgacaygtgtcagtaaaaaggaaagaagaatcatggaaatcaggaattgggtgggagttgggtggattgccacctatcttaaatagacctcattggaagaagttaa

SEQ ID NO: 308770 - DNA, 201 bp, Homo sapiens
aaggttaattagtgagagaatgtgatgaacttaatgaaataggtgatgatgcagtgtgagggaagcccacacagtcatcaaaagataaatgcactgagacrttgtatttttcttttctttgctacagaggagtagctacaactacacatagaacaaatccagaggagtagctacagctacacatagaacaaatcctgcgta

SEQ ID NO: 308771 - DNA, 201 bp, Homo sapiens
ttgagatggagctttaaaaagcattcctgacttcttcccaaaacataaattaaaaatctttgtttctgccacaatatctttagtctcatttccctgttccytctactgtttcatcctgggattgatcaactcttcacttttgttttgttttattttattttgagacaaagtcttgctctgtacccaggctggaatgcagtg

SEQ ID NO: 308772 - DNA, 201 bp, Homo sapiens; identical to SEQ ID NO: 64284

SEQ ID NO: 308773 - DNA, 201 bp, Homo sapiens
ttcagaaatagtaatgactataatgaaattgtcctattttctgtatttgctgtgggcccctttaactcagttccctctgaaaacctgttgaacactgttcyactctttctgcattattcaatgccaagccaaggtgttaggcttcctgatggatttatgagcctcacatttccattgctaaagcagtgaatagaccaagga

SEQ ID NO: 308774 - DNA, 201 bp, Homo sapiens
tgggttgatttaggttactcaacaataaaggtaaatagttaatttagaccttgtaagaccttgtgaccatagcaatcattttcccagtcctctgctttcayagacaagggagtagctttgggcaaagttacatggcccgttagtgacagtacttttactttttatgaaaatgagctttacttttacacattctttgatttg

SEQ ID NO: 308775 - DNA, 201 bp, Homo sapiens
catggtggcatgttcctgtagtcctggttacttgagagtttgagatgggaggatcgcttgagtttgggaggttgaggctgcagtgggccgagattgcaccrttgtgctccagtctgggcggcagagagagaccctgtctcaaaaaaacaaacaaacaaacaaacaaaaaggaccagggaggctccctgtaagtagctaaag

SEQ ID NO: 308776 - DNA, 201 bp, Homo sapiens
agttgccattgtcatatgaatgcttgaaatttcatttatatttcattaattccattgaactttggaatcataaatgcatgattcttcaagagcatctacaytaagaaacgtttcttatgtgacattgtttccagcctcctttatggctgtggtcagttctgaatctttgcatcagaaacaaagatataaaatgattgtcat

SEQ ID NO: 308777 - DNA, 201 bp, Homo sapiens
aaaacccacccaattacagtgccaggtacaatctttgatgagattcagggaaaacaaattaatctgtgtgggagagattctctttgtatgaaggcaagctrtgaaatcagaatgaactgggcattgtttgttaagggggaaatggttatataaattgaagatggtgtagtctcaaaaaccatgatccattattaggttact

SEQ ID NO: 308778 - DNA, 201 bp, Homo sapiens
aagcagtcttattcatgtgttcacatcaacgtgatcttaagatcatgatgactggcccggaccccagtaactctgaatggcagctgatatattttggtaayggataagagttgagggtcagtctcagtgctaaaaggtgaagagcctggtctgctgttgagcacaagtgaaggaaggaagaacaacctccatgtgtggaag

SEQ ID NO: 308779 - DNA, 201 bp, Homo sapiens
tctgacttaatgcagagagatgaaaatatgctaaaatcatgttttttttaaaggcatagaccagagacattttggaagcttttcatctagcaaagccagcrttcctttaagcaaagcatcaggattgcttcaatatttaggtattaatattcccttgtggctcaatcagctctttgaagatgaatttctcagcactgctgt

SEQ ID NO: 308780 - DNA, 201 bp, Homo sapiens
caggggtcagcacgctactacccacaaaccaaatctagctctccgcatgtttttgtaggactcgtaagccaagaagggctttatatttttaaatggttggmaaaaatctacagaataatattttgacatgtgaaaattatatgtaattcagatttgtgttcataaggaatatcttgttagagccacaaaaaaagttatatt

SEQ ID NO: 308781 - DNA, 201 bp, Homo sapiens
tctctgcctttgctgtgcttagatatgaagttcataatgttgccccccaaaagcaccaaaataggcacaaacctagcagacatctggttgtccaatgaacycttacattggcctagagtagtggttacttgcactttgccccattgtggctcacaggcatgatttgttgaatttacacagtgtttatgattcttttcttca

SEQ ID NO: 308782 - DNA, 201 bp, Homo sapiens
agctagatggtggttagtcggcaagctagatggttaactggcaagctggaaaactaactaactgaagttttcgattgtgaaatggtaatagaggaaataamcaggatgctgtccaagagaattatggagaggatagggacctaccttaattaagaaaggccactctggagaagtggcttgttcatggaaacctacagaatg

SEQ ID NO: 308783 - DNA, 201 bp, Homo sapiens
taataaacacaatcttctcctgtgcactagaacctcactgtcatggtcccacaaataacggccaaaaagagttgaactcctctacttgtaaaaaggctatrctctgacttggtgcttataaacccacatattcattattcagagtgacacaaagagaatgacccaaaagcccaggcctaggcaaggccaagttctgcagag

SEQ ID NO: 308784 - DNA, 201 bp, Homo sapiens
caggcttttttctagcgtttctttagtgcaaagccctcagctggatgtctgctacatggaaatccagcatgtggtcccatcctgaggagccacagcgtgarcccagaagccaactgatgcaatgaaatgttcttgggggtactatgcagtacagcataccctacaaaaacatttcagagtgggcatcatctacaaattcat

SEQ ID NO: 308785 - DNA, 201 bp, Homo sapiens
tgctttgtggcccagcctagtctggaactcctgggctcaagtgatgctcctgcctcagccttctaaagtgctgggattataggcgtcagccactgcgcccrgcccctttgtctttcttgtaagcacacacgtgcttatatgcttgaattctcactatgtcatgcaatgcaaataaaaaaaattgttacttcaatttggcat

SEQ ID NO: 308786 - DNA, 201 bp, Homo sapiens
aaacaaacagccctttcagatttgcctttctattctaaacagctcccaagttaacagagtagaatcagttatacacctgtgtgctgattgaaagtaacttycttggcattcacgtgagatcacttaaaatgccctagagtagttactcaggagcctctcctactcccttgtctccctgccttttcctggagacttcttttc

SEQ ID NO: 308787 - DNA, 201 bp, Homo sapiens
tctttctctttacagggtgtgagattgtacaggttttttttccctctccctcatgtatcatgtttgaaaatgaagaatctttacccagtctctaaactggrttcctttgacacagttatggaataaaatctttgatgtttccttctaaacagtgttcacatttgagggttgatggacttaaaacactaataaagataggca

SEQ ID NO: 308788 - DNA, 201 bp, Homo sapiens
ctctttttcctcattacttttcatgaacacaatagagcatagtgttttaagagcttattcactggagtcaagatacttgcttttgaattccatgatttctrcagtgtaatggtaatgtagttatttaaacttttcaatctcagtatccttatctgtgaagtagagagaacagctaatacatcatgtagattgcagtggtaa

SEQ ID NO: 308789 - DNA, 201 bp, Homo sapiens
agtcatttttggacaacaccctggaacaggaaaccacagtttctcctaaatttgtacaggatggaaatagataacattcttcataaaaccatggccacaaktaatgctttcaaatcaacataatggtggatggtttgttttttgcatttcttacctgaatagattatgggaacctgcagcatgggaaatttcatgaataat

SEQ ID NO: 308790 - DNA, 201 bp, Homo sapiens
agtgatctgcctgccacagccacccaaagtgctgggattcacaggtgtgagccaccgcacccaacctgaatccagctttttcatctttagatcttgacctyttgacagttacccagtaatatctcctaaaatgtgggatacagtaaagtaactggaagttgagtcacaagcagggctcctgtttgcccatgtcttgctgaa

SEQ ID NO: 308791 - DNA, 201 bp, Homo sapiens
catgaggacataattcatatcatggtaatggtgaactttattagaagtaacagaaaaactccatttggttttgaaactcactttgttttcctctcttctcmtttgtttcacacagtcgccatccttctgaaagacgactattttgtcagtggagctggtctacctggcagattcaaagctgagaaggtggaatttcactgg

SEQ ID NO: 308792 - DNA, 201 bp, Homo sapiens
ggaccagggagcaggcctggtggctcatgcctataattccaacactttgggaagctgagatggaaggcttgcttgagcccacgagttcgagcccagtctgsgcatcacagtgagacctaatctgtaccaaaaaaaaaaaaaaaaaagaaagaaagaaagaaaaaaattagctggacatggtggcatgttcctgtagtcctg

SEQ ID NO: 308793 - DNA, 201 bp, Homo sapiens
tgcctgggttttatctactttacagttttgctttggtctggtatggaaggctggtctacctgtttgtgaggcaaagcactttaccagctggtagctgaacsatttgtgatattttcattgtttttcttcttctctgttgacatttgccactttcagtcccatttccatctccatgtctttctttcatcttgttagagtgca

SEQ ID NO: 308794 - DNA, 201 bp, Homo sapiens
cggagaatttttcttctcagcagtttgcgaagcttcttggctactgataatgcctgggttttatctactttacagttttgctttggtctggtatggaaggmtggtctacctgtttgtgaggcaaagcactttaccagctggtagctgaaccatttgtgatattttcattgtttttcttcttctctgttgacatttgccact

SEQ ID NO: 308795 - DNA, 201 bp, Homo sapiens
ttaccatctctttcaagcgaaagggtcttttgatttatgacttggtgggatccttttcagcattgatagagagatgtatgggttaatggttgaaaatacayaggatttggttgttagagtatatctagagaaattgagctactttgagggaaatataatatcaaatctcacttgtactgataatttgtataatggaaatat

SEQ ID NO: 308796 - DNA, 201 bp, Homo sapiens
gtttaccatctctttcaagcgaaagggtcttttgatttatgacttggtgggatccttttcagcattgatagagagatgtatgggttaatggttgaaaatayataggatttggttgttagagtatatctagagaaattgagctactttgagggaaatataatatcaaatctcacttgtactgataatttgtataatggaaat

SEQ ID NO: 308797 - DNA, 201 bp, Homo sapiens
gatagtacagagcggtcccatataccccctttttttgttttctctagtggttccatcttacaggattacagtacaatatcaaaaccaggagtttgatattrgcacaatatatgtttgtaggtcgtggacattttatctcatatatggtgtaaccactgctgaagtccagatactggatgattcccatgtcacaaagatttc

SEQ ID NO: 308798 - DNA, 201 bp, Homo sapiens
attggatgattgacaggaagttacagatttaaagtcatggtgacttttctatttttttttctttttactgtcacaacagcattaattttcatggcctgatkatctgttgagatatctttctaagaagttgctaagttttatctgccctcatcttcctccatccctcccccttggtattaccattataaataggatacatgt

SEQ ID NO: 308799 - DNA, 201 bp, Homo sapiens
gctcactttacagtgcagtcctgacttgtcctatgtcctctccctactttttttctcctgggcaccatttgtcattctatatgttttactttatcttgttmattatttatccctcctccgtcctgcttagggggtaaacaccatgatgacaagggaattttttttttttttgagacacattcttgttctgtcccccaggct

SEQ ID NO: 308800 - DNA, 201 bp, Homo sapiens
cgctggatagaattggactttgcagaaaggttttgataacctttttggcctggtgccctgccctcatctagtcctttcccatttgtaatagaagcatgaarttcaatgctattgacttcccaggagtcattgaattgccacacacacagtgaatttggagtttggttcttaagttgaaaggggataaacaatcgacattga

SEQ ID NO: 308801 - DNA, 201 bp, Homo sapiens
tgaggtggagccattcttgtttggagtatgttaatttcaccacccttttcaatgggtgacacatgagtgacagttttctcccttttaactacatttctccyttttctcaagggagataaaggctcaaatgagagatcagatgaaaatttgaaaagcttgatattctacctagaataagaacaatggttgccattggtgatt

SEQ ID NO: 308802 - DNA, 201 bp, Homo sapiens
tcttaaagttgacctagcgactacataaaggtgttcatttcaccaatgagtctctgttggaaaatgaagtctttttgacaactaaaggaaagttaaagacrtaagagccttctccaacacgtctttgacatctgcctttttgagcaagtttgtcattgaggtggagccattcttgtttggagtatgttaatttcaccaccc

SEQ ID NO: 308803 - DNA, 201 bp, Homo sapiens
tgaactcttatccttctgtcctctcttttaatatgattgtgttgatgaatgctcataactcagtgttgattctgcacctagaatcccagcattgcatcctktgataaaataatgctgttcaggctttttaataagtcaaatcaaagtagtgttgatcagtgagtgccttgaccaacttgcctgtaggagaccttggtgctt

SEQ ID NO: 308804 - DNA, 201 bp, Homo sapiens
atccgtcacttttctaaagagaccccctctctttccctctcagaaatccccatagtaactaaagtttttgttgcaactatctctgtgttggtacatttatraactcttatccttctgtcctctcttttaatatgattgtgttgatgaatgctcataactcagtgttgattctgcacctagaatcccagcattgcatccttt

SEQ ID NO: 308805 - DNA, 201 bp, Homo sapiens
gggatacccaatggttcatttttgttctctacatcttttttttttttttcgagacagagttttgctcttgttgcccaggctggagtgcaatggcatgaccwcggctcaccgcagcatccgcctcccaggttcaagtgattctcctgcctcagcctcccgagtagctgggattgcaggcatgcaccaccatgcctggctaat

SEQ ID NO: 308806 - DNA, 201 bp, Homo sapiens
ggccagggtgggcggattgcttgagctcagttactctaaaccagcctgggcaacatagtgagacgctgcctctaaaaatgtatatatatatgtataaaaastagcccgatatggtggtgtatacccgtagtcccagctgcttaggaggctgaggtgggaggatcgcttgagtccaggaggtcaaggccgcagtgagccatg

SEQ ID NO: 308807 - DNA, 201 bp, Homo sapiens
ttgagtctttcagtagattgccttccccctgagctatctgcatgctgtttccttacttactccgtcatgattttttttcttggaccatgtgtggggggcaygtgggagaaatcgctttttgagaggaaataaaacgtagagctttctaaatctgcatataaattactgttgggttttctactctcatgttgggatcatttc

SEQ ID NO: 308808 - DNA, 201 bp, Homo sapiens
tgacttcatgtgacgagttgcattcaaaatacagtcacaactttgtttcaggcacaaacttattaattaaaaatattgtttaaaattaccttcagactatrtgcatatataaggtatatgtgaaagttaaatgaatttcatgtttagacttggctctcacatttagactcaagatttctaagatatctcattatttatttg

SEQ ID NO: 308809 - DNA, 201 bp, Homo sapiens
tgaggttcctctaacgtcatcttgaactctgcagaagtgtgtttcttcctctgaagtgctattttgtggtaatttaatgtatttttttcatgaataatttwcccatagagtcctaatatcttaagacagtgaattttgttgtttatcaaagatgtatctcaactaggagacagaaatcaatttcttattacaaagcaaaga

SEQ ID NO: 308810 - DNA, 201 bp, Homo sapiens
atggtgtgatctcggctcactgcaacatctgcctcctgggttcaaacgattctcctgcctcagcctcccaagtagctgggattataggcacctgctaccaygcccagttaatttttgtatttttagtagagacggggtttcgccatgttggccaggctggtgtcgaactcctgaccttaggtgacccgcctgccttggcct

SEQ ID NO: 308811 - DNA, 201 bp, Homo sapiens
tttcactcttgttgcccaggctggagtgcaatggtgtgatctcggctcactgcaacatctgcctcctgggttcaaacgattctcctgcctcagcctcccargtagctgggattataggcacctgctaccatgcccagttaatttttgtatttttagtagagacggggtttcgccatgttggccaggctggtgtcgaactcc

SEQ ID NO: 308812 - DNA, 201 bp, Homo sapiens
actatcagaatgaacaggcaacatacagaatgggagaaaatttttgcaatgtgtacatctgacaaagggctgatatccagaatctacaaggaacttaaacwaatttacaagttttctctttacttgcgtatcattcagctttcaccttcccccatggctaccacatgaatttacatttgtctgtctctaaaacattagaaa

SEQ ID NO: 308813 - DNA, 201 bp, Homo sapiens
aggctttgtgctagacccctttccatgtcgaatcccatgtagtgcgtacaatagttctatgaggttagataatagtagccccattttaaaagtaagtaaaygaaggcttagatataagaggaaacttctcttagtctcttgactagtaagtggccccagatcattccaagcttgtccaacccgtggcccagggcagcatgt

SEQ ID NO: 308814 - DNA, 201 bp, Homo sapiens
atgctgggattacaggcgtgagccaccacacccagtagttttttttttattttttagggatatttgcctccccggaacgctgtgtcactttgtgctgctcmtactaacaaagtatgaaaggactgtcctttctgcacatctcagccaactggtgatctaagctcattaaaaaaatattgagtcactatgtcagggcaactt

SEQ ID NO: 308815 - DNA, 201 bp, Homo sapiens
gaataatgaattgaccaaatatctgggcaccttggcccagtcaagttgacacataaactttaccgtcatagtatttaaggatatttttattttttaatgcstattttattattatttttgagacagggtctccctttgttgcctaggctggagtgcagtggtgtgaacatggttcattgcagccttgacctccctgtttca

SEQ ID NO: 308816 - DNA, 201 bp, Homo sapiens
ttaataaaaatccccagcagtatcctggaaatgtctattgagtctttcagtagattgccttccccctgagctatctgcatgctgtttccttacttactccrtcatgattttttttcttggaccatgtgtggggggcacgtgggagaaatcgctttttgagaggaaataaaacgtagagctttctaaatctgcatataaatt

SEQ ID NO: 308817 - DNA, 201 bp, Homo sapiens
actttgccttcacttcacatctttattcttaggcacctgtttcttgtccaccaccacgttcccactggcaggttaacaccaagcttgattagaaaaatacrtttcccaggtttgtcaaagtaacctgcacaatgtgcacatgtaccctaaaacttaaagtataattaaaaaaaaaaagaaaaaaaaagaaaaatacatttc

SEQ ID NO: 308818 - DNA, 201 bp, Homo sapiens
aaaatacagtcacaactttgtttcaggcacaaacttattaattaaaaatattgtttaaaattaccttcagactatatgcatatataaggtatatgtgaaasttaaatgaatttcatgtttagacttggctctcacatttagactcaagatttctaagatatctcattatttatttgaaaatattccaaaatttgaaaaaat

SEQ ID NO: 308819 - DNA, 201 bp, Homo sapiens
tgagctcaatctgtgttgcagtgtagaggcagaattccctcctcttaaaaagacctcaggtcttcagctgattgcatgagacccacccacattatagaggstaatcagctttacttctaaagtctactgatttaaatgttaatcacatgtaaaaaatactttcacaaaaaataacaatgatccttttaaaaagtaactagg

SEQ ID NO: 308820 - DNA, 201 bp, Homo sapiens
atataaggtatatgtgaaagttaaatgaatttcatgtttagacttggctctcacatttagactcaagatttctaagatatctcattatttatttgaaaatrttccaaaatttgaaaaaatccaaaatctgaaattttggattttttggaaaaggttcctcaacctctactggattctgtacttacaggttaggaaattgtt

SEQ ID NO: 308821 - DNA, 201 bp, Homo sapiens
tgaggcaggagaatcactggaacccagaaggcagaggttgcagtgagccaagatcatgccgttgcactacagcctgggcaacaaagcaagattccatcttaaaaaaaaaatttttttttaaatatgtcctttatggaacactgtgccttttcgtgactgactgtctttaggcaacaaaagcaattgcttactcacttaatt

SEQ ID NO: 308822 - DNA, 201 bp, Homo sapiens
tagagatgtttaaagaaaaaaaaaatactatttactgtcgccatcaccgcatcaaagaaaggatgctttgtcaccaaaggagtaggaggtgtataactgtrcaataaagaagagtcattgatgttaaatgaatcaggtgttatgggccttattcttggttattttaccaggacccgggaacgatgtcatcataggctggtc

SEQ ID NO: 308823 - DNA, 201 bp, Homo sapiens
gttttcttcttgttagaccttttgagttctttctagttttaggctttcatgagtaaagctgtaaagagcaatcttgtaaatgcctgttggtgcacatttgyatgcagttccctctggtgcctaccataagggataaggttaaatgtaattcatacggtgggtgcagaatttgcatttgaaccttgattctctataggcaga

SEQ ID NO: 308824 - DNA, 201 bp, Homo sapiens
agtctgaattcattggagtaaaagggaacaaaagaagctagcttcagagcaggaaaatgcctgtgatgacaaagaagcctaaaagaatgatttgcataaarctgaaacacttgaaaagcttcaagataataaggttaaatacaaaaggagactcaacctcagagtggctgcttttgaaataagttttctagagggttttca

SEQ ID NO: 308825 - DNA, 201 bp, Homo sapiens
tgtggcacagtcaacatgaggttgagctgattgggatgtaactacatgttcttaaaatgaagactttgagggtgttgttatgagaacaaaccaaaaatgcrgttcttccatgcacttgtagtaccccaaaattcccccaatgcttgtatgtttgtgctattttgttgttgttgcaaattgatacgagtacatatctattaa

SEQ ID NO: 308826 - DNA, 201 bp, Homo sapiens
aggatgcaggcaagtcagagtgaaagaaaggagccagtatccccaccacccgctagtgttttccataccaaaggacttaacgcttatgtttgcaaaattcratagtcagtacccttgtcagctgctgctttaaattctgtgtcctttgcctgtttctgggtcattgcctagtaaatggtaaacattgccatatcccagctt

SEQ ID NO: 308827 - DNA, 201 bp, Homo sapiens
aaaacaaaaaaaggagtttttaaatttatacaaaagtatgaaaaagaatgagaagttaggaaagtgtgaattatattttaagtaaggctttgtggctttgytgatcatggaaatctttttattaacacattagacaaattctttacatgccagtttgcattcacttaaacatttgtgggggtggtgtgtaaaatgtgcagc

SEQ ID NO: 308828 - DNA, 201 bp, Homo sapiens
agtacccctgactccttgcagcccttggctggggaagagctttgccttgacacaaaagctgcttggaacctgaaggttctttgcagctgagtagcaagttstttgctgaagggagctccaagttgtacccctgctagggctagctagagatacctccactatctgtgttggggtccctattctgtcttacttctgtcacat

SEQ ID NO: 308829 - DNA, 201 bp, Homo sapiens
attatgtgattatcgtcttggggctgtgattagaatgtgttgctatatattggtaacatttagaaatgtgtaacttcatcccagctccatggtaccgtagrgcaagcatgacataaacatggtcttgcagttgtacactggtttgagattccctggagactaaacagctatgagggagtcatgcttccgtttgccactgtt

SEQ ID NO: 308830 - DNA, 201 bp, Homo sapiens
gtttagaggcagaatcaagatagaattggagactctgtatttctaggttactttgtggtctttgtattatggtgcctatgtctttgtcaagttcacggtgrctatggagatcctgagctttgagggccatgtgtgaaagcaccatgcaacagtttgccttatgaaaattgcctgatttattcttgtttccaggggcctatt

SEQ ID NO: 308831 - DNA, 201 bp, Homo sapiens
ccgtaaagtagttgaagataattccctgttacagggcaaatgaaaacaggaaataattaaggattagtgtactctgtgattaatgatattgcataaaggamgtgtttgagaatgtttatttaaatgccaccttgcctgcaaagatacccgctacctactattcttcagagcttggttcctctaaaaatattcttccagtga

SEQ ID NO: 308832 - DNA, 201 bp, Homo sapiens
tggtttggtttggttttttgagataaggtctccctatgtttctcaggctggtctcaaactccttggctccaggagatctcaaaaacatcctggcacccaartatatgcctcatagccctagtgtgcaccttaggttctactgccccaaaacttgggattcctgccgtaaagtagttgaagataattccctgttacagggca

SEQ ID NO: 308833 - DNA, 201 bp, Homo sapiens
gtaggcaggggcagtgcctggctcttgtaatagttattgggccctaggctggagggattctctatgttaaggccagtcactggaacttgctccgtcaagcmggtaagttcaatctgaccatactgtcagatttaaagtagcttatattaaatggaatgaatgcaaaacagggcagtaaactcggccctgctctgttttggt

SEQ ID NO: 308834 - DNA, 201 bp, Homo sapiens
tgagggggttagggacctctgtgctagatgcctatcaccccctcaaagagtgacaaccaaaaatgtctctagacatggccatatttccactggggtacagratcaccccatgttaagaacactgctctggaagctttgtactaggaccctagagagaactaacaggtagtgctcattgctaatggaattctggtgaggatg

SEQ ID NO: 308835 - DNA, 201 bp, Homo sapiens
ctcatgttacttctcttgcttgatgttcaacccagcttaaagttaaagcagactcaagccaccattcattcattctgttgaggacagcatccatctggtatcttcttactttgttaattcagttattctatctacaattgtttctcacattgatgacttaggaatttcaggaatggatgagttaggaaaatgccaatgacc

SEQ ID NO: 308836 - DNA, 201 bp, Homo sapiens
aaagggaaagaaaaacaaagtgctttaccatgcccactgataatgtttcatgttgacagggggtgtaggacagggtttctgcatctcagcactatggacaytctgggtggataattcttttcttttttttttttttcttttgtcaacctccaaagcgtgagtaggcacaggaaactcccatgatgtggggcactattcttt

SEQ ID NO: 308837 - DNA, 201 bp, Homo sapiens
tcatgttacttctcttgcttgatgttcaacccagcttaaagttaaagcagactcaagccaccattcattcattctgttgaggacagcatccatctggtatcttcttactttgttaattcagttattctatctacaattgtttctcacattgatgacttaggaatttcaggaatggatgagttaggaaaatgccaatgacca

SEQ ID NO: 308838 - DNA, 201 bp, Homo sapiens
atcctccccctcaaggttcagtagtggtgtgaaagggaaagaaaaacaaagtgctttaccatgcccactgataatgtttcatgttgacagggggtgtaggrcagggtttctgcatctcagcactatggacattctgggtggataattcttttcttttttttttttttcttttgtcaacctccaaagcgtgagtaggcacag

SEQ ID NO: 308839 - DNA, 201 bp, Homo sapiens
tggaaatagagaaaaaggtataccaaattttgggtgctttttgagttttctgtcttatgggtaaatgatatttttgtgcctttttctccattgcaaaaagsaaatagtttttcataagaattgctggttcaaactgtatatagataaacacacacataggatagatattgatgggtggtaaaagttttctaattggttcag

SEQ ID NO: 308840 - DNA, 201 bp, Homo sapiens
aaaaaaatcaactgctctcccagtttcaagctccctcacagcagacttgatcctccccctcaaggttcagtagtggtgtgaaagggaaagaaaaacaaagkgctttaccatgcccactgataatgtttcatgttgacagggggtgtaggacagggtttctgcatctcagcactatggacattctgggtggataattctttt

SEQ ID NO: 308841 - DNA, 201 bp, Homo sapiens
ctttttttggagacaagtctcactctgtcgcccaggctggagtgcagtggtgtgatctcggctcgctgcaacctccgccacctgggttcaagcaattctcrtgcctcagcctcctgagtagctggaactacaggtacccgccaccacgcctggctactttttttgtatttttagtagagacggggtttcagcatgttggcc

SEQ ID NO: 308842 - DNA, 201 bp, Homo sapiens
cagcatgttggccaggctggtttcgaactcctgagctaaggcagtgtgcccgcctcggcctcccaaagcgctaggattacaggcgtgagccaccgcgcccrgccgtgttgaagtgttttctatggaagctcatctttgaaaggagagctctgtgtaaatgttaggtattctcatccacaaagttatgggtcttccttattt

SEQ ID NO: 308843 - DNA, 201 bp, Homo sapiens
tagtagagacggggttttaccgtgttagccaggatggtctctatctcctgacctcgtgatccacccgcctcggcctcccaaagtgttgggattacaggcgkgagccaccgcgcactgccgtctgctcttcttaagttgacagaaaaggagttttacagtttttacatttcttaatcctttatgggaaatagtatttctttc

SEQ ID NO: 308844 - DNA, 201 bp, Homo sapiens
acctcagccggcctgaggttcacagggtttaaatggaatgcagtgggaagtaaagagtgatcccaaggagaagtaaaaatcttgacaccttactctcttcrgcttgtcccacttttcttcaactgccccgctactggaacattttctctttctcaatttcgattgtccccttaagcaatttactaattagacattaaaact

SEQ ID NO: 308845 - DNA, 201 bp, Homo sapiens
gttttgagaagttgctcagtttcagaggacttggtggtgtttttcattaaaaggtaccagaaatttagcagcccgaccaagagccaggcttataagtcacrgaatgaccctggtcagtacatgcagaaccttaacagtatgatcttaagatatctcattagattccagtgaataaggccaggtaccgtggctcacgtctgt

SEQ ID NO: 308846 - DNA, 201 bp, Homo sapiens
tatggtgaaaccccatctctactaaaaatataaaaattagctgggcatggtggcgggcgcctgtagtcccagctactcgagaggctgaggcaggagaatcrcttgaacccaggaggcagaggttgcagtgagcccagatcgcaccactgcactccagcgtgggtgacagagcgagactccgtctcaaaaaaaaaaaaaaaa

SEQ ID NO: 308847 - DNA, 201 bp, Homo sapiens
agcactttgggaggctgaggtgggcagatcacgaggtcaggagatcgagaccatcctggctaacacggtgaaaccccgtctctactaaaaatacaaaataytagctgggtgtggtggcgggcacgtgaagtcccagctactcgggaggctgaggcaggagaatggcgtgaacctgggaggcagagcttgcagtgagctgag

SEQ ID NO: 308848 - DNA, 201 bp, Homo sapiens
tagtatatagtgaatatcaatgctgatacatttaaactgtggaggcatcaggggaccaacctgcagtgatgctaagtggaactgacaagataatgacatgygggttattgttgattaatccagttcactggagaatcattgggaaatgcatttatcctttcacctgaccctcccaaccccacaaaaatgatttacagtaat

SEQ ID NO: 308849 - DNA, 201 bp, Homo sapiens
aaagcaatttctaaaaagtttcatattacaaagagcacaaacactgtggtagtgatttttgtgtttttgaaatacaaatgagttccagatgcacctagggrcccctccccctccactgtgtccaaggcgttaagctccactgcatttcagaaccagctttatacatagaatagccatgcaagcaaggaaacgttgtttcat

SEQ ID NO: 308850 - DNA, 201 bp, Homo sapiens
aaatgcatttatcctttcacctgaccctcccaaccccacaaaaatgatttacagtaatcttggagtcacccagtcctttcttccacatcttccagaacttaaaaaaaaaaaaaatccgatgtttgtactatttcccctcttccctacttttgatgacggccaatttgttaaaaatgtaagaatggccagatgtttggtgtt

SEQ ID NO: 308851 - DNA, 201 bp, Homo sapiens
taataataaaaaatcccggtggagcaatgcaacgtattttctcctgtgtgggaaataactcattcattcattccatagtcatttaatgagtgcctaccatrtgcttagctttgtaaggaccctcccagtgggagaggtcatgatacaacatccagaagaaccttttgtaaggggatctccaccagaaatgataagatgacc

SEQ ID NO: 308852 - DNA, 201 bp, Homo sapiens
gctgattcttgacagatttgtccacaatgttctcatctttgaatcttcgacttacgacttacttaaaactggtgatggttctttttgtttttgtttttttktttttttttttttggagatggagtttcgctcttgttgcccatgctggagtgcaatgccgtgatctcggttcactgcaacctccacctctcaggttcaagt

SEQ ID NO: 308853 - DNA, 201 bp, Homo sapiens
tgtttttttttttttttttttttggagatggagtttcgctcttgttgcccatgctggagtgcaatgccgtgatctcggttcactgcaacctccacctctcrggttcaagtgattctcctgcctcagcctcccgagtagctgggattacaggcacgcgccaccacacctggctaattttgcgtttttagtagagatggggtt

SEQ ID NO: 308854 - DNA, 201 bp, Homo sapiens
atggccttgatttcctgacctcctgatcctcccagctcggcttcccaaagtgctgagattataggtgtgagccactgcacccagccttgtttggaaatttytaaatgagagcagaagtacccatccaatggtaaaaaataagaaggatccataaatccagtgttacgaatggtataggaaaattggtattctcctgcactg

SEQ ID NO: 308855 - DNA, 201 bp, Homo sapiens
ttttggagatggagtttcgctcttgttgcccatgctggagtgcaatgccgtgatctcggttcactgcaacctccacctctcaggttcaagtgattctcctkcctcagcctcccgagtagctgggattacaggcacgcgccaccacacctggctaattttgcgtttttagtagagatggggtttctccatgttggtcaggct

SEQ ID NO: 308856 - DNA, 201 bp, Homo sapiens
ttgtatatctgattatgtgctctatgtatatttgtgccttaaatgtaaaaagagtacaatatttctgccctcccccaccccccacactccaagaacaaacttttacctcaccgggagcaagaccacccaactagaggcagtgtcacccctgttgagaatgcatgctatgatgtgataaaacctcaggggtttcagagttca

SEQ ID NO: 308857 - DNA, 201 bp, Homo sapiens
atcgggagaactcctgacataaagcactttatattcacaaccgttcttacctctctttcctcccccagataaattagttgcaagatgtttctaaatagaayacaaacaccactaataaaagttaacatttgctgaggacttaactgatgtaaaatgctaatgacaactactatacagtgtctcacttaatcttcactggga

SEQ ID NO: 308858 - DNA, 201 bp, Homo sapiens
tccgtaggttctaccattctcctatttattatgcatatcaagtttttcttcccctgatgccatcgatggtggggcatagatacttgaatatttgtctttgyatatgcagcacttgtggcaaagtattaatattgtgaataaagagctccttaaataataaaacaggaaatcattagaaaaaactaagtaaagattctttac

SEQ ID NO: 308859 - DNA, 201 bp, Homo sapiens
tattttgcaagttgattttctcctctaacaatatatctgagaactttcaaggttggtcttgaactcctggtctgaagcaatcctcctgcttcagtctcccraattagtgcctaatttcttccttccccctccgtaggttctaccattctcctatttattatgcatatcaagtttttcttcccctgatgccatcgatggtgg

SEQ ID NO: 308860 - DNA, 201 bp, Homo sapiens
ccccagagaaaactactgttagtttgtgctgtttttccagacgtgagccttcccttgccttagatctatatacttgggcatatacccacaggacacaaacwatactgagttgtatgacatttttaaagtcaaatgtgatcacagtgtatttattttgcaagttgattttctcctctaacaatatatctgagaactttcaag

SEQ ID NO: 308861 - DNA, 201 bp, Homo sapiens
ctcattacagataagcctagtcctcccatttcccccggacgcctctccccgattgctaaagaagcagccgctccccgggtagctgccaggaaatcagtccrgccccgcggcgctgctttcaccctgcagggtgtaagaggcgcacttcctgcgccctccccgcggccaaaccggggtgcgggaaccttctccagagaagct

SEQ ID NO: 308862 - DNA, 201 bp, Homo sapiens
cccccggacgcctctccccgattgctaaagaagcagccgctccccgggtagctgccaggaaatcagtccggccccgcggcgctgctttcaccctgcagggkgtaagaggcgcacttcctgcgccctccccgcggccaaaccggggtgcgggaaccttctccagagaagctgcgagttggggaaactccgccaccgatccat

SEQ ID NO: 308863 - DNA, 201 bp, Homo sapiens
agtgctgggattacaggcatgagccaccgcgcccggcctatgctgaggttttaaaatgggtacccaaccacatttaaatagggcttctttgtccatttttwtatatatatatatatacatatatatatatatatatatatatgtatatatatatataaacctatttcattcaatatttcacatggaatgtgcatgtaaaaa

SEQ ID NO: 308864 - DNA, 201 bp, Homo sapiens
gctaaaggggcttacagaattaaatacaggagcaagggtaatctgatatctggcatcccagctgaggggagaatagtgattagtaggggcagtggtgaagrggagaacatttgcactaagtgaagatggcccacaactgtgcatccgggccagttgttgccgtatgtttcaggatggcttgataccaacatttttaaaggg

SEQ ID NO: 308865 - DNA, 201 bp, Homo sapiens
ttttttttgtatcttattattttatatcttaggtgctctaacatatttgaaaacccatatgcttaaaaggaccagggagcaggcctggtggctcatgcctwtaattccaacactttgggaagctgagatggaaggcttgcttgagcccacgagttcgagcccagtctgcgcatcacagtgagacctaatctgtaccaaaaa

SEQ ID NO: 308866 - DNA, 201 bp, Homo sapiens
atattaactgaaccttgcatggtggactagaggttgctgattgtcttctattatttctccataatagaagccctgtttttctaggtgggcccatagctgcraggaataaagaccagccttcaccctcccttgtagttagccatggtttaagtgtgcaacttctaggacatttcctcagtggaagacggtcatgtccttagt

SEQ ID NO: 308867 - DNA, 201 bp, Homo sapiens
aggaaaagattttgtttttctaaaaatgaattatggatatgaaactcttttagttggaattttatgtatgaatttgagaggtccagaaaatgaaataaaawtagacttatattggaaaggattagaattctagctcttaacgcctttttactttttttttttttttggccaagtaaaatggctaattatactgggaactag

SEQ ID NO: 308868 - DNA, 201 bp, Homo sapiens
tttgatataaagtctccatggcacataagagatagtcagttaatgttgcttatcatcatcatcatttttttctggaaagggccacatagaacatgttttargctttgcaggtcataccttgtctgtcaaaactattcaacactgcccttgtagcaggcaagcagacatagataatgcataagtgaatgggtgtggctttgt

SEQ ID NO: 308869 - DNA, 201 bp, Homo sapiens
tgagagaacctgagccagaagcaagccaactaaactgctcttacatccatgccccacagagcctatgagatgataaatgtttgttgttagaagccattacrttgtgggataatttgttacacagtaatagatcactaatgcacaataatggtgggggtcagatacacaggaacaaactgaatccataagaagatgatggtc

SEQ ID NO: 308870 - DNA, 201 bp, Homo sapiens
ttgaacatagtatgagaaagaatgaaattctggccgggcgcggtggctcacacctgtaatctcagcactttgggaggccagggcaggcggatcacgaggtsaggagatagagaccatcctggccaacatggtgaaaccctgtctctactaaaaatacaaaaattagctgggcctggtggtttgtgcctgtagtcccagcta

SEQ ID NO: 308871 - DNA, 201 bp, Homo sapiens
gaatggttttttttaaataaggaaaactagagtttttcagggggaatgtggctatggtggaaactttgaacatagtatgagaaagaatgaaattctggccrggcgcggtggctcacacctgtaatctcagcactttgggaggccagggcaggcggatcacgaggtcaggagatagagaccatcctggccaacatggtgaaa

SEQ ID NO: 308872 - DNA, 201 bp, Homo sapiens
actttattcagatttcaccagtttaacatgcacttatttgtatttactcagtggtgtttgtggtgtgtatgtgtatgtatagttttatgcatttttttcayatgtgtagatttgtgtgaccagcatcacaatctagatacaggacagttccatcactgcaaagatctcatatgctaccccttgatagccacccccacatcc

SEQ ID NO: 308873 - DNA, 201 bp, Homo sapiens
accctcttcttcttacagcagtggtggggtttgggttttgttcttttttggtttttctttttctgctcatttcaagggagactttttttccgatgagctayatttttagagccagcaagtgttttaaacagttgggataaaccacctttcttggccccaaatgaatacaagtcttctccccagagaaaactactgttagtt

SEQ ID NO: 308874 - DNA, 201 bp, Homo sapiens
ctcctgcctcatcctcccaaaatgctgggattctaggtgtgagtcacctcacctggcctcaatcttttctttatttctttgtttcctttggagtgttagtragcttgagtagttgtgcgtttcattgtggtaaaagatacatgaagagtgaattgtgttacagtgagatcaggaataaaggaagattacaccctgcgtgat

SEQ ID NO: 308875 - DNA, 201 bp, Homo sapiens
aagtattacatgtattttcaaaataagtatctccctggatcatgcatgtgttttgacttccagaagtcatcatcattaatggtttaggaagttgccttgtaatttttgtgtatataccgttactggttttgatttgtatttattttttctttacatgatgtgatatatttctgtaataatagttctgcaactagctttttt

SEQ ID NO: 308876 - DNA, 201 bp, Homo sapiens
tttttgtagagaactagtatcgctatgttgcccaggctagtcttgaactgctggcttcgagcaatcctcctgcctcatcctcccaaaatgctgggattctrggtgtgagtcacctcacctggcctcaatcttttctttatttctttgtttcctttggagtgttagtgagcttgagtagttgtgcgtttcattgtggtaaaa

SEQ ID NO: 308877 - DNA, 201 bp, Homo sapiens
aagacaaactgcttcattctcagcattctattgtcaactgttcaagattattctgctcagaggctgatctacatcattattgtcaaattttaaaaacagcygggttcccatagatatttagaacataggcatggttctcatatagtcttataagacagctgtagatcagacctcacccaaattactctactcactcacaga

SEQ ID NO: 308878 - DNA, 201 bp, Homo sapiens
aagtaaattaaattctgcataaatctgaaacagtacctcgattttcatttttatttatttatattttttgtagagaactagtatcgctatgttgcccaggmtagtcttgaactgctggcttcgagcaatcctcctgcctcatcctcccaaaatgctgggattctaggtgtgagtcacctcacctggcctcaatcttttctt

SEQ ID NO: 308879 - DNA, 201 bp, Homo sapiens
tactttgtgtttatataaagtaaaattatagtgcacagtgtaattttatggctaggtaggtgggaaattattagtctaaataaatacactttttagtagarcagctgtgttaagtaaattaaattctgcataaatctgaaacagtacctcgattttcatttttatttatttatattttttgtagagaactagtatcgctat

SEQ ID NO: 308880 - DNA, 201 bp, Homo sapiens
aactcaagctatctgcccgcctcagcctcccagagtgctgggattacaggcatgagccaccatgcccagccaattttgtggcattcttacttgccctgtgrtgttaaatactaaccccaaactagtgtaaggttatattcaatcatcaaactttgttttaagtcatcatcattcaaatgtatgtaaaagcatcatctcaat

SEQ ID NO: 308881 - DNA, 201 bp, Homo sapiens
acaggcatgtgccaccatgcccagttaatttttgtagaaataaggtttcaccatgttgcttaggctgttttcgaactcctgaactcaagctatctgcccgyctcagcctcccagagtgctgggattacaggcatgagccaccatgcccagccaattttgtggcattcttacttgccctgtgatgttaaatactaaccccaa

SEQ ID NO: 308882 - DNA, 201 bp, Homo sapiens
tggaccacaggcatgtgccaccatgcccagttaatttttgtagaaataaggtttcaccatgttgcttaggctgttttcgaactcctgaactcaagctatcygcccgcctcagcctcccagagtgctgggattacaggcatgagccaccatgcccagccaattttgtggcattcttacttgccctgtgatgttaaatactaa

SEQ ID NO: 308883 - DNA, 201 bp, Homo sapiens
ggaaactaaagcttgactgttccttctgttcgtttgcaccaccagtttctaaagttatcttgtctgcagggccaacattactgaaaagttgctacttttgmgagcctgacttcctgggaaggaactggtcatagtgatgagaccaatagggttgtgagaatttgcaaactggaaacatagggatgggaaaggcagtgggac

SEQ ID NO: 308884 - DNA, 201 bp, Homo sapiens
gcattgttttttttaaaggcaggatctcattgtgttacttaggctggtgggcaatcatggctcactgcagcctgacctccttctgggctcaagtgattgcyctacttcagcctcccaagtagcatggaccacaggcatgtgccaccatgcccagttaatttttgtagaaataaggtttcaccatgttgcttaggctgtttt

SEQ ID NO: 308885 - DNA, 201 bp, Homo sapiens
tgtttgagcaggactgtatttaaggtatcgtatctctggatgttttctatatccactaacaagataggtcatgaatggagccactctgtaacctgattatyggttgacacatctccggtagacttttgtcttcatgaagtcatggttttgatattttgctgtttttatcccctcctttaaactctatttttattccaaatt

SEQ ID NO: 308886 - DNA, 201 bp, Homo sapiens
agaaagtcagtagatggttactcttggttggagggtagtgaccagatgagattgcacaaggcttctggaggagcaagaagcgttctctttcctcatcaggwtgccagttacgtggatgtgctcactctgagacttcattgagatcactcacagttgcacttacagctatgcactgttctgtctgtatgtcagtatttagta

SEQ ID NO: 308887 - DNA, 201 bp, Homo sapiens
acagaaagtcacctatggatactgccaagcttcattcttgccctgcgtttatggatctggggagtttatgtcctgagtatgtaggccgtgggtctgtcccrggaagcagtgcatgtgtaggtgctgttgttagcatgacccaagtaggcagtagggaccaggttgaattcagtgttgataacagcatccagcagataggac

SEQ ID NO: 308888 - DNA, 201 bp, Homo sapiens
cagctggatgttcattttaagtgcgtcagtccttttatgctaaagcttgtcatccccctccccctcatacacacctttttgttgggatctacagaaagtcrcctatggatactgccaagcttcattcttgccctgcgtttatggatctggggagtttatgtcctgagtatgtaggccgtgggtctgtcccaggaagcagtg

SEQ ID NO: 308889 - DNA, 201 bp, Homo sapiens
accttaataatcttataagggagcataagttgccttacggtgggaaggaaccttgctagtgtgatgacatttggatatgcacttatttattattattattwttttttttagagactgggttttgctatgtcaaccagggttgtctgaaacgcctaacctcaagtgatcttcccacctcagtctctgaaagtgttgggatta

SEQ ID NO: 308890 - DNA, 201 bp, Homo sapiens
gggtataggagtgatattctatttagtctaaatcaagcttgtccaacctgtgacccacggaccacatgtagcccatgagggctttgaatgtggcccaacayaaatttgtaaactttcttaataccttataagatttttttttttaagcacatcattagtgttagtgtattttatggtagcccaagacaattcttcttccat

SEQ ID NO: 308891 - DNA, 201 bp, Homo sapiens
catctttgtgtggcattctccttgtctttctctgtgtccacatttccctaatttttaaagaacatagtcatattggattgggattcattctaatggcctcrtctcaatttgatcatctgcaaagaccctgtttataaattttccaaataaggtgacagtcataggtatacagaggataaggacttcaaaatcttttgggaa

SEQ ID NO: 308892 - DNA, 201 bp, Homo sapiens
gaagtaatatacaaggtattcattatttgttagctactattttgaataatgggtttttttcttctatttggccttctctccagttggtctttaatgtgtaygtcacctgtttggaataactggttatgttagtgtctatagatccatttgtaaggatcaatttgtctgagtagcttgctgttttctaacactggatggggc

SEQ ID NO: 308893 - DNA, 201 bp, Homo sapiens
gtatacaccctgtaactactgtctgggtcaagatatggaacatgcccatcactctgaaaggcttcctagtggaccttctcggtcttaaccttaccctcacwgcacatctatgagcgtactgacttccatcctcttctgtccctttttgtctatttgtgaccaacaatgattgctgctgctattgtagtcccaattgttaga

SEQ ID NO: 308894 - DNA, 201 bp, Homo sapiens
cacctcccaggctcaagtgattctcctgcctcagcctcccgagtagctgggattacaggcgtccgccatcacacctggctaatttttgtatttttagtagwgacggggtttctccatgttggccaggctggtcttcatctcctgacctcagataatccacccacctcggcctcccaaagttgtgggattacaggcatgagc

SEQ ID NO: 308895 - DNA, 201 bp, Homo sapiens
atggagctgggcatggaaattataaattattaggacagtttggtctatgcttttttgatatatgcttttatatatgtcttctctcattaaccataagtctyatctgcaatatattttgtgaattatttccaaatgttaaagattagcacgatactttaaaatgatgtttctttcattttcaccgcatcactttttttcttc

SEQ ID NO: 308896 - DNA, 201 bp, Homo sapiens
attttatatatgcctattgtaagtaaatctgtgtgttaatatacctttgtaaccaaaccacctctcccagaatagacaaatggcttaatcaacatggtctstgtcacccatcttctgagtaaaaaaaggatctaatcagatctgacatggagctgggcatggaaattataaattattaggacagtttggtctatgcttttt

SEQ ID NO: 308897 - DNA, 201 bp, Homo sapiens
acacagaaattcaattgctttcaacatattgcaatcaactgcattttatatatgcctattgtaagtaaatctgtgtgttaatatacctttgtaaccaaacyacctctcccagaatagacaaatggcttaatcaacatggtctgtgtcacccatcttctgagtaaaaaaaggatctaatcagatctgacatggagctgggca

SEQ ID NO: 308898 - DNA, 201 bp, Homo sapiens
tatgttttgtcaattaaaagaaagctgtgttaatatttgatgtatatgttgcagccggcgccctcatgtggtctgtgtgccaggtggttacatgtcttatytggcaggtattcaatggaaagaatgggaataccagtgtacacagaaattcaattgctttcaacatattgcaatcaactgcattttatatatgcctattgt

SEQ ID NO: 308899 - DNA, 201 bp, Homo sapiens
ccatttgcagcttatttctatcgtagttggagtttctcaaagcttaggaggcatgaagtacctaatttggaataattatattaaattcagattccagggcmccccttgagacctattcaaatttctaatcttgttcctaggaatccacattttctttaatctacccaggtgaattctgatacgtgataaaattattctcca

SEQ ID NO: 308900 - DNA, 201 bp, Homo sapiens
cagcacaactgccttgttatgaatttttcttaaatgcatatatactgtatttaaaattaaaatatagataccaatttaccaaagatacatattactaattytaagcaaaactaaaaaaaaaacccaactcatcataatttaagaatcaaaatgtagtttgtcttaagaatttagtggttatactggaaatgcattttcaac

SEQ ID NO: 308901 - DNA, 201 bp, Homo sapiens
agaaatgactttgacacaactttgaagttgataaccttgaaatggagtaagaaggtgaagatcctaaaaagtaaaaacaaaacaaaacaaaaaaaaaaacrgaagccggggagaaacgtatctcatcgtccctcttttgtatccttcagctgactcagtactcaagctattccctgtccacttaagatctgtgtaatgcga

SEQ ID NO: 308902 - DNA, 201 bp, Homo sapiens
aaattgtatcctggaatgccttgctcactgttacagacttgcatgaagttcaagttttatgtaagttctctaacccattcagctgtcaccttatgtaataygcattttcccctctcatttaatgctggatgtcaatgctgagctcctcagagatagtacatgcctcaggatggtaggaccccttcgtcctagatataaatc

SEQ ID NO: 308903 - DNA, 201 bp, Homo sapiens
atgcttccttcccagcccgtgaaagccattgtttgatgagaaaaaaaatacatgacttttctccccaggcatagaaggataatagctgtgcttttttttgkttttgttccttttttttttttttttttttttttgagacgaagtctcgctttgttgcccaggctggagtgcactggcacaatcttggctcactgcaacctc

SEQ ID NO: 308904 - DNA, 201 bp, Homo sapiens
gtaattattttaaattaaatagcattgtggtagaggagaggacaaaagagtgtgacccggatgagtgttttaatttgcattcattgtaagaatggggaagkggtgttggtgtggggtgagggcagccatttcatgaaactcatagtagttgtctcagaatgctaccttgtcttagctttgcaattgaaaggtagcttagat

SEQ ID NO: 308905 - DNA, 201 bp, Homo sapiens
tcaacccctgtgttcaaaacttctcattatggctggtgacatgcacagatggtcaccaacagctcaatactgtggcatttcgcacaggtgaggtgttcaagctgggcctccagggtgtctgtccttggggactttttccttttatctttaattatcattgtaaaggtttatctttacaatgtaacttgaagaagcttagaa

SEQ ID NO: 308906 - DNA, 201 bp, Homo sapiens
tcttcttgtcttggaaggggttagaaggtaatagtcatttgaacatatgtccacaaaatcttttttcagaaactgaggtttaattgtcctcctattgactrtgagctagacttcatgtctcctgatgaacataataaggttgaagtgatagtgactttagagacaatatctctaaagagactttctgtcttggataacttt

SEQ ID NO: 308907 - DNA, 201 bp, Homo sapiens
ggctgaggcaggagaatcacttgaacccaggagacagaggttgcagttagctgagatcatgccactgcactccagcctgggtgacagagccagactgtatmtcaaaaaaaaaaggaaaaaaaatggctaaggaatgcttacctcatgagattattttaagattaaatgagctattgtatttaaagcatttaatacacacag

SEQ ID NO: 308908 - DNA, 201 bp, Homo sapiens
taacatagggatggagagaaaacttccttctaagttttcctagaaagtctggcacctttgacatagctataacagaaagaaaaatatatatatgtatttgrtactggttctagataatgccattaattagatttaaaatgatgcttatagcaagcatatgtacaacgtaatatgttccagctacgactctaagcacttttc

SEQ ID NO: 308909 - DNA, 201 bp, Homo sapiens
gttcaagacaagcctgaccaatatggtgaaaccccgtctctactaaaaatacaaaaattagccgggcatggtggcacatgcctgtagtcccagctactcargaggctgaggcaggagaatcacttgaacccaggagacagaggttgcagttagctgagatcatgccactgcactccagcctgggtgacagagccagactgt

SEQ ID NO: 308910 - DNA, 201 bp, Homo sapiens
gcagcccctcttgatgtggcacacctagaccataagtcagttataaagagtccttaggagtgttgggccgtggatgggaggggaagggaagtgactggtasagtttcaaaaggtagcttgtgtacagcccttcctcatgaattaaaatttatgaaagctgtttgggaaattcgatacccagaggtgcagacaccacatttg

SEQ ID NO: 308911 - DNA, 201 bp, Homo sapiens
ctctctgctcagtttctctattttgaaaatggctcttggccgggtgtggtggctcacgcctgtaatcccagcactttgggaggctgaggcgggcggatcayctgaggtcagaagttcaagacaagcctgaccaatatggtgaaaccccgtctctactaaaaatacaaaaattagccgggcatggtggcacatgcctgtagt

SEQ ID NO: 308912 - DNA, 201 bp, Homo sapiens
tttttattctgttttagtgaactaaaagcatctactcaatacttaagatctcccccccaggcccgggctgggcacagtgactcacacctgtgtaatctcgrcactttgggaggccaaggtgggtgaatctcttgaggtcaggagttcgagaccagcctggctaacatggtgaaaccctgtctctactaaaaatacaaaaat

SEQ ID NO: 308913 - DNA, 201 bp, Homo sapiens
tttgagagcatgtgatgagggtcaggtccaggtttgggggagtcaagaaaggctctctgggagaagacaggattcagctgaagttaactagagtggaaatyacaggctgagcagaggagattctcagctactagcaatagcatgagcaatggccccaagcaggagaactgagtgctcaaggaccagagagaaagccctcaa

SEQ ID NO: 308914 - DNA, 201 bp, Homo sapiens
gaggcaggagaatcacttgaacccaggaagctgaggttgcagtgggcggtgatcacatcattgcgctccagcctgggcaacagagcgagactctgtctccaaaaaaaaaaaaaaaaaaagtccttaccaatttgatagactccaaatggtatcttattgctgtttctgcctgtatattcttacccagggcagacttcggtg

SEQ ID NO: 308915 - DNA, 201 bp, Homo sapiens
tcagtgaggcaaaggaagaatgtctacaaggagatttttgtgaggtggtgtggttgcagcctcgctgtggacttaggaggctctctgggatacaaatgacrgcagttagaggttacaccagtagaggagatcacgtaccatcctgcgttctcaatgaaagaagagtgttactgtctcagcctgtctagcttatacatatat

SEQ ID NO: 308916 - DNA, 201 bp, Homo sapiens
atgttttagaattcagaatctttcttagaaagttattatagcccagcggtccccaaccttttcgacaccagggactggttttgtggaagacagtttttccrtggactgggtggggtcgggggttcagaatgaaactgttccacctcagatcatcaggcattagttggattctcaaaaggagcatgcagcctagatccctcg

SEQ ID NO: 308917 - DNA, 201 bp, Homo sapiens
ttgtatccacaggccgactgtgccatgcagaatggtaatctaccttctgtgcctttatcttccagagcagcaacatcataatcttctctctggctttataratgatgaaatgtcgcacagggttttctgtcaggcaaacatgtaaaatcagcctggatacccagcaaagtaccatgccttccattacatccttgttatgaa

SEQ ID NO: 308918 - DNA, 201 bp, Homo sapiens
atatcatttgtggccctgtccttatcattttacaagggttttttttttccagatataaaaatgtttaataaaatttaagcacatcaaatttaacatcatawacaaagaacagtactttataacaaagtgaggtttacaaggggcttgctctctaaaaacagccttcttctttcccgatagattgtaagtctgtgcttgtaa

SEQ ID NO: 308919 - DNA, 201 bp, Homo sapiens
ctgctgaaggctccttactggtgtgaaggtgatgagatttctcttctgttatctgtctgaattacttctgggcttgacagagatgggaactctcatttgayagcaattcacagactttggatatcttatttcccttaagttaaacttaccagtcttcatttgccaaataatttccccttctgggaagggtgtgtggcaaat

SEQ ID NO: 308920 - DNA, 201 bp, Homo sapiens
gcaagctccgcctcccgggttcacgccattctcctgcctcagcctcccgagtagctgggactacaggcgcccaccatcgcgcccggctaattttttgtattttttttttttttagtagagacggggtttcaccgtgttagccaggatggtctcgatctcctgacctcgtgatccgcccgcctcggcctcccaaagtgctgg

SEQ ID NO: 308921 - DNA, 201 bp, Homo sapiens
cttcagtaaaagattttggatattctgtgccaggatgtaccaggctctggcagcacctgctgagttgctcagtacccagagccagttctcttctagtccarcgtccccactgaggctatccagggcctatgctgagaatttgtttctgcagtggaccagaaaagatgcttgtcttatgagactggggagagtagggaggct

SEQ ID NO: 308922 - DNA, 201 bp, Homo sapiens
acctcagcttgggtgacaacgcgaaccctgtctcaaaaaaaaaaaaaaaaaaaaaagagagagacctatggccaggtgatgaggtatgaagccatttaatrcgaagaagagctaaaagaatgagaacgtgattgcatgaaatgtttagccagaaatcttgggatataggagaagagggggagacttgattgattaggttgt

SEQ ID NO: 308923 - DNA, 201 bp, Homo sapiens
ctaggggacttggagcaggcagcctagcctctctgtgccatcttttcttgcatctagcaatggaagaaaggaaaaccagcctttgtagggttgtgatgaargtgaaatgagatgataaacaccaggtacctggcaggtggttttactgtcgctggttttctcaaaacctaaggcagagttgctgaaactcagcactattga

SEQ ID NO: 308924 - DNA, 201 bp, Homo sapiens
ttgcagtgagctgagattgtgccactgtactccagcctgggtgacagagtgagaccccatctcaaaaaaaaaaaaaaaaaaaagtccttggaagaataagytcaggagatctgttgtataacagggtgattataatgaatgacaatgtatacttgaaaattgctaagagaataggttttaaaatattactgccacacacac

SEQ ID NO: 308925 - DNA, 201 bp, Homo sapiens
ccttttaacttgccataggtcagaatctcaatgtgatatagtaaaagacacagtagttggtgctcatatcatctctttattatgattgtacaggtgtcttytgagaaaatttttagcatcaaatccccgtttggggtctgttgggagctatgagcatagctgtgcattcactcacctcaacaagctggtacagcaaattct

SEQ ID NO: 308926 - DNA, 201 bp, Homo sapiens
ttgtttggaattttcaattaaatataatgggaaaaccatttttttcttcagtttttttgatgactacttttcttattttacagtaaccaaattttcatctrtttttttaaattgcttgattaggatctcaaagggttctaaggttttgttttgttgacagccgtaaaatgtaaccattatggagtaatttttttccctttt

SEQ ID NO: 308927 - DNA, 201 bp, Homo sapiens
ggcaaacttggaagaaacttaattttatttgtccgtgtgagactttttatgattttccccatgttcctctttttctgttaacatcttgatcttggtaacaytgttttgctgattgtgatatttttcaagaatgcaactcctgtggtttgtaaaggattaggaaacggtctattgcaagaacgtccatgatagaaatatttt

SEQ ID NO: 308928 - DNA, 201 bp, Homo sapiens
attttggactactttggttatgcagggagcacagaaacatgccttagcatttggatatttattattttctaagtattaagaacgtggatgttctgcagcaktggagagatgtttgagaatgctggcctggcctggccctcagaagttaatttagggtttttaactctggtgcaaatgcttaggttaccggcagggggttaa

SEQ ID NO: 308929 - DNA, 201 bp, Homo sapiens
ctgaaatgcctggggccaaaacacttaccagatgcatcaaacactactgtcagtctgagactgtgctcagccacatcgctaccgctctcatttcataggakttttctttcccacagaaaggcagctcgacaaactcttttaaaccttacttttttttggttttggtagtggtagagggaaggtctgagcaaagataacaga

SEQ ID NO: 308930 - DNA, 201 bp, Homo sapiens
ctatatacagagcttatttctaaggagagaagttcttctggtgtcccaatgtcagtccatgtatgttgttataacaaaatatctgcaaccaggtaacttayaaagaagagaaattaattttcttacacttctggaggctgggaagcccaggatcaaggcactggaggcattccttgtctggcaagggctacatcctccaga

SEQ ID NO: 308931 - DNA, 201 bp, Homo sapiens
cctggtcttaacaaaaaagaagacatgtggctggccgcagtggctcacgcctgtaaccccaacattgtggggggacgaggctggtggatcccttcaggtcrggagttcgagaccagcctggctaatgtggcaaaaccctgtctctactaaaaaaaaaaaaaatacaaaaattagctgggtctggtggtgcgtgcctataat

SEQ ID NO: 308932 - DNA, 201 bp, Homo sapiens
gctgtctccacaatgtggatgtttgcttctccaaggccaacaaggtggtgggggtgcggggtgtcagggtgtctctgctatttgtagtctcttttaaaagrctcacctgattaggtcaggcccacttagaataaattctcttcattaaattaaagtcagctgatcagggccattgatatacatctgcaatatccctaactc

SEQ ID NO: 308933 - DNA, 201 bp, Homo sapiens
ccctcaccccatgtggtgtatccattttctattgctgtataacaaattaccataaactcagcaatctaaaacaacacacatttattatcttgcggtttccrtgggtcatgagtctgggcattagctgggtcctctgctcaggctgaaattagggtgccagccagggctgtgatctcatcggaggctcattctctcccaggc

SEQ ID NO: 308934 - DNA, 201 bp, Homo sapiens
cagaggttgtaggagaacctgcttctgtaaattacagcactacacagtttccttagcattatagaaggattttcccaggacaggattttaaaatgataaaygctggcttattttagagggttactgttgtctcttgcgaaatctttttactatctggccatctaggcattgagggccaggattattaaccatctttaactg

SEQ ID NO: 308935 - DNA, 201 bp, Homo sapiens
tttgcagacactgcagtgatttttgaaacaagcaccaatttaatagaacattgacttagatgtagaaaagtaaacagaggtaagaaggtaagagcatgtayaaatgcttttgaacttgaaatcagcgagagctagtttaaaaaactcataggaagatcaatgaaactcccttgcagaggttgtaggagaacctgcttctgt

SEQ ID NO: 308936 - DNA, 201 bp, Homo sapiens
tgcaggccgaaggccataagaataactaataatcccagtcctaagaactccagtagtccctggctaaccaagacttggacaactgggattccaacataagktgcaaaacttgcatgccaaaatatttaaatctgccctgttcctacatatcctaggtttacctctgccctgttaaattaaagcacccacatgggtatttgt

SEQ ID NO: 308937 - DNA, 201 bp, Homo sapiens
tgaacgcgattggtggtggggggcatatttttgggggcaagagaggactcctcattcacccttccccaagttagaaaatgccatagcatagtaggaatgcrttcaaaaaacaaatttctagatgatatcctgcatatgaaataaactccagtcttttgtaccatctgtatctagcatacttataaaatagaacaaagtgtg

SEQ ID NO: 308938 - DNA, 201 bp, Homo sapiens
tagaggggggtcagttagggctatttgggttattttctgcaggccgaaggccataagaataactaataatcccagtcctaagaactccagtagtccctggstaaccaagacttggacaactgggattccaacataaggtgcaaaacttgcatgccaaaatatttaaatctgccctgttcctacatatcctaggtttacctc

SEQ ID NO: 308939 - DNA, 201 bp, Homo sapiens
tggtttctttgccacaccctgtggcatgacttcttgggatgttggctagcctgtggaaatggtttatttgaaccttactttaagtatcccttctggtcatraagaaagtcatcaggacatattgtaagagaaaaatgagagctgtttcatcagtttttacttctccaaagcaagcgcttagcgaaaatgtattacaacagc

SEQ ID NO: 308940 - DNA, 201 bp, Homo sapiens
ggtattataagtaatctagagatgagttaaagtaagcaagaagatgagtataggctgtatggaaatactacaccattttatataagggacttatgcatctrtggatttgggtatctgtggggttcctagaaccaatcacctgtggatagtggggataactgtgggcaaataaggcattgtcaattttatcccaccctccac

SEQ ID NO: 308941 - DNA, 201 bp, Homo sapiens
gcaaataaaacttgagaaaattcaagattggtattaattatgttgctccaaatgaatttctaatgtagacaactaaaatcaacaactgtgaagccatactrtcaataggagagtgaagatctcctagcatagacatagcatagaaaaacctcattttgattttcacctcctttcagataagattagtttacttgtctagag

SEQ ID NO: 308942 - DNA, 201 bp, Homo sapiens
tttagttgttttggatgtgtgttctcagaaatgttttgcagcaacctttttcttatggagaaccatgatgtggtagcattcagctgtatagtgcaaaatgyagttttccagataaaagagcataacttgtctttgtgacaagctttcttggaggtctctggctgggagaagaggagggaatacaaccaactagatctacac

SEQ ID NO: 308943 - DNA, 201 bp, Homo sapiens
aaccttaaaaatacttcactgtagaggttctcccaaggacactaaagggtgtggtttggatttatagaactcagaagcgtttggaagcctttagttgtttyggatgtgtgttctcagaaatgttttgcagcaacctttttcttatggagaaccatgatgtggtagcattcagctgtatagtgcaaaatgcagttttccaga

SEQ ID NO: 308944 - DNA, 201 bp, Homo sapiens
accctcccagtgggagaggtcatgatacaacatccagaagaaccttttgtaaggggatctccaccagaaatgataagatgacctcaggaacagaagagctsttttaaagaacagatgttctagaccagttgacccagctaaccttaaaaatacttcactgtagaggttctcccaaggacactaaagggtgtggtttggatt

SEQ ID NO: 308945 - DNA, 201 bp, Homo sapiens
ctgttcttgcccagcctggagtataatggtgcaatctgggctcgccgcaacatccagctccctggttcaagtgattctcctgcctcggcctcccgagtagygtgattacaggcgcgtgccaccacgccaagctaattttttgtattttttagtaaagatgggctttcaccatgttagccaggatggccttgatttcctgac

SEQ ID NO: 308946 - DNA, 201 bp, Homo sapiens
gtccataagcatgtatattaataagttgtacgaaatcaaatgtcagaggttcagggagacagttttgaaatcccagcattttgtgagtggaggttgtttcmtattcttttgtgtttttaaagtattagtgatttaaaaggcacctgccaaatacctgataggtgcttggtgaaatgaactgtcaaggttttttagtgggtg

SEQ ID NO: 308947 - DNA, 201 bp, Homo sapiens
tgccttctatgcatagagcttgccacagtacctagaacacagcaagctcttggtaaaagcacagtgaaagagagacaatatttttattgggcgtggtggchcatgcttgtaatcccagcacttgggaggttgaagtggacagatcacttgagcccaggagctcaagaccaacctgggtaacatggcaaaaccccgtctcta

SEQ ID NO: 308948 - DNA, 201 bp, Homo sapiens
acacagcaagctcttggtaaaagcacagtgaaagagagacaatatttttattgggcgtggtggctcatgcttgtaatcccagcacttgggaggttgaagtrgacagatcacttgagcccaggagctcaagaccaacctgggtaacatggcaaaaccccgtctctactaaaaatagaaaaattagccaggtgtggtggcaca

SEQ ID NO: 308949 - DNA, 201 bp, Homo sapiens
ttcagtgaggcagcgcagctagtgtctgtccttttaccctggagattccttttcttatctctgaactaggatgtgaggttgagcgtcctgtgctgtccccrtcctgtctcttattttggggctttattacttgatgatagagtgaagagctataagacacgctcattaaactcggccatcagttaaggtgtgactccgctt

SEQ ID NO: 308950 - DNA, 201 bp, Homo sapiens
tgagggacttgatctgagtcatatgtaaatgaattccctatcaagtaaccagttcaacagagacatctattttttgaaaagaagttttgtagaaattacarttatactaatgatgagtaagaagataatgttgatctcatctcatagattttatggcattgttttttttaaaggcaggatctcattgtgttacttaggctg

SEQ ID NO: 308951 - DNA, 201 bp, Homo sapiens
aactctatttttattccaaattactaacttccctgctgagatttatctatcagagtctcaagatgctctcattaataaagttattaacccctttgctaacyagcagcatccaaagcctaaaaaacattacttggctttctcttttcttttcttttttttttttttagatggagtctcgctctgtcgcccaggccggagtgt

SEQ ID NO: 308952 - DNA, 201 bp, Homo sapiens
tccttgataaatctttaaacaatactgaaggtatggagtagaaattgaagtcattgttttatctctattcttgcctgcattttcagttctcagaggtaacygaagttaaatatcttatagattgtttaaggttttctgccctcctttatctgaaatatgggatgatcataatacatggagttctgtaacttgccttatcat

SEQ ID NO: 308953 - DNA, 201 bp, Homo sapiens
tcatatcctattttctctttccagctgcacacatcaagactttttaaatcaacattcaattatcactaaatgacttttctgcctatttcagaatgattttratgtggtcatgtttattttattaaagaatttttatatctgccttgggataatgcaattagaattctttttacctttatgcgatcagtttagagcccttct

SEQ ID NO: 308954 - DNA, 201 bp, Homo sapiens
gggttacaggcatgagccactgcgcccagccctaatagagaccttctgatcggaaggaaccacaccactgaggaggaatcagccttgagagtcttcctccrtgtctcagctcaaaggctccctgtgccttggtgcttagcctgacccatttctgcctaaactcctcagtctcccctttatttatttttaaaattaatgttt

SEQ ID NO: 308955 - DNA, 201 bp, Homo sapiens
gtgagtgatttctcacaatgacaaattctcaaatattgctaatagtactgtggattttcctacattggtaaattgaaggaattgctaaatgctgaattcakcaaccagtttgagattgttgaaaataaagattgtttctttttcaatgcaagttcacagatcactggagttctagctacagtttgttctagaccagaggtt

SEQ ID NO: 308956 - DNA, 201 bp, Homo sapiens
gcactggtcctctgaaataaagcaggcaatcaccattcaataaacacacttgatttattttgtataaaagggttacgtttacaactaaaagtttaaacttktataaaaagtttagcatgaataagtacatcattacactttttaatgcagaaatagacatctctgccactatacaagaaaactctaattaaagagttaaca

SEQ ID NO: 308957 - DNA, 201 bp, Homo sapiens
tgactctacaattccatccagttgagcaactgttctcttggatgacctttgcctaaagtgagatgcacatgtgcctccagttcagttgtaggtagttctcsgcagtactgcatgtggcctgtttccagttagaaatgtcaacactgtgagcccaggtaggtgctgggcacgaattgcctgatggactctctgagaagctgt

SEQ ID NO: 308958 - DNA, 201 bp, Homo sapiens
aatatattctgtgtgagatagcttgctggatctatgcaggcctaaggtttttatgattgcagcccttaatacaactgtaaaaaaaattttttttttggccyggcatggtggctcatgcctgtaattccagcattttgggaggcccaggcggacggaacatgaggtcaagagattgagaccatcctggccaatatagtgaaa

SEQ ID NO: 308959 - DNA, 201 bp, Homo sapiens
atacataaaagtaaagaaaattgtataatgacccatcctatacccaccacccaaggtcataaatgattgattcaagctaatcctgtggcatgtataccccrctcactccccctgctgttcactcttggattattttgaaacaaattcaagacgtcatttcatgtcatttgtaaatatctctgtatgtctaaaagaaaatac

SEQ ID NO: 308960 - DNA, 201 bp, Homo sapiens
tcatgctattccatcttaatgagaattgattttgtcctttcacctatcacagacccttacatgcttccttcccagcccgtgaaagccattgtttgatgagaaaaaaaatacatgacttttctccccaggcatagaaggataatagctgtgcttttttttgtttttgttccttttttttttttttttttttttttgagacga

SEQ ID NO: 308961 - DNA, 201 bp, Homo sapiens
attttgaatgaccagttttactaattctaacaggaatttaggatattcagtgtgttcttctgatttagtatagcaaagacagtgttttaagaacgaagacttttttttttcccctggtctcacctaacacttatgcaaaatatggaaatgctagacagagactgtgaatatatatggtggttgaggttaattagccatgtt

SEQ ID NO: 308962 - DNA, 201 bp, Homo sapiens
atgtgaaagaaaacttaagaaaccaattatattttcaggtgttctggaagctaactagtggtactcactcagttacatctccattatttgagaagattttkatgttgaataatataacctatttggtcttagtcccagctgatcagtgctagttttcttgatattaaatgtttaatatcttattgaccataattctagcct

SEQ ID NO: 308963 - DNA, 201 bp, Homo sapiens
agtggtgcattcatggcttactgcagcctcaacctcctgggcttaactgatcttcccccctcagcctcccgagtatctgggaccgtaggtgcacgccaccmtgcctggctaattttttgttttgttttgttttgttttgttttgttttgcagagatgaggttttcccatgtttcccaggctggtctcaaccttctgggctt

SEQ ID NO: 308964 - DNA, 201 bp, Homo sapiens
tttttttttttttggagacggagtctcactctgttgcccaggagtgcaatggtatgatttcaggtccagtgcagcctccccctcctgggttcaagcaattytcctgcctcagcctcccgagtaggtgggactacaggcattaactaccccccctagcttttttttttttttttttttttttttggatttttagtagagatg

SEQ ID NO: 308965 - DNA, 201 bp, Homo sapiens
ctgggttcaagcaattttcctgcctcagcctcccgagtaggtgggactacaggcattaactaccccccctagcttttttttttttttttttttttttttgkatttttagtagagatggattttttttttttttttgtatttttagtagagatggattttttttttttttttttaaccatgttggccaggctggcctcgaac

SEQ ID NO: 308966 - DNA, 201 bp, Homo sapiens
ttttttctagaatgaaggggcaatcaccagagtgtcttgaaggtcccattcagtattccattttccctacattccctgttatgttatgttatgttatgttrtgttgtgttgtgttgtgttgtgttgtgttatgttatgttatgttatgttatgttatgttatgttatgttatgttatgttatgttatgttatgttaatgtt

SEQ ID NO: 308967 - DNA, 201 bp, Homo sapiens
gaaaatcgtgctcttttatgaaaatacaagtagatgaggtgtagaggtgaggtttttgctgtcttttcactcaatttgtaaatttcatagatcatataacggtaaactatgacagtttgcttagaagcagacactgggcaaaatgtattctgaattttgactgcagatctctattctgctgtttgtttcaaaaaaccacct

SEQ ID NO: 308968 - DNA, 201 bp, Homo sapiens
ttggagtttatattgggggagggacaggtcatgtggagacaaacaatgcacaagtaaacaaatatataggatacagaaaatttcagatggagttttttttktttgtttgtttttttttttttttttttgagatgaggtcttgctctgtcacccaggctggagtacagtggcaagatctctgctcactgcaacctccaccac

SEQ ID NO: 308969 - DNA, 201 bp, Homo sapiens
tttccaaaccattgttctttgtttaggcctttgttatagaacatagcccttttctgttcatccactaccctctgacctctctgattcatgtacccctcacmttcctcattgttttctgagtgtgtagtacatagtaagtgcttgaaagtggttgaagtaatgcagtttaaagttgtaacattttgaggcctggtgttgatc

SEQ ID NO: 308970 - DNA, 201 bp, Homo sapiens
atcatagcttagtgtagccttgaactcatgggctcaagtaatcctcccaagttgatgggactataggtgtacgccgccacatctggctttttttttttttccccctgtttggtagagatgcgtatcttgctatattgaacagggtggtctcgaactcctggcctcaagcagtcctaccgccttggtctcctaaagtgctgg

SEQ ID NO: 308971 - DNA, 201 bp, Homo sapiens
tcatagcttagtgtagccttgaactcatgggctcaagtaatcctcccaagttgatgggactataggtgtacgccgccacatctggctttttttttttttccccctgtttggtagagatgcgtatcttgctatattgaacagggtggtctcgaactcctggcctcaagcagtcctaccgccttggtctcctaaagtgctggg

SEQ ID NO: 308972 - DNA, 201 bp, Homo sapiens
atgtctaatcagatcctttaccattttttaactggcttacttttgtcttttgttgagttgtaagagttctttatatattctggatacagatcatttattgmatatacagtttgcaaatattttctcattctgtgcattgtcttttcactttcttaatgtgagttctctaaatttgttcctttttcaagattgttttggcta

SEQ ID NO: 308973 - DNA, 201 bp, Homo sapiens
gtaccatatatcaatacttcattcctttttatggctgaataatactctaatgtgtggatatacagcattttgtctattcattcatcatttgatggacattstttcttttccgcttctcagctagtatgaataccgctatgagcattcatgtacaagtctttatgtagacagatattttcacttctctttggtgtatacgta

SEQ ID NO: 308974 - DNA, 201 bp, Homo sapiens
gcatcatgtagacacagctgtcttgagctaaaattttgaacacttaaagatagatggcattgtacccagagccagctggtacaatggcatctatctataaytgtgtataaaggattgcttaaaacttataagattggaaatagaacttaattgcttaaagttcaagctggactccattgaacagcaattaaaaaaaaacaa

SEQ ID NO: 308975 - DNA, 201 bp, Homo sapiens
taggactttaattgttcacacaggaagaatttgtacttacagagcaccacctatttgataagtaacatttctatgctaagcaacttggattatgaacacayaagtcaccttcctaaaacaaagtataagagatgctattttccacttaagcatgattcaagtttgaaaatgtcaatagatgcaaaaagccaccctagagct

SEQ ID NO: 308976 - DNA, 201 bp, Homo sapiens
caaagacagtgttttaagaacgaagacttttttttttcccctggtctcacctaacacttatgcaaaatatggaaatgctagacagagactgtgaatatatrtggtggttgaggttaattagccatgttagaaaaaactcaaaatgcaagagtatttatccagcttgaaagaagtgcttttgaggttggcttccaatcacta

SEQ ID NO: 308977 - DNA, 201 bp, Homo sapiens
caaagttacatggcccgttagtgacagtacttttactttttatgaaaatgagctttacttttacacattctttgatttggggagttatatggtttaacatrctcattttttaacaattcaccatgcatttaaaacatgagcctagtgattgttagaacaaaggagggaaatacactgaaatttgaacagtggttatggtta

SEQ ID NO: 308978 - DNA, 201 bp, Homo sapiens
ctgataagagagagagagagactgagagacagactgactgactgttcagggccctccaaaattaaggcatacctaaatcagagtacttaaagtgtcagaargatatatgctgcaaattgtacaatagggggaagtagaagataactaatttgggtcattactaggcctgtcagagtcagtgaaaataatgttacctggcct

SEQ ID NO: 308979 - DNA, 201 bp, Homo sapiens
aggcacgtgccaccacacctgcctaatttttgtatttttagtatagacggggtttcaccatcttggccaggctggtctcaaacttgggatccacccacctsggcctcccaaagtgctgggattacaggcgtgagtcactgtgtctgggcagcgctttgagaaattctatctccattcccctgcgctcaaaattagagacaa

SEQ ID NO: 308980 - DNA, 201 bp, Homo sapiens
cacatctggctttttttttttttccccctgtttggtagagatgcgtatcttgctatattgaacagggtggtctcgaactcctggcctcaagcagtcctacygccttggtctcctaaagtgctgggattacaggcatgagccaccacacctggccagcatctgtatattatttgctaaatctggcaaccctagtttctagaa

SEQ ID NO: 308981 - DNA, 201 bp, Homo sapiens
cctattaaataagagaaaacaaaaattagaccaagccccattcactcatgtgagtgtaccccatggcccttttttcattttgtctatattattgagtcaawtttaggttcaacaaatatttattgttcacttcataatgagacctgtgttaggcacatttgcatatcttatttaattctcctaaccgttatttgagatagt

SEQ ID NO: 308982 - DNA, 201 bp, Homo sapiens
ttgggcctttgggtctggaattttttttttttttttttttgaactggtaatagaatttattcaaatgtgccttaatataggcgctggggcttgcccatggkgctctcgatatataaggcccggacattctgccagtttttcttgagcaatgacaccaagaagttgacagccaggtgaatgttatacacaagctcatcggct

SEQ ID NO: 308983 - DNA, 201 bp, Homo sapiens
ccagaagaaaacagatgtgaagtgctcctccacacagtggagtgctaattttttttttttttggatggagtttcactcttgttgcccaggctggagtcaayggcatgatctccgtatcaccgcagcctccgcctcctgggttcgagcaattctcctgcctcagcctcccgagcagctgggattacaggccaccatacccag

SEQ ID NO: 308984 - DNA, 201 bp, Homo sapiens
ctctggcttaaaaatattcactgaagcactatgtatagtggttggggttggggacatgggctttggaactgggtagatggtgacaagggctttggaactgrtagatagatacggtgcgattcctgtttctaggcataactagctaagttactcaacctattctgaacttgatttccccaaggatccttaagaattgttcct

SEQ ID NO: 308985 - DNA, 201 bp, Homo sapiens
ctacagcatgttctggtctctggaggcctaggcatggggaagtttagcctcatggattgtcggtgtctgagggcatataatgatatgggtgtatactcagkgccacattttgtgtgttgtagtagtcctagcagcttgctgttttattagggccacaaattgagtcagggagcaggacgggtatttcttctgaaggacaca

SEQ ID NO: 308986 - DNA, 201 bp, Homo sapiens
aaaaaatacaaaaaaattagccgggcgtggtggcaggcacctgtagtcccagctacttgggaggctgaggcagaagaatggtgtgaacctgggaggcggarcttgcagtgagctgagatcacaccactgcactccagcctgggtgacagagtgagactccgtctcaaaaaaaaaaaaaaaaaaaaaagagttagcaattca

SEQ ID NO: 308987 - DNA, 201 bp, Homo sapiens
tgttcaggttcatccagctcattaaaagttatcaattggccgggcacggtggctcacgcctgtaatcccagcactttgggaggccgaggcgggcggatcaygaagtcaggagatcgagaccatcctggctaacacagtgaaaccccgtctccactaaaaaatacaaaaaaattagccgggcgtggtggcaggcacctgtag

SEQ ID NO: 308988 - DNA, 201 bp, Homo sapiens
acaaatctccctgttgcccaggcggaagtgtagtggtgcaattatggctcactacagcctccaactcctgggttcaaggggatcctcctgcaacagcctchtgagtagccgggactacaggtgcaggccaccatgtccggctaattttcttatttttttgtagagacaaggtcttgctttgtggcccagcctagtctggaa

SEQ ID NO: 308989 - DNA, 201 bp, Homo sapiens
tactagaataatttttttttaccatttcaatttttcactatccatgcttctttttttgttctcaacatgtgcccattattcctggtaattttggctttctstctgcctttgctgtgcttagatatgaagttcataatgttgccccccaaaagcaccaaaataggcacaaacctagcagacatctggttgtccaatgaaccc

SEQ ID NO: 308990 - DNA, 201 bp, Homo sapiens
gcagctgatatattttggtaatggataagagttgagggtcagtctcagtgctaaaaggtgaagagcctggtctgctgttgagcacaagtgaaggaaggaasaacaacctccatgtgtggaagacggtgaatcagggcagccacatcttggcccagacagctctagaaggtgcgctccctttgtagccactggttaagtgta

SEQ ID NO: 308991 - DNA, 201 bp, Homo sapiens
acaagtgaaggaaggaagaacaacctccatgtgtggaagacggtgaatcagggcagccacatcttggcccagacagctctagaaggtgcgctccctttgtrgccactggttaagtgtaatattataattttccatcacatggtagtaatgtgtctggaggaaggatcacctttttctagatcatgcagatcacctttgggt

SEQ ID NO: 308992 - DNA, 201 bp, Homo sapiens
actatttttgagtctgagaaaattgagtttgtgttggagaatggtggtagattatttagaacttccttcttagactgctttacaagataatgacggtaaamtaatatgattcctaatttattcctttccagttgctgctgtttgaatatcgtccttctggcattttccacatccttggttttatccagatataagttcaat

SEQ ID NO: 308993 - DNA, 201 bp, Homo sapiens
tgaaaatttgaagtacttttaaaagagtagtattccttttgggtaactgctaaaagggaaaactggtaataggctacataagaagctattacggctatttyataaacagagatagtaacaggctttataagaaaggacagaaaaagattttgtgtaattaaaaacaaaattgtattatggtaagagagttaaggtaatctt

SEQ ID NO: 308994 - DNA, 201 bp, Homo sapiens
taaaaaactcataggaagatcaatgaaactcccttgcagaggttgtaggagaacctgcttctgtaaattacagcactacacagtttccttagcattatagraggattttcccaggacaggattttaaaatgataaacgctggcttattttagagggttactgttgtctcttgcgaaatctttttactatctggccatctag

SEQ ID NO: 308995 - DNA, 201 bp, Homo sapiens
ctcagttataatttgcagttccaaagacctcccatttaggtttcatttgtagtacagaaggatttttaaatgtacacagtttactagcccatcttagaaayatgaagcaaaaatccgcccatcttaaaagtgaaattatgggccaagctggcttaagttgacaacattagcaacccactgtcagaaacacaaagacacccc

SEQ ID NO: 308996 - DNA, 201 bp, Homo sapiens
agggaacaacaatgaatatgacagatgcaagctatgctttaaggatgtctggtaggattagttttgtagaaacattaacacatttagagattttttctgcyttataaatatcaagactgtatcacagtaactgatctttatagtcatcatctagaaatgaagttcctaaattttattttcatggtgaccttactaatctat

SEQ ID NO: 308997 - DNA, 201 bp, Homo sapiens
gcagattttctaaatctatatggttttgccatcatggaaacagaggtagaagaacctagagaaggttggggagggcatcaccaattcacagtgagtgaackttctttgttactggactctaacatcacagttgggtagcacctttgtggtacatctcagcagacaccatacactaagcagggcattgctgaaagtcataac

SEQ ID NO: 308998 - DNA, 201 bp, Homo sapiens
tcaaggaggttaagttacttgcccaaagtcaaccagctaaccagagcccagaacccaaacctgaaggtctgcccaactcttaaagtccttgcacttgcctrtgaggttctgctgacttccgttgtcataggacagattgaaaatccatctagtatcaggtaggccttttagtatcctttggaaaaagttaaaattcagcat

SEQ ID NO: 308999 - DNA, 201 bp, Homo sapiens
ggcctcaagcaatcctcccaccttggcctcccaaagtactgaattacaggcatgaaccactatgcctagccatgctttttttaaaaaacaaaaaaacaaamaaaaaaaaccttcctggtatttttcttctttccagctgtggtttggttaacacaacattgttgagagttacctataacacatggctttctcaggagcaag

SEQ ID NO: 309000 - DNA, 201 bp, Homo sapiens
ggattataactatcacttgaagaaacaaaacatctgaggagacaggagcaggcagcatgagtctatttctaaattttactgccaagcaccaaatacagcckctggtgtttattcggaaatgctgttgtttgaaggcatatccaaagttctgttagcctcactgcctccttgcattcaggtgctcagtttacctgaaacccc

SEQ ID NO: 309001 - DNA, 201 bp, Homo sapiens
tcacctgtttgaggattataactatcacttgaagaaacaaaacatctgaggagacaggagcaggcagcatgagtctatttctaaattttactgccaagcaycaaatacagccgctggtgtttattcggaaatgctgttgtttgaaggcatatccaaagttctgttagcctcactgcctccttgcattcaggtgctcagttt

SEQ ID NO: 309002 - DNA, 201 bp, Homo sapiens
gttatgttttgatggttgcaatggtagtaaaccttttttttttttcctctcttgtggaataatttaagctaaattctgtgaatctggtggtcattgtatcraaagtggccttggctcttaggtgattcaggagaaggtagccctcttattagtgctttgttccagaaacagtgaatgaggtatgcagagagcagcagagct

SEQ ID NO: 309003 - DNA, 201 bp, Homo sapiens
tgcaatggtagtaaaccttttttttttttcctctcttgtggaataatttaagctaaattctgtgaatctggtggtcattgtatcaaaagtggccttggctsttaggtgattcaggagaaggtagccctcttattagtgctttgttccagaaacagtgaatgaggtatgcagagagcagcagagcttgcctcagctgacagt

SEQ ID NO: 309004 - DNA, 201 bp, Homo sapiens
gctgatggaagaattggatgcggatgtaagtaaagcactggtccctagcaaacacatgattattgttgtttttattgtactgctattatttttgcctgccyagcatctcttttaacattctttgctaataggacctttgctactctttgggtattgatctcctctcctctctgtgttcttgatgggatcatctgctgatta

SEQ ID NO: 309005 - DNA, 201 bp, Homo sapiens
acaggaaccttctcccctgcctgccaaaaataatcctttaatagtggtttcatttctttgtttggtttttcgagttcattcattttgagctttttatcttygggaatctgaggacttttattttggtgctagggacagcctctctggaggagacatgctgataacacttagccttaactgcttctcttgattttatttgta

SEQ ID NO: 309006 - DNA, 201 bp, Homo sapiens
atttaatttgtcctatatctcccaccttgaagaaaaaggttcatagctactcttcatattctcattgctgaaattatcagcacgagtagggtacacatgcyttgctgtatatctttgtgttaatatggggccagtcacaccccctaggtgcatataaacagggacattcagtgaaagtgaacagcatatgtcttcttcctg

SEQ ID NO: 309007 - DNA, 201 bp, Homo sapiens
agtcttaggtacccagcttgcagtttaaaatgagctcatcgtgttcacctacaggggatccatctgcacgttttctatggagttacttattcccaggttastgtcaatggcagttttcataagataagcctcttcctggctaaatgttacctacaccaccctctcccctactgggaccatttttttccatccaaactgctg

SEQ ID NO: 309008 - DNA, 201 bp, Homo sapiens
gcctctctgcttctgcaactgttaacctctgtctgtgcacctaaccctacctggatgttctataaatacaatcttattgaatcccatcagcaacacgttgrggtaagaattcttaatcccattttataaataggtaaagtgaggttttagagagatgagcgaatgtatcccagccatgcagtggaacagtgatttgaaccc

SEQ ID NO: 309009 - DNA, 201 bp, Homo sapiens
gaagaaatcatattattttctcagaggagagagagttggcccagtgaggaaatgattgctgggaacaaactttctggttttccattttgttctgctacaartggcacgttctatcaatcaaggcctgccaggaaagattttgtctttcctcattgcaatttaattttaacctctgttgaactcaggtgcatgttaaataca

SEQ ID NO: 309010 - DNA, 201 bp, Homo sapiens
ttcccacttcccacccccaacacttgtgttaaaataggggcaggcagaatatgaccgaaggccaaatccattctactgtctatttttgtatggcccctggsctaagaatggtttttacatttaattcctaattaagtgaaatgttattcccccaaaaaagaatcatattattctcattaagtagatatatattttgaaaat

SEQ ID NO: 309011 - DNA, 201 bp, Homo sapiens
tctcttgtagtatcaggcagcaaaccccttccatgagcccatggtttggaatagggaatggcctgtgaggtattgcttaggagagtgaattgatacttaayctgcagagactacattatgagagcaatcattcagtgctccaagaaagcacagagtaaaactaccccctcttaaaagaaaaaaaagctttaggatatgtaa

SEQ ID NO: 309012 - DNA, 201 bp, Homo sapiens
tcccacttcccacccccaacacttgtgttaaaataggggcaggcagaatatgaccgaaggccaaatccattctactgtctatttttgtatggcccctgggstaagaatggtttttacatttaattcctaattaagtgaaatgttattcccccaaaaaagaatcatattattctcattaagtagatatatattttgaaaatt

SEQ ID NO: 309013 - DNA, 201 bp, Homo sapiens
ctctggtcctgccctttgtcactttcctctgcagccatggttaacggtatagccattcaccctcagcatgcataaatccttttttcccacaagaggatatyggctggatgtgatgtttatggaactaaaggagcagctggcggtgtcggattcaaggcaagtaggttgtcttgaccatcctatttagcagatggccaggac

SEQ ID NO: 309014 - DNA, 201 bp, Homo sapiens
gtccaagagaatggccctgacatctggcaaggctttcttgctgcattgtaaccatggcaacgcgtatcacatgaacaagagagagaatgtgagagagcaaragggggttgcaagggggccaaactcacttttataacaaattccctctagcaataatgatgataatctattcatgagggcagaaccctcatgacctagtca

SEQ ID NO: 309015 - DNA, 201 bp, Homo sapiens
ccagtgagtctagaagaacgttagctaggactacctatgtctactccttgtagtcgctcatcctttaataggctaacttggaattcttcatttgatcttargattccaaagaatctgagtgttttatgagcttgtgtctgcatcatgttcactaattctccattcactaaagcaagacatatggacaagcccaatttcaaa

SEQ ID NO: 309016 - DNA, 201 bp, Homo sapiens
tgtagtcgctcatcctttaataggctaacttggaattcttcatttgatcttaggattccaaagaatctgagtgttttatgagcttgtgtctgcatcatgtwcactaattctccattcactaaagcaagacatatggacaagcccaatttcaaagaatggaataattggtgtacactttccatagaggagggcaaagtcaag

SEQ ID NO: 309017 - DNA, 201 bp, Homo sapiens
atgatgggtaaagagcatgcccatttattacctgcaaatgggtctgtgttaacagtaagcagtttgtttcttttcaggtactagtttgaatgcatatgttrtaaatcagaacaccttaagatgtactattcttatgtgttgaacttgccatttgtttcatatctctcctaaaaatattctttcagttgtcttttcacctat

SEQ ID NO: 309018 - DNA, 201 bp, Homo sapiens
taaaaccagttgtcaggggtcaattggagcaagtaggattttggattaattgttccgttctcaaaattggtcagtcatgcagcaggtaacaatagtaaacytactcagtgtagaaaaatagggttactgaaaacaccacatagaggctttcattttaagatatttctgggccaggcatggtggcttatgcctgtaatccca

SEQ ID NO: 309019 - DNA, 201 bp, Homo sapiens
tgaggttaattacaactaggccttgctttctttaaggttatccagtgcagggctttgatcatagagtggattttcaaacattggagcaggaagaggctccygactctcaccaaagccctggggaatgaatgacttgttcaggaggtaggtatagcttggggttacacctggttttctttagctttgcaacagactagagaa

SEQ ID NO: 309020 - DNA, 201 bp, Homo sapiens
ggcgaggttctgatctgcatgactagggaggacagaacaactgcatggttaaggcagaggaaagttgggggactagaacacagagaaatcggggggaaggwccttgaggttaattacaactaggccttgctttctttaaggttatccagtgcagggctttgatcatagagtggattttcaaacattggagcaggaagaggc

SEQ ID NO: 309021 - DNA, 201 bp, Homo sapiens
gacagtgggagctaatggcaagttggtggtggaatacattggccctaccatgttttgtttttagacatggcattcccaagactcagatccctccttgggcraggttctgatctgcatgactagggaggacagaacaactgcatggttaaggcagaggaaagttgggggactagaacacagagaaatcggggggaaggacct

SEQ ID NO: 309022 - DNA, 201 bp, Homo sapiens
acagctcttagggtgaagaacagtcattaattcccctttacagataatagagacttactaaaggtaatcgcctaacttaatgtcacccagatattagataytaagtgtcaaaactgtgatttcaacttgggctttatggctccagcaatgaggctcttaaaacatggtcacaaagaaaaccttcttccttgggatgaatca

SEQ ID NO: 309023 - DNA, 201 bp, Homo sapiens
aatccttataactgaacaaggtaaaacttttcgtgtcttttggaatctgttttctggttttgtgccttcagtaatagtcttaccttagtagacaagatgtrtaaattgtgtaaattactaagcaaaggtgaagggaaatatattttggttatttccagttagtaactgcctcttaatgaatcacattaagtgccatagtca

SEQ ID NO: 309024 - DNA, 201 bp, Homo sapiens
gcgccgggtggattacaatgcagagccctgcatctctgcctgtgtagggtgcagctgtgggctgttagttacatgggcatttcttccattctgagtggacsaagtgtgaattgacttggtgcctgaggtgcagataggctcaaggaaagtaggtcaggcctgaattgtggctgttagacgttgggagtgcaagcagaagag

SEQ ID NO: 309025 - DNA, 201 bp, Homo sapiens
tgcctgaggtgcagataggctcaaggaaagtaggtcaggcctgaattgtggctgttagacgttgggagtgcaagcagaagagaagacagtgattacaaatrctgcctatttagaggacaagagcaacttcggagagttggaggagcaccccccatctgcataccacctcctccatccaatcagttatttctgcggaagcac

SEQ ID NO: 309026 - DNA, 201 bp, Homo sapiens
aatttttttaaagtgttcagtaagccataaacatctccccagatctacacattcacaccaatgccattcttaagaggcatgtgtcattccgtggtagcatrgatcatattaataattgaaccagtatcctattgttagatacgtctgttctcagttttttcgaccattcttggaaatagaggaaaatttgtccagtcattt

SEQ ID NO: 309027 - DNA, 201 bp, Homo sapiens
ggagactcctgacctgagtgaggagtattatctgtcctgtgagcctccagttagcctgggtaaaaacaatacattaagaatcactacctcttcttagccargcatggtggctcaggcctgtaatcccagcactttgggaggctgaggcgggtggatcacaaggttaggagtttgagaccaacctggccaatatggtgaaac

SEQ ID NO: 309028 - DNA, 201 bp, Homo sapiens
agtggctcacgcctgtaaccccaacattgtggggggacgaggctggtggatcccttcaggtcaggagttcgagaccagcctggctaatgtggcaaaacccygtctctactaaaaaaaaaaaaaatacaaaaattagctgggtctggtggtgcgtgcctataatcccagctacttgggaggctgaggcatgagaatcacttg

SEQ ID NO: 309029 - DNA, 201 bp, Homo sapiens
tgtgaccccagtacaaattactgaacctctctgtccctgactttctgccttgtaaaattaggataatgaaagtgcttatctcacgagtatcatcgctaaawgcattaagacagggaaaacacagagaaaagaaggcgtgcctggtatgtgttcagtgccctctaaatcagtggtcagcaaactataatctgcagaccaaat

SEQ ID NO: 309030 - DNA, 201 bp, Homo sapiens
tctcaaattttagtagggccctgaatcacctggacggcttgatgcaacatagattgctgggccttattcccaaggtctgggttggagcctgagaattggcrtttctaggtgctgctgatgctgctgttcctgggaccacactagaagtaacattgagctagaagggtgaaccagtacttccgggtgtttgccaagttactg

SEQ ID NO: 309031 - DNA, 201 bp, Homo sapiens
cattaagacagggaaaacacagagaaaagaaggcgtgcctggtatgtgttcagtgccctctaaatcagtggtcagcaaactataatctgcagaccaaatcmagcccactgcttgcttttgtaaataaagtttcattggaacacagctgcactcacttgtttacatatcatctatggctacttttgcacaacaatggcaaac

SEQ ID NO: 309032 - DNA, 201 bp, Homo sapiens
tcagtggtcagcaaactataatctgcagaccaaatccagcccactgcttgcttttgtaaataaagtttcattggaacacagctgcactcacttgtttacawatcatctatggctacttttgcacaacaatggcaaacttgagtagccgtgacagacgcactggcctgcaccaccttatgtgtttaatctctggccctttaa

SEQ ID NO: 309033 - DNA, 201 bp, Homo sapiens
ttctgacagtaagctggagtggacagaaaaggtttaattgcatgaccctttttaaccaaaggtatctgtgagaaacagtagagcagctctttgaaattaaractgtgtgctttggaggcaaactgcctgggttccatttatggctttgttcttcggccaaattactcaagtactctactatttggtgcctcggttttctcc

SEQ ID NO: 309034 - DNA, 201 bp, Homo sapiens
cctgggttccatttatggctttgttcttcggccaaattactcaagtactctactatttggtgcctcggttttctcctctgtaacatcatgatgataatacycccctcatggagtcacaataaagattaaatggtggaatatgtataaaatgcttagactagaatatgtataaagtgcacatcacaggaagtgctttggaga

SEQ ID NO: 309035 - DNA, 201 bp, Homo sapiens
gacccagaaagacacaactttgtccgtatggtttgttctgtggctccagcctgatttccatattgcacaactctaggggacactttctcatggtgggcttrtggcaccttttggaatcaaacaaagtggaggtccaaggcaagagtcagggtgtggggacagactgaagttgctgtgtaatgatgtatcagtagatttcgt

SEQ ID NO: 309036 - DNA, 201 bp, Homo sapiens
acgatgacttgctgaaaatggccagtgtctccttgtctacagactttctttcctcagaggtggacgtgagtttactcattacatatattggcatttatccytctatgttgataagggggcaagttttaaaatggaaagaaaaaagatatctcctttttcagaataattaggtttctcagtaataaatttaatctggcttgg

SEQ ID NO: 309037 - DNA, 201 bp, Homo sapiens
taattcaaaacgagcaaagcctgcctgattggtattctctatctgataattattggaagctttcaatgcccaggaaagctatgatgttttatgcattcatygggctgttgtcacagaagaaggaaaaataaattaattacataaggcaggagtcatttaacttttttggttaagggccagatagtaaatgtttttggcttt

SEQ ID NO: 309038 - DNA, 201 bp, Homo sapiens
gaacagaatatattggagtttagtaagagtaaggaaagggtaagaactgtcattaaacacactttcccagaaaggtggattgaattaatgcctgtggggcttttttttttttttttaaatggacagctgggaaggactataattatggaaacttcaatttacagtgtccaacaattggagagtcattgaatactgtttctt

SEQ ID NO: 309039 - DNA, 201 bp, Homo sapiens
atctgataattattggaagctttcaatgcccaggaaagctatgatgttttatgcattcatcgggctgttgtcacagaagaaggaaaaataaattaattacrtaaggcaggagtcatttaacttttttggttaagggccagatagtaaatgtttttggctttgttggccatatggtctctgttgaatcctgggtacttgtgg

SEQ ID NO: 309040 - DNA, 201 bp, Homo sapiens
aatatttactatctggccctttacagaaaaaatgtttgccatcctctattctaggccctcctagtactctgcaaatgcctcctccaaatttggcccagtakagctagaaaaagccactacccaggatggggggtagagaacagaagagacatctctcatcagactgctcttcctatagctcctcagcctgcaaagccctgg

SEQ ID NO: 309041 - DNA, 201 bp, Homo sapiens
aattagtaccttaggctgggcttggtggctcgcgcctgtaatcccagcactttgggagcccaaggcaggaggaccatttaagcccaggagttcgagaccarcctgggcagcatagtgagatcctgtctcaaaaaaaaaaaaaaaaaaaaaaaagttaaaaactaccctggtgtgttggtgcgcatctgtggtcccagctac

SEQ ID NO: 309042 - DNA, 201 bp, Homo sapiens
agaggttctctggtgagcttcttggaatgcgaagcatctttctgtaacctttgtcgtgactctacaattccatccagttgagcaactgttctcttggatgrcctttgcctaaagtgagatgcacatgtgcctccagttcagttgtaggtagttctcggcagtactgcatgtggcctgtttccagttagaaatgtcaacact

SEQ ID NO: 309043 - DNA, 201 bp, Homo sapiens
ggaaatattcttttgacttttaaaaaactatttaaaaatataaaaatccttctttacatgaggactattcaaaaggaagcagcaggtcagagtttgttaamccctgctgtaagggttttttgttttatttttgagatggagtcctgctccattgcccaggctggagtgcagtggcactatctcggctcactgcaacctccg

SEQ ID NO: 309044 - DNA, 201 bp, Homo sapiens
ataaatatatcactgtctttttctttgcaagagtcactttggattttttgttcacaaacagcaatcaaatttgagtaactcagttgaagtgttttggaagkttacagaagctcccagaatagagaggcaaagtgaagaaacattgctggtcatgggcaaggaattccagaggctgggaagtgagtgctagaggacagcata

SEQ ID NO: 309045 - DNA, 201 bp, Homo sapiens
aggtgctctaacatatttgaaaacccatatgcttaaaaggaccagggagcaggcctggtggctcatgcctataattccaacactttgggaagctgagatgraaggcttgcttgagcccacgagttcgagcccagtctgcgcatcacagtgagacctaatctgtaccaaaaaaaaaaaaaaaaaagaaagaaagaaagaaaa

SEQ ID NO: 309046 - DNA, 201 bp, Homo sapiens
caaattatatttcatgaaatgtctggtatctctcttacagctctgttgctctagcctgatttatactacttcccacttcatagaagaagttttttatctckcagtttcatattgattcattctgcaaagaaaatccagttttaccgaatgtcaatttaaattttgataagccacaatcccaccaatatttgaaaatggcca

SEQ ID NO: 309047 - DNA, 201 bp, Homo sapiens
acatggaagctgagtcccagagagttaaattgatgagtctttggtttagaggcagaatcaagatagaattggagactctgtatttctaggttactttgtgstctttgtattatggtgcctatgtctttgtcaagttcacggtggctatggagatcctgagctttgagggccatgtgtgaaagcaccatgcaacagtttgcc

SEQ ID NO: 309048 - DNA, 201 bp, Homo sapiens
acaggtgctaaagacaaagtctttctcattgtgcagagacaatttaccatagatttaatttattaattagcctttacttagatgtgctcacaccgacttasggaaaagttctttttagaattgttttgggaggcagagttgaggttgaggccatgctcacatccatgttaaaacaatgatttttttttttttttggagaca

SEQ ID NO: 309049 - DNA, 201 bp, Homo sapiens
caagccaccattcattcattctgttgaggacagcatccatctggtatcttcttactttgttaattcagttattctatctacaattgtttctcacattgatracttaggaatttcaggaatggatgagttaggaaaatgccaatgaccatggaaatagagaaaaaggtataccaaattttgggtgctttttgagttttctgt

SEQ ID NO: 309050 - DNA, 201 bp, Homo sapiens
ttaaagttaaagcagactcaagccaccattcattcattctgttgaggacagcatccatctggtatcttcttactttgttaattcagttattctatctacarttgtttctcacattgatgacttaggaatttcaggaatggatgagttaggaaaatgccaatgaccatggaaatagagaaaaaggtataccaaattttgggt

SEQ ID NO: 309051 - DNA, 201 bp, Homo sapiens
ttgttgtgtaagtcagctttaacactacttagtttttttggcacctagcctcatcttgggtaatatcagtgaaaagctgagtttgatcgactagttatgcrttttaacatgttcacaattataaaaccattaaaaataaaagttgatcacccatggaccacctaatgtcaactttatgccatacattggaaaactccatag

SEQ ID NO: 309052 - DNA, 201 bp, Homo sapiens
catctaaattccatttattgaatgatttctttgtaacagctgttgtgttacatgcaggggataggatagtgaccaaagcatacaaacatgcttgtccttgyggagcttacgttctactgtgggaaacagacaaagagtaagaagtatgttgtatgatgataagttctaaatagaaaacattaaagcagggaaggggggttt

SEQ ID NO: 309053 - DNA, 201 bp, Homo sapiens
cagcaagagaatgagatctcttgagagaacagcagccctgtgctgctagaaggtagcagtactacacacatgcacaacagatgtaccccctgaatagttaygtgagacaataacctccttgccctttggttttcttttgtttaggccactttgaggtgggatggtttcactttaaaccagtgccctgagttttcaccataa

SEQ ID NO: 309054 - DNA, 201 bp, Homo sapiens
ggagcatcacttgagcctgggagtttgagatagcagtgagtcatgaacgtggcactgtactccagcctagacaatagagcaagaagaccctgtctccaaamagaaaaaagggagaaaagaaaaagttgtatagaggctgcctaaaggagaaccaaaatatgtgtgataggagtcctgtaagaagaaattgaaagtaaagag

SEQ ID NO: 309055 - DNA, 201 bp, Homo sapiens
ttcactgtctgtatttcaaagtctcttcattgtaggatgggtctattttataggagggtgaataccctgtttgaatggttcctcaagagaggatctagttkggaaacatattaacacaaaagaaaaccgagctgcttttaggaatacagatgcttggtggccagaaaatatacaatactagctgccatcaaataaactgac

SEQ ID NO: 309056 - DNA, 201 bp, Homo sapiens
cagaactttttcactgtctgtatttcaaagtctcttcattgtaggatgggtctattttataggagggtgaataccctgtttgaatggttcctcaagagagratctagttgggaaacatattaacacaaaagaaaaccgagctgcttttaggaatacagatgcttggtggccagaaaatatacaatactagctgccatcaaa

SEQ ID NO: 309057 - DNA, 201 bp, Homo sapiens
gaaatcaggcaaggatatgtatacatctgtgccttatatatacatacatacatacacacacacacacacacacacacacgtatacatctgtgccttatatacacacacacacacacacacacacacacaccattctctccaccagagcatcctttacttctctaatgtcaaacatcacttactgccttgctaaaagtattg

SEQ ID NO: 309058 - DNA, 201 bp, Homo sapiens
attaattgattttgattatatgactccaaagcttgagcatttcaaactgttttcaaactaatggccatcgcatttggcaaggagcccaactgcgcattggkttcattataaaaggagatcttgacagcctgtcaggaggacagaatgcatgctagggttttgagaagttgctcagtttcagaggacttggtggtgtttttc

SEQ ID NO: 309059 - DNA, 201 bp, Homo sapiens
atggctgtacatacaaactcccaaatgatacattaattgattttgattatatgactccaaagcttgagcatttcaaactgttttcaaactaatggccatcrcatttggcaaggagcccaactgcgcattggtttcattataaaaggagatcttgacagcctgtcaggaggacagaatgcatgctagggttttgagaagttg

SEQ ID NO: 309060 - DNA, 201 bp, Homo sapiens
aaatcttagagatcctttttgcaaagcaaaacatgcctttgtatgaaacaggatatatttaaaggtacatctcaattttgctttcctgtgatttctggcargatgaagcttgcgtgggcacctgtgactaggtttctgagaggctccagcactgtccataggtgtcaggttaggtaagattcttagaatgttaacggtaac

SEQ ID NO: 309061 - DNA, 201 bp, Homo sapiens
atctatgtttagacaaacctacttgcatacttcggattttcttacctgaagagttttttaaaaaccatggacatatactgttagcatccagcttcagtgaygttataattgggatgaggtcttactgataaatattgtgtttcttacgaacatggaagctgagtcccagagagttaaattgatgagtctttggtttagagg

SEQ ID NO: 309062 - DNA, 201 bp, Homo sapiens
gtgcttattccagtgggtggtttctccctgtgttgcagagttcacaggctgtacctagctcagtggagtagactggtgtgatcacttagccgtgtctgtcwtgggcagtggagtacagagggtggttgccctctctccatttcacacttgtactggaggaaccctgaggctagatggtttttctgttaatttagaaaatct

SEQ ID NO: 309063 - DNA, 201 bp, Homo sapiens
tttaaattgtaaaggaaacagccactggggcagctcaagaaacaggcttcagagtcaaaaaaaacacccatctggattcccttcctgactctgaggctcaytgaccttgaataaagtaccttatttaccttctctgaacttgggcttcctccttgggtaactggtggcaccagtgccttctatgcatagagcttgccacag

SEQ ID NO: 309064 - DNA, 201 bp, Homo sapiens
cggggctcggaagggctagatttcgcaatcctgggatcgacattcctcccctcccccactttccccagccttggactgggccaatgaaagcccgaaaaagaaaaaaaaaaaaaattaaatctcaatgtagccggagtgcaaaggccgctcggctttgtttcccggcgggggaatgcgctgtgttggaggcgcgaacaggag

SEQ ID NO: 309065 - DNA, 201 bp, Homo sapiens
atgtgcgttttcggacatgcggaggttactggaaccgtgttggtggattttgttcctgaaaatcaccagttccgtgctccattatgtcgtgtgcttcccckgtgagtgccggccgccgaggggatgcggccccggccggcgcgcgttggggatgcggagttgtcgcctgggcgcggagctccggcgcccgtccgggagacc

SEQ ID NO: 309066 - DNA, 201 bp, Homo sapiens
actgatactggtgttggtagtggtaatagtgatgatattgtagatgcaatttaatagacacgacctatatcaggcactttctagatgtttcttcatgtcarccttgtgagagagggactcttcttatacccatcttaaagatggaaagactgagcttctgcaggcttggctgagacttcctgttagtactccagaatctgg

SEQ ID NO: 309067 - DNA, 201 bp, Homo sapiens
tccagctactccagaggtggaggacaggactttggggctgcaatgagctgtgatggtgccactgctctccagcctgggcgacatagtgagaccctgcctcaaaaaaaaaaaaaaaaaaaaagttcatttgccagtctgagaaatgggagcaaccatcttacttggaaacaaactatatccaggactagggcaacattctgt

SEQ ID NO: 309068 - DNA, 201 bp, Homo sapiens
atggtggctcatgcctgtaattccagcattttgggaggcccaggcggacggaacatgaggtcaagagattgagaccatcctggccaatatagtgaaacccygtctcttctaaaaatacaaaaattagctgggcatggtggtgcacacctgtagtcccagctactcgggaggctgaggcgggagaattgcttgaacccagga

SEQ ID NO: 309069 - DNA, 201 bp, Homo sapiens
tgaggcgggagaattgcttgaacccaggaggcagaggttgcagtgagttgagattgcaccactgcactgcagcctgtgcgacagagcaagactccgtctcaaaaaaaaaaaaaaagattcgttttaagtgcttccagggataggaagaggaatgacagctgatgaggtttctatatgtgcctggtttctgttttggaagcc

SEQ ID NO: 309070 - DNA, 201 bp, Homo sapiens
gaggcgggagaattgcttgaacccaggaggcagaggttgcagtgagttgagattgcaccactgcactgcagcctgtgcgacagagcaagactccgtctcaaaaaaaaaaaaaaagattcgttttaagtgcttccagggataggaagaggaatgacagctgatgaggtttctatatgtgcctggtttctgttttggaagcct

SEQ ID NO: 309071 - DNA, 201 bp, Homo sapiens
tactcgaaagcccgcctcccccacttttagccccagcgttaagaatgtaaaatagggcgcttagaagtctaagcgataaagatcttcttaccgagagccamgggacaaaactcattacagataagcctagtcctcccatttcccccggacgcctctccccgattgctaaagaagcagccgctccccgggtagctgccagga

SEQ ID NO: 309072 - DNA, 201 bp, Homo sapiens
aaacagtcttttttccccctattatgtatgtacttttggctatcttttaataacaggattatgcttcctaggcagttgtatgtcttttttctgccatttartagaatatcataattgatatggtatttgatgttggcttctaaataaccaaggggagaggtgaggcctatggctaatgtttcagctgaaacaaggttagcc

SEQ ID NO: 309073 - DNA, 201 bp, Homo sapiens
gctcagttgctgcatggcatatacgtaaatattatcctatttgaagaacgggatttctggaaaaactcatggggattttgcagtaatcctatgtcctgtcrtgtggacaagtatttcaacccagctgtccccaagacatgccatcgctccctttcagcccattggctctgtggaattttcattgcaggaacatggaactgg

SEQ ID NO: 309074 - DNA, 201 bp, Homo sapiens
acattgatgtcctgtctctatatgttcatggattcagagctacagagcatatgagagagaaccaaacactgatgcacacctcgtaccctctaatcttttcttttttttttttgcagactgaaatcagcatgatatttttctggccaaacaacaaaatgtgattttaaactactcagtttagctatttttggggagtagcaa

SEQ ID NO: 309075 - DNA, 201 bp, Homo sapiens
atatggggccagtcacaccccctaggtgcatataaacagggacattcagtgaaagtgaacagcatatgtcttcttcctgtccctgtgtgttattttgcagtttttctacagaggaattggaggttggcatttgagccaatggtccccattcccatagctgtggtagatgttgctaattgatcacagagctttttgctactg

SEQ ID NO: 309076 - DNA, 201 bp, Homo sapiens
aaatatatttcctgttgaaagtaacgtgtactttcactgaaggatagcttctctactacagctactgtttgaaagacaataagaatgttgattctggccasgtgcagcgttgggcacctggagttctggcaactcaggaggctgaggcaggggatcacttgagtgtgctgtgattacacctgtgaatagtcacttcactcc

SEQ ID NO: 309077 - DNA, 201 bp, Homo sapiens
acaaaattaaaaaacaaacaacagttatactcagattttcgaccgtgcaggagtcaatacccttaacccttgagtcgttcaagggtcaactctattctgattttttttttttttttttgagacggagtcttgctctgtctccaggctggaatgtagtggcgtgatctcagctcactgcaacctctgcctcccaggttcaag

SEQ ID NO: 309078 - DNA, 201 bp, Homo sapiens
gtgagccaccacccctagccaagagttatggtttttttttttggttttgtttttgtttttttttttaaagagaagtgttgtatgtctactcttctaacacrtatatacaacttaagttaaaaaaaatttttttaagctagtaagaaatttctgggaagtccttaccatctctggtaagaagtgttttcatgcaacaggggg

SEQ ID NO: 309079 - DNA, 201 bp, Homo sapiens
ttttattttggtgctagggacagcctctctggaggagacatgctgataacacttagccttaactgcttctcttgattttatttgtaaattagaatcctaaggatctgtaaggaaatgagtaaaacttaattgtacaacatttagagcctgaattaaaaataataataaaaagagtctataatggtaagaggccctggagga

SEQ ID NO: 309080 - DNA, 201 bp, Homo sapiens
aactgtggaaacaagatgagtaattactacacgaaagcacagaatgttttccaaatattgtgatgggtgtttattctacatttttcttctctcaaggccartcatgggcttgtacagaaatatgaacttcagttctcaattattggtagatctgaagggagtctatgtacagaactattgtttaccatcccgagaagttaa

SEQ ID NO: 309081 - DNA, 201 bp, Homo sapiens
ctaataccatctcattaaggaaactatcacttgttgaatgatatgttccaggtcctgaacttagcactttgcatatattaatttaatctttgccccaaacscatgagatacaagggtcttctcagatatctgcttctaagatactgtctctgccatagaagtgagaaaactttgaggctcacagaaaaatttcccccagtt

SEQ ID NO: 309082 - DNA, 201 bp, Homo sapiens
agcctaatcaaaatagttgcatattattttcttagtagtcattgtaggaaacaccaattttttcttttctctctctttttctttctttctttctttctttytttttttttttaagaaagggggtgatctgtctagcttgtggactctctcaatattcaccctgtctctgaaaatcaccctcccacctccttgaattctggt

SEQ ID NO: 309083 - DNA, 201 bp, Homo sapiens
atttacttatcagctcttgttcctgttctcttcatttcctttcagattgaggcatttttaatgaggagagaagttagaaaagggggtcaggaaaactggaaaaaaaaaaaaaaagaagaaaaagccagaaaaactcttctgctgagctctgtagctgttctcagttctttaaagtgcttgaaaagtaatattttgttgcta

SEQ ID NO: 309084 - DNA, 201 bp, Homo sapiens
tttacttatcagctcttgttcctgttctcttcatttcctttcagattgaggcatttttaatgaggagagaagttagaaaagggggtcaggaaaactggaaaaaaaaaaaaaaagaagaaaaagccagaaaaactcttctgctgagctctgtagctgttctcagttctttaaagtgcttgaaaagtaatattttgttgctac

SEQ ID NO: 309085 - DNA, 201 bp, Homo sapiens
tcttgttcctgttctcttcatttcctttcagattgaggcatttttaatgaggagagaagttagaaaagggggtcaggaaaactggaaaaaaaaaaaaaaagaagaaaaagccagaaaaactcttctgctgagctctgtagctgttctcagttctttaaagtgcttgaaaagtaatattttgttgctactaaatctaattaa

SEQ ID NO: 309086 - DNA, 201 bp, Homo sapiens
tggaatataaagacttgctcttccctaaattgctcagtatactatatcttgagtcgtctttatgctcaatctaatgctttattaaaggagaagacacaccytacacacatgtatacatgtgtaaaatacctgtactgtgctcctactatgtgtcaggcactctgccaagcacaatgcacttgttttattccttacaataaa

SEQ ID NO: 309087 - DNA, 201 bp, Homo sapiens
ctagaaccagaaaccttggctattcagatggccttatttctacctaatgtcttttctgttccaagatcccatacaggatgccacattgcatctagtcatcrtgtctctttaggttctgctggactgcgacagtttctcagactttccttgttcttaatgaccttggcaatgttgagtactggtcacatatttcatagaatg

SEQ ID NO: 309088 - DNA, 201 bp, Homo sapiens
tcctctttgctagtttgtaattgtttcctttttcacaagtagaaaagacaatgaacaaaaatgagaattgcatgaatatgagtttagagtctcaattagtttattattattattattattatgtttactcttattccctagtgagacagaattactttttagaagtgaataattgtctcaaggtttttatgcagcttaacc

SEQ ID NO: 309089 - DNA, 201 bp, Homo sapiens
cctctttgctagtttgtaattgtttcctttttcacaagtagaaaagacaatgaacaaaaatgagaattgcatgaatatgagtttagagtctcaattagtttattattattattattattatgtttactcttattccctagtgagacagaattactttttagaagtgaataattgtctcaaggtttttatgcagcttaacct

SEQ ID NO: 309090 - DNA, 201 bp, Homo sapiens
ctctttgctagtttgtaattgtttcctttttcacaagtagaaaagacaatgaacaaaaatgagaattgcatgaatatgagtttagagtctcaattagtttattattattattattattatgtttactcttattccctagtgagacagaattactttttagaagtgaataattgtctcaaggtttttatgcagcttaaccta

SEQ ID NO: 309091 - DNA, 201 bp, Homo sapiens
aggcagaggttgcagtgagccaagagcaagccactatactccagcctgggcgacagagtgagacattgtctcaaaaaaaaaaaaatatatatatatatatrtgtgtgtgtgtgtgtgtgtgtgtgtgtaaaatagaatgaactttatagacaagcaggcacactttagaatcttctactcatcttttattcctttctgggt

SEQ ID NO: 309092 - DNA, 201 bp, Homo sapiens
gggtggctttatgcaagatgcagctggctaattggacaaatgtatctatgtgactgtgttaatggaagccttcttgggcttctgttcaggccttcctagctttttttttttaaatttttaatttctgtgggtacttctagccttttggctggctgtcttagtcaatagggttgagactgtacctgtcttgctcacttgggt

SEQ ID NO: 309093 - DNA, 201 bp, Homo sapiens
gctgtcttagtcaatagggttgagactgtacctgtcttgctcacttgggtttccacagtgtctcgttcatagcttacatgtgttgattaaacaagaaggawaaaatatgccacctgcccccttgtaattaaaagagaagttcaaacatccaacccagtgtacacaatccagagggaaatgaaatcagcatcctcacggtgg

SEQ ID NO: 309094 - DNA, 201 bp, Homo sapiens
ctgtacctgtcttgctcacttgggtttccacagtgtctcgttcatagcttacatgtgttgattaaacaagaaggaaaaaatatgccacctgcccccttgtaattaaaagagaagttcaaacatccaacccagtgtacacaatccagagggaaatgaaatcagcatcctcacggtgggaccagtcaagtgtccagctacctc

SEQ ID NO: 309095 - DNA, 201 bp, Homo sapiens
tgtaataattcaacttttaacttctgccagtggttttaagttgcctattgtgacatctggcctgtaggagcccagctcagatcatacaaataaacattaamggcccatatgtctaagaactttagtggcttactatgcatcaggtattattctttgtcacatcagttctcctttaaccctctcaaccagcctgtaatgtaa

SEQ ID NO: 309096 - DNA, 201 bp, Homo sapiens
tggtggtctgtacttaattatttttatattttattaacaggaagtgtgtaattaagcacggatggctcttcccacccctttcctttttacatatgtctgtyctgtcttctcacatttctggactgacttaaacttgtcagccagaaagatggatgtcattcaggtattggcaggaagagatgcttctgtaaatagtctctt

SEQ ID NO: 309097 - DNA, 201 bp, Homo sapiens
ggtctcaaactctggacctcaggggatctgtccactttggcctcccaaagtgctaggattacaggtgtgagccaccacaccaagccaatttttttattttyttgttttttttatttttagaaagagtcttgctccgtcacctagactgaagtgcagtgctgtgatcatagcttactgctgccttgaactcctggcctcaag

SEQ ID NO: 309098 - DNA, 201 bp, Homo sapiens
gtctcaaactctggacctcaggggatctgtccactttggcctcccaaagtgctaggattacaggtgtgagccaccacaccaagccaatttttttatttttwtgttttttttatttttagaaagagtcttgctccgtcacctagactgaagtgcagtgctgtgatcatagcttactgctgccttgaactcctggcctcaagt

SEQ ID NO: 309099 - DNA, 201 bp, Homo sapiens
tctgccagtggttttaagttgcctattgtgacatctggcctgtaggagcccagctcagatcatacaaataaacattaaaggcccatatgtctaagaacttyagtggcttactatgcatcaggtattattctttgtcacatcagttctcctttaaccctctcaaccagcctgtaatgtaagtaccattttttccatttacca

SEQ ID NO: 309100 - DNA, 201 bp, Homo sapiens
atatgcctgtaaacccagctcatgcctgtaatcccagcactttgggaggccgaggtggcagatcgcttgaggctaggagtacaagacctgtctggccaacrtggcaaaaccttgtctctactaaaaatacaaaaattagctgggcatagtggtgggcacctgtattcccaggtactcgggaggctgaggcaggagaatcac

SEQ ID NO: 309101 - DNA, 201 bp, Homo sapiens
gggtctgttcctaattggctggaacagaagaataaggaaggaggtcatctcaggtttcctcgggcgtctgacggtaaccataagccctttagtgctgcagmccagcaagtttatgaagtatgttgtattttggggtgagcataggaacactagactcaccttcatgtcatcccttctccaggaaaaagtattgtgcaaata

SEQ ID NO: 309102 - DNA, 201 bp, Homo sapiens
gaggaagcattgatgacataagtagaggtcggtaaatgattgctaattgttctttctctttacatctactaaggataccatgtagtgtttcagataatcayaattggagtgtccagtgaatttggggaaggatagcactagaggtgacacagttttgtggccctgaataaatttgtgtatctaggcaataattatcaatgg

SEQ ID NO: 309103 - DNA, 201 bp, Homo sapiens
tttttacatatgtctgttctgtcttctcacatttctggactgacttaaacttgtcagccagaaagatggatgtcattcaggtattggcaggaagagatgcktctgtaaatagtctctttcacatctgggtgttcagttttcctgctggggctgagagaatctgatgagctttgggtatttctttccacagccgggactgat

SEQ ID NO: 309104 - DNA, 201 bp, Homo sapiens
tataccttgctgtgtgggtcgaatgaagttatgtatgtaaagtgatgagcacagtgcctttctcattttaattttcatgttttcctgttccatttctacgyatcatcttggctaccaagtcagaaacctagaaagccttttggggaactttatatatgttgtgctgtttgctgatttttctggtggagttttctgagaagg

SEQ ID NO: 309105 - DNA, 201 bp, Homo sapiens
acaagttgttcctaacacatttatactcatcaggcttataaatgagaaaggaaatcagttattgaatgggaaatatgtatatatatatatacacacacacrgagtatatgtacataaggtgagtatatgtgtgtgtatgtatttaattctcctatgatgcattgtggtactctgaagatactgttgggtgtttgagatact

SEQ ID NO: 309106 - DNA, 201 bp, Homo sapiens
ctcaaactctggacctcaggggatctgtccactttggcctcccaaagtgctaggattacaggtgtgagccaccacaccaagccaatttttttatttttttgttttttttatttttagaaagagtcttgctccgtcacctagactgaagtgcagtgctgtgatcatagcttactgctgccttgaactcctggcctcaagtga

SEQ ID NO: 309107 - DNA, 201 bp, Homo sapiens
ctataccttgctgtgtgggtcgaatgaagttatgtatgtaaagtgatgagcacagtgcctttctcattttaattttcatgttttcctgttccatttctacrtatcatcttggctaccaagtcagaaacctagaaagccttttggggaactttatatatgttgtgctgtttgctgatttttctggtggagttttctgagaag

SEQ ID NO: 309108 - DNA, 201 bp, Homo sapiens
tacgcaccataactgcttaaagacaaagagaaaatagatgtcttttgaattctttcttaattatcaccatgatctcccatgtgtcaatgctagtttttctmagcaaaacacagttttggtttttaacatatatcctgaaaggggaaatagttggtgatctggtatccttctttaaaagctcctcataacgtaggctaaaag

SEQ ID NO: 309109 - DNA, 201 bp, Homo sapiens
ttcaactttgcaggccatatgcctcagttggacatactcactgcgttgtagtgcagaagtagccacagacagtacatcaatgaatgggtatggtagtgttccaataaaactttatttatagactctgaagttgaatttcatatccttttcatgtgtcaggaaatattcttttgacttttaaaaaactatttaaaaatataa

SEQ ID NO: 309110 - DNA, 201 bp, Homo sapiens
gaaggcacaatattttttctgcctgattattataaatagtaaatgagctacatttttgttgaagcaaagatgggacagaacaatgccgggttgcaaacctmgatgagaactggacagattttgcccatgttaaagtaggaagcagctactcacttataagccagtattagaagatttttcaggagacttttaaagcaaaat

SEQ ID NO: 309111 - DNA, 201 bp, Homo sapiens
atagaaaaagaatatcagttctgattgttccttaccagtgcttctaatttttattataagaaagaaaatacccagaagaatccgacaaaaaaactctacarttactaagttttccatatgtaagataaggataaatgttaatttctccttattgcagagatagtattgaaagcagaaggcacaatattttttctgcctgat

SEQ ID NO: 309112 - DNA, 201 bp, Homo sapiens
aatgcccagaacagcgcctatttggaaaaggctcaatacatattaacactattaatctcctcaagttagggatgctgcttggagcagataacaacatcctyaaaataaaattacctgggccaggcacagtggctcacgcctgtaatcccagcattttgggaggccgaggcgggcggatcacgaggtcaagagatggagaca

SEQ ID NO: 309113 - DNA, 201 bp, Homo sapiens
atgaagatcaatttcagttaaactcaacaaatgtgctttgggtgcttactatgtgcaaagaaagtgttacagagataaaaagatgaaacagagatggtgcytgccctaaaggaacacaaaataaccagaatgtgttggggttggaggtggaagagtatgagacagaatgtatgatttaccaataacaatagatttctattt

SEQ ID NO: 309114 - DNA, 201 bp, Homo sapiens
taagagcagaaacacagaggtcatggtagttaaagcacagagtttgaagaaaggagagaagagagacgagtgttgggaacaagccccccaaaatctggccrtaaactggccccaaaactggccataaacaaaatctctgcagcactgtgacatgttcatcatggccataacgcccatgctggaaggtggtgggctttccag

SEQ ID NO: 309115 - DNA, 201 bp, Homo sapiens
aatatgtatttagtgcctactactacattcagagagcgtgctagttggcagaaaaaaaagatgaagatcaatttcagttaaactcaacaaatgtgctttgrgtgcttactatgtgcaaagaaagtgttacagagataaaaagatgaaacagagatggtgcttgccctaaaggaacacaaaataaccagaatgtgttggggt

SEQ ID NO: 309116 - DNA, 201 bp, Homo sapiens
tagaagatacttccatcatttactgacatttcaggcttggaggagacctagaaagcacagaattggtgttagacatgatgtgattgtcaaatgcctattgrttttaacctgatttcttatttccttcctcccattcattctttcactggtctccttgttgaaaagaatggcctcccatcgccagaacggtcatatgtgttc

SEQ ID NO: 309117 - DNA, 201 bp, Homo sapiens
aagtgatctgcacccccttggcctcccaaagtgctgggatttacagacgtgagccaccgcacacagccagattttcttttttttgagatggagtttcactsttgttgcccaggctgtgcaatggcacaatcttggcacactgcaacctccacctcccagtttcaagcgattctcctgcctctgcctcccaagtagctggga

SEQ ID NO: 309118 - DNA, 201 bp, Homo sapiens
tgtgtcaactccaggagtcattggttgaaagcggctggggaggtgggagagaagtataggaaggaggctttttcttttcttttcttttcttttttttttttgagacagagtctcgttctgtgacccaggctggagtgcagtggcatgatcttggctcactgcaacctctacctcccgggttcaagtgattgaacctcagat

SEQ ID NO: 309119 - DNA, 201 bp, Homo sapiens
gccaaacatcaaccgggtctcaacctgttacagcgaggagatcacagtgtgtggtaagagctggtcagaaacggctttccatgctgcacacaaagaagaaygctctacctgtgtggggatgcaagaggagtggcgggctgcagggagatgtgatgataagccaaatttaaccccttcaggtccacaatttgcatattcact

SEQ ID NO: 309120 - DNA, 201 bp, Homo sapiens
gatatcatggaactggggatggcaagcatgggagctgggacacagttgctaccccctgacatcgtatgatgcattcatttgagtattcgtttattgtttgyttttcctagtcttcatctggccccgccccttttccagatgaggacattgaggccccagatgacttgtctgaaaccacagagcttgtcagggcagttctag

SEQ ID NO: 309121 - DNA, 201 bp, Homo sapiens
cttggccccgcaaatttctgggattagagagccaccgtgcccagccaaggactattctatagtgcccacagactgcatgatcagatgatcataagctgatscaccttttctatctggactaggggacttcctgacccgcatattcactgaggacagattcgcccaggactccgagatgaagaaatgcagtgactatgaatc

SEQ ID NO: 309122 - DNA, 201 bp, Homo sapiens
acattagaggcatcaggaaaggctttgatcaatagtgaggatgaaaaaggtgattttgagaggaagtaaagagaaaactgtagtctacccttgagataaayctggatgagaagacaagagaggttgggtgacagttagaggaatataggaggtcaagggaggaggaggtggcggatgaattgctttgagaatgcaaaataa

SEQ ID NO: 309123 - DNA, 201 bp, Homo sapiens
tctgtgctggagctgaagctgaagccagattaaccatgtcctgcttcaatagtccagggaaggactttttttttttttttttgagacagggtctcactctrtcgttcaggctggagtgcagtagtatcatctctgctcattgaaacctctgcatcccaggcttatgtgatcctcccatctcagcctcttgagtagctggaa

SEQ ID NO: 309124 - DNA, 201 bp, Homo sapiens
tgagacagagtctcgttctgtgacccaggctggagtgcagtggcatgatcttggctcactgcaacctctacctcccgggttcaagtgattgaacctcagayacccaagtagctgggattacaggtgtgcaccaacacacctggctgattttttatatgtttagtagagatgggctttcaccatgttaaccaggctggtctt

SEQ ID NO: 309125 - DNA, 201 bp, Homo sapiens
ccaatgtatcaaagcaacttgtgagtcattgacaagcagaatcattgctgaagtcccttctagttctaaaactgtgcaaatatttaggagcagttttgttrgtttggacatgatggcttctcactttaccccaaactcagattctggtatcatgacatctcatagaactaggaaccattttgcacacaaaaagagatcaca

SEQ ID NO: 309126 - DNA, 201 bp, Homo sapiens
actcctggcctcaagcgatccacctgcctcggcctcccaaagtgctggcattacaagcgtgaaccactgagccaagccaggaggttgttaattccatagcrtttctggcctgccatccggatccaggaaataagtcctcagtctggagatgccaatgctggcagctggaagctgctggaaggcactgccaggtctgatgca

SEQ ID NO: 309127 - DNA, 201 bp, Homo sapiens
accaatgtatcaaagcaacttgtgagtcattgacaagcagaatcattgctgaagtcccttctagttctaaaactgtgcaaatatttaggagcagttttgtyggtttggacatgatggcttctcactttaccccaaactcagattctggtatcatgacatctcatagaactaggaaccattttgcacacaaaaagagatcac

SEQ ID NO: 309128 - DNA, 201 bp, Homo sapiens
gacccgcatattcactgaggacagattcgcccaggactccgagatgaagaaatgcagtgactatgaatccatagaggtacccgacagttacacggggccahgcctctccttcccactcctgcctgaccatgcaactgccctggtagaagcattcagactgaaacaagtaagctcacctggggaacctgggtcactaccaac

SEQ ID NO: 309129 - DNA, 201 bp, Homo sapiens
ccacacataactactgagcactgctttgtgccccacattgctctgggcactgaggatacagcagtgaacaaaacagataaaatctctgcccttatggggcyggcattccatcggggaggcagacaatgaacaataaataacaataaataagacaattatgcagtatattagaaggcgatgagagctatggaaaagaataaa

SEQ ID NO: 309130 - DNA, 201 bp, Homo sapiens
ctgaacctgcgggttggtactgagcaggattaccatggcaacaacagatcatcagtagggtaaaactaacctgtctcataatggcctaatttttttttttyttaagacagagtttcgctcttctcgccgaggctggaatgcaatggcacgatctcggctcactgcaacctccgcgtcccaggttcaagtgattctcctgcc

SEQ ID NO: 309131 - DNA, 201 bp, Homo sapiens
atggacctcagggcccagcctctgctttattttcccaagcaattcctactgactcaaactcatgttcttcattcaaaacaaaatctctgcaaataaccagrccctccttgttagaagatggtttatttaatggtacttgagaaagccccgatgactagcaaattattcctcccatccacacacattcctctcctggaaaga

SEQ ID NO: 309132 - DNA, 201 bp, Homo sapiens
cctcttctgtgctggagctgaagctgaagccagattaaccatgtcctgcttcaatagtccagggaaggactttttttttttttttttgagacagggtctcrctctatcgttcaggctggagtgcagtagtatcatctctgctcattgaaacctctgcatcccaggcttatgtgatcctcccatctcagcctcttgagtagc

SEQ ID NO: 309133 - DNA, 201 bp, Homo sapiens
ttgcagtcaatcagccggttctgatgattgacagcttttcttcctaatcacataatctctcattgttcattcatcccacacataactactgagcactgctktgtgccccacattgctctgggcactgaggatacagcagtgaacaaaacagataaaatctctgcccttatggggccggcattccatcggggaggcagacaa

SEQ ID NO: 309134 - DNA, 201 bp, Homo sapiens
atgattctcctacctcaggctcccaagtagctgggattacagatgcctgccaccatgcccagctaatttttgtatttttagtagagatgaggtttcaccayattggccaggctggtcttgaactcctcacctcaggtgatccaccagcctcagcctcccaaagtgttaggattataggtgtgagccaccacgcccagcctc

SEQ ID NO: 309135 - DNA, 201 bp, Homo sapiens
tttaccaggaatctctaaagaatctgtagcaccagccctggacctttcattcactattctcttttgtgtgtgagtgtgtgtgtgtgtgtgtgtgtgtgtgtcagagtctctagcccaggctaaagtgcagtggtacgatctcggctcactgcaacctctgcctcccaggttcaaatgattctcctacctcaggctcccaag

SEQ ID NO: 309136 - DNA, 201 bp, Homo sapiens
gtttaccaggaatctctaaagaatctgtagcaccagccctggacctttcattcactattctcttttgtgtgtgagtgtgtgtgtgtgtgtgtgtgtgtgtgtcagagtctctagcccaggctaaagtgcagtggtacgatctcggctcactgcaacctctgcctcccaggttcaaatgattctcctacctcaggctcccaa

SEQ ID NO: 309137 - DNA, 201 bp, Homo sapiens
tgtttaccaggaatctctaaagaatctgtagcaccagccctggacctttcattcactattctcttttgtgtgtgagtgtgtgtgtgtgtgtgtgtgtgtgtgtcagagtctctagcccaggctaaagtgcagtggtacgatctcggctcactgcaacctctgcctcccaggttcaaatgattctcctacctcaggctccca

SEQ ID NO: 309138 - DNA, 201 bp, Homo sapiens
atgtttaccaggaatctctaaagaatctgtagcaccagccctggacctttcattcactattctcttttgtgtgtgagtgtgtgtgtgtgtgtgtgtgtgtgtgtcagagtctctagcccaggctaaagtgcagtggtacgatctcggctcactgcaacctctgcctcccaggttcaaatgattctcctacctcaggctccc

SEQ ID NO: 309139 - DNA, 201 bp, Homo sapiens
cctcccaaagtgttgggattgtaggcataagtgaccacacctagccatcagttgtatcttgattttctcacaaactttcaactcaaacattctgtccagcwgcatgtatgtctggaggcagagacagcaaaccacagtagagcaaattatctcatgggaagaatcatatttaattatgtaaacatagaagaaggaactctg

SEQ ID NO: 309140 - DNA, 201 bp, Homo sapiens
tctcgaactcctgacctcaggtgatctgcccgcctcggcctcccaaagtgctgggattacagaagtgagccaccatgcccagcaaaaaaaaaaaaaaaaaaattaattagctgggtgtggtggcgagcacctctgtagtcctagacactcaggagcctgaggtgggaggattgcttgagcacaggagttcaagcctacagt

SEQ ID NO: 309141 - DNA, 201 bp, Homo sapiens
gtgaccacacctagccatcagttgtatcttgattttctcacaaactttcaactcaaacattctgtccagcagcatgtatgtctggaggcagagacagcaarccacagtagagcaaattatctcatgggaagaatcatatttaattatgtaaacatagaagaaggaactctgggaaagaatgctaacgaaaagtttattttc

SEQ ID NO: 309142 - DNA, 201 bp, Homo sapiens
ggtgagaatggcgtgaacccaggaggcggagctcgcagggagccaagattgtgccactgcactactccagcctgggtgacagagaaagactctgtctcaaraaagaaagaaagaaagaaagaaaggtaggcctatggagacagatggccttgctgttctggcaaggtaaggactgaaaagatgaagacattagaggcatca

SEQ ID NO: 309143 - DNA, 201 bp, Homo sapiens
aagagaagtgggatagaaagaacattccaggtaagagcagaaacacagaggtcatggtagttaaagcacagagtttgaagaaaggagagaagagagacgartgttgggaacaagccccccaaaatctggccataaactggccccaaaactggccataaacaaaatctctgcagcactgtgacatgttcatcatggccataa

SEQ ID NO: 309144 - DNA, 201 bp, Homo sapiens
ttttcctcttcctatttctcacctatatactttgattctttttctttgttttagcatctgtggaatgacaggaaagtcaatgaggactggcctgagacagrgttgccctttcctatccttgtctaaaaaagtcactggtctcccagacagaaacgatgaactaggttagtgtttctcgaaattatatgtgaaggaccaggt

SEQ ID NO: 309145 - DNA, 201 bp, Homo sapiens
cacccaccttggcctcccagagtcctgggattacaggcatgagccaccacgccaagcctctttttatattcttgttcattcaactacagatatttattgascacttactttgggccaagtactgtgcccagcattactctattgacccaataagaatgaaaaaactaaactagtgttattttgttattcataaattttgcc

SEQ ID NO: 309146 - DNA, 201 bp, Homo sapiens
tttgattctttttctttgttttagcatctgtggaatgacaggaaagtcaatgaggactggcctgagacagagttgccctttcctatccttgtctaaaaaartcactggtctcccagacagaaacgatgaactaggttagtgtttctcgaaattatatgtgaaggaccaggttttataaacttccaatttgttgcagatcaa

SEQ ID NO: 309147 - DNA, 201 bp, Homo sapiens
tgatgtaggtattaacaatcttttctgcctccaactactatgaagttggcagcaacagaggggcctatgtcaaactggggccagccctgaccccacatatygtgcagtatcaagctaacaaggtgacccacacactcaccatgaggcaaaggcaagacttttcaatgagtgattttcagaaaaaaaaattatagtgttcat

SEQ ID NO: 309148 - DNA, 201 bp, Homo sapiens
ggagctcgcagggagccaagattgtgccactgcactactccagcctgggtgacagagaaagactctgtctcaaaaaagaaagaaagaaagaaagaaaggtwggcctatggagacagatggccttgctgttctggcaaggtaaggactgaaaagatgaagacattagaggcatcaggaaaggctttgatcaatagtgaggat

SEQ ID NO: 309149 - DNA, 201 bp, Homo sapiens
gctgttaataaatacgtgggtaaatctctgttcagggctctcagctctgaaggctgtgagacacctgatttcccacttcgcacctctatatttctgtgtgygtgtctttaattcctctagcaccgctgggttagggtctccctgactgagctggtctcggcagacgaggcttttggggaagatttgttgttgttgttgttg

SEQ ID NO: 309150 - DNA, 201 bp, Homo sapiens
ttacatatggaaaactttgtagggttttttctgtcagattcttctgggtattttctttcttataataaaaatcagaagcactggtaaggaacaatcagaaytgatattctttttctatctttgttaggagacttacatggccaattggatgacttaatctttatattttataaggtatgaatgttcaaattaagttgcttt

SEQ ID NO: 309151 - DNA, 201 bp, Homo sapiens
tgaaaaatcttttaacactggcttataagtgagtagctgctttctagtttaacgtgggcaaaatctctccagttctcatctaggtttgcaaccttgcactrttctatcgcatctttgcttcaataaaaatgtagctcatttactatttataataatccggcagaaaaaatattatgccttctgctttcaatactatctctg

SEQ ID NO: 309152 - DNA, 201 bp, Homo sapiens
gccacccctaatgtgtggtttctagacttagctaccatttagcaagtaaggatatgactccttgtggtttggtaactagaaattgctgtgtccctgtacayccaaactcagtgttttcacttacacatctgttatatctttttttgtttgtttgtttttgagacaaggtctcactctgtcatccagactggagtgtggtac

SEQ ID NO: 309153 - DNA, 201 bp, Homo sapiens
ggatgagaagacaagagaggttgggtgacagttagaggaatataggaggtcaagggaggaggaggtggcggatgaattgctttgagaatgcaaaataagakatttcagtatgtttctagactgaaaggaaaaggcagtggaaaggttgaaaacgggagacctagggaatgacaaatggagggaactctcaggggaggaaca

SEQ ID NO: 309154 - DNA, 201 bp, Homo sapiens
ggaaacattgtatcgaaaccgatccaacctagagaccatttttaggatcatagacagtgatcattcaggtaaaggcactcattattctatcacttttgaakcactgcaagtattttaccttaaacccttaatctccttcctgattcatcctcattcatctccactcaggcatttggagagcaaggtaagaagattagtgct

SEQ ID NO: 309155 - DNA, 201 bp, Homo sapiens
caacatggtgaaaccccgtctctactaaaaatacaaaaaaattagccgggcatggcagcatgcgcctgtagtcccagctactcaggaggctgaggtaggaraatcacttgaacccaggagacagagactgcagtgagccaagattgtgccactgcactccagcctggcgacagagtgagactctgtctccaaaaaaaaaaa

SEQ ID NO: 309156 - DNA, 201 bp, Homo sapiens
attatgtattggaacaagcctaaacatatgacaaagaaggaaaatgaattttttcttgcagaacatacaatcaagtttgctggaaacattgtatcgaaacygatccaacctagagaccatttttaggatcatagacagtgatcattcaggtaaaggcactcattattctatcacttttgaagcactgcaagtattttacct

SEQ ID NO: 309157 - DNA, 201 bp, Homo sapiens
cagcggcattccccatactcatcctgtttgtgtacaacagggaagagtaaaggcgctctccctcaaaaactgagctcttgggagactgatatgttaagaamgagagagtggaaatatagtaaaatctctaagtattttttctataccagtgtgttaaaatgtcgcttttcatctcctgtcccaggattagcagagtggagg

SEQ ID NO: 309158 - DNA, 201 bp, Homo sapiens
cggttccctggacgggcgggagctctcccggcaggtgcggagctccgtggaactggagctagagcggtgccggcagcaagcaggcctcctggtgaccggaragaaagaggagccctcccgctcagcctcagaagcagactctgaagccggagagctgcggaagcccactcaggaggagtggaggcaggtgagcgtggccag

SEQ ID NO: 309159 - DNA, 201 bp, Homo sapiens
tgagaagcagaaacaagggcagaagttgagtgataaagaaagaatccgtgcatagtcccaggagcagtttactggggttacttttggggtcttaggtgatrggggttgttaagcagtaaaggtaaggaccattttccctcacgaatatcagtgttgttttcttccttccctcctcttcctcccagtagcagctccatgctc

SEQ ID NO: 309160 - DNA, 201 bp, Homo sapiens
tagctgggactacaggcatgtgccaccatgaccagctcatttttttgtattttttgtagagacacggtcttgccatgttgctcaagctggtcttgaactcycgggcttgagtgttctgctgggctcagtctcccaaagttctaggattacaggagtgggccaccacacctgtctgggcctacagtttcattccagcatctg

SEQ ID NO: 309161 - DNA, 201 bp, Homo sapiens
gcctgggcgacagagcaagcctccatctcaaaaataaaataaaataaagtaaaataaaaataaataaataaataaataaataaataaataaataaatggtrgcttttgagatgattctgagttcttagttgagagattacaaccacaaaatgttataaagaatttatatgggtagcctcacagtaaatttatgcaacagat

SEQ ID NO: 309162 - DNA, 201 bp, Homo sapiens
ttgatgggctgaactgggtagagggaatggagggatggcaaaatattttcaggttttttcaagaatgtgtgattgtcagggttgattgtgtgttaattatrtattggaacaagcctaaacatatgacaaagaaggaaaatgaattttttcttgcagaacatacaatcaagtttgctggaaacattgtatcgaaaccgatcc

SEQ ID NO: 309163 - DNA, 201 bp, Homo sapiens
tatgtttttacctaggaaataaatacagagttgttttgagacaaaggtcaaagacagctcctctgttatctatcaactcatccagatggggtctttgctayctgtgtgatgagatcttcaagtgctgggtgaccattctgccctggatttcttgggctcacttagtggacagataaacactttttttttccgcctaagaga

SEQ ID NO: 309164 - DNA, 201 bp, Homo sapiens
ctgggtagagggaatggagggatggcaaaatattttcaggttttttcaagaatgtgtgattgtcagggttgattgtgtgttaattatgtattggaacaagyctaaacatatgacaaagaaggaaaatgaattttttcttgcagaacatacaatcaagtttgctggaaacattgtatcgaaaccgatccaacctagagacca

SEQ ID NO: 309165 - DNA, 201 bp, Homo sapiens
gggaaatcatcagggggagaagacagctggtgattaccaaaggtgctgattcaacaatctcgggctccctcaagctcgttttctgtggctgaccttatgamgttttcacatttttagtttttcccttgagaattattctacttcccctttctgttcatttcctttttttttttttgaggtggagtctcgctctgtcaccca

SEQ ID NO: 309166 - DNA, 201 bp, Homo sapiens
tagagttttataaaagatggggatgtgtggctgttaggctctattgcctgatgatacttgggttagtgattgagcactagtagggtaagaagataagctaygatttgttggatgctattgtgtgctattttttttaatgtgtcagtaatatagctgccatagttcaaggccaaaagggctaggcagcagcttctttcctct

SEQ ID NO: 309167 - DNA, 201 bp, Homo sapiens
cctactacatgtcaggcactgtgctaaatcctggggataaaatgatgaatttgcttacagtctttctctgaaggaactcacagtctaatagtagagagatmcaagattaaagactgtaatatggtattgcagtgatggaaatgtgaacaggatattcaggagctcagaggaggagcaggtcaagctggcttctttaaggaa

SEQ ID NO: 309168 - DNA, 201 bp, Homo sapiens
aagttagccagcttaagagaagtgggatagaaagaacattccaggtaagagcagaaacacagaggtcatggtagttaaagcacagagtttgaagaaaggaragaagagagacgagtgttgggaacaagccccccaaaatctggccataaactggccccaaaactggccataaacaaaatctctgcagcactgtgacatgtt

SEQ ID NO: 309169 - DNA, 201 bp, Homo sapiens
caacttattcctttaattcggcccatcccttcgtttcccataagggatacttttagttaatcgaatatatacagaaacaatgctaatgactggcttgctgktaataaatacgtgggtaaatctctgttcagggctctcagctctgaaggctgtgagacacctgatttcccacttcgcacctctatatttctgtgtgtgtgt

SEQ ID NO: 309170 - DNA, 201 bp, Homo sapiens
gactctgaagccggagagctgcggaagcccactcaggaggagtggaggcaggtgagcgtggccaggcgctgcttcctagcatgtggctgccaacaggtcamaactctcccttccagggaaactcaggatatgttttgaggcccctctttctctctctttctggggtaacaacaccccagaaggacactagtatttgcctaa

SEQ ID NO: 309171 - DNA, 201 bp, Homo sapiens
gcggtggctcatgcctgtaatcccagcactttgggaggctgagatgggtggatcacgaggtcaggagatcaagaccatcctggccaacatggtgaaacccygtctctactaaaaatacaaaaaaattagccgggcatggcagcatgcgcctgtagtcccagctactcaggaggctgaggtaggagaatcacttgaacccag

SEQ ID NO: 309172 - DNA, 201 bp, Homo sapiens; identical to SEQ ID NO: 64302

SEQ ID NO: 309173 - DNA, 201 bp, Homo sapiens
gagggaatggagggatggcaaaatattttcaggttttttcaagaatgtgtgattgtcagggttgattgtgtgttaattatgtattggaacaagcctaaacrtatgacaaagaaggaaaatgaattttttcttgcagaacatacaatcaagtttgctggaaacattgtatcgaaaccgatccaacctagagaccatttttag

SEQ ID NO: 309174 - DNA, 201 bp, Homo sapiens
accatgttagccaggatggtctcgatctcctgacctcgtgattcacccacctagatctcccaaagtgctgggattacaggcgtgaaccactgcacctggcytagaacattttaatcaccccagaaagaaatctcatacctattagcaattactcctcattccctatccctcctccacgagtccctggcaaccactaatcta

SEQ ID NO: 309175 - DNA, 201 bp, Homo sapiens
aacctccacctcccgggttcaagtgattctcctgcctcagcctcctgagtagctaggactacaggcgtgtgccaccacacctggctattttttttttttttgtatttttagtagagacaggatttcaccatgttagccaggatggtctcgatctcctgacctcgtgattcacccacctagatctcccaaagtgctgggatt

SEQ ID NO: 309176 - DNA, 201 bp, Homo sapiens
ctcgttttctgtggctgaccttatgaagttttcacatttttagtttttcccttgagaattattctacttcccctttctgttcatttcctttttttttttttgaggtggagtctcgctctgtcacccaggctggagtgtagtggcgaaatcttggctcactacaacttccacctcccaggttcaagcgattctcctgcctca

SEQ ID NO: 309177 - DNA, 201 bp, Homo sapiens
ctgtaacctcgaactcctgggctcaagcaatcctcctgccatagtctcccaagtaactgagattacaggcatgcaccaccatgcctggctaatttttaaargttttttttgtaaagaaacccagcctagctgtgttgcccagggtggtcttgagctcctggcctcaagtgatcctcccgcttcagcctcccaaagtgctgg

SEQ ID NO: 309178 - DNA, 201 bp, Homo sapiens
gcaccactgcactccagcctgggcgacagagcaagcctccatctcaaaaataaaataaaataaagtaaaataaaaataaataaataaataaataaataaawaaataaataaatggtagcttttgagatgattctgagttcttagttgagagattacaaccacaaaatgttataaagaatttatatgggtagcctcacagta

SEQ ID NO: 309179 - DNA, 201 bp, Homo sapiens
ctggcagttattgttttcctgagtattaataatagagtagaaactgaagtgctagaaaaattgctcaactcttctgcaattatttatttatttatttattwgtttgtttgtttgtttgtttgaggtggagtctcgctctgtcacccaggctggagtgcagtggcacgatctcggctcactgcaacttccctcttccgggtt

SEQ ID NO: 309180 - DNA, 201 bp, Homo sapiens
acttcaccgatgatgactatggcagagagagccctgaaaaggctgttgtagccatccaggtgggagatgattattgtgagcttgttttgtttttgtttttktttttctttgagacaatgtcactccagttgcccaggctggagtacagtggcatgatcatgactcactgcagcctgtacttcccaggctcagatgatcctc

SEQ ID NO: 309181 - DNA, 201 bp, Homo sapiens
acttcttctctaaccactgtcccataccaggaaggacagcggcattccccatactcatcctgtttgtgtacaacagggaagagtaaaggcgctctccctcraaaactgagctcttgggagactgatatgttaagaaagagagagtggaaatatagtaaaatctctaagtattttttctataccagtgtgttaaaatgtcgc

SEQ ID NO: 309182 - DNA, 201 bp, Homo sapiens
tgccaggctttcttctaagtgctgtacatgaaattactcattgtaatcttcacaataatcctgtgaagtggagacaggtaccattttaatcactgttttayaggtgggaaaactgaagcaaaggatgattagataactttaccacagaggtgatccttctccagaacttcttctctaaccactgtcccataccaggaagga

SEQ ID NO: 309183 - DNA, 201 bp, Homo sapiens
ctgcatggtcagtgctgtctatcttatgacgggggtgcttaaagcctgtagggatatcatggaactggggatggcaagcatgggagctgggacacagttgmtaccccctgacatcgtatgatgcattcatttgagtattcgtttattgtttgcttttcctagtcttcatctggccccgccccttttccagatgaggacatt

SEQ ID NO: 309184 - DNA, 201 bp, Homo sapiens
cttttaaaaatggtatttcaacattggaaatttggaggattttatattatgatctagattttgctttaaaagtctcctgaaaaatcttttaacactggctyataagtgagtagctgctttctagtttaacgtgggcaaaatctctccagttctcatctaggtttgcaaccttgcactgttctatcgcatctttgcttcaat

SEQ ID NO: 309185 - DNA, 201 bp, Homo sapiens
tctttttatattcttgttcattcaactacagatatttattgaccacttactttgggccaagtactgtgcccagcattactctattgacccaataagaatgraaaaactaaactagtgttattttgttattcataaattttgccttctgtttcacatgataataaattacaagaaatgcacaacagttgtgataatagatac

SEQ ID NO: 309186 - DNA, 201 bp, Homo sapiens
gtagcagctccatgctcgctacgtcttgaaccttttgtatgaaaccaagaaacatctggtacagctgccaaacatcaaccgggtctcaacctgttacagcraggagatcacagtgtgtggtaagagctggtcagaaacggctttccatgctgcacacaaagaagaacgctctacctgtgtggggatgcaagaggagtggcg

SEQ ID NO: 309187 - DNA, 201 bp, Homo sapiens
agtgacccaaagttccctttggctatatcctccattttattcaacttaatgtctcatttattctaactaaattttaaaattgtaagcttttaacaaaataygaacttagccaaatagagagggtgaaaagaaatagagtcagggaaggataacatggccagaaccaagcaaagaacaagtgggagaagttataagagtata

SEQ ID NO: 309188 - DNA, 201 bp, Homo sapiens
aaaagtcctaagatctgcagctggcaagctagagaaccaggagagccaatggtgtcagttacagtctaagtccaaaggcctgagactcagaagatccaacrgagtcagttccagttcatgtttgagtaggcaggaaaaaaccaatgtccctgctcaaaggcagtgagacagagaaaaataactctttcttattcagccttt

SEQ ID NO: 309189 - DNA, 201 bp, Homo sapiens; identical to SEQ ID NO: 64293

SEQ ID NO: 309190 - DNA, 201 bp, Homo sapiens
aattaaaatatcccataatttctctacccagggataatgatataattgtaaacattttggtgattattcctcagtctcttttctatgtatttaagtacatrtacccagaatatgcattcttctaaaaatgtgattatgccctgattattgtcacccagtttactctaatatctatttgtgcttctaaatctagatatggct

SEQ ID NO: 309191 - DNA, 201 bp, Homo sapiens
caaactggggccagccctgaccccacatatcgtgcagtatcaagctaacaaggtgacccacacactcaccatgaggcaaaggcaagacttttcaatgagtrattttcagaaaaaaaaattatagtgttcatagaatctttgaatgaagtgtcaaacgttatatttattcaaattctacgtgagaattcagaatttggctat

SEQ ID NO: 309192 - DNA, 201 bp, Homo sapiens
ctctgatagatgagaaagttctaattcttcatggtggggtgtcagacataactgatctggagcttttggacaaaatagagaggagcaaggtagtggttaaygaaataatacaaatttcaccataatgcccagtttcattgccaatataaatgtcatcttacatgctgactgcagtcaactgattatggctgttaagagtgt

SEQ ID NO: 309193 - DNA, 201 bp, Homo sapiens
tctttgctatctgtgtgatgagatcttcaagtgctgggtgaccattctgccctggatttcttgggctcacttagtggacagataaacactttttttttccrcctaagagacagagtctcactatgttgcccagactggagtgcagtggctgttcataagtgcaatcatagcacactacagcctcgaactcctgggctcaag

SEQ ID NO: 309194 - DNA, 201 bp, Homo sapiens
ttttagtagagacgggtttcaccatgttggccaggctggtctcgaacttctgacctcaggtgatacacccgtcccggcctcccgaagtgctgggataacaygcatgagccaccgtgtccagcctagattttttttttttttttttttttttttgtgacggagtctcgcttggtcacccaggctggagtgcagtggtgcgat

SEQ ID NO: 309195 - DNA, 201 bp, Homo sapiens
cctcagagtatataagatgctaacagatacagttttagtgctattgaacatgcttctttaagtattcagcctaacagagttagaaattaagatcggcaaarctagcataaatcaggtggatagagaacatgttagtatttagcatttacccttgtgtgagtgctgtaaaagtgcattattttaaatcattctcaagttatt

SEQ ID NO: 309196 - DNA, 201 bp, Homo sapiens
aatgtcgcttttcatctcctgtcccaggattagcagagtggaggagtcggctctgagagctctgagggagaagctgtttgctcattcttcagatcttctcwgtgaatttaagaagcatgatgcagataaagtcggtaagaatgatcaagttaaagattcacagaggaaggaagctagccagaaaatctctgtcttacacta

SEQ ID NO: 309197 - DNA, 201 bp, Homo sapiens
ctgctgcgtcctgcaggagcattgcgcttaaactatgggaagcggcacctccacccaacatcattttgctttccagaatgcagagagaggtacgtgtttcycactttccaaaccagctgtgggtaccacaaagcccatattgcatggagagggttgggggttctgagggtagaagcagaaaaacccttaaatttctcctca

SEQ ID NO: 309198 - DNA, 201 bp, Homo sapiens
gacagattttgcccatgttaaagtaggaagcagctactcacttataagccagtattagaagatttttcaggagacttttaaagcaaaatctagaccttaayataaaatcctccaaatttcaaatgtcaaaataccattttaaaaattttatgaacattgcaaggcaagcaagacctatctgcaggctgcaggtgaccctag

SEQ ID NO: 309199 - DNA, 201 bp, Homo sapiens
cctagacactcaggagcctgaggtgggaggattgcttgagcacaggagttcaagcctacagtgagctatgatcatgccactgccctccagcctgggtgacygagtgaaatcatttctaatatggtagggatatcaactgtgatataaattgcaaatattttttcccagtttgtcacttgtttggaccaattttggaattag

SEQ ID NO: 309200 - DNA, 201 bp, Homo sapiens
agtgcaggagggattgtaactggccctgctagggtcacctgcagcctgcagatggtcttgcctgccttgcaatgttcataaagttttttttttttttttttgagacacagtcccgctctgtcgcccaggctggagggcagtggtgcaatctcggctcactgcaagctccgcctcccgggttcacacgattctcctgcctca

SEQ ID NO: 309201 - DNA, 201 bp, Homo sapiens
gttaagaaagagagagtggaaatatagtaaaatctctaagtattttttctataccagtgtgttaaaatgtcgcttttcatctcctgtcccaggattagcaragtggaggagtcggctctgagagctctgagggagaagctgtttgctcattcttcagatcttctcagtgaatttaagaagcatgatgcagataaagtcggt

SEQ ID NO: 309202 - DNA, 201 bp, Homo sapiens
gatgtgattgtcaaatgcctattgattttaacctgatttcttatttccttcctcccattcattctttcactggtctccttgttgaaaagaatggcctcccrtcgccagaacggtcatatgtgttcaacggtgactttgtggatcgaggcaaggattcagtagagatcctgatgattctttttgccttcatgctggtttacc

SEQ ID NO: 309203 - DNA, 201 bp, Homo sapiens
attggcagcactggccatagaatgctcagggcaaggtgttagcagacaacattgatgtccatgatcttcttcagtggtccttaaactttagcacaagtatraattatgtatggagcttgttaaaccttcagattccttcctggattccagcggtagagattctgatgttacaggtccagggtgaggtgtagcaacctgcat

SEQ ID NO: 309204 - DNA, 201 bp, Homo sapiens
gctcccaagtagctgggattacagatgcctgccaccatgcccagctaatttttgtatttttagtagagatgaggtttcaccatattggccaggctggtctygaactcctcacctcaggtgatccaccagcctcagcctcccaaagtgttaggattataggtgtgagccaccacgcccagcctcattcactattctgaacat

SEQ ID NO: 309205 - DNA, 201 bp, Homo sapiens
catttactgacatttcaggcttggaggagacctagaaagcacagaattggtgttagacatgatgtgattgtcaaatgcctattgattttaacctgatttcytatttccttcctcccattcattctttcactggtctccttgttgaaaagaatggcctcccatcgccagaacggtcatatgtgttcaacggtgactttgtgg

SEQ ID NO: 309206 - DNA, 201 bp, Homo sapiens
ttattaaagaaccgatgttaaatcatctgacctgtggtcacacagctagtccttgagtgaaggtagtccttgaccgaggcaattctatttcagaacccacwcttttaatgtctatgcaatattgcctcctacaacgaagatggcctcagagtatataagatgctaacagatacagttttagtgctattgaacatgcttctt

SEQ ID NO: 309207 - DNA, 201 bp, Homo sapiens
acagaaagaatggccccagatttagggtgttcatgtcatgtgtccactagagagattctacccctgctgtgcttagccaggaccttgcagtcaatcagccrgttctgatgattgacagcttttcttcctaatcacataatctctcattgttcattcatcccacacataactactgagcactgctttgtgccccacattgct

SEQ ID NO: 309208 - DNA, 201 bp, Homo sapiens
agtagcagctccatgctcgctacgtcttgaaccttttgtatgaaaccaagaaacatctggtacagctgccaaacatcaaccgggtctcaacctgttacagygaggagatcacagtgtgtggtaagagctggtcagaaacggctttccatgctgcacacaaagaagaacgctctacctgtgtggggatgcaagaggagtggc

SEQ ID NO: 309209 - DNA, 201 bp, Homo sapiens
atgaaataatatgtaaaacaaccccctgtgacatgtgtgtacctatgtaaaaaaccttcgcatatacccccaaacctaaaataaaagttaaaaaaaaaaaagaaaaaggaaatacaaacaaaagatacaagcccactgatcatgtgcttgactgtcatgacaatgtcatattgctgtcaatgtttctcagacttactctca

SEQ ID NO: 309210 - DNA, 201 bp, Homo sapiens
cgctgctacaatctgctctgtggcctgacccctgatcagaattcgtgccacttatgtcctcagcccagtcccagtgccatgatgaccgcaagtgagagggwctctattcaattccctgtggcaaggagtgtctttctgattaggtccaggctgaaaagaggagctccctcccctcccctgtccttccccaacaggtaagat

SEQ ID NO: 309211 - DNA, 201 bp, Homo sapiens
atagtgcccacagactgcatgatcagatgatcataagctgatccaccttttctatctggactaggggacttcctgacccgcatattcactgaggacagatkcgcccaggactccgagatgaagaaatgcagtgactatgaatccatagaggtacccgacagttacacggggccacgcctctccttcccactcctgcctgac

SEQ ID NO: 309212 - DNA, 201 bp, Homo sapiens
gttgaagcaaagatgggacagaacaatgccgggttgcaaacctagatgagaactggacagattttgcccatgttaaagtaggaagcagctactcacttatragccagtattagaagatttttcaggagacttttaaagcaaaatctagaccttaatataaaatcctccaaatttcaaatgtcaaaataccattttaaaaat

SEQ ID NO: 309213 - DNA, 201 bp, Homo sapiens
taacatccttcacactgttaagacataaggaagaagctgatgtcacaggacctgaatgcagagtgtttagagcaagtacgtagtggaagagcgcccaaagrtgatgtccattcttccctccagggctggaggcctagagaaacagcatttgcctggcacacagcaagaggtcaaaacaccctgctaggtggtctctttttt

SEQ ID NO: 309214 - DNA, 201 bp, Homo sapiens
aaaaactaccaaattatatggtatatacaaggaggaattttctattatgtgaattctatctcaacaaacaaacaaacaaacaaacaaacatacctccaaarcatcgtacccaacctgtatgcatactgtctagaagctaactggcccacaacctatatgggattcaaggttgctgaaagttttgatatacttgtagctgtt

SEQ ID NO: 309215 - DNA, 201 bp, Homo sapiens
gggtttcaccatgttgtccaggttggtctcaaactcctgacatcaggtgatccacctgcctcagcctcccaaaatgctgggattacaggtttgacccaccrtgcctggcccccagacactcgagttttaaaggaatgctataataaatagaaattattttacaacagtgggatgaaactatgttttttttgttttcgtttt

SEQ ID NO: 309216 - DNA, 201 bp, Homo sapiens
tttatttcccatatacttgttaagtgtagatcttggggaagaacaactaacaccagaaacatcacatgttggctgttggggaggtgcttgtccattttgtwtcccttttattttttcccaatcaacagagatccagttagaaggagcagcaagaccttccaggaggccatgctggaaggacatggggtgaggaggatacct

SEQ ID NO: 309217 - DNA, 201 bp, Homo sapiens
gctaactaccaaaacccagccatttataaaaacccaaccatcataaaaaaaaaaatgcatgggtgacgtgtgttacagcacacgaaccttgagaacgtgcygagtgaaagaagccagacacagaagatgacacgttatataccatttacatgaaatgtcaagaagaggcaaatccagagatagaaagtacacgggtggttg

SEQ ID NO: 309218 - DNA, 201 bp, Homo sapiens
agtttcagcgtctgagctcttgcccactaacttactgcctcacgctgatcctgatgcagcacccactctagattggcatgtggcctccagtcagagactcrtttaatttaatcacatggtgcccacctggcccttgtaggtacttgccggagctgctgaggacaatgctgacaacctagttggcctcatgggtagttgtgt

SEQ ID NO: 309219 - DNA, 201 bp, Homo sapiens
acactgtgtgttctcgctcataggtgggaactgaacaatgaggtcacttggacagagggtggggagcatcatttaccagggcctgtcaaggggtagggggyttggggagggacagcattaggagaaatacctaatgtaaatgatgagttgatgggtgcagcaaaccaacatggcacatgtatacctatgtaacaaacctgc

SEQ ID NO: 309220 - DNA, 201 bp, Homo sapiens
ctttctggtgtatggtcctcaatttgaattgcctttgggtttaccatgacagctctttccttttgggttattttgacttgggtcagcctattaaaggtggyagcaccctgtagaggcctcgggatgctgaagatgccatgagaagacacaggcattctgcagacgctagacaattttagtggcagttagtgtcgcagagca

SEQ ID NO: 309221 - DNA, 201 bp, Homo sapiens
atcctgatgcagcacccactctagattggcatgtggcctccagtcagagactcatttaatttaatcacatggtgcccacctggcccttgtaggtacttgcyggagctgctgaggacaatgctgacaacctagttggcctcatgggtagttgtgtacgaacatagaatataccctcaccaggggtcttgctttgttgcccag

SEQ ID NO: 309222 - DNA, 201 bp, Homo sapiens
gtggggagcatcatttaccagggcctgtcaaggggtagggggtttggggagggacagcattaggagaaatacctaatgtaaatgatgagttgatgggtgcmgcaaaccaacatggcacatgtatacctatgtaacaaacctgcacgttgtgcacatgtaccctaaaacttaaagtataataaattcaatatagtgattaag

SEQ ID NO: 309223 - DNA, 201 bp, Homo sapiens
ttggccaggctggtctcgaactcctggcctcaagtgattggctcacctcggcctcccaaagtgctgggattacaggtgtgagacacacatcggcccaatayctgttctttatgcaagatgaatgtttcttctacagaggttatactggtttggttctctgggcagtatttattatgatttttcatggacctttgtgagttt

SEQ ID NO: 309224 - DNA, 201 bp, Homo sapiens
tcagagactcatttaatttaatcacatggtgcccacctggcccttgtaggtacttgccggagctgctgaggacaatgctgacaacctagttggcctcatgrgtagttgtgtacgaacatagaatataccctcaccaggggtcttgctttgttgcccaggttggtctggaactcctgggctcaagcgatccttccactttgg

SEQ ID NO: 309225 - DNA, 201 bp, Homo sapiens
tcttgaactcccgacctcgcaatccacccgcctcggcctcccaaagtgctgggattacaggcgtgaaccaccgcgccctgccttttttttgttgttttctragttctccagatgactctgaagtgcagttgggaataaaaataaccgtcttaaggtaggatagactcccaaggtcaagttatgaaaccccttttcaaagtc

SEQ ID NO: 309226 - DNA, 201 bp, Homo sapiens
tccgggcgtggtggcacgcgcctgtagtcccagctactcaggaggctgaggtgggaggatcgattgaacccaggaggcagaggttttagggagctgagatsatgccactgcactccagtctgggaggcagaccgtcttaaataagccagccagcccgtgccagatcgacagaatctagaagtgagtactaggcgactattt

SEQ ID NO: 309227 - DNA, 201 bp, Homo sapiens
aatggaggccgggacgtggtggcttatgcatgtaatcccagcactttgagaggctgaggtgagtggatcacttgagaccaggagttcaggaccagcctggmcaacatggtaaaacctcatctccactaaaaatacagaaattagccaggcatggtggtgcacgcctgtaatcccagctacttgggaggcagaggcataaga

SEQ ID NO: 309228 - DNA, 201 bp, Homo sapiens
catgaacccgggaggcagagctttcagtgagccgagatcgtgccactgcactccagcctgggcgacagagccagactccatctcaataaataaataaatawataaataaataaataaataaataaataaataagggttaaaaaggcagtagttagaattgatgagtgtctggttcctaagattgatttcaacattgggcta

SEQ ID NO: 309229 - DNA, 201 bp, Homo sapiens
ttctctctgcagttctgtccttactcttccctgcagcaccttctgcctgtgtccaggactcctggaagtaattctaggaaacaagccaagtgacctttgamcaataaggatttgaattgcgcgggtccacttatatgcggattttttttcaaccaaacgcgaccagtatttacgggatgtgccgccccgcgtataaggagg

SEQ ID NO: 309230 - DNA, 201 bp, Homo sapiens
aatgatgagttgatgggtgcagcaaaccaacatggcacatgtatacctatgtaacaaacctgcacgttgtgcacatgtaccctaaaacttaaagtataataaattcaatatagtgattaagtggcattgtaccaccctgttatcttgggaagcagatgctttcatggactaaattttgtgtttggtgctcctttcttgcag

SEQ ID NO: 309231 - DNA, 201 bp, Homo sapiens
ctcgtgtcctttcagcctatgtcagccgcctgcccgcggcctttgcgccgctgccccgggtccggatgctggccgtggcccggcctctcagcaccgctctstgctccgcggggacccagacgaggctcgggactttgcagccggccttagtgctcgcgcaggtgactcgtggtgactttgctgccgcttggcaagggtcag

SEQ ID NO: 309232 - DNA, 201 bp, Homo sapiens
ctgcaatctcggcactttgggaggccaaggcaggcagctgggaggtggaggttgtagctagccgagatcacgccactgcactccagcctgggcaacattgwgcactgagtgaacgagactccatctgcaatcccggcacctcgggaggccgaggctggcagatcactcgcggttaggagctggagaccagcccagccaaca

SEQ ID NO: 309233 - DNA, 201 bp, Homo sapiens
aggtaaagttcccaggcttctgagacagtcgtgtaaataaaggcaaggcattgtgaaacaggtgtgtgtagtgcaaaagcaaaaagagatacttgaccaayctctcagtgaacgtgatcttgaaggcctgtgcagaggccaggaagagcctggcacttacctccttgtggttgactcttagggtgtctggaagggaacatt

SEQ ID NO: 309234 - DNA, 201 bp, Homo sapiens
ctccaactcatctctttagtttgctgattaaacctgattttttttttttttttcttgagacggaatctcactctgtcacccatgctggagtgtaaatggcrtgatcttggctcactgcaacctccgactcccaagttcaagcgattcttctgcttcagcctcctgagtagatgggattacaggcacatgttaccacgccca

SEQ ID NO: 309235 - DNA, 201 bp, Homo sapiens
aagtgttgggattacaggcgtgagccaccacacctggcatcgtaccatttctttttttttttttttttttttttctttttggagacagagtctcaccctgycgcccaggctggagtgtagagccatgatctcagttcactgcaacctctgcctcctaggttcaagtgatcctcccacttcagcctcctgattagctgggat

SEQ ID NO: 309236 - DNA, 201 bp, Homo sapiens
gggttattttgacttgggtcagcctattaaaggtggcagcaccctgtagaggcctcgggatgctgaagatgccatgagaagacacaggcattctgcagacrctagacaattttagtggcagttagtgtcgcagagcagtatgaatgtccagagcctgagggttgaagccaggaggcagaggggccggtcctgactcccagg

SEQ ID NO: 309237 - DNA, 201 bp, Homo sapiens
aggagccgccaggggccgccaccgccggcggtgcccgacagcgctgccgtgtgcgtcgcctgcgcgccgccggaaaggaaccctggtccggaggcggcggsgcagtgcatcctgggttggcgtagccatggcgtctcgtgtcctttcagcctatgtcagccgcctgcccgcggcctttgcgccgctgccccgggtccggat

SEQ ID NO: 309238 - DNA, 201 bp, Homo sapiens
taataaataataaaaacacaagtggggccgggcgtggtagctcacgcctgtaatcccagcactttgggaggccgaggcgagtggatcatgaggtcaggaawtgaagagcagcctggccaagatggtgaaaccccatctctactaaaaatacacaaattagacaggcgtggtggcagacacctgtaatcccagccactcggg

SEQ ID NO: 309239 - DNA, 201 bp, Homo sapiens
cctcccaaagtgctgggattacaggtgtgagacacacatcggcccaatacctgttctttatgcaagatgaatgtttcttctacagaggttatactggtttsgttctctgggcagtatttattatgatttttcatggacctttgtgagtttcagggacctgagccctaacaagcagccccactttctatagggaaatgcctg

SEQ ID NO: 309240 - DNA, 201 bp, Homo sapiens
ctggctcacactcacctgcaaaattgggatcctggtctctaccttgcggagtagcaatgaggattagatgagttaatgcggctagagcacctcgtacggtmtcaaaatagcggtcaccgtattgtagtgaaagcagcatgcaaagaggcagccacactggcctacagccttctccagagcggttttctctctgcagttctg

SEQ ID NO: 309241 - DNA, 201 bp, Homo sapiens
tttcttttacacaatggtgatggttgcacaatgtgaatatactaaaaactaccaaattatatggtatatacaaggaggaattttctattatgtgaattctrtctcaacaaacaaacaaacaaacaaacaaacatacctccaaagcatcgtacccaacctgtatgcatactgtctagaagctaactggcccacaacctatat

SEQ ID NO: 309242 - DNA, 201 bp, Homo sapiens
taacaaaaataaaaagaaattgaggtaaaactggtgacattattggatcattcattcaggcagatttcagaatttggagtcattatcccgtgtgtttccayttcagtcaatatcctttagctccctgcttagaaataggaattagccttcttaaactcctccctcgcttacctatttttgttagctattgtaaggaacatg

SEQ ID NO: 309243 - DNA, 201 bp, Homo sapiens
cgctaccacgcctgacctcatttcgttttcttgacctgttcttccctctccttgaattatcagtctcagctcttttcctcaccaaatccaagtctggcatyctcctttccggccactcaaggactgagtgacaacttttgttattgcatcagcctacagatacttctgtcatggtgcttgccatatttttatttcaactaa

SEQ ID NO: 309244 - DNA, 201 bp, Homo sapiens
ttacttggatttaacaaaaataaaaagaaattgaggtaaaactggtgacattattggatcattcattcaggcagatttcagaatttggagtcattatcccrtgtgtttccatttcagtcaatatcctttagctccctgcttagaaataggaattagccttcttaaactcctccctcgcttacctatttttgttagctattg

SEQ ID NO: 309245 - DNA, 201 bp, Homo sapiens
cctgggccctccctcttagcctccaagcctgtcatctgtgtaccatctcccaacatgagctgatgtcttctcacatagacacaggcactgcactttcatgwctttttttttttttttttttccagacaaggtctctgtcacttaggctggagtgcagtggcatgatcatatatcagtgcagcttcaaactcctgggctcaa

SEQ ID NO: 309246 - DNA, 201 bp, Homo sapiens
gtgggctcccgagttctcttaccacacatgctccctggactcttcactcctggtttctgttattgctgtatatcccagacctccgcctccagtccttgttyatctcatttggaccattgctcatgctacctattccctgctgtgaaatttcctctcctcaaatccatccactatgccaacttcagagcaactagtcactca

SEQ ID NO: 309247 - DNA, 201 bp, Homo sapiens
gttcctaagattgatttcaacattgggctaaaatgtgaagtgactgtctttgttcttacagcattgattctcagttgattggacatacagatcacttaggytggaatacagattctgattcagttctgggaaggggccagagagtttccacctccagtgggcttccagaagatcctgctgcgggtgttccttggaccatgc

SEQ ID NO: 309248 - DNA, 201 bp, Homo sapiens
tttctcaaaaaaccaaaaaacagacaacattagagtgaaatccttcattagctatgtatatattgttcacttcaaaacagagtaagataaagcaaaccatrtacatactagcataggttacatataaaatgtcagttatagcctctgtatgttaaaaaaaattcgatgtagtcacaaggacagaaaaccaaacactgtgtg

SEQ ID NO: 309249 - DNA, 201 bp, Homo sapiens
agccaggaggcagaggggccggtcctgactcccaggaaggaggcctgagatgctgctgaactgttggggcttctgcgattacccagtcctgcaacttagtstgtcctggtggccacaatgagaatcagatgctgtgggttctctaaagccccgaaagttctgtgaaagttacctataggcttgtgcattgatttagaggta

SEQ ID NO: 309250 - DNA, 201 bp, Homo sapiens
cctttttaaaaaacacaactggccgggcactgtggctcatgcctgtaatcccagcactttgggaggccgaggcgggcggatcacctgaggtcgggaattcragaccagcctgactaacatgtagaaacttcatctctactaaaaatacaaaattagccgggcatggtggcacatacctgtaatcccagctactcgggaggc

SEQ ID NO: 309251 - DNA, 201 bp, Homo sapiens
ctcggagaaggtggatgtgattgccaagcgtgtgctggggtgagtacccgcaggctgagctcagggttccacaccctccttccctctctctgtcccatggmtctctttccttcagggctgggctgttggggccccagcacaactccatggccagtgaagaagtgacccttcactggctttcgctggtgaggagggcttacc

SEQ ID NO: 309252 - DNA, 201 bp, Homo sapiens
ggttccacaccctccttccctctctctgtcccatggctctctttccttcagggctgggctgttggggccccagcacaactccatggccagtgaagaagtgmcccttcactggctttcgctggtgaggagggcttacccggagaacccgggctttctctggacataggcatgtgttcactgcttgcaccaacctggttgcat

SEQ ID NO: 309253 - DNA, 201 bp, Homo sapiens
gggtagatacatatctccactgtttgtaagaggattgtgaagctcagagaagctgagtaacttgccaaagtcacacacctagtgagggatatagcgctttmggcctatgcctgatcacgatgcctgctgaccgtatgggactgagctgctgctcacaagaagcagctcccagcactacggttcttaacttttttttttttt

SEQ ID NO: 309254 - DNA, 201 bp, Homo sapiens
cgcgctagggggcctgtgactttaaggggcaaggctgcgctggctgtggcggaggccgattggctggaagcagtccccggaagtgacgcagggagaagccyacgtgtgctattccatcccacatggcggcgctcctgaggagactgctgcagcgcgagaggccttcggcggcctctggccgccccgtaggacggcgcgagg

SEQ ID NO: 309255 - DNA, 201 bp, Homo sapiens
agcggaaataattcaaattgccaggagtttcttgtgttttttgtgccatcccatctctttcgatctttttttcatgcattccatacatgtgcattgatgayaacctgtgtaacaggtgttgtagacgctgggatacagtgatcattgagaaaggtaggggccttgctctgtggaagtctgcattctagtggctgccgcaga

SEQ ID NO: 309256 - DNA, 201 bp, Homo sapiens
ttgtggaggaggcctttggttgccagctgcaaaacagggatgtcctcaacccagtctacgtggagaggatcctcctgctgagacaggtgtggtgtcaggaytctgggaagctgagggaggggttactgggtgcctcaattcctcctgccttccagagccctgtccctagtgcattcaatgactgcctccttccccagggtc

SEQ ID NO: 309257 - DNA, 201 bp, Homo sapiens
tgatcaataaccttctgaagcccttcctcccacccacttgccattggcccatgcaggccctgtaaactggccctcttcttctaggcttctagaaagatctrgtatgagcttaactcaggatatgctgaatggagaactgaagaagctatcagaaggtctggaaggcaccaagtacagtaatgtgatgaaactccttcggat

SEQ ID NO: 309258 - DNA, 201 bp, Homo sapiens
tttttgttaaattatagtcatgccctgttgtggaatccttgcagccatttatttatttatttattttaagctttcaggatttgtattaaatcctagtctartttaacagtatctgatgttacacacatcatctcatggtgaacgtgtttaataagcgaaagcaaatcagacagcttatctaagtcgttattttttgtggac

SEQ ID NO: 309259 - DNA, 201 bp, Homo sapiens
gttgaggttgaggctgcagtgagctgtgatcatgttacagaattccttcagtgccactttgccagccagaaatctctgcagctgccctcacctctgtcggkgcctcgcttgggccttctgggcccatttggcccagcaggctgcacttggctcatgcccacttggatcccacacctgccatggctccacactcagcccatg

SEQ ID NO: 309260 - DNA, 201 bp, Homo sapiens
cttagcaaggacctcctgtagctgagatgatgttggccttgggaccaaaggaagtacgggaacggatccagaaggtggtttccagctagggagaggatgtktcgggcagtggagatcgccctaagaacctgtgagcttagaaacagctttcagagaccagaaggaggcctggggcccgtcgggaagtttgctgaaggaact

SEQ ID NO: 309261 - DNA, 201 bp, Homo sapiens; identical to SEQ ID NO: 64315

SEQ ID NO: 309262 - DNA, 201 bp, Homo sapiens
ccgcagcagcccctaatctctcacagcccggccggaaacaggtggaggtttctatggagacccgcctcctccgctcccaggtccggcccctgccacgcttycgctttcccaagctgaagggggcgggtccgggaaatagccctttctctggcctctgccccctggtggcgagtgcggccgcagccgtccaggggggcgtgg

SEQ ID NO: 309263 - DNA, 201 bp, Homo sapiens; identical to SEQ ID NO: 64317

SEQ ID NO: 309264 - DNA, 201 bp, Homo sapiens
gggcgatagagcgacactgtctcaaaaaaaaaaaaaaaaaaaaaaaaaatgaaaggtccacaaagggccaagtatggtggctcacgtctgtaattccagcmctttgggagggcggaggtgggcagatcacttgaggtcagaagttcgagaccagcctggccaacatggtgaaaccccatctttactaaaaatacaaaaatt

SEQ ID NO: 309265 - DNA, 201 bp, Homo sapiens
gtgttttggctcaaaagcttttaatgacgacagactatggatcctttgaaactatagcacagtgctgtccagcagaactttctgggagggcgaatatgttygtacctgtgctagccactacctactgctgtgactattacacacttgaaatgcagctactatgactgaggaactgaattcttaatttcattttaaccagcc

SEQ ID NO: 309266 - DNA, 201 bp, Homo sapiens
atgctaacagtatgactagaattaatatggatttagtttctttttttccttcttcattttactgccagatgaatctagtttatttcaagctgagcacttayccatggtccaagacttagacccaaaccttgaagaagcaagcatcaaataggatgacctgaaggatttctgaaaatgtgtccagaatagcctgcctgctgg

SEQ ID NO: 309267 - DNA, 201 bp, Homo sapiens
gctgaagggggcgggtccgggaaatagccctttctctggcctctgccccctggtggcgagtgcggccgcagccgtccaggggggcgtgggatttcgcgctmgggggcctgtgactttaaggggcaaggctgcgctggctgtggcggaggccgattggctggaagcagtccccggaagtgacgcagggagaagcccacgtgt

SEQ ID NO: 309268 - DNA, 201 bp, Homo sapiens
acgctttcgctttcccaagctgaagggggcgggtccgggaaatagccctttctctggcctctgccccctggtggcgagtgcggccgcagccgtccaggggrgcgtgggatttcgcgctagggggcctgtgactttaaggggcaaggctgcgctggctgtggcggaggccgattggctggaagcagtccccggaagtgacgc

SEQ ID NO: 309269 - DNA, 201 bp, Homo sapiens
acggtggggctgcctcattttcagaatgctcacaaagaaatccgccttacctgggcccccttaacagatggcatcacatcttcaggttttcctttatccarcactttcctgtgttgctataagtcagaagagagaatgaaatgaaacagctgactacatttcgtcgtgttactattcccttgaaagagaggatgaagaaag

SEQ ID NO: 309270 - DNA, 201 bp, Homo sapiens
attatatgcaatggaggaaaagttgttctcaaggaaaactagggagctttctccagaagatgatgtaatggcagaaacaacaggtggttgaccacagaagsggacaataataatacttgtaatttattgtgcgcttatatgagcctcaccctctcccaggtgtcagataatgctcgtaaatgccttagtccatcatctcag

SEQ ID NO: 309271 - DNA, 201 bp, Homo sapiens
atcttactctagtctcatgatgatcctcatgagaaagttactacttgtttccttctttgacagatgagaacccagagcccagaaagatgacttgcccaagrtctctgagctggctggtacgtttgaacccaggcccactcagctcagtttgtgttagcattgagggtagcaaggtgaacaatgtccttatcttcccaattc

SEQ ID NO: 309272 - DNA, 201 bp, Homo sapiens
acaggaggctgctagctccacttttcaaaagaggaaactgaggcttagaaagattaagtctagctgggcatggtggcacattcctataatcccagctactygagaggctgaggtgggaggatcacttgagcctagaaattggagactgtagtgagctatgattgcactactgcaccctagcctgagtgacacagcaagact

SEQ ID NO: 309273 - DNA, 201 bp, Homo sapiens; identical to SEQ ID NO: 64313

SEQ ID NO: 309274 - DNA, 201 bp, Homo sapiens
catctcttagaaaaagaaaggctaagtaacacaaacagcagtgtaatgagtggttaagaatatcggctccggtgcccattagtctgggtttgaagctgatygtgccccttctactcggccaggtgacaaagcatctctgtgcctcagtgtcctcacagagtgggggaataaccgcacctacctggtagggtgggtttgagg

SEQ ID NO: 309275 - DNA, 201 bp, Homo sapiens
ctcagcttgttgcagatgcctcatcaacattgggtgtgtttgttaccttgtgctgcgtaagaaattcccctaaacatgtattacctctcagtttctgtggrtcaggcatctgagcgtggcctcacctgtttctttggctcagggattctctcaaagccacaagcaactacaggtcctagccagtcctggagttctcttaaa

SEQ ID NO: 309276 - DNA, 201 bp, Homo sapiens; identical to SEQ ID NO: 64308

SEQ ID NO: 309277 - DNA, 201 bp, Homo sapiens
ctcgccctgcagtaggtcgagcacagctggacgccatctcggagaaggtggatgtgattgccaagcgtgtgctggggtgagtacccgcaggctgagctcarggttccacaccctccttccctctctctgtcccatggctctctttccttcagggctgggctgttggggccccagcacaactccatggccagtgaagaagtg

SEQ ID NO: 309278 - DNA, 201 bp, Homo sapiens
atttttttttttaaacttttcataaagatggggatctcactatgttgcccaggctggtcttgaactcctggcctcaagcaatcctcccaccttggcctccyaaagtgctgggattatagatgtgagccactgcacctgactttttttttttttttttttttggtgagacagagtcttgctctgctacccaggctagagtgc

SEQ ID NO: 309279 - DNA, 201 bp, Homo sapiens
taaatgaatgaatgaatgaatgtttcttcagctggccccattgctgtggatttaaagaaataccttttcttcctggttttatttaacctttgagatccatycaataatctctaataccatcaattagcacttcccctttaacatcccaaacactaaggtacctcattttcccaatctgaaacatgttatcagctgagtaca

SEQ ID NO: 309280 - DNA, 201 bp, Homo sapiens
aaataaatacataaataccaaagcatagagagcaccggtcacaggccacttgatgagtactttacttagatcatcttactctagtctcatgatgatcctcrtgagaaagttactacttgtttccttctttgacagatgagaacccagagcccagaaagatgacttgcccaagatctctgagctggctggtacgtttgaacc

SEQ ID NO: 309281 - DNA, 201 bp, Homo sapiens; identical to SEQ ID NO: 64307

SEQ ID NO: 309282 - DNA, 201 bp, Homo sapiens
aaaggtgaatgaaacatgatcactcccctcatttagtcaatcaacagacactattgagtacctactatgtgcaagcattgtgttaggtacagtgaatacartatagaattaaacacacatacataatctctgcctccatggggtttgcagtttattggggataacagacctagcaacagcttacttaatatgggaaaatca

SEQ ID NO: 309283 - DNA, 201 bp, Homo sapiens
aaaattttaaattcaaatacgaaatgtaatacttggccgggcatggtggctcacgcctataatcctgcctataatcccagcactttgggaggccaaggtgrgtggatcacctgaggtcaggtgtttgagaccggcctgatcaacatggtaaaaccctgtctctactaaaaatacaaaattagctgggcgtggtggcacgtg

SEQ ID NO: 309284 - DNA, 201 bp, Homo sapiens
ggggttgcggtgcgagtgcggttcgctcccagccccacaggtaaccctggcggacgtgacgctacaggccgaggccccctgtcccgtctccgccccacgartgttcccgaatgaatcctttccggtggtgtcagagtgggcgggcggaggagggttaaggcagcgcgagcccattttacagaggcggaaactgaggtgcag

SEQ ID NO: 309285 - DNA, 201 bp, Homo sapiens
aattactcactaaactctggattcctaaagagtataaaatggttggccgggcgtggtggctcacgcctgtaatcccaaaactttgggaggccgaggctggygcatcacgaggtcaggagatcgagaccatcctggctaacatagtgaaaccccatctctactaaaaatacaaaaaattagccaggcgtggtggcgggtgcc

SEQ ID NO: 309286 - DNA, 201 bp, Homo sapiens
ccaacctcaggtgatccacctttctcagattcccaaagtgttaggattataggcgtaaaccaccgtgcccagccagatcaggttttttggttttttttttkttgttgttgttgttgttttttttcatagagtcagggtcttactttgtcacccaggctggagtgcaatggtgtgatgttggctcactgcagcctccaactc

SEQ ID NO: 309287 - DNA, 201 bp, Homo sapiens
tatgttgcccaggctggtcttgaactcctggcctcaagcaatcctcccaccttggcctcccaaagtgctgggattatagatgtgagccactgcacctgactttttttttttttttttttttggtgagacagagtcttgctctgctacccaggctagagtgcagtggtgcaatctcagcttactgcagtctccacctcccgg

SEQ ID NO: 309288 - DNA, 201 bp, Homo sapiens
ctgaggcaggagaatcatttgaacccaggaagtggaggttgcagtgagccaagactgcaccactgcactccagcctgggcgatagagcgacactgtctcawaaaaaaaaaaaaaaaaaaaaaaaatgaaaggtccacaaagggccaagtatggtggctcacgtctgtaattccagcactttgggagggcggaggtgggcag

SEQ ID NO: 309289 - DNA, 201 bp, Homo sapiens
aatcgcatgaacccagaaggtggaggttgcagtgagctgagattgtgccattgtactccagcctgggtgacagagggagactgtctcaaaaaaaaaaaaargaagatccacaaagatatatattgaaagaactctcttccaatcttgactctggccactcaattctgctctccagagataaccagtgttaaaattttctta

SEQ ID NO: 309290 - DNA, 201 bp, Homo sapiens
ctattttgcccaggctggtatgaaactcaagcgatcttcccacctcagcttcccaaagtgctgggattataggcatgagccaccatgcctggccaacagatttttttttttgttaaattatagtcatgccctgttgtggaatccttgcagccatttatttatttatttattttaagctttcaggatttgtattaaatccta

SEQ ID NO: 309291 - DNA, 201 bp, Homo sapiens
taaattatagtcatgccctgttgtggaatccttgcagccatttatttatttatttattttaagctttcaggatttgtattaaatcctagtctagtttaacrgtatctgatgttacacacatcatctcatggtgaacgtgtttaataagcgaaagcaaatcagacagcttatctaagtcgttattttttgtggactaaacag

SEQ ID NO: 309292 - DNA, 201 bp, Homo sapiens
ggacctgatatgtcattcttccaacttcaccctttccctgggggagagacggtttgggtgggttggggtgttgacagcagggcagccccttgatttcttcygcagactgcacctccagcggctggtgagcaatgagagccagaggcgccagctggtggggaagctgcaggtccttgtggaggaggcctttggttgccagct

SEQ ID NO: 309293 - DNA, 201 bp, Homo sapiens
tgctcctctaccaggccctgggctggcagccaccccacttcgcccacctgcccctgctcctcaacagggatggcagcaagctctccaagaggcaaggggaygttttcctggagcactttgctgctgatggcttcctgcccgattccttgttggacatcatcaccaactgtggctcaggttttgcaggtacgtgcccacctg

SEQ ID NO: 309294 - DNA, 201 bp, Homo sapiens
ctgtcttcggggaaaaaaaaatgacatataattcacatgatatgaaatttaccatatcaaagtgtacaattcagtggttttcaatatatttactgtgttgygcaaccgtcaccactaattccagaacatttccatcacccctaaaagaaactcttccttattagcagttgttttccattctaccctctcctaccacctggc

SEQ ID NO: 309295 - DNA, 201 bp, Homo sapiens
ctgggaggcagaggttgcagtgagacaggatcacaccactgcactccaacctgggcaacaaagtgatactctgtctttaaaaaaagttattagtggtttgyaagaccatcagccaggtgtgcacctggggtgagggtcttcctgatactttgcctagagcactggtttggggacacagtatcagtgcatttacttgcatga

SEQ ID NO: 309296 - DNA, 201 bp, Homo sapiens
ctactaaaaatacaaaaaacttagccgggtgtggtggcgggcacctgtagtcccagctactcaggaggctgaggcagaagaatggtgtgaacccaggaggyggagcttgcagtgagccgagatcgctccactgcactccagcctgggtgacagaacaagactccgtctcaaaaaaaaaagaaagaaactagccaaagttca

SEQ ID NO: 309297 - DNA, 201 bp, Homo sapiens
caagagcgaaactgtgtctcaaaaacaaaaaagaaggaaccttctgggtagaggaaatcgcaggtaccaaggcactgtgctagtgctgttgggagcttagyaagctagagggtgacagaggcccattgtatagcctgttggagatctcgtcagggccttttggttcccaccagtaaggctaccttctacgttctctacacg

SEQ ID NO: 309298 - DNA, 201 bp, Homo sapiens
ggcgggcacctgtagtcccagctactcaggaggctgaggcagaagaatggtgtgaacccaggaggcggagcttgcagtgagccgagatcgctccactgcaytccagcctgggtgacagaacaagactccgtctcaaaaaaaaaagaaagaaactagccaaagttcacacagtaaacagtgggcatcttttgaatggggcat

SEQ ID NO: 309299 - DNA, 201 bp, Homo sapiens
agtgaaacaggataggagactggggattaagaaggacgctccagaaggctttactgagcaggtaacatttgagctgagatccaaatgacaagaaggagcaygctatgtgaagcctatagaaggaaccttctggaggccaggcgcggtggctcacgcttgtaatcccagcactttgggaggcagaggtgggtgcatcacttg

SEQ ID NO: 309300 - DNA, 201 bp, Homo sapiens; identical to SEQ ID NO: 64314

SEQ ID NO: 309301 - DNA, 201 bp, Homo sapiens
gagtcacatgtgccatgcgggaagtgaaacaggataggagactggggattaagaaggacgctccagaaggctttactgagcaggtaacatttgagctgagmtccaaatgacaagaaggagcacgctatgtgaagcctatagaaggaaccttctggaggccaggcgcggtggctcacgcttgtaatcccagcactttgggag

SEQ ID NO: 309302 - DNA, 201 bp, Homo sapiens
ccattaccaagattcgctttcgctctctgcctttccccttctgcccctactcgccgatgctgaccacttttcctgcagaggctgtgtatcaggtaactagrgggcaagactctctaccagacaaaagaaatgacagcgcatgtcctttgtggaagtacatttctccattatgtagcaatctgcaggaagcagctcagggct

SEQ ID NO: 309303 - DNA, 201 bp, Homo sapiens
atttaggggaacacaaacattccgaacatagagatgatgcagtaagaacgatcatcctttgctgggcgcggtgactcacgcctgtaatcccagcactttgkgaggcccaggcgggccgatcacgaggtcaggagatcaagaccatcctggctaacacggtgaaaccccgtctctactaaaaatacaaaaatttagccgggt

SEQ ID NO: 309304 - DNA, 201 bp, Homo sapiens
cccagttccctgagacagtagtggtccatactgagttgactttggaatgcagttgcctggaccatgtttgagcaggcagggtcagaactgacatcacagaycatctgcaccagaaagatgtccagccccagttcctcttcagtgtttccatgttggaatctccagtaataactgaagggaggctggacactgtggcttgta

SEQ ID NO: 309305 - DNA, 201 bp, Homo sapiens
agtttcttttttgttgtgcctgcaagcagaactgtttctttttagatccttttgtaatgtctcaaagctcttgattgtacttaactaatttttaaaaattytaaattcaaatacgaaatgtaatacttggccgggcatggtggctcacgcctataatcctgcctataatcccagcactttgggaggccaaggtgagtggat

SEQ ID NO: 309306 - DNA, 201 bp, Homo sapiens
atccctacagcagagggtataatgggctctggtacctaattctgtgtgaccatggctaaatcacctagcctctttgagcctctgttttctcttctctaaartgggattaataacagtactgatcttatatccttgttctatgaaagtatcttgtattaagtgttgcatgaaaatatcttgtatagccctggcacatacaaa

SEQ ID NO: 309307 - DNA, 201 bp, Homo sapiens
gaatgacagaagggaaactctccactgcgagaggggaccctgaaagtggtagccatctgtgaggctgagtctatcatttttatgggcttagaatgggggartgcctgccgattggtccatgagtggtcttggaaaaaggaccattcagttggttaaaacatcatccggaaggaaccaatcgagagagtgggtgagacaggg

SEQ ID NO: 309308 - DNA, 201 bp, Homo sapiens
tgaatgacagaagggaaactctccactgcgagaggggaccctgaaagtggtagccatctgtgaggctgagtctatcatttttatgggcttagaatgggggmgtgcctgccgattggtccatgagtggtcttggaaaaaggaccattcagttggttaaaacatcatccggaaggaaccaatcgagagagtgggtgagacagg

SEQ ID NO: 309309 - DNA, 201 bp, Homo sapiens
cttcactcctgtagcttggtgagtgggagcgtgttacagctctctttctcctgtagtctggtgagcgggagcgtgttacagctcttttattcccgtcaccygcagcttggcgagttttgggttcttgtcctgcaaccaagaggaatgaggtgtgcaggtaccatagagtgagtaaggcagagaagaattttattgaatgac

SEQ ID NO: 309310 - DNA, 201 bp, Homo sapiens
tgaggcaggagaatcagctgaactagggagatggaggttgcagtgagctgagattgtgccactgcactccagcctgggagacagaatgagaccctgtctcaaaaaaaaaaaaaaaaaaaaaaggaggggggccataactgttgagaatgtattacttggttttattttacattaggtggtaggtacaaagcaatccttctt

SEQ ID NO: 309311 - DNA, 201 bp, Homo sapiens
gcactgccttgtacaactacatctttgctaagaagtaccaggggagcttcatcctgaggctagaggacacagatcagactcgcgttgtgcctggggcagcrgagaatattgaggacatgctggagtgggcaggtaagcctggcagagaaaggatctttctgcagggaaggaacaggaagcaggaaaaggagcctgtgggtc

SEQ ID NO: 309312 - DNA, 201 bp, Homo sapiens
atatagcgctttaggcctatgcctgatcacgatgcctgctgaccgtatgggactgagctgctgctcacaagaagcagctcccagcactacggttcttaacttttttttttttttttgagacagaacttcttgtcccccattctggagtgcaatggcgcgatctcggctcaccgcaacctccgtctcctgggttcaagcgat

SEQ ID NO: 309313 - DNA, 201 bp, Homo sapiens
ttttttgctaagacaaggtctcaccatgttgcccaggcagatctcaaactcaggccaagcacaatggctcacgcttgtaatcccagcactttgggaagccraggcagatggatcacttgaggtcaggagttcgagatcagcctgaccaccatggcaaaatcctatctttactaaaaatacaaaaattggccaggtgtgatg

SEQ ID NO: 309314 - DNA, 201 bp, Homo sapiens
tagtcgcagcattttgggaggctgaggcaggtggatctcctgagtcaggagtcgagatcagcctggccaacatggtgaaaccacatttctactaaaaatasaaaaaaaaaaaaaaatcagcccgacgtggcgggcgcctgtagtctcagctactcaggaggctgagacaggagaatcacttaaacctgggaggtggaggtt

SEQ ID NO: 309315 - DNA, 201 bp, Homo sapiens
gagacaggagaatcacttaaacctgggaggtggaggttgcagtgagccgaaatcacaccattgcactccagcctgggcaacaagagtgaaactccatctcaaaaaaaaaaaatgcctctttctatatattttagtggctgggtctcgccctgtcacccaggctggagtgcagtggtgacatctcggttcactgcagcctca

SEQ ID NO: 309316 - DNA, 201 bp, Homo sapiens; identical to SEQ ID NO: 64316

SEQ ID NO: 309317 - DNA, 201 bp, Homo sapiens; identical to SEQ ID NO: 64318

SEQ ID NO: 309318 - DNA, 201 bp, Homo sapiens; identical to SEQ ID NO: 64319

SEQ ID NO: 309319 - DNA, 201 bp, Homo sapiens; identical to SEQ ID NO: 64320

SEQ ID NO: 309320 - DNA, 201 bp, Homo sapiens; identical to SEQ ID NO: 64321

SEQ ID NO: 309321 - DNA, 201 bp, Homo sapiens
tactggtgccgccatgcaagagacaagaaatgagtagcaaaaaggggagggggtggaaaaattaaattctgcgtcatcagcaaggtttcaaacaatcgctygccaactgaagtgggtgccacgtctataagtcattctgttttatagaccattaggatctccagagagaacctgcatggagaccactgctttttgttgaaa

SEQ ID NO: 309322 - DNA, 201 bp, Homo sapiens
ttgcacagttttcataaaggtctatttcattattggtgggtagcgcatttaacagttaaatacatttaaataatgtataggtgactgcaggactgcagcawtggtaactagataaccaactagaaaccagctaacaaagaactgtctaaatacttaaaatacagctcttgttgagatcatcctttgttttgatcatcttct

SEQ ID NO: 309323 - DNA, 201 bp, Homo sapiens
agtaagctgaagaatgaaaactaaattttttaatactatcaaaacaatcctactttatcaagaatacttaccaggcctcagagtctgagtatagcctactscaattaagctagagttgttgacttttgcctaaaataaaatacaaaaacaactgtaagaaaaatatttcaatagagacaaagcccctacatgtttccccat

SEQ ID NO: 309324 - DNA, 201 bp, Homo sapiens
ggaacataaaaacaaacatgcacacaattgcacagttttcataaaggtctatttcattattggtgggtagcgcatttaacagttaaatacatttaaataaygtataggtgactgcaggactgcagcattggtaactagataaccaactagaaaccagctaacaaagaactgtctaaatacttaaaatacagctcttgttga

SEQ ID NO: 309325 - DNA, 201 bp, Homo sapiens
ctgggaggcggaggttgcagtgagctgagatcgcgccactgggctccagcctggacgacagagcaagactccatctcaaaaaaaaaaaaaaaaaaaaaaaaggctcttacagcctccaccccaggggacatctgcagtgcagcaggaagataaccggctgcccttcggactttgactccttttaaaggtaacatgacagct

SEQ ID NO: 309326 - DNA, 201 bp, Homo sapiens
aggtcctgtggcgcgggaaggtgctgcaacctccgaaaggggacgtggcggccgagtgtgtgcgaaacctaaacgaacgcatccggcgggacgtcagggtytacatcagcctcctgcccctgggcgatggactcaccttggccttcaagatctagggctggcccctagtgagtgggctcgagggagggttgcctgggaacc

SEQ ID NO: 309327 - DNA, 201 bp, Homo sapiens
accctggagcagccgcagggggattctatgatgacctgcgagcaggcccagctcttggccaacctggcgcggctcatccaggccaagaaggcgctggaccygggtaggggcacgcggccgggatcccggagggccgaggtttccgggccgacccccactctgggctgagcccgtctgtgtcctggtcccaggcaccttcac

SEQ ID NO: 309328 - DNA, 201 bp, Homo sapiens
atgttttctaaaggaacataaaaacaaacatgcacacaattgcacagttttcataaaggtctatttcattattggtgggtagcgcatttaacagttaaatrcatttaaataatgtataggtgactgcaggactgcagcattggtaactagataaccaactagaaaccagctaacaaagaactgtctaaatacttaaaatac

SEQ ID NO: 309329 - DNA, 201 bp, Homo sapiens
cagaggtatcagagccagcgtaacaagaatggaatacattaatcttttcaaattagttttttaatctgacggggatagatggtgacatgcctcccctcccsacccgctccccctcaacctccaccgctccggcctaaagccaggctgtaggagggagtttcagtgtgagctgggggcctgctgcaacctggacccccgggc

SEQ ID NO: 309330 - DNA, 201 bp, Homo sapiens
aagaatggaatacattaatcttttcaaattagttttttaatctgacggggatagatggtgacatgcctcccctccccacccgctccccctcaacctccacygctccggcctaaagccaggctgtaggagggagtttcagtgtgagctgggggcctgctgcaacctggacccccgggctgaagggagagagcggtcagcggc

SEQ ID NO: 309331 - DNA, 201 bp, Homo sapiens
atacttgttttattcataatttgtcatgttctgggataccaaaagtaataatggctgaacttaacaaaatttgtaacctcatcttaatatccactgatccwtctcattcaatggtaacagtcaatgttttctaaaggaacataaaaacaaacatgcacacaattgcacagttttcataaaggtctatttcattattggtgg

SEQ ID NO: 309332 - DNA, 201 bp, Homo sapiens
tataattctggaatcttctctaggggagaggctggtctaatttctctctattgacccagggcaggcaggaaacaaggcacactgtggaaagaatgtttgartgttcaggcttctaagtgacagaaaagcagcttgtctgaaaaatgatttttttctggcttctaaccagtgttaattcacttggaaaccaaggcagttttc

SEQ ID NO: 309333 - DNA, 201 bp, Homo sapiens
cttgtatgatacactgtaccccagtagaaccataccagagtcattctgaatttattatactctgcccttgtacttcaggggaaagagtttattgctttccrttatcttgaaagacttcactgggctgttgtcaattaccaagttcaataggttctgtttaggactctcataaaataagacttagcaattttgtaataaaaa

SEQ ID NO: 309334 - DNA, 201 bp, Homo sapiens
taaaaagaaatgacaatttatatttcatcattcagtggtgtttactcaactcaaaaaactgtgccatgtttcatttctgagacatttattatttattatcatttttttgagatggagtctcactctgttgcccaggctggagtgcagtggcgtgatcttggctcactgcaacctccgcctcccaggttcaagagattctcc

SEQ ID NO: 309335 - DNA, 201 bp, Homo sapiens
aatagcatcacttatcctatatataaatattttctttacatctctaattattatctatgtatgagtttcctattgctgttgtaacaaacataaacttagtrgcttaaagcaacacaggtttattatcttataattctggaggtcagaagtcttaaaatcaagttatcaacagggctgcattccttctggaggttctagggg

SEQ ID NO: 309336 - DNA, 201 bp, Homo sapiens
gtgtgtgaatgtgaaatggtgcagctgctttgaaaaacagtctaatggttcctcaaacattaaacatagagttagtgtgtgacccagcagtttcacccctrtgtatatatccaagagaattgaaaatacgtatctatacaaaaacatacatgaatgttcataacagcattattctcaacagccaaaaaagtagatacaatc

SEQ ID NO: 309337 - DNA, 201 bp, Homo sapiens; identical to SEQ ID NO: 64359

SEQ ID NO: 309338 - DNA, 201 bp, Homo sapiens
ccaacagtgctgggttctggaagccagaagtgctgtcgcagttttcccttgagaggtggatgcctcttaccacctcccttgccagaaagatgggtttcctygtttgtttaagttcttccattgctacctctgaattgaagtctctcctcacactgctaactctaaactgaggtcttatcatgtggatgcaggtggttggta

SEQ ID NO: 309339 - DNA, 201 bp, Homo sapiens
ggtatttattaccctgcttcatatttttagtatgtcttcaggatccaaaactaattctaagagatgaccaaatcaattaatgtaaacaaaatgagtcatarttggaaaatgatttcgaagaggtgggtagtcattgtaggaggggtcagagcctgacaatcctcagtggcaggcaagaaagaggaatgacggcatcacctt

SEQ ID NO: 309340 - DNA, 201 bp, Homo sapiens
aatgagtcatagttggaaaatgatttcgaagaggtgggtagtcattgtaggaggggtcagagcctgacaatcctcagtggcaggcaagaaagaggaatgayggcatcaccttcacagaggaccctggccatggtgttctgtctgtgaaatcagaccttcaccatgggcactgccctatgtctggaaagatgagaaaatacc

SEQ ID NO: 309341 - DNA, 201 bp, Homo sapiens
ctgtatttttctcattttaaaatgtagtatcaggagaagagtaaagtgtggtttaaggtggtgaataaaggaaagctctagctggatgactgttttctatwtagtcaaatattggagtcagccttaaaagcaaaaaggcctgtctgccaaatagcttctaaagctcttccaaggagttggctttgagttttaccccataat

SEQ ID NO: 309342 - DNA, 201 bp, Homo sapiens
aagctcttccaaggagttggctttgagttttaccccataatacttcattgtgtttagtaagaattactcagccttaatattttcttttaaaatgctaagcmtctcatttgtcacgtattaattattcattttctgaatctcttttgtctttgttcctcaacgacttacatgccaacttgggagtctactagaccagcttgt

SEQ ID NO: 309343 - DNA, 201 bp, Homo sapiens
aatcaggcaactacattacgatgaagtgtatttgtatgtagatatgaatgtcacctaaggatatttttatagcatcagttgttaggggctggcctatgaaycgcttaatttttttttcagttatacatacctgtctttgggattataaaattttccttttcatgcctctttccttctagttactcttatatagcaagtcat

SEQ ID NO: 309344 - DNA, 201 bp, Homo sapiens
tgctattgtgactagtgctgtgatgaacatgcaagtatatgtgtctttttggtagaatgattttgctttcttttgcatgtatactcagtaatgagcttgcsaggttgaatggtagttttgttttaagttctttgagaaatttccaagctgctttccaccatggctgaatttatttacattcccatcaacagtgcataaggg

SEQ ID NO: 309345 - DNA, 201 bp, Homo sapiens
gctccttagtgcgtgtttccggaaatgtctgatgggcaacaaaagggcagtgatggagctgagggagatgctggggttgtgaaagaaaagatgcgccaggrctatacatattagccaactatgttcataatttggacgaactttgaaataagcttctctgtaatatttctattaggcaggtattgtcattcttactatctc

SEQ ID NO: 309346 - DNA, 201 bp, Homo sapiens
cctgcgggtgctggagctatacagcggcgtgggcggcatgcaccacgcgctgagaggtgagagtccatctagcacccctctctctattcgctcacgggggytggttggagcacccgcgccgggaaggggcggagcggcgagacgcaaggggcggacactgtggggcggacactgtggggcggccctcggttgtcctggaaa

SEQ ID NO: 309347 - DNA, 201 bp, Homo sapiens
gttttggaacacaaccattttgtacatagggaacaaactgccaatataatttgactactctcttggtaattgattctctgagtgtagtcgcagcaaccagktttattttgtactccctgcctctttcttggtgatctcatttttgtcccaaatatcctggggagtgttgtttaagaaaaacacaaactttccttgtagttt

SEQ ID NO: 309348 - DNA, 201 bp, Homo sapiens
tcagtacatgataggtaatctcacagatatttacttactgcctgacaatagcactattgggactatatttaagacatttgtaacataaatagaattttgtwggtttcctgggaacttcattgtaggtgtttccaaggtaaaaaatttgacctaaatgtcaaacaattacttaaaaatgagcattgagatagataatcatat

SEQ ID NO: 309349 - DNA, 201 bp, Homo sapiens
tttctctctttcattctagggtttgatagcaaggtcaggaaagcttttcccatcaatgctagtctcttgggattaaattttagcccgtttctgtttttcctttttttttttttttttattagtagagattggaatcagctagtttttgtcatttgtgaagatctcttcttacattacttgaaactctttcaaaaatatttc

SEQ ID NO: 309350 - DNA, 201 bp, Homo sapiens
acatcttagacttggtatatcttatagtaggaactgttgtgaaataaaaatcttaaaaaccagtgcatacattctgacattttatatattaaatgtcttamtcatcagtattgattttactaataatgtattagtaagtattacaataagtattaccaagttttgttcaactgattctcttctattttgatattttctaat

SEQ ID NO: 309351 - DNA, 201 bp, Homo sapiens
ccccaataacaggtggctttgttcttctagttgcccacacctgagccttggagtcatcttgtttcttctttttcacccacatcagccagttctacaggctytaccttcagactatatttataactctatcatttctctccattttcacctttaccacctgatctataatctctctcctgtcttgtcagacttaatttttgc

SEQ ID NO: 309352 - DNA, 201 bp, Homo sapiens
acaggtggctttgttcttctagttgcccacacctgagccttggagtcatcttgtttcttctttttcacccacatcagccagttctacaggctttaccttcmgactatatttataactctatcatttctctccattttcacctttaccacctgatctataatctctctcctgtcttgtcagacttaatttttgcgctgcccg

SEQ ID NO: 309353 - DNA, 201 bp, Homo sapiens
ttaccttcagactatatttataactctatcatttctctccattttcacctttaccacctgatctataatctctctcctgtcttgtcagacttaatttttgygctgcccggatttgcttggccccacctgcctcctggcctggggctgctggttcagtgtcacaccctgactaatgccaccttgcctcatctgacactgtca

SEQ ID NO: 309354 - DNA, 201 bp, Homo sapiens
cacaccctgactaatgccaccttgcctcatctgacactgtcagggggtgatggccgagcttgaccctcagaatgattgtcgacccctgtacctggactcargtgaagtgtcaggctgtgggcatgcactctgtctgctcagtagctgtcttgaggagtcagatcacaaaacctgacttgtgtgtgtaggtagcagggaggt

SEQ ID NO: 309355 - DNA, 201 bp, Homo sapiens
gttggctgggtttctgggaagcattgaccgacgtgctaatgcactccctccttctctgcctcactgccctaactcttgccgcttcggagttttccttccarataaagcatctgcagctaagcttggcctgagctacttttctgggaccctggacaaagcattattgcagtagcctctttactgatcttgcttctgctctgg

SEQ ID NO: 309356 - DNA, 201 bp, Homo sapiens
tgataaataaggtcaaggttacatgtacagtttggtgtctggaacctttttagaatctctgttgccttttgctttcccatggaacattatcagaaatattrgtgaaaagtgctacccaggaatagtgccaaccagctctcctcttgtctaaaagcgtaaaattatatctcatttttagcgactaggtaaagtgtatgttgg

SEQ ID NO: 309357 - DNA, 201 bp, Homo sapiens
actgtaaattcaaaacgcttgtgatcccagtattttaactaagaacaaaaacaaaatacaaatatatatacatacactcttatagacatgtttggcataarttcttctatatgagatattcattttacctgaaaaattatacttcagaaagagagtatggccttataatttagtcttctgaaaggaaatctcttcatatta

SEQ ID NO: 309358 - DNA, 201 bp, Homo sapiens
atattactcaattactaaacttttcaaaaatagcaaatcaataaagtactgcttggataaactacattagcctgaagaaacttaatatcatttctagatgyttattgaggtcactcaatggaattggccagaaaccatagaaatgaatttaaagatctagaagtaatttttaggaggatgacctcacaattacaagtgttg

SEQ ID NO: 309359 - DNA, 201 bp, Homo sapiens
taatttttaggaggatgacctcacaattacaagtgttggatgttattgtaaacaagccttttgaaaattactttataaagcaatacagtaggtgattactwcgcggaaatcacaaatagctactgggtatttgtggtgggcataaaatttccagtgacatcattatacacgaactcaaaaagggctagttctcaagtaact

SEQ ID NO: 309360 - DNA, 201 bp, Homo sapiens
gacacaacaaacatcctctgtattatcagcacgcacacagggctttctctgctgcgagtggacttgtgtccttacttataattctggaatcttctctaggrgagaggctggtctaatttctctctattgacccagggcaggcaggaaacaaggcacactgtggaaagaatgtttgaatgttcaggcttctaagtgacagaa

SEQ ID NO: 309361 - DNA, 201 bp, Homo sapiens
tttttaatgtattttttattttattcttggaaataatttatcagcaatttttaaaatgcaagaactttttttttttttttttttccgagacagagtctcaytctgtcatctaggctggagtgcaatggtgcaatctcagctcactgtacccgctgcctccagggttgaagcgattctcctgcttcagcctcctgagtagct

SEQ ID NO: 309362 - DNA, 201 bp, Homo sapiens
taaaatgcaagaactttttttttttttttttttccgagacagagtctcactctgtcatctaggctggagtgcaatggtgcaatctcagctcactgtacccsctgcctccagggttgaagcgattctcctgcttcagcctcctgagtagctgggattacaggcgtgtgccaccatgcctggctaatttttgtatttttagta

SEQ ID NO: 309363 - DNA, 201 bp, Homo sapiens
tctcagctcactgtacccgctgcctccagggttgaagcgattctcctgcttcagcctcctgagtagctgggattacaggcgtgtgccaccatgcctggctwatttttgtatttttagtagagatgaggtttcactattttggccaggctggtctcaaactccgaacctcaaatggtgtgccctccttggcttcccaaagtg

SEQ ID NO: 309364 - DNA, 201 bp, Homo sapiens
aattcataacagatcctaaagattacctcagatggcttcttcaagcacatatttattgaatacaagctagccagacctgttaaatgggataaatacccttytcccttcccatgttaacacctaagagctgtaattcttcatgccagttaaaaaaaagttcaaaaaacagagtttgttttactaatgtaaaacattagtaaa

SEQ ID NO: 309365 - DNA, 201 bp, Homo sapiens
ttttccagagattttgctctactgggcaataccaatgctacacaaatagagaagaaaatttaaaaaactcaccaatgatgctaatgcataaacactgacayaacactggtgaagacataaacactggtgaaggcttagattaaaatctttattctaatgtgaccatgaacattaaaataaattatagctttctttctttac

SEQ ID NO: 309366 - DNA, 201 bp, Homo sapiens
ataattgtttactggtgtgtatgtgcctgtgacaggtcacagcacaattggcatgccttgagaaaagagccaaacctttcttgtctgaccttgttactttycttttgttgtttctcagggtcaaaaccaagagcagcattgaattctttcgttccaaaataagagtcatttttttgtttgctttttgccaattataaaaat

SEQ ID NO: 309367 - DNA, 201 bp, Homo sapiens
ttacaggacttttgcattcatattgctctgtttgccagtttggaatttgaaatgcttctcctcataggaacaaatggcatattagtttgtgttcacctgawtgccacttagaagtgttatttgcaagtgacagaaacttagctcagactggtttcctaaaagttgtaaatctggactcatttaattgaccaggtccaaatg

SEQ ID NO: 309368 - DNA, 201 bp, Homo sapiens
tggggcggccctcggttgtcctggaaacagctcctgcgcgccgccctgtccacccctccagacgctgactcccttctcctggcgccgagtctggctcgagrggccgcacatggcgcctcaaagggcccagttgggagtcgggattcgcaaggcagtaaatcaacctcaaagggtatcaaaggggcgagaccctcgcctggt

SEQ ID NO: 309369 - DNA, 201 bp, Homo sapiens
cagagtgaactggagtgtgatgagagtgcacggatcagccttcatggtccgtcacagcaaacggagctcaagtcattacatctgctttccaaacctccagyggaaaggccagagagcatagggaactaccactctcttcctttatagaacactctctgagagtgtgatgcacttattctgtctcattagtctgactttagt

SEQ ID NO: 309370 - DNA, 201 bp, Homo sapiens
tattttatctatttaatctataatattccagataaatgccaggcagtgaatatgaattttaataattattgagcatttactgtatcctaggcgttcgttayctatattctttttagagaccagtttatgcccttggaaattgaggtccctgcatcctcaggactaagggtaatgctgggctatgtggcctttctgtagccc

SEQ ID NO: 309371 - DNA, 201 bp, Homo sapiens
aatgaggttgttttcgtaatgttgactggacattgttaatttctcttatttttaatgcaacttttgacaatttgtgtatttttatgtaatgccaggtactkatggagttccccaaaattgaatctgtacatccacaaaaatatgcaatggatgtagaaaataaaattcaagaaaagaacgttgaaccaaatattagctttg

SEQ ID NO: 309372 - DNA, 201 bp, Homo sapiens
agtttctgatatatttaattatagttagtattttccctcttccccattctatccatgtttttatgttcttttttccccctaaatgttcattcctcagggcrttacactcgaagagtttgacagattatcttttgatatgattttaatgagccctccctgccagccattcacaaggtatgtgtcataaatatttcagtgttg

SEQ ID NO: 309373 - DNA, 201 bp, Homo sapiens
ttccctcttccccattctatccatgtttttatgttcttttttccccctaaatgttcattcctcagggcattacactcgaagagtttgacagattatctttygatatgattttaatgagccctccctgccagccattcacaaggtatgtgtcataaatatttcagtgttgtattggtccattttcatgctgctgataaagac

SEQ ID NO: 309374 - DNA, 201 bp, Homo sapiens
caggcagatcacttgaggttaggagtttgagaccagcctggccaatatggtgaaaccctgtccctactaaaaatatagaaattagctgggtgtggtggcamgtgtctgtagtttctgttactctggagactgaggcaggagaatcaaattgcttgaacctgagaggtggaggttgcagtgagccgagatcatgccactgaa

SEQ ID NO: 309375 - DNA, 201 bp, Homo sapiens
tatacatgctcccttgagatattgggcctgtcatttatcttctcctaccatgactaatagagtaactgcaaatgtttcacaattccatgcttgccaccacrgtgagtgacagggaatcacagcctactagctagattctgctgcctctgctcatagtgttgatgcagatggtgctaatgttagtgaatgctgttacccatg

SEQ ID NO: 309376 - DNA, 201 bp, Homo sapiens
ctcacccagcaaaatacaagaacttttaaaaagaaccaaacaatatactttactaatagtgataaaacatttggcagcaattttaagttcagatccttatrggtctgtacgttctttagtacttttattcctaactaagccagcactttgaatgaaaggacattggatgtattcaactgatctttcatcttacaactagat

SEQ ID NO: 309377 - DNA, 201 bp, Homo sapiens
aaatgtctgtgtgtgtgtgtgtgtgtgtgtgtgtgtgtgtgtgtttcttgtctatttttgtaagaagcatattgaaagcaagaattatgtatgtatcctcrgtgacatttctaacatcttacctagaagtctctcttgaaataactaaatctaccttttaaatttagtcctcatataaatggaagcgtgatgtccttatgt

SEQ ID NO: 309378 - DNA, 201 bp, Homo sapiens
tacctgctgagtgtcttgagcctagcagccatttagtatcaatccttggagacatttgtgcctttcttttcttcctggcctcatctcttctaggcctcagyggaaggttatgattgttttctgagcgtgtgtgagcctttctccttgccctgtctcctgtggtctgcttttatttccgggtgcctgctgcatgagtcctag

SEQ ID NO: 309379 - DNA, 201 bp, Homo sapiens
cttaggaaaactttctatttgacttataagtgtgtctcttaatgagggaggaaagcaaatataagaggtaagcactaaaatatttaaatcttctctttagyattggaatgctgtttagagagatgaaccagaagtccatgttcaaatatttcacttcatgcctggcttcccctggcctgaccttccactgacagtctgaga

SEQ ID NO: 309380 - DNA, 201 bp, Homo sapiens
acaaaagtgctcataaaagacaatgtcatttgtttggtgaccttcataggagcttaaatacccgtagtggagacatggtttctgtagactattacttgctrattctttagcacttctgtggcacatcatacctcaagtgttcactcttatgatcaatgtataataagaaattaaattttaaactaaagatgtaatattgag

SEQ ID NO: 309381 - DNA, 201 bp, Homo sapiens
ttcaaacattttacggagtttggcttttttcgtcaacatgagcctctaacagttggttactggatcatcctgaggaatcaaggccatagcacttaaagacmcataaataatcctacatgatattcactgtgtattctatgtaggtgtaatttccaagctaaaacataattaaccccactaatagacacaacaaacatcctc

SEQ ID NO: 309382 - DNA, 201 bp, Homo sapiens
ttttccgcagcagcggcacaattttccattgcatgagcactccgtttcctctacctccatattctccacttgttattccattttttaaaaatagtagccaytctgatggatatgaaatcatatcctattgtggttttgatttgcattttcttaataactaaagatgttgagcatcttttctttttctttcttttttttttt

SEQ ID NO: 309383 - DNA, 201 bp, Homo sapiens
cactaaaatatttaaatcttctctttagcattggaatgctgtttagagagatgaaccagaagtccatgttcaaatatttcacttcatgcctggcttccccyggcctgaccttccactgacagtctgagatgaggctaataaatgaagaaataaggaaatggattactaaattctgctattttgatttctttctataatgaa

SEQ ID NO: 309384 - DNA, 201 bp, Homo sapiens
atagtagccattctgatggatatgaaatcatatcctattgtggttttgatttgcattttcttaataactaaagatgttgagcatcttttctttttctttctttttttttttgagatggagtttcgctcttcttgcccaggctggagtgcagtggcgcgatctcagttcactgcaacctccgtctcccgggttcaagcgatc

SEQ ID NO: 309385 - DNA, 201 bp, Homo sapiens
tttctttttttttttgagatggagtttcgctcttcttgcccaggctggagtgcagtggcgcgatctcagttcactgcaacctccgtctcccgggttcaagygatcttcctgcctcagcctcccgagcagctgggattacaagtccctgccaccatgcctggctaattttttgtatttttagtagagatggggtttcaccat

SEQ ID NO: 309386 - DNA, 201 bp, Homo sapiens
tttatcatgaaaaattttacaaacaaatttctcatgaaatttctcataatttacatgcaataaatatgtagtttattgtacgtaattttaagtgggcagtytgagtttcgactcaatcatcaactgtgtaactactaccaccacaatcaagacttagaacacttccatcatgctaaattgttcttagtgccacatttctgt

SEQ ID NO: 309387 - DNA, 201 bp, Homo sapiens
tccaccatggctgaatttatttacattcccatcaacagtgcataagggttcccttttctccgcagccttgccagcatctgcgtttttttttttttttgacttttttttttttttgagtcggattcttgctttgttgcacaggctggagtgcagtggtgcaatcttggctcactgcaacctctgcctcccgggttcaagcta

SEQ ID NO: 309388 - DNA, 201 bp, Homo sapiens
ttctgctttcattcctcttaatatattgtgtctttctttgtctacatttaagattttatctttatcacgtgttttgaaaagttttattttgatgtgctctktatgtttttctttatttgtagtgcttggaccttgtggtgcttttcttatttataattttcatcaaatttggggggtttgaccattattgcttcaaaaata

SEQ ID NO: 309389 - DNA, 201 bp, Homo sapiens
tatcaaatgatgaaggtttatttagcccagattctttttttgtattatatgtagttcttagttgcaacccacagaatccactctagctaacataatcaggaaaaaaaaaattaaaaacatttggaaactcacagaatctccaggacacccaacaaacaggttaggtgaacaggagcactgcccacactatagtgtgggtat

SEQ ID NO: 309390 - DNA, 201 bp, Homo sapiens
catgttgaccaggctggtctggaactcctgatcccaagcaatccacctgcctcgttctcccaaagtgctgggattacaggcatgagccatcacgcctagcyttttattgactttttaatcgtagccattgtgactggtgtgagatgctgtcctattgtggttttgatttgcatttcttgaagattagtgatgatgactatt

SEQ ID NO: 309391 - DNA, 201 bp, Homo sapiens
aaaatagataaaaatttttctagaatgaaatttacaatataacatccatgagcccttctggaacagatgactgcatcacttaatctagctgagcaagagakgaatcaaagtagaaaacccaggaatgaagctgccgtgttaggaggaaaactatggttagaaaatagctgaaaatgttgtaaagctttgcagtgtagaaat

SEQ ID NO: 309392 - DNA, 201 bp, Homo sapiens
gtggagtgcagtggcttaatcttggctcactgcaacctctgcctcctgggttccagcgattctcctgcctcagcctcctgggtagctgggactacaggcaygcgccaccatgcctggctaattttgtatttttagtagagacggggtttcaccatgttggccaggctggtctcgaactcctgacctcaggtgatcagccca

SEQ ID NO: 309393 - DNA, 201 bp, Homo sapiens
gctgccgtgttaggaggaaaactatggttagaaaatagctgaaaatgttgtaaagctttgcagtgtagaaataataatgtaatcggagtgggaagaggcaktgagacacaaaaaatatgtctttgcagataaatgaaactatcaattttttaggacattattcagtgttgttgtcagggtctcagcagagctgggaaagag

SEQ ID NO: 309394 - DNA, 201 bp, Homo sapiens
tgttcccaccctgtgtccaagtgttctcattgttcaattcccacctatgagtgagaatgtgtggtgtttggttttctgtccttgcaatagtttgctgagawtgatggtttccagcttcatccatgtccctacaaaggacatgaactcatcctttttatggctgcatagtattccgtggtgtatatgtgccacattttctta

SEQ ID NO: 309395 - DNA, 201 bp, Homo sapiens
tttatattggtgcttatttctgtggaagtagaaatgttttcagtaagaattggtcctgttgacaagtattttctgccctacagttggatgcaggaagaatycctgtgtcggggttctttcagatggtggctcagctggagagaaagcatccacccgagtccttgagtcagctgctgtctgtaacagtgctcccatctgact

SEQ ID NO: 309396 - DNA, 201 bp, Homo sapiens
taaacagtttgtaatcagcctgtgtggggaaggggtttgaggctccttcctctcaggaggttggtatttttcattaactctgccatgtgtctgtactgtcyctcccctacaggtaaggtcttttgtcacatttattttgatttatagcacgaatgctgaaaattccagatttgtttaatatattggtttttggctatatat

SEQ ID NO: 309397 - DNA, 201 bp, Homo sapiens
tgctagcggtctatcaattttgttgatcttttcaaaaaaccagctcctggattcattgattttttgaagggttttttgtgtctctatttccttcagttctrctctgatcttagttatttcttgccttctcctagcttttgaatgtgtttgctcttgcttctctagttcttttaattgtgatgttagggtgtaaattttaga

SEQ ID NO: 309398 - DNA, 201 bp, Homo sapiens
gtgtttggttttctgtccttgcaatagtttgctgagaatgatggtttccagcttcatccatgtccctacaaaggacatgaactcatcctttttatggctgyatagtattccgtggtgtatatgtgccacattttcttaatccagtctatcattgatggacatttgggttggttccaagtctttgctattgtgaatagtgcc

SEQ ID NO: 309399 - DNA, 201 bp, Homo sapiens
ccctctcactgttgagggaatccttggccttaagggaagggaaagcagggagggctagcagtggaaaagtgctggggactgagtcagaatggcacactctwcaggtgtcatcagtgtcttcagggtttcccacacctccccacacaaggaggccttggcagagaagttctgctcaaggcctcagataaggacacctcggaa

SEQ ID NO: 309400 - DNA, 201 bp, Homo sapiens
atgcatcttgtcaacagtcatttgaagttcattgcacacaactgcaaaacaaaataattgtggatatctgagaatgaggcccttttccatttgataatatrttaacagatgtatatgaaagggatggtgactggtctgcatatcacatttgctaaataaagaacattattgacaggtaggtatttaaaaatttcctagacc

SEQ ID NO: 309401 - DNA, 201 bp, Homo sapiens
ggcttgctgcataccaagagaagggaattctttcagaggtgatgtctgaactgtgtctggaggtagattaggagtatatcagagcaggcagaggccattcyatctcagggtggctctaggcacgtgcaagagtgtggcctgtggagtacagtgagcaggatatacacagcggaatgcagctccagctctgtgaagcctcag

SEQ ID NO: 309402 - DNA, 201 bp, Homo sapiens
ctggaactcccgggctcaagtgttctgcccacctcagccttccgaagtgctgggattatagatgtgagccaccacgctcggcctaatttttgtatttttartagagacagggtttcgccatgtcggccaggctggtcccgaactcctggcctcacgtgatccacctgcctcacctcccaaagtgctggaattacaagcgtg

SEQ ID NO: 309403 - DNA, 201 bp, Homo sapiens
caagtgttctgcccacctcagccttccgaagtgctgggattatagatgtgagccaccacgctcggcctaatttttgtatttttagtagagacagggtttcrccatgtcggccaggctggtcccgaactcctggcctcacgtgatccacctgcctcacctcccaaagtgctggaattacaagcgtgagcctctgcgcctgga

SEQ ID NO: 309404 - DNA, 201 bp, Homo sapiens
gtactaccattttaacaacattgattttttgaatccataagcatgggatgtttttccatttgtttgtcacctgtatgatgtctcttagcagtattttgtcrttctccttgcagagatctttcacctccttggttagatgtattcctaggtatttttatatgttttttgtggctgttataaagaagatcacattcttgattt

SEQ ID NO: 309405 - DNA, 201 bp, Homo sapiens
gctgtatacctgcacaagtggtggctgccattgatgtcaacactgtcgctaatgaagtatacaagtataattttcctcacacacagttacttgccaagacrattgaagtgagtaattgtcattgttttaataagtatgtagcaagggaaatgtgattgaaaaacactgcctaatactggtttccgttgtcttaattggaag

SEQ ID NO: 309406 - DNA, 201 bp, Homo sapiens
ccattttaacaacattgattttttgaatccataagcatgggatgtttttccatttgtttgtcacctgtatgatgtctcttagcagtattttgtcattctcyttgcagagatctttcacctccttggttagatgtattcctaggtatttttatatgttttttgtggctgttataaagaagatcacattcttgatttgactct

SEQ ID NO: 309407 - DNA, 201 bp, Homo sapiens
taataaactttctgtgtttttttttgtttttttttttttttacccctttaggattggccggcagggtgatatgactgattcaaggacgaatagcttcttayatattctagatattctcccaaggtaaaaacttaggttcctgtacaagcttacctttcatttgaaactccaggtctggaagaatgtgacgtttgtcatttt

SEQ ID NO: 309408 - DNA, 201 bp, Homo sapiens
gtagcaagggaaatgtgattgaaaaacactgcctaatactggtttccgttgtcttaattggaagataaagcatatataaatttaagagttcaggagaaggrgattaacattttatatcctatcagaagatagcatgcttttaaaaaaaagtccagctatagacagggagatcaatattttggtctttcagagaaataattg

SEQ ID NO: 309409 - DNA, 201 bp, Homo sapiens
gagtaactgattctgtagtcctcatgtgaaagtctgacaggaaaggacaaataagaactgaagatttctgagaagtctgttcacatccagtctaatcccayagctgaacctcagatccactgatggttttggtcctgccatcaggtatgaggaaactgaccaatgatgccagctaacttatttaagactctgaagataaat

SEQ ID NO: 309410 - DNA, 201 bp, Homo sapiens
tttcaagtcaggtagcgtgatgcctccagcttcgttcttttggcttaggattgacttggcaatgtgggctcttttttggttccatatgaactttaaattgkttttttccaattctgtgaagaaaatcattggtagcttgatggggatggcattgaatctataaattaccttgggcaatgtggccattttcacaatattgat

SEQ ID NO: 309411 - DNA, 201 bp, Homo sapiens
taggattggccggcagggtgatatgactgattcaaggacgaatagcttcttacatattctagatattctcccaaggtaaaaacttaggttcctgtacaagyttacctttcatttgaaactccaggtctggaagaatgtgacgtttgtcattttgtagaggatagccatttatacatgctcccttgagatattgggcctgtc

SEQ ID NO: 309412 - DNA, 201 bp, Homo sapiens
tggataagctttttgatgtgctgctggattcggtttgccagtattttattgtggatttttgcatcgatgttcatcagggatattggtctaaaattctcttkttttgttgtgtctctgccaggctttggtatcaggatgatgctggccttataaaatgagttagggaggattccctctttttctattgattggaatagtttc

SEQ ID NO: 309413 - DNA, 201 bp, Homo sapiens
atcttctcctaccatgactaatagagtaactgcaaatgtttcacaattccatgcttgccaccacagtgagtgacagggaatcacagcctactagctagatwctgctgcctctgctcatagtgttgatgcagatggtgctaatgttagtgaatgctgttacccatggcctggaaatatgtgcaaacccttaaagccaccctt

SEQ ID NO: 309414 - DNA, 201 bp, Homo sapiens
aacttatttttattctccttttgacttaaaaagtgatttgacatctttttatcagattcttaataaactttctgtgtttttttttgttttttttttttttwacccctttaggattggccggcagggtgatatgactgattcaaggacgaatagcttcttacatattctagatattctcccaaggtaaaaacttaggttcct

SEQ ID NO: 309415 - DNA, 201 bp, Homo sapiens
ctaatttctctctattgacccagggcaggcaggaaacaaggcacactgtggaaagaatgtttgaatgttcaggcttctaagtgacagaaaagcagcttgtytgaaaaatgatttttttctggcttctaaccagtgttaattcacttggaaaccaaggcagttttctcccctttactgaactctggatttcttttccaatca

SEQ ID NO: 309416 - DNA, 201 bp, Homo sapiens
taggtttcctgggaacttcattgtaggtgtttccaaggtaaaaaatttgacctaaatgtcaaacaattacttaaaaatgagcattgagatagataatcatrtaagttcagacatattaaatactttttaagctagcagtgttctcagaaacaggagaacaaggagggtaatcagtaataatctggagttgattttaggaag

SEQ ID NO: 309417 - DNA, 201 bp, Homo sapiens
gtgagagtccatctagcacccctctctctattcgctcacgggggctggttggagcacccgcgccgggaaggggcggagcggcgagacgcaaggggcggacrctgtggggcggacactgtggggcggccctcggttgtcctggaaacagctcctgcgcgccgccctgtccacccctccagacgctgactcccttctcctggc

SEQ ID NO: 309418 - DNA, 201 bp, Homo sapiens; identical to SEQ ID NO: 64357

SEQ ID NO: 309419 - DNA, 201 bp, Homo sapiens
ccaaagtcattgctgcgatatgctcttctgttagacattgttcagcccacttgtagaaggtccgtgtgctttaccaaagggtaggttttaaagatctattsatcctgtatccaaaataaccaggttttttaaagctattgtttctttaagttcttctaaaaacaaggagcattttataaaatgtttttgctagaatgaggt

SEQ ID NO: 309420 - DNA, 201 bp, Homo sapiens
ccttggatttcctccagagttcggtatgtgggatacgtgcagaattcagctttcatgtattaaaactctcaaaaatctttagggacttgtgtgtctaggasttgcctaaacaaatgggctcaagaaacctctttcctttcctgatcatgccatttatggcatctttctgccctctttcccctcataactgcctcattcggt

SEQ ID NO: 309421 - DNA, 201 bp, Homo sapiens
aaaatgaataaaatatatgttgtctccagccttataaaattccattttaaaaagagttcagaaaattacttacctcgtatttcccacaagtaatgatttthtttttcttcttagtaatgagatatttagaattccatttgtttatttttttatagattacaaaaattaccaaagtatattcttttggaaaatgttaaaggt

SEQ ID NO: 309422 - DNA, 201 bp, Homo sapiens
attgatcatcactagattagcaattctgactttcatcagtttggataatttatctggcagctttatttatttgtagtaatgaattatgtatatcttttgaktcaatattatttctgaggtgctgaacttagtaaaaacgtagggtcattatctttctaaacaagtgaagttacagttttcacttaaaatgaggttttgtgg

SEQ ID NO: 309423 - DNA, 201 bp, Homo sapiens
atcatcactagattagcaattctgactttcatcagtttggataatttatctggcagctttatttatttgtagtaatgaattatgtatatcttttgattcartattatttctgaggtgctgaacttagtaaaaacgtagggtcattatctttctaaacaagtgaagttacagttttcacttaaaatgaggttttgtgggccg

SEQ ID NO: 309424 - DNA, 201 bp, Homo sapiens
ctttcatcagtttggataatttatctggcagctttatttatttgtagtaatgaattatgtatatcttttgattcaatattatttctgaggtgctgaacttwgtaaaaacgtagggtcattatctttctaaacaagtgaagttacagttttcacttaaaatgaggttttgtgggccgggcgcggtggctcacgcctgtaatc

SEQ ID NO: 309425 - DNA, 201 bp, Homo sapiens
gctgtcagctttttgttattgttcttgttagtttcttgtcatctttagccatattatattgttctttgcccagaaattaatagaaaacccatttcaaaaaytcaagatacaagctgtggaaattggcaacatatttgatctcttaaaatttatttcatatttattgccttttagcttgtaaaacatagtgtatcatccttt

SEQ ID NO: 309426 - DNA, 201 bp, Homo sapiens
tattgttctttgcccagaaattaatagaaaacccatttcaaaaattcaagatacaagctgtggaaattggcaacatatttgatctcttaaaatttatttcrtatttattgccttttagcttgtaaaacatagtgtatcatccttttttaacaaaatgaggtaataaatagccaagaatagctatatttgaatttttaaatt

SEQ ID NO: 309427 - DNA, 201 bp, Homo sapiens
catatttattgccttttagcttgtaaaacatagtgtatcatccttttttaacaaaatgaggtaataaatagccaagaatagctatatttgaatttttaaaktattaatatattatcaataatgaatgtaaaaatatctatactacgtcttagctgggaaatataaaatggaagtgacttgtagatatatttgtcagtttca

SEQ ID NO: 309428 - DNA, 201 bp, Homo sapiens
atattgctccctttccatagtagccaattccaatgtaaagttaatataccttacacattgtattaagttaacagtaactttatacattgacttcaaggacytcatcattaaaaattcctggaatggttttccttttacaaaataggactttatacatggttgtatgttttgcagaaacaagtttttcccataggactcatg

SEQ ID NO: 309429 - DNA, 201 bp, Homo sapiens
acaatatagctatatgattaataacgtgtaataacttgtacaaatacaagtaaaccacaatttctatcttttaatggcaaccccataaaggctaatgaggwtgttttcgtaatgttgactggacattgttaatttctcttatttttaatgcaacttttgacaatttgtgtatttttatgtaatgccaggtactgatggagt

SEQ ID NO: 309430 - DNA, 201 bp, Homo sapiens
acttgcctaaacaaatgggctcaagaaacctctttcctttcctgatcatgccatttatggcatctttctgccctctttcccctcataactgcctcattcgrttctctactgactcattctccccctctctaactccagtagtgggtcacagaggttggcatggctagaagggtcacattggcaactccttgcctctttcca

SEQ ID NO: 309431 - DNA, 201 bp, Homo sapiens
ctgaaacgccgcggaaccagaggctgagggagcggcgcgatggagggaggaggagcgacggaccggcaggcctagctccggggctgcggcggctgaggcgsggggatggagcccctgcgggtgctggagctatacagcggcgtgggcggcatgcaccacgcgctgagaggtgagagtccatctagcacccctctctctatt

SEQ ID NO: 309432 - DNA, 201 bp, Homo sapiens
aaatacaagtaaaccacaatttctatcttttaatggcaaccccataaaggctaatgaggttgttttcgtaatgttgactggacattgttaatttctcttakttttaatgcaacttttgacaatttgtgtatttttatgtaatgccaggtactgatggagttccccaaaattgaatctgtacatccacaaaaatatgcaatg

SEQ ID NO: 309433 - DNA, 201 bp, Homo sapiens
aaattttggccgggcacgctggctcatgcctgtaatcccaacactttgggaggctgaggcaggtagatcacctgaggtcaggagtttgagactagcctggycaacatggtgaaaccctgtctgtacgaagactacaaaaattgaccaggcatggtggtgggtgcctgcattcccagctacttgggagactgaggcaggaga

SEQ ID NO: 309434 - DNA, 201 bp, Homo sapiens
gggagtctagaaggaaggttccacttgaagtataggtcttaaagaagtctaggagatttctagagaagggaaagaacacaagcagagaagtgaactgaagrgcatgtttggggaacaccaagtagtttcatttacagcagagttcaagaagagaaaaaagttaaggaagaaaagtaagttcagggctataccgtgaagatc

SEQ ID NO: 309435 - DNA, 201 bp, Homo sapiens
tacatggtttctgtaagctgagttagtttaagagtacatttgcttaaagcaggtaacaagtcttctttctacatatttcaaattcaataaataattaacasgttgccaaatcaggtctcattttttctaatttgaattcagccatgaattcatttcttggaactaaaacaccctcaacaatccatctctttctgttccctt

SEQ ID NO: 309436 - DNA, 201 bp, Homo sapiens
taaaacaccctcaacaatccatctctttctgttcccttctgctttatcttacagatgaggaaaccagggtcatctcaaagtcacacaatcagttaactggsaacgccagggctaaagctgagttatctggtatctttctaccatacacctcttcttatctgaaagtgactaacaaaaagcaaagcacgtggccaatgcaca

SEQ ID NO: 309437 - DNA, 201 bp, Homo sapiens
aagaaggaaatggagcgtaaatcaggctacagagtggctgccattcattcgggaagccttattgttttccgtcctttgttcccctctagacccttgccaayccccaggccgcgaggccctctgaagccctgagcctggagcggtaggagacgggggaactgaaacgccgcggaaccagaggctgagggagcggcgcgatgg

SEQ ID NO: 309438 - DNA, 201 bp, Homo sapiens
ccaggcgtggtggtgggtgcctgtaatcccagttactcaggagactgaggcagagaattgcttgaacctgggaggcggaggatgcagtgagccgagattcygccattgcattccagcctgggcaacagagtgagactctgtctcaaaaaaaaccaaaaaaacaagaaaacaaacaaaagaaacccagcttttgtgtacatt

SEQ ID NO: 309439 - DNA, 201 bp, Homo sapiens
aataatcagggcttttgagaataaattggtctttactcactgtaaaatttaaatcatatgctaacagtgagctatggccaaaataattaagtttaagtggtttttttttttttttgctcttttattcctgtcaagaaatatgaactctttatttttcaaagttgaaaagaagttgatgtatgagagcaaatctacacataa

SEQ ID NO: 309440 - DNA, 201 bp, Homo sapiens
ctgaacattaatattaaatagttcttgtgcatccattactgatttttgttcaaactcaataatgaagttaattaccctctagtactcaatgaatgagactyaagaaacaaatgccagagtcttttagcacaaacaggaccccatagactttggcagatgccttcattagagttgaattttggttcaaaaagaacctataat

SEQ ID NO: 309441 - DNA, 201 bp, Homo sapiens
cgcgctgagaggtgagagtccatctagcacccctctctctattcgctcacgggggctggttggagcacccgcgccgggaaggggcggagcggcgagacgcwaggggcggacactgtggggcggacactgtggggcggccctcggttgtcctggaaacagctcctgcgcgccgccctgtccacccctccagacgctgactcc

SEQ ID NO: 309442 - DNA, 201 bp, Homo sapiens
cgggaaggggcggagcggcgagacgcaaggggcggacactgtggggcggacactgtggggcggccctcggttgtcctggaaacagctcctgcgcgccgccstgtccacccctccagacgctgactcccttctcctggcgccgagtctggctcgaggggccgcacatggcgcctcaaagggcccagttgggagtcgggattc

SEQ ID NO: 309443 - DNA, 201 bp, Homo sapiens
aatgaaagagtaaaatattttctctcctattagccaatgcaatgtgaatttgtacacgtttttctattgccagttctactgttgtgaatccaagctattawgttctgtaatttaaattattaacatagcttcccagcttctctccttacttccattctgcctccctactccgttttccttctagcaggcagcatgatcatt

SEQ ID NO: 309444 - DNA, 201 bp, Homo sapiens
taatttaaattattaacatagcttcccagcttctctccttacttccattctgcctccctactccgttttccttctagcaggcagcatgatcatttgcacartaaaccagatcatgttacttcgttgcttaaatggttgcttttgagattgtaatcacagtcccatcttaacaggcttgtgagttctggcttctgtcttctc

SEQ ID NO: 309445 - DNA, 201 bp, Homo sapiens
atgcagtaggtcctaattttataacagtctaaaatatgtgcatcaatccatgcaaacagtgcatttgcttattggctttgaaaatctgttctttcctgagraagaaatttcagttcatcagtttttggatcaccatatgaaatactcatttggcagttgatttttgtcagtttttgtgacctccaggcatataacacaaga

SEQ ID NO: 309446 - DNA, 201 bp, Homo sapiens
tacttttaaagtgagatcacattatcttttatactgattcaaacttttaactactgataaaatttacccatggtaaaaattctgttataggcaattgaatrtctggatttgagaaattatatttgcttaatatatttaatcattttaaggaagtatcttgatgaacctgagtataaaaataaaagttttaatgattctcct

SEQ ID NO: 309447 - DNA, 201 bp, Homo sapiens
tgatcttggctcactgcaacctccgcctcccaggttcaagagattctcctacctcagcctcctgaggtaggcacgcaccaccacgcctggctcattttttwaatatttttagtagagacaggatttcaccatgttggccaggctgacctcgaactcctctgacctcaggtgatccacccgcctgggcctcccaaagtgctg

SEQ ID NO: 309448 - DNA, 201 bp, Homo sapiens
catcaggtgctgcataattgttgtgttgatttttcagatatggaagctacatagaagggacagggtctgtgttacagactgcagaggatgtgcaggtactrtgcatgttttaaagctaaaacactttaaaacttttaactaaaattgtttaatactttgagaacattagaataattttatgcattcaactggccatgaata

SEQ ID NO: 309449 - DNA, 201 bp, Homo sapiens
tatctgaaagtgactaacaaaaagcaaagcacgtggccaatgcacatgtacaatttaaaaagttaatttcatagaccacatcaaaaggaaccagtgaatgytataatttggatgcagtggttatacttttatttgttaacagcattacattagcaggcatgcaacatttctaacaaatcagttattgttattacaagtggt

SEQ ID NO: 309450 - DNA, 201 bp, Homo sapiens
tcaaacttttaactactgataaaatttacccatggtaaaaattctgttataggcaattgaatatctggatttgagaaattatatttgcttaatatatttartcattttaaggaagtatcttgatgaacctgagtataaaaataaaagttttaatgattctcctgttttattgtaaaattgactttgttgttttgtcaagct

SEQ ID NO: 309451 - DNA, 201 bp, Homo sapiens
atgtgtcaggatattttaggctgggagtctagaaggaaggttccacttgaagtataggtcttaaagaagtctaggagatttctagagaagggaaagaacamaagcagagaagtgaactgaagggcatgtttggggaacaccaagtagtttcatttacagcagagttcaagaagagaaaaaagttaaggaagaaaagtaagt

SEQ ID NO: 309452 - DNA, 201 bp, Homo sapiens
aggcatgcaacatttctaacaaatcagttattgttattacaagtggtacccccaagttccccctaacaaaaacctgtggcagtgttgggaacaaagagaaraacacttcacaacgggaacattttctatcctccatatgggtacattatttttatttataattgactgtaaacaccgctccccccacaaaatttctaagct

SEQ ID NO: 309453 - DNA, 201 bp, Homo sapiens
tccacagatggctgtgcatagcatcccctttccagcttattttcttttccagaggtcctctcctaatcaccccacactagagcttgtgaaagaatgctttygattggctttttataaattaaaaggcagttgagggattattttcgaagggtgggggtgtattggtatttattctcctcagagatacacctgtgtcagctg

SEQ ID NO: 309454 - DNA, 201 bp, Homo sapiens
ggttactggatcatcctgaggaatcaaggccatagcacttaaagacccataaataatcctacatgatattcactgtgtattctatgtaggtgtaatttccragctaaaacataattaaccccactaatagacacaacaaacatcctctgtattatcagcacgcacacagggctttctctgctgcgagtggacttgtgtcct

SEQ ID NO: 309455 - DNA, 201 bp, Homo sapiens
gaggtggagaggctgtctaggaaggagctttcataatggaatgaaagggggactcagaagatgaaattgacacaggagatgaattgacacagagttaatgwaagattggggatctacagcaaggaatctcaagaacaaatgggaagatttagttgtagagtgagaaagtcaaaggcctaattccattggcagtccaagaag

SEQ ID NO: 309456 - DNA, 201 bp, Homo sapiens
ataatctttatttcataaatatttttctcattttttaaaattttaagttggtgaaatagaatttttcaaagctctttgaatatatatgtataatacttagwaaaacagcctttgaaattactgaacctccttctaaaatacgtgatatgtttttggagttgagcttaccctgatgtcaccactgagcagcaccgtgacaca

SEQ ID NO: 309457 - DNA, 201 bp, Homo sapiens
tactaactgttggaattaattcaacagtaagacttaactgtgtgctagttactaagtgaaaaacagaatttttaaggcttttgagagagaggatagcaaaktgcttttcagagatttttgagtgccttaactacatattcatcagggatatgtattatcaatttttaatccttgctaatttgttaggggaaattgtgtaat

SEQ ID NO: 309458 - DNA, 201 bp, Homo sapiens
ggatctgcattgatccttccaaaccctctgtcctggttctgtgactggtggtgtgtattctgcggtagcgggcttttgaagaaaaacactaacctgtcctyacgggtgaaagctgatatcttgaccttgttcatcccatgtttctttgtttttgaggattattattgttatttttaatgtatctaagttttttaaaagttg

SEQ ID NO: 309459 - DNA, 201 bp, Homo sapiens
tatctttagaatagaaactttatgatcatgtttaattgcaacagtaattgctgttattttattgcagttaataaaatgtcaagtgtcaatgaagcaacttkattgtaactaattctaccttcctgtcctcatgagtatatgaaattttgctattcttaatgctcctaattgtttttcattttcttatctaacttatttttc

SEQ ID NO: 309460 - DNA, 201 bp, Homo sapiens
tagttagcggtagaactggtattttaacctaggtctacctacctgaccttttaactatgctatgttgccgttgttctggttagaactactaacttccttgkatctatacattaaataatataataagcagcacaaaaggaataatattgaacttcatttttgactgatttctagataaggttcataatggaatttttttat

SEQ ID NO: 309461 - DNA, 201 bp, Homo sapiens
ggtagaagctaaatgtaggctcgtttgagttttttgttgttgctgtttaacttggtgctaaagttggtaccgctctctttaattttttagagtaactaacygctttgctttgcttacagcttggcattccaaattcaaggctacgatattttcttattgcaaagcttcagtcagagccattaccctttcaagcccctggtc

SEQ ID NO: 309462 - DNA, 201 bp, Homo sapiens
aatgttgtgcaaccatcacccttgttcgtttctaaaactttttaatcatctcaaacagagctctgtacctgttaaacaataactccaaattccctttcccsccagcccctggtaaccttgattctgctttgtctttatgaacttgtctactctgcgtaccacacataagtagaataatacatttgtccttttgtgtctggc

SEQ ID NO: 309463 - DNA, 201 bp, Homo sapiens
aaaatgatttttttctggcttctaaccagtgttaattcacttggaaaccaaggcagttttctcccctttactgaactctggatttcttttccaatcaaggyccctgacaccaaagaaggaaatggagcgtaaatcaggctacagagtggctgccattcattcgggaagccttattgttttccgtcctttgttcccctctag

SEQ ID NO: 309464 - DNA, 201 bp, Homo sapiens
ctttcaagcccctggtcaggtattattattggaattttattatgaatattatggcttatttattataaatatatattagtctgctaatttattttcaagarctactttgtgtagctgtctctgtgtactatagaatctaaagtatagaccatgccctaggtccatcttcaaggctgttttcatcttgccacttttattgtt

SEQ ID NO: 309465 - DNA, 201 bp, Homo sapiens
ctaatgaggttgttttcgtaatgttgactggacattgttaatttctcttatttttaatgcaacttttgacaatttgtgtatttttatgtaatgccaggtaytgatggagttccccaaaattgaatctgtacatccacaaaaatatgcaatggatgtagaaaataaaattcaagaaaagaacgttgaaccaaatattagctt

SEQ ID NO: 309466 - DNA, 201 bp, Homo sapiens
tctgtactatggcagcaagtcagcttgtgatgctacatgaatggcaaaaaagaaaacttgagaattctcatttacgcatcctaattcttgtctgtttcacrtaggtgcgtgctagtgcaattgcccaagatgctgatcagaattacgactatgccagtaacagtgtggttcttcatttggagccgggagatgaagtctata

SEQ ID NO: 309467 - DNA, 201 bp, Homo sapiens; identical to SEQ ID NO: 64401

SEQ ID NO: 309468 - DNA, 201 bp, Homo sapiens
acaatgcatgagatgataggcaatttgactgtttgtaaatgtctatcaactcactaatgagatcacaggcttaccatgggcagattataagcagcctctgycctcaaatcaagccacatatttagaatctcctaagtgtaagtggatattcaacgaaatcattcaaaaattcttgaaacttgagaggcctcagagcatgaa

SEQ ID NO: 309469 - DNA, 201 bp, Homo sapiens
atgcatggaaattcttgacttctgtctcatttctctcattttgccaagtgataaaatccagcatattgtaccccaaatcatgcattattacatagtgcagstttacaaaaccactaaatcacttgctatgttattcagggaaatatcattatagtggaatagaaatgaaacaagccacaaagtagaagatgttttactgaa

SEQ ID NO: 309470 - DNA, 201 bp, Homo sapiens
aaatggaaattgagcctctgggagattaagaaactttcacagctcctaaatgaggaagctagtattcaaattaagacccatctgattccaaagccataagratatacggcttccctacataactccaggcagactctttctggttagaaatgtacagttcttcagtcaaaggagtatatgttctgaaatgaaatttggaga

SEQ ID NO: 309471 - DNA, 201 bp, Homo sapiens
ttccctgggaattaatggctagatgaaattaatgaatcaaagcattcaactcctacaaactcatgattaatctttagaaaatattatgaagtcaaactgcrtcattatttaatggtcaaaacggaccactttactaaattggcatatatattggagtcagtgcttccaagcataattacatggtatattgctttcattata

SEQ ID NO: 309472 - DNA, 201 bp, Homo sapiens
aatttgtggttacgcctactgaataaaaatggtgacgttcactcggttttgtggttacaccctggagaataaaaatggcattatatttttaaaaggattaktgtgtctaaatcaagtaattttagtatgtcctgtttctccaataccttcatgtagaaaaccatgttaaagcccagtaaccatagaacatgtcctaaatac

SEQ ID NO: 309473 - DNA, 201 bp, Homo sapiens
attgccttcctcaatagtttgatggcttgaaagaattgttgaagtcactgagctgaatactagagcttgaaatttcaagtcctgttatatctttagagtakgatcaggtgagcagccataccaaaatcatgccaggtacactggagtatggcaattatttaattgggacagtcttacggtacagtataggttaaaatctta

SEQ ID NO: 309474 - DNA, 201 bp, Homo sapiens; identical to SEQ ID NO: 64402

SEQ ID NO: 309475 - DNA, 201 bp, Homo sapiens; identical to SEQ ID NO: 64403

SEQ ID NO: 309476 - DNA, 201 bp, Homo sapiens
actctttctggttagaaatgtacagttcttcagtcaaaggagtatatgttctgaaatgaaatttggagaccgcaaaattaaagataaatagcagatctagkcccaatttttttttgtattttttatgtctgattctctagacagtccttgggtttgttaatttattattattttttcctgttctaagaaatgctatttctg

SEQ ID NO: 309477 - DNA, 201 bp, Homo sapiens
atacggcttccctacataactccaggcagactctttctggttagaaatgtacagttcttcagtcaaaggagtatatgttctgaaatgaaatttggagaccrcaaaattaaagataaatagcagatctagtcccaatttttttttgtattttttatgtctgattctctagacagtccttgggtttgttaatttattattatt

SEQ ID NO: 309478 - DNA, 201 bp, Homo sapiens
gcctggggggcgaccggttcgagcccagccccgggtctatcggcctctggaccagccggccaagaggatttgattccctgagccggtcggcgccgctacamgggctacgcatgggtctgcagtattctgctggggccactttactgtggagaaattcgaggtcattgcaaaaccgaagcttgtttgatctcttagtcaaag

SEQ ID NO: 309479 - DNA, 201 bp, Homo sapiens; identical to SEQ ID NO: 64404

SEQ ID NO: 309480 - DNA, 201 bp, Homo sapiens
ccagcgtagggctgtgctgtccgtagatactcaatactgattaatggatggccgtgcatgtctgtgtgggagtcgtgtgcttaggatctgctcagctctcygaaagcaacagaaatggtgtggggaagaagaaaatcacaggattgtgatccaaccatgatcacggctttctggattggacttcatcttctggagggtcca

SEQ ID NO: 309481 - DNA, 201 bp, Homo sapiens
ccttctgtctgctcgtttgaccttattttgttttgaaacagagaagaaagaaagaaagaaagaactaaattggtggggtggactggagtaggctggggggyggggagattgaggcacagggaggaaaggagaagtccatgctgtgacacccgcagacaagatcacaggctgctgatcgtcacccaggatgttactgtttgc

SEQ ID NO: 309482 - DNA, 201 bp, Homo sapiens; identical to SEQ ID NO: 64405

SEQ ID NO: 309483 - DNA, 201 bp, Homo sapiens
ggagtatattatgggttgataactaatgtattactaatatagctcatgaatattttgtttttaatttttttcaccattaaaaatccaaagatgagaaaaaracacaagtcataatagcaatatccttcttgtagatttgtttccctgggaattaatggctagatgaaattaatgaatcaaagcattcaactcctacaaact

SEQ ID NO: 309484 - DNA, 201 bp, Homo sapiens; identical to SEQ ID NO: 64406

SEQ ID NO: 309485 - DNA, 201 bp, Homo sapiens; identical to SEQ ID NO: 64407

SEQ ID NO: 309486 - DNA, 201 bp, Homo sapiens; identical to SEQ ID NO: 64408

SEQ ID NO: 309487 - DNA, 201 bp, Homo sapiens; identical to SEQ ID NO: 64411

SEQ ID NO: 309488 - DNA, 201 bp, Homo sapiens
gggggtcgtgcgcgcaggagggcgccccgcggcctggagagggcagttccggagtctgggaccctcgatcggtgcgcgcccctgcgagcgcgaccctcgargggcgggaagccgggagctgggtcccggggacagctcgtgcgctggggagtcccggcgcgggaagcgacccctggccgtgggatcctccgcaacagaggg

SEQ ID NO: 309489 - DNA, 201 bp, Homo sapiens
tatacggcttccctacataactccaggcagactctttctggttagaaatgtacagttcttcagtcaaaggagtatatgttctgaaatgaaatttggagacygcaaaattaaagataaatagcagatctagtcccaatttttttttgtattttttatgtctgattctctagacagtccttgggtttgttaatttattattat

SEQ ID NO: 309490 - DNA, 201 bp, Homo sapiens
atgttactgtttgcttgctgtagtcttatttgttcctgcttttctcatttcagattctcaccctgatgtaataagtcaccgtcttcccagccatcatcctsgtattgacaagcaaatgtcacccacgtttgattgacatctgttgctcctgaatgcaaaagtatgatttaggattcaattctacttatttatttaaagcca

SEQ ID NO: 309491 - DNA, 201 bp, Homo sapiens
ttgtttccctgggaattaatggctagatgaaattaatgaatcaaagcattcaactcctacaaactcatgattaatctttagaaaatattatgaagtcaaastgcgtcattatttaatggtcaaaacggaccactttactaaattggcatatatattggagtcagtgcttccaagcataattacatggtatattgctttcat

SEQ ID NO: 309492 - DNA, 201 bp, Homo sapiens
atattatgggttgataactaatgtattactaatatagctcatgaatattttgtttttaatttttttcaccattaaaaatccaaagatgagaaaaaaacacragtcataatagcaatatccttcttgtagatttgtttccctgggaattaatggctagatgaaattaatgaatcaaagcattcaactcctacaaactcatga

SEQ ID NO: 309493 - DNA, 201 bp, Homo sapiens
aatatgtctggttattagtaatagctgaggagtatattatgggttgataactaatgtattactaatatagctcatgaatattttgtttttaatttttttcmccattaaaaatccaaagatgagaaaaaaacacaagtcataatagcaatatccttcttgtagatttgtttccctgggaattaatggctagatgaaattaat

SEQ ID NO: 309494 - DNA, 201 bp, Homo sapiens
tttttaaaaggattattgtgtctaaatcaagtaattttagtatgtcctgtttctccaataccttcatgtagaaaaccatgttaaagcccagtaaccatagmacatgtcctaaatacccaaagcactgaataaaatatgtctggttattagtaatagctgaggagtatattatgggttgataactaatgtattactaatata

SEQ ID NO: 309495 - DNA, 201 bp, Homo sapiens
cggttttgtggttacaccctggagaataaaaatggcattatatttttaaaaggattattgtgtctaaatcaagtaattttagtatgtcctgtttctccaayaccttcatgtagaaaaccatgttaaagcccagtaaccatagaacatgtcctaaatacccaaagcactgaataaaatatgtctggttattagtaatagctg

SEQ ID NO: 309496 - DNA, 201 bp, Homo sapiens
gcgcctgatcgccgccggggcgctgggggtggtgatggtgctgctgctggtgatcctcatcccggtgctggtgagctcggccggcacgtcggcgcactackagatgctgggcacctgccgcatggtctgcgacccctacgggggcaccaaggcgcccagcaccgctgccacgcccgaccgcggcctcatgcagtccctgcc

SEQ ID NO: 309497 - DNA, 201 bp, Homo sapiens
caggtgggtccagcaggacctgccatcgcttggttcagcaagggagtattcagaatctcactgttcatccatgtgcagagagagaaaaaaagagaggccgaaaaaaaaaaaaaaatcccacattgtcagagtaatgccaaactctctctgagtgggatgagcagagcagatgctgcaatgagatgccaaagcggctcccct

SEQ ID NO: 309498 - DNA, 201 bp, Homo sapiens; identical to SEQ ID NO: 64410

SEQ ID NO: 309499 - DNA, 201 bp, Homo sapiens
gagtgcagtggcgcaatcttgactcactgcaccctccacctcccaggttcaagcaattctcctgcctcagcctcccgagtagcctcccgagtgatgacagrcatgtgccaccaggcccagctaatttttgtattttttatagagacagggtttcatcatgctggccaggctggtctcgaactcctggccttaagtgatctg

SEQ ID NO: 309500 - DNA, 201 bp, Homo sapiens
tacaggtgtgagccactgtgcctgacctaatttgaccattgcatttaaaattgttagacgagtaccttcaaccaggtcaagggctgggtataacagagtcmggggtgggagaagagcctatgtttatgaaataaggacagtgtatttcagttaagagaagctctcctcattcacaggtaaaatagagtcctggaaagtcct

SEQ ID NO: 309501 - DNA, 201 bp, Homo sapiens
aatgctccacagtcacacagccagaaaacactggagccaagactccaagttttgggttcttcttttttatttttttaagacagggttttactttgttggcyaggttggagtgcagtggtgtgatcaaggctcactgcagcctcagcctcaacctcgcaggttcaagtgatcctcccacctcagcctccagagtagcttgga

SEQ ID NO: 309502 - DNA, 201 bp, Homo sapiens
gtctgtagtttgccaggacttaaaagtaatacaaattttaagtgctttactgatcaaatacagctaaagaccagttgtgcagctggctcaaagtatcactrtttctgggaggcaacctatgactagggtttcatgggacagaaaatcccctgtagaaaaagcagaggacagacttcaacgtggagagttcttcatgaagaa

SEQ ID NO: 309503 - DNA, 201 bp, Homo sapiens
acattgtgtgtgatcataggaagtgccagccagttctgcctgagagcattagaggaatctcccagaagggatgacatttcttaagtgatttttttttcagraagactcacagcttgtgagcttgaaacgtaccaacattgctctttcaaatatgcatcaattgaatatgcagtttggtacttttctagcaaaagtggtagc

SEQ ID NO: 309504 - DNA, 201 bp, Homo sapiens
cctattatcttgtggaaagaccttatattcaattaaagattgtaggaagacctgactgcaaaatgggttgaacttttgagaagtgaaatgttttgctgctbcccagcactttttttttttaagctctcatatcacaacttggctccatcacaattaatcttatgtggtaatgcagtgacaatgagatgatttctctggaga

SEQ ID NO: 309505 - DNA, 201 bp, Homo sapiens
tattgaattagagaattagcctattgaatcaggaattatttgtgtttctaatatacgtgaacaagagagaaaaacatatttttctaagcaatgtcaagactatataatataatttccatttttatggcaagtaagtatatgtacatttaaacattccaagttcttgatttttaatctacaattatgtctaataacaataaa

SEQ ID NO: 309506 - DNA, 201 bp, Homo sapiens
ctgagatttacaggcatgaactactgcgcccagctgtgactttttgttttctctcctcctcctcctccttcttcctcttcttcttctcctgctgctgctgmtgatgatgattctccttctccttctccttctccttccttttcctcttcctcttcttcttctacttctacttcttcctcatttattattattgttattatt

SEQ ID NO: 309507 - DNA, 201 bp, Homo sapiens
ttcctggtgaaagggaaacgctggccatgtgctctatccagtacattctacccaccaaagccttccacgagtaattttttttctaaagcaatttttcatamctctgacaccattcccatgaaatgtgacattttaacaaataggattgccaggtctgtgagatttatcttcactctcctcaataccgtcattccctgaacc

SEQ ID NO: 309508 - DNA, 201 bp, Homo sapiens
aggcccactaagcattgtgcctctttcttggttgtaggaggggccaaatgcagcgacttgtccttcatcttaaaaggaatatctcgacaggccccacaccrctggacccctggacattttactgaggtggaaggcccctgaattttagtcggatttatttcccatcccctggcatgtaaatatctcaccaataagtctggt

SEQ ID NO: 309509 - DNA, 201 bp, Homo sapiens
agaaagaatagaattattcatggatggccaggcgcagtgtctcacactgtaatcccagcactttgggaggccaaggcaggcagatcagctggcgcatcagmtgaggtcaggagtttgagaccagcctggccaacatggcgaaaccctatctctactaaaaatacaaaattagctgggtgtggtggtgggcacttgtaatcc

SEQ ID NO: 309510 - DNA, 201 bp, Homo sapiens
cccagctactcgggaggctgaggcaggagaatcgcttgaacccaggagatgaaagctgcagtgagccaagatcgcgccactgcactccagcctgtgtgacrgagcgagactgtctcaaaaaactaaaataaaaaacaactctcaagaagtattcatggatatagaatgcagaatgaggaaaactggctgaggttagcacct

SEQ ID NO: 309511 - DNA, 201 bp, Homo sapiens
aagctttgtaagtggctatactatctctgactataaggtcttggtccatattctttacaccatacatcgtatttatatatatgcctgcatatattcatgcstgcatattgtgcagaaccacctgtgaaccagatcctagtcttctcttcctctgtcaactgatcatagggaactccccatgataccattggtgcaggctgg

SEQ ID NO: 309512 - DNA, 201 bp, Homo sapiens
ttgcataaatgcaacttcagtagcgctttggcagtccctggaagccatccagctgaatgtcaatttcacatgggtaagtcaccttgttagacgttcacggygcaaggtgcttgttcctagatgtcactacgatggtgagtgtgtctccgtagtgtgagtgccttggaggaggaacggagttgccctggtgcctgggtgttc

SEQ ID NO: 309513 - DNA, 201 bp, Homo sapiens
tcttgaactcctgacttcaggcgatctgcctcccttggcttcccaaagtgctggaattacaggtatgagatagcatacccggcctttttttcttttctttytttttttttttttgagtcagagtcttgctctcttgcccaggctggagtgcagtggtgccatcatagctcactgcagccttgaactattgggctcaagcga

SEQ ID NO: 309514 - DNA, 201 bp, Homo sapiens
gaataattggaatgctatgtgcatgtatttgtttgtaacatctagaatcctatgaatatgacactgagtttcttttattcttaaaaacaattttttttttwaatttttaagagtaaaagagacagggacttgctatgtttcccaagttaattttgaactccttcctcaagtgatcctcctgccttggcctcccaaaatgct

SEQ ID NO: 309515 - DNA, 201 bp, Homo sapiens
atcttgcttaaatatgttgtgtcttacaattatcacgatactatcaactgaaaacagaaaggtctgtgagaaaagatgtgagcctaggaagctaaaaactytttcttttttttttttttttgagatggagtctcgctctgttgccatgctggagtgcattggcgcgatctcggctgactgcaacctctgcctcccgaattc

SEQ ID NO: 309516 - DNA, 201 bp, Homo sapiens
ggccaacatggcgaaaccccatctctactaaaaatacaaaaattagccaggcatacgtctgtaagtccagctactcaggaggttgaggcaggagaatcgcytgaacccgggaggcgaaggttgcagtgagccaagattgtgccactgcataccagcctgggtgacagagtgatactctgtctcaaaaacaataaaaataag

SEQ ID NO: 309517 - DNA, 201 bp, Homo sapiens
gattcttcccaaatgcagttatcagtggatacatttcagaaattattttgtcactgaaggacatttgaaatgaatcatccgtacttaccattgactaataygttttttttcaggcagcttcaaagagtattttaaatatgatttcctggctatctgatttcggatctaagagtatcagacttaggttttgctgttaatgtc

SEQ ID NO: 309518 - DNA, 201 bp, Homo sapiens
gtggtgcacacctgtagtcccagctgctcaggaggctgaggcaggaggatccctcgagcccaggagttcaaggctgcagtgagctatgactgcaccactgwaatccatcctgggcaacagagccatttcaaaataataataataataattgatgacagtgtaatatggttggggttcagaaaatgataccccaaaatgaag

SEQ ID NO: 309519 - DNA, 201 bp, Homo sapiens
acacctgtagtcccagctgctcaggaggctgaggcaggaggatccctcgagcccaggagttcaaggctgcagtgagctatgactgcaccactgtaatccaycctgggcaacagagccatttcaaaataataataataataattgatgacagtgtaatatggttggggttcagaaaatgataccccaaaatgaaggccttag

SEQ ID NO: 309520 - DNA, 201 bp, Homo sapiens
tatggtaaacactgagttctttcttcacagaaactgttaaaagagtaattattagttctttttactaaatccagagtaatagcaacttatcttgcagtggyttaattgggtaattatttggtgtgtgaagagcactttgaagagaatattggtaaatattgttaatttcgtgctcttttatgtaactgaaagcccattgcg

SEQ ID NO: 309521 - DNA, 201 bp, Homo sapiens
ctcaaatgatccacctgcctcagcctcccaaagtgctgggattacaggtgtgagcccccatgctcagccaatatttgtaatattcatttcttagttgactycacactagtgtttagttatccagagggggtcatatcactatatgtcagttaaaaaaatgaataactacacacacacacacacacacacacacacacacac

SEQ ID NO: 309522 - DNA, 201 bp, Homo sapiens
tgggaagccactggtaccagttacaagtttgtagaccacagtctacacaaaggccatctgctcaaccctggtgacttgaggttgactggcccaagttaaaytgaagagttaatgaagccacaagccgattttttttattcaaggagtctgatgtgttttctgggttttcaaatggcttcaatggatttacttaccagttta

SEQ ID NO: 309523 - DNA, 201 bp, Homo sapiens
acgcgagggtcctgccggaaggaaggattttctagccgctgcgcttgggccctgccgcctctccttaagtgcttgagggacgttgcaaagagcgccagtcscgtgtggcgccagctccctgtggctcgacagcaatgcccgggggcgtcatcgggtagctgtgctaagcctcctttaataagctttttttttttttttttt

SEQ ID NO: 309524 - DNA, 201 bp, Homo sapiens; identical to SEQ ID NO: 64417

SEQ ID NO: 309525 - DNA, 201 bp, Homo sapiens
agggtcctgccggaaggaaggattttctagccgctgcgcttgggccctgccgcctctccttaagtgcttgagggacgttgcaaagagcgccagtcccgtgyggcgccagctccctgtggctcgacagcaatgcccgggggcgtcatcgggtagctgtgctaagcctcctttaataagcttttttttttttttttttttaga

SEQ ID NO: 309526 - DNA, 201 bp, Homo sapiens
cactgaaaaatatattcaatctacatagacggaatcatcttaagtataatggccagggtgaaatagctgtgaggaactctcagtgaaactaaactaaaatygcccccaaactaccgtcctgcacaccaaatcttcaacaattaggtgaattgtctaagtattttgtagaagttgatttatgcatatggttttagaatacac

SEQ ID NO: 309527 - DNA, 201 bp, Homo sapiens; identical to SEQ ID NO: 64421

SEQ ID NO: 309528 - DNA, 201 bp, Homo sapiens
gtgaaatagctgtgaggaactctcagtgaaactaaactaaaattgcccccaaactaccgtcctgcacaccaaatcttcaacaattaggtgaattgtctaartattttgtagaagttgatttatgcatatggttttagaatacacatattttaaacatgcgtattttaaataagacaaatcctatttatcgtttctggcttt

SEQ ID NO: 309529 - DNA, 201 bp, Homo sapiens
ccttgctctcagtagcaaggaataagacactgaacagtaaattcctatccatcatcattggaaaatattgccctgtatagtgcctggcagctgtgtggtgrttctctgaagagacactgcctgcttttctcttagccaccatttgaattgcctagctgatagaagtttggcttccagaaaggcactatcaaacaaaatcaa

SEQ ID NO: 309530 - DNA, 201 bp, Homo sapiens
gcctagctgatagaagtttggcttccagaaaggcactatcaaacaaaatcaatggccatgttagccacaagtcctaagttctgtccaaaagtctaaatccrtcatttatgccttataagccaatatatcgcaaacacctgagttccagataattgcagtggcttgctataaattggcctacaattctgtcaccctctgacc

SEQ ID NO: 309531 - DNA, 201 bp, Homo sapiens
gttctgtccaaaagtctaaatccatcatttatgccttataagccaatatatcgcaaacacctgagttccagataattgcagtggcttgctataaattggcstacaattctgtcaccctctgacctctgatgttgttttcaccttgtcttacgtgtgtactatacccttcacaaattttcccctttgttcccccaaatcatc

SEQ ID NO: 309532 - DNA, 201 bp, Homo sapiens
ataaactgataataagtactatatagtaatgaaataataaaagctgataatcaaatgtaataaaagaacattttcatattaatgcataatgaaaactgtaygaaataagttacctaaagactaaactggccaggtgcagtggctcatgcctgtgatcccagcactttgaggagctgaggaaggtggatcacttaagcccag

SEQ ID NO: 309533 - DNA, 201 bp, Homo sapiens
acaaactgggtggctttaacaacagacatttattttctcacagctctggcagctggaagtcccagatcaaggtgtcagcagtgttggcctcttctgaggtmtctctctttggcttgtggatggccgtcttcccttttatgcatgtctgggtattgatcttttatagggacaccagtcctattggattgagacctaccctaa

SEQ ID NO: 309534 - DNA, 201 bp, Homo sapiens
acgttgggctgtagcctgaagaacaacccactctctgccttcaaagtcattatttaattataattatggtgatttttaaccttaaggttttctgtgaaaarccacaaaaaataattatttggtttccttggaacttacacacatttaatccctctgaatattcgtgaattaacgggaagtcattcaaaaacaattccaagc

SEQ ID NO: 309535 - DNA, 201 bp, Homo sapiens
tttttaatataatagagatggggtctcaatatgttgtccaggtggggtctcactgtgttgcccaggctgatcttgaattcctgggctcaagtgattcttckgcctcagccttccaaagtgctgggattataggcatgagccactgcacctggccaggttattgattttttttaacacttatttcaccatctactaaagaat

SEQ ID NO: 309536 - DNA, 201 bp, Homo sapiens
tttaaacatttatgtaattaggtaaaaagggaagcaacattattaaatgacttggatagagttcatcaagcagttaagaaaaaaatgtacataatcaagcktaccttgcagtctgaatgacaaacatccaaatatttgctgtaacaactcgcacatatttttaccaaaaatttcctctccgaatcagaaacttactatgat

SEQ ID NO: 309537 - DNA, 201 bp, Homo sapiens
tataaatctgtgtatatatatataaaatacctgtgtgctattccatacgtacgtgtatgtgtgtgtgcttaatcttccttaaattaaaccatgcattctckcttgacccaaggacagcccatgttaagcactgaatgcccttttgggttgcgtgtgctccagtacccactgtcttgcacacttgattttcatcatgcatga

SEQ ID NO: 309538 - DNA, 201 bp, Homo sapiens
ctggctgattttttgtatttttgttagaaatggggttttgccatgttgcccaagctggtctggaattcatgagctcaagtgacccttccacctcagcctcscaaagtgctgggattacaagcatgagccactgtctgcagctgaattcatttcttaattgccttcacgttaatgtttagttaccccaaggaggtcatatca

SEQ ID NO: 309539 - DNA, 201 bp, Homo sapiens
agtgcagtgtttctagagtgcagccgcgctctgtgatgtaacacttcaaaaaatagaagtgctgatctatttgggccagacagcacttttttcttagaagkccatttatttggaggatacttttatagtaccagcaagtccagttagaaagttccatctgctctgcctcttactgcttctggtttcttgccatctacactg

SEQ ID NO: 309540 - DNA, 201 bp, Homo sapiens
tgggaatgaatgacatcactcagagaagaagatgaggacagagacctggggacagagacatttaaggaatggagtaggaaccgttgctcaaggaaaggtcraggagaagttttcaaagtgataacatgagagatatatattcttatggaagtcagtagagaggaagtctcagggcagaagggcttgaatgccggtaataag

SEQ ID NO: 309541 - DNA, 201 bp, Homo sapiens
cccaggctggtttcgaactcctgggctcaatcagtctgctgcctcggcctcccaaagtgctggcattacaggtctatattttttgacagtttataaaagcyaattaccagcggtcatatgtctgagtcctgtgcactcttgcttaatccactctgcagccctgtgaaggattctagtgataacgacaaagctaaggtacag

SEQ ID NO: 309542 - DNA, 201 bp, Homo sapiens
gagaaatgggtgggccgtgaggaagaggagagaggatgttgaggtgactctttcaagaagcgtggcagtggagggaagcaaggagatgggtctggagttasaagtcaataaaggatcaagggaagcttctagtaagagttgagcaatgtttatgtgacttaagagcaaaagcagagacagagccagagagaatgagtccag

SEQ ID NO: 309543 - DNA, 201 bp, Homo sapiens
ccaggctgatctggaactcctgaccttgtgatgcacccgtctcggcctcccaaaatgctgggattacaggcatgagccactgcacctggcctgttttttttgtttgtttgtttttttagggaagataggttttcaccatgttggccaggctggtctcaaactcctggcctcaagggatctgctaccctggcctcccaaatt

SEQ ID NO: 309544 - DNA, 201 bp, Homo sapiens
tggagggaagcaaggagatgggtctggagttacaagtcaataaaggatcaagggaagcttctagtaagagttgagcaatgtttatgtgacttaagagcaaragcagagacagagccagagagaatgagtccagggaagtggtgcccattccacagggttactatagaattgacatgaaataatgttttccaagtttttgtc

SEQ ID NO: 309545 - DNA, 201 bp, Homo sapiens
actcggtgagggcgtgacctcgggccaggggcggggagagaaccagagggcgaagtgggagggcacaggggagactaaaaaggccagggaagttggcctgscggaagttcccagggagaaggcagcgcgttgtacccgaggtaaggcttcttggagtcagagcaggagccggaactgtgggcccagtaggaagagtggggc

SEQ ID NO: 309546 - DNA, 201 bp, Homo sapiens
tagggccaggattgtttctttttcatcttcgtttccctgcatatcttcagttgaagttagtagatcctcaggaaacatttgcaacattaaattgaaatgtrtgcaggtgaaattagcacgtttggaaagctgatttccttgaattcccttcctatgccctgagaacttaagaccgaagttgccccctcagatctgtaaatc

SEQ ID NO: 309547 - DNA, 201 bp, Homo sapiens
tttttgtctgagtgtctggtgcagaatatggaagtgttcaatagatgttgactttaaaaactctggatagataagaaatatagagcaaggttcctaaggcracaaatagatggaatctggggaacaaatagaaagtcggttgaaaggatgctttctccatggaaatgagagggcatgacacagcgatggggtgaatgcaaa

SEQ ID NO: 309548 - DNA, 201 bp, Homo sapiens
tttcggtagagatgggatttcaccacgttggccagactggtcttgaactcctgacctcaggtgatccacccacctcagcctcccaaagtgctaggattacrcgcatgagccaccgcgcctggcccagaattttattcttttttaaggttaaataatattctattgtgcctatatgcccccttttcttaataatctgctcat

SEQ ID NO: 309549 - DNA, 201 bp, Homo sapiens
  misc_feature (1)...(201): n = A,T,C or G
aaggaattcacagagtcaaatggctgaggagttacaattaaatcaaagctcagcacaatggaaagggcactagattaggagttggaatacctgcattgtgngtcactttaaagaacacccatgctttcctttctttatttgtgcagtgacattaatacgtgacataattatttcaccagtctattgtgagtttcacagcct

SEQ ID NO: 309550 - DNA, 201 bp, Homo sapiens
tataacagagtccggggtgggagaagagcctatgtttatgaaataaggacagtgtatttcagttaagagaagctctcctcattcacaggtaaaatagagtyctggaaagtcctaccctctgcaattcaaaatgccactgaaaaatatattcaatctacatagacggaatcatcttaagtataatggccagggtgaaatagc

SEQ ID NO: 309551 - DNA, 201 bp, Homo sapiens; identical to SEQ ID NO: 64412

SEQ ID NO: 309552 - DNA, 201 bp, Homo sapiens
caacaggagagatgatcttttagtgtaagcaggacggggcaggttttcttcatagtcaggatatgattgtgtgtccagagccataacgttatctttctcadaagtagtctccagattcttgacttaatgggttctaaggattcccggttttaagtatgagtatcttgtcctctatactctttcattctacttcatgatttg

SEQ ID NO: 309553 - DNA, 201 bp, Homo sapiens
tggcaactctcaactctacatgagcaaatgacttcacctgtcttgaccaatgaagttctgtcttttaatactcagatcagttatttgacaagtagatgtaytgtttctttgtttatttttgttttattattttaatttacttgcccaggaacccgattcaatacaggtgaacctgttcccctaaagccctagtagttagtt

SEQ ID NO: 309554 - DNA, 201 bp, Homo sapiens
tgcccctctgtgactctctggaacacgtctgtaagatggtcagccagaaggaaagaaacggcaaattaacccatatggaagcttgcatctattattaatgrtactgtgatttcatcaacggaaggcatgaactacacactccttgctctcagtagcaaggaataagacactgaacagtaaattcctatccatcatcattgg

SEQ ID NO: 309555 - DNA, 201 bp, Homo sapiens
ttttcagcatgttggccgggatggtctcaatctcttgactcgtgatctacccgcctcggcctcccaaagtgctgggattacaggcatgaaccaccgcaccyggcctcttttcttttttttgagacggtgtcttgctctgtcacccaggccggagtgtggtggtgatcatagctcacttgagcttctgggctaaagcgatcc

SEQ ID NO: 309556 - DNA, 201 bp, Homo sapiens
tataaagtttcacaactgacatgaataaaagtcaatgctgccatttttgtgtccctcctctgtgtcagatagtgtcctaggtatttcacataagatatttygcataagtcatttcctttaatttactcaatcctttataactcataacaggtgtcactgtctacttcatttctttgtctcatgggatgctatcaaagtagc

SEQ ID NO: 309557 - DNA, 201 bp, Homo sapiens; identical to SEQ ID NO: 64418

SEQ ID NO: 309558 - DNA, 201 bp, Homo sapiens; identical to SEQ ID NO: 64420

SEQ ID NO: 309559 - DNA, 201 bp, Homo sapiens
atgctggagtgcattggcgcgatctcggctgactgcaacctctgcctcccgaattcaagcgattctcctgcctcagcctcccgagtagctggaactatagrcacgtgccaccatgcccagctaacttttatatttttagtatattttcagcatgttggccgggatggtctcaatctcttgactcgtgatctacccgcctcg

SEQ ID NO: 309560 - DNA, 201 bp, Homo sapiens
catgagccaccacaaccagctagcaaagctcttatattcaaagaaatattggggaatgtgaaggcacagaaggcctcagtttgacattatctgtccatatmtataatgcatactatctttgcttctgacgagcttttacaatgttccctcagaatagaataatagggttttttttaatccttaaaagaatcttacgtagta

SEQ ID NO: 309561 - DNA, 201 bp, Homo sapiens; identical to SEQ ID NO: 64422

SEQ ID NO: 309562 - DNA, 201 bp, Homo sapiens
agatttgttatatatattaaagaacatatgcagtttcttagcattagaaacatttcatggactgttgctactcgttattgttgccatggtgaggtcaaaasgcttaatttcttaattctttcttttctattttgatagaccaccaagattgtaagacatttttgtttgtttgtttgtttgttttgttttgttttgtttttt

SEQ ID NO: 309563 - DNA, 201 bp, Homo sapiens
cagggttttgccatgttagccaggttggtcttgaactcctgacttcaggcgatctgcctcccttggcttcccaaagtgctggaattacaggtatgagatarcatacccggcctttttttcttttctttttttttttttttttgagtcagagtcttgctctcttgcccaggctggagtgcagtggtgccatcatagctcact

SEQ ID NO: 309564 - DNA, 201 bp, Homo sapiens
  misc_feature (1)...(201): n = A,T,C or G
tcagatctgtaaatcaaagcagtttttcttaatatttcaggaagcataaagatcattggtcacaagcctataaagaggacataatgccaacgaaaacatangtttgcttgtggctgaaattacattccatcagtatggaactgaagggtggatagaacagaaatatttgctcattggttgagcagacatttattgatcatc

SEQ ID NO: 309565 - DNA, 201 bp, Homo sapiens
tcacaagcctataaagaggacataatgccaacgaaaacataggtttgcttgtggctgaaattacattccatcagtatggaactgaagggtggatagaacasaaatatttgctcattggttgagcagacatttattgatcatctgcctctgtgcaattgctgtttgtattagttcattctcacactgctataaagatactac

SEQ ID NO: 309566 - DNA, 201 bp, Homo sapiens
gtgggtcatcttttgattcacatttcagctaaccaaacaaataaactcttagaaccttttctaacaccctgagttgcaacattaaatgcagaatccctgcwtagtgggcccaaatcagtaagttcaggctgatccaactttatgttccatccaccattatctcacacccttaatatccattcccatgcctgttctccagat

SEQ ID NO: 309567 - DNA, 201 bp, Homo sapiens
tgccaacgaaaacataggtttgcttgtggctgaaattacattccatcagtatggaactgaagggtggatagaacagaaatatttgctcattggttgagcasacatttattgatcatctgcctctgtgcaattgctgtttgtattagttcattctcacactgctataaagatactacccaagtctgggtaatttataatgga

SEQ ID NO: 309568 - DNA, 201 bp, Homo sapiens
ccatatcatatctggagccgggttttatgtggatgcaactcactcctcagagaccagggccatgtcagtggagcaggtaaaaagcctaagttctttgacartatttgttcataaattcagaacagccagaaccttggaaatgccctgggttcagaggtagctgggcatgctacggaaatttgctagctagcaaagacatct

SEQ ID NO: 309569 - DNA, 201 bp, Homo sapiens
ccagttacttcaaagtactttgtttttgtttttttgagaaagagtctcactctgtcacccaggctggagtgcagtggcctgatcttggctcactgcaacckctgcctcccaggttcaagtgattctcctgccttagccttcccagaaactggcactacaggtgcgtgccaccacacctgtagtgtggtggctaatttttgt

SEQ ID NO: 309570 - DNA, 201 bp, Homo sapiens
cattgcaaaatccaacgtgataatagttagatttgtgtgtatcgtatctgtcctcagtattggcaccacagtctatttgtaaacctcacttttccatcttmagttatgctacctcgattttttttcaccctggattttataataaccagcaatgaagattcactgtagggtgaaacttggcagtcaaagacttggcacatt

SEQ ID NO: 309571 - DNA, 201 bp, Homo sapiens
tgattgcgaactcctgggctcaagcagtcctcctgcctcagcctcccaaagtggtgctggggttatagcatgagccaccgtgcctggctgttttttttgtktgtttttttgtttttttttttaatttaaataagagcatttgtagatgttgcatcagagagaatgtgaaaaatatagaaatgtcatgtaaattaccgagtg

SEQ ID NO: 309572 - DNA, 201 bp, Homo sapiens
ttttctgcattattttccaaccaggactttatttttttaatgtatttttgttgtttaaagactatgctgatgatgaggattatatattcttccaaccactyttagtggtaactatacatatgaacccaaaagtctaatagtagtatagtgtgctgtgaattttctatgctgtctatgataaaagactggaataaataggag

SEQ ID NO: 309573 - DNA, 201 bp, Homo sapiens
gagaattaaagcatttcttgatgccttgtgcggtgatgcaagcgtgtagtcctagctacatgggagcctgaaatgggaggttcacttgatctcaggagttscaagtccagcctgagtaacatggtgagacctctgcttctttaaaaaaaacaaagaagaaagaaaaagaatgacttgatacacgggacatagattcaattc

SEQ ID NO: 309574 - DNA, 201 bp, Homo sapiens
accagtcctgtttgcaccattgggtatagctgctctcatcgttccttaccttcttccttgttctgtgaactctcttctctatgggggaaggccatgaatarcctcttgcctgtatgttgagaagagagcaacctccaagctgaatgcagagggaaaagggctccctccctgcacaggaagcgtgtattctagatacacact

SEQ ID NO: 309575 - DNA, 201 bp, Homo sapiens
tctcaaaaaaaacaaaaaaaattcttcttatggttctgttctttaaaaaggtttctttctatggttctatttttatggtttatctttacttacaatttatwgttcttgattcttttttttttaacttaaaaatgatgactgacacttcctaatttatgattaagaacttcccttcacaacacccccgcctccatttccgct

SEQ ID NO: 309576 - DNA, 201 bp, Homo sapiens
tgtatatatatacacagtagaagaagtgagtggaaaaagtagaaaaatgtaacatgatcggagtgggaaactgaagatggagatttcagagggggagcagtagttccctatgataacaagaactagaatataattatgagaacagaaaagtgtttgcagtggaagtagcaaagctggaattgagaagtgatgtccaggaac

SEQ ID NO: 309577 - DNA, 201 bp, Homo sapiens
tatgttttagagtacaattttttgttgtaacatcagacatcttggaaattattatgagtattaggttggtttcctcttacccctggttttttttttttggktatttattttttatttctggtaggcagttgtggcactacttacgtgggacactttatactaaattttttaattgtggtaaaatgtgcataacataaaatt

SEQ ID NO: 309578 - DNA, 201 bp, Homo sapiens
ttaaaacaatgtattttataatgttgccttgtatgatatgggatatatgtagcacatttactgagtaaggatgatactttttaaacattgtgaagtacctyataccttcaaaaatgtattacactaatacttttaaattttataaaatgttttagattcttaaaagcgttgcattctgcagttattatacagtgtaattgt

SEQ ID NO: 309579 - DNA, 201 bp, Homo sapiens
caaaaaaaacaaaaaaaattcttcttatggttctgttctttaaaaaggtttctttctatggttctatttttatggtttatctttacttacaatttattgtkcttgattcttttttttttaacttaaaaatgatgactgacacttcctaatttatgattaagaacttcccttcacaacacccccgcctccatttccgctgct

SEQ ID NO: 309580 - DNA, 201 bp, Homo sapiens
cagaagtcttagtgagggaaacaggagactgaggacacatggccacatgtcctctagtgtctctgtgaggtggacatggttatctcctgagaaaaaaagagtggatttagggcagcactgtgtagagcaggagaaaggctaggaatggctgtcaggtcaatgagagagatcttgacatggatgtgttatgtgcgagaccta

SEQ ID NO: 309581 - DNA, 201 bp, Homo sapiens
atgtagcacatttactgagtaaggatgatactttttaaacattgtgaagtacctcataccttcaaaaatgtattacactaatacttttaaattttataaartgttttagattcttaaaagcgttgcattctgcagttattatacagtgtaattgttctatatgtctattagaacataatcatttatcatgttcaagtattc

SEQ ID NO: 309582 - DNA, 201 bp, Homo sapiens
ttcttaaaagcgttgcattctgcagttattatacagtgtaattgttctatatgtctattagaacataatcatttatcatgttcaagtattctgcatttctrctaatttaaatatatatatatatatggagagagagagagagagagagagagtctgtctctctgttgcccaggctggagtgcagtggcatgattttggctc

SEQ ID NO: 309583 - DNA, 201 bp, Homo sapiens
acagaagtcttagtgagggaaacaggagactgaggacacatggccacatgtcctctagtgtctctgtgaggtggacatggttatctcctgagaaaaaaagagtggatttagggcagcactgtgtagagcaggagaaaggctaggaatggctgtcaggtcaatgagagagatcttgacatggatgtgttatgtgcgagacct

SEQ ID NO: 309584 - DNA, 201 bp, Homo sapiens
cttctctttccaacggaatcaatctgtcacttagccaatatatttggtttataatgttgagaactacatggtttttctgttacctattaagttctagttgkttacttttcaaatctgcttggttaattttgatcatttatgttcctttcaacatggtttcgattcaacctttaaaaaaatattaaacatacaatgtataac

SEQ ID NO: 309585 - DNA, 201 bp, Homo sapiens
catggaaatgagagggcatgacacagcgatggggtgaatgcaaacagaagtcttagtgagggaaacaggagactgaggacacatggccacatgtcctctartgtctctgtgaggtggacatggttatctcctgagaaaaaaagagtggatttagggcagcactgtgtagagcaggagaaaggctaggaatggctgtcaggt

SEQ ID NO: 309586 - DNA, 201 bp, Homo sapiens
tttcaaatctgcttggttaattttgatcatttatgttcctttcaacatggtttcgattcaacctttaaaaaaatattaaacatacaatgtataacttgtawttgataaatctaacttctactgcctttgttttactctgatatagtttactagttcttctggctgtcattgataggaggttatttccttatgttttagagt

SEQ ID NO: 309587 - DNA, 201 bp, Homo sapiens
ccgggttcaagcaattctcctgcctcagcctcccgattagccgggattacaggcgggtgccaccatgcccggctaatttttgtatttttagtagagacacrgtttcaccgtgttggccaggctggtctcgaactcctgacctcaggtgatccgctcacctcggcttcccaaactgctgggattacaggcgtgagccaccat

SEQ ID NO: 309588 - DNA, 201 bp, Homo sapiens
atgaaagtcagtagtcaactcccaggaatctcacaggaaaggagaaacttcccgcacccgtggcacagggaggcttaattggttctcctgtggtttataaraaaagctttgatcaggtgcggtggctcacacctgtaatcccaggactttgggaggctgaaacaggtggatcacctgaggtcaggagttcaagaccagcct

SEQ ID NO: 309589 - DNA, 201 bp, Homo sapiens
aactcctgggctcaagcaaccctcccagaggcttggcctcccaaagtgctgggattacaggcatgagccactcactgcatctggccttgcccctttttttttaactgcattttcctaatgtctaaaatatcagcctaattgcttcccttctgaagcaatctcccctcacgtgtgatcatgaaatttttaagagcattttaa

SEQ ID NO: 309590 - DNA, 201 bp, Homo sapiens
tgccaccatgcccggctaatttttgtatttttagtagagacacagtttcaccgtgttggccaggctggtctcgaactcctgacctcaggtgatccgctcayctcggcttcccaaactgctgggattacaggcgtgagccaccatgcccggccaatgcatattttctttggcccacattttaggtgtttattaataagtgtt

SEQ ID NO: 309591 - DNA, 201 bp, Homo sapiens
aaactcctgggctcaagcaaccctcccagaggcttggcctcccaaagtgctgggattacaggcatgagccactcactgcatctggccttgcccctttttttttaactgcattttcctaatgtctaaaatatcagcctaattgcttcccttctgaagcaatctcccctcacgtgtgatcatgaaatttttaagagcatttta

SEQ ID NO: 309592 - DNA, 201 bp, Homo sapiens
gcatggggaaaactgtcgccatgctctaatcacctcccatctgttccctccctcaatatgtagggattatggggattacaatttgagatgagatttgggtrgggacgtgaagccaaaccatatcactgttatagcttagagttgtacctagtgttccaagtatgggaatggagttagttatcaaaacaaaatctagttaca

SEQ ID NO: 309593 - DNA, 201 bp, Homo sapiens
aaactgtcgccatgctctaatcacctcccatctgttccctccctcaatatgtagggattatggggattacaatttgagatgagatttgggtggggacgtgragccaaaccatatcactgttatagcttagagttgtacctagtgttccaagtatgggaatggagttagttatcaaaacaaaatctagttacaagtacaact

SEQ ID NO: 309594 - DNA, 201 bp, Homo sapiens
tagagttgtacctagtgttccaagtatgggaatggagttagttatcaaaacaaaatctagttacaagtacaactctccttttcatcaattatggtgttgastttcccaggcaggtgtccaggcaggcagcagaccagagcaaggcaagggctagagtcagaatggaaaagtctctgagctccctgctagtggctgtcagac

SEQ ID NO: 309595 - DNA, 201 bp, Homo sapiens
cctcaagtgatccgcctgtctctgcctcccaaagtgctgggcttacaggcatgagccactgcacctggcctgattcttttcaactctggattaacaaaacrtggtagccaaaatcaagacttttcttggagagtctaccgtgtgatcttcaaaggacctggggagacttgtgtgggaaataccttttagatatactgtatt

SEQ ID NO: 309596 - DNA, 201 bp, Homo sapiens
tcaagtgatccgcctgtctctgcctcccaaagtgctgggcttacaggcatgagccactgcacctggcctgattcttttcaactctggattaacaaaacgtrgtagccaaaatcaagacttttcttggagagtctaccgtgtgatcttcaaaggacctggggagacttgtgtgggaaataccttttagatatactgtattgt

SEQ ID NO: 309597 - DNA, 201 bp, Homo sapiens; identical to SEQ ID NO: 64419

SEQ ID NO: 309598 - DNA, 201 bp, Homo sapiens
ttgtatttttagtacagatggggtttccccatgaaggccaggctggtcctgaactcctgacctcaagcaatccacccgcctcggcctcccaaagtgctggrattacaggtgtgagccaccacgcccagccttttcctaggactttatgagaggtggttggattgagagagcagtggataatctgtcaaagtggtttacttc

SEQ ID NO: 309599 - DNA, 201 bp, Homo sapiens
catatacacaactgaggtgccctgccattggcatcccctgggatccttgattcactgacgttagccatacgaatccagtgttcaaactcagaataataagyttagtttctgcattatcagtcagcataaataataaatccagaaaacgtgctgtatttgttgttgtttcctccatgggctttcccgccatctaatttgata

SEQ ID NO: 309600 - DNA, 201 bp, Homo sapiens; identical to SEQ ID NO: 64424

SEQ ID NO: 309601 - DNA, 201 bp, Homo sapiens
atataatacatatatgcctagatagtggattatatgaacttttatttgggatatagccagccgttttcagttgcttaggcagtcagcatcacgtatttgarggctactataaagacaccattattgtatacttgcgcctctattcttactcacaagcagtatgaagaatgataataaataattaacaatctggaacttctg

SEQ ID NO: 309602 - DNA, 201 bp, Homo sapiens
ccgtggcataaaatgattatcacgtgtcagtgacaaattaacaggtgcagtgactcatgcctataatcctaacactttgggagaccgagtcaggaggatcrtttgagcccaggagtttgagaccagcctgggcaacatatcaatacctcgtctctattaaaaataaaaaaattagtgaagtgagatggcatatttctgtgg

SEQ ID NO: 309603 - DNA, 201 bp, Homo sapiens
atgagtctcactgatgcaaaataaacactagatactatgtaactattgggaataaaggaggccttctgcccaccccacctctaacctgacgaagcccctgwtgaagtcaaaggaagataaatccacgcagtgctggaatatactgtggaacctcatgatatattcattatgagtcctcctctccagcacaccccagttagt

SEQ ID NO: 309604 - DNA, 201 bp, Homo sapiens
ttccatgaataataaccttttatatatacaacaaaattagtccatattcaaaatcagacagaacagataagtgcaaagggaaaaaagatttttaaaaagcyttaaaaattctacccccagagatgacctatattagcatctctgggtattttctttcagactattctccatgcatagtatcaatgtatttttcttcaaaaa

SEQ ID NO: 309605 - DNA, 201 bp, Homo sapiens
agtctatcctcagtcctcagattgttcaaatttcacatttgaagtgcaacagaacttttgacccatgtgtttgtagctctggctacccactttctcactakcttctgtgccggtgtatgtgagtgatgcttaagcctctcaggcatactctggaaaatgccagaagcctgctttgtttgttggtaaccagtcctgtttgca

SEQ ID NO: 309606 - DNA, 201 bp, Homo sapiens
ttgactactctaggtacctcatgtagatggaatcacataaagctttttgtgactgtttaaactaaattttagacttgagagacttagacccacacaggtgmtatgagttctgacccctcagcttagcaagtgcaggaatggggctatggattctcaagggagactttttctcaacttaccttcctttcactagaagacaag

SEQ ID NO: 309607 - DNA, 201 bp, Homo sapiens
actgaattaatttatgaaggtgtgtttcaatgtgtgaaatgaaataatatacctgagagttatttgaaactgtaaagcccaagacaaatggtaggtgcttktgttatcttgatcctacccacggatcaaattctttcctctgctccttagttctttctagctagggagcccacagacccttgtctaaattatcacttcatg

SEQ ID NO: 309608 - DNA, 201 bp, Homo sapiens
tgtgtttcaatgtgtgaaatgaaataatatacctgagagttatttgaaactgtaaagcccaagacaaatggtaggtgcttttgttatcttgatcctacccrcggatcaaattctttcctctgctccttagttctttctagctagggagcccacagacccttgtctaaattatcacttcatgcagacttcctttctcccaca

SEQ ID NO: 309609 - DNA, 201 bp, Homo sapiens
tgtttttcatgctcttaattagatgaaataagagagtgggatatcacatcattcattcattccacaaatacttgcatgtctaattaccatataccagacgytgggctgtagcctgaagaacaacccactctctgccttcaaagtcattatttaattataattatggtgatttttaaccttaaggttttctgtgaaaaacca

SEQ ID NO: 309610 - DNA, 201 bp, Homo sapiens
tgaaataatatacctgagagttatttgaaactgtaaagcccaagacaaatggtaggtgcttttgttatcttgatcctacccacggatcaaattctttcctstgctccttagttctttctagctagggagcccacagacccttgtctaaattatcacttcatgcagacttcctttctcccacacagagtgcattttgacatt

SEQ ID NO: 309611 - DNA, 201 bp, Homo sapiens
tgacgtcactccttccttatgatgtcattaaacatttctttagcgacccaagcagtcagagaactgaataagtgatggggggagatgcttgttaaaatatrgataatagcatactgaattattttatttttcattcccagttattctccaatatcaaaaatattgttcaatgaaagtcatgcctccgtgcaaaaagaatcc

SEQ ID NO: 309612 - DNA, 201 bp, Homo sapiens
acttaaaagcctccaatgggtcacctttgcctcaggcacaaaatccgaaggtcttggtcttctggttccctcgcctccctccaccttatctctcgttattyccagtatgcacacagtctctgagccaaagccacactgaccatgtctttgagtgccctgtattggttgtccttatatgcatctcacacatgctattctctc

SEQ ID NO: 309613 - DNA, 201 bp, Homo sapiens
ggctggaatgcagttgcgcgatctcggctcactgcagcctttgcctcctgggttccagcagttctcctacctcagcctcccaagtagctaggattacaggygcctgccaccatgcctggctaatttttgtatttttagtagagacgaggtctcaccatgttggccaggctggtctcaaactcctaacctcaggtaatccac

SEQ ID NO: 309614 - DNA, 201 bp, Homo sapiens
gtgtcctttaagactcaactcaaatgaatcaaagtgaatcaagtgaaaaaaattaagtgcttcattcttcgttcgcaatactgtgtatttatttgtacttmaatgttttttagcacatttaactataattattagcttaaacatcttccttctgcagactttaatttccttgagacagcatcttaaatttcttattcgtgt

SEQ ID NO: 309615 - DNA, 201 bp, Homo sapiens
aaattataaattaaactttatcataagtatgtatatatgggacaaaaacatagtatctacagggttaggtactatttgcggtttcacacatccactggggsccctggaacagattttctttggataagagggcactactgtggatagtaagggaaagttaaaaaaacaaaaacaaaacataaaaaggctatgtattcctat

SEQ ID NO: 309616 - DNA, 201 bp, Homo sapiens
ttgcaaagccagagagacttctgagaagcttttactggaatccatctgtgagatgatggtggttcctactaagatcgtgactgtgagaatgaaggggaaarggaatcaaagagctattaaagtggtggaatttacgggatttagaaactgagtgggtgtgggtgaggcaggagtcttggatgaaatctgagttcattctgt

SEQ ID NO: 309617 - DNA, 201 bp, Homo sapiens
tgaattttgcactcagtttgctttgtcaataagaagaatttaaaggaattcattcccttttttatttttaatttaattattttatttatttatttatttawattttggagacagggtctcgcttgctctgtcacctaggctggagtgcagtggcttgatcgtgactcactgcagcctcaacttcccgggctccaacaatcc

SEQ ID NO: 309618 - DNA, 201 bp, Homo sapiens
ttcttgtttcccgtcccaccccttattaatatctcataccacatactacttattttcaggactttcctttgaaaacctgtgtgatcactcacactattttmttcccctgaattttgcactcagtttgctttgtcaataagaagaatttaaaggaattcattcccttttttatttttaatttaattattttatttatttatt

SEQ ID NO: 309619 - DNA, 201 bp, Homo sapiens
accatcgctagagcagccatccattctgtacctatctgatggattattcacggttccagtgcatgaaaaagacatacatgaaagtatgagcatttcagaarggaggcagctagggaacatggctttagaaaaagcagtgcattcggaaaaacataccgaataaagtaacagaaaaaaataatcagggaggcagatgcaggc

SEQ ID NO: 309620 - DNA, 201 bp, Homo sapiens
aaaatatacatttaaaaatccattgtgcaagtatagctttcattgtttgttagtgatctataggtggtcagtaatatccatttcaagctaaaggaatcacygatgcatggatgccatctggaagttatctggtcaaccccttcatttcacagatgggaaaaacaggtgtggagtggttaaccaagttgcccaaacccacac

SEQ ID NO: 309621 - DNA, 201 bp, Homo sapiens
tgcccaaacccacacagctatttagtgaagagccatggattcttacctctgaacccatcattttaccaactagaccacaccacctcaagaatagccttccrgatgaaactatgagaggaatatagatattttacatgtttaaaacatttgtctgtagtttgccaggacttaaaagtaatacaaattttaagtgctttactg

SEQ ID NO: 309622 - DNA, 201 bp, Homo sapiens
agactcaactcaaatgaatcaaagtgaatcaagtgaaaaaaattaagtgcttcattcttcgttcgcaatactgtgtatttatttgtacttcaatgttttttagcacatttaactataattattagcttaaacatcttccttctgcagactttaatttccttgagacagcatcttaaatttcttattcgtgtctatattcct

SEQ ID NO: 309623 - DNA, 201 bp, Homo sapiens; identical to SEQ ID NO: 64423

SEQ ID NO: 309624 - DNA, 201 bp, Homo sapiens
agaaatccaggcaaatatctgacaaagtaaaatgcaccaaaattctgtatattcataaatagtgccaaataaaatgcaataaagttatggtgataattaataattaattgtggagtattccaaattatactattttgggcagacctgccttcctggtgaaagggaaacgctggccatgtgctctatccagtacattctacc

SEQ ID NO: 309625 - DNA, 201 bp, Homo sapiens
gaatgacaaaataaataaattcattcacatactgtggtggatctattttgataaatttcacaacctataaaatatattccttctcactcttccttagcttrccgatgtccttatgaatgaaattctccatggagctgatggaaccagtatcaagtgtggcattattggagaaattggttgctcctggcctttgactgagag

SEQ ID NO: 309626 - DNA, 201 bp, Homo sapiens
aagaaatccaggcaaatatctgacaaagtaaaatgcaccaaaattctgtatattcataaatagtgccaaataaaatgcaataaagttatggtgataattaataattaattgtggagtattccaaattatactattttgggcagacctgccttcctggtgaaagggaaacgctggccatgtgctctatccagtacattctac

SEQ ID NO: 309627 - DNA, 201 bp, Homo sapiens
aaagaaatccaggcaaatatctgacaaagtaaaatgcaccaaaattctgtatattcataaatagtgccaaataaaatgcaataaagttatggtgataattaataattaattgtggagtattccaaattatactattttgggcagacctgccttcctggtgaaagggaaacgctggccatgtgctctatccagtacattcta

SEQ ID NO: 309628 - DNA, 201 bp, Homo sapiens
cagctcatgcccaggctcagcttggttgtcctgttattatccatcctggacggagctccagggcaccatttcagattatccgaatattgcaagaagcaggygcagacatctccaaaacagtcatgtcacacctggataggtaagtaggctgtcttacaaatggatgcaaactgccatataattaatgcatgatcaaattaa

SEQ ID NO: 309629 - DNA, 201 bp, Homo sapiens
cttggatttagtgcaacttgttgatttttgatttggccagcaaaatgcctttttccttggccaatattaattgataaatactgaatacatttttaaaagamtgaatgacaaaataaataaattcattcacatactgtggtggatctattttgataaatttcacaacctataaaatatattccttctcactcttccttagct

SEQ ID NO: 309630 - DNA, 201 bp, Homo sapiens
gaaagaaatccaggcaaatatctgacaaagtaaaatgcaccaaaattctgtatattcataaatagtgccaaataaaatgcaataaagttatggtgataattaataattaattgtggagtattccaaattatactattttgggcagacctgccttcctggtgaaagggaaacgctggccatgtgctctatccagtacattct

SEQ ID NO: 309631 - DNA, 201 bp, Homo sapiens
gtttactgtgtattttctctcaacatgcagaacgtatggaaggaagaaagggaaagggagagggagggaggcagaaaggatggaaggaaggggagggagggagaagagaaagaaagaaggaaaaaaggaaacagaaagaaatccaggcaaatatctgacaaagtaaaatgcaccaaaattctgtatattcataaatagtgc

SEQ ID NO: 309632 - DNA, 201 bp, Homo sapiens
ccggccagaaaaattatttttaaccctaaagtgttatgcaaaatttccccacccctgccctagttattgtttactgtgtattttctctcaacatgcagaasgtatggaaggaagaaagggaaagggagagggagggaggcagaaaggatggaaggaaggggagggagggagaagagaaagaaagaaggaaaaaaggaaaca

SEQ ID NO: 309633 - DNA, 201 bp, Homo sapiens
aatatcagcatggataaaaagccaataagacaatgactgtctaatgttcccaactcatctccatgccaatttccgatccgaaacgatcccttacatttctmtaggtccttcattcctttcatgcaatgtctaatggggtatatttttccttcattcccttcatgcaatgtcttccttcccttcatgaaatgtctaatgggg

SEQ ID NO: 309634 - DNA, 201 bp, Homo sapiens; identical to SEQ ID NO: 64428

SEQ ID NO: 309635 - DNA, 201 bp, Homo sapiens; identical to SEQ ID NO: 64429

SEQ ID NO: 309636 - DNA, 201 bp, Homo sapiens
ttttttagcacatttaactataattattagcttaaacatcttccttctgcagactttaatttccttgagacagcatcttaaatttcttattcgtgtctatrttcctaacacagagaatagcacaagatagctgatagtagatgttcactgaattaatttatgaaggtgtgtttcaatgtgtgaaatgaaataatatacctg

SEQ ID NO: 309637 - DNA, 201 bp, Homo sapiens
cttgcattatagtaccagccttaagaaactgggtatatgataactgtattctgacaataaagagccgaatcactttggacaccatttttttttttagctgrtgacaatttattttccctaaatttatgcctgtttcttatatacagaaaagttacttactagttgagcaaaagtataaaatatgcagcagaggaaatgata

SEQ ID NO: 309638 - DNA, 201 bp, Homo sapiens
cttgaagatgggacttttcttcagtgtgaaatgcggtagctcttctgtgcgtcacaatcacttcactgacttttcaggggaagaagtgaaaaataccgacyttaaaagctgggaaagattggagtaagaaagaatagaattattcatggatggccaggcgcagtgtctcacactgtaatcccagcactttgggaggccaag

SEQ ID NO: 309639 - DNA, 201 bp, Homo sapiens
tttcaggggaagaagtgaaaaataccgaccttaaaagctgggaaagattggagtaagaaagaatagaattattcatggatggccaggcgcagtgtctcacrctgtaatcccagcactttgggaggccaaggcaggcagatcagctggcgcatcagctgaggtcaggagtttgagaccagcctggccaacatggcgaaaccc

SEQ ID NO: 309640 - DNA, 201 bp, Homo sapiens
tggatggccaggcgcagtgtctcacactgtaatcccagcactttgggaggccaaggcaggcagatcagctggcgcatcagctgaggtcaggagtttgagamcagcctggccaacatggcgaaaccctatctctactaaaaatacaaaattagctgggtgtggtggtgggcacttgtaatcccagctactcgggaggctgag

SEQ ID NO: 309641 - DNA, 201 bp, Homo sapiens
cagtctattgtgagtttcacagcctgctccttgttcttgttatttaatggtgccaacatctaatcagttgcccaagcaagacaggcttgtgattctcctcstgcgtggctgtccctgtggtgccaatgcctcatccttcactcttgctgctgtgctccgtaatctggctaataacagcgctatttacccagctgttagcct

SEQ ID NO: 309642 - DNA, 201 bp, Homo sapiens
ccagctgaatgtcaatttcacatgggtaagtcaccttgttagacgttcacggcgcaaggtgcttgttcctagatgtcactacgatggtgagtgtgtctccrtagtgtgagtgccttggaggaggaacggagttgccctggtgcctgggtgttcttacccctggaggggcagcctggtttaagaacacggcctcaacacaaa

SEQ ID NO: 309643 - DNA, 201 bp, Homo sapiens
tgagtgactatctaatcaagtcccagtttctcagtcttcagaattgagagctgctgggatcatggagggtattaaatgagataatacatataatgcacttygcacaatgtcagacacatagtaagttctcataattgtcagcatgatgataatgatgctaagtgactttactttttattttcaattggagctaaggctaaa

SEQ ID NO: 309644 - DNA, 201 bp, Homo sapiens
cattcatagacatcatctcttaaaaaaaagaaaaagaaaaaagaataagaaaaataaaatatctggttccatttggcataaactggctctgtggttgtacstattttgtcaaaacaataaccacctgagtacaaatacctctgtgcctgctcagcgtgagagctgtgaatgttagccatttccctgtctccttccaggcag

SEQ ID NO: 309645 - DNA, 201 bp, Homo sapiens
gtatgtacatgtggaaaatgggctcttcataataacagttcatctgtcgcattgtttctaggactattcttgataagaaagagctcttggagtttgctcarcttggctgctacttggaatatgatctctttggtactgaactacttcattaccaactcggcccagatattgacatgcctgatgataacaaaagaattagaa

SEQ ID NO: 309646 - DNA, 201 bp, Homo sapiens
gttggccaggctggtctcgaactcctgacctcaggtgatccgctcacctcggcttcccaaactgctgggattacaggcgtgagccaccatgcccggccaaygcatattttctttggcccacattttaggtgtttattaataagtgttggtcgacgcccaaaggagaaatctcagaggtcatggttgttatactatttttaa

SEQ ID NO: 309647 - DNA, 201 bp, Homo sapiens
gtggaaccttctgagaatgaaaagggcagagatgagatctcgtttttcaaattaagtaaaatttaaaggtcagttattccgacagtgtcttgacaataatrttgcacttgtcccaactctaggatgttactatagtgagtaatgttgcacttcgatctgggttgaaatactgttttcttcctccctctcccttttcctccc

SEQ ID NO: 309648 - DNA, 201 bp, Homo sapiens
tgttttcaaactatgattattacaatacttttgtaagttggagcaggggggaaaacagtatttatttaggcttgtgtttcctgactcgtctcctggtctcyggtttctccagctttcaacctgtattccaactgcctacttaatgatcgcccttatgtagttctcatcctctgggccaagcccttgtgtcagtatttttca

SEQ ID NO: 309649 - DNA, 201 bp, Homo sapiens
atgaatcatgctccttttactgtgtgggagatggcaggtgtgctgttcccatcatgctccagtctgctttgtgattttaatcaagagtggcaaaaatggcrtttagatgtttaattgcattctgtaagggcagaccatgttaaagtgtaaaataggtaaaggctgtatgcctggaagggataagaatcaaggctttcattt

SEQ ID NO: 309650 - DNA, 201 bp, Homo sapiens
gcacttgtcccaactctaggatgttactatagtgagtaatgttgcacttcgatctgggttgaaatactgttttcttcctccctctcccttttcctccctcrtttccgtttttttttttttttggagttggagtgttgctcttgttgcccaggctggagtgcaatggcacgattttggctcactgcaacctccgcctcccgg

SEQ ID NO: 309651 - DNA, 201 bp, Homo sapiens
gaagcataaagatcattggtcacaagcctataaagaggacataatgccaacgaaaacataggtttgcttgtggctgaaattacattccatcagtatggaaytgaagggtggatagaacagaaatatttgctcattggttgagcagacatttattgatcatctgcctctgtgcaattgctgtttgtattagttcattctcac

SEQ ID NO: 309652 - DNA, 201 bp, Homo sapiens
caaagtaaaatgcaccaaaattctgtatattcataaatagtgccaaataaaatgcaataaagttatggtgataattaataattaattgtggagtattccarattatactattttgggcagacctgccttcctggtgaaagggaaacgctggccatgtgctctatccagtacattctacccaccaaagccttccacgagtaa

SEQ ID NO: 309653 - DNA, 201 bp, Homo sapiens
gggaggttgaggtgggtggatcacctgaggtcaggagttcgagaccagtctggcctacatggtgaaacgcagtctctactaaaaatacaaaaattagccasgtgtggtagtgggtgcctgtaatcctagctactcgggaggctgacgcaggagaattgcttgaacctggaagatggaggttgcagtgtgcaattgcactcc

SEQ ID NO: 309654 - DNA, 201 bp, Homo sapiens
tctggtttcttgccatctacactggtgtcatctcagacaagacactacctgattttttctggataatagcgacatcctatggggctccctgcaggtacaaygggccccctcccttcatccattcgtacacggctgccaggctcttcacttcatattgtctgcaaaaaaccctgagatgccttcccgtttttttgtcagtta

SEQ ID NO: 309655 - DNA, 201 bp, Homo sapiens
tggggctccctgcaggtacaacgggccccctcccttcatccattcgtacacggctgccaggctcttcacttcatattgtctgcaaaaaaccctgagatgcsttcccgtttttttgtcagttagggtttcttcagagccaccaaactattaggttggtgcaaaaataattctggtttttaccatcacttcattttactcata

SEQ ID NO: 309656 - DNA, 201 bp, Homo sapiens
tatttttttatttttgttttttgagacacagtctcactctgtcacccaagctggagtacagtggcacgatctcggctcactgcaacctctgccttccaggktcaagcgattcttctgcctcatcctcctgagtagctgggactgcagcacgtgccaccacacccagttaatttttgtatttttagtaaagccagggtttca

SEQ ID NO: 309657 - DNA, 201 bp, Homo sapiens
attgctagttgaataaggcacactgggttgaggggaagatcttgagccagtggtcatagttgggacatcctgaggatctttccctgggaagtcacatttaygtctgtatgccttctgctgtctccaagtactggcattctgccttgatcacctcattaatagtactatgcttcaagtttagtatcattagggaaagctagt

SEQ ID NO: 309658 - DNA, 201 bp, Homo sapiens
acagtgtgcccccaatcacattgaagcaggtaaatatttttgaagatatacaatcttcattaggattcatgcatttgtatgggtgcacacacacacacacmtacactcattgtgacaacaacaacaacaaattgctacatggctatccaaaaggggcatttgggaccctgagagggaagagttaatgaatggccatcacct

SEQ ID NO: 309659 - DNA, 201 bp, Homo sapiens
gagccagtggtcatagttgggacatcctgaggatctttccctgggaagtcacatttacgtctgtatgccttctgctgtctccaagtactggcattctgccytgatcacctcattaatagtactatgcttcaagtttagtatcattagggaaagctagttaatcagtgttgcattagttaagtaagatggcaactctcaact

SEQ ID NO: 309660 - DNA, 201 bp, Homo sapiens
aaatttatcatcttttaaacattttgaaatgtacagttcagtaatgttgagtgtattcactccccatggcctgtgacaaacgccattctactttctgtctmtatgaatttgactactctaggtacctcatgtagatggaatcacataaagctttttgtgactgtttaaactaaattttagacttgagagacttagacccac

SEQ ID NO: 309661 - DNA, 201 bp, Homo sapiens
aacataaaatttatcatcttttaaacattttgaaatgtacagttcagtaatgttgagtgtattcactccccatggcctgtgacaaacgccattctactttstgtctctatgaatttgactactctaggtacctcatgtagatggaatcacataaagctttttgtgactgtttaaactaaattttagacttgagagacttag

SEQ ID NO: 309662 - DNA, 201 bp, Homo sapiens
gggaaagatcagtttcactgggcaaatttccccttccctgtgaaggacagaaaataccttcaatatggctaaagtgagaagcatttctgaaaaaaaatgcwatttaatatcctttgaagtgtcagtaaattttgagccaaatagaagcagagagtaagagaacacaaaaatagatcatttagaatctggagaagtacatga

SEQ ID NO: 309663 - DNA, 201 bp, Homo sapiens
gaagacagaatatatttgtattggtcagtttaatccaatgctcagaggctacaactaaatcaaaattgccatagacttcaaaggggcaaatggttaaaatrctgaccaaccttttttcagtggctttgtagcttatcaaatgcccctcacttgcagaccaactgattttgctctcagaatattttacttgtagtgagattc

SEQ ID NO: 309664 - DNA, 201 bp, Homo sapiens
ttttaattgtggtaaaatgtgcataacataaaatttatcatcttttaaacattttgaaatgtacagttcagtaatgttgagtgtattcactccccatggcstgtgacaaacgccattctactttctgtctctatgaatttgactactctaggtacctcatgtagatggaatcacataaagctttttgtgactgtttaaact

SEQ ID NO: 309665 - DNA, 201 bp, Homo sapiens
atccgaatattgcaagaagcaggcgcagacatctccaaaacagtcatgtcacacctggataggtaagtaggctgtcttacaaatggatgcaaactgccatrtaattaatgcatgatcaaattaagaatctacagtaatcagtcaatgcaatactaatcacgcagagaaaaccactaactatatggaaggtagtatttataa

SEQ ID NO: 309666 - DNA, 201 bp, Homo sapiens
ccttatgttttagagtacaattttttgttgtaacatcagacatcttggaaattattatgagtattaggttggtttcctcttacccctggttttttttttttggttatttattttttatttctggtaggcagttgtggcactacttacgtgggacactttatactaaattttttaattgtggtaaaatgtgcataacataaa

SEQ ID NO: 309667 - DNA, 201 bp, Homo sapiens
tggatagtaagggaaagttaaaaaaacaaaaacaaaacataaaaaggctatgtattcctatgtagttgggtacagaataataatctaaaatagcacatttrctgccgggctcagtgactcatgcctgtaatcccaacactttgggaggttgaggtgggtggatcacctgaggtcaggagttcgagaccagtctggcctaca

SEQ ID NO: 309668 - DNA, 201 bp, Homo sapiens
catcattaaactaagtctgtagtacccaagtactttagaggggaaaactcctttttagatgagtaagttctgttatttctagtaacaaattgaacttactsttttatactcacatcattaagagccatttcagaagtgtctgttactcgacttcaactatgttcttgttcttgtacattgtgtgcttaaaacttctagtat

SEQ ID NO: 309669 - DNA, 201 bp, Homo sapiens
tatatatatatggagagagagagagagagagagagagtctgtctctctgttgcccaggctggagtgcagtggcatgattttggctcactgcagcctcaccctcccaagttcaagtgatcctccaacctcagcctcccaagaagctgggactacaggcatgtgcctccacacctggctaatttttatattttttgtagagat

SEQ ID NO: 309670 - DNA, 201 bp, Homo sapiens
ttaaaaaaacaaaaacaaaacataaaaaggctatgtattcctatgtagttgggtacagaataataatctaaaatagcacatttgctgccgggctcagtgamtcatgcctgtaatcccaacactttgggaggttgaggtgggtggatcacctgaggtcaggagttcgagaccagtctggcctacatggtgaaacgcagtctc

SEQ ID NO: 309671 - DNA, 201 bp, Homo sapiens
tgcggtattgccaggcatggtcataaatgtcacaggttagaaatttctgtatgcatggaataaggatatgttcctgctaggatgcagcaatatttttatcrtcaccacacaatatttattaaaggtctctcagtacacacgccacagtagaagtcagtatctttacgacaagcacaataggttaatgagtaaaaagttgaa

SEQ ID NO: 309672 - DNA, 201 bp, Homo sapiens
tgtctattagaacataatcatttatcatgttcaagtattctgcatttctactaatttaaatatatatatatatatggagagagagagagagagagagagartctgtctctctgttgcccaggctggagtgcagtggcatgattttggctcactgcagcctcaccctcccaagttcaagtgatcctccaacctcagcctccc

SEQ ID NO: 309673 - DNA, 201 bp, Homo sapiens
ttattatacagtgtaattgttctatatgtctattagaacataatcatttatcatgttcaagtattctgcatttctactaatttaaatatatatatatatawggagagagagagagagagagagagagtctgtctctctgttgcccaggctggagtgcagtggcatgattttggctcactgcagcctcaccctcccaagttc

SEQ ID NO: 309674 - DNA, 201 bp, Homo sapiens
tatgccttataagccaatatatcgcaaacacctgagttccagataattgcagtggcttgctataaattggcctacaattctgtcaccctctgacctctgaygttgttttcaccttgtcttacgtgtgtactatacccttcacaaattttcccctttgttcccccaaatcatctcccctctcatcagccactttctctgaaa

SEQ ID NO: 309675 - DNA, 201 bp, Homo sapiens
tgttactatagtgagtaatgttgcacttcgatctgggttgaaatactgttttcttcctccctctcccttttcctccctcgtttccgtttttttttttttttggagttggagtgttgctcttgttgcccaggctggagtgcaatggcacgattttggctcactgcaacctccgcctcccgggttcaagcgattatcctgcct

SEQ ID NO: 309676 - DNA, 201 bp, Homo sapiens
cagaggctacaactaaatcaaaattgccatagacttcaaaggggcaaatggttaaaatgctgaccaaccttttttcagtggctttgtagcttatcaaatgyccctcacttgcagaccaactgattttgctctcagaatattttacttgtagtgagattccttttgtttccctattttaatcgcaaacagtccttgatattt

SEQ ID NO: 309677 - DNA, 201 bp, Homo sapiens
gcaggagaaaggctaggaatggctgtcaggtcaatgagagagatcttgacatggatgtgttatgtgcgagacctagttgagtctagaaatcatgattgcakgcctgtgtattggcaccaatgcacacgatttggtgattattttccaaagcaaaactgttttgcgttttggtagtggaaccagagaagttgtgtgcgtaca

SEQ ID NO: 309678 - DNA, 201 bp, Homo sapiens
aaggctaggaatggctgtcaggtcaatgagagagatcttgacatggatgtgttatgtgcgagacctagttgagtctagaaatcatgattgcatgcctgtgyattggcaccaatgcacacgatttggtgattattttccaaagcaaaactgttttgcgttttggtagtggaaccagagaagttgtgtgcgtacaagcagaaa

SEQ ID NO: 309679 - DNA, 201 bp, Homo sapiens
cagtctggcctacatggtgaaacgcagtctctactaaaaatacaaaaattagccaggtgtggtagtgggtgcctgtaatcctagctactcgggaggctgaygcaggagaattgcttgaacctggaagatggaggttgcagtgtgcaattgcactccagcctgggttacatgagtaaaattatgtctcaaaaaataataata

SEQ ID NO: 309680 - DNA, 201 bp, Homo sapiens
taaaatagtatatttgctgccttctgagaacttggagtgtgaagatacaggaaagttgaaaaagcaaacctggcttcaaaatccagagcccaaacactttsggaaaaacattttccatgctttttaataatttttagctcttccgatttgggaaaataatgtcatattccgtaaaagggctgtgctgtgatctcagaatta

SEQ ID NO: 309681 - DNA, 201 bp, Homo sapiens
acttttattttaaattacagaaattccatggtcaaccaactccacttctaatccatttttgaaatacagtaagttaacattaatttttggtggcacagaasatactttataactactattattcgtataaatacaaaattaacctgccaggcacggtggctcacgcctgtaatcccaacactttgggaggctgaggtgggt

SEQ ID NO: 309682 - DNA, 201 bp, Homo sapiens
gatacaggaaagttgaaaaagcaaacctggcttcaaaatccagagcccaaacactttgggaaaaacattttccatgctttttaataatttttagctcttcmgatttgggaaaataatgtcatattccgtaaaagggctgtgctgtgatctcagaattatctattgtcagaaatatattaaataaagattccaagaaaatgg

SEQ ID NO: 309683 - DNA, 201 bp, Homo sapiens
attttctactatacatatatccctgttcatgtaatatttaaacagatgtgaacaaatggagaagcttctggagaggtcatttagagcccatgtaacatctytccacatagactcatagaacttgtatctggaaggaagcttagaaatcactttgttccactcccttgttttattaatgagaaaactgaggtcctcagacta

SEQ ID NO: 309684 - DNA, 201 bp, Homo sapiens
taatcctagctactcggaaggccgaggcaggagaatcacttgaaccagggaggcagaggttgcagtgagccgagatcaaaccaccgtactccagcctgggkgacagagcaaaactccatctcaaaacaaaaaacttccaggaaaatgtttagctcttttttttttttagtgacttttaacctctattaactacacattttt

SEQ ID NO: 309685 - DNA, 201 bp, Homo sapiens; identical to SEQ ID NO: 64414

SEQ ID NO: 309686 - DNA, 201 bp, Homo sapiens; identical to SEQ ID NO: 64415

SEQ ID NO: 309687 - DNA, 201 bp, Homo sapiens; identical to SEQ ID NO: 64416

SEQ ID NO: 309688 - DNA, 201 bp, Homo sapiens
agtagatgtattgtttctttgtttatttttgttttattattttaatttacttgcccaggaacccgattcaatacaggtgaacctgttcccctaaagccctrgtagttagtttatactcagaggagactattccttgcctaagggcatctggaatttaaaatagtgcagtgcattcagtcattctcatctttcacaatctca

SEQ ID NO: 309689 - DNA, 201 bp, Homo sapiens
tttgttttcttactttattgtatgattcctttgtgcgagtctcctcaaaccctttgtggataaagcgggactaaaacaagcaagcatctagatgttcgctraatacatactgtgtaccaggcactgcagggaactgaggactgagaggcaaagatgtgactcaccgcaacgagctcaaagtctgatggaaaagacataaaa

SEQ ID NO: 309690 - DNA, 201 bp, Homo sapiens
aacttatcttagataattcccctaaactgagtgtgttccaaaagtaactgcagatcagaacttcaggatagtatacaaatttcaatgaggcaaaaaatcayagtggcacaaaagtcattacatgcacttataggacaggcatggttcttctctgctagtgcttgcattcctttgacctgcagatacaaagtctattcttcc

SEQ ID NO: 309691 - DNA, 201 bp, Homo sapiens
catttgatatatcggcaatattgttaaattacagttaaaactacagtgaaaggagatttttcacttgcataattatataagtatatagataaatcattgtstcaaataatattttaaatatgtgattttctgtgaattcttaggaagcaggtgatagcaatgattgaggtgctcaattaagctatggtactagaggaacct

SEQ ID NO: 309692 - DNA, 201 bp, Homo sapiens
gttagttatcaaaacaaaatctagttacaagtacaactctccttttcatcaattatggtgttgactttcccaggcaggtgtccaggcaggcagcagaccasagcaaggcaagggctagagtcagaatggaaaagtctctgagctccctgctagtggctgtcagacctttttctgttataactaccttttttttttttttac

SEQ ID NO: 309693 - DNA, 201 bp, Homo sapiens
ttcattctgttgtttgtttgtttgtttctgagagcatgaacttggctcatagcctcgagtccaggctcaagtgatccttctgcctcagcctcctgtgtagstgggaccacaggtgcatgtcaccatggctgactaattttgggatttgtttttctagagatgaggtctcactttgttgcccaagctgattgcgaactcctg

SEQ ID NO: 309694 - DNA, 201 bp, Homo sapiens
agcctaattgcttcccttctgaagcaatctcccctcacgtgtgatcatgaaatttttaagagcattttaacagaggaaccagcttccccaaagtcactccsctttatataagtttttgagcggataagaattcatagggattacttttttttttttttgagacaaggtctcactctgtcacccaggctggagtgcagcagt

SEQ ID NO: 309695 - DNA, 201 bp, Homo sapiens
caaccctcccagaggcttggcctcccaaagtgctgggattacaggcatgagccactcactgcatctggccttgcccctttttttttaactgcattttcctratgtctaaaatatcagcctaattgcttcccttctgaagcaatctcccctcacgtgtgatcatgaaatttttaagagcattttaacagaggaaccagcttc

SEQ ID NO: 309696 - DNA, 201 bp, Homo sapiens
actcctgggctcaagcaaccctcccagaggcttggcctcccaaagtgctgggattacaggcatgagccactcactgcatctggccttgccccttttttttyaactgcattttcctaatgtctaaaatatcagcctaattgcttcccttctgaagcaatctcccctcacgtgtgatcatgaaatttttaagagcattttaac

SEQ ID NO: 309697 - DNA, 201 bp, Homo sapiens
gctcactgcagcctctggcttccaggctcaagcaatactcccacctcagcctctcaagtagctgggactataggcacacatcaccatgcctggctaatttktgtgtttttagtagagatgggctggccatattgcacaggctggtatcaaacccttgagctcaagcagtctgcctgccttggcctcccagagtgctgggat

SEQ ID NO: 309698 - DNA, 201 bp, Homo sapiens
cactgcagcctcagcctcaacctcgcaggttcaagtgatcctcccacctcagcctccagagtagcttggaccacaggagtgccccaccatgcccagctaayttttgtagagacaaggtgttgctatgtttcccaggctggtctcaaacttctagactcaagcaattgtcccacctcagcctctcaaagtcctggaattaca

SEQ ID NO: 309699 - DNA, 201 bp, Homo sapiens
aagcagtcctcctgcctcagcctcccaaagtggtgctggggttatagcatgagccaccgtgcctggctgttttttttgtttgtttttttgtttttttttttaatttaaataagagcatttgtagatgttgcatcagagagaatgtgaaaaatatagaaatgtcatgtaaattaccgagtgctgggcttggcacatggtaat

SEQ ID NO: 309700 - DNA, 201 bp, Homo sapiens
caagcagtcctcctgcctcagcctcccaaagtggtgctggggttatagcatgagccaccgtgcctggctgttttttttgtttgtttttttgtttttttttttaatttaaataagagcatttgtagatgttgcatcagagagaatgtgaaaaatatagaaatgtcatgtaaattaccgagtgctgggcttggcacatggtaa

SEQ ID NO: 309701 - DNA, 201 bp, Homo sapiens
tcaagcagtcctcctgcctcagcctcccaaagtggtgctggggttatagcatgagccaccgtgcctggctgttttttttgtttgtttttttgtttttttttttaatttaaataagagcatttgtagatgttgcatcagagagaatgtgaaaaatatagaaatgtcatgtaaattaccgagtgctgggcttggcacatggta

SEQ ID NO: 309702 - DNA, 201 bp, Homo sapiens
caatggctcatgcctataatcccattactttgggggccaaggtgggaggatcccttgagtccaggagttcaaaaccagcctgggcaacacagggagacccctttctctatagaaaataaaaaaaataattgggtgtggcaacgtgcacttgtagtcccaactactcaggaggctgaggtgggaggatctcttgagcccagg

SEQ ID NO: 309703 - DNA, 201 bp, Homo sapiens
gagccgagatcaaaccaccgtactccagcctgggtgacagagcaaaactccatctcaaaacaaaaaacttccaggaaaatgtttagctcttttttttttttagtgacttttaacctctattaactacacatttttgttgttcttttctagtgctaattccacttctatttataattctttgcttctgctttaatttttgtt

SEQ ID NO: 309704 - DNA, 201 bp, Homo sapiens
gttacctgtagtcaaccacagtctgaaaatattaaggtattttaagacagaaagagagagaggagagaaaccgcattcacgtaagttttattccagcataktgttataattcttctattttattattagttattgttgctaatcttttactgtgcctaaattataaattaaactttatcataagtatgtatatatgggaca

SEQ ID NO: 309705 - DNA, 201 bp, Homo sapiens
gttttgctttttgtggtttcagttacctgtagtcaaccacagtctgaaaatattaaggtattttaagacagaaagagagagaggagagaaaccgcattcaygtaagttttattccagcatattgttataattcttctattttattattagttattgttgctaatcttttactgtgcctaaattataaattaaactttatca

SEQ ID NO: 309706 - DNA, 201 bp, Homo sapiens
cagagcaaggcaagggctagagtcagaatggaaaagtctctgagctccctgctagtggctgtcagacctttttctgttataactaccttttttttttttttacaccaaacaggctaggttagaccatctaaaaacaggtatctgcactgattgtttgtttgagacagaattttgccctgtcacccaggttgcagtgcagtg

SEQ ID NO: 309707 - DNA, 201 bp, Homo sapiens
ttgcggtttcacacatccactggggcccctggaacagattttctttggataagagggcactactgtggatagtaagggaaagttaaaaaaacaaaaacaamacataaaaaggctatgtattcctatgtagttgggtacagaataataatctaaaatagcacatttgctgccgggctcagtgactcatgcctgtaatcccaa

SEQ ID NO: 309708 - DNA, 201 bp, Homo sapiens; identical to SEQ ID NO: 64430

SEQ ID NO: 309709 - DNA, 201 bp, Homo sapiens
tatagacttcatctcccggctccaaatgaagaaccacactgttactggcatagtcgtaattctgatcagcatcttgggcaattgcactagcacgcacctaygtgaaacagacaagaattaggatgcgtaaatgagaattctcaagttttcttttttgccattcatgtagcatcacaagctgacttgctgccatagtacaga

SEQ ID NO: 309710 - DNA, 201 bp, Homo sapiens
gtttgtttctgagagcatgaacttggctcatagcctcgagtccaggctcaagtgatccttctgcctcagcctcctgtgtaggtgggaccacaggtgcatgycaccatggctgactaattttgggatttgtttttctagagatgaggtctcactttgttgcccaagctgattgcgaactcctgggctcaagcagtcctcctg

SEQ ID NO: 309711 - DNA, 201 bp, Homo sapiens
ttcagtaaaacatcttctactttgtggcttgtttcatttctattccactataatgatatttccctgaataacatagcaagtgatttagtggttttgtaaasctgcactatgtaataatgcatgatttggggtacaatatgctggattttatcacttggcaaaatgagagaaatgagacagaagtcaagaatttccatgcat

SEQ ID NO: 309712 - DNA, 201 bp, Homo sapiens
gaatttgaaatagctcttgagttcataactcgttgcctgcctgtgtgttttggttgggggattcaaaatgtatatgttactattttacctgtgacattacwataagcatctgatggatttacactagtaacattgatcttttcccattttactcccttttactgattataaatgttataaacattaaaaactggaaaatac

SEQ ID NO: 309713 - DNA, 201 bp, Homo sapiens
ctttaattaaggtataaactagttgtgatactttccttctctttattcggctcaaatgagtctcactgatgcaaaataaacactagatactatgtaactaytgggaataaaggaggccttctgcccaccccacctctaacctgacgaagcccctgatgaagtcaaaggaagataaatccacgcagtgctggaatatactgt

SEQ ID NO: 309714 - DNA, 201 bp, Homo sapiens
tatttgtgcagtgacattaatacgtgacataattatttcaccagtctattgtgagtttcacagcctgctccttgttcttgttatttaatggtgccaacatmtaatcagttgcccaagcaagacaggcttgtgattctcctcctgcgtggctgtccctgtggtgccaatgcctcatccttcactcttgctgctgtgctccgt

SEQ ID NO: 309715 - DNA, 201 bp, Homo sapiens
cgcaccactgcactccagcctgggtgatagagtgagactccatccgaaaaaaaaaaaaaaaaaaaaaaaaaaaacagttagttctcctgtaagcattcctrtgtccttaatatcactttctgttcctgccttgcatctccgcatctttttcttcgtctctggccgaatgctgtaaacgctcataaatatcaagtaataaga

SEQ ID NO: 309716 - DNA, 201 bp, Homo sapiens
cccagctacttgagaggctgaggcaggaaagttgtttgaacctgggagttagacccttaacagcccaagaggagaaattggtaggaatggtatcaagacargtgcttcagaatagaagttgcataacaaccagttaatagaggaccttggttaaaaaagaaaatgatagtcttcaaaaatatttttgcaaaacttttttca

SEQ ID NO: 309717 - DNA, 201 bp, Homo sapiens
ggtgacaactgtaatcccagcagtttgagaggccgaggcaggtggatcatgaggtcaggagttcgagaccagcctggccagcatggtgaaactccgtctcygctaaaaatacaaaaaattagctgggcatggtggcgtgcacctgtaatcccagctactcaggaggctgaggcaggagaatcgcttgaacccaggaagcag

SEQ ID NO: 309718 - DNA, 201 bp, Homo sapiens
cctgggtgacaaagtgagactccatctcaaaaaacaaaacaaaacaaatttatttctcatcattctgaaggctgagaagtctaagattgaagccctggcakatttggtgtctgggagggcctatgtcctggtttgcagatggtcatcttgctgtgtgttcacatggtggaaggaaggaggaagctctttggggtctttttt

SEQ ID NO: 309719 - DNA, 201 bp, Homo sapiens
tattgcctagtgatatacatatatgtatacactacacctatatatacacatatgtatatatttatgtatatacacacacatatgtattttttttctgttamacaataaagatacattaccagatttccatttggctgcagtttcaatatatctctctagaatgggtcagaacagaatggaaaggttgacctgacatcagac

SEQ ID NO: 309720 - DNA, 201 bp, Homo sapiens
cctgacctcaaatgatccacctgcctcagcctcccaaagtgctgggattacaggtgtgagcccccatgctcagccaatatttgtaatattcatttcttagwtgacttcacactagtgtttagttatccagagggggtcatatcactatatgtcagttaaaaaaatgaataactacacacacacacacacacacacacacac

SEQ ID NO: 309721 - DNA, 201 bp, Homo sapiens
agctgggcctgacatcatttgggatcttggctggactagaatgtccagggtaactcacttatctgctaccttcacagggacggcctcaaggctgaaatgaytgggggccctgggatggctggagactctctttctctccatattgtctcagggcctcttctccatgtaggaaggtagccagattcttacattgcaactcgg

SEQ ID NO: 309722 - DNA, 201 bp, Homo sapiens
cacacacacacacacacatgcacacacacacacacacaccccatagtaagaaagtaagcagttgtcatgattaccatagttcctttctctttgatcatgtsattcaaattgtctaaaataactgtaaagatttaatcctgcttactatatatagttaccctctgacttagcagttaaaaatctccacaagtgaatcctttc

SEQ ID NO: 309723 - DNA, 201 bp, Homo sapiens
ttcatcgaaaacgtcatttccagtactgcttatccatggataatgaggacctcctgtagctgtagtcactttggtgcatcgtttccaaaaacctaatgagytgtgatgtcaattgcagctgtcaatctacttttaatcacaggcctcaaatgaagaaattcatttagaggataagcaaattacagcttcagttttgttcat

SEQ ID NO: 309724 - DNA, 201 bp, Homo sapiens
aggcaggtgtccaggcaggcagcagaccagagcaaggcaagggctagagtcagaatggaaaagtctctgagctccctgctagtggctgtcagacctttttytgttataactaccttttttttttttttacaccaaacaggctaggttagaccatctaaaaacaggtatctgcactgattgtttgtttgagacagaattttg

SEQ ID NO: 309725 - DNA, 201 bp, Homo sapiens
tcattctcacactgctataaagatactacccaagtctgggtaatttataatggaaagaggtttaattgactcatagttctgcctggctggggaggcctcakgaaacgtaaaattgtggtggaaggggaatcacgcatgtcttacatggcagcaggagagagagggcaagtgagagcagggaaaactgcctcataaaaccat

SEQ ID NO: 309726 - DNA, 201 bp, Homo sapiens
tcctgacatttactgcactctgctttgtatcgtaagtatcctatgaatatataaaaacgatgagtgactcattgaatgcttaccatatatgtgctaaggtaggcactgtgttggtggctcctctcctagggccaggattgtttctttttcatcttcgtttccctgcatatcttcagttgaagttagtagatcctcaggaaa

SEQ ID NO: 309727 - DNA, 201 bp, Homo sapiens
ctcctgacatttactgcactctgctttgtatcgtaagtatcctatgaatatataaaaacgatgagtgactcattgaatgcttaccatatatgtgctaaggtaggcactgtgttggtggctcctctcctagggccaggattgtttctttttcatcttcgtttccctgcatatcttcagttgaagttagtagatcctcaggaa

SEQ ID NO: 309728 - DNA, 201 bp, Homo sapiens
tctcctgacatttactgcactctgctttgtatcgtaagtatcctatgaatatataaaaacgatgagtgactcattgaatgcttaccatatatgtgctaaggtaggcactgtgttggtggctcctctcctagggccaggattgtttctttttcatcttcgtttccctgcatatcttcagttgaagttagtagatcctcagga

SEQ ID NO: 309729 - DNA, 201 bp, Homo sapiens
tctcactctgttgcccaggttcgtctccaactccaaggctcaagtgatcctcccacctcggcctcccaaaatgctaggatcacaggcatgagccaccacamccagctagcaaagctcttatattcaaagaaatattggggaatgtgaaggcacagaaggcctcagtttgacattatctgtccatatctataatgcatacta

SEQ ID NO: 309730 - DNA, 201 bp, Homo sapiens
ctctcctgacatttactgcactctgctttgtatcgtaagtatcctatgaatatataaaaacgatgagtgactcattgaatgcttaccatatatgtgctaaggtaggcactgtgttggtggctcctctcctagggccaggattgtttctttttcatcttcgtttccctgcatatcttcagttgaagttagtagatcctcagg

SEQ ID NO: 309731 - DNA, 201 bp, Homo sapiens
tctctcctgacatttactgcactctgctttgtatcgtaagtatcctatgaatatataaaaacgatgagtgactcattgaatgcttaccatatatgtgctaaggtaggcactgtgttggtggctcctctcctagggccaggattgtttctttttcatcttcgtttccctgcatatcttcagttgaagttagtagatcctcag

SEQ ID NO: 309732 - DNA, 201 bp, Homo sapiens
ttgggtggggacacagccaaaccatatcagtacctctctcctgacatttactgcactctgctttgtatcgtaagtatcctatgaatatataaaaacgatgmgtgactcattgaatgcttaccatatatgtgctaaggtaggcactgtgttggtggctcctctcctagggccaggattgtttctttttcatcttcgtttccc

SEQ ID NO: 309733 - DNA, 201 bp, Homo sapiens
gtctaaatatagttgagtttttgttagtaagtatttgctttgcacttagatatgctgtatatttcagagttatttatttatttatttatttatttatttayttacttatttgagaccaagttttgctctccttactcaggctggggtgcaatgcaccatcttggctcaccacaacctccgcctcccgggttcaaccgagtc

SEQ ID NO: 309734 - DNA, 201 bp, Homo sapiens
ggctagaagcagctggtgcaactcagcttctacgcgggcaaacttctcctcattgatggaggcctccagcaggacagaggcaggcggcggccagggcaagycctcatagcagtccacagggaaggggtgcaccacagtacgcagctcagcctgtgccactgagtcccgcagcagctccttgaggcccgccatggacagtgg

SEQ ID NO: 309735 - DNA, 201 bp, Homo sapiens
aaggacctgctcggccgctactttgaggaagaggaagggcaggagccgggaggcatggaggacgcacagggccccgagccagggcaggccagagtgagtgyagtaaggccaggcagctcatcggggttgcaggttccctgggctgcatggggcttgctctgtggatgcagtgccacgggagctcagaggaagcctgatgtg

SEQ ID NO: 309736 - DNA, 201 bp, Homo sapiens
catccgccagttcctgtccctgaggccagaggagaagttctccagcagggctgtggcccgcatcttccacggcatcggtgaggcctgggaggccccacccrctgcaggctggggctgggggctggggcaggtgaggcctgggaggctccacccgctgcaggctggggctggggctcacggctgtgtcttggctccaccgta

SEQ ID NO: 309737 - DNA, 201 bp, Homo sapiens; identical to SEQ ID NO: 64461

SEQ ID NO: 309738 - DNA, 201 bp, Homo sapiens
gttgtctcctgcaggcgccagagccccgctgctgggggccccatctgaatcgggctgcgaccaagagtccacagcctacgccagggcggagccgccagggytcggtgccggactacgggcagcggctcaaggccaatctgaaaggcaccctgcaggtgaggagtgggcaggcagtgagtccacgctaggtccacagctgct

SEQ ID NO: 309739 - DNA, 201 bp, Homo sapiens
agacatctgccctggagggtgggtccggccaacactgtggagagggcgcagtgctcttttgggggacacttatgttccaagcaacaggccttccaggtacycctggtccaggccctaccctagctcccctgaaggagggtggcagggacgacgatggctgtcactcttttctgctttggaaaaagtagcccagaggaaggg

SEQ ID NO: 309740 - DNA, 201 bp, Homo sapiens
gccccgccgccccagcctcctcccacttccctgtttggcggagtggcgggagccacggagtcgcggccaggcctccgtggggcacagaacttgggaggggsactgggcaaagtgaagaagggccgggcctcgctccaggtgcgggaggggtggctgggagcgcttctgccgccacaacagccttttctggcctgtgcccct

SEQ ID NO: 309741 - DNA, 201 bp, Homo sapiens
gttccaggccctggagcagctggggcaccaagcctttcgccctgggcaggagcgtgcagtcatgcggatcctgtctggtgagcgtggctgccagggctgasgctgggctgaggccaggctgcagaaccctgctgctgactcccgccccatccaggcatctccacgctgctggtgctgcctacaggtgccggcaagtccctg

SEQ ID NO: 309742 - DNA, 201 bp, Homo sapiens
gcgcggcggggcggcgggggcgagaagacaccgggtcggcaggggcccaggccccaccctgaccccgcctcccgctcgcccacgcagcgctctaccgggartaccgcactctgaagcgtaccacgggccaggccggcggcgggctccgcagctccgagtcgctccccgcggcggccgaagaggtacccaggccccgccgcc

SEQ ID NO: 309743 - DNA, 201 bp, Homo sapiens
tgactcccgccccatccaggcatctccacgctgctggtgctgcctacaggtgccggcaagtccctgtgctaccagctcccagcgctgctctacagccggcrcagcccctgcctcacgttggtcgtctctcccctgctgtcactcatggatgaccaggtgtgcacacagggccctgggcacacgtacacagccaagaaccag

SEQ ID NO: 309744 - DNA, 201 bp, Homo sapiens
cctcagggcagttggcaggtgagcagtcagcttctggcccagagccttcactgaggggttggggtgactcaagtcatggtgatcaacatctgtgtctgcaragacgccggctgaggtgttccaggccctggagcagctggggcaccaagcctttcgccctgggcaggagcgtgcagtcatgcggatcctgtctggtgagcg

SEQ ID NO: 309745 - DNA, 201 bp, Homo sapiens
atttgcaggtgtctggcctgccaccgtgtctcaaggcggcctgcatacactcgggcatgaccaggaagcaacgggaatctgtcctgcagaaggtgggggcytcatgggcctaggggtgagggaggcagcgggcgggcacctgggctgtgcctctgatcttgctgccttcagattcgggcagcccaggtacacgtgctgatg

SEQ ID NO: 309746 - DNA, 201 bp, Homo sapiens
agcgggaagggccacgtgtgtaccaactcgcgcagtaccactgtcttcttgtccatgaaggccaccttgaacagcagggggaagagttcgcgtggcagcargggcagggcctggcaggcagctggctggcactgcagcacctgccgtgtgctcaagaacacaagcgtgtgcatggtgctgggccgggcagacggccacctg

SEQ ID NO: 309747 - DNA, 201 bp, Homo sapiens
ccccgcggcggccgaagaggtacccaggccccgccgccccagcctcctcccacttccctgtttggcggagtggcgggagccacggagtcgcggccaggcckccgtggggcacagaacttgggagggggactgggcaaagtgaagaagggccgggcctcgctccaggtgcgggaggggtggctgggagcgcttctgccgcca

SEQ ID NO: 309748 - DNA, 201 bp, Homo sapiens
ctgcctgcatctgacatgctttccggcaggtgtgcggcgtgggacaggggtgcttgtggagttcagtgagctggccttccaccttcgcagcccgggggacytgaccgctgaggagaaggaccagatatgtgacttcctctatggccgtgtgcaggcccgggagcgccaggccctggcccgtctgcgcagaaccttccaggc

SEQ ID NO: 309749 - DNA, 201 bp, Homo sapiens
aacagccttttctggcctgtgcccctgttgtctcctgcaggcgccagagccccgctgctgggggccccatctgaatcgggctgcgaccaagagtccacagyctacgccagggcggagccgccagggctcggtgccggactacgggcagcggctcaaggccaatctgaaaggcaccctgcaggtgaggagtgggcaggcagt

SEQ ID NO: 309750 - DNA, 201 bp, Homo sapiens
cctggttctcctctcccctgagggactaggatggacatggcagcagctctgggatgacttggggaagggccagggctgggctggcgtatgacggctgtcgytcctgcatttgcaggtgtctggcctgccaccgtgtctcaaggcggcctgcatacactcgggcatgaccaggaagcaacgggaatctgtcctgcagaaggt

SEQ ID NO: 309751 - DNA, 201 bp, Homo sapiens
cctgggctgtgcctctgatcttgctgccttcagattcgggcagcccaggtacacgtgctgatgctgacacctgaggcactggtgggggcgggaggcctccytccagccgcacagctgcctccagttgcttttgcctgcattgatgaggcccactgcctctcccagtggtcccacaacttccggccctgctacctgcgcgtc

SEQ ID NO: 309752 - DNA, 201 bp, Homo sapiens
tcccactgaccatctgcctgtcttccccaaaggtcgtgcccccaaaaccacagccgaggcctaccacgcgggcatgtgcagccgggaacggcggcgggtayagcgagccttcatgcagggccagttgcgggtggtggtggccacggtggcctttgggatggggctggaccggccagatgtgcgggctgtgctgcatctggg

SEQ ID NO: 309753 - DNA, 201 bp, Homo sapiens
gcgggcactcccaatacagcttaccgtacaggctttggacatgccggaggagggtgaggaacctggggtaagccacaggggtgtggaggggctgtccccgygtccgctgagccctgctctgcccccagccatcgagactttgctgtgctacctggagctgcacccacaccactggctggagctgctggcgaccacctatac

SEQ ID NO: 309754 - DNA, 201 bp, Homo sapiens
cttgggcctccgaaaggtgggaagagcaaggactggccggcagtgccgacggggctgccccgcgaagggcggggcgacaggctggatggcagttgttgccsggtggccatgttgggggtgacagcagagataaggataagggtgaccaacgtggacagaaaaaaaaacagccacaaattcaacttccaggcacatgtgtac

SEQ ID NO: 309755 - DNA, 201 bp, Homo sapiens
cagcagctgcctgaggacccagggcaaggcagcagctccgtggagtttgacatggtcaagctggtggactccatgggctgggagctggcctctgtgcggcrggctctctgccagctgcagtgggaccacgagcccaggacaggtgcgcctctccccaccccacaccgccctggacgctgcctgcctgcatctgacatgctt

SEQ ID NO: 309756 - DNA, 201 bp, Homo sapiens
caggtgggtgtgtgtgctctggggaccctgcagggccctggctgctgactgcccacgccgacccctcctcactccccaccgcccacgccgacccctcctcwctccccaccgcccacgccgacccctcctctctccccaccgcccacgccgacccctcctcactccccaccgcccacgccgacccctcctcactccccaccg

SEQ ID NO: 309757 - DNA, 201 bp, Homo sapiens
agatatgtgacttcctctatggccgtgtgcaggcccgggagcgccaggccctggcccgtctgcgcagaaccttccaggcctttcacaggttgggaggaggygggcggggcctgggaccatccaccctcccgcagtgatcagctctgacaggctcctccccacagcgtagccttccccagctgcgggccctgcctggagcag

SEQ ID NO: 309758 - DNA, 201 bp, Homo sapiens; identical to SEQ ID NO: 64471

SEQ ID NO: 309759 - DNA, 201 bp, Homo sapiens
actgcacaggctgttttagcagcaccctcaagccacctgcctaacgctgctctcccacagagaacccatggcgctgtgactgcgccctgcactggctgggkgcctggatcaaggagggcggccagcggctgctcacctccagggacaggaagatcatgtgtgcagagcccccgcgcctggcgctccagagtctcctggacg

SEQ ID NO: 309760 - DNA, 201 bp, Homo sapiens; identical to SEQ ID NO: 64472

SEQ ID NO: 309761 - DNA, 201 bp, Homo sapiens
tggtggtgccacagtcacaaccaaggagtcttgtttcctgaacgagcagttcgatcactgggcagcccagtgtccccggccaggtgagacatctgccctgragggtgggtccggccaacactgtggagagggcgcagtgctcttttgggggacacttatgttccaagcaacaggccttccaggtacccctggtccaggccc

SEQ ID NO: 309762 - DNA, 201 bp, Homo sapiens
gtggtgccacagtcacaaccaaggagtcttgtttcctgaacgagcagttcgatcactgggcagcccagtgtccccggccaggtgagacatctgccctggarggtgggtccggccaacactgtggagagggcgcagtgctcttttgggggacacttatgttccaagcaacaggccttccaggtacccctggtccaggcccta

SEQ ID NO: 309763 - DNA, 201 bp, Homo sapiens
catcggggacgcacaggctatggggcagaggcccatcaccttcctgcgccaggtgaggctcctgcactgcccggagcacccccccacccccagcccatgtrccctggcctcagcactccgtcttcccaggtcttggccctctgtgttaaccctgatcttctgagcagccccaacttccctgacgatgccaagaaaagggcg

SEQ ID NO: 309764 - DNA, 201 bp, Homo sapiens
ggtcagccctgacttggccaacgaggacggcctgacggccctgcaccaggtcagcctgcactgggtgtgggcagggtgggggctggcccccgtgctctggycgctcacgtggcacggtttgcagtgctgcattgatgatttccgagagatggtgcagcagctcctggaggctggggccaacatcaatgcctgtgacagtga

SEQ ID NO: 309765 - DNA, 201 bp, Homo sapiens
  misc_feature (1)...(201): n = A,T,C or G
gcatcttgcaggcgtgtgggggccacagtctgggtgagagccagggccaggaggaagcagagggccgccctgccactggaggagggaagtcccttgggagngctgaggagaacttcacctgtacttcccatcctgtcctgcccgagtccaggggcctacagcgtcagctccggcatccagctgatccgggaggacgtggcg

SEQ ID NO: 309766 - DNA, 201 bp, Homo sapiens
ttgtacctgagctgcccccaatccactatactgacccatttcccacccccatcccaggaaactgctgcctctgttgaggtcggtgctgcgcttccgcctcrggggcctagcctgtcagactgccttggtcttccacctggacaccctgggggccagcatggacgctggcacaatcttgagaggtgaggggctggccttgag

SEQ ID NO: 309767 - DNA, 201 bp, Homo sapiens; identical to SEQ ID NO: 64475

SEQ ID NO: 309768 - DNA, 201 bp, Homo sapiens
gctggggctggaggaggcaggggctgggctgagcgggagtgggcagcgctgtgtcctggcctggggagcatggctgagcacctactacatgcagacactgmtggggggtcactcaatctgcacagatgctcttctgaagtaggcatgatagtccccatttgatagacgtggaaacctgcaacccaaaaacctgctgagctg

SEQ ID NO: 309769 - DNA, 201 bp, Homo sapiens
cagcccaggctccagtctcgcctcgggggtccctccttgccagctctgccagcccgtcaggccggctgggcaccccttcacctcctgagcaccccaggtgstcagccctctccccctccccccatgtctagtccctcagagctgtccggactgacgtctgtacctaccccccatgtgggtctcctgctctcccttcgtggg

SEQ ID NO: 309770 - DNA, 201 bp, Homo sapiens; identical to SEQ ID NO: 64473

SEQ ID NO: 309771 - DNA, 201 bp, Homo sapiens; identical to SEQ ID NO: 64474

SEQ ID NO: 309772 - DNA, 201 bp, Homo sapiens
ttcctcttctcctgctggaccacggcgtttctgctcccgagttgggactgtggaatggtgtgggtgctgtggtctgctccatcgctggctcctccctgggwgggaccttgctggccaagcactggtgagccctccccagtgtaccctgcccacccacttgtacctgagctgcccccaatccactatactgacccatttccc

SEQ ID NO: 309773 - DNA, 201 bp, Homo sapiens
cttgcctgcagctgcacgtcgcagccgccaacgggttcagcgaggcggctgccctgctgctggaacaccgagccagcctgagcgctaaggaccaagacggytgggagccgctgcacgccgcggcctactggggccaggtgagtgcgggcgggagcaggtgggagggggcttccagcgcagcagtctgcagctccggcctgc

SEQ ID NO: 309774 - DNA, 201 bp, Homo sapiens
ccctcctggagctggccaggccgggctgcccgccgctgtggcggggttgctgctgttgttgaacctgggtgccgccatgcaggatgtggccctggacgcgytggctgtgcagctgctggagccggccgaactggggccgggcaataccgtgcaggtggtcgcgtacaagctgggggccgcgctagctgggggcgcgctgct

SEQ ID NO: 309775 - DNA, 201 bp, Homo sapiens
gcctggaaggttctgcgcagacgggccagggcctggcgctcccgggcctgcacacggccatagaggaagtcacatatctggtccttctcctcagcggtcargtcccccgggctgcgaaggtggaaggccagctcactgaactccacaagcacccctgtcccacgccgcacacctgccggaaagcatgtcagatgcaggcag

SEQ ID NO: 309776 - DNA, 201 bp, Homo sapiens
tgggggcagatatggaacctcccgtgctcatgccccccccaccacccaaggtgagcagggtgccagcagcctgtttcctcttctcctgctggaccacggcrtttctgctcccgagttgggactgtggaatggtgtgggtgctgtggtctgctccatcgctggctcctccctgggtgggaccttgctggccaagcactggtg

SEQ ID NO: 309777 - DNA, 201 bp, Homo sapiens
aagcatgtcagatgcaggcaggcagcgtccagggcggtgtggggtggggagaggcgcacctgtcctgggctcgtggtcccactgcagctggcagagagccygccgcacagaggccagctcccagcccatggagtccaccagcttgaccatgtcaaactccacggagctgctgccttgccctgggtcctcaggcagctgctg

SEQ ID NO: 309778 - DNA, 201 bp, Homo sapiens
ctgctccaggcagggcccgcagctggggaaggctacgctgtggggaggagcctgtcagagctgatcactgcgggagggtggatggtcccaggccccgcccrcctcctcccaacctgtgaaaggcctggaaggttctgcgcagacgggccagggcctggcgctcccgggcctgcacacggccatagaggaagtcacatatct

SEQ ID NO: 309779 - DNA, 201 bp, Homo sapiens
cctgctcaagctcacagccccggcggtggaggctcccgtggagaggaggccgtgctgcctgctcatgtgaggctgttgctcagcatgcaggggccctgtckcgggcacagcccaaggctgcctccccacggtgcgtgccctggtgctgcgggtgcagcacggaaaccccggcttctactgtacaggacactggcccctctc

SEQ ID NO: 309780 - DNA, 201 bp, Homo sapiens
ccccaagctccccactctggtgccccgagcagccctgtgggcaagcagccgccgccatggccgagcacctggagctgctggcagagatgcccatggtgggmaggatgagcacacaggagcggctgaagcatgcccagaagcggcgcgcccagcaggtgaagatgtgggcccaggctgagaaggaggcccagggcaagaagg

SEQ ID NO: 309781 - DNA, 201 bp, Homo sapiens
acagctgagcctggcctgcctggtgacacggtgaccccccagcctgactgtggcttcagggcaggcggggacccacccctgctcaagctcacagccccggyggtggaggctcccgtggagaggaggccgtgctgcctgctcatgtgaggctgttgctcagcatgcaggggccctgtcgcgggcacagcccaaggctgcctc

SEQ ID NO: 309782 - DNA, 201 bp, Homo sapiens
ttccacgccccgaggcccgcccctagctgggagcctctagggagcctcaggccccgcctctccgaggcaggcccctcccctgagacccaggccccgccccygagacccaggccccgcccccactcggttgccaactttcgcccgtctatgccaaagcctcggcggcgaccccgccccaagggcccgccccattggccgccg

SEQ ID NO: 309783 - DNA, 201 bp, Homo sapiens
gatccctgcctctgggaaagtgcatgtcaggctggtgtgtggctggcgcctggcctgcctttgccagtttgagcctgcacgtccaagtgtggggacccctyagctcccgggtgctgggatgggccaactgaatagggtggactcaaccctcaccacttggtccccacagtgctgggcagtgccccctggtccatccccagg

SEQ ID NO: 309784 - DNA, 201 bp, Homo sapiens
cgggctctgtcctccatatcgaataataatgacacatatcgaatcgcatggacttatccgacctcctcagaccccgcttccgccctgccccgggcccccacccccccccccgtaccccaggcattcgtgttggaggacggattcccggggccggcaggcaggcctgggcgctgccctctacacacctctgtcttcgctttg

SEQ ID NO: 309785 - DNA, 201 bp, Homo sapiens
gctgtggtcacttgggtgcccatgcaccacatacttgctgcttcccattggatcccaggagagtcctgcagatgtggtgtgggcgtggggaggccgaacartgcctggctggagcctgtgtgttgtgagctgggcctgaggggtgcagggcctccagggagggcagggtggagggggtcttgccctgggctggtgggagag

SEQ ID NO: 309786 - DNA, 201 bp, Homo sapiens; identical to SEQ ID NO: 64482

SEQ ID NO: 309787 - DNA, 201 bp, Homo sapiens; identical to SEQ ID NO: 64490

SEQ ID NO: 309788 - DNA, 201 bp, Homo sapiens
agcggccaatgtctttgctgtggctgcattccaggttgagaagcgcctggcggtggtaagcagtgcccctcacctccgtgtgtgctcaccctgctgtgtgygctcctgggaggagctgctccccaggcctggcagccctctcccaggcaatgggagccctggttgagtgctctgctccccactccagggtgccctgacgga

SEQ ID NO: 309789 - DNA, 201 bp, Homo sapiens
ccctgggggctgggatgggccatggtgtgctctgatccccctgtggtctcttggcccccaggaactccgagtctgtcacctacttctggcagaactggaasatccctgtgcacaagtggtgcatcaggtaggtggggtgtgtgtgtgtgtgatgtggaacatggctgtgaacctgaaccgctttccatgccccctcctctg

SEQ ID NO: 309790 - DNA, 201 bp, Homo sapiens
gcggccaatgtctttgctgtggctgcattccaggttgagaagcgcctggcggtggtaagcagtgcccctcacctccgtgtgtgctcaccctgctgtgtgcrctcctgggaggagctgctccccaggcctggcagccctctcccaggcaatgggagccctggttgagtgctctgctccccactccagggtgccctgacggag

SEQ ID NO: 309791 - DNA, 201 bp, Homo sapiens
cctcgggtggggatcaggctgacgtggccctaaacctgccccttggtgcttctgtccacagcggccaatgtctttgctgtggctgcattccaggttgagargcgcctggcggtggtaagcagtgcccctcacctccgtgtgtgctcaccctgctgtgtgcgctcctgggaggagctgctccccaggcctggcagccctctc

SEQ ID NO: 309792 - DNA, 201 bp, Homo sapiens
gtgtgtggctggcgcctggcctgcctttgccagtttgagcctgcacgtccaagtgtggggaccccttagctcccgggtgctgggatgggccaactgaatakggtggactcaaccctcaccacttggtccccacagtgctgggcagtgccccctggtccatccccaggttggaccctgcttgtggccccagtgctagtccac

SEQ ID NO: 309793 - DNA, 201 bp, Homo sapiens
gggtgcccatgcaccacatacttgctgcttcccattggatcccaggagagtcctgcagatgtggtgtgggcgtggggaggccgaacagtgcctggctggarcctgtgtgttgtgagctgggcctgaggggtgcagggcctccagggagggcagggtggagggggtcttgccctgggctggtgggagagtggactgcatgct

SEQ ID NO: 309794 - DNA, 201 bp, Homo sapiens
ggtgtcgggagcgggtctaggtccaggtggggctctgtcccaggctggcctttgcctgagaacaggctctgtcacccagggtgtccaggctggagcccctstgggctggggtgtgtggagcaggctgcacctccatgtggctgccagcactggactgttggggaggggagtggcagtggctgcccctgctgtggtcacttg

SEQ ID NO: 309795 - DNA, 201 bp, Homo sapiens
ccctgcctctgggaaagtgcatgtcaggctggtgtgtggctggcgcctggcctgcctttgccagtttgagcctgcacgtccaagtgtggggaccccttagytcccgggtgctgggatgggccaactgaatagggtggactcaaccctcaccacttggtccccacagtgctgggcagtgccccctggtccatccccaggttg

SEQ ID NO: 309796 - DNA, 201 bp, Homo sapiens
gctgcccctgctgtggtcacttgggtgcccatgcaccacatacttgctgcttcccattggatcccaggagagtcctgcagatgtggtgtgggcgtggggasgccgaacagtgcctggctggagcctgtgtgttgtgagctgggcctgaggggtgcagggcctccagggagggcagggtggagggggtcttgccctgggctg

SEQ ID NO: 309797 - DNA, 201 bp, Homo sapiens
gttggggaggggagtggcagtggctgcccctgctgtggtcacttgggtgcccatgcaccacatacttgctgcttcccattggatcccaggagagtcctgcwgatgtggtgtgggcgtggggaggccgaacagtgcctggctggagcctgtgtgttgtgagctgggcctgaggggtgcagggcctccagggagggcagggtg

SEQ ID NO: 309798 - DNA, 201 bp, Homo sapiens
ggctcctgccatggctctcaggcccactctccctgcctaggggctctgaggggcagatgtgcgtgtgcgggagggaaagggaggctctggcctctcctctyacaaagttgaggacttgctcaatgctgtgtgtggtgtcccagtggcacggcagatggggggtgaggcgggcctgcagctagtgtatgtgagccagcactg

SEQ ID NO: 309799 - DNA, 201 bp, Homo sapiens; identical to SEQ ID NO: 64484

SEQ ID NO: 309800 - DNA, 201 bp, Homo sapiens
tggactgttggggaggggagtggcagtggctgcccctgctgtggtcacttgggtgcccatgcaccacatacttgctgcttcccattggatcccaggagagycctgcagatgtggtgtgggcgtggggaggccgaacagtgcctggctggagcctgtgtgttgtgagctgggcctgaggggtgcagggcctccagggagggc

SEQ ID NO: 309801 - DNA, 201 bp, Homo sapiens
tgctcaatgctgtgtgtggtgtcccagtggcacggcagatggggggtgaggcgggcctgcagctagtgtatgtgagccagcactgcttcctaggacgtgtrggggcctggccaagctcttgctgtccttgtcctagctatatggcagtccctctattgggctgggtgccctcttccacctgtgcagtatgctgaggaccag

SEQ ID NO: 309802 - DNA, 201 bp, Homo sapiens
tggcctctcctctcacaaagttgaggacttgctcaatgctgtgtgtggtgtcccagtggcacggcagatggggggtgaggcgggcctgcagctagtgtatrtgagccagcactgcttcctaggacgtgtaggggcctggccaagctcttgctgtccttgtcctagctatatggcagtccctctattgggctgggtgccctc

SEQ ID NO: 309803 - DNA, 201 bp, Homo sapiens
cttccacctgtgcagtatgctgaggaccaggcagggtctgcctgtgcccctccagcgctggttgggagatcatgggtgggtgcctgcctctgttggaagcytctcagccagcaggcacctagccccgggtgggttcctttcagccccctcagcctgggcacacatcacaaacaagtggaggctacaccggcacacgagggc

SEQ ID NO: 309804 - DNA, 201 bp, Homo sapiens
tcactccctagatcccactggcctggttcgtgggccgctttttccagggcaactatggcaacgcagctgtgtggctgtcgctcatcatcggacagccaatwgccgtcctcatgtacgtccacgactactacgtgctcaactatgaggccccagcggcagaggcctgagctgcacctgagggcctggcttctcactgccacc

SEQ ID NO: 309805 - DNA, 201 bp, Homo sapiens; identical to SEQ ID NO: 64485

SEQ ID NO: 309806 - DNA, 201 bp, Homo sapiens
ggttagcgctgaccccactggggagggaggagggctctgccagcgctcgggccctcccacacagccgtggaccagacccagcctggccgggcatgagcgtygggcctgggcggcagcagccgagacccctctgtggcgggggctcagtgtcgtcatggctcccctggccacgggcctgtggtcattgcctgtgacagggat

SEQ ID NO: 309807 - DNA, 201 bp, Homo sapiens
tggggcaacatagcttggccaacatggtgaaaccttgtctctactaaaaatacaaaaactagctgggcgtggtggcaggtgcctgtaatccccgctactcrggaggctgaggcgggagaatctctggaacccaggaggcagaggctgcagtgagccgaaactgcaccattgcactccagcctgggcgacacagcgagactc

SEQ ID NO: 309808 - DNA, 201 bp, Homo sapiens
cacggagttccagcacccatgcttcctgcgtggccaggagcagctccttgagaacatcaagaggaaagtgaccagtgtgagtgccggccctgcacccttgmccggtctcacctgccacagctctccccgcccgcccctccctgagggctcccaccccagcctgccccttcctgagggacctggctgcagtggacgagcctg

SEQ ID NO: 309809 - DNA, 201 bp, Homo sapiens
cgacaaagcgagactccgtctcaaaaaaaataaaaagcatccagaagagccgtgcacggtggtggtgcctgtggtgccagctactcagaggctcgggtggmaggattgctcccagatggggcaacatagcttggccaacatggtgaaaccttgtctctactaaaaatacaaaaactagctgggcgtggtggcaggtgcctg

SEQ ID NO: 309810 - DNA, 201 bp, Homo sapiens
gcccagtcctgggcctcacagtgaggatgcaggtcacgctgcacagatgaggcccgtgtggcaggtggtcccaggaacgaactcgcctcccgccagccccmtgggcctcccatggccccagccccatcaggtggaacgtgcactgcctgcgtttcagaaggggcggcctggggaaggggcggcttgggcacgctgcccctc

SEQ ID NO: 309811 - DNA, 201 bp, Homo sapiens
ctggtgtgagccactgcacccagcccttcttctttttcttattccccttaatcctcagaagttaaggggaataactcccccattgggggaggggcatccgmgattatctgggatattctaagcttaatcctactagcgtgatctgtcctgtcccgtaatctgcttgctgtttctgcttaaagattatgaggcatgtgggtt

SEQ ID NO: 309812 - DNA, 201 bp, Homo sapiens; identical to SEQ ID NO: 64509

SEQ ID NO: 309813 - DNA, 201 bp, Homo sapiens; identical to SEQ ID NO: 64510

SEQ ID NO: 309814 - DNA, 201 bp, Homo sapiens
gaacctggcgcctagagtggcctgcgggccattcagcccatgggagccaggatgagttgaattcgcttcacaaagcaatggggcagtttcaacaacccagmgcggccgcggccgagggggctgtgaggggctggctgtccatcccctccaccacccaatttgatgatccccacaaccaagacagggctgagctagcagaga

SEQ ID NO: 309815 - DNA, 201 bp, Homo sapiens
ggtctttctggctttttccctgtttgcatctgcagctcccttccctggcagggagaaacctgccccactgcccttcaccagtttcttcactgagtcagccrccccttcctatgcagacacccctcacccctctctggccctgcttcaggccccccttccccgccgtgtgggcttctcgctgtcccctaagccttcgatgtc

SEQ ID NO: 309816 - DNA, 201 bp, Homo sapiens
cagaggagggggcatggaaagcggttcaggttcacagccatgttccacatcacacacacacacaccccacctacctgatgcaccacttgtgcacagggatsttccagttctgccagaagtaggtgacagactcggagttcctgggggccaagagaccacagggggatcagagcacaccatggcccatcccagcccccaggg

SEQ ID NO: 309817 - DNA, 201 bp, Homo sapiens
acgccccttgtctcctgggtccactgccaccaaggcccccaggccctcatggcaaagggatgcccagcataggcccagccgcacccctgcagggcacagascctccactgccttccaggccgtcctcgaatgcgctgccccctccagcctgtgcaggcgtacacgggggtgcagcctggggggtacagtcaaggggagccc

SEQ ID NO: 309818 - DNA, 201 bp, Homo sapiens
gagagggctgccaggcctggggagcagctcctcccaggagcgcacacagcagggtgagcacacacggaggtgaggggcactgcttaccaccgccaggcgcytctcaacctggaatgcagccacagcaaagacattggccgctgtggacagaagcaccaaggggcaggtttagggccacgtcagcctgatccccacccgagg

SEQ ID NO: 309819 - DNA, 201 bp, Homo sapiens
ggaggctgaggcggttggatcacctgaggtcagcagttcaagaccagcctgaccaacatggtgaaaccccgtctctactaaaaatacaaaaaaaaaaaaaatagccaggcgtggtggtgcgtgcctgtaatcccagctactcgggaggctgaggcaggagaatcacttgaacctgggatacagaggttgcagtgagccgag

SEQ ID NO: 309820 - DNA, 201 bp, Homo sapiens
caccctgccctccctggaggccctgcacccctcaggcccagctcacaacacacaggctccagccaggcactgttcggcctccccacgcccacaccacatcwgcaggactctcctgggatccaatgggaagcagcaagtatgtggtgcatgggcacccaagtgaccacagcaggggcagccactgccactcccctccccaac

SEQ ID NO: 309821 - DNA, 201 bp, Homo sapiens
gcagaaagtgaagcctcagaactgggttcaccatcatcccagttttttacaagctatgattttgtcccatctttattaacaagataaggaagtatgaaaartaatctcgacatctgagatggtgagattacagccccaggagccacccagctggctgaggagcctgagaacaaggcacagccacatgacctgtgccagaca

SEQ ID NO: 309822 - DNA, 201 bp, Homo sapiens
ccatgagacccgggacccgcagcctccctgccccgtgccctggtgccggccctcagcccagcttcctcgtctgcatgcagcagctcctctgtccaccagcrgaggctcttctagggccttgctgggctgcagctgactcaggagggcaacagcctcttcagagaatttgacagcatggagaaccaaacaaaagcagaaagt

SEQ ID NO: 309823 - DNA, 201 bp, Homo sapiens
gccctccctggaggccctgcacccctcaggcccagctcacaacacacaggctccagccaggcactgttcggcctccccacgcccacaccacatctgcaggrctctcctgggatccaatgggaagcagcaagtatgtggtgcatgggcacccaagtgaccacagcaggggcagccactgccactcccctccccaacagtcca

SEQ ID NO: 309824 - DNA, 201 bp, Homo sapiens
ctgcggtgctgactgcacttcctgtcaggcagggtctccagggcacctctgggacccagcctggctgtccgtcccatagcccaggtgtgccctgtggcctrgggctttcttggtcacagccaccagaccgtgggtctcatccccacagcagcaccagggcagggactgagccacccacacactgagcagagccccacctgt

SEQ ID NO: 309825 - DNA, 201 bp, Homo sapiens
ggtggcagtgagaagccaggccctcaggtgcagctcaggcctctgccgctggggcctcatagttgagcacgtagtagtcgtggacgtacatgaggacggcwattggctgtccgatgatgagcgacagccacacagctgcgttgccatagttgccctggaaaaagcggcccacgaaccaggccagtgggatctagggagtga

SEQ ID NO: 309826 - DNA, 201 bp, Homo sapiens
agtgggactgaagaagatgtgacaactggatggattttggatgatgtcctggagcagaggaaggattgggtaaaaagctaaggaatctgattagaatgtgsgtcctagttaacaatgtgtctaatgttcttgagacaactgtaccacacaaaggcaggatgttaatgatgggggacactggtgtagggcatgtattctaaa

SEQ ID NO: 309827 - DNA, 201 bp, Homo sapiens
ggggaggggctttccgactgagaggaaggcctcgcatctgcccaccgcccagtcctgggcctcacagtgaggatgcaggtcacgctgcacagatgaggccmgtgtggcaggtggtcccaggaacgaactcgcctcccgccagccccctgggcctcccatggccccagccccatcaggtggaacgtgcactgcctgcgtttc

SEQ ID NO: 309828 - DNA, 201 bp, Homo sapiens
tagggctccatttccttcgctgttcccaagggaaaggtcctgcttaaacaggtgctttgtgagtggaaacgtggccagagtgcggcgggtgctttgtgagkggaaatgtggccagagtgcggcggatgctttgtgagtggaaacgtggccttctctggaagccctggggaggggctttccgactgagaggaaggcctcgca

SEQ ID NO: 309829 - DNA, 201 bp, Homo sapiens
ggtctaacgtatttgaggttccagaaaacagtggggaagagaatacagaaatatgaccaaaaggctggacacggtggctcctgcccgaaatcccagcactytgggaggctgacatgggtggatcgcttgagcccaggagttcaagaccagcctgggcaacatagcaagaccctgtctctataaataatacaaaaattagcc

SEQ ID NO: 309830 - DNA, 201 bp, Homo sapiens; identical to SEQ ID NO: 64511

SEQ ID NO: 309831 - DNA, 201 bp, Homo sapiens
tcttactaagattcagctgtttttcttgaataaatgctccccgtgctactgtaattctttggttaactttcagagttctggaaagttggcttggcgctttycgccgtctctctcctgctgccttggggtcctttccgtgaccgtttccctccctgacacgtgtacatccctgtgtatttcacatctctctatgctggaaag

SEQ ID NO: 309832 - DNA, 201 bp, Homo sapiens
gactccaacctggataacctgcagaccatgctgagcagccacggcttcagcgtggacaccagtgccctgctggacgtgagtggagccccgccgccccgcckccccgccccgcctccccgcgcctccccgcctccccgcctcgcctcgccgcctccccgcctccccgcgccgcctccccgcctccccgcgccgcctccccgc

SEQ ID NO: 309833 - DNA, 201 bp, Homo sapiens
agtatgaagtggcaatggttggtgcaggacgtagcactgggggcgagcatggcaatgagacagaaacactgacttaaaactggaaggaagcccttctccargccgcgcagggggctgcagagctttccggcgctggctgcctggcctggagaaaggaggtgatcatcccatcctgtgactttgagagcactcacacaagcc

SEQ ID NO: 309834 - DNA, 201 bp, Homo sapiens
gggatattctaagcttaatcctactagcgtgatctgtcctgtcccgtaatctgcttgctgtttctgcttaaagattatgaggcatgtgggttagggcccaktgtacccttttttgggaccgaggcatgttctgggcagggcttttgagcaaggaaggcaggtgtgatgaggcccgtggccagcctccactccactcacagg

SEQ ID NO: 309835 - DNA, 201 bp, Homo sapiens
ttggcaaatacataatgataaaaaaaaaaaatctgggatgtataggaggagctcagaggatttttagggcagtaacaccattttgtataatgctacaatgrtggatatatattataatatacatttattcaaattcatagaatgtgtaacaccaagagtgaactctaaactatggacattgggtgattatgatgtgtcaat

SEQ ID NO: 309836 - DNA, 201 bp, Homo sapiens
tagcatcccattcttccctctgggcatctttgggctatttcttgttcactgagcaacttggatacagcagtgtccatctgtgcccacttcatgttgaaatyatggtctctgcccaggccccataggtgctgctccatactccaggccaaccagggctctcatgggaccagaacaaggcctcgttctgtgcggaagtgggga

SEQ ID NO: 309837 - DNA, 201 bp, Homo sapiens
gaaggctgggtgcagtagctcacgcctgtaatcccagaactttggaagactgatgtgggtgggttacctgaggtcaggagttcgagactagcctggccaaygtgatgaaaccccatctctactaaaaacataaaaattagctgggcatggtgctgggcacctgtaatcccagctacttgggaggctgaggcaggagaatca

SEQ ID NO: 309838 - DNA, 201 bp, Homo sapiens
ggtatctcatggtgagaaagtttttgcaatctactcatctgacaaagggctaatatgcagaatctacaaataaacaaatttacaagaaaaaaacaacctcwtgaaaaagtgggcaaaggatatgaacagacacttctcaaaagaagacatattgcctaggttctaagtaagaatgcaggccacttcatgtctgtgtcatga

SEQ ID NO: 309839 - DNA, 201 bp, Homo sapiens
ccattcaagatgagatttgggtgggaacacagagccaaaccatatcacctaggttctttttttcaattattattatactttaagttctagggtacatgtgmacaacgtgcaggtttgttacatatgtatacatgtgccatgttggtgtgctgcacccattaactcgtcatttacattaggtatatctcctaatgctatccc

SEQ ID NO: 309840 - DNA, 201 bp, Homo sapiens
tcttgggcagggatgatacaacctttatgaagccccacactccagaggctgggtccttagctttgtaagtcccagaaacctttttatttttatttttttttcaatgtatgtagagttgttcagtttttcagggctatatcatgctcaccaaacttacaagagacactttttgaaaagtcagattggcaatatattatttta

SEQ ID NO: 309841 - DNA, 201 bp, Homo sapiens
taatgtgttgagattacaggtgtgagccactgaacccagccaaaaatattttttctaatctcctagagtcatcttgcccatacctatttttttttttttttgcaactcattcttatggagtctatccaaggcagtcaaccatcaacctagttttcatagcattaataactccttgttttacactcatttcatcagctcatg

SEQ ID NO: 309842 - DNA, 201 bp, Homo sapiens
taatagagacagggtcttgctctgttgcccaggctggtcctgaacttctgaggtcaagtgatcctcccgccttggcctgctaatgtgttgagattacaggygtgagccactgaacccagccaaaaatattttttctaatctcctagagtcatcttgcccatacctatttttttttttttttgcaactcattcttatggagt

SEQ ID NO: 309843 - DNA, 201 bp, Homo sapiens
tttttttgagacaaggtcttgttctgtcacccaggctgaagtacagtggcgtgatcacagcttactgcagccttgatgtcctgggctcaagcaatcctcctgcttcagcctcctgagtagctgggactacaggtacatgctaccctgtctggctaatttttgtatttttttgtagagatggagtttcaccatattgcctag

SEQ ID NO: 309844 - DNA, 201 bp, Homo sapiens
ctttttttgagacaaggtcttgttctgtcacccaggctgaagtacagtggcgtgatcacagcttactgcagccttgatgtcctgggctcaagcaatcctcctgcttcagcctcctgagtagctgggactacaggtacatgctaccctgtctggctaatttttgtatttttttgtagagatggagtttcaccatattgccta

SEQ ID NO: 309845 - DNA, 201 bp, Homo sapiens
tctttttttgagacaaggtcttgttctgtcacccaggctgaagtacagtggcgtgatcacagcttactgcagccttgatgtcctgggctcaagcaatcctcctgcttcagcctcctgagtagctgggactacaggtacatgctaccctgtctggctaatttttgtatttttttgtagagatggagtttcaccatattgcct

SEQ ID NO: 309846 - DNA, 201 bp, Homo sapiens
cagcactttggaggctgaggtgggcggatcacctgaggtcaggagtttgagacagcctggctattatggtgaaatcccctctctactaaaaatgcaaaaarttagccgggcatagtggcagtctcctgtaattccagctacttgggaggctgaggcaggagaatcgcttgaacctgggaggcggaggttgcaatgagctga

SEQ ID NO: 309847 - DNA, 201 bp, Homo sapiens
gtaaaccaaagcacatgtggtagatgagaagttcatttttcaccctgcaggaaatttatatgggcagacaaaccataccaagtaggttgcttggtgaaatygcagtagggtcggggaaggaggttgcatgtcttaaggttactaccattaagacgaagctatcttcaccactttagggatatacatgactctgggctgggg

SEQ ID NO: 309848 - DNA, 201 bp, Homo sapiens
ctaaagtcctcagaatgaccaacatgaccgaactccgtatttcttctctgttctcatttcccatccctttgccgtggcttcctctgcttcagtcatgctgrtctccttgctgttcccaaacactccaggtgtatccccatctcaggctctcagtactgctgttgtctctgcctgaatgttttgcccatttatctgcatagc

SEQ ID NO: 309849 - DNA, 201 bp, Homo sapiens
gattcaaccaaccacagattaaaggtagttgaaaaaatggcatctgtactgaacatgtatggcctttttacttgtcattatttcctaaacaatacagtacwactgcttatgtagcattgccattgtgttaggtattataatctagagatgatttaaagtatatagaaggatgtggataggttatatgcaaatactacacca

SEQ ID NO: 309850 - DNA, 201 bp, Homo sapiens
ggtgacaaggtccagggttggtcatgggggtggtttgttgaagtagacacttaaggaacacatgaggccaaggctgtccttaggaatgtcgaggcacccasggtgttgtcagttttggggggatctagaggaagatcctgagtcaaatgcgtgggttctgggagaatgaaaggaccgatcagaggcaaatggcaacgaaga

SEQ ID NO: 309851 - DNA, 201 bp, Homo sapiens
gtccttaggaatgtcgaggcacccacggtgttgtcagttttggggggatctagaggaagatcctgagtcaaatgcgtgggttctgggagaatgaaaggacygatcagaggcaaatggcaacgaagagatctgatagagcaaaaagtgttttgaaaaggagatatgatgaggtatgtgaaggaaacccagggcagtgacttc

SEQ ID NO: 309852 - DNA, 201 bp, Homo sapiens
acccacggtgttgtcagttttggggggatctagaggaagatcctgagtcaaatgcgtgggttctgggagaatgaaaggaccgatcagaggcaaatggcaaygaagagatctgatagagcaaaaagtgttttgaaaaggagatatgatgaggtatgtgaaggaaacccagggcagtgacttctgggcatttggagcctttat

SEQ ID NO: 309853 - DNA, 201 bp, Homo sapiens
accatgagatcttgtgagaactccctcactatcacgagaacagcctgggggaaaccacctcatgatgcaatcacctcccaccaggtccctcccttgacacrtggggattgcaattcaagatgggatttgggtgggcacacagagccaaaccatatcaattctccacttgcataacctcatactttattcaatatgtgcttg

SEQ ID NO: 309854 - DNA, 201 bp, Homo sapiens
gatgtgaatagtgaacagcattcgttatttgggtgatgggtacacgaaaagcccagacttcaccactagcagcatatgcatgtaagaaaccggcactcgtrctcccgacatgaaaactaaaaatcaatgtttaggttcatagcaaaactgaacagaaagtacagaaagttcccatttctatgttttaaaacatagaagtgt

SEQ ID NO: 309855 - DNA, 201 bp, Homo sapiens
atgcataattgtacatatttatgggatatgtgtgagattttgatataggcatgcaatatgtaatgatcaagtcagggaatttagaattactggtggaattytaatttttcaaaagaaatcactgtggagatatttcttcctgttatgtgtataaagaaccaaatacagggaagaaagaactaaaaaccctgtaataaaagg

SEQ ID NO: 309856 - DNA, 201 bp, Homo sapiens
agagccactctgggcaaagactggcagttagtatgcagtaaaacttatggctgggcatggtggctcacgcctgtaatcccagaagtttgggaggctgaggyaggaggatcacttgagctcaggagttcttgaccacctgggcaacatggtgaaaccccgtctccacaaaaaatacaaacaaattagctgggaatggtggtg

SEQ ID NO: 309857 - DNA, 201 bp, Homo sapiens
catgaaaactaaaaatcaatgtttaggttcatagcaaaactgaacagaaagtacagaaagttcccatttctatgttttaaaacatagaagtgtacattctyttatcactcttaatgtaaaaggcctttgagtagaggacacaaattggaattctaagatgtctgtcttatgtaatcacaaccttaatgcatatgtgtgggt

SEQ ID NO: 309858 - DNA, 201 bp, Homo sapiens
tctagaagacatgaaatgttctgcagactttatcatttcccagcagtgcaaataactggcaagtggaactgttatctttctggttcacaaatgggaaactrggacgaatagagaaaatagggttttactgatttgcatatagcaccccctgccctggaaaaacaagttacaaaaatctacaaaaaatgaaagaattgggaa

SEQ ID NO: 309859 - DNA, 201 bp, Homo sapiens
attttgtaaaatgtaaaaaaaaaaagaaatgatgtcatcattattgatccttggacattaaaagaataacaaagaaatattattaacaaaaaaaagataarttttatagttagaaattttacatgtccagaaactggaaattcagatgcagtttctctgcagaattcagaaattacttccttttacttgtttagattagtt

SEQ ID NO: 309860 - DNA, 201 bp, Homo sapiens
ctctttttttttttttttttttttgagatggagtctagctctgtcgcccaggttgaagtgcaacggtgtgatcgtggctcactgcaacctccgccttctgkgttcaagtgatcctcctgcctcagcctcctgaatagctgggattacaggcacacgccatcatgcctggataatttttgtgtttttgtagagatggggttt

SEQ ID NO: 309861 - DNA, 201 bp, Homo sapiens
actttctttactgtccttccagaaaaatactctataaatgtgtgtgtgtgtatatagatagatagatagataggtagatagataaacattcatatctgtgkggggggtatatccccccactttatcttcttttttttttttaactcaattaagagcatattgtattctgttctgtatggttggtagtgggagaagaacagg

SEQ ID NO: 309862 - DNA, 201 bp, Homo sapiens
ttaggagatatacctaatgtaaatgacgagttaatgggtgcagcacaccaacatggcacatgtatgcatatgtaactaacctgcacgttgtgcacatgtamcctaaaacttaaagtaaaaaaaaaaaaagaaacagcctataatgcttgataggtagccatctgtagagggaacctctataccttgagagatatctgaaaa

SEQ ID NO: 309863 - DNA, 201 bp, Homo sapiens
ggggggtatatccccccactttatcttcttttttttttttaactcaattaagagcatattgtattctgttctgtatggttggtagtgggagaagaacaggwgtagccctaagaaagaaatgctgaggcctgggaatggcagtcactgtatccttgcagtgtctcatagggccaccagggagtccttgtgcaaggagagctg

SEQ ID NO: 309864 - DNA, 201 bp, Homo sapiens
acatatacaccatggaatactatgcagccataaaaaatgatgagttcatgtcctttgtagggacgtggatgaagctagaaaccatcattctcagcaaactrtcgcaaggacaaaacaccaaacactgcatgttctcactcgtaggtgggaattgaacaatgagaacccatggacacaggaaggggaacttcacacacgggg

SEQ ID NO: 309865 - DNA, 201 bp, Homo sapiens
aaagtcacaggttcttaagttacagtgttaaagtagccttaaagggatacacagtaacaaagttgaggaaatgataactgtgtatctattcttaaaacagkttacatatccatatatttcattaatgtagtagtggttgtataattggcgttaacactatgtccctcatgatccagggccagaaccttaatttaaccacct

SEQ ID NO: 309866 - DNA, 201 bp, Homo sapiens
ttgaattcccatgataaaatcatattatagggtaaaataagtgaaaggataaaacgaaatattttagctatcattctttgttaaaagaacgaccttttacctttccaaattagagtctagaggtttgtaatctttttttgtaacacagtctcctctggattaaaggtatgaactttttccccagagatgcacattaacttg

SEQ ID NO: 309867 - DNA, 201 bp, Homo sapiens
ccaccacacccagctaatttaaaaaattttttgtagaggtaggatctcattatgttgcccagggttagtcttacaggactgtaattaaaagagtagaacaygtgtttggcttgttaaatttgtgatattcttcctatgcactgacaatggtcaagctgagaaccaaatcaggaatgcaatttcattcacaattaccacatg

SEQ ID NO: 309868 - DNA, 201 bp, Homo sapiens
aagaatgttaaatttgttctcaagcacaaagtagcacagaagagggaggatactgtttccaaagaagtgactagaaaactttctgaagctgataatagaargatgtctcggaaggagaaagatgtaagaatcttgtggaagaagaatgaagttgctgattctgaagctacaacattttccattttctattaacaacactct

SEQ ID NO: 309869 - DNA, 201 bp, Homo sapiens
gttaaacttgggcaataatacaatttattcagaattgttttgtattgcatttgtcaatgcttattcttctaagccaaaaaaaaaaccttttagtaatacaygtagttcttcatgtcgtatttctaggcatagagagtacctgtgacagaatttgtttcagcatataattctgttattctacttctttcccccactgaacat

SEQ ID NO: 309870 - DNA, 201 bp, Homo sapiens
aagcacatatttggtagcctttgcatacaagaatgttaaatttgttctcaagcacaaagtagcacagaagagggaggatactgtttccaaagaagtgactrgaaaactttctgaagctgataatagaaggatgtctcggaaggagaaagatgtaagaatcttgtggaagaagaatgaagttgctgattctgaagctacaac

SEQ ID NO: 309871 - DNA, 201 bp, Homo sapiens
ttttctatagtgtgatgaccctagaaagcacatatttggtagcctttgcatacaagaatgttaaatttgttctcaagcacaaagtagcacagaagagggargatactgtttccaaagaagtgactagaaaactttctgaagctgataatagaaggatgtctcggaaggagaaagatgtaagaatcttgtggaagaagaatg

SEQ ID NO: 309872 - DNA, 201 bp, Homo sapiens
aaaccgtatggcaattcgtcagctaaaagcagaactaccatttgactcagcaatcccattactgggtgtatacccagaggattagaaagcattctaccatraagacacatgcatgtatatgtttactgcagcactgttcacaatagtaatgacatggaatcaacctaaatgccaatcagcagcagactggataaagaaatg

SEQ ID NO: 309873 - DNA, 201 bp, Homo sapiens
agtgttttatgtccagttataatatgtggtcaattttagagtatataccatgtggtgatgacaagaatgtatattctgttgtttttgggtggagagttctrtagaggtctttcagatccatttggtccaatgttgagttcaggtcctgaatatctttgttaattttctacctcaatgatctgtctactactgtcagtagag

SEQ ID NO: 309874 - DNA, 201 bp, Homo sapiens
ttgagcctgggaggtggaggttgcaatgagccgagatcatgtcactgcactccagcctgggcgacagagggagactctgtctcaaaaaaaaaaaaaaaaaattacgaactcgtaacgatgcttctaattgtcatcctgccccacagggttatttcttggcttccccatcaaaatttttactttcaaagtcattaaaatatt

SEQ ID NO: 309875 - DNA, 201 bp, Homo sapiens
catgttggccaggctagtctcgaactcctgaccttaggtgatctgcctgcctcagcctcccaaagtaatcccaaagcctgggattacaggtgtgagtcacygcgcccagcctaaagacatgagattctaaagctgaactgcccaatgttgtaaccactagccgaatttggatactgagaactttaaatgtagctggttctt

SEQ ID NO: 309876 - DNA, 201 bp, Homo sapiens
ataaagatacaaggcataatgattctatcagttaggaaccttttagttgaaagtaacagaaaatccaacccaggatggcttggtgaaatttattgactcaygtaactaaacattctgggataggactgtgtatcagacagcgtgttttcagctgcaagtaacagaaaactacttactcaaactggctaaaccaagataact

SEQ ID NO: 309877 - DNA, 201 bp, Homo sapiens
tagttaacatctttgggcaattccattttcagctatgatgccatttaaagccaagtattgaaataaactgagcagaatttaccaaatattaaaccaaaaakttaaaataatatttttactgaaatgtttagtaatcatttcgggaagaacaaaaatgttttggtaccattaatacataacacaaaaatgatttaaaaagta

SEQ ID NO: 309878 - DNA, 201 bp, Homo sapiens
cacatctgggaattgtgttaggaggggaaaagagtggacaatctccagtgcccacccctgactgtctcgaagtaagactggagccagaggctctgctttcctcatgtcagcgttgttgccaggcccactcttctaatgtttgcagtgataactgcagtcattttagacctcatataatttagaagaagtgagggacacaga

SEQ ID NO: 309879 - DNA, 201 bp, Homo sapiens
atacatacaataaagttaaaaatacacaataagggtatttgttcagaaaagttttactattgggatgagccatcaaacgtttggagaccctggcctgcacmataaagaccaaagtccttttcatggtacacaggactcctcaagatctagtcatatttgtcactgtgttctccagctacatgggacttctggcatccctct

SEQ ID NO: 309880 - DNA, 201 bp, Homo sapiens
ctcaaacaaaacaaaacaaaacaaagcaagacaaaaaaaccccgccacagttcttaagacatccttctttttctctgagacagggtcttgtcctgttgccrggttggagggcagtggcagaattatggctcactacagcctcgtcatcctgggctcaagtgatcttcccactttagcctcctgagtggctgggactaaagg

SEQ ID NO: 309881 - DNA, 201 bp, Homo sapiens
ataaatagcactacatgaagagctagccactctttattgaggagaaagggaaaagacttgatgtcaagtggagcagataatcagggcccataatgtgcccrcagctgtgctaggcctgtaagcctacagtgtgttcactccatcctcaccagaatcttttcattttacaatttagtgaagtgagactctgagaagttaaat

SEQ ID NO: 309882 - DNA, 201 bp, Homo sapiens
ggattacaagcatgtgctaccacacccagctaattattttaattaattaattaattttttttgtagagatggagtctcaccatgttgcctgggctggtctygaactcctaggctgaagcaactctcccaccgtggccttccaaagtgctgggattacaggtgtgagccactgtgctcagccaagtcaccttctttctaaag

SEQ ID NO: 309883 - DNA, 201 bp, Homo sapiens
actttggaggctaaggctcaggtaacccataaaatatataatccatgtctccaactttgcttctttatctggttcatcttctccaagtttcctatattgaytttcctgtgtcttcattccagattcttatctgctgcctctgatagtgaaatgtgctgtgacttttctcttgctacctggattctcaccctgctgtctgct

SEQ ID NO: 309884 - DNA, 201 bp, Homo sapiens
ccccctgtctcgtctgtcaaagtgcagggagagattacaggtgtgagccatcattgccagccctgagaacttttaaaataaaatttctgtactggatatasagatgctgtctgcaacttaaaaacattggtagtttgttccttgctccttggagaaaaatacaaaattttcgtgtggatgcttttatcctctgtgcagaca

SEQ ID NO: 309885 - DNA, 201 bp, Homo sapiens
tctgtgcagacaagaagttaaagctgaaaaccaatgtctgagaacttctctttccaatccttttgcctggctaatttttttaattttaatttttgtagagmtggggtctacttgtgttacctaagctggtcctgaactcctgggctcaagccatcctcttgccttggcctcccaaagtgttggaattactggcattgagcc

SEQ ID NO: 309886 - DNA, 201 bp, Homo sapiens
aagggctcagtgtcagcacccagactggagccaggagactggtactcctcatcctggctctggcttggtgacacattcctgggagttgaggatggagtccygtggtagcctgtcagcttcttcagctcctgcccctgcttggtcttctccctctcttttctaagtgctctgcctcccctagcaccgggagtcttgcaggca

SEQ ID NO: 309887 - DNA, 201 bp, Homo sapiens
  misc_feature (1)...(201): n = A,T,C or G
gcctcccaaagtgttggaattactggcattgagccgctaagcccagcctcagtctcctgttttgaaattgcagatctcaaggaacaatagaatccatgctntggtctggagtgaatcacagacacagggcctaggaaaagatctaactaggaataaagacagacatacacataaacatgaatacttttagacatataagga

SEQ ID NO: 309888 - DNA, 201 bp, Homo sapiens
ttcatgaagccctgtattccagtaataataataaaaacctttaaattgagcctttttatttatttacttattttttagagataggatcttgctttgtcacycaggctagagtgtagtagcacatagcacatagctcactgcagtcttgaactcttgggttcaagcaatattcctgcctcagtcctaagtagttgagactac

SEQ ID NO: 309889 - DNA, 201 bp, Homo sapiens
tgggattacaggtgtgagtcactgcgcccagcctaaagacatgagattctaaagctgaactgcccaatgttgtaaccactagccgaatttggatactgagmactttaaatgtagctggttcttccaaattgagacaagatgtaagggtaaatacatgctggatcttaaaaacttaatttaaaaaatgaaaaccatcttaat

SEQ ID NO: 309890 - DNA, 201 bp, Homo sapiens
catctgggaattgtgttaggaggggaaaagagtggacaatctccagtgcccacccctgactgtctcgaagtaagactggagccagaggctctgctttcctcatgtcagcgttgttgccaggcccactcttctaatgtttgcagtgataactgcagtcattttagacctcatataatttagaagaagtgagggacacagaac

SEQ ID NO: 309891 - DNA, 201 bp, Homo sapiens
acatctgggaattgtgttaggaggggaaaagagtggacaatctccagtgcccacccctgactgtctcgaagtaagactggagccagaggctctgctttcctcatgtcagcgttgttgccaggcccactcttctaatgtttgcagtgataactgcagtcattttagacctcatataatttagaagaagtgagggacacagaa

SEQ ID NO: 309892 - DNA, 201 bp, Homo sapiens
tgtacagcttaatgaatgtttacatacttatccctgtttaaccatcacccagatcaggataaattgcatttctgccactcagaaggctcatttgtgccccktcccagtcaataatctttccccgcaaagtagccattattctggcatctattgccatgaacttcatataatcatatattatatactccactattttcggct

SEQ ID NO: 309893 - DNA, 201 bp, Homo sapiens
ctcctgagtagctgggactacaggtgcacgccaccacacctgcctaatttttaaatttttagtagagacggggtttcaccatgttggccaggctggtctcraactcctgacctcaaatgatccacccatctcagactcccaaagtgctgggatttcaggtgtgagccattgcacccagactttctctttattttctataat

SEQ ID NO: 309894 - DNA, 201 bp, Homo sapiens
atgaacttcatataatcatatattatatactccactattttcggcttcttttgctcaaaaagatgcctatgagatccatggataggtactatttccaaccytattttacagatgtggaaacaggctcaggaaggttaagtagcttgcccaaagttatacagctggacacattcaggatttggatctatgaggtctgacttc

SEQ ID NO: 309895 - DNA, 201 bp, Homo sapiens
actccttttagaaagtgaggggtttattaaatgaacacaatatatttggttccatacagagtataaaactgtatagtctcttctagaaggtttttttttttgctcctcctcctcttcttcctcttcctctccttctttctcctcctcctccttccttctccttcttcttcttcttttttcttcttcttctttcttcttctt

SEQ ID NO: 309896 - DNA, 201 bp, Homo sapiens
attaagaattaatgatagatttcatgcaacagggaatattttgtgcctttattttgtccaaatcttgatttgctgatgcattgtcaccattaaataatctyagggaagttatcttcttaactgtaaatgggactttcgctacccacttgatagaatggctatttttagctctgcaaaagatatgactgtgctgaaggttga

SEQ ID NO: 309897 - DNA, 201 bp, Homo sapiens
atttgtcaatgcttattcttctaagccaaaaaaaaaaccttttagtaatacatgtagttcttcatgtcgtatttctaggcatagagagtacctgtgacagaatttgtttcagcatataattctgttattctacttctttcccccactgaacatttagagttaatatccaactctccccatactcattaagtctcctagaat

SEQ ID NO: 309898 - DNA, 201 bp, Homo sapiens
attttttaaaaaatgctttgtcaaacatgtgcctgactcagagtactagtcactagccctgtggagatatagggcatgttagcaaaggagaaagcaaggcrtaatctaaactgccaacatatagttcaacttagaagagagatgcacattatactgtatacatggttgatgaaattttttaaaaattgggagaggataatt

SEQ ID NO: 309899 - DNA, 201 bp, Homo sapiens
gatataaaggttaatacctgttaatttgcatagcctgttgctttatacagacaattcaagatacattgtaatgaaggcaagagcaatatattgtctgttaytgtttttaaggtttagttcttgtaaataaaaatgtgagaaagttgtattaatatcttcaaggaaatagatttttatttgctataaaatgcatgattttaa

SEQ ID NO: 309900 - DNA, 201 bp, Homo sapiens
catttgtcaatgcttattcttctaagccaaaaaaaaaaccttttagtaatacatgtagttcttcatgtcgtatttctaggcatagagagtacctgtgacagaatttgtttcagcatataattctgttattctacttctttcccccactgaacatttagagttaatatccaactctccccatactcattaagtctcctagaa

SEQ ID NO: 309901 - DNA, 201 bp, Homo sapiens
tgtttgacttgtgaattgtttgaaaagcattgatatttataaaaagtcttaggaaaagtaaggcctgaagaccttccatagaatgagacgtagttgcataytttatgattaaactaacaataatgatgactaatcttcaaaccctgctatttgccattttatagatttgaaaactgacattcagagaagtttgataacttg

SEQ ID NO: 309902 - DNA, 201 bp, Homo sapiens
aaaatacaaaaatttgccgggtgtggtggtgcatgcctgtatttccagctactcagctactcaggaggctgagacaggagaatcgcttgaacctgggaggyggaggttgcagtgagctgagattgtgccgctgcactccagcctgggtgacagagcaagactctgtctcaaaaagacaaaaaaaaaaaaaaaaaaagatgg

SEQ ID NO: 309903 - DNA, 201 bp, Homo sapiens
ccaacatggtgaaacccatctctactaaaaatacaaaaatttgccgggtgtggtggtgcatgcctgtatttccagctactcagctactcaggaggctgagrcaggagaatcgcttgaacctgggaggtggaggttgcagtgagctgagattgtgccgctgcactccagcctgggtgacagagcaagactctgtctcaaaaa

SEQ ID NO: 309904 - DNA, 201 bp, Homo sapiens
aaccagcctggccaacatggtgaaacccatctctactaaaaatacaaaaatttgccgggtgtggtggtgcatgcctgtatttccagctactcagctactcrggaggctgagacaggagaatcgcttgaacctgggaggtggaggttgcagtgagctgagattgtgccgctgcactccagcctgggtgacagagcaagactc

SEQ ID NO: 309905 - DNA, 201 bp, Homo sapiens
cacatgtggtagatgagaagttcatttttcaccctgcaggaaatttatatgggcagacaaaccataccaagtaggttgcttggtgaaattgcagtagggtsggggaaggaggttgcatgtcttaaggttactaccattaagacgaagctatcttcaccactttagggatatacatgactctgggctggggatacttacatt

SEQ ID NO: 309906 - DNA, 201 bp, Homo sapiens
acacgatgttttgatataaatagtgaaataattattacagtcaagctaattaatatatccatcttagaaactatgaaatttgaggctctgtttgcaagcawagtcacttcctaaatgagttacagcatatgaggagctgcttcctgaggcttcccagaagctgcttccttttctcaacttgctgacactagcactgagctc

SEQ ID NO: 309907 - DNA, 201 bp, Homo sapiens
taggaataaagacagacatacacataaacatgaatacttttagacatataaggaaatatgtaacatataaatagaggcatcaacgtgtacataaatcaaakttagaatagaaatgtttattcgtacaacagtctagactgtgggccattctttagtggtatttttccatacaggagggaagcaaatgtatatatgtgtaca

SEQ ID NO: 309908 - DNA, 201 bp, Homo sapiens
atagaggcatcaacgtgtacataaatcaaatttagaatagaaatgtttattcgtacaacagtctagactgtgggccattctttagtggtatttttccatayaggagggaagcaaatgtatatatgtgtacatgaatttttacatatacatacacacatacgcatagatgtatttatgctcacatacagtgaaagagatatg

SEQ ID NO: 309909 - DNA, 201 bp, Homo sapiens
agagagtaatcctgaagatgaaagtgcttcatttgattgtaaagttaagttgtgaacgatgacttttctaccagccagtgtcaacatgggtcaccttgggwtgttatccatgaaaaaaattaagcgttctaaaagatgctgagtcctataagacctcacatggtcttgacctaactcagtggaaagttgtgtcatacaagt

SEQ ID NO: 309910 - DNA, 201 bp, Homo sapiens
gaaagtgcttcatttgattgtaaagttaagttgtgaacgatgacttttctaccagccagtgtcaacatgggtcaccttgggatgttatccatgaaaaaaaktaagcgttctaaaagatgctgagtcctataagacctcacatggtcttgacctaactcagtggaaagttgtgtcatacaagtttcttcttgaatgtttaaa

SEQ ID NO: 309911 - DNA, 201 bp, Homo sapiens
gcttcatttgattgtaaagttaagttgtgaacgatgacttttctaccagccagtgtcaacatgggtcaccttgggatgttatccatgaaaaaaattaagcrttctaaaagatgctgagtcctataagacctcacatggtcttgacctaactcagtggaaagttgtgtcatacaagtttcttcttgaatgtttaaagaaact

SEQ ID NO: 309912 - DNA, 201 bp, Homo sapiens
tgtttgaaaagcattgatatttataaaaagtcttaggaaaagtaaggcctgaagaccttccatagaatgagacgtagttgcatattttatgattaaactarcaataatgatgactaatcttcaaaccctgctatttgccattttatagatttgaaaactgacattcagagaagtttgataacttgcccaaagttacctaag

SEQ ID NO: 309913 - DNA, 201 bp, Homo sapiens
tatgttcaccaaacccagctgaggatgagaaataaaataaaaaagcgatgtttatactttatgtattaggaaaaatatataacatatttagctgcatgctscatttttgaattcatatagcaaattactggtttttaaaagatgtatagagcactgtattacatgcagtatttccagcacaattatgtagctgtgtaattg

SEQ ID NO: 309914 - DNA, 201 bp, Homo sapiens
ctgggcaaaggcagaaagcagcgaagatagcattttgagtggtcagatttatgagggtacagcattaatgtagtgtagtgtagtgagaaccaagggttctktagattagactgccactagggtttagttttaaagataaacattggttacacaaggaaaaaaaaattgtgtgtgtgtgtgtgtgtgtgtgtgtgtgtgtgt

SEQ ID NO: 309915 - DNA, 201 bp, Homo sapiens
tgccatttttctgaggaagtcttagtctttctaatggagaatggtatttaagaaccaagatttcggtgctttgtgtactcattgtagttgggatgtcatgmttccaggactgaggaatgtgtatacacatgcatgtatgcatttatgtctgtatttttataacacctcaattggagatatatatatatttccagtgatatc

SEQ ID NO: 309916 - DNA, 201 bp, Homo sapiens; identical to SEQ ID NO: 64514

SEQ ID NO: 309917 - DNA, 201 bp, Homo sapiens
tctagaacacaacaagatattctagacccatcttgtatctccttttcccctgacctagaatcaactatttctctcagaagctctgatttttactagagatygatagtcaagttctggtgttagctgtgctcatacactgaagtcaagttctggtgttagctgtgctcatacactgaagtcaagttctggtgttagctgtgc

SEQ ID NO: 309918 - DNA, 201 bp, Homo sapiens
ctggtgttagctgtgctcatacattgaagtcaagttctggtgttagctgtgctcatacattgctattggagtgcattatttctagatcctttcagtggtasaattagagaacatgtttattagaagttatgaattgggccaggcatggtggctcacacctgttatcccagcactttgggaggctgaggtaggtggataact

SEQ ID NO: 309919 - DNA, 201 bp, Homo sapiens
aggaagagaaaaccaagtactgcatgttctcacttataagtgggagctaaatgatgagaacttatgaacacaaaggaggaaacaacagacactggggtctmcttgaccccagtcatagtgagactctgtctctacaacaaatagaaaatcccttaaccccaacatagtgagactctgtctctacagcaaatagaaaaaatt

SEQ ID NO: 309920 - DNA, 201 bp, Homo sapiens
tgagagaggcattacagtgcggtgcataggggcatggactttagaatcagataggcctgctttcagtcttagccagatcacttatttactggctgtgtaayattggccaaggcattaaacttttctgagccttctctcaagtgggaatgttagcacctactttatagtattatttgggggtataaatataatgacacgctt

SEQ ID NO: 309921 - DNA, 201 bp, Homo sapiens
gaatgttagcacctactttatagtattatttgggggtataaatataatgacacgcttaaaatgtctgcagtactcacaattaatagctaatattttaatawtagttctaacaataaactattacataattaggagagatcaatggcagaaaaatgcattttatagttttgtatggttcacacagatgaaactggttttttt

SEQ ID NO: 309922 - DNA, 201 bp, Homo sapiens
ttttttgtttgtttgtttttgtagagacaaggttttgccatgctgctcagttgagcagggctcaagtgatccctctctctaggcctcccaaaatgctgggrttacagggatgagccaccatacgtggcccagatgaaactttttaggtgaaaaaacaacctacttaaatgttcatgattttattatctaagtctcaacatt

SEQ ID NO: 309923 - DNA, 201 bp, Homo sapiens
attccattgtgctttttctcatgctgttctttgttccagtaactcctactcacttttctagtcctgtaatttcctccaagaagcctaccctgtgaatccasaaatctggatacctgctattgcatgatttttaacatagcatttgcacataagattgaatttagttactcctctgtttcttcctgagggctgggacttttt

SEQ ID NO: 309924 - DNA, 201 bp, Homo sapiens
tttctcatgctgttctttgttccagtaactcctactcacttttctagtcctgtaatttcctccaagaagcctaccctgtgaatccagaaatctggataccygctattgcatgatttttaacatagcatttgcacataagattgaatttagttactcctctgtttcttcctgagggctgggacttttttcctttttaaatct

SEQ ID NO: 309925 - DNA, 201 bp, Homo sapiens
tgcatgcctgtatttccagctactcagctactcaggaggctgagacaggagaatcgcttgaacctgggaggtggaggttgcagtgagctgagattgtgccrctgcactccagcctgggtgacagagcaagactctgtctcaaaaagacaaaaaaaaaaaaaaaaaaagatgggattcaattgattgtttttgtctcttttt

SEQ ID NO: 309926 - DNA, 201 bp, Homo sapiens
ccctggttaaagcgattctcttgcctcagcctcccaagcagctgggattacaggcacatgccagtacccttggctaacttttttgtatttttgtagagacrgggttttactatgttggccaggctggtctcaaactcctgacctcaagtaatctgcctgccttggcctcccaaagtgctgggattataggtgtgagccact

SEQ ID NO: 309927 - DNA, 201 bp, Homo sapiens
agtcatattaaaaaaagcttaacatcactgatcattagaaaatgcaagtcaaaaccacagtgatataccgtctcatacaagtcagaatagttattattaaraagtcaaaaaataacagatgctggtaagattgcagagaaaaaggaacatttaaacactgttggtgggagtgtaaattagttcaaccattgtggaagacag

SEQ ID NO: 309928 - DNA, 201 bp, Homo sapiens
aattcagttgtgaatccatcaggttctaggcttttttttttttttggttggtaggttatttattactgcttcaatttcattattggtctgttcaggaaatyagtttcttcctggttcagtcttgggagagtgtatgtgtccaggaatttattcatctcttctagttttctagttagtgtgcatagaggtgtttatagtagt

SEQ ID NO: 309929 - DNA, 201 bp, Homo sapiens; identical to SEQ ID NO: 64513

SEQ ID NO: 309930 - DNA, 201 bp, Homo sapiens
ctgaaatacctattaattcttaatattacctctcttggaaagacacaaaaaaagagctgttatttttaggcataagatgacttaggaggcccatagaaacrttctcgtttaaacaacaacaacaaaataaatttatcagcactagatattagatttgaaataagtcattgttcattattgatggttgtcagtttctccttc

SEQ ID NO: 309931 - DNA, 201 bp, Homo sapiens
ctctttgccagagaggggagcatatatcagggggtacttggggaatcaggcttcccccaattctcttggttctaatcttatcttttgctatgtttcctttytttttttcctgtattttctggcattattattgactcagggccaagaattcaaatttcatagtccttcatgattgtctgattctctgtcctcttggatttc

SEQ ID NO: 309932 - DNA, 201 bp, Homo sapiens
tagcagctgtgagattcttggtagctgcattcaaattccaaatacgaacccagaaaaacctctttttttttttttttttttttgagatggagtctagctcygtcgcccaggttgaagtgcaacggtgtgatcgtggctcactgcaacctccgccttctgtgttcaagtgatcctcctgcctcagcctcctgaatagctggg

SEQ ID NO: 309933 - DNA, 201 bp, Homo sapiens
atagaaggatgtctcggaaggagaaagatgtaagaatcttgtggaagaagaatgaagttgctgattctgaagctacaacattttccattttctattaacarcactctgttcctgttcttggtcatttttgcttcttcttcgttttgaagaacttcaaccccacagtgaactacattttgtccataagtgcttcatcaggac

SEQ ID NO: 309934 - DNA, 201 bp, Homo sapiens
gttgctgattctgaagctacaacattttccattttctattaacaacactctgttcctgttcttggtcatttttgcttcttcttcgttttgaagaacttcamccccacagtgaactacattttgtccataagtgcttcatcaggactcatcgccctcctgtctactggctccaagtagaccatgtcagcttcaccccccggc

SEQ ID NO: 309935 - DNA, 201 bp, Homo sapiens
ttcaggatgggagacacacaagatgtttttatagtctagagcctttaaaaaacccaagggaatgtaattgaaaggggaaaaaaaagattttagggagagtrtatgctgccctagacttctgctgacatctgtgatgagaaggcagaattctctaaatatatgggatgaacataatggaagatattataataatgatctgaa

SEQ ID NO: 309936 - DNA, 201 bp, Homo sapiens
tgcatctgattagtgcctttggcaatattattaatctctgtcaagttattttatgattatcaaagcacattaggtttcagaaacttgtctccattgctccygtattgtttattctgcccactttggaggctaaggctcaggtaacccataaaatatataatccatgtctccaactttgcttctttatctggttcatcttct

SEQ ID NO: 309937 - DNA, 201 bp, Homo sapiens
tatttttctatgacagttgagaaactctagttgtactgagtgattcccattgtttctgttagcgatataagtttaatatgggtttctaataaaataatgtyggtagattatgaaacttctggtatctttgtttaactatttctaatgacagtgagctctgtttaaattggcattattgtgacatttgcatatagcatgtta

SEQ ID NO: 309938 - DNA, 201 bp, Homo sapiens
gattatgaaacttctggtatctttgtttaactatttctaatgacagtgagctctgtttaaattggcattattgtgacatttgcatatagcatgttaacagycactattagaatgaatgaacatagcaatattcttaaaatttgggataaaagagaaatctattttgagttttgatttataataatgcaatttaaacattaa

SEQ ID NO: 309939 - DNA, 201 bp, Homo sapiens
tcttgggaatactagataccattttgatactttaccctacagatgtattgtagagaagtaagatagatttaagaaagaccaacttgaagtttctccttggsgtcctacattctgttcatctaaaatacataaatgaaaaacaatagcatcaaatcacccttactggctcccaaaatgataaccatacttatcttttattgg

SEQ ID NO: 309940 - DNA, 201 bp, Homo sapiens
tttttttaaacctgtagcatctgatattcccaggcagtctcccatccaagtactaaccaggcccaaacctgcttagcttccaagatcagatgagattggtrcattcattacacagttctattttatattatgttatcatcaatttcctttcagagaattaaagatggtggtgttattgactcagttaaaacaatctgtgtt

SEQ ID NO: 309941 - DNA, 201 bp, Homo sapiens
ttgagccttgacaaggtcaggaaccaagcctgtttcaggggtgtgtgtaccaggaaccattcatggcactggctgaattgactcttggcaattattttctrttttcatatcacttcactcaggattcaaattcctgggagaggtggagcaagtaagtaggtcttgtacccatcttgataatggggaaggcaggctatatga

SEQ ID NO: 309942 - DNA, 201 bp, Homo sapiens
aaggaaggagagactgcaaatgatgacctcagatttgtggcttcagggagggagtatgctgtcattctttgagatgaggaaagctggcaaagaaatagatrtgggcgaggagataggataggaaagaaattataaatacaattttggactaaatgaatttgaaatctgtggaacgattcagttagacttgtacaaaagggc

SEQ ID NO: 309943 - DNA, 201 bp, Homo sapiens
agaaacttattctacgtattgtagctttacagttttcaactatatgatgctcctcattaaacaattttattataaatagttccatgtgagaaatgtggtaraatatgttatcaactctttacatttgcaggatctgttttggtaactatttttcttaactttgtaaagtctagggggaaggtccaggctgtgtaataaacc

SEQ ID NO: 309944 - DNA, 201 bp, Homo sapiens
ccttaaagggatacacagtaacaaagttgaggaaatgataactgtgtatctattcttaaaacagtttacatatccatatatttcattaatgtagtagtggytgtataattggcgttaacactatgtccctcatgatccagggccagaaccttaatttaaccacctgaagcttctcacatttgatactagcagtgtgttctg

SEQ ID NO: 309945 - DNA, 201 bp, Homo sapiens
agttttaatcccagctcttaccacagtacctctccaagagtaagtacttgataaatgtctgttgagagtcacaaaagtagtgaattcacagggagcatgartcctaattttattagtttggagctttggcccttgggcaaattattaaacttagaatcctaattttcacatctataaaagggacataataaaaataatctt

SEQ ID NO: 309946 - DNA, 201 bp, Homo sapiens
cacaaaagtagtgaattcacagggagcatgagtcctaattttattagtttggagctttggcccttgggcaaattattaaacttagaatcctaattttcacrtctataaaagggacataataaaaataatcttatagggttgccaaggaatcaaataatctgtataaagtcctgtcacatcataaataataatgggtgtagg

SEQ ID NO: 309947 - DNA, 201 bp, Homo sapiens
acattttcccttctggctaccagtgttgcaggtaagagcaagataagatagaaacgtcatgtagagaggccagctgacttcttgggcagggatgatacaayctttatgaagccccacactccagaggctgggtccttagctttgtaagtcccagaaacctttttatttttatttttttttcaatgtatgtagagttgttca

SEQ ID NO: 309948 - DNA, 201 bp, Homo sapiens
ggcagctgcaaacctgggttcagtggacacattgttgaaaagtatctttgccaccttgatgtgtgtgtgtgagagagggtatcttactgttttaatttgcrtttaattttgcatttaatttgaaatatatttatgcatgttacttttagcaagtaattttcctgttgccatttttctcagtcctttgatgctatttcattt

SEQ ID NO: 309949 - DNA, 201 bp, Homo sapiens
ggagaaaaatgcggaaataaaattctgcaaattcggggaatggtggaagaatgctgtgatatttgagagaaggtccatgggcacctcgtagccatcttctkgcaacatccctcctttcttactcttttctttgctggctctcttcttctttattcagcctccctccatggaggctcctcaggtgtctgacctgggttcctt

SEQ ID NO: 309950 - DNA, 201 bp, Homo sapiens
atgggctgaattgtgtccttcaaaattcacatgttgaagtcctaatcttcactaccttagaatgcaactggatttgtagataggggctttaaagatgtaaytaggttaaaatgacatcatttgggtgggccctaatccaatatgactggtgtacttattagaagaggaaatttagacacagacacagggaggatgccattt

SEQ ID NO: 309951 - DNA, 201 bp, Homo sapiens
cctcgtagccatcttctggcaacatccctcctttcttactcttttctttgctggctctcttcttctttattcagcctccctccatggaggctcctcaggtstctgacctgggttcctttcccccaccccaccctcttttcttaggtgactcatttattcccatggcttttaacatctttatgtttatgactccaaagtaca

SEQ ID NO: 309952 - DNA, 201 bp, Homo sapiens
ttttgactatacttctaggaagatttttaattatctgtaaattatttttaatttatctatctcacaaattatttttaaattatctatctcacaaattattragactcttctgtgtttcaggtactctgtgtggcatagaaaatactaaggaggaagactaagttatggctcctgcctttcgaggagctcatggtctaacag

SEQ ID NO: 309953 - DNA, 201 bp, Homo sapiens
atccctcctttcttactcttttctttgctggctctcttcttctttattcagcctccctccatggaggctcctcaggtgtctgacctgggttcctttccccyaccccaccctcttttcttaggtgactcatttattcccatggcttttaacatctttatgtttatgactccaaagtacatatccacagtccagacctctcct

SEQ ID NO: 309954 - DNA, 201 bp, Homo sapiens
cctattaaactaccaaggacattcttcacagaattaaaaaaaaaaaactgttttaaaattcatatggaaagacaaaagagcctgaatagccaaggcaattytaagtgaaaagaacaaagttggagacgtcatgttatctgagttcaaaatatactatagggctatagtaaccaaaataacttggtcctggtacaacaatag

SEQ ID NO: 309955 - DNA, 201 bp, Homo sapiens
ggtgccaacgcacttcagcctgggcaacagagtgaaactctgtctcaaaaaaaaaaaaaaaaaaaaaaaaaaaaaaaaagagctagcattctaggaagtaraagaaacttattctacgtattgtagctttacagttttcaactatatgatgctcctcattaaacaattttattataaatagttccatgtgagaaatgtggt

SEQ ID NO: 309956 - DNA, 201 bp, Homo sapiens
gccaacgcacttcagcctgggcaacagagtgaaactctgtctcaaaaaaaaaaaaaaaaaaaaaaaaaaaaaaaaagagctagcattctaggaagtagaaraaacttattctacgtattgtagctttacagttttcaactatatgatgctcctcattaaacaattttattataaatagttccatgtgagaaatgtggtaga

SEQ ID NO: 309957 - DNA, 201 bp, Homo sapiens
taggaagtagaagaaacttattctacgtattgtagctttacagttttcaactatatgatgctcctcattaaacaattttattataaatagttccatgtgaraaatgtggtagaatatgttatcaactctttacatttgcaggatctgttttggtaactatttttcttaactttgtaaagtctagggggaaggtccaggctg

SEQ ID NO: 309958 - DNA, 201 bp, Homo sapiens
tgggagcccacttgggcctttgataacatctctccctatggattaataaactgatttggtgagatctgttctttgtgaatttggctagtgtgaatcaatcsctaagattcagatcagctctgggaacactgaaaaaaataagcattcctgggtctgcaatactgaggattgctggtgcgcacatcctgccgagtgctgctg

SEQ ID NO: 309959 - DNA, 201 bp, Homo sapiens
ggaccatcctgcttgtttttgtctataaacagattgatttatgtacctggatcataggctcatagacaaacacggcttctgtttccttagaggtgaaaacygccctctggaggctggtccaagccagaatttaaaatttaacttttgctttggtgccaccaagtggttagctttgagatggcttggcaaatacataatgat

SEQ ID NO: 309960 - DNA, 201 bp, Homo sapiens
gatatacatgactctgggctggggatacttacattgctaggcagtacggaatcctggacagtgctgatgataggtcaacttaatctttttctttggatacyctttttgaaactctatgctgagtgcatgataattctttcttccctcacacaggacatactataactggcaaggccaatactgtaggcttgctgatacagc

SEQ ID NO: 309961 - DNA, 201 bp, Homo sapiens
aaagtttgatttaattgtccaaacttaaaaaatttaaaaatccggagatgcacacaaaactctgagtatcctctttctttccttctttctctctctctctkttcttttcttttctttctttcacagggtctcactgtgttgcaatcatggctcactgcagccttgaccacctgagctcaagctatcctcccatctcaacct

SEQ ID NO: 309962 - DNA, 201 bp, Homo sapiens
gccaccacacctgcctaatttttaaatttttagtagagacggggtttcaccatgttggccaggctggtctcgaactcctgacctcaaatgatccacccatstcagactcccaaagtgctgggatttcaggtgtgagccattgcacccagactttctctttattttctataatgacattggctgatatttctataatgttta

SEQ ID NO: 309963 - DNA, 201 bp, Homo sapiens
tatatcatgctcaccaaacttacaagagacactttttgaaaagtcagattggcaatatattattttacaattagaaatgtgtaatcaatggtaaaccaaarcacatgtggtagatgagaagttcatttttcaccctgcaggaaatttatatgggcagacaaaccataccaagtaggttgcttggtgaaattgcagtagggt

SEQ ID NO: 309964 - DNA, 201 bp, Homo sapiens
aggagattccattttcatagcccatttccccagcaagcaattacctcagcaataatgatgtaaacaactttttttggttggtttttgttttttgagatggwgtcttgttctgtcgcccaggctggagtgcagtggcacgatcttggctgactgaaacctccacctcctgggttcaagtgattgtcctgcctcagcttgcct

SEQ ID NO: 309965 - DNA, 201 bp, Homo sapiens
tgtgaactcttgctccctgctcttgtccttgctgtctgcagggaattccttccttggaacctgctttcaggctctttttcttttggaccctatttctgttrgtatgtcaactctgattttatcccttgtgctttcaagaggtgtgggctggagcgttgttcaggaaagcatatgaactttgaaatctggtttgtatctgca

SEQ ID NO: 309966 - DNA, 201 bp, Homo sapiens
caactctgattttatcccttgtgctttcaagaggtgtgggctggagcgttgttcaggaaagcatatgaactttgaaatctggtttgtatctgcaagacctsgttttgaatcccagccccatttcttactgccttcagttcccttatcagtaaaatgagggcaatcaccggtctcataggttggtatgagtattaaatggga

SEQ ID NO: 309967 - DNA, 201 bp, Homo sapiens
caattttgactataattaccaattttgactatacttctaggaagatttttaattatctgtaaattatttttaatttatctatctcacaaattatttttaawttatctatctcacaaattattgagactcttctgtgtttcaggtactctgtgtggcatagaaaatactaaggaggaagactaagttatggctcctgccttt

SEQ ID NO: 309968 - DNA, 201 bp, Homo sapiens
agttttgtgatagaaactacattagccttcacagtaatctgttgggatgctttctgtgtatatgtatgtttccctgttcattgtattgtagaaatagagcygaggtcaaaggctggaaagtcatcaggagaaaaaattggttgtggaagggcaacacttcgcctgagatcaaaaggtcctgccaccgtggaagaaatggta

SEQ ID NO: 309969 - DNA, 201 bp, Homo sapiens
acacactaggactctatatctttgattaattttgtctactgtctagctcctttgctcacatgtcttgttcactgctgcatccccagcacctagaataggayctgatataccaaaggaatggaaatctttggtgcattaatgaattagtaaacgattccttttagtttgagaaaagcaaggatttttccctttgaatgactt

SEQ ID NO: 309970 - DNA, 201 bp, Homo sapiens
aagcaaggatttttccctttgaatgactttgtctatatataggtcagtgtttgagtgaaaaacaccagaaggagaagtgacaactagaggcaagaagggtrgaggaagaaaactgcaagtttggggtggcgatggtaaggattccaagtggcaagcagcaggcccacaacagcagcaaaggcatgggggtcaaagccctcc

SEQ ID NO: 309971 - DNA, 201 bp, Homo sapiens
aggctattatcctcagcaaactaatgcaggaaggaagagaaaaccaagtactgcatgttctcacttataagtgggagctaaatgatgagaacttatgaacrcaaaggaggaaacaacagacactggggtctacttgaccccagtcatagtgagactctgtctctacaacaaatagaaaatcccttaaccccaacatagtga

SEQ ID NO: 309972 - DNA, 201 bp, Homo sapiens
aaaaaaaaaaaaaaaaaaagatgggattcaattgattgtttttgtctctttttcctcatattcaacattttaaaataagagatattaatgtttgtaaatgstcatagaattgccatagtgcaacaacaggagcagactgatataaatgttttatgttacaaatccaaataacatgggcagcattgctgtcaatgacttgat

SEQ ID NO: 309973 - DNA, 201 bp, Homo sapiens
atggaaagacaaaagagcctgaatagccaaggcaattctaagtgaaaagaacaaagttggagacgtcatgttatctgagttcaaaatatactatagggctwtagtaaccaaaataacttggtcctggtacaacaatagatatatagaccaatggaacaaaaaagagaacccagaagtaaggctgcatgcctacaattatct

SEQ ID NO: 309974 - DNA, 201 bp, Homo sapiens
gaggcttttaagaagataagtggttcagaaagcatggaaaatttaacagcacctgacgggggaaatagcagtgatttatgatgtctttcaaattggcatgmaatgttgcagcattattagactaggataagctcaggtatctcctctgagtgtaaaaagattgtgggagaggatgatatatatatatatatatggctatat

SEQ ID NO: 309975 - DNA, 201 bp, Homo sapiens
cttaagcgatcctcccacttcagcctcctgagagctttttagtttaaaaagtatatttatacacttactgaatttttgtaatgaccatttgatgtagaccraactttaataatgccacaatttacgtgaggatcaaggaggccaaatgactcaactaaaccccctgagactgaagggtacataattgaaactagatccaga

SEQ ID NO: 309976 - DNA, 201 bp, Homo sapiens
tcttctttctatttaacacattacaagaatgagactattccagtctatcgatttatttattttactgatattggaagtaaggaggagagattgtctgaaakttttgttaggggtgatagaatatgaaattaggatgccataatacctcagcgtattaaaagaaacacaattcaccatgtactttagatattttttaaagga

SEQ ID NO: 309977 - DNA, 201 bp, Homo sapiens
attagactgccactagggtttagttttaaagataaacattggttacacaaggaaaaaaaaattgtgtgtgtgtgtgtgtgtgtgtgtgtgtgtgtgtgtgkatgtatgtattatggattcatggcttcctgttctattcactggagttataatatattaccatcattacttatttggatatttaaattatccctgatttgg

SEQ ID NO: 309978 - DNA, 201 bp, Homo sapiens
ctgcagtgagctaggatggcgccactgcactttagactggacaatagagtgagaccctgtctctaaaaataaataaataaataaataaatgaaaaaaaaaagaagaaaatgcagcttaaaaaaaggaaattcagggcactaaacattccttacaaattctttgtaaattaaccagaaatttatttgtaaggtgaattagtt

SEQ ID NO: 309979 - DNA, 201 bp, Homo sapiens; identical to SEQ ID NO: 64515

SEQ ID NO: 309980 - DNA, 201 bp, Homo sapiens
cctgattttgtggaaggtcagataaacaacttagtttggcttagtgagtggaacttcagcatgagtaactccattttggtttggtctgttaggcctagtayaggagctcagtccaaaccaatcacctcctataaattttatttaacaatctattcttattttctttcttgcctgtgtgaacttttatttatcttctaattt

SEQ ID NO: 309981 - DNA, 201 bp, Homo sapiens
ttttactattgggatgagccatcaaacgtttggagaccctggcctgcaccataaagaccaaagtccttttcatggtacacaggactcctcaagatctagtmatatttgtcactgtgttctccagctacatgggacttctggcatccctctaacatgactctgtgaccttacttagactttgcctatctattgcatcctact

SEQ ID NO: 309982 - DNA, 201 bp, Homo sapiens
gagcccaggaggcggaggttgcagcgagccgagattatgccattgcactccagcctgggtgacagagtgagactccatctcaaaaaaaaaaaaaaaaaaarggtcaggaagtgtttctctccggaagaaattagtgagtgagttcaaaatggggaagaagagtgttctaggcatggaacaataatgggttttggggacctg

SEQ ID NO: 309983 - DNA, 201 bp, Homo sapiens
gaatctctctagccaacataaaaacacattttatgatgtaactctttacatcataaattgaggagtatttcagtcaataaatgtttataaataaattaacrgtcagatgtattccaagtggaaatggacctgacattttatttttctttgcagatcttatattgcactttaaacacacctaaaattgacatggaaagactc

SEQ ID NO: 309984 - DNA, 201 bp, Homo sapiens
aggcattagattatcataaggtgcaggcaatctagatccctcgcatgtgcagctcaccttagggttcatgctcctatgagagtgtaatgccgctgctgatmtgacagaaggctgaactcagtcagtaatgcttgcctgcctgctactcacctcctgctgtgtggcctggttcctaacaggccaagggctggtaccagtctg

SEQ ID NO: 309985 - DNA, 201 bp, Homo sapiens
gctactcacctcctgctgtgtggcctggttcctaacaggccaagggctggtaccagtctgcagcctaggggttggggacccctgcaataagacaaataagkctagtaagataaaatccctacctactaaaaggttttattttaattttattttttttgagatagagtctcgctctgtcacccaggctgaggtgcagtggtg

SEQ ID NO: 309986 - DNA, 201 bp, Homo sapiens
ggtcattagaagttcagtttgtgtgagatttcctttttttcctttttgtttttctctatcctgttataccatcatggtattttaattttttttttcctagstaatgggtaaattgcttttatattggtgtttgggacccactgtgaataccatggacagattcaccggaaaaaaaaaaaaaaaaaacaacaaaccaaggag

SEQ ID NO: 309987 - DNA, 201 bp, Homo sapiens
caggccaaagaaagttagaaatgatcttcagagtgagagcccgctcagcaaggatgcatgaattggtaatgtttcactttcattttaaaaatgttcagatrtcagtttgtgtttactattttcttaatttcttccctttagtttaaacttcccctagaatttagaactaactgaaaggaaagtctaaccctggtgcctact

SEQ ID NO: 309988 - DNA, 201 bp, Homo sapiens
tagaaaatcccttaaccccaacatagtgagactctgtctctacagcaaatagaaaaaattagctgggtatagtggcatgcacctatagtaccagctactcwtgaggctgaggtgggagaattgcttgagcctggggaactcaaggttgcagtgagccatgatcatgccaccactctcagcaagacactgtctcttaaaaaa

SEQ ID NO: 309989 - DNA, 201 bp, Homo sapiens
tctgttcatctaaaatacataaatgaaaaacaatagcatcaaatcacccttactggctcccaaaatgataaccatacttatcttttattgggtatcaggcrtcttagctaagatggtattattctttgtgtctttgcatctgtaactaaatgcagccaattgaaaaagctcaagctctattcttatgtgatgggcctcaat

SEQ ID NO: 309990 - DNA, 201 bp, Homo sapiens
tcttgtaaagaatgatatatgtatatataaacattttattttaatttaaaacatagatgtgaatagtgaacagcattcgttatttgggtgatgggtacacraaaagcccagacttcaccactagcagcatatgcatgtaagaaaccggcactcgtactcccgacatgaaaactaaaaatcaatgtttaggttcatagcaaa

SEQ ID NO: 309991 - DNA, 201 bp, Homo sapiens
tttctctctacctgagcttcatcaaatagcaaaaactaggggtttgcttgtttattgaaaatgtcagttaaaataggctcttgtaaagaatgatatatgtrtatataaacattttattttaatttaaaacatagatgtgaatagtgaacagcattcgttatttgggtgatgggtacacgaaaagcccagacttcaccacta

SEQ ID NO: 309992 - DNA, 201 bp, Homo sapiens; identical to SEQ ID NO: 64516

SEQ ID NO: 309993 - DNA, 201 bp, Homo sapiens
ttcctacccctccctagaatcttctgaatgtagtaccttctggccaggtatgagaacaccctggctgctcagttctttggccacactcatgtggatgaatytgaggtcttctatgatgaagagactctgagccggccgctggctgtagccttcctggcacccagtgcaactacctacatcggccttaatcctggtgagtga

SEQ ID NO: 309994 - DNA, 201 bp, Homo sapiens; identical to SEQ ID NO: 64518

SEQ ID NO: 309995 - DNA, 201 bp, Homo sapiens; identical to SEQ ID NO: 64519

SEQ ID NO: 309996 - DNA, 201 bp, Homo sapiens; identical to SEQ ID NO: 64520

SEQ ID NO: 309997 - DNA, 201 bp, Homo sapiens
ggaacaagtgttgacctctcatgtttactttgtttcagaattggggggttctatgctctttccccataccccggtctccgcctcatctctctcaatatgartttttgttcccgtgagaacttctggctcttgatcaactccacggatcccgcaggacagctccagtggctggtgggggagcttcaggctgctgaggatcga

SEQ ID NO: 309998 - DNA, 201 bp, Homo sapiens
tttactttgtttcagaattggggggttctatgctctttccccataccccggtctccgcctcatctctctcaatatgaatttttgttcccgtgagaacttckggctcttgatcaactccacggatcccgcaggacagctccagtggctggtgggggagcttcaggctgctgaggatcgaggagacaaagtgagggccagtag

SEQ ID NO: 309999 - DNA, 201 bp, Homo sapiens; identical to SEQ ID NO: 64524

SEQ ID NO: 310000 - DNA, 201 bp, Homo sapiens
ggagccagagcctgcaaagcatgggcaggatgtgtggcccctccctggagttacccttgctccttgcccctccagtcagccccacatccttgcaggttacygtgtgtaccaaatagatggaaactactccgggagctctcacgtggtcctggaccatgagacctacatcctgaatctgacccaggcaaacataccgggagc

SEQ ID NO: 310001 - DNA, 201 bp, Homo sapiens
ttgctccttgcccctccagtcagccccacatccttgcaggttaccgtgtgtaccaaatagatggaaactactccgggagctctcacgtggtcctggaccakgagacctacatcctgaatctgacccaggcaaacataccgggagccataccgcactggcagcttctctacagggctcgagaaacctatgggctgcccaaca

SEQ ID NO: 310002 - DNA, 201 bp, Homo sapiens; identical to SEQ ID NO: 64526

SEQ ID NO: 310003 - DNA, 201 bp, Homo sapiens
gctccttgcccctccagtcagccccacatccttgcaggttaccgtgtgtaccaaatagatggaaactactccgggagctctcacgtggtcctggaccatgwgacctacatcctgaatctgacccaggcaaacataccgggagccataccgcactggcagcttctctacagggctcgagaaacctatgggctgcccaacaca

SEQ ID NO: 310004 - DNA, 201 bp, Homo sapiens; identical to SEQ ID NO: 64528

SEQ ID NO: 310005 - DNA, 201 bp, Homo sapiens; identical to SEQ ID NO: 64529

SEQ ID NO: 310006 - DNA, 201 bp, Homo sapiens; identical to SEQ ID NO: 64530

SEQ ID NO: 310007 - DNA, 201 bp, Homo sapiens
ggatgccctgattaccatccttaattctccctactaggtgcatataattggccacattcccccagggcactgtctgaagagctggagctggaattattacygaattgtagccaggtaggacggagatgagggtgggaatagggacagggtgagtgtctgaaggctgaaaattcccttgagcatctcaccatccctgttgtc

SEQ ID NO: 310008 - DNA, 201 bp, Homo sapiens
tcctcactagaacaggttggagaaagagggcatcctatctccccagatgtcttcctacccctccctagaatcttctgaatgtagtaccttctggccaggtrtgagaacaccctggctgctcagttctttggccacactcatgtggatgaatttgaggtcttctatgatgaagagactctgagccggccgctggctgtagcc

SEQ ID NO: 310009 - DNA, 201 bp, Homo sapiens
gagccagagcctgcaaagcatgggcaggatgtgtggcccctccctggagttacccttgctccttgcccctccagtcagccccacatccttgcaggttaccktgtgtaccaaatagatggaaactactccgggagctctcacgtggtcctggaccatgagacctacatcctgaatctgacccaggcaaacataccgggagcc

SEQ ID NO: 310010 - DNA, 201 bp, Homo sapiens; identical to SEQ ID NO: 64534

SEQ ID NO: 310011 - DNA, 201 bp, Homo sapiens
ctcttgttaccactccagtgttatcacttccttgaagggattagatctctccctccccagctcctaggcagggaaccgtagctactggggaggggcatatytgggaggcctgaggcctaggaatagcctctagacccctccctgacccacaccctttagttccctggggcccaacacaagcaggtggagggaaggtggggg

SEQ ID NO: 310012 - DNA, 201 bp, Homo sapiens
ttggaacaagtgttgacctctcatgtttactttgtttcagaattggggggttctatgctctttccccataccccggtctccgcctcatctctctcaatatraatttttgttcccgtgagaacttctggctcttgatcaactccacggatcccgcaggacagctccagtggctggtgggggagcttcaggctgctgaggatc

SEQ ID NO: 310013 - DNA, 201 bp, Homo sapiens; identical to SEQ ID NO: 64536

SEQ ID NO: 310014 - DNA, 201 bp, Homo sapiens; identical to SEQ ID NO: 64537

SEQ ID NO: 310015 - DNA, 201 bp, Homo sapiens
cagaaggaacccaatgtggctcgcgtgggctccgtggccatcaagctgtgcaatctgctgaagatagcaccacctgccgtgtgccaatccattgtccaccyctttgaggatgacatggtggaggtgtggagacgctcagtgctgagcccatctgaggcctgtggcctgctcctgggctccacctgtgggcactgggacatt

SEQ ID NO: 310016 - DNA, 201 bp, Homo sapiens; identical to SEQ ID NO: 64540

SEQ ID NO: 310017 - DNA, 201 bp, Homo sapiens; identical to SEQ ID NO: 64539

SEQ ID NO: 310018 - DNA, 201 bp, Homo sapiens; identical to SEQ ID NO: 64541

SEQ ID NO: 310019 - DNA, 201 bp, Homo sapiens
cctcccttatcctggagttggtgggataggggaaggaggttggagccagagcctgcaaagcatgggcaggatgtgtggcccctccctggagttacccttgytccttgcccctccagtcagccccacatccttgcaggttaccgtgtgtaccaaatagatggaaactactccgggagctctcacgtggtcctggaccatgag

SEQ ID NO: 310020 - DNA, 201 bp, Homo sapiens; identical to SEQ ID NO: 64542

SEQ ID NO: 310021 - DNA, 201 bp, Homo sapiens; identical to SEQ ID NO: 64543

SEQ ID NO: 310022 - DNA, 201 bp, Homo sapiens
tgtgtggcccctccctggagttacccttgctccttgcccctccagtcagccccacatccttgcaggttaccgtgtgtaccaaatagatggaaactactccrggagctctcacgtggtcctggaccatgagacctacatcctgaatctgacccaggcaaacataccgggagccataccgcactggcagcttctctacagggc

SEQ ID NO: 310023 - DNA, 201 bp, Homo sapiens; identical to SEQ ID NO: 64545

SEQ ID NO: 310024 - DNA, 201 bp, Homo sapiens; identical to SEQ ID NO: 64546

SEQ ID NO: 310025 - DNA, 201 bp, Homo sapiens; identical to SEQ ID NO: 64547

SEQ ID NO: 310026 - DNA, 201 bp, Homo sapiens; identical to SEQ ID NO: 64548

SEQ ID NO: 310027 - DNA, 201 bp, Homo sapiens; identical to SEQ ID NO: 64549

SEQ ID NO: 310028 - DNA, 201 bp, Homo sapiens; identical to SEQ ID NO: 64550

SEQ ID NO: 310029 - DNA, 201 bp, Homo sapiens; identical to SEQ ID NO: 64551

SEQ ID NO: 310030 - DNA, 201 bp, Homo sapiens; identical to SEQ ID NO: 64552

SEQ ID NO: 310031 - DNA, 201 bp, Homo sapiens; identical to SEQ ID NO: 64553

SEQ ID NO: 310032 - DNA, 201 bp, Homo sapiens; identical to SEQ ID NO: 64554

SEQ ID NO: 310033 - DNA, 201 bp, Homo sapiens; identical to SEQ ID NO: 64555

SEQ ID NO: 310034 - DNA, 201 bp, Homo sapiens; identical to SEQ ID NO: 64556

SEQ ID NO: 310035 - DNA, 201 bp, Homo sapiens; identical to SEQ ID NO: 64557

SEQ ID NO: 310036 - DNA, 201 bp, Homo sapiens; identical to SEQ ID NO: 64558

SEQ ID NO: 310037 - DNA, 201 bp, Homo sapiens; identical to SEQ ID NO: 64559

SEQ ID NO: 310038 - DNA, 201 bp, Homo sapiens; identical to SEQ ID NO: 64642

SEQ ID NO: 310039 - DNA, 201 bp, Homo sapiens; identical to SEQ ID NO: 64645

SEQ ID NO: 310040 - DNA, 201 bp, Homo sapiens
gtcaatagcttccctccccccttcattgagggcaaccactcctcccgctggctctatgaagcgatggccaaggcttgggagccctggctgcctgccgaagmcctgcgcaccctcaggtacttatcgtccgtggaaacccaggaagggaaaagaaaggtgaatgaaagtgaagggagaagggaacctggggcattgtctctg

SEQ ID NO: 310041 - DNA, 201 bp, Homo sapiens; identical to SEQ ID NO: 64562

SEQ ID NO: 310042 - DNA, 201 bp, Homo sapiens
tcatgtttactttgtttcagaattggggggttctatgctctttccccataccccggtctccgcctcatctctctcaatatgaatttttgttcccgtgagamcttctggctcttgatcaactccacggatcccgcaggacagctccagtggctggtgggggagcttcaggctgctgaggatcgaggagacaaagtgagggcc

SEQ ID NO: 310043 - DNA, 201 bp, Homo sapiens; identical to SEQ ID NO: 64565

SEQ ID NO: 310044 - DNA, 201 bp, Homo sapiens
gctggccttgcttcctgctcctcttgttaccactccagtgttatcacttccttgaagggattagatctctccctccccagctcctaggcagggaaccgtasctactggggaggggcatatttgggaggcctgaggcctaggaatagcctctagacccctccctgacccacaccctttagttccctggggcccaacacaagc

SEQ ID NO: 310045 - DNA, 201 bp, Homo sapiens
agctactggggaggggcatatttgggaggcctgaggcctaggaatagcctctagacccctccctgacccacaccctttagttccctggggcccaacacaakcaggtggagggaaggtgggggcttcttcatggggtatgggcccccagccgtttgggcttcagggagccccacagcgactgaacacccctgcggacagtcc

SEQ ID NO: 310046 - DNA, 201 bp, Homo sapiens; identical to SEQ ID NO: 64566

SEQ ID NO: 310047 - DNA, 201 bp, Homo sapiens
cagcacaggaggaccaggattggaacaagtgttgacctctcatgtttactttgtttcagaattggggggttctatgctctttccccataccccggtctccdcctcatctctctcaatatgaatttttgttcccgtgagaacttctggctcttgatcaactccacggatcccgcaggacagctccagtggctggtgggggag

SEQ ID NO: 310048 - DNA, 201 bp, Homo sapiens
gaggaccaggattggaacaagtgttgacctctcatgtttactttgtttcagaattggggggttctatgctctttccccataccccggtctccgcctcatcyctctcaatatgaatttttgttcccgtgagaacttctggctcttgatcaactccacggatcccgcaggacagctccagtggctggtgggggagcttcaggc

SEQ ID NO: 310049 - DNA, 201 bp, Homo sapiens; identical to SEQ ID NO: 64568

SEQ ID NO: 310050 - DNA, 201 bp, Homo sapiens
ctcaatatgaatttttgttcccgtgagaacttctggctcttgatcaactccacggatcccgcaggacagctccagtggctggtgggggagcttcaggctgytgaggatcgaggagacaaagtgagggccagtagtgggaacacggtggtgctgggggacaagcaggctcctgttgagctggagcacctctgggcacagaag

SEQ ID NO: 310051 - DNA, 201 bp, Homo sapiens
gtcactgttgaaagccttcattcagtccccctttctctagccagggctgcctggacccctggatgccctgattaccatccttaattctccctactaggtgyatataattggccacattcccccagggcactgtctgaagagctggagctggaattattaccgaattgtagccaggtaggacggagatgagggtgggaatag

SEQ ID NO: 310052 - DNA, 201 bp, Homo sapiens
ggagaaagagggcatcctatctccccagatgtcttcctacccctccctagaatcttctgaatgtagtaccttctggccaggtatgagaacaccctggctgytcagttctttggccacactcatgtggatgaatttgaggtcttctatgatgaagagactctgagccggccgctggctgtagccttcctggcacccagtgca

SEQ ID NO: 310053 - DNA, 201 bp, Homo sapiens
gtaccttctggccaggtatgagaacaccctggctgctcagttctttggccacactcatgtggatgaatttgaggtcttctatgatgaagagactctgagcyggccgctggctgtagccttcctggcacccagtgcaactacctacatcggccttaatcctggtgagtgaggcagaagggagcctcccttatcctggagttg

SEQ ID NO: 310054 - DNA, 201 bp, Homo sapiens; identical to SEQ ID NO: 64573

SEQ ID NO: 310055 - DNA, 201 bp, Homo sapiens
cttctggccaggtatgagaacaccctggctgctcagttctttggccacactcatgtggatgaatttgaggtcttctatgatgaagagactctgagccggcygctggctgtagccttcctggcacccagtgcaactacctacatcggccttaatcctggtgagtgaggcagaagggagcctcccttatcctggagttggtgg

SEQ ID NO: 310056 - DNA, 201 bp, Homo sapiens
agaacaccctggctgctcagttctttggccacactcatgtggatgaatttgaggtcttctatgatgaagagactctgagccggccgctggctgtagccttmctggcacccagtgcaactacctacatcggccttaatcctggtgagtgaggcagaagggagcctcccttatcctggagttggtgggataggggaaggaggt

SEQ ID NO: 310057 - DNA, 201 bp, Homo sapiens; identical to SEQ ID NO: 64577

SEQ ID NO: 310058 - DNA, 201 bp, Homo sapiens
ctttggccacactcatgtggatgaatttgaggtcttctatgatgaagagactctgagccggccgctggctgtagccttcctggcacccagtgcaactaccwacatcggccttaatcctggtgagtgaggcagaagggagcctcccttatcctggagttggtgggataggggaaggaggttggagccagagcctgcaaagca

SEQ ID NO: 310059 - DNA, 201 bp, Homo sapiens
gcctcatctctctcaatatgaatttttgttcccgtgagaacttctggctcttgatcaactccacggatcccgcaggacagctccagtggctggtgggggarcttcaggctgctgaggatcgaggagacaaagtgagggccagtagtgggaacacggtggtgctgggggacaagcaggctcctgttgagctggagcacctct

SEQ ID NO: 310060 - DNA, 201 bp, Homo sapiens
ggatgaatttgaggtcttctatgatgaagagactctgagccggccgctggctgtagccttcctggcacccagtgcaactacctacatcggccttaatcctrgtgagtgaggcagaagggagcctcccttatcctggagttggtgggataggggaaggaggttggagccagagcctgcaaagcatgggcaggatgtgtggcc

SEQ ID NO: 310061 - DNA, 201 bp, Homo sapiens; identical to SEQ ID NO: 64581

SEQ ID NO: 310062 - DNA, 201 bp, Homo sapiens; identical to SEQ ID NO: 64582

SEQ ID NO: 310063 - DNA, 201 bp, Homo sapiens; identical to SEQ ID NO: 64583

SEQ ID NO: 310064 - DNA, 201 bp, Homo sapiens; identical to SEQ ID NO: 64584

SEQ ID NO: 310065 - DNA, 201 bp, Homo sapiens
gctcctgttgagctggagcacctctgggcacagaagttttattttcctggcattcccaacaagtgttccctggggattcagctcatggtcactgttgaaarccttcattcagtccccctttctctagccagggctgcctggacccctggatgccctgattaccatccttaattctccctactaggtgcatataattggcca

SEQ ID NO: 310066 - DNA, 201 bp, Homo sapiens
tgaggatgctggactcatggtcctgaggcccctccttgtgctggaaaccctggtttctaggatgctggtctctcctcagccctttcccgtggaaggagttrgttctgctctgatagccaccttcccatttcctattctcccactgagctcctttcaccttcccctaacaacttctccgtcaaggagcatgggaacaaagcc

SEQ ID NO: 310067 - DNA, 201 bp, Homo sapiens
gggatgggaaggctgtgagacagtcaaggctgacgtctccttctcctcctatagttgccaggggtggcccagctgttctcccaccttatgggttatgcacmccataggctcttgctactctcaacccagcccctcactaggctggaaaatgagactaggtgagaccaccttccttctggggaaagtgagcgggacccagct

SEQ ID NO: 310068 - DNA, 201 bp, Homo sapiens
caccaggtggtgtccggccctcgctgtcctcacctccccagaggtcagagaaggatatgggagggggtggggtggggtgagggggacgcggcggggacggsggggacggtggttggtagtctcactcctgtccattcacctacaggttgagtatcccttatccaaaatgcttggggccagaagtgtctcagatttaagatt

SEQ ID NO: 310069 - DNA, 201 bp, Homo sapiens
gagctaccgtacctggcccttgtggaaattctatttgttgtgtagccctagtctttcttgctgcccatggtctgatttctggcctctcaccctctgcccccatgcacccgcaggctgttgcaggacctgttccccaaagcggcagagctgtacgagcgcgtggcctccaaccgtgagcactggaccaaggtgtcccacaag

SEQ ID NO: 310070 - DNA, 201 bp, Homo sapiens
tgggattacaggcatgcaccaccacgcccagctaattttgtatttttagtagagatggggcttcaccattttggtcaggctggtcttgaactcctgacttcaggtgatccacacacctcggcatctctgagtgttgggattacaggcgtgagctaccgtacctggcccttgtggaaattctatttgttgtgtagccctagt

SEQ ID NO: 310071 - DNA, 201 bp, Homo sapiens
ctgggattacaggcatgcaccaccacgcccagctaattttgtatttttagtagagatggggcttcaccattttggtcaggctggtcttgaactcctgacttcaggtgatccacacacctcggcatctctgagtgttgggattacaggcgtgagctaccgtacctggcccttgtggaaattctatttgttgtgtagccctag

SEQ ID NO: 310072 - DNA, 201 bp, Homo sapiens
gctgggattacaggcatgcaccaccacgcccagctaattttgtatttttagtagagatggggcttcaccattttggtcaggctggtcttgaactcctgacttcaggtgatccacacacctcggcatctctgagtgttgggattacaggcgtgagctaccgtacctggcccttgtggaaattctatttgttgtgtagcccta

SEQ ID NO: 310073 - DNA, 201 bp, Homo sapiens
tagctgggattacaggcatgcaccaccacgcccagctaattttgtatttttagtagagatggggcttcaccattttggtcaggctggtcttgaactcctgacttcaggtgatccacacacctcggcatctctgagtgttgggattacaggcgtgagctaccgtacctggcccttgtggaaattctatttgttgtgtagccc

SEQ ID NO: 310074 - DNA, 201 bp, Homo sapiens
tgttcagagtatggggccttggtccctgttgcttagaccttcttgccttggtatctctgatgggctcagctcttagtagcctttgtgtatgtgtgtgtgtrtgtgtgtgtgtgtgtgtgtgtgtgtgtgtgtgtgtgtgtagtggggactggggtcaggggtcagggactgactctaacctgaggcacccctggagtgggg

SEQ ID NO: 310075 - DNA, 201 bp, Homo sapiens
ggtagggacttaagtgaggggatggaggctgagtgagtgtgtgggggctcattgagagggtgggggctaagtggggaatgggggctcagtgaggggatggrggctcagtgagaggatgagggctcagtgaggggatgggggctcggtgaggggatgggggttcaatgaggggatgggggctgagtgaggggatgggggctg

SEQ ID NO: 310076 - DNA, 201 bp, Homo sapiens
ctgatgggctcagctcttagtagcctttgtgtatgtgtgtgtgtgtgtgtgtgtgtgtgtgtgtgtgtgtgtgtgtgtgtgtgtagtggggactggggtcwggggtcagggactgactctaacctgaggcacccctggagtggggccagcccaggaatagcaggtggaggaaagccgggcagcctcagggctgcagctgtc

SEQ ID NO: 310077 - DNA, 201 bp, Homo sapiens
gtagctgggattacaggcatgcaccaccacgcccagctaattttgtatttttagtagagatggggcttcaccattttggtcaggctggtcttgaactcctgacttcaggtgatccacacacctcggcatctctgagtgttgggattacaggcgtgagctaccgtacctggcccttgtggaaattctatttgttgtgtagcc

SEQ ID NO: 310078 - DNA, 201 bp, Homo sapiens
aagtagctgggattacaggcatgcaccaccacgcccagctaattttgtatttttagtagagatggggcttcaccattttggtcaggctggtcttgaactcctgacttcaggtgatccacacacctcggcatctctgagtgttgggattacaggcgtgagctaccgtacctggcccttgtggaaattctatttgttgtgtag

SEQ ID NO: 310079 - DNA, 201 bp, Homo sapiens
caagtagctgggattacaggcatgcaccaccacgcccagctaattttgtatttttagtagagatggggcttcaccattttggtcaggctggtcttgaactcctgacttcaggtgatccacacacctcggcatctctgagtgttgggattacaggcgtgagctaccgtacctggcccttgtggaaattctatttgttgtgta

SEQ ID NO: 310080 - DNA, 201 bp, Homo sapiens
ttctaccgcggcgtggacgacagcaccggcttccgcacgcgcaacatcctctgcttccccatcaagaacgagaaccagggtgcgcgtggcggcccgggcgsaggggcggggcctgcgccgggcggggcgggtccgagcgagcgggggtggcaacacttccccaccgcctccggcgtcccggagcataagggagtcgggttc

SEQ ID NO: 310081 - DNA, 201 bp, Homo sapiens
agactgtaggctccaatacagcagggacagggctggctttggatcctcagctcctatcacagtgcctggcacatagtaggtgcttccaaaaaaaaaaaaaacaaaacacttgaatggacacgtttctggagccagccagccctgagcagagtgtcttaccttggagcactcctcccaggcctcggaaatccggcctttgcc

SEQ ID NO: 310082 - DNA, 201 bp, Homo sapiens
gctctgggttggatgaaccctctgggacccacaaagcatcatcaacacagtggacagtggctaaagggaatatgcttggggactgggaaaagctgtggatcttttgagcccctgacagggcagctataaaaatgatacacaaaaatctctttttttgtgggcagggcacagtggacaggaaagcaggcttggaggcttagt

SEQ ID NO: 310083 - DNA, 201 bp, Homo sapiens
ttatctcaggctgtgtgaagagcgtgtgcactggcctccgtgtgtccttcctgcagaccggctggggcaggaggagagggagcttggcagcgcccttgctsgggggagtctgtggggctaggagggaagggtgtgccagaggcccctgcctagagcctgaatttgagtgctggctgagggagaggtgggagcagatgggag

SEQ ID NO: 310084 - DNA, 201 bp, Homo sapiens
ctgctcagctcagcctggctgtgttctggggagacagaaacctagaccatctcagggtgacaaatggagactcagagaggggaacagacctagcaagtcastggctggtggaaggtgggccccaacccagccactccctgcctcaggccatcccactgccaagctggggctggtggggacggctcctgagctgggactgaa

SEQ ID NO: 310085 - DNA, 201 bp, Homo sapiens
ctggaggtggtgagggtcgggggcagagcagagcagccattatgctcaagacaggctctggactgcacctggggagagaagggagaatcagggttggggcrggaatgaaggaaggggcatgggaaatcaggggaggaggcagcatgggtggtgtgggaggatcaaggatgtcagggcaggcctcttacctgactgaggttt

SEQ ID NO: 310086 - DNA, 201 bp, Homo sapiens
ctcctctgcctcctcatgacctcctgtgacctctctgaccagaccaagggctggaagactacgagaaagatcgcggtaggtgtagtcctccctgggaaggsacaggctgcccaccctgcccagctttgggtgccccctgtgcctgaataccctctctctgctcagctcagcctggctgtgttctggggagacagaaaccta

SEQ ID NO: 310087 - DNA, 201 bp, Homo sapiens
ctctgtgtttctgtgggttttggggtctctgtgtgtctctgtcctggcctctctttgtctgcatctttgtctcccccacctgggtcccggctcggtatctytgagcctcgccagccctgcaggagcacctcattgccctctccccctcagtgctggtcatgccgctagcggacaaggaggctggggccgtggcagctgtca

SEQ ID NO: 310088 - DNA, 201 bp, Homo sapiens
gttttccaatgagtttctgtcaagttttgggatgaaggattttgcctgtgctcgttgaggtggtgactgtgggtgtgagtgggtgattagggccaaaaaamccccccaaaaaactggacagaggcaaatttggggggaaatgagttaggaatagctgtgaggagccccagctactcagggcctcagaagatatttatttct

SEQ ID NO: 310089 - DNA, 201 bp, Homo sapiens
agattgtaaactctgtgagggcagggattaggtctgtgaccgcctcctcacccagcgggagaccaagaatgagacttgggagtcagacacaactgggtgtractcctgcctttgcgggttgccagcacgtgggcttgggcaggttcctttatcaccagaagctttgccgtctcctccactataaagtgggcacaataacat

SEQ ID NO: 310090 - DNA, 201 bp, Homo sapiens; identical to SEQ ID NO: 64715

SEQ ID NO: 310091 - DNA, 201 bp, Homo sapiens
acaggtgggagtctggcatttctcctccaggctgaggaggtggtgacttccagggaaagtcctgggagggatcagaaccacagctccagcctgcttggatragggtggtcttctggctgccaggagggtagctaggtgggaagatctgcccttgtttcctccataacctggggtgggaggaggaggagctcccagcccaat

SEQ ID NO: 310092 - DNA, 201 bp, Homo sapiens; identical to SEQ ID NO: 64717

SEQ ID NO: 310093 - DNA, 201 bp, Homo sapiens
taaagatgcctggtacatgcctgccaggagaaggcacaacatatgaactccctccctcttccctccacccctcctcagctcctgtgacatcaggagggacmtgccctgccctgctcacagaggctgggtgggaggctcccatcatggccttcactgaggctgcctctgcagttggaccaagctggacacacagtaggtgca

SEQ ID NO: 310094 - DNA, 201 bp, Homo sapiens
taacagtgactcattcagggttacaacaggtcagtggctgggctgggcctagcgtctggccctcagcttgtctacatggcccccctcgtggctctcccctygcctctcgcaccccactgtgcagcatggttgggcctgccagccttgatggatggctctgcagctcaacctccctcccattcctctccggatgccgggccg

SEQ ID NO: 310095 - DNA, 201 bp, Homo sapiens
tgtgtaaccttgggcaaatgacacaacctctctgtgcctcagttttgtttatgaaatggtgataataatggtgcttataggattgtggggaggattaaatrtgtcacacatgtaaagcatttaaatcaggcctgatccatggtgagggctgtctgttggggattaccattgtgagagaatgctggaatcactgacttcagg

SEQ ID NO: 310096 - DNA, 201 bp, Homo sapiens; identical to SEQ ID NO: 64720

SEQ ID NO: 310097 - DNA, 201 bp, Homo sapiens
tttgctgccctggctgcatcttagaatcacctggagagaaaaacaaacagatcattgccagagctccactcccacaggttccatgaccttgccccacagamccctgtgtacaggctgggactgggcagctgggagggcctctccacagggtctcataagtgccttctgtcctaggaaactgtctacacctacctactggat

SEQ ID NO: 310098 - DNA, 201 bp, Homo sapiens
tgtctgcaccctcagtccttgaaactctttacctggcacattgggttttgggtggtaaaaaaggtcataggttcatgaatcattgcctgcttagaattccktccaagaggagaggacgaggtgcttagttcaccgggtgttttgctgccctggctgcatcttagaatcacctggagagaaaaacaaacagatcattgccag

SEQ ID NO: 310099 - DNA, 201 bp, Homo sapiens
cctgggttcaagcgattctcctgcctcagcctcccaagtagctgggattacaggcatgcaccaccacgcccagctaattttgtatttttagtagagatggrgcttcaccattttggtcaggctggtcttgaactcctgacttcaggtgatccacacacctcggcatctctgagtgttgggattacaggcgtgagctaccgt

SEQ ID NO: 310100 - DNA, 201 bp, Homo sapiens
cacttaggtttccttccagccaaacaagagggtgtctgcccctctcactcccttcaggccttatcattcccaccccatgccacacccaccacggaacctgrctcagtgtctctggaagtagtggccaggcatctcctgtggtgggggctggctggcgacagctgatgacaagaagagtggctggcaggattgtggacgctc

SEQ ID NO: 310101 - DNA, 201 bp, Homo sapiens
gagagttttccaggtggaggagaaaaggaagggtattccaggcaaaaatccccgtaagagcaaaggtgtgagcagcaagaaatcaagggtggcaggttcakggctcctgggctggaggaagggcctggcggtggagaggaagggagtgaaggcccagctcacaaagggaagcagaggaaagtttaagcagggtcaggccat

SEQ ID NO: 310102 - DNA, 201 bp, Homo sapiens
accatgcccagggcatgtgacctcagggtttgcatccctcccaaccctgtttttctaacattttgtgtgggcttggtttcaagagttcttagttcttagakctctaaaaatgcatagctccgagaacggttgcttcaactattttgtggttctctagtttagatgtaagtttctaagactccagatcttgagtgtggagct

SEQ ID NO: 310103 - DNA, 201 bp, Homo sapiens
agcgaccccaaccctcaggaagggcgttggtcttgtgcttgtggctccaaaggggataagaccaaggtctctggtttcatagaatcttaggctttaagaaygagttagaagtaatttagtccagaccctctcctctccccagataagtgcagaaatgcagatctagcccacggctgagccccaaccctggcttcagaggag

SEQ ID NO: 310104 - DNA, 201 bp, Homo sapiens
ctgatcgtgcaggcaactcttgcctgccttctcctgctctttccctcttcccattccttcatccacccccaaacctagctcctgatggatccaagggtgcrggggacaaccgggaggtcattttggaggaggcaggagctggaatagaagctgggactggcttgggaagggcgagaggccggggcggagctggttgtgggc

SEQ ID NO: 310105 - DNA, 201 bp, Homo sapiens
ggccagaagcaggtgtggtggtgacagctgcccccagtcctccacaaggctccattgtccccggcagggagcccctccccagctgcaggccagaagtgtgyctccccgggccctcctgtcgtgactctgccacccgcttcctcctgctgccccttccctcttctcatctccgcttgccctcaggccctccccatccccgtg

SEQ ID NO: 310106 - DNA, 201 bp, Homo sapiens
ggtgggagacatacggacatgcggaagtgaagcgagaatctgtccccctctgcccccatggactacccacccctccctctgcctgggcaggactttctgtrtaaccccggctggtctcttaacctctttgggccaaataactcaggcccctcccaggctgctggaagagatggatgacaaggaggctagatatagccgaag

SEQ ID NO: 310107 - DNA, 201 bp, Homo sapiens
tggttactgtgaaggttcgctggtggcagacagagggaggagagcctgtggcagcaccactccatggagcaggcccctgggtgccagccggctgggtccgsggggatggggactggtaaagctggcccagccagatggtgcaggacttgtaagccatgttaaggactgcggacttattctggagggaaattgaccctgggg

SEQ ID NO: 310108 - DNA, 201 bp, Homo sapiens
gccccccttccccttccctccccaccccaccccactgcgccggtctctgcctggggctctggccgggccccggaccccagagtggtggcggggaaacaggrtgcgatcagacagggtggaggctctgagagcggcccctgcgagatgcgagagaagtggcgacggggcgaggggcagcgagcgcaggctgacagcaggcca

SEQ ID NO: 310109 - DNA, 201 bp, Homo sapiens
ttagttgcaccagaaagagggaagcaggggacgtttgaagcctggagaagggagtctgatccagcctaaggggcatggaagacttcctggaggaggagatkccctaactgagtcctgatagccttgaatgtcctcttccctactctaaacccggccaagggcagcctctgctccaggaaatatggccaactcagaatgtga

SEQ ID NO: 310110 - DNA, 201 bp, Homo sapiens
ctgcaccctctccggctccggggacggcgacagagacctgcccacccaggcctgggggccccagtcagtggcggccgccgtgtgtgcgctcggtgtctgtkcgcacgtgtctccctcgcagatgggcgactgctccagggcctgtccgtctcacagcgacctccaacattctcccgacttccccctgcctcctaggctgag

SEQ ID NO: 310111 - DNA, 201 bp, Homo sapiens
cagctgggtgcctctgagggcacaggagctcccagggctggctggcaggtgcagctaacagtgttagcaatcccaaggacaggtagcttggggcggaggasagcatgctgtcacccatcctgatgaggggagagatgtctggtgctaggagcagtggtggccggaggagggctggggacccaccccaggccaccccacact

SEQ ID NO: 310112 - DNA, 201 bp, Homo sapiens
gaggaaggaagaggcagggtccctgcccagaggactttcatggggaagtgaagggtctggatgggtgttctgagacagctttctggaggaggaagccttargctaagcatcaaggaatgaacttgcataggaatcctgcaatggctgagccagaaggggccttagaggttaagtggaaaagctgtgtctcagataatgaaa

SEQ ID NO: 310113 - DNA, 201 bp, Homo sapiens
ccttgcccagcacaggtgattttgtttggggagaaggggggcacagcaggtcttcctctgaggctgagccaagagtttggctgcagcccccactctggggkgcccgagggttagggaatagcctgcactcccttgctggagtgtcagaaatccctcctgaatctccctagggcacgtgcacatgcacacacaggcacacac

SEQ ID NO: 310114 - DNA, 201 bp, Homo sapiens
aggaggaaggaagaggcagggtccctgcccagaggactttcatggggaagtgaagggtctggatgggtgttctgagacagctttctggaggaggaagcctkaggctaagcatcaaggaatgaacttgcataggaatcctgcaatggctgagccagaaggggccttagaggttaagtggaaaagctgtgtctcagataatga

SEQ ID NO: 310115 - DNA, 201 bp, Homo sapiens
tggctctcccctcgcctctcgcaccccactgtgcagcatggttgggcctgccagccttgatggatggctctgcagctcaacctccctcccattcctctccrgatgccgggccgtgagcctcctaatcaccagtcctgcctggtggccgccaagccatccatctccccacacagccttgcccagcacaggtgattttgtttg

SEQ ID NO: 310116 - DNA, 201 bp, Homo sapiens
atcaaggaaggctgtggagggtccctcagggatggaggggacatgtagtttgccatcatggggccgtgatggaggaggagaggctgaggcccctcttctgscctcttccctcccccaggttctgtttgatggtgaagaagggctaccgggatcccccctaccacaactggatgcacgccttttctgtctcccacttctgct

SEQ ID NO: 310117 - DNA, 201 bp, Homo sapiens
agaattgtcctcgactagagaacaagagacctggggtctaggccaggcttgacctgttgactcactatgaggcctttgctaagtccctggcccttctctgygcctcagtttccccacctgtaagatgagggtacttggacattctgtggccttaagactgtttgattttgagatcctaagatcctgggattcctgtgcctg

SEQ ID NO: 310118 - DNA, 201 bp, Homo sapiens
cggatcagactcaagaacacttcccagtggtgcttatttgagaactgggacggcaacactagattgtaaactctgtgagggcagggattaggtctgtgacygcctcctcacccagcgggagaccaagaatgagacttgggagtcagacacaactgggtgtgactcctgcctttgcgggttgccagcacgtgggcttgggca

SEQ ID NO: 310119 - DNA, 201 bp, Homo sapiens
agatctagcccacggctgagccccaaccctggcttcagaggaggcctgactcagaacaggctcccctttcttggtacctggggtgaatgaaagctaagtcygtggtaatggtgctgtctgtggtgctgactggccttaccttggactacagagctgcaggtggagctggagagagcagaaaggctccatctatccatctac

SEQ ID NO: 310120 - DNA, 201 bp, Homo sapiens
gaaatgcagatctagcccacggctgagccccaaccctggcttcagaggaggcctgactcagaacaggctcccctttcttggtacctggggtgaatgaaagmtaagtccgtggtaatggtgctgtctgtggtgctgactggccttaccttggactacagagctgcaggtggagctggagagagcagaaaggctccatctatc

SEQ ID NO: 310121 - DNA, 201 bp, Homo sapiens
tggatggtgagtcccagctggtgtgtgaggaccccccacatgagctgccccaggaggggaaagtccggtgagccattctctgcacccccattgccctcttscatggccaaggattctcagggctgaggcaccatccaaggtcatctggtctgaccctccccttccaacattgatccccgcctccctgccaggtgggattcc

SEQ ID NO: 310122 - DNA, 201 bp, Homo sapiens
gtctctgtcctgctccaggagatcatcacggaggccagaaacctcagcaacgcagagatgtgagtgactctacccaggggacagggcgagagaggctgtgrccttcagtccccatcatctcctttcctgccccacccacttccctttctctgccttctgcgggacttcatcaccttttgagggatcctttatttcatgcct

SEQ ID NO: 310123 - DNA, 201 bp, Homo sapiens
cactagattgtaaactctgtgagggcagggattaggtctgtgaccgcctcctcacccagcgggagaccaagaatgagacttgggagtcagacacaactggstgtgactcctgcctttgcgggttgccagcacgtgggcttgggcaggttcctttatcaccagaagctttgccgtctcctccactataaagtgggcacaata

SEQ ID NO: 310124 - DNA, 201 bp, Homo sapiens
attcgtcattcatccatccacccattcaattattcctttggccatcatttcctgagggatgtaaactctcttctgacactgacccagcgggacactcagcrtcctcctcctctcctgcttgagccaccatgcctgcctcttggaggctcctggacttgctttgctcagctcccaacccaccctgagggggtgaggctgagg

SEQ ID NO: 310125 - DNA, 201 bp, Homo sapiens
tctcctctgcctcctcatgacctcctgtgacctctctgaccagaccaagggctggaagactacgagaaagatcgcggtaggtgtagtcctccctgggaagkcacaggctgcccaccctgcccagctttgggtgccccctgtgcctgaataccctctctctgctcagctcagcctggctgtgttctggggagacagaaacct

SEQ ID NO: 310126 - DNA, 201 bp, Homo sapiens
actcagagctggaggcctgccacctcaccaggggcctttctcagggcacaggctccctggtggcagggccttggcccttgcttgcacacccttggggactrggagccccctcatccatcctgctcaggctctcttttgtggcgcgactctgattcacagtgtgcccaaatctgcctccttgtgactgccgcgagctgcctc

SEQ ID NO: 310127 - DNA, 201 bp, Homo sapiens
cttcctccacacccctcttctccctgatggcatgtagccctcacagtacagtagtcctgggcacacaggagtttacccagtcatttacagctcagcaaacrcctaccaacacctatgaggggctgggtaatgctggagacctggagaggggcaggacacaatctctgccctccaaaagctcccagtctgttgtgggagcca

SEQ ID NO: 310128 - DNA, 201 bp, Homo sapiens
ctccacaaaaggaggactgctacagttactgtgtatgaaatgctgccatggtttgggggtgtcatgaaggggtgttgtcgatctttgccaaggttatgctrttacagataaagggtggtcacctgcaggaaggcgcgcggggtgggctgcagggctgtgaggggagggtggtgatttcctgcccagttacagtccacagcg

SEQ ID NO: 310129 - DNA, 201 bp, Homo sapiens
catggctgggcttgcctcccgccatccaccccaccagccctaccccaggctggcccttcctccccgccctctgcaggcccacactaaccctaggccaggcygcctccttcagcatttacctcccacacacaatgggcacagtgaggacataagagacccagtctctggcctggaggcagatactcagccttacccgacatc

SEQ ID NO: 310130 - DNA, 201 bp, Homo sapiens
caatgcccatgcagccctgggcagtcttaattgctgataatctatcccattccctaccctgggtcacaaaagctggcttagttccatgtatatggtagtcrctgttcatttggacatttcctctcacctgtgtccaaaccagagaggcccagaccttgtgagttggatcaaaactgtagtaggaagagttaaggttagaga

SEQ ID NO: 310131 - DNA, 201 bp, Homo sapiens
gtgccctgctctctatcttgtccctaagaagaccagcatggctgggcttgcctcccgccatccaccccaccagccctaccccaggctggcccttcctcccygccctctgcaggcccacactaaccctaggccaggccgcctccttcagcatttacctcccacacacaatgggcacagtgaggacataagagacccagtctc

SEQ ID NO: 310132 - DNA, 201 bp, Homo sapiens
cccatgtgggttacagattcctacagagacacagacctacatactttcacaaggaaattctcccagtgacccagggaacatagtctgccatgatgatgtgrtggtccgtaggggctcgccactatggaccattaatgggcaggctgcacacatgcttaggtccccagcaaagcgggagttctgcacagagtgagaggagag

SEQ ID NO: 310133 - DNA, 201 bp, Homo sapiens
cacatgtttacactctcacgacccatgtgggttacagattcctacagagacacagacctacatactttcacaaggaaattctcccagtgacccagggaacrtagtctgccatgatgatgtgatggtccgtaggggctcgccactatggaccattaatgggcaggctgcacacatgcttaggtccccagcaaagcgggagtt

SEQ ID NO: 310134 - DNA, 201 bp, Homo sapiens
cgcagaggaggagaattagaccctctcagattccaccactctcagccacacgttcactcactcatttggagacaagactaaccaccagcgcattcacagcmccccagacagccacatactgactataccactgtcacatggacatcaatgacctgaatcacatatgcatagatgcaggcccacatggtcactcccacgtgc

SEQ ID NO: 310135 - DNA, 201 bp, Homo sapiens
ccaggaaggtccaaagacttgtccagtacatgtggtgtgtggcagggcaggcagatgagcccgcatctgagggaggcgatgggagaagtgacaggggtgcrcagaggaggagaattagaccctctcagattccaccactctcagccacacgttcactcactcatttggagacaagactaaccaccagcgcattcacagcac

SEQ ID NO: 310136 - DNA, 201 bp, Homo sapiens
cttctctgaatacccaggaaggcttcctggaggcaggatgtgggcacttcagcaggatgttgtaggtgctgattaagagcagggcctgtggtgtcagacasccctgtctaggctctgacattcagcaggtcattttatctcttgagcctcaatttcctcaagtataaaatgggagctcttaggaggattgcatgaagcagt

SEQ ID NO: 310137 - DNA, 201 bp, Homo sapiens
agataagttagggggaggcagagagaaggtgggtagagcaactggaggctcctgcagctgcccaggcaggagatggtggtgcctgtgttaatggaatggcrgaagagttagagatatggagcaactttggagatatttgaaaacagaaatgacagaacttgctgataaatgagaagatgagcaagagggaaaaccagagaa

SEQ ID NO: 310138 - DNA, 201 bp, Homo sapiens
gggaacagacctagcaagtcagtggctggtggaaggtgggccccaacccagccactccctgcctcaggccatcccactgccaagctggggctggtggggayggctcctgagctgggactgaatccctgggcctcagttttctctcctgggaacgggctgtcagaggagcttgggtggatgtatcctacatagaggatgtga

SEQ ID NO: 310139 - DNA, 201 bp, Homo sapiens
tccaactagcccctttgtgacaactgaactctgtgagcctaggttcctcctgtgactcgaagggcaaggctgagtccccccttcagtcctggggccactcyttcagtgtcttcaggaggggctcagcttcctgttgctgggtggggagagccctgaggtccccacaggacgtgggacaatggggaggcggtgacagatgag

SEQ ID NO: 310140 - DNA, 201 bp, Homo sapiens
aaaaaaagaaaaagattgctcaggttgcagaatatgtatgtgtgcgagtgtgcatggtgcgtggcaggggaggggagataagttagggggaggcagagagraggtgggtagagcaactggaggctcctgcagctgcccaggcaggagatggtggtgcctgtgttaatggaatggcagaagagttagagatatggagcaact

SEQ ID NO: 310141 - DNA, 201 bp, Homo sapiens
gagagatctttgtagtgtttctagctaggatgcagagggtcagagatcatggagccatctcttgccagacagggaaactgagactatggcttcatcactaycctttggctgcaaggctggggctcaacctcttcatcagacctgaccctcaatatcattctccttcaggccctgcccggaacctcttggttgctgagcttg

SEQ ID NO: 310142 - DNA, 201 bp, Homo sapiens
cattgcactccagcctgggtgacgagtgaaataccatctcaaaaaaaaaaaaagaaaaagattgctcaggttgcagaatatgtatgtgtgcgagtgtgcayggtgcgtggcaggggaggggagataagttagggggaggcagagagaaggtgggtagagcaactggaggctcctgcagctgcccaggcaggagatggtggt

SEQ ID NO: 310143 - DNA, 201 bp, Homo sapiens
ccagcctcctgtccccagggactgctgatggcttggctgggatctagccaaatggtggggggtgggggcgggggtggggggaagagctcccagcagtcctytaccccttggtcttaatggactgggagtctcaccctcagccatgctgctgtcaggccaggcctgcgctccccgggcttctgctgcttgggcctatgaaat

SEQ ID NO: 310144 - DNA, 201 bp, Homo sapiens
gtgagccaagattgagccattgcactccagcctgggtgacgagtgaaataccatctcaaaaaaaaaaaaagaaaaagattgctcaggttgcagaatatgtrtgtgtgcgagtgtgcatggtgcgtggcaggggaggggagataagttagggggaggcagagagaaggtgggtagagcaactggaggctcctgcagctgccc

SEQ ID NO: 310145 - DNA, 201 bp, Homo sapiens
tgaggtcaggagttcaagaccagtctggtgaaaccccatctctactaaaaatacaaaaattagccaggcatggtgacaggcgcctgtaatctcagctgctygggaggttgagacaggagaatcacttgaacccagggggcagaggttgcagtgagccaagattgagccattgcactccagcctgggtgacgagtgaaatac

SEQ ID NO: 310146 - DNA, 201 bp, Homo sapiens
tgaattgtgacattgagtgtgtcccaagcatatgatctagtgaggctgagtgtgtaaacaaaggcatgacatggagtgatagcaagtgtgtggaagtgggygtgtgatgctgtgtgatcttgggcctgacattacatgtgtgatgctctgtaatggttgtaacagtatgcaatgtgcacatacagtgctgtgtaggacact

SEQ ID NO: 310147 - DNA, 201 bp, Homo sapiens
aagggcagcctctgctccaggaaatatggccaactcagaatgtgaccttcccatccctccagagcccattgtccctgaatctgcttgatggatgaaccacyggaggcccagagagagagggcacttgtcccaaggtcacacagcatgacagggataaatgggacttggtatctaagcagccccattccctctcctcagctc

SEQ ID NO: 310148 - DNA, 201 bp, Homo sapiens
tggctctgttctcagagtcaaggaacagagaatatggcagagccagaggtgcccatgggaagcagagaacaaggagggagtcttgggagagagcagggtgmaagcaggcaaggctccctggaggagggggccatccgtgggcttgctgggggctaatgggaggacagtctggggagaaggggagaaggcctggccggcctc

SEQ ID NO: 310149 - DNA, 201 bp, Homo sapiens
gacgtgtaatatcaagtacgtgaccatgatcatagggtactgtgtggagtgtgggtgagtcactgagtatgtgacactggctgtgaggcactccatgatarcagatgtgtacagtggctgtgccaccaagtgtgtaacactgtgtgatattgattgtgtgatgctgacaccgagtgtgtgacattgcacattgcatgctac

SEQ ID NO: 310150 - DNA, 201 bp, Homo sapiens
aagcagaggctgaggactctgagcacaacaacaggaaacagccgtgacatggggcaacagccctggcgactgtgcccagttggggtggggacgaggggccragcttgtgggacccagggtgatgccaagagggacactgagacactgtgggacagggggcgttctgcacatgtgacacggagcttatgacgtgtaatatca

SEQ ID NO: 310151 - DNA, 201 bp, Homo sapiens
gtccatcctgtctcctccaggttccggcctccagcctggtgtcccctcctcaggctgccttttcctcctcctcctccctgtttcctggctcttagccgctycatctgggaagtcttcctcaactttaaaccctcgaacccttgtcctctgccctccatctcccactcctcaggctttcagcagcttcacgtggagcattgg

SEQ ID NO: 310152 - DNA, 201 bp, Homo sapiens
gaggcccctgcctagagcctgaatttgagtgctggctgagggagaggtgggagcagatgggagagaagcctgttttctccaaaccccacaaatgccctccrcctctctcatgttcctttcttcttcctggtccatcctgtctcctccaggttccggcctccagcctggtgtcccctcctcaggctgccttttcctcctcct

SEQ ID NO: 310153 - DNA, 201 bp, Homo sapiens
aaatctcaggcctttcagctgcaactgaagcacccaccgcccacctcggcccaggctggctgtctccctctgctaccattttggggtccccagggcccatycctaagaaatttcttcccctaagctgaccaggtcttctttcattgcagaatctgaccatccctaggggttgtctcagaggacaccgggaacggtctgctc

SEQ ID NO: 310154 - DNA, 201 bp, Homo sapiens
aggactctggtggcctcggtgcccttgacctggtattgctgccgttttgccccactgctgtctgtctccgcgtccgagtcaccacctgtccctctccagtyctctcctctcttcctttattactatctctatattgcctcctgcctcaggcttatctcctcctgtcatgcctctatccacctctgtcactcccctgcgact

SEQ ID NO: 310155 - DNA, 201 bp, Homo sapiens
ttttccaatgagtttctgtcaagttttgggatgaaggattttgcctgtgctcgttgaggtggtgactgtgggtgtgagtgggtgattagggccaaaaaacmcccccaaaaaactggacagaggcaaatttggggggaaatgagttaggaatagctgtgaggagccccagctactcagggcctcagaagatatttatttctg

SEQ ID NO: 310156 - DNA, 201 bp, Homo sapiens
gggcttagaaggtgggggtatgactactttttctgaatttatttttaattttttacatctgttttatggaggcataatttacatacagtaaaatcaccaayttaaagtgtataatgagttttgataaatatatatggtcataaccaccatgacaattaagaaaagaatatttttatcctggcaaacttcccttgtgccctt

SEQ ID NO: 310157 - DNA, 201 bp, Homo sapiens
gctatgacaaccacatggcactcttagcctccagtcagggctcagccgcagaggccagagacccctttggctctgggcctttgtactggcgtgtgtgagcsgggctggggcctgagggagatggaggagtgggaggggcaggggccggggcatggggctgcatctggcatggactggagttcattcagattgttccatcca

SEQ ID NO: 310158 - DNA, 201 bp, Homo sapiens
ggtagcttggggcggaggagagcatgctgtcacccatcctgatgaggggagagatgtctggtgctaggagcagtggtggccggaggagggctggggacccwccccaggccaccccacactctccctctgggaggggctcctgagcaggcctggtcaccttgcttcttggctgcttcttccccggcggaggagcctccccca

SEQ ID NO: 310159 - DNA, 201 bp, Homo sapiens
agtgagctttattgagtgtgaaattggtaggaagtgggtggtgtgttggcgcccaaaaataaatcctcctggagaaggacgggactaaggcaacatctggsctggggtgaaggcacatctggaaagggagggtggtggaaactggcaggtcggtttctgtagggctgccccgagagcctctgtggccactgaggctgccgt

SEQ ID NO: 310160 - DNA, 201 bp, Homo sapiens
tgggacacaatgaacaggggatggtctaactagactataaaagtgggggaactgtcatcttcccaattgggttaacagacctctattaatatggcctgcartttgagcatttttatttcttgccagtcatgcttacactgtgggctcatgctgaactgtggtcttttaagaccctcaacctcatatcatgttcacatgaat

SEQ ID NO: 310161 - DNA, 201 bp, Homo sapiens
ggcaggagtgggaggggagaaggctccgagtatacgagcatagcttaccagcaagtcctggggtgaggctggaggggccgcgctgtaggcagcacttttcrggcccttatctaacattctcaagtgagtgctcctagctgccagatgtgctacttcctcctggattctgcacatcaggagccagtggcctctacaatgccc

SEQ ID NO: 310162 - DNA, 201 bp, Homo sapiens
aacaagcactctgggtggttctggtgcacatgaaaattggggaacggctggtggaaacctctagccacaggaggtgcttgggaaaggtaccttcccctccycaaagcctgatgcctcactcaagcatgacactgacagttgggctagttcagctgcgttctgggtctctgtcttgcctcctccttcagactaagcctccca

SEQ ID NO: 310163 - DNA, 201 bp, Homo sapiens
ggggcgggagccaggttggagggggtattgccattgccgctgcaggtggagtagggcttcgctggggaaggagcagcttgtgcgagagtgtgggcaggagkgggaggggagaaggctccgagtatacgagcatagcttaccagcaagtcctggggtgaggctggaggggccgcgctgtaggcagcacttttcaggccctta

SEQ ID NO: 310164 - DNA, 201 bp, Homo sapiens
gaggatccaagatagtgtcagtgggtctcgaggtgtggtcccccgaccagcagcatcagtgtcatctaggaatgtttggaaacgcaagttcttggacctcrtcccagacctactgtatcagaaaccctgggggtggggccagcaatctgcactttaacaagcactctgggtggttctggtgcacatgaaaattggggaacg

SEQ ID NO: 310165 - DNA, 201 bp, Homo sapiens
tcagggtgaggctgaggccaccagtgaatatgtgggcccagctgcgggggtagcactaggcaggggcgggagccaggttggagggggtattgccattgccrctgcaggtggagtagggcttcgctggggaaggagcagcttgtgcgagagtgtgggcaggagtgggaggggagaaggctccgagtatacgagcatagctta

SEQ ID NO: 310166 - DNA, 201 bp, Homo sapiens
aggctggtcttgaactcctgacttcaggtgatccacacacctcggcatctctgagtgttgggattacaggcgtgagctaccgtacctggcccttgtggaarttctatttgttgtgtagccctagtctttcttgctgcccatggtctgatttctggcctctcaccctctgcccccatgcacccgcaggctgttgcaggacct

SEQ ID NO: 310167 - DNA, 201 bp, Homo sapiens
gtgggaggagtgggctggagacacaggagtaggtgggggcaggaagtatgcaggagagagatggagagtgggaggagaagctatgagaggaagagaggacrcggaggtgggaaaagacgtcaagactcctggagaggaacaggagtgcagcctgggacagaggtggacgtcggccgggggaggcagggaggaaggcaggga

SEQ ID NO: 310168 - DNA, 201 bp, Homo sapiens
ttggggaagctgaggcccagagggatcattcagcaagtgagttgggacagagctaagattggagcctagatgtgtctcaggctcgaggctcactctttccyggcccctgagtaagatgggaaagaaggtgcccacacagggcctggtgcacaggaggggctcagcacaggttccctgctgggacacagggccaagacctga

SEQ ID NO: 310169 - DNA, 201 bp, Homo sapiens
gattacaggcgtgagctaccgtacctggcccttgtggaaattctatttgttgtgtagccctagtctttcttgctgcccatggtctgatttctggcctctcrccctctgcccccatgcacccgcaggctgttgcaggacctgttccccaaagcggcagagctgtacgagcgcgtggcctccaaccgtgagcactggaccaag

SEQ ID NO: 310170 - DNA, 201 bp, Homo sapiens
agaagctgggactggcttgggaagggcgagaggccggggcggagctggttgtgggcgctggaagggaggagccaacagtgtggggtcaggctcctgtggayggggacacccttgggaggcactgggactggctcaggtgtattctacagtgcacgtgtctccagtgtggctcggaggctggagacgcggccctgttggagt

SEQ ID NO: 310171 - DNA, 201 bp, Homo sapiens
tgcctgcctggcgggctgggtggagaggtgggctgtttatgttgggaggtgggctgtatgacagcctgcctcagcccctgtggccccactgaccgggaccctgtgtaatgaggcagagtgaccaaggcccatggccagcgtcccatgggctcgtaggcccatcgcctcccctctctggggcttggctctctcatctgaaaa

SEQ ID NO: 310172 - DNA, 201 bp, Homo sapiens
cgcagctaagagggaagaccctgcagggcacagggacacgtgggacaaccagacgccctgcttcggccacaccacaagcctccacacaccaggtgcagctyctgtcacccctacggtcaacccaaggagagccagagattccagtagtcgtgggcaggtatccagtgcccaggcgagaagagggggacaccagcagggaac

SEQ ID NO: 310173 - DNA, 201 bp, Homo sapiens
cctgatggatccaagggtgcgggggacaaccgggaggtcattttggaggaggcaggagctggaatagaagctgggactggcttgggaagggcgagaggccrgggcggagctggttgtgggcgctggaagggaggagccaacagtgtggggtcaggctcctgtggatggggacacccttgggaggcactgggactggctcag

SEQ ID NO: 310174 - DNA, 201 bp, Homo sapiens
ctgcctgcctggcgggctgggtggagaggtgggctgtttatgttgggaggtgggctgtatgacagcctgcctcagcccctgtggccccactgaccgggaccctgtgtaatgaggcagagtgaccaaggcccatggccagcgtcccatgggctcgtaggcccatcgcctcccctctctggggcttggctctctcatctgaaa

SEQ ID NO: 310175 - DNA, 201 bp, Homo sapiens
aatgcagaggtctgggaatcagaagccctggttctccagcagcagttctctaactggcggctatggagtccaggcctccagggcactggtaggttattggygggttggtgcagattccagtgtccaggaggggtgagctggcctggggggcctatgtacaggagataggagggtgataaacacaggctaggtgggattaca

SEQ ID NO: 310176 - DNA, 201 bp, Homo sapiens
attgcaggggttctttatatattccagatattacctctttatcagataaaagctttgcaaatatttttctcccatttcataggttgcttcgctgaaatatkttaaagcaaatcccagacatgatgtcatttcaccaaaggtagactttttttttggtggggggagctttccggtgaagactgaaaaacctgctagacaaat

SEQ ID NO: 310177 - DNA, 201 bp, Homo sapiens
cataaatcccagctgaaaactggtcagaccatcaggaggccaccctggaacccagtgtcctcctcttcctgtcaggcctcacacacctcctccaggaagcsccttaggacccctgaagaccatcttcatccaactagcccctttgtgacaactgaactctgtgagcctaggttcctcctgtgactcgaagggcaaggctga

SEQ ID NO: 310178 - DNA, 201 bp, Homo sapiens
aatcacttgaacccagggggcagaggttgcagtgagccaagattgagccattgcactccagcctgggtgacgagtgaaataccatctcaaaaaaaaaaaaagaaaaagattgctcaggttgcagaatatgtatgtgtgcgagtgtgcatggtgcgtggcaggggaggggagataagttagggggaggcagagagaaggtgg

SEQ ID NO: 310179 - DNA, 201 bp, Homo sapiens
tacaaaaaagtgaatgaggctcagtatcgcagccacctggccaatgagatgatgatgtaccacatgaaggtgaggcttgcagagacctctggtcctcctcycagattccccggggacccagggccaggcagggcttcctgatcaatctctactgaggatgagaggataggcccagagccacagcaggcctcctgccctcct

SEQ ID NO: 310180 - DNA, 201 bp, Homo sapiens
cagtcctccacaaggctccattgtccccggcagggagcccctccccagctgcaggccagaagtgtgcctccccgggccctcctgtcgtgactctgccacccgcttcctcctgctgccccttccctcttctcatctccgcttgccctcaggccctccccatccccgtgaggtctcgtctctggcgctctctgggtttaagcc

SEQ ID NO: 310181 - DNA, 201 bp, Homo sapiens
gcctctgtccatcatccctccgtcttcctcttcccacaggccagaagcaggtgtggtggtgacagctgcccccagtcctccacaaggctccattgtccccrgcagggagcccctccccagctgcaggccagaagtgtgcctccccgggccctcctgtcgtgactctgccacccgcttcctcctgctgccccttccctcttc

SEQ ID NO: 310182 - DNA, 201 bp, Homo sapiens
gacacctgaggggcaggagtggaggtggggctcaggttagggagcagagcctctgtccatcatccctccgtcttcctcttcccacaggccagaagcaggtrtggtggtgacagctgcccccagtcctccacaaggctccattgtccccggcagggagcccctccccagctgcaggccagaagtgtgcctccccgggccctc

SEQ ID NO: 310183 - DNA, 201 bp, Homo sapiens
gggagcttcctggcagaggaggagtggggagaagctgtggaatggctccttgagctccccactccaccccttccccatgcctgggctcccattgcaaagamccagatgtgggcttatcctgtcccccagccagagggagtcacccaggggtgttcaggccaaccctttgtgaaatccatgttccaccagttaccagccttt

SEQ ID NO: 310184 - DNA, 201 bp, Homo sapiens
gatcatcacggaggccagaaacctcagcaacgcagagatgtgagtgactctacccaggggacagggcgagagaggctgtggccttcagtccccatcatctyctttcctgccccacccacttccctttctctgccttctgcgggacttcatcaccttttgagggatcctttatttcatgcctgtctccctcgctagactgta

SEQ ID NO: 310185 - DNA, 201 bp, Homo sapiens
aaggggggcagtgggagccccaggtgggagggtcagacttgcctggagagagaacaacaacagactctccctggaggggatccagagaagggagatcactycattcattcattcgtcattcatccatccacccattcaattattcctttggccatcatttcctgagggatgtaaactctcttctgacactgacccagcggg

SEQ ID NO: 310186 - DNA, 201 bp, Homo sapiens
cacagtacagtagtcctgggcacacaggagtttacccagtcatttacagctcagcaaacgcctaccaacacctatgaggggctgggtaatgctggagaccyggagaggggcaggacacaatctctgccctccaaaagctcccagtctgttgtgggagccagacgggaaagggtggcactgcattgatgcacacagtgcatg

SEQ ID NO: 310187 - DNA, 201 bp, Homo sapiens
gcctcggtgagaccctgccctgctcacagtggggaccctccatggggtgtcttggagtctcatcctctcccagcctgaagatgggtgggagcgagtgagamcaggagccaggtttagacacaggaggaggttcccccagggtttgcccctggctctgagatagggaggaggggagaaaggtggaagggcaggacactgctc

SEQ ID NO: 310188 - DNA, 201 bp, Homo sapiens
gagcaggagagaagagaggacaccacagtgcaggaaacggaggagcaaaggctgggagtggggaggctggaggggtgcagggaatcagactggggcgctgygaagaggcctgaggccagagcaggcagtgcctggatggagggagcgagcagctcctcaccctcagctccttgatgaggtaaggtgaccacgagccctgct

SEQ ID NO: 310189 - DNA, 201 bp, Homo sapiens
gactggatgggctttctcctggagactgattagagagacagagactcaggcccggggtccagaaaagacaaccaaagctggggagggcacatgaagggggrcaaagaaggtctgggttcaggggagtgcgtggggccccagagcctgccatgtctccgccaactctctccctcactggaggagggctctgtgccttggtgc

SEQ ID NO: 310190 - DNA, 201 bp, Homo sapiens
ggctggaattatcttcattgtcgttgacattgtcatcttcatcatcttttaggcagttatttccaaattccagggtcctttcacaaatgtctcatttagcvggttaactcatgcaattgtccaaaagtctttatggaacactgctgtgtaccaggcaggcacagttttaagtgccggggtcatggtggtggccaaactggc

SEQ ID NO: 310191 - DNA, 201 bp, Homo sapiens
ggccagaaacctcagcaacgcagagatgtgagtgactctacccaggggacagggcgagagaggctgtggccttcagtccccatcatctcctttcctgcccyacccacttccctttctctgccttctgcgggacttcatcaccttttgagggatcctttatttcatgcctgtctccctcgctagactgtaggctccaataca

SEQ ID NO: 310192 - DNA, 201 bp, Homo sapiens
tgagctgagatcgcgccactgcgctccagcctggtgacagagcgagactccgtctcaaaaaaataaaataaaataaaataaaataaaataaaataaaatawaataaataaaataacttctcaagaggtgagtgccatggaggtggtgcctggagttgggagcccaagagatggtggcggtgccaggccagggtcggctgtt

SEQ ID NO: 310193 - DNA, 201 bp, Homo sapiens
agactcagggaaaggcaggagctggcatagaggcgcaggcaggtccaaggcagtgcccaggccagatgctgcggccccgggctgaggttgctccagccggscccaccccccaccgtcctgcctggcctttggctgtaaacactgagagaacaagttccgtttcccgggaaatatttatctcaggctgtgtgaagagcgtgt

SEQ ID NO: 310194 - DNA, 201 bp, Homo sapiens
caggtcctcccctgtgtgcaaggccacagtccagcctggcagaaggccagcccaattgtccagtgtttcactgcctcctgagtccttcttatgccttggcrcccaggccagagttggggaggggtccaggctgcaggggagggtttccttccagagtgcccatccctgatggatccttagaagcccagtacagctgcacag

SEQ ID NO: 310195 - DNA, 201 bp, Homo sapiens
cagtgagctgagatcgcgccactgcgctccagcctggtgacagagcgagactccgtctcaaaaaaataaaataaaataaaataaaataaaataaaataaaataaaataaataaaataacttctcaagaggtgagtgccatggaggtggtgcctggagttgggagcccaagagatggtggcggtgccaggccagggtcggct

SEQ ID NO: 310196 - DNA, 201 bp, Homo sapiens
atacttcctggacacagacatggaaatgcatgaacccctgccttcgagggccccgcgtccaaaggctcagacaagggcagaggccaggacagccagtgggrtcccatcagcaccctctcagtataggctgaggagggaagaccctgttcttgccccaagggtgacagtgagaaggggtcaaggaaaggagtcccaggtcag

SEQ ID NO: 310197 - DNA, 201 bp, Homo sapiens
ctgggcatggtggtgcatgcctgtagtcccatctactcgggaggctgaggcaggagaattgcttgaacccgggaggcggaggttgcagtgagctgagatcrcgccactgcgctccagcctggtgacagagcgagactccgtctcaaaaaaataaaataaaataaaataaaataaaataaaataaaataaaataaataaaat

SEQ ID NO: 310198 - DNA, 201 bp, Homo sapiens
gggctcagtgagaggatgggggcttggtgaggagatgggggctcagtgggggatgggggctgagtgaggggatgggggctcagtgagaggatgagacctcrgtgaggggatgggggctcagtgggggatgagggctaagtggtagatgggggctgagtggggggatgggggctcagtgacagggtggggctcagtgagagg

SEQ ID NO: 310199 - DNA, 201 bp, Homo sapiens
gagggccagcctcgtcaagggcctggagttgagactcagggaaaggcaggagctggcatagaggcgcaggcaggtccaaggcagtgcccaggccagatgckgcggccccgggctgaggttgctccagccggccccaccccccaccgtcctgcctggcctttggctgtaaacactgagagaacaagttccgtttcccgggaa

SEQ ID NO: 310200 - DNA, 201 bp, Homo sapiens
cccccgccccttccctgacagcctgagggggaaaacaggacatgaatacttcctggacacagacatggaaatgcatgaacccctgccttcgagggccccgygtccaaaggctcagacaagggcagaggccaggacagccagtggggtcccatcagcaccctctcagtataggctgaggagggaagaccctgttcttgcccc

SEQ ID NO: 310201 - DNA, 201 bp, Homo sapiens
gtgcccctgagctgagctctgttgtgcaccacccgatttccgtcggcctcctttctgacttttctccatcaacatttcctgcttgggcctgttgcgggctrcccaaaggctgtggactggggccgaggtacataggactttggcttgtcttttgagctaacaggatcctgtagaagaaatgagatgagcctgagagggggt

SEQ ID NO: 310202 - DNA, 201 bp, Homo sapiens
tgctgagaccacgccaggctcgcgggcaaggcctaggcccagggagggccagcctcgtcaagggcctggagttgagactcagggaaaggcaggagctggcwtagaggcgcaggcaggtccaaggcagtgcccaggccagatgctgcggccccgggctgaggttgctccagccggccccaccccccaccgtcctgcctggcc

SEQ ID NO: 310203 - DNA, 201 bp, Homo sapiens
aaaaacataacaagaagcaatggagacagatagctcagaatggtgggcgctccctccactcccagtgagggaggacagaagaggctgggctggccttagakaatagagaccttttcaacctgggtcacacaggttgtttctcctgtcacaacagaactggtgtgtgtacattcgagagagcttccactcccaaagcttgca

SEQ ID NO: 310204 - DNA, 201 bp, Homo sapiens
ggcaggcgcctgtaatctcagctactcgggaggctgaggcaggagaattgcttgaacctgagaggcggaggttgcagtgagtcgagattgtaccactgcaytccagccctgggcgacagagcaagactccatctaaaaaaaaaaaaaaaaaaaagtctcagggctgtctctgcactgctccaggttcctgaggacggcggt

SEQ ID NO: 310205 - DNA, 201 bp, Homo sapiens
cacacttgaaattggctggagggggaaccagaagttaggtggggttggggagggacaggagccagcaccctgcctccacctccgggcagtgcctctgctgsggggagggaacctgtcctgggggtggtgggaggtgtgaggggggagctggattctccagtgaaactggccctccctcctctcaggggaggggagggggct

SEQ ID NO: 310206 - DNA, 201 bp, Homo sapiens
ccttggcccccactctcgggtattcttgcacaagaccatttttctgggctgcattttctcacttgtaaaaggaggaagttgggggtcaatatctccaagcratatatgagctctagctctaggagtataggattttgagaatctggaattgttagtctgtggggttctaactgggacaattctagcattccttgactctca

SEQ ID NO: 310207 - DNA, 201 bp, Homo sapiens
caaggggatgtggctcagtggaggttgctgaagagtttcttggggttggctacacgcggtggctcacgcctgtaatcccagcactttgggaggccaaggcrgatggatcacttgaggtcaggacttcaagaccagcctggccaacatggtgaaaccctgcctctaccaaaaaatacaaatattagccgggcgtaatggcag

SEQ ID NO: 310208 - DNA, 201 bp, Homo sapiens
gggagtgagagcaaagggagacaggcagagctgaagagcagtatcgccccaacatcaatactggtatttcagaatgggaaagctgttccatttcccgaatyatcagaatgctgaggtccgatcttgcagtctctgagctgggcattccttggcccccactctcgggtattcttgcacaagaccatttttctgggctgcatt

SEQ ID NO: 310209 - DNA, 201 bp, Homo sapiens
gtgggtgggagaccttttgagagggtggagactcagagagaaggatgggggctcagcaaggggatgtggctcagtggaggttgctgaagagtttcttggggttggctacacgcggtggctcacgcctgtaatcccagcactttgggaggccaaggcagatggatcacttgaggtcaggacttcaagaccagcctggccaac

SEQ ID NO: 310210 - DNA, 201 bp, Homo sapiens
cgggagtgagagcaaagggagacaggcagagctgaagagcagtatcgccccaacatcaatactggtatttcagaatgggaaagctgttccatttcccgaawtatcagaatgctgaggtccgatcttgcagtctctgagctgggcattccttggcccccactctcgggtattcttgcacaagaccatttttctgggctgcat

SEQ ID NO: 310211 - DNA, 201 bp, Homo sapiens
ttatggctcacatcttgcattcacaactcctgctctactgactcacctgtgcacacacacacacatgcacacacacacacgtgcgtgcacacacacacacaggcactcacttgcatgcatgagcacgagccaccattttggctcttgtaccatccatctacctgggccaggttcttgaggagtgaggagaatgctgggctg

SEQ ID NO: 310212 - DNA, 201 bp, Homo sapiens
gacagaggggagagaatggttactgtgaaggttcgctggtggcagacagagggaggagagcctgtggcagcaccactccatggagcaggcccctgggtgcyagccggctgggtccggggggatggggactggtaaagctggcccagccagatggtgcaggacttgtaagccatgttaaggactgcggacttattctggagg

SEQ ID NO: 310213 - DNA, 201 bp, Homo sapiens
cttatggctcacatcttgcattcacaactcctgctctactgactcacctgtgcacacacacacacatgcacacacacacacgtgcgtgcacacacacacacaggcactcacttgcatgcatgagcacgagccaccattttggctcttgtaccatccatctacctgggccaggttcttgaggagtgaggagaatgctgggct

SEQ ID NO: 310214 - DNA, 201 bp, Homo sapiens
gttggggagcttccaggaggaaacaaatctgaactgagagctaaggtcaagccaggagaaagttctggacagaggggagagaatggttactgtgaaggttygctggtggcagacagagggaggagagcctgtggcagcaccactccatggagcaggcccctgggtgccagccggctgggtccggggggatggggactggta

SEQ ID NO: 310215 - DNA, 201 bp, Homo sapiens
gcgaccggctgagccgtgagtatagtgaggggctggggtggtgagcggctgtgagaggtgccacagacagggtcctgggagtccctccaaggagctggggytggcatggagctgagccacgtggaaggatcgatcctgttcctgggcacccctcctccccgcgttgccagactgcagcctggggtgggggcaggttacctc

SEQ ID NO: 310216 - DNA, 201 bp, Homo sapiens
tgtggctggtgtgtgtgtgtatctatatgtgtgtattcatctgagtgtgtgtgggtggctgtttccttcccctggcaattgaggatacagctgggacaccrtggcccactgatgcagggcagggaggggctgaatgtatgaccgcctctttgaactcaggacaattcattctacaccctgtgggaaagatgcagaaaagaa

SEQ ID NO: 310217 - DNA, 201 bp, Homo sapiens
gtggggggcaggcaggacccacattcaatagaactttaagatccaggactcttaggctttatccagagagccctggggagcccagaaaggttttatatagsggagagacatgatcagatttgggttctagaaacctgccctgggccaggcatggtggctcatgcctgtaatcccatcactttgggaggcagaagcaggtgg

SEQ ID NO: 310218 - DNA, 201 bp, Homo sapiens
acacataaacatgtgcaagcgtgtcacggggtccataaatcccagctgaaaactggtcagaccatcaggaggccaccctggaacccagtgtcctcctcttyctgtcaggcctcacacacctcctccaggaagccccttaggacccctgaagaccatcttcatccaactagcccctttgtgacaactgaactctgtgagcct

SEQ ID NO: 310219 - DNA, 201 bp, Homo sapiens
gccatgttaaggactgcggacttattctggagggaaattgaccctggggaagagttgagagaacggatatgacagatcagatctgcatgttcaatagctcyctggaccatggtgtggagactgaaggggaggctggtgtggtccaggtaagcgggggtgatgaggcctggacagggaaatggctgaagaatggaggggagg

SEQ ID NO: 310220 - DNA, 201 bp, Homo sapiens
agctctgcagaggctgggcccgggtctctcctctacccaccgtgtgtgtcctgagctgggtctggcagagtccagatgctcacacctatcatcaagtgacyggaactgccatgtagggttggcagtccagctctgtctagggaaactggggtccatcggatgaggggactctcatctcatcaggcagcatctcatcaggcc

SEQ ID NO: 310221 - DNA, 201 bp, Homo sapiens
gagatcatgcatgttaggggcctggcacaagcgagggctcagtggcccgtggctgtggttgtgatgtgcctgtgcctgatgctggatggggctgtagttgytctcacattctctctgtcactgtcattggccctatttctctttttcttctcctccatgcctcctgtccgccatgtccctctctgcctcgtgtctcagtct

SEQ ID NO: 310222 - DNA, 201 bp, Homo sapiens
tcccgcgattctggacaggaaagggttgcagccagggctgaggggtctgaggtgaggagccagttgacaagtgtgtgagtgtgtgagtgtgtgtgtgtgcrtgcatgtacacgtgcatatgggaatggggtggggtgggaggaggcagtgggccagcagcgctgtctatgctgaggggctgtgtgtgcccacaaacgtgtg

SEQ ID NO: 310223 - DNA, 201 bp, Homo sapiens
ttattgtgctggtggtagggagccactgagggtgagtgggggagagcatgccagagcatgcctcagaaagaaaggtgggagaaacgctggcatggagggcygccccctgagttggtggggtggccgggctctgccaaggctatgtgccagctgcctggactgtgtccaggaatgggcacaatgactcaacattgagaaaat

SEQ ID NO: 310224 - DNA, 201 bp, Homo sapiens
ctgggccttggttcctggcagaggcagtgcagccaggcaggggaagggatgcttaggccttggtctcctgagggcaagccttggatgtgagggttggatcrgctggaagtggtggcttcagaaacccatagagtgggtgacagggtagggacttggtgtttccacaaacccgcccctcctttgaccaggtgtgccctgtgg

SEQ ID NO: 310225 - DNA, 201 bp, Homo sapiens
tcaccatgttggccaggctggtcttcaacttctgagctcaggtgatcctcctgcctcggcctcccaaagtgctgagattacaggtgtgagccactgcaccygacctcagaagacattgaaacccacagagaggacacagccagatgccctctgcctcattttctcagaccctgcctgatttctcttatgtttcttctaggc

SEQ ID NO: 310226 - DNA, 201 bp, Homo sapiens
ggagaaagagtccccatcctcacagagacacttatctgaaaggagagagctggtcacacctttggggaccctctagactgacgcagtctgtagggggatcraggtcataccttccagagagagctgtgggaaaaccctactgggctgcctcccagcaggtgcttgagagaagaaacatccaaggttccttgagattggaag

SEQ ID NO: 310227 - DNA, 201 bp, Homo sapiens
gagaggagcccagtggtgaagtgaggccagaggaggggcttcctctggaagcctcaatttcttctttgcagtagttgctttttttttcgtgttttttttttgttgttgttttttaggttttcaccgttctaacattcaaggctttctctgttatctctctttgagctcttagtactgagacagtgctggggtttggggcag

SEQ ID NO: 310228 - DNA, 201 bp, Homo sapiens
gtgtttggggccttggtttggaggagggtgtggagaggatgcacgtggcagcaaggtcactgtgtttactacaccacttcgtgctccgcagaggggaggcrtacggcgcaggcagtgaggcctgggtggtgtctttggtggcgcctgttggtgtaagaacagcttaggctgggcttggagtttgccagccatgcagtctta

SEQ ID NO: 310229 - DNA, 201 bp, Homo sapiens
cacaccctcacaaggatacaaacctgtgctcacactctcttccaccctcacacacatcatgcttacaagcctgtgtgcagccttacacacatgcacacacrtacagagcagcctaagggtggctcacccctgcccaggtgaacacctgtgcccactccagggctggagtgttgaggaaagggtctggatggaggcagaacc

SEQ ID NO: 310230 - DNA, 201 bp, Homo sapiens
tgagtagctgggactacaggcatgcaccaccacacctgcataatttttgtatttttagtagagatggggtttcaccatgttggccaggctggtcttgaacycctgacctcaaatgatccacccaccttggcctcccaaagtactgggattacaggcatgagccactgcacccggctgtgactgtccatctttatgtctgat

SEQ ID NO: 310231 - DNA, 201 bp, Homo sapiens
ggcacattgggttttgggtggtaaaaaaggtcataggttcatgaatcattgcctgcttagaattccttccaagaggagaggacgaggtgcttagttcaccrggtgttttgctgccctggctgcatcttagaatcacctggagagaaaaacaaacagatcattgccagagctccactcccacaggttccatgaccttgcccc

SEQ ID NO: 310232 - DNA, 201 bp, Homo sapiens
gtgcgtgcatgtacacgtgcatatgggaatggggtggggtgggaggaggcagtgggccagcagcgctgtctatgctgaggggctgtgtgtgcccacaaacrtgtgacattaggtgtgcacattatctatgcaggttgtgtctgcatgtgtctctgtgtctaggtggcgtgcgtattgaatttaattggatgcatacacctg

SEQ ID NO: 310233 - DNA, 201 bp, Homo sapiens
gtggccatgggcagcacctctggcaggtgctgaggtggaggaggcagtatccaggcaggcatccctgggcagaaggtacctctcctgagcagacaggcctwcccaggcaccaggcccaaagataggggcaagggctagatcctggtattggaggaccctcaggagaggctgtgtgtgacttgctctctctctgacctgggc

SEQ ID NO: 310234 - DNA, 201 bp, Homo sapiens
gtgcacccagcactttgctgctgtccctcctccatgcttcttctcagtttcttccttctcctctccttcatcttcttccctcaccctttttttttttttttaatagagacagtgtcttgctggctggagtacagtggtgccataatagctcactgcagcctcaaattcctgggctgaagctatcctcctgcctgggcctcc

SEQ ID NO: 310235 - DNA, 201 bp, Homo sapiens
ttgtaacttataaagcccctcatcccagctgccctggtcttgacgggggcggctagggcttgagatagggaagagtaaactgcaatctggtgtcaacctgyggtgggatgtgtccaggctgggtgggtctatagtgtatgtgtttgtgtgagtgttcctgtctgtgtgtagcacgggctgggttgcatgtgttgggtgtgt

SEQ ID NO: 310236 - DNA, 201 bp, Homo sapiens
aactggaagagagaggtggggccaggaggctagagtggaggccaagccaatacaggggtcagtgagttctggagctttttgagaacttgggaaaggctggrtagatgagaacagggaagggaatgtctaggtggctcaggcttggactggggtcaggggtgtagtgcagacatctcagtaagtcaggatctcatgagggaa

SEQ ID NO: 310237 - DNA, 201 bp, Homo sapiens
aacttgggaggtggaggttgcagtgagctgagattgccttactgcactttagcctgggggtgacaaagtgagactctgtctcaaaaaaagaaaaaaaaaaagaagaagaaaaataaagaaacctgcctcggtggcattgtctgggttgaactggaagagagaggtggggccaggaggctagagtggaggccaagccaatac

SEQ ID NO: 310238 - DNA, 201 bp, Homo sapiens
ttcactggctttctctgtgggacccactccccgatcccttccctccctcctgtgttggagatctccgagtctttcctcgtggggggcccctcctcttgttsctctccaggtacagtggtcccactttattctctgggcttctcctctggtttctcttcaagtatttctgggctctctaatttggtctgttgccccatgtgc

SEQ ID NO: 310239 - DNA, 201 bp, Homo sapiens
gcagagagtgggagaaatgcgcagcctttattaacaaaaatctgagatgggtgcaggccctgactcctctccaaaaataatgataaagaagcaggcatggycaaataagggagtgaggacagacagcaggaagaacttcctaccaatgcagaagggctgtgagtctcttggttttatgagagtgggctgtacgtgtgaaag

SEQ ID NO: 310240 - DNA, 201 bp, Homo sapiens
atgagaatcgcttgaacttgggaggtggaggttgcagtgagctgagattgccttactgcactttagcctgggggtgacaaagtgagactctgtctcaaaaraagaaaaaaaaaaagaagaagaaaaataaagaaacctgcctcggtggcattgtctgggttgaactggaagagagaggtggggccaggaggctagagtgga

SEQ ID NO: 310241 - DNA, 201 bp, Homo sapiens
tttgagagggctcagatccttggcatcagctgccctttcaacatcctccttccaaccacttcagactcagtaaggcctttggaaaaaataccaaaaaaaaagcaattaaaagtgaatattcaaatccaattatcccagagctcagtggagatggggaggtgagtgcctgctggtagacaggggctgaagattccaggagga

SEQ ID NO: 310242 - DNA, 201 bp, Homo sapiens
tggggggaggggatccgagcaaggtcatgcggcaagtcgctggcaaaggcctagcgagacccaagcgcaccctccagtccagacacgtcctgccgccccarccgctttcatgccaagcagaggcctaagaaccgggtcggtccgggcagggagctgaccccggtgacccgctgaatccccggacgcggcccctccgggcag

SEQ ID NO: 310243 - DNA, 201 bp, Homo sapiens
ttgctgagatgtgtggaccctggatttctgggctttcattctttggatggttgccttgggcgcagaggaggctttgaagatagagcagagaaggtggcagrcaggcttatgctcaaatttcagcatactgaaagatgtactgttactctgtagctgtgtggtcctgggcaagttacttaacttctctgaaccttgtgtgaa

SEQ ID NO: 310244 - DNA, 201 bp, Homo sapiens
ggagggatgcaggaaaacaggctcaggaggcagcggggagcagcctgcaggtttgcttcactccctaggacccacacatgctcccctcagctgtctgggcrtgtagagtgggtgcgtatctgcggtccaggcatttttgagagggctcagatccttggcatcagctgccctttcaacatcctccttccaaccacttcagac

SEQ ID NO: 310245 - DNA, 201 bp, Homo sapiens
atacattgacttggcccagatcacttactctacacctctcctaagtccccagatgtgactcccaggaaagacacaaaaaagggctacccagagggataagrtagtaaccagggaagccctcccagaggaggtgggccttcaaatggcccctaaatgacaggcaggagggaaggatctgggagggtattgggggtggggtgg

SEQ ID NO: 310246 - DNA, 201 bp, Homo sapiens
cagcatgcccggctaatttttgtacttttggtagagacggggtttcaccatattggccaggctggtctcgaactcctgccctcaggtgatctgcccgcctygacctcccaaagtgctgggattacaggcgtgaaccactgcacctggcctgaacactcactttgtcacattcactgaggtctcctgagtggactcatatgc

SEQ ID NO: 310247 - DNA, 201 bp, Homo sapiens
acccttcctgaggaggcgatgctgggtcttagccttaaagaacaactgagagttttccaggtggaggagaaaaggaagggtattccaggcaaaaatccccrtaagagcaaaggtgtgagcagcaagaaatcaagggtggcaggttcatggctcctgggctggaggaagggcctggcggtggagaggaagggagtgaaggcc

SEQ ID NO: 310248 - DNA, 201 bp, Homo sapiens
tgagctaaggccctagttcctcagtgtctgcccaccaatgcaggtgtgtggcagctctagaccctcctctagggacatccctccctgcctcatgctgcctrtggctttcactctctggagcactcatccatggcacccataagccaccccctcagacaatggcccctaaagcaaaactgtgtcaccgttgcatatctcttg

SEQ ID NO: 310249 - DNA, 201 bp, Homo sapiens
agccaccccctcagacaatggcccctaaagcaaaactgtgtcaccgttgcatatctcttgataacactctgacccctccactgccaaatctgataaaagamctccctttgaagaccttcctcctggagtcggatctcagtccttcttgctgtccagagcctgggccttgggcctccctgggaggcgagtcagtgagggcag

SEQ ID NO: 310250 - DNA, 201 bp, Homo sapiens
gtgttcctgctggatcagaatgagctggtggccaaggtgttcgacgggggcgtggtggatgatgaggtgagagggcgtggagggagtatgtggccctaggrgtgtccgggagtccgccggcggcgctggggagcggcccgaggtttaacagtcccctctgtggccgggtcactaacttcttcctctcgactccatctctgc

SEQ ID NO: 310251 - DNA, 201 bp, Homo sapiens
acacccggagttgttggtatgctgggagaaggctgcatgctccgtgggagtagggtggagaatgaggagagacagggccgccgtcctgcaaggagcatccrtattgagggggcgaagatagggtgcaccagtgagggagacagaggaggggccgtctggaaggtgggagggaaacagccgcgcaggacggggcgggggcgg

SEQ ID NO: 310252 - DNA, 201 bp, Homo sapiens
gggctctgtgggtgggagaccttttgagagggtggagactcagagagaaggatgggggctcagcaaggggatgtggctcagtggaggttgctgaagagttycttggggttggctacacgcggtggctcacgcctgtaatcccagcactttgggaggccaaggcagatggatcacttgaggtcaggacttcaagaccagcct

SEQ ID NO: 310253 - DNA, 201 bp, Homo sapiens
agcctttgtgtatgtgtgtgtgtgtgtgtgtgtgtgtgtgtgtgtgtgtgtgtgtgtgtgtgtagtggggactggggtcaggggtcagggactgactctarcctgaggcacccctggagtggggccagcccaggaatagcaggtggaggaaagccgggcagcctcagggctgcagctgtctggtggtacagggcagggctc

SEQ ID NO: 310254 - DNA, 201 bp, Homo sapiens
gaagtgagaaaacggggtctccaggaggcacttgtctaaggtgacacagctggagagttggagatggtggttagaccgagtcacccccccagaccctggcstctccctgcgtgccccttccaggacacccatcactcccttgacaccccttgggagtgggtgttcatttccttgggctctcccaatcccagtccttggtat

SEQ ID NO: 310255 - DNA, 201 bp, Homo sapiens
tctcctctagcatttggggctgctgggtagggagctacattggggtccccttgcttattctcatgctgctccctacttctgccctgtcacttggtcccagragaggggctcccactggttccttttccctgccaggcctgcccaccaaggccaccatggccacacagcctgaatcctggggccagcaagtgtccatggaag

SEQ ID NO: 310256 - DNA, 201 bp, Homo sapiens
caggcatccctgggcagaaggtacctctcctgagcagacaggccttcccaggcaccaggcccaaagataggggcaagggctagatcctggtattggaggamcctcaggagaggctgtgtgtgacttgctctctctctgacctgggctagagcataaacacgtgtcacatacttgcacacacattcacacgtgaaagcacgc

SEQ ID NO: 310257 - DNA, 201 bp, Homo sapiens
gcttctctctgctcttatctctgggcctctgtctctcagggcctgactggtcttgacctctttgcctccttcttcccctcgagagcccagccaggcagcakgtccagccctccagcccagagaacagatggagtccaccctccctctctcttgctggctgcctcggaagccccaaacaatggcctccgccctgcaccgtgc

SEQ ID NO: 310258 - DNA, 201 bp, Homo sapiens
ctatgggttcccttcccccagagggtcatggggccagccatctgctgcagacaagacaaacatgcatgcaaatcacatgaaaatggatgaggcctgtggcygacccaccctacagcccccatcccctgggcctgagttcactcagcctgtacccttcctgacccagagctgctgccagggctctgggaacaggccttgccc

SEQ ID NO: 310259 - DNA, 201 bp, Homo sapiens
cgcgtccgagtcaccacctgtccctctccagtcctctcctctcttcctttattactatctctatattgcctcctgcctcaggcttatctcctcctgtcatrcctctatccacctctgtcactcccctgcgactctgcctcactccctggcacaccctctccctccctgggagtcgggagtggagcctcgctgggaatcagg

SEQ ID NO: 310260 - DNA, 201 bp, Homo sapiens
gacgtgtatctatggaaagactccaattgtgcataggggtgtatgtgtgtaagattctgtggcccagggcagcctgtgaaaaggaaggatcttggggtctstggatgatggggagcagagactaaggcctaaggtatgctggggctcgagccccctggactttatcccctgtgagctggcaggtcttagactagtcctgga

SEQ ID NO: 310261 - DNA, 201 bp, Homo sapiens
tgcttcttccccggcggaggagcctcccccaggctctcccacctgcactggcctcaagagagctgggattgagccccagttcaggcacctgctggctggcrgaggttagggcaaatcactttcctcagccctctcatccgtgacaggctctggtgagggttaaatgagatgttgcccgtcaagtgcctgccacttccctga

SEQ ID NO: 310262 - DNA, 201 bp, Homo sapiens
gggctccaattgtcctgctggcaataggaagccatatgggtgggggtgaggcagaatcagatttaggtgtggaaaagatgactccagccagtgtgggcatygaagaggaggcacagaagcaggcgtggccacctgtgcctctgtgtaggagctgtgtgagcatgtgcttgaggatgtgtgtctgtgtagaggactggggtg

SEQ ID NO: 310263 - DNA, 201 bp, Homo sapiens
ttctgggtcaagacttgttcttatttgctgggataaaacagcagtgagcaaaacagagctgacagcatggtgggaaggttgagctcttccagaccgtgatragaagtattggtgagtggtggggagagtggccagaaggcagagtgtgggcgcagcatgagaggaggctttgtccagacttaaggacctggaaggccttga

SEQ ID NO: 310264 - DNA, 201 bp, Homo sapiens
tcttcctttctggtttccatgggaatctgtggctcaggatgatcaggggttgacaggatggcgctgtggaaggagtctgtgtcaggcacagccatcccacdtgggaaggagccggctggtaagaaagtgagttccctgtccctgggagtgtgcaagcagggtaggggctgaatggctagagtgactccagaaaggggttca

SEQ ID NO: 310265 - DNA, 201 bp, Homo sapiens
taaagatcccttatcccaagccatgggcactggcactgccagaggatgctgaggcctgctggggcataaggacaacaagcaacatccttttctgagctgtygggagtgccaagctctctgttaaatacttttgagcctcttctcatgtattcacagccacctttcaaggaaggccagttgatccccagtttagaagtgaga

SEQ ID NO: 310266 - DNA, 201 bp, Homo sapiens
gccagcaagtgtccatggaaggccccactctgtcatcgtagagatcaggaaacaggctcagaagtaggagggcttcctggtcctagggcccagctcttccytcttttcaggcctgtcttctgcactaaggacttcaggccaccagggaaggtggggagggaggaaaggagatgagatagacttgggcgggggcctgaggac

SEQ ID NO: 310267 - DNA, 201 bp, Homo sapiens
ctctcccagcctgaagatgggtgggagcgagtgagaccaggagccaggtttagacacaggaggaggttcccccagggtttgcccctggctctgagataggsaggaggggagaaaggtggaagggcaggacactgctcagcctaaagcagtggcacttggatccggatgtgaggagtgaccacagttttcctgggcttttcc

SEQ ID NO: 310268 - DNA, 201 bp, Homo sapiens
taagactgaagaaataacttcttggctgggtgcagtggctcacacctgtaatcccaacactttgggaggctgaggtgggtggatcatgaggtcaagagatygagaccatcctggccaacatggcgaaatcccatctgtactaaaaatataaaaattagctgggcatggtggtgcatgcctgtagtcccatctactcgggag

SEQ ID NO: 310269 - DNA, 201 bp, Homo sapiens
cctacaggctgccgtggagcctgaggctctagcagtgcccgaggaggtgggggtgtggggagggtgctactccaggaaaccctggactgtgggcaaacagyagcaggtgtggcgtggaggctggatcatagagacagataaggaggcccgaggcaatgggcagggaatgggatcagggcagtgtggggagagacagggtgg

SEQ ID NO: 310270 - DNA, 201 bp, Homo sapiens
cacaatcttctcgcctccaagccttcacaattgcaattccctggacatcctttcctgtctgcctcgataacctctgcctgtcctttaggactcaactcagrtgtctccctctacaggaagccttctctgactccatcacaccctgcacctgagtgggctggggcctgctcttcctgcctttggcagagctctcatctcccg

SEQ ID NO: 310271 - DNA, 201 bp, Homo sapiens
ccagcacttcaggaaccttaaaggtcctgggtgtaggggctggaaggtgggagacaccaccggttcctgtagatcctggattacttaaagtggccaggaaygaatgggtttggttcagaatgctgcgtgagcttgaacgagatgctcaacctctttggtcctcgatttgtctagagtctctgacctagtgatctcgtgact

SEQ ID NO: 310272 - DNA, 201 bp, Homo sapiens
gaagccttccaaatgtcctcccctctgagctacccacctagttttctctctccttcctcaggtatgaggctccacacctcctcccagtcatgtctccccaytcgtcccaccccagacagactgtgagcttcccgagaacctgctggtctcctcctccccatctgctcctggcaggagacccagagctgaggcaggcattgg

SEQ ID NO: 310273 - DNA, 201 bp, Homo sapiens
ttttccccaagtcagcctgctgcaagaggcacaagcttgggagctggaaggggctgtgttgaaattgctgttccatcatttctagctgcatgactttggaygaatgacctcaggtcccagggcctcagtttcatcaactgtaaaattgggctaataatatcatgaagattaaatgagagaatagatctggcacttagtagg

SEQ ID NO: 310274 - DNA, 201 bp, Homo sapiens
gctggtgggaagatggcctggccagggagctggacagacctgggtttcagcttcggctttgctgcttttgagctgtgtgaccttgagcaagtcactaaacstctctgggcctcagtttcacacctgaaaatggggataatgatagcaccgactgacctagggcagtggtgaaacaaaactggtcaaatatcttgtaaatac

SEQ ID NO: 310275 - DNA, 201 bp, Homo sapiens
ccaaacaatggcctccgccctgcaccgtgccttgttgctaggccttgggctggcagcacctggcttccatagcgacgggtgcttagaaacagaatgccacrtctcccagtcccaccacaggagcctttgccgattgagcgagtgccttttgatcaatcaggaagtgtggccaggctctaggttgcctccaacttgaggagg

SEQ ID NO: 310276 - DNA, 201 bp, Homo sapiens
gtgcaggtcctgcagcagcgcgggcccagggaggctccccgagccgtccagaaccccccggaggggacggcggaagaccagaagggcggggcggcgtacaycgaccgcgaccgcaagatcctccaactgtgcggtgagggcccggcctggacaggtcacgagggcggggccgggcagaacttggaggggaggtgggcgggt

SEQ ID NO: 310277 - DNA, 201 bp, Homo sapiens
tagagatccagaggtttgggttctggacctggctctgctctgactggctgtctgaccacaggttgatcattgcttctcattgaacctcagcttcctcatcrgtcaaatggggagacttagctctctgaaggctgtggctttgaagaatttctccccctgtatcaggctcactccgtcacctgggtctctcttccccaagtc

SEQ ID NO: 310278 - DNA, 201 bp, Homo sapiens
gtccagccctccagcccagagaacagatggagtccaccctccctctctcttgctggctgcctcggaagccccaaacaatggcctccgccctgcaccgtgcsttgttgctaggccttgggctggcagcacctggcttccatagcgacgggtgcttagaaacagaatgccacatctcccagtcccaccacaggagcctttgcc

SEQ ID NO: 310279 - DNA, 201 bp, Homo sapiens
ggatggccccagagctggagaagaggtggtatcagcaggaaataaggatggggccttggtggcagctttgaggcccagggcaggggcagggctatctctgkgtcccacgcatttcagggagtgagtgttgaatgactgcatgagccagggtggggctcagctcagtgcagtgactacagagaagcttcctgaaacacagct

SEQ ID NO: 310280 - DNA, 201 bp, Homo sapiens
gctgggaatcaggacccccctgcctctggtctctgtctaagcagtctctgcgattctggccagctcttatctttttccaccttcccgaatctctcttgctstctgatggtgtctctgcctttcactgtctctgaactccctttgtttttctctatatgcttctctctgctcttatctctgggcctctgtctctcagggcct

SEQ ID NO: 310281 - DNA, 201 bp, Homo sapiens
gtattgctgccgttttgccccactgctgtctgtctccgcgtccgagtcaccacctgtccctctccagtcctctcctctcttcctttattactatctctatmttgcctcctgcctcaggcttatctcctcctgtcatgcctctatccacctctgtcactcccctgcgactctgcctcactccctggcacaccctctccctcc

SEQ ID NO: 310282 - DNA, 201 bp, Homo sapiens
ggttaaatgagatgttgcccgtcaagtgcctgccacttccctgacgccgagcagctaggctgctctgggttctctagcacctgcctcccctggtcccagcrctgggtgggcggctgtgttctaccggtcactggtgggtcctcagggccccgacacagggcctgctattgggaaagagggaagtaaacatcccagggctgg

SEQ ID NO: 310283 - DNA, 201 bp, Homo sapiens
tcaaatggcccctaaatgacaggcaggagggaaggatctgggagggtattgggggtggggtggcatgggcaaaggcctggaggtgagagtcagtcagtcaytgatgtgagaagagcaagaagtagaaatgtaaggaatggtggggaggggagtcagagctggatgaccaagcaagggttcagctgtagagggtctggcccg

SEQ ID NO: 310284 - DNA, 201 bp, Homo sapiens
tacactgacgacattagcaaagacctccgaagtgtttcctctgtaccaggctctgcactgggcatgggtgatatagtcatggccccatttcataagactcraagctcattttcagggcatagagggaagagagtgagaagggtattctaggccgagggaacagtgtagaaaaaaaagcatgaaggtgtgaaagagcccaag

SEQ ID NO: 310285 - DNA, 201 bp, Homo sapiens
tctccctggaggggatccagagaagggagatcactccattcattcattcgtcattcatccatccacccattcaattattcctttggccatcatttcctgarggatgtaaactctcttctgacactgacccagcgggacactcagcgtcctcctcctctcctgcttgagccaccatgcctgcctcttggaggctcctggact

SEQ ID NO: 310286 - DNA, 201 bp, Homo sapiens
cacttagtagccaaatgatataattagacactgacagtttctggcttgtccagtgagccctagggaaggaaggagaagacccgggtgctgttggaggcagraggttggatagggtgacccctacaccccgacccccctatgatctccatttccttcattccaggctcttctccaagtggcaaagaacctcttcacccacct

SEQ ID NO: 310287 - DNA, 201 bp, Homo sapiens
ttatttattgagacagagtcttgctctgtcacccaggctggagggcagtggcgctatcctggcccactgcaacctccacctcccaggttcaggcgattctycttcctcagcctcccgagtagctgggattacaggtgcgcaccaccatgcctggctaatttttctatttttagcagagacggggtttcaccatgttggcca

SEQ ID NO: 310288 - DNA, 201 bp, Homo sapiens
tgtctctgactctgcaggctgggggtgctgtaaggctgcgaggaggcatagagtcagcttgggtgctgggctgaggccaggggccgaggctcagctgaagygggcttctctggtctgagcctacaggatgcctcctttggggcagttctgccagtcaccctgactgggcggctgtgcttgctagtgccagacccatgctag

SEQ ID NO: 310289 - DNA, 201 bp, Homo sapiens
aaacccctccctccacagctgctctgtgttcctgctggatcagaatgagctggtggccaaggtgttcgacgggggcgtggtggatgatgaggtgagagggygtggagggagtatgtggccctaggggtgtccgggagtccgccggcggcgctggggagcggcccgaggtttaacagtcccctctgtggccgggtcactaac

SEQ ID NO: 310290 - DNA, 201 bp, Homo sapiens
gaaccagggtgcgcgtggcggcccgggcggaggggcggggcctgcgccgggcggggcgggtccgagcgagcgggggtggcaacacttccccaccgcctccrgcgtcccggagcataagggagtcgggttccatgcctgggacgtacgtaacctgcggaaactgcgagggcaggtcccggccggatccctccctccaaccga

SEQ ID NO: 310291 - DNA, 201 bp, Homo sapiens
agcctggatcaggtgtgggggagtgcaaagggccagaccaaatgctgggagaacttgatgaggaggaaccggcgcgggggtctggatgaaagtgggggtgrggtctttactgtggactggagcttgaaggttttgactggggccagaatgggacaggaagtggggtgtctttttgaccccttcatcccagtcctgggcatt

SEQ ID NO: 310292 - DNA, 201 bp, Homo sapiens
aaaggattgggggaaggcccaggcccagtgctctctctggtatctgagctctgcttgcccacctttgtgcctggtgtctggtggtgagcccatctccacarttagggcggagaggccccagggttggctgggccctgctctcaggagctcccagcaggatggggacttgagacccaggtgtatggacgagggaagagcact

SEQ ID NO: 310293 - DNA, 201 bp, Homo sapiens
ctgtaaggctgcgaggaggcatagagtcagcttgggtgctgggctgaggccaggggccgaggctcagctgaagcgggcttctctggtctgagcctacaggrtgcctcctttggggcagttctgccagtcaccctgactgggcggctgtgcttgctagtgccagacccatgctaggcacagaggtcgatacgttctcctgtg

SEQ ID NO: 310294 - DNA, 201 bp, Homo sapiens
tgtcataaataaatttcatatcctacaccaactcataaacaggcagtaggtgcctgaattttattgcaaatggatcttagttcagggagaaacagtgctgygtctgatgagccatttctgtcctgggtgcaggttcacacttgggctggcaggatgagcagtttgtgctgtgtcacataggtggggagaagtagacagatg

SEQ ID NO: 310295 - DNA, 201 bp, Homo sapiens
ggatcaaaactgtagtaggaagagttaaggttagagagtagaaaggtctccacaaaaggaggactgctacagttactgtgtatgaaatgctgccatggttwgggggtgtcatgaaggggtgttgtcgatctttgccaaggttatgctgttacagataaagggtggtcacctgcaggaaggcgcgcggggtgggctgcaggg

SEQ ID NO: 310296 - DNA, 201 bp, Homo sapiens
ccagagaacaggggctccagaagcccttcagctgtgagtgggatggggctggtggcaaggccagggataggatacactgacgacattagcaaagacctccraagtgtttcctctgtaccaggctctgcactgggcatgggtgatatagtcatggccccatttcataagactcaaagctcattttcagggcatagagggaag

SEQ ID NO: 310297 - DNA, 201 bp, Homo sapiens
atgcgcatcaagaacttcctgggaagacagagtcatcaaggaaggctgtggagggtccctcagagatggaggggcttgtagtctgccatcaggaagccatrgggcctgcccaggggctagaggctggactggatgatcccaagggctgctcttggaccaaccatgcccagggcatgtgacctcagggtttgcatccctccc

SEQ ID NO: 310298 - DNA, 201 bp, Homo sapiens
aggcttgcagttgttcaggacccgcgccactgcccgcaggcactgtatgtgatcgccctctagtgttcaatatgtgcactacagcaacacctaggcagctrgagctggcgtgaaggcggctgagacactcaggagactcctcacctgcaccggggctattccctcactccttcacttagtagccaaatgatataattagac

SEQ ID NO: 310299 - DNA, 201 bp, Homo sapiens
tcttagttcttagatctctaaaaatgcatagctccgagaacggttgcttcaactattttgtggttctctagtttagatgtaagtttctaagactccagatyttgagtgtggagcttgaagaaggacccaggcaagggccctgtcttgatactggcagcccctctgatacctccctctgccctctccaggccatcctgagca

SEQ ID NO: 310300 - DNA, 201 bp, Homo sapiens
cggttgcttcaactattttgtggttctctagtttagatgtaagtttctaagactccagatcttgagtgtggagcttgaagaaggacccaggcaagggcccygtcttgatactggcagcccctctgatacctccctctgccctctccaggccatcctgagcatgctgcaggacatgaatttcatcaacaactacaaaattga

SEQ ID NO: 310301 - DNA, 201 bp, Homo sapiens
aggcaaggcaaagcctggaggcaaggccgagagtgtgtagccagaggtttaagttagatgtgcataggaacttcctgctaagacagagtcatcaaggaagkctgtggagggtccctcagggatggaggggacatgtagtttgccatcatggggccgtgatggaggaggagaggctgaggcccctcttctgccctcttccct

SEQ ID NO: 310302 - DNA, 201 bp, Homo sapiens
cctcgtgtgtgtccacgtgcaggggggtgcatgtgcaagtgagtggggggcgccgtggcgacacccctctactaagggctgccgaggtggtaggcagggtrtgtgtgtgtgtgtgtgtgtgtatacatgtggaatgtaagggacatgttgggtgtagaggggcctgtagagctctagggtccttggtggttggatgtaaag

SEQ ID NO: 310303 - DNA, 201 bp, Homo sapiens
agcatcaaggaatgaacttgcataggaatcctgcaatggctgagccagaaggggccttagaggttaagtggaaaagctgtgtctcagataatgaaagggawtcacctaggataacaggacgtggtggagccagctgagttttggaatacatgcagcaggagaagttgagggtagacatgtagaagaacttcctggaagcca

SEQ ID NO: 310304 - DNA, 201 bp, Homo sapiens
taccctcctgttcctggaccgccggacgctccaggggctgtgggagcccccgggggagccctcaggaaggtagagtccagggatgaggtgtttgggacggyggcggggtccctgggcccggcaggcagagggaacggcgggagcaaaggcaggaatcccgctgcagcaagcgcagcgagcttggggcgagcggcgcgctaa

SEQ ID NO: 310305 - DNA, 201 bp, Homo sapiens
gggaactctacgacctggatgcctcttccctgcagctcaaagtgctccaatacgtgagtccctgcgcccctgccggccacctccccgtcctgtctccctcsggggaccaacttccccttgagccctccatctcagttccaattacgatgtccttccttcctctctcctccacccgcctgaagagccccggagaggggagca

SEQ ID NO: 310306 - DNA, 201 bp, Homo sapiens
cgtttctggagccagccagccctgagcagagtgtcttaccttggagcactcctcccaggcctcggaaatccggcctttgcctccttatgggacgtgagggmgatcagagggggttgtcaggccccagaggaccaaacccctccctccacagctgctctgtgttcctgctggatcagaatgagctggtggccaaggtgttcg

SEQ ID NO: 310307 - DNA, 201 bp, Homo sapiens
tctcaaccagggacatcgagatctttgccttgtttatttcctgcatgtgtcatgacctggaccacagaggcacaaacaactctttccaggtggcctcggtragaccctgccctgctcacagtggggaccctccatggggtgtcttggagtctcatcctctcccagcctgaagatgggtgggagcgagtgagaccaggagcc

SEQ ID NO: 310308 - DNA, 201 bp, Homo sapiens
cttagccccaggggactagaggggaaggctgtgagccccatcttccaggaggggcttgctcacagccaagcagctagtgaagactgagcctgatttaaacycgggtctgctggactccaaaccagtgcttctttccaggaagggaacccaggtgttccaacctcctgtcccagtggctcctgggcatgtcatctcctgtct

SEQ ID NO: 310309 - DNA, 201 bp, Homo sapiens
atgtgtcatgacctggaccacagaggcacaaacaactctttccaggtggcctcggtgagaccctgccctgctcacagtggggaccctccatggggtgtctkggagtctcatcctctcccagcctgaagatgggtgggagcgagtgagaccaggagccaggtttagacacaggaggaggttcccccagggtttgcccctggc

SEQ ID NO: 310310 - DNA, 201 bp, Homo sapiens
tgaatgaggctcagtatcgcagccacctggccaatgagatgatgatgtaccacatgaaggtgaggcttgcagagacctctggtcctcctcccagattcccyggggacccagggccaggcagggcttcctgatcaatctctactgaggatgagaggataggcccagagccacagcaggcctcctgccctccttaggggcagc

SEQ ID NO: 310311 - DNA, 201 bp, Homo sapiens
tgtgtatgaaatgctgccatggtttgggggtgtcatgaaggggtgttgtcgatctttgccaaggttatgctgttacagataaagggtggtcacctgcaggraggcgcgcggggtgggctgcagggctgtgaggggagggtggtgatttcctgcccagttacagtccacagcgtggtggcccaactgtggtacattctgggt

SEQ ID NO: 310312 - DNA, 201 bp, Homo sapiens
tgagccatttctgagttccctgcacttggcacagggcttggcacagagtaggagacacatttccaaggtcaccttgcctcatgctacttcccacaacaccyctccagaggctgcccctgcttgcacacccccagagacgaggttctctgtctctctcccaggaggcctggtggcagtgctggttctgccctctgcccccct

SEQ ID NO: 310313 - DNA, 201 bp, Homo sapiens
actgtgaggcttccttccagagaaggaggcatggagccagtgccaggcagtggggtgagccataggaggacctgtggagatggggaaaggcatagagactyatgaagatgaaacaggaaagatcttatggcagcgaccccaaccctcaggaagggcgttggtcttgtgcttgtggctccaaaggggataagaccaaggtct

SEQ ID NO: 310314 - DNA, 201 bp, Homo sapiens
cctcagggtttgcatccctcccaaccctgtttttctaacattttgtgtgggcttggtttcaagagttcttagttcttagatctctaaaaatgcatagctcygagaacggttgcttcaactattttgtggttctctagtttagatgtaagtttctaagactccagatcttgagtgtggagcttgaagaaggacccaggcaag

SEQ ID NO: 310315 - DNA, 201 bp, Homo sapiens; identical to SEQ ID NO: 64722

SEQ ID NO: 310316 - DNA, 201 bp, Homo sapiens
tcatcaacaactacaaaattgactgcccgaccctggcccggttcgtgcgcccacagacagccccagtcttcgcctccctctttcctctactgtcacatccrttgcccccggcattctggagaggatctctctaaggatgactggggagacccagtcttatgggggtggggaggatccatgaatgagaagcaattcctagac

SEQ ID NO: 310317 - DNA, 201 bp, Homo sapiens
gtgagtgagctcatggggacaagctgcaccctgcacagagagggtaggctggagtggggacatcacaggaaacacaggtgctgagattggcctggcccagstccaactgattcatccccttgcctctgggcataactgtctcccgctgtgcccctcagtgggtccttcacttcatccttggtcctcagtggaaagagacca

SEQ ID NO: 310318 - DNA, 201 bp, Homo sapiens
agtcttcgcctccctctttcctctactgtcacatccattgcccccggcattctggagaggatctctctaaggatgactggggagacccagtcttatggggrtggggaggatccatgaatgagaagcaattcctagacactgaactgtcaataaaggcaagaaatgaggcaaggcaaagcctggaggcaaggccgagagtgt

SEQ ID NO: 310319 - DNA, 201 bp, Homo sapiens; identical to SEQ ID NO: 64716

SEQ ID NO: 310320 - DNA, 201 bp, Homo sapiens
gccccaggggactagaggggaaggctgtgagccccatcttccaggaggggcttgctcacagccaagcagctagtgaagactgagcctgatttaaacccggktctgctggactccaaaccagtgcttctttccaggaagggaacccaggtgttccaacctcctgtcccagtggctcctgggcatgtcatctcctgtctgtcc

SEQ ID NO: 310321 - DNA, 201 bp, Homo sapiens
ggaaggctgtgagccccatcttccaggaggggcttgctcacagccaagcagctagtgaagactgagcctgatttaaacccgggtctgctggactccaaacmagtgcttctttccaggaagggaacccaggtgttccaacctcctgtcccagtggctcctgggcatgtcatctcctgtctgtcctcttggggatttagggag

SEQ ID NO: 310322 - DNA, 201 bp, Homo sapiens
ttggcacagagtaggagacacatttccaaggtcaccttgcctcatgctacttcccacaacacctctccagaggctgcccctgcttgcacacccccagagaygaggttctctgtctctctcccaggaggcctggtggcagtgctggttctgccctctgcccccctgagataagctgctccttttctgagtgacagcccttca

SEQ ID NO: 310323 - DNA, 201 bp, Homo sapiens
gggctccaggctcctcccattcccagctcctgctgtgggctccccaagtccgtctctatcctctcacagcacaggacccaggcttggccagtgggtccccrggtgggggtgggagtggtcagtttgtggcccacggccaataagagatggctattctaatggtgcctggctgaccccagggtcactgtgggctgatgtagc

SEQ ID NO: 310324 - DNA, 201 bp, Homo sapiens
agtctgcagggtcatgggggtgggaagctgttccaagggcctgtgcagtggttatatagttggcaggtgggtacccctgtgggcttctgatggaacagaastaaggagagtggggagagaagccagtcttcccttccctcctgagtgagcccaccccctcctccaggttcaccgacgaggacgagcatgtgatccagcact

SEQ ID NO: 310325 - DNA, 201 bp, Homo sapiens
ctgggtgggagaagacagtaagggcgtttgggtcattttctagcagttgttttagtactctctacaacttgccctgcagatctatccagcctgctgtttgyatacccccggacataggatgttcatctcttccctcctgggcagcccttcccttgtggtggttatatctgtcctgggtcttctccgcagggcccagcaact

SEQ ID NO: 310326 - DNA, 201 bp, Homo sapiens
gttggcagaggggggccgaggagagtgccccagctccatgagccagagccctggagatggggctgccctgcaggagctgtggctgcagccactgcttgtcraaggaggcaggtgggtgagggggtgaatacccaccatgagcctgcatgcttctcaccctttgctctcctgccagtaccctgaccctcactggcagaattt

SEQ ID NO: 310327 - DNA, 201 bp, Homo sapiens
tgacggatcccccacctgccatgggaatttgagggtgaagacaccagatggggtgaaggctgtcttctaatgctctggctggtctcctctaggtctccgaygatgagtataccaaacttctccatgatgggatccagcctgtggctgccattgactccaattttgcaagtttcacctatacccctcgttccctgcccgagg

SEQ ID NO: 310328 - DNA, 201 bp, Homo sapiens; identical to SEQ ID NO: 64721

SEQ ID NO: 310329 - DNA, 201 bp, Homo sapiens
gctggggaggaacaaccaggggaaggatttgccaggggagcattcccagggtgcagacccatcccctgcaacatcaacccttctctggctgcacggccccycccaggcagacccagcactggccccttggctcccatcaagggtgcccaattccctggaccgctctgggttgggccctgggagccttgtcctcagaagggc

SEQ ID NO: 310330 - DNA, 201 bp, Homo sapiens
tcccctgcaacatcaacccttctctggctgcacggccccccccaggcagacccagcactggccccttggctcccatcaagggtgcccaattccctggaccrctctgggttgggccctgggagccttgtcctcagaagggcaaagaggctgggccccgctccttgaccccatcctcccctcaacagtgggctacgaccgaaa

SEQ ID NO: 310331 - DNA, 201 bp, Homo sapiens
gcctgcaggagaaggccatgggcaacaggccgatggagatgatggaccgggagaaggcctatatccctgagctgcaaatcagcttcatggagcacattgcratgcccatctacaagtgagtgagctcatggggacaagctgcaccctgcacagagagggtaggctggagtggggacatcacaggaaacacaggtgctgaga

SEQ ID NO: 310332 - DNA, 201 bp, Homo sapiens
ctttcttgctgcccatggtctgatttctggcctctcaccctctgcccccatgcacccgcaggctgttgcaggacctgttccccaaagcggcagagctgtaygagcgcgtggcctccaaccgtgagcactggaccaaggtgtcccacaagttcaccatccgcggcctcccaagtaacaactcgctggacttcctggatgagg

SEQ ID NO: 310333 - DNA, 201 bp, Homo sapiens; identical to SEQ ID NO: 64719

SEQ ID NO: 310334 - DNA, 201 bp, Homo sapiens
cttgtgggcggaatgcttgccatggccgctgctcaccttggctcaggctgggccagaggccaatgtgtgtgtgtgtgtgtgtgtgtgtgtgtctcagggaygctggtgggatcagatcacttacacttaactcacccagtagaactctggtctggtcctgcggcaggctgggtgctggagccgactctgccttcagggagc

SEQ ID NO: 310335 - DNA, 201 bp, Homo sapiens
ctacaagcacaattaagtggaggcagcatgagggatgaagaacccaggacaattaatcatcaaggagtgacatttggtgcaaactcaggtgcttaattaarcgggatgagccagaggctggggggtagaggaggtgggttgtgtggtgggacagagagaaactcattcttcccataccaacctcccctgccttggttccca

SEQ ID NO: 310336 - DNA, 201 bp, Homo sapiens
gctgaactgtggtcttttaagaccctcaacctcatatcatgttcacatgaatggggacccagccatgtctccttcatcttgcagttaatcactttgctttytgaacacagacccaaccttccactgggaagacatctgaaaggacttccaagggcttgcgggagggcatggctggtggctggtatgagtcacgatcttgcc

SEQ ID NO: 310337 - DNA, 201 bp, Homo sapiens
ggagggctggggacccaccccaggccaccccacactctccctctgggaggggctcctgagcaggcctggtcaccttgcttcttggctgcttcttccccggyggaggagcctcccccaggctctcccacctgcactggcctcaagagagctgggattgagccccagttcaggcacctgctggctggcggaggttagggcaaa

SEQ ID NO: 310338 - DNA, 201 bp, Homo sapiens
cagcccctgtgccccttccctcactgtctgttcctaaatgctccatgctttatacgcctctggacctacctgtgtacctgctataaggcctgggagcccaktctgcaccctgcccactccctgaatgtgtctaattcccactcagtgacagctgaaaggtcacttcctccaggaagccctctccagccccaccggaggatg

SEQ ID NO: 310339 - DNA, 201 bp, Homo sapiens
tcaactattttgtggttctctagtttagatgtaagtttctaagactccagatcttgagtgtggagcttgaagaaggacccaggcaagggccctgtcttgawactggcagcccctctgatacctccctctgccctctccaggccatcctgagcatgctgcaggacatgaatttcatcaacaactacaaaattgactgcccga

SEQ ID NO: 310340 - DNA, 201 bp, Homo sapiens
taccagagagaagcatataagaaactgccatatactcatcaccccagttcaacagttgctgggatttggcctcatttcttcctctcttgccccctatctgwtctttcattttcctttgcttaagcttaaaattttttaaattgtggtaaaatatacataacttaaactttaccatcataaccatttctaagtgtacagttc

SEQ ID NO: 310341 - DNA, 201 bp, Homo sapiens
tcgtcttgcactgagaagattaacaacacagacacacacacgtgaagcaggttaaggaggggaaggtttaatagacaaaaaagaagagagagtgagctttytcatacagagaaagcagggcaggtgggatgcgatccattttatagagaggcttgaggaggcggtgtttgatttacacaggggccaggggattggtttgac

SEQ ID NO: 310342 - DNA, 201 bp, Homo sapiens
agttctggttgttttcaggcctgggaagatggtatccctagagtgattggctgctacagagctgttcatgctgcttacaaggtctaatgctgttatttccyacaggttgcaaattatggagtgggaggacagtatgaaccgcacttcgacttctctagggtaaggcctaaatcacaggtgctttcaaagggccctgctcta

SEQ ID NO: 310343 - DNA, 201 bp, Homo sapiens
taaatgtgtgtgtgtgtgtgcgtatgtgtgtgtgtttgtgggtgagagccctcttactagaggctatggccaagttgctctgtttttcaggcactagaagstcagggattatcaagcttctcacaggtttatgcaaatgtttgaaacatgaaaaaaatatagaaagctataaaaaatgtaaatactaaatatagtaaatgt

SEQ ID NO: 310344 - DNA, 201 bp, Homo sapiens
tcccaaagtgctggaattacagctgtgagccatcgcgtctggccaatttttttttttaattagcaaaagatactcccttttcaattcactttatttccatytactgaaaacttattgtaatgactatgcacatctatgatggctgccatgtaaatggagacatcattgtgcagtgcaccaattgagcaatgtttgattggg

SEQ ID NO: 310345 - DNA, 201 bp, Homo sapiens
gcctctgaactccagcctgtgttcgtacactgcacttcagcctggagagagtgagacccaaaaaaaaaagtgagtctcaaaaaaaaagtgagtgagtctcaaaaaaaaaaaaaagaaagaaagaaaaaaggagaggaagggtggcaccaggagagtttgtgctgaaactgtcattaaatgtgtggttacctcgcaatgaaa

SEQ ID NO: 310346 - DNA, 201 bp, Homo sapiens
gcctgtgttcgtacactgcacttcagcctggagagagtgagacccaaaaaaaaaagtgagtctcaaaaaaaaagtgagtgagtctcaaaaaaaaaaaaaaraaagaaagaaaaaaggagaggaagggtggcaccaggagagtttgtgctgaaactgtcattaaatgtgtggttacctcgcaatgaaaggagtctcgtattt

SEQ ID NO: 310347 - DNA, 201 bp, Homo sapiens
agggtgtagtggagatcctcaggcctgggtacttgtaggagcctggaatgagcaggtcagaggcatataagtacatgagttcctagagtattggtccaatcccccgccttttgctagagaacattgcttgatgagctttagagccagtgattgaccagttccagggttatcccctgatgatcaatgtactacattatacct

SEQ ID NO: 310348 - DNA, 201 bp, Homo sapiens
gtatagtaaggccttggagcagacctgtggctagaaccaggagggcctggactctgcctcagggcaagcccaggcttactcactttctcttgatgacttgstctcttctgctgctctaactccctaatggaccccttagcacaatacgccctaccctgcagcaggttccaggttggaagataattgtcctgtgtgtcttgg

SEQ ID NO: 310349 - DNA, 201 bp, Homo sapiens
cagagtccagagctgtgcagttcccagcttgcaagtgcacacaagcaccccacagcaatgtaaacaggggcatgcacactctcacaattatgctttaaagmcacacacacacacataaggacaacacatatgcacctaccaatctccctacatacaactaactacatgcgcatggttacagagacttggagccagcactgg

SEQ ID NO: 310350 - DNA, 201 bp, Homo sapiens
ggcctcccaaagtgctgggattacaggcgtgagccaccgcgcctggccattttgtgataatttttatatctaccctgcctctgttgattgttacccatctrgtctctgcaattccagggtcctaccatccccactgacactaagaattcctcacctttacatgttgtgttgcctcggtgaaaagagtggcctctggacttc

SEQ ID NO: 310351 - DNA, 201 bp, Homo sapiens
ttgaatttactttggcaatgtgattggaatgtatctggctcagaactatgccacgccaaacctggataaaacacttgatgaaatgaaaaagggcaatgccragaaaacccccctagttcatgaggccgactccagcactgccttctggatacactgattgcaccactcttgagggcctcctttaccatctcaaccaaaggc

SEQ ID NO: 310352 - DNA, 201 bp, Homo sapiens
tactttggcaatgtgattggaatgtatctggctcagaactatgccacgccaaacctggataaaacacttgatgaaatgaaaaagggcaatgccgagaaaamccccctagttcatgaggccgactccagcactgccttctggatacactgattgcaccactcttgagggcctcctttaccatctcaaccaaaggcttttgtt

SEQ ID NO: 310353 - DNA, 201 bp, Homo sapiens
gaacaagtatactgcttacagcttagcccactgggggaatttcccttcaaagttgtttagggctaccccctaaatggagctatgttacaggaacaatctctttttttttttttcttttttaactagtatcaatgtctaaagctaatccatctgtgagtaagggctattttcccctccatcagttggttacagagaactacc

SEQ ID NO: 310354 - DNA, 201 bp, Homo sapiens
gcagtggcacaatcacagctcactgcagcctcaacctccctaggctcaagcaatccttctacttcagcctcccaggttgctgggactacaggcaaacaccwccacacccagctaatttttttttctttattttttagagatggggttttgccatgttgcctcctgggctcaagtaattctctgccctcagcttcctcccaa

SEQ ID NO: 310355 - DNA, 201 bp, Homo sapiens
ggtatgccttaacttgtatggacacaacggggctgctacaggccttcccaataaaatgtgccactcaactggagatcatcaaatgtctcactgctcttttktgtgtgtgtgtgtgagacagaatcttgctctgtcccccaggctggggtgcagtggtgcgatcttggctcactgcaacctccgcctctcaagtagctggga

SEQ ID NO: 310356 - DNA, 201 bp, Homo sapiens
gtaattgcagggcagccagggtgagggaaaacaaaagtgaggtgcaggcctgtgcgatggctcatgcctataatcccagcactttgggaggtcgagatggwtggattgcctgaggtcaggagtttaagaccagctggccaatatggtgaaaccccatctctactaaaaatacaaaaattagctgggcatggtggcacacac

SEQ ID NO: 310357 - DNA, 201 bp, Homo sapiens
aaaagtcggaaaacacaaaaacaagagaattataattcttaatccagttgcccagtggtgagcattattaaaattgtagtttttctacctatgcatatacrtttaaaaaatggaactatacatacataccagggcatgcaaactcagttgcttggagggacaatgaatttacaagtgtcaagtgggctggatggtggggcc

SEQ ID NO: 310358 - DNA, 201 bp, Homo sapiens
agacttgtctggaactcctgacctcagctgttccatccgcctcaggctcccaaagggctgagattacaggtgtgagccaccgtgcccagcctctcattccycttttaaagataacttctctggatatagaatactaggttgcttttttttctcatagattatttaatatttaatatataattcctataattttattgtttt

SEQ ID NO: 310359 - DNA, 201 bp, Homo sapiens
gctgactgcggagagctgtgacattgggcattcaagcatgaagcattgttggcccagagagggtgcacaagcattctccctcagagaaccatggtgttccrgagccagagagagatggagagcttccacaatccttgtgaagatctgttatcctaacaccaatatatcccctttaagaaaatggtggccccctgtaaattg

SEQ ID NO: 310360 - DNA, 201 bp, Homo sapiens
gacctcacctccaggcctggccataggacgccagctgtggccactgggtatgagcctggccgcctgtgttgctgggagagtcaggcagagccatgtcgccragtccagtagctgccagctggccgagaggtctgggaatccaggtgcagggggccatagggattaaagtcggaagagccagatccaggcctgtgagggtga

SEQ ID NO: 310361 - DNA, 201 bp, Homo sapiens
caggagggacccccataactcctgatgcccatgattttctcactggtatagattagacctctgtctcttgatcctgaggggtcctgggggctgtgattcakattggcagaggtggtgaagctctcctcaggagtctggctagcataggcctgtcgctagcctatcctccctgccccatcctttctatctcttacgattggc

SEQ ID NO: 310362 - DNA, 201 bp, Homo sapiens
acatactctgtcactcatctgtcagctggggcctggactcatggcccagctttagccctgccccagcgcacacatccacagacactcaaatttagcagtgrcctggccaggactgtctggtctctggcctgaggcccctccttctcttcttgaccactagaactgacatccagggctactcagaaggcaggagaggcccat

SEQ ID NO: 310363 - DNA, 201 bp, Homo sapiens
ctagaatgtcttggccgtggcctgaccatcactgtgcctggacaaaagcaggggtgtaaaaacctttccttctcagcccgagagagagagacgctgctatraggtgcaggtaaggcttgagcaaaagtgcagggttgacaagaaggagacggacatacatgcagcccagaaattcagttactggggctctccagacatact

SEQ ID NO: 310364 - DNA, 201 bp, Homo sapiens
ccaggcccgggccaatcccctgaaacccggagcgtaggtggcatgaacggggtgaggaggtcagaactccatttctgcggggtgtttggttgggcgccagrcgggccatcggcacccgagactggggaacgggtttggcgggcgtggggtgaggggcagcgacagggggtggagagggaatcgggaagccagggcgtagca

SEQ ID NO: 310365 - DNA, 201 bp, Homo sapiens
agatccacgcgacccggagtctaggacacatcctcgggagtgaacagccacaattcacagacgatgtgtgcagccggggcatgaaaggcccaaggcaaacmcaccacgaggtaaacgccgggactctgaggagaggggtggaagccgggacttcgaggaggggtggaattgacttagagacaggagggagcctcttggagg

SEQ ID NO: 310366 - DNA, 201 bp, Homo sapiens
atcccctcagcagtgaacacggcagagctgataagttatgcccgacttctgtggatcaaggtgggcaggggagtggggagatcccactcagccaggcttargccaactgcttctcagagctgagtaaagacccaggacctgagcaaggctgggtccccccacccccacccccagtggaccttctatcccaggatcatttat

SEQ ID NO: 310367 - DNA, 201 bp, Homo sapiens
ttacatatagatttcaaaaatcagagaaatatgctgcaaactgttggtagtttttgtttctggggatggtattttgggacatttactttttctgagttatrtatttgtacagtgttttaatttcatataaataaattttactgtttgtaattagaaaaatgaagataataaaaaggaaaataaagacaacagaaggacaaa

SEQ ID NO: 310368 - DNA, 201 bp, Homo sapiens
tgaagtggcttcattgtctggggaaataccctaggttcgtcttgcactgagaagattaacaacacagacacacacacgtgaagcaggttaaggaggggaargtttaatagacaaaaaagaagagagagtgagctttctcatacagagaaagcagggcaggtgggatgcgatccattttatagagaggcttgaggaggcggt

SEQ ID NO: 310369 - DNA, 201 bp, Homo sapiens
ctacctttttttttttttttttttgagacagagtctcactcatccagcctggagagcagtggcacgatctcagctcactgtaacctccgcctcccgggttsatgagattttcctgcctcagcctcccaggtggctgggattacagaggcacatgccccatgttgtattttctttagtagagatgaggttttaccatgttgg

SEQ ID NO: 310370 - DNA, 201 bp, Homo sapiens
tttttttttttttttgagacagagtctcactcatccagcctggagagcagtggcacgatctcagctcactgtaacctccgcctcccgggttgatgagattytcctgcctcagcctcccaggtggctgggattacagaggcacatgccccatgttgtattttctttagtagagatgaggttttaccatgttggtcaggctgg

SEQ ID NO: 310371 - DNA, 201 bp, Homo sapiens
acctccttggagggtcaaggaagcctgcaagagtcttgaggagagtttgatggggctgaacttacagataagcacaatgagagttacagaggcacaagttrtccacagaggccagcaggggctgtgtacctcatgtggccctgtgagctgggatttggaatttagactctgtcctaagagcagtgaggagccatggaaact

SEQ ID NO: 310372 - DNA, 201 bp, Homo sapiens
ctggacaggggcacccagaggtggaggggaggtggggcactccccaggtggggcagagggactcagggcccacagcccaggcttctgggcatcatggtgtkgtgcaagtcacaacactgctcccacccatccaactcagcagttcaagggctgtgagcccagggccaagctagcacaccccctagaggggctgagtccttg

SEQ ID NO: 310373 - DNA, 201 bp, Homo sapiens
atggtggtaggttcatgcatatcagagttggtgatcaggtgctgtggcaccagccttgtccacactcagatccaaagcttcaggggtcacctttactttgyccagcttccaccattccatgccccatgcaaaaagttggtaaggttgagcctgcactctgggctgttctggggaccttgccaagtggaaacagatcagcac

SEQ ID NO: 310374 - DNA, 201 bp, Homo sapiens
gcatctctacttcatttccgaaggtcgtaattgtgtccaagtttcaaagaagcatctcagaagcatgtgaaaatggttttatgtatccttgattggatgtkaatccctgaataatgagagtgcccccagattgatacattcttacaaccctctcctcacacccctgttatccctgttcctgccacaacataggtcccgtaa

SEQ ID NO: 310375 - DNA, 201 bp, Homo sapiens
tgctcacagaattgatgggaaagctgaggtactgctgagataagcagaaatcagctgttggagatggcacccgcctgggaagtagacagaccagagtggasccctaacagggcagcctgcttcagactgagcctgaaggggaggagtggctccttgactgggccaggtggcctctgatcactgtcctcccagaacaagtcc

SEQ ID NO: 310376 - DNA, 201 bp, Homo sapiens
gtgcgatcttggctcactgcaacctccgcctctcaagtagctgggatcacaggtgcccacctgtaatacaaaaacgcctggctaatttttatatttttagkagagatgggttttcaccatgttggccaggttggtctcgaactcctgacctcaagtgatccacccacctcagcctcccaaagtgctgggattacaagcgtg

SEQ ID NO: 310377 - DNA, 201 bp, Homo sapiens
cctctctcctcccctccctccctcccttcctttcttccttcctttttcttctctttttcctgtttcctctttttccttttcttttctttctttcgtctcamcctgtcgcccaggctggtgtgcagtggtataatcatagctcactgcagctttgacctcccagccttgagcaatcctcctgcctcagtctcctgagtagct

SEQ ID NO: 310378 - DNA, 201 bp, Homo sapiens
gaaaggggctagtcaggcagatgcatgggtagacaaggcaggcataattctgcaggcaaagcggacctggggaggagaagggatgagcagtgaccgagcarggcaatagccaggaactgattgcggattgggaatgtggaggcctcagactcttgccctcaactggcctgcaggatcttggggccttggctagagccattg

SEQ ID NO: 310379 - DNA, 201 bp, Homo sapiens
gaactatgaaacaatcaagcttctaaaggaaaccatggaagcatagtttcatgacctctgggtagggaaacatttcttaaatgggacatagaaagcactarccaaaatataaaagattaatatgttggatttgtaagaattaagaacttttatttatcaaaagatcctattaggagaatgaacaagccaaagcacagattg

SEQ ID NO: 310380 - DNA, 201 bp, Homo sapiens
ggaggcaactgctgccaaatttgctgagactgtctcccttcttaggtttttttctgctgttattaccatccagccatgtaatgtccatgcagctggtaaaygccaaggcagctggttggaaacactcagagatacacaggaagctgaagaaggcctgaggacgaatagctgcataagcaccataggtccaggaccctctgg

SEQ ID NO: 310381 - DNA, 201 bp, Homo sapiens
cagtacccccaccccttgtcctccctccacctctgcatcaccaggggaaactcttcgttactggtgaatcccaaatctggaaccaagggtcctgcagaatrcagtggagcctggctgtctcccctgtagatgtggggcgttcgtcccctgccctaattctgtcaccctttgccctgattctaaagcaaagagcctcactag

SEQ ID NO: 310382 - DNA, 201 bp, Homo sapiens
gtatgaaccgcacttcgacttctctagggtaaggcctaaatcacaggtgctttcaaagggccctgctctagctgatttgagaagggtggagcttctaggarcatttcagcctccacatcagtacccccaccccttgtcctccctccacctctgcatcaccaggggaaactcttcgttactggtgaatcccaaatctggaac

SEQ ID NO: 310383 - DNA, 201 bp, Homo sapiens
cccacttgtggtagaggggacacaggaggacagtgcttgcttattagagaaacctcttcactacccttaaacctttttagaggttccacctccattcagakgtgctgtgggaatgttgttagaaagacagattattctgtgagaaaatgataaaccaggaagttacatgaaaagcaagtcaggggtcggcctggggtgcaa

SEQ ID NO: 310384 - DNA, 201 bp, Homo sapiens
gtcacactggggttgctgatgtagcacggtaattcttgactgcctggcagctggccacccatgttgtgctgtttcactccatgcagtagaccactgtgggmgtctgccccactcagtctcaccaggaatagcagaggtggtaggaacagtgccaggtgctgagtacctccaaaactagtttaaaaaagaaaatcctcgtct

SEQ ID NO: 310385 - DNA, 201 bp, Homo sapiens
tgccactcaactggagatcatcaaatgtctcactgctcttttgtgtgtgtgtgtgtgagacagaatcttgctctgtcccccaggctggggtgcagtggtgygatcttggctcactgcaacctccgcctctcaagtagctgggatcacaggtgcccacctgtaatacaaaaacgcctggctaatttttatatttttaggaga

SEQ ID NO: 310386 - DNA, 201 bp, Homo sapiens
taagaggatttcatctcttataaagtccactgtccctttctttcttgcatttctttttttgtgtgtatgtgaaacagggtctcactctgttgcccaggctrgagtgcagtggcacagtcatagctcagtgcaaccttgaactcctgtgctcaagcaatcctcctgcctcagcttcctgagtagctgggactacaggtgcac

SEQ ID NO: 310387 - DNA, 201 bp, Homo sapiens
tcattcctttgcttgtctttatagttttaccatctatgattagatccctaaataagtagttattctgttttccctgattttgaacttttactaatagaatragagtaaatatttttgggtatgtggcttcttttgttcaacattgttttaagattcatccgtgttgcttgtgtagctgtaatttgttttaatctttatagt

SEQ ID NO: 310388 - DNA, 201 bp, Homo sapiens
cagctttccttggattacctatcagggaaaatagagcttagccataacaggtcccaattttgtcaaaagtaatttgggtccaactgtcttttgtaaaaacwacaaatttattatattgtctcatggctagagttctgaagtaaaattatcagatctttgtgtatgtatgtatatacatgtttaaatatattatatatgtgc

SEQ ID NO: 310389 - DNA, 201 bp, Homo sapiens
ctgattgtcactgtgatgtgccttagcccacctggggtctgacctggtagcccagcttctccctgtgaagaaaggacagggagggaagtcccttcaggggygggtgagttcccagacttctacctcagaaaggtaggtgctttctgggaaatgtctctgttgctggagtcccagagccctatcccctgtccatgggaaaat

SEQ ID NO: 310390 - DNA, 201 bp, Homo sapiens
gaatcacctattgtaagaagttaagatattaaaatacgataaagataataaatgtgctattgttgcaataagggtagctactgagaaatcatgagagcagraaagggagaaagggtaaaaactcctgcagaaggtgaaaggcatgccaggttttctaggacaccagcaggttacatatgatggcctattcttgtgcacgtt

SEQ ID NO: 310391 - DNA, 201 bp, Homo sapiens
tctattttcatcatctaaaactgaaactctacccattaagcaataattccagattcccctcctgcagctcctggcagccaccattctgctttctgtcgctrtgattttggttacttaaataaatggaatcaaagtattaacacttgtctttttgtgtggctggtgcataatgtcctcaaggtttatccatgttgtagcata

SEQ ID NO: 310392 - DNA, 201 bp, Homo sapiens
aacctaccaagggaaacagtcccatcacacacacatagtaggtaaagagacagaaaattagcttagagatgggaggtggcacagatctctaaagctgtccygctgccattcaggagtgcctcatgcataagtcctaataaactcatctactagccaagctgaacttgtcccagacatgcttggtctctttgctccctccca

SEQ ID NO: 310393 - DNA, 201 bp, Homo sapiens
tagcctattcctcagacaataaagcaacttcacgttttcctaggtttattaggctactggaaaatattcatctctcatttgacacaaaccctctggccttyacacaccctagtaaaaagggatgcaaaatgggactggacacataaagagcaagaggcatttgacaaagcaaaaatgttggtaaaacaagcccaagcatta

SEQ ID NO: 310394 - DNA, 201 bp, Homo sapiens
gctgtgtacatgctggtgagcagaacatatgtggtctcccttgtgcttgaggtccaatatgagagacttattttaaacatcagagagattcttctttatcttttttttttttttttttttgagacagactctccctctgttgcccaggctggagtgcagtggcgctatctcagcttactgcaaactctgcctcccaggttc

SEQ ID NO: 310395 - DNA, 201 bp, Homo sapiens
tcctcttgggtattgagtccaaatcagcactggctatgttcccttataaatattggaacttctgtgttctgttgtaaaattgatgacctgagacaccatcrgagaagtttcactggcatctttctagaggcctctgggtctctctgtttggccaaagtttctgtatacttaaagatagcagcctttacctttaggattggc

SEQ ID NO: 310396 - DNA, 201 bp, Homo sapiens
gatatagatgaaataatatgggctgtgaatagtggttcaagggattcgttttactagtttgtctacttttacatccatttaacttattctagaacaaaaargtaagaaaaaagttgaacaatatgaatgtcctgaatcttcatatttttatctgctatcctttggcatacatgtgtctttactaggacatctagagttctt

SEQ ID NO: 310397 - DNA, 201 bp, Homo sapiens
gtgtcctcttgggtattgagtccaaatcagcactggctatgttcccttataaatattggaacttctgtgttctgttgtaaaattgatgacctgagacaccrtcagagaagtttcactggcatctttctagaggcctctgggtctctctgtttggccaaagtttctgtatacttaaagatagcagcctttacctttaggatt

SEQ ID NO: 310398 - DNA, 201 bp, Homo sapiens
acatctctaagagagctaaaaatgacttcagaggccatggttctgtgtcataatcaaatacatttgaaggtcaaagtattctgtgtgttttctcctgctgraccacaactgaagttgctccaaaagcagcagcaggggacttcccatgagggactgccaagatggggtcagttgagaattcaaagaaagcggcactaaacc

SEQ ID NO: 310399 - DNA, 201 bp, Homo sapiens
gatgctatgaatatggagtgatctcattttaggaaaccagaattaatcatgcctgctggctttcaacaattagtgttcaacaaatatctattgagcatctkctgtgtgcccaagtgtgctgcaagctagggatcaggggtagttatggtaggttcgttcatgtcttcttgacaacagaagctcaaatcctgaatggtctca

SEQ ID NO: 310400 - DNA, 201 bp, Homo sapiens
caggcagatgcatgggtagacaaggcaggcataattctgcaggcaaagcggacctggggaggagaagggatgagcagtgaccgagcagggcaatagccagraactgattgcggattgggaatgtggaggcctcagactcttgccctcaactggcctgcaggatcttggggccttggctagagccattggctgcaaagcttc

SEQ ID NO: 310401 - DNA, 201 bp, Homo sapiens
ggaaaggggctagtcaggcagatgcatgggtagacaaggcaggcataattctgcaggcaaagcggacctggggaggagaagggatgagcagtgaccgagcmgggcaatagccaggaactgattgcggattgggaatgtggaggcctcagactcttgccctcaactggcctgcaggatcttggggccttggctagagccatt

SEQ ID NO: 310402 - DNA, 201 bp, Homo sapiens
tgtctcccttcttaggtttttttctgctgttattaccatccagccatgtaatgtccatgcagctggtaaatgccaaggcagctggttggaaacactcagaratacacaggaagctgaagaaggcctgaggacgaatagctgcataagcaccataggtccaggaccctctggcaaggcttctgagggagcagagtggagagc

SEQ ID NO: 310403 - DNA, 201 bp, Homo sapiens
tctgtccttagcattgtaaatacccacatctttcaaataactgaccccactcttacaatagtaagtctaaagatttaagtgaatacctcctcacatgaatyggtcttgacgtacagtttcttgttattaaaggcgtgagcctggggacttgagtatgcctggatagggaatcttactgctgcaaatctagatggtcctatg

SEQ ID NO: 310404 - DNA, 201 bp, Homo sapiens
tgaagactttggctgcatgatgtctcagcctcaccagaaaagtgatttctgacctttttaattttgcctttactctgtccttagcattgtaaatacccacdtctttcaaataactgaccccactcttacaatagtaagtctaaagatttaagtgaatacctcctcacatgaatcggtcttgacgtacagtttcttgttatt

SEQ ID NO: 310405 - DNA, 201 bp, Homo sapiens
aaaaagcatactgattaccttgcaaatagtactgtgaaattttaatttttttttcagttcagctcaacttagtgttttgtaatttttaaataaattctgcmgataagcacatccatggaggacttctgcctcatctcccacttgctgcgtatgtgtaagagcaccaccatttcaagagtgataggcactcttgatgtgcta

SEQ ID NO: 310406 - DNA, 201 bp, Homo sapiens
gctcactgtgtcagtggccctttaggatatgcagtctaaatgtccgatggagttctgcttggtgatgccccctatccagtggctcaggctttccttgaagygggaatctctttccctaatccagaggctctttggagcctgacaatttacttcccctgctgtaggaaccaagtaccaggcaatgctgagtgtggatgactg

SEQ ID NO: 310407 - DNA, 201 bp, Homo sapiens
ctcctatctttagttcattctcagggttattcattgtctgttctttctgggtaggtgctccctggagctctggccttagtcatcttctccattctttcctyagagttcctgcaagctattttcctcacccatggcttggttgccacctaaatttatgttttttatattcagctaatttttccatcctctagactcatatgg

SEQ ID NO: 310408 - DNA, 201 bp, Homo sapiens
agctgcttcttcatattggcttgaaactatcttcatggtcactttccagcactccctctacagcagatgacctttggtcataagacccactgaactgataytcagcaaggtccctgccacttaacagccaaagctggcactgcaaccttggctcttggcctcccttggtgtctctcacaccactcccgctccctctgtttc

SEQ ID NO: 310409 - DNA, 201 bp, Homo sapiens
tgaagtagatgcagggagtgcatgtgtagtgtgtacctgtatgagtgggtggcttccaggcagtggttcacttattttaacttacagaatcttttcctggktttatcatctgacttgtaaggatcccaagggagcgaaaactgtgccatctgtctttgcttcttgaggctgtgggaacccagtgtgaggtggtgcagcagg

SEQ ID NO: 310410 - DNA, 201 bp, Homo sapiens
cctaggctcaagcaatccttctacttcagcctcccaggttgctgggactacaggcaaacaccaccacacccagctaatttttttttctttattttttagaratggggttttgccatgttgcctcctgggctcaagtaattctctgccctcagcttcctcccaaagtgccgggattacaggtgtgagccaccatgcctggct

SEQ ID NO: 310411 - DNA, 201 bp, Homo sapiens
atgttcctctacttggataactcatgttaacccttcaggcctcagctaggtggtctcctcccctaggaagctattcttgacactataccctgagcttccamaggatggtaagttcacccatgctgtgctgcagttacctgactggttttctgctttccccacttgactgagttgtaagagtgcaggggccatgtctcagtt

SEQ ID NO: 310412 - DNA, 201 bp, Homo sapiens
gttcctgtaatgttcctctacttggataactcatgttaacccttcaggcctcagctaggtggtctcctcccctaggaagctattcttgacactataccctragcttccacaggatggtaagttcacccatgctgtgctgcagttacctgactggttttctgctttccccacttgactgagttgtaagagtgcaggggccat

SEQ ID NO: 310413 - DNA, 201 bp, Homo sapiens
gatttcctgagagatttcttacccgttcttcagttccagacactgagaacatttctctgtgcatgtgtgcatatgtgtacacatgtgtgtggctggccagrgggtagtgttaggaaaagatatatttgaatagaagccatgcaaagagccaaacaaggttggcaaacatgtttggctcttaacatggcttctattcaaaga

SEQ ID NO: 310414 - DNA, 201 bp, Homo sapiens
ctacaggtatgcaccatcatgcctggctaattttttagagacaggtctatgtcatctaggctggtcccaaactcctggtctcaagctatcctttggccccycagagttctcggattacaggcatgagccactgtgcatgcccacctgctgggacttttgttttcttctgtggtgtggtgggagggagcagctgctggccat

SEQ ID NO: 310415 - DNA, 201 bp, Homo sapiens
ccagagagcgagttctcggaggggtcggccctcgatctgctcgggccgcgtcgccccgggcccagaccccagcagggttccctccgcggtctcctccaatstggaggctgagcttaggctgccacgcgtggggcgcggaggggcgagtcagtggagtcggttcccgggaaacttctgggggcggcagagcgacaggagcgc

SEQ ID NO: 310416 - DNA, 201 bp, Homo sapiens
cgtgacctcacgtgatccacccgcctcggcctcccaaagtgctgggattgcaggtatgagccaccgcacctggcctctgttggttttccagttacgaccarcgtactctggttagatgctgtggaaggtagaatgcagcatgcaggtgagctgctgggagagaaacccttacagaataatttctctaaatgacctaacaga

SEQ ID NO: 310417 - DNA, 201 bp, Homo sapiens
actctgtccattttcctggttcccatatactcctgaactcacagtatctggcctttttccccactgtcactgatgctgttcttacaaggtcatcagtggcygcttggctggtaaacccagcgaacaaggttcacacataatgttctttaacttcccagcagcatttgacagatagattgcctcattctttgtgatgttctc

SEQ ID NO: 310418 - DNA, 201 bp, Homo sapiens
ttactttcacaagtatccttcttcgaatgatatattatggtcattatcttacttagcttgggtttcatctccctactccaccccatataatagagcaaagytggagacaagaacgtatataaggtcgtttattctgagtaatgataccataaaacagaagtgagggactagggaggagagtgaacagagagggaggtaaag

SEQ ID NO: 310419 - DNA, 201 bp, Homo sapiens
accaaaaaggatagataatgatcaaggccccaattcacaggccataatattaaacactgggcatcagaacaaaacatagactgaaagttccacttaccatrtaacccaacaggggcaggccttacatgcattgtcttaggactggactaagaatctccctgtaatacaaattttaaatgtcacccactaccatgcatggca

SEQ ID NO: 310420 - DNA, 201 bp, Homo sapiens
tctctgaattgccagaaaaagaattcagaaggtcgattattaaattaatcaaggaggtaccagagaaaagtgaagtcctacttaaataaatcaaaaacatsatacaggatttgaaaggaatagtgtcaatagggatggtagcagttcttctttgaatgtctgatagaattcaacagtgaatccacctggtcatggattttt

SEQ ID NO: 310421 - DNA, 201 bp, Homo sapiens
ccgttcctgggaaacaggctgaaggcgttggagcgttcccgggagctcgcgctgagcttgatgccactgtacacttgggaccacacccccatccccggccsggcgcggggaaggggagggcggcccagcccgggaggctgggctcccggctgtctccgccctgtgcttcgcgcgcccgcccgcccccaaggacctgacggg

SEQ ID NO: 310422 - DNA, 201 bp, Homo sapiens
agatcaggaaacggaggtccagagaagtacagaaggatagttaattgataaaagactgaatcaagatttcaatccaggccacctgattccaaatttaaaamtatgctcttaacacctgcatttttcttccaaagggggtaagggaaaagagagtatctgagggagagatagtgttccaggcagaaggaccagcatgtataa

SEQ ID NO: 310423 - DNA, 201 bp, Homo sapiens
agctcgttctcggttgtccccagccacccccgagcgctgattcccagacctgggccccacgtgggagggcgggcgcaagggaggagccgaggccagagagmgagttctcggaggggtcggccctcgatctgctcgggccgcgtcgccccgggcccagaccccagcagggttccctccgcggtctcctccaatctggaggct

SEQ ID NO: 310424 - DNA, 201 bp, Homo sapiens
cctgggccccacgtgggagggcgggcgcaagggaggagccgaggccagagagcgagttctcggaggggtcggccctcgatctgctcgggccgcgtcgcccsgggcccagaccccagcagggttccctccgcggtctcctccaatctggaggctgagcttaggctgccacgcgtggggcgcggaggggcgagtcagtggagt

SEQ ID NO: 310425 - DNA, 201 bp, Homo sapiens
tggttcagggtcagagtaagtaataaggccagagcctggtccaaagtcaatatcaggctctggttcagagtcaagattaagggcagagccagaggacaaargacagaacctcctccttctcatgtgaaaggccagatccacacgcttgcgtatgcatgtgaatccctctgtgcgtgagcatataaatgtgtgtgtgtgtgt

SEQ ID NO: 310426 - DNA, 201 bp, Homo sapiens
ccagacctgggccccacgtgggagggcgggcgcaagggaggagccgaggccagagagcgagttctcggaggggtcggccctcgatctgctcgggccgcgtsgccccgggcccagaccccagcagggttccctccgcggtctcctccaatctggaggctgagcttaggctgccacgcgtggggcgcggaggggcgagtcagt

SEQ ID NO: 310427 - DNA, 201 bp, Homo sapiens
gcgctgattcccagacctgggccccacgtgggagggcgggcgcaagggaggagccgaggccagagagcgagttctcggaggggtcggccctcgatctgctsgggccgcgtcgccccgggcccagaccccagcagggttccctccgcggtctcctccaatctggaggctgagcttaggctgccacgcgtggggcgcggaggg

SEQ ID NO: 310428 - DNA, 201 bp, Homo sapiens
tttttttttttttcctcagagcagaggagaatgaaaagtctggatgatttactggagccctagaagagagttcttgttcagctggtgtcattgcagggcaraggattaagtgtttgggtagagtgctctccagctcagatggaatctatctgagcctggtaacaggccagcatctgctctggacctttcaggaagtgcttg

SEQ ID NO: 310429 - DNA, 201 bp, Homo sapiens
cttagcccctggccacgagccaggattgcctctgctgcttgccctgtggccctgcagatgaacttaggccctctccagagcagagcatttgttgcccttcstgctcctttagcctcagggcaggaggctgccgggtttcctcacacgcagggcctcttctctctgaggtcttggccctgagggctatatatgaagggccat

SEQ ID NO: 310430 - DNA, 201 bp, Homo sapiens
ggctggaaggtcctgtggtctgtgggctttgtgttacggacatggaatgagagatagaaagacagttttttttttttttttttttcctcagagcagaggaraatgaaaagtctggatgatttactggagccctagaagagagttcttgttcagctggtgtcattgcagggcagaggattaagtgtttgggtagagtgctct

SEQ ID NO: 310431 - DNA, 201 bp, Homo sapiens
catgcttagcccctggccacgagccaggattgcctctgctgcttgccctgtggccctgcagatgaacttaggccctctccagagcagagcatttgttgccyttcctgctcctttagcctcagggcaggaggctgccgggtttcctcacacgcagggcctcttctctctgaggtcttggccctgagggctatatatgaaggg

SEQ ID NO: 310432 - DNA, 201 bp, Homo sapiens
gagcaaagagggctggaaggtcctgtggtctgtgggctttgtgttacggacatggaatgagagatagaaagacagttttttttttttttttttttcctcaragcagaggagaatgaaaagtctggatgatttactggagccctagaagagagttcttgttcagctggtgtcattgcagggcagaggattaagtgtttgggt

SEQ ID NO: 310433 - DNA, 201 bp, Homo sapiens
gggccatcggcacccgagactggggaacgggtttggcgggcgtggggtgaggggcagcgacagggggtggagagggaatcgggaagccagggcgtagcaargttgtagcaagggcgtgggaccgggccgcagagaccgaagagggcaggtgactgcgaggcgggacgtggggtcgctagggggcaacctgggcactgcagg

SEQ ID NO: 310434 - DNA, 201 bp, Homo sapiens
ccagctgatctcagttcatcccttgagtgccttctgcctgtttggcttctgactggagcgtgcctggggctagaatgagggacgagagagaggaggtggcsgaggcactattcttgcctgtgggtagctcgtactctgagattgctgcttcatattggcagctggccatgtgccaggggaggagcccggctgtgagtgctc

SEQ ID NO: 310435 - DNA, 201 bp, Homo sapiens
gcggagccaccggagctggggaccaggacgcaggcaggcgtgtggagcgtgaggtggggacgtggcggcggctcaagtgggcggagccccggcagcggccsgaggcggagtcgccaagggaggaggcgccgagctgaccgggcgacgccgcgggaggttctggaaacgccgggagctgcgagtgtccaggtgagcgccccg

SEQ ID NO: 310436 - DNA, 201 bp, Homo sapiens
aggaggagtcttggcaggattccaggcaaggagaggcttgtctcctatagcaggagaaagatagctgcttctgctggccttgaaggtttaggagaatccasgaattcaaaattctcacattaatctattcaaatgttcccattctttgttccagggttccatatgtttcctatcagggccatgactccattgtagaaagta

SEQ ID NO: 310437 - DNA, 201 bp, Homo sapiens
ttctcacattaatctattcaaatgttcccattctttgttccagggttccatatgtttcctatcagggccatgactccattgtagaaagtagagctatcacrgctgtgaatcccttccttgcaggtctgccttctaggaccactcttatgtcgactgtcttagcccagatttcctcctgaaagcaaagcctgagtcaagagt

SEQ ID NO: 310438 - DNA, 201 bp, Homo sapiens
tgcgggagcacagtcatggaggcactgtcgtcacgctgggttctgattttgagccccttgctctcctcacgcccccagggccctttatcgcggcaggctgycagagctttctccgactggaaggctttctgttagcagaagggcctgcccccagtccaggaacagagggagggagggagagagaagtaggagatccgattt

SEQ ID NO: 310439 - DNA, 201 bp, Homo sapiens
aagatggatcatatcacaggactctgcagacactccccagtaccagcctgtagcccagtagctcagctaggtggctagacccagaagagcaaaaacaatcwctacagttcagctctcaggaagccccattcctaggggaagggggagaacaccacatcaagggaacaccccatgggacaaaataatctaaacaacagccct

SEQ ID NO: 310440 - DNA, 201 bp, Homo sapiens
agaaccacaccagccaaaccatgacataaaccaaagccttgacaggagtagggtatttatttggtactctgccttccagaagtcaacttaattctctcttyctggatgaatacaacatcacccagagactttccaacttttcatccaaaatgtgtgtcatctaatagagaagtatgagacatgctaaaaaacaaaacaaaa

SEQ ID NO: 310441 - DNA, 201 bp, Homo sapiens
cgtccagaaagaagtaaccacgctgcttgaggttcaggccgcagtcactgcacatgaagcactcgggatggtagagcttgtcccgtgccttgacgatggtrcccctgatggggggaacgagacaggacagcgtcgagtgactgatgggttcacgactgcgcccgcatccagggccctggaaggctagggtccgggaggggc

SEQ ID NO: 310442 - DNA, 201 bp, Homo sapiens
ccagaagggtcacacactaggagagagggtcacatcctaggaataagagatatgtcctaggacaaaaaagaaccacaccagccaaaccatgacataaaccraagccttgacaggagtagggtatttatttggtactctgccttccagaagtcaacttaattctctcttcctggatgaatacaacatcacccagagactttc

SEQ ID NO: 310443 - DNA, 201 bp, Homo sapiens
tgttctgctaagtcccagaagggtcacacactaggagagagggtcacatcctaggaataagagatatgtcctaggacaaaaaagaaccacaccagccaaamcatgacataaaccaaagccttgacaggagtagggtatttatttggtactctgccttccagaagtcaacttaattctctcttcctggatgaatacaacatc

SEQ ID NO: 310444 - DNA, 201 bp, Homo sapiens
aagtgttggggagacaaattggaattcaacttctatcaaggtagagaggccttggtaaatgcgtaggtgttctgctaagtcccagaagggtcacacactargagagagggtcacatcctaggaataagagatatgtcctaggacaaaaaagaaccacaccagccaaaccatgacataaaccaaagccttgacaggagtagg

SEQ ID NO: 310445 - DNA, 201 bp, Homo sapiens
ctaggggcatttcacacattgttacttgagggaatagggaccaagcagaaagcatcagtcttaccagactgaggatacaaaggtcagagttcagggctgcygaagaagatggaaattaagaaggaaaattccagaaggtaggaaagaagagagaaggagcccaataattgcatgcaaattcctccaactttattggctttt

SEQ ID NO: 310446 - DNA, 201 bp, Homo sapiens
tggatatagaatactaggttgcttttttttctcatagattatttaatatttaatatataattcctataattttattgttttctgtcttgcattactcctgstaagaaataaatggtgattctaatcgttgtttcccttatgtaatgtgcctatattcttttatcacttctaagatgttctatttggttttaagattttgac

SEQ ID NO: 310447 - DNA, 201 bp, Homo sapiens
agaaccttacaataatacacttccatttacttctcccttcttttttgctaatgttgttgtgcgtttacctctgtatttgctataaactccataataaatamtcattatttttgctttaaacagtcaactgtcttttaagtaatttaaaaaacaagaaaacctattttctatttacttgttaggtttactggtagcacttgt

SEQ ID NO: 310448 - DNA, 201 bp, Homo sapiens
gcttctcagctctctcggcctttgggtttgcatagtcctgctatccatggaacaatggctcacaagggccaacacagccttgtctccctcacatctctctracgacctcatctactacttccagccacctcacttatactacttcagtcactgcttgcctagggccttaggatttcctgtgccctctgcctggaatgtaat

SEQ ID NO: 310449 - DNA, 201 bp, Homo sapiens
atgccttctttatttccttgatagcactgcttatagcctgtagttattttacatgttcgttcaaaatgttttcctagggtgcaacacaatgcctggcatayagaaggttcttaataggtatttttgttttttgagacagagtcttgctctgtcacccacgctggagtgcagtggcgtgatcttggctcactgcaacctcca

SEQ ID NO: 310450 - DNA, 201 bp, Homo sapiens
cgggcggcatgaagggcgcgggcggccagctccggctccggctccggctccggctcccgcgaggccgggtagcctgggcgttcccaggggtcgcagaggayggcgaaccccggcggagccaccggagctggggaccaggacgcaggcaggcgtgtggagcgtgaggtggggacgtggcggcggctcaagtgggcggagccc

SEQ ID NO: 310451 - DNA, 201 bp, Homo sapiens
tcaatatcaggctctggttcagagtcaagattaagggcagagccagaggacaaaggacagaacctcctccttctcatgtgaaaggccagatccacacgctygcgtatgcatgtgaatccctctgtgcgtgagcatataaatgtgtgtgtgtgtgtgcgtatgtgtgtgtgtttgtgggtgagagccctcttactagaggct

SEQ ID NO: 310452 - DNA, 201 bp, Homo sapiens
cataagaagagagaccatcagggctggataaaagggattggcagcattggcaagatttgtgtctacccttgggtccatggaatacctttgagaggttctayacggaaataacatgatgggaatcacatggttacaatgtcactctgccctgtgtaatggagtaaggatagagggagcggagtagaaaagtgggctaagatg

SEQ ID NO: 310453 - DNA, 201 bp, Homo sapiens
gcacagatgtttttactatcccttctggggaaacaccaggttcttccttcggggtggggatggcaggcagacaagtccagactgcttcaaggagccattgsccagggatattgcctagggacagcatggaggtagagcctcatttggcaatgccctggccatgctggggtgaaaggtcataggccatgcctgatcttgagc

SEQ ID NO: 310454 - DNA, 201 bp, Homo sapiens
cagcacagatgtttttactatcccttctggggaaacaccaggttcttccttcggggtggggatggcaggcagacaagtccagactgcttcaaggagccatkggccagggatattgcctagggacagcatggaggtagagcctcatttggcaatgccctggccatgctggggtgaaaggtcataggccatgcctgatcttga

SEQ ID NO: 310455 - DNA, 201 bp, Homo sapiens
taaggtgccttacaaacaagtttcattatagcaaagtgaagtacattcatttaaaaatagagagaggcagcctgggcaacatggcgagacctcgtctctayaaaaataaataaaaaattggccacgtgtggtagcgtgtacctgtggtcccaccagagaggctgaggtaggaagattgcttgagcctgggaggctgaggct

SEQ ID NO: 310456 - DNA, 201 bp, Homo sapiens
gacggggaatcgtgtggctactttcttaaactacgtgagtatgatgtgtgctgatgagccctaaggggaccctgggtccagagggctgccttatatcccayccccatcagggctgatctcatctgctgttaagtaatggtcaggtccttctggctctcagcacccttcttggctgcagtagggagagttggcctctgtttc

SEQ ID NO: 310457 - DNA, 201 bp, Homo sapiens
gcaggcccactgtaggcaggggtcaagggctctgcaaggggtagaggcagccacaggcatgggcaccaggcaacatccaaaaggaaggtctgagacagtayagcctgtgaggtgggctgggggctgatgcccagcatatcctggaaggacaggactcagtcaggaggcaacaaaactggtcctggagccgtggttggttca

SEQ ID NO: 310458 - DNA, 201 bp, Homo sapiens
ctcctccctggcctggtggcctcaggtctctaggtagagtctgctccattctggctcagctcctggaggccaagacatctctccttcaaggcccagccccstctccccagccaagagcctggattccaaggggatctaaagccttgcttgggagttccatcttcctggaatgcccagtccacagtactgaccactccaggg

SEQ ID NO: 310459 - DNA, 201 bp, Homo sapiens
agccatcattatagcttgtggggaaggagccccggatgatgttcttgggactcctggaggcttcatgggctgagattgcaagcccccagccctgccgggcygatagcctcctccctgtctgtgtgaggctgtccctccctaccaggtcccgcgtaggggaggtcctggaagcaagggaggggctggatcttgagccccact

SEQ ID NO: 310460 - DNA, 201 bp, Homo sapiens; identical to SEQ ID NO: 64769

SEQ ID NO: 310461 - DNA, 201 bp, Homo sapiens
ggccaagaaattgtgactctcccagtcacctttacatgcattatctcattaatcctgaaggcaagcccatttcctagatcaggaaacggaggtccagagargtacagaaggatagttaattgataaaagactgaatcaagatttcaatccaggccacctgattccaaatttaaaactatgctcttaacacctgcatttttc

SEQ ID NO: 310462 - DNA, 201 bp, Homo sapiens
taaaaaatggaactatacatacataccagggcatgcaaactcagttgcttggagggacaatgaatttacaagtgtcaagtgggctggatggtggggccagsgcaagttggggagcataggtctgatctaaattcattcctattcatatgttttacaaacaaagcatatctgttggtagatttgtgacagaagaaaaaattc

SEQ ID NO: 310463 - DNA, 201 bp, Homo sapiens
tttgggggtcagaattctacctctacttcccctgcaggacaggaactcaggctacctcagtgccactattgacccctcggggtcaagcagtgttcacaccyggaagctcttacaatgctggtcaactgaagaaggctagaatggggggtggagttagactcacagagatatctaagtaagcaactcaggggaatccaggcc

SEQ ID NO: 310464 - DNA, 201 bp, Homo sapiens
ccgagtggctggttgaggtccccatgtagcctggctgcagccttgctggaaacacctccaactccagcacctggaggcctggcagggcatgaggatatacragaagggcttcctcagggctgggacaaatggatgttgttcttgcagcctgcgtatgtgcccaaggacatgcaggggacacagagacacatggagacatag

SEQ ID NO: 310465 - DNA, 201 bp, Homo sapiens
gccagtggcttacctcccaccctgccagctcagaggcatggttagctgtgttgtggtttggggaggctttgcccacgtacttccacagggggtcatggaartcccctcagcagtgaacacggcagagctgataagttatgcccgacttctgtggatcaaggtgggcaggggagtggggagatcccactcagccaggcttag

SEQ ID NO: 310466 - DNA, 201 bp, Homo sapiens
agtctccttgcccaaactctgtggcccagagatggctctggatacctcagtcatccccacttggctactccttatgccatggcaaaacaaggccctagaayagcctgaccccctcactcttcttgaggacaggaccagagatatgacttctatcacacacagaaaggtgactgggcagacaggcctgcagcctaagttctg

SEQ ID NO: 310467 - DNA, 201 bp, Homo sapiens
gcttgttttcctgcaactagatggtcccatctgggggtgatgggagacagtgacagatcatcagacgttagattctcataaggaatgtacagcctagatcmcttgcttgcacagctcacaatagggttcatactcctggaatcctagaatcctagaatccctactcctagaatcctagaattagagaatctaatgccactg

SEQ ID NO: 310468 - DNA, 201 bp, Homo sapiens
ccccatcaatgcagcagcaacaggaaaacccctatccacatcaggcccaacaaaagcccctgagaaacgtgagcgctctcacacgtgtgtctgtcgggcargcatgcaggcagggctgacctctaatggggaccagatgggctgtggccagtgggggtggggctcagcctccgggcagaggctttggtgggagggaggagt

SEQ ID NO: 310469 - DNA, 201 bp, Homo sapiens
aagtatactgcttacagcttagcccactgggggaatttcccttcaaagttgtttagggctaccccctaaatggagctatgttacaggaacaatctcttttyttttttttcttttttaactagtatcaatgtctaaagctaatccatctgtgagtaagggctattttcccctccatcagttggttacagagaactacctact

SEQ ID NO: 310470 - DNA, 201 bp, Homo sapiens
tggagtcccagagccctatcccctgtccatgggaaaatgagggtgtttctgctcagggcagagcttctgtgatgcttgcagtcaggtccctgagcacagtytcttaagaatgtgttctgaaaggccatctctttcccagggtacagctgtgttctggtacaacctcttgcggagcggggaaggtgactaccgaacaagaca

SEQ ID NO: 310471 - DNA, 201 bp, Homo sapiens
tcccacaggggagatgccaggtcaggttctgtacctggagtttgggggtggcccttcttaggggccatgctgtaaacccactcataaggtaccctgagttmtaggcagcaggtcagacaagctgcagattctatggcttctccagctctcccgaaagttctttaaggaagccctcagatttccttttcccctgtaatggcc

SEQ ID NO: 310472 - DNA, 201 bp, Homo sapiens
attccctcacatgagctcatgttgacatccctgacttaagagaacatcagaggcttacttctgactgtgccttcccacaggggagatgccaggtcaggttstgtacctggagtttgggggtggcccttcttaggggccatgctgtaaacccactcataaggtaccctgagttctaggcagcaggtcagacaagctgcagat

SEQ ID NO: 310473 - DNA, 201 bp, Homo sapiens
actggggaacgggtttggcgggcgtggggtgaggggcagcgacagggggtggagagggaatcgggaagccagggcgtagcaaggttgtagcaagggcgtgsgaccgggccgcagagaccgaagagggcaggtgactgcgaggcgggacgtggggtcgctagggggcaacctgggcactgcagggagtgggaaggcagatgg

SEQ ID NO: 310474 - DNA, 201 bp, Homo sapiens
tctgtaggaggcaagatgctgctatctgttcagctgggagagaaacaagtggtgtgtggtagcggtgtttatatgggagtgtatttggggtgtgtgtgtgkgggggggtgcggtgtctgaatccattagagcaccagccattgggctgttctccatcactttgtggtggaggaggtttctgctcagccccttgcagacttg

SEQ ID NO: 310475 - DNA, 201 bp, Homo sapiens
ccagggcgaaggcccgcgcagggtcacggaatggggcatcgcgggctggagccgcagccggagcctgagccggactctgaggaggagccgccgccgccgcmgccgccgccgccgcctggacgccgcgccccgcccccggcccgcccgcccctgtccccactcggcccagcccccgcccccgctccctgtgcgcctggattg

SEQ ID NO: 310476 - DNA, 201 bp, Homo sapiens
tcctccactcctctatcctcagactagccacgctccagggctgtgccggctccttttccttctctgtgggcaaggcagggccctgggaaacttgaggaacrggcctgaggctgtcctggcccccggctttgtgtcatcttgtggggaggggtctcacaacctcacagttaagtctccctttcccctggaagccaaaattcc

SEQ ID NO: 310477 - DNA, 201 bp, Homo sapiens
gacccccaagggcagggtctgagtcctctcttttggccctccagacacgaggatgtcgaggctgggccaggatcctgtctcccctagacaggcaccccctmgaacagggcctgagtcacctcctccactcctctatcctcagactagccacgctccagggctgtgccggctccttttccttctctgtgggcaaggcagggc

SEQ ID NO: 310478 - DNA, 201 bp, Homo sapiens
gggctgggagtccaagtcagaaccaggtgccacattgtcctacacagtcacagcaaactgcagactgcctggattcctcctgtctccactctgcttctctrggttgattacattagcctctctgtgcctgggtctccatctatgtaaggccagagggagtccttacttctaaaggctgttgtaaggactatttgagaaaaa

SEQ ID NO: 310479 - DNA, 201 bp, Homo sapiens
cctgtgcaagcctgtcatcctgggggagacacccacttggcaccatcccaccctcccctcaaggccatcctctgcctcctccccttcatggatacctgccytgtgccagggcctgggctctatgctttacccataactagctcacagcaacccctcaaccacctggtgaggcagaggctgttctcatccctattttacaga

SEQ ID NO: 310480 - DNA, 201 bp, Homo sapiens
tctgagcataattgccactccttccagaaaaccctactaacccagaaggatagtaataagttactatccttcctccaccctgggctaggccaagtgcctcstgtgttcccacaagaggcctgagagaaggaggttctcctatcgccccacagggaaggtgggcctgaagttccagctggccctgtcccatcccactcgggg

SEQ ID NO: 310481 - DNA, 201 bp, Homo sapiens
ccccacagccagcctggtgcccatggctgaaacattttgggtgggagtgtcctgaacctgccccctcagccatgaggagagggcagtatctctgtgtgtgkgggtctgagtggggactggggatctttgtccctgcagagtccagagctgtgcagttcccagcttgcaagtgcacacaagcaccccacagcaatgtaaaca

SEQ ID NO: 310482 - DNA, 201 bp, Homo sapiens; identical to SEQ ID NO: 64746

SEQ ID NO: 310483 - DNA, 201 bp, Homo sapiens
tcaaaaaacgtaactcctgtcctacagtcagaaagggtccttgactgtcatgtgtccaaggccctttgggcaggctgaggctcaagagtgccattgtgagstcagccccttctgggcctacacctgtcccccatttcctgctttccaggccacaatgagtagccttctgcaggcacagcagatgaggggcagagaccaggc

SEQ ID NO: 310484 - DNA, 201 bp, Homo sapiens
tgcagtcccggctccgcgggaggcctctggctgggtcagcgctgggagggagaaagaaatagaggaggaagggatgcagttccagccttcaccctgtggayttggggtctggtaaggcttatgagtcagaatgcaaccagctaagacccaaggatcaagtgtcaggggtcagagtgggactgggtgagatttgagggatca

SEQ ID NO: 310485 - DNA, 201 bp, Homo sapiens
ggcacacctgcggcccatcctgccgtgtgaggagccctctgaaccaagaaccctatgaaccaggggcttgcgcagcactgggccggggacgcagacccaaracgacagcaggcagcgccgagcgtgggagtggacacagaaaggtcctcagactagtttgtggaggccagtaaggcttcctggaagaggtggtccctgact

SEQ ID NO: 310486 - DNA, 201 bp, Homo sapiens
gacaggtggcaggcgtcttaccgccctcgccggcctctagcatgccctgcaagtagcggaaggagcctgactgcttgggctccgcggccacgggctcggcyggctcccgcagcatcctgtacacctcggagcccaggtcgactctgcagtcccggctccgcgggaggcctctggctgggtcagcgctgggagggagaaaga

SEQ ID NO: 310487 - DNA, 201 bp, Homo sapiens
ccatcggcacccgagactggggaacgggtttggcgggcgtggggtgaggggcagcgacagggggtggagagggaatcgggaagccagggcgtagcaaggtygtagcaagggcgtgggaccgggccgcagagaccgaagagggcaggtgactgcgaggcgggacgtggggtcgctagggggcaacctgggcactgcagggag

SEQ ID NO: 310488 - DNA, 201 bp, Homo sapiens
cgagtgactgatgggttcacgactgcgcccgcatccagggccctggaaggctagggtccgggaggggcagcgggggcggttactcacacgatgccgtggcmgcagcgcgtgcactcgggcagcccctgcaggccgctcagcggagcgcccagcttgctggccgtgggcttgaggttccgggggccgccaggcccgggccaa

SEQ ID NO: 310489 - DNA, 201 bp, Homo sapiens
gcaggccaggtgacaggttcaaggtggagcagaggagctttattagagggacagggtgaaacatatttacaccggccgagcagggaccttaagaagcaggsgtgggagcagggtcccagctcagacgagttccaccttggcattggggtacaccgccaccacgtcgtagccctcgggcggcttcacgcgcgccttggcgtg

SEQ ID NO: 310490 - DNA, 201 bp, Homo sapiens
atgacggccacagaggcctttctcgcccccagctcacctttgcacacacagttcccccgtgcagagtttgtgcctccctcatctcttagttctcagctaasactttccctgaccccacccaggtcatacctcctgtcgtcgcgccgcacgcagcatcccagacctcaccttcgtattactagagctggcccgttgtgattc

SEQ ID NO: 310491 - DNA, 201 bp, Homo sapiens
ccttcaaagttgtttagggctaccccctaaatggagctatgttacaggaacaatctctttttttttttttcttttttaactagtatcaatgtctaaagctwatccatctgtgagtaagggctattttcccctccatcagttggttacagagaactacctactaaggctgtaggtctgagctaagacagaagggttggtata

SEQ ID NO: 310492 - DNA, 201 bp, Homo sapiens
aagagaaaaggcagacaatggaaatagacccacaggtgtttcagaaatgagagacttccaataattatgatgaaaatgttcaagaaaatagagggaaagtwaaaaaaaaaaaaagatgaaaagctagagaatttaaatatagaattgccagaatactgataaagatagcagataggaggcaggactagcttgcagctcctg

SEQ ID NO: 310493 - DNA, 201 bp, Homo sapiens
ggactgcctgctccacctgacttgcttctccccatcacctggttctgagcataattgccactccttccagaaaaccctactaacccagaaggatagtaatragttactatccttcctccaccctgggctaggccaagtgcctcctgtgttcccacaagaggcctgagagaaggaggttctcctatcgccccacagggaagg

SEQ ID NO: 310494 - DNA, 201 bp, Homo sapiens
agatgagcaggtgccatctcctagaggctcagttctagctctctgctggtctggggaggacaggctgagtgtgcaaggactgcctgctccacctgacttgyttctccccatcacctggttctgagcataattgccactccttccagaaaaccctactaacccagaaggatagtaataagttactatccttcctccaccctg

SEQ ID NO: 310495 - DNA, 201 bp, Homo sapiens
gctcccctaaaaagattctcccagaaggcctcacacacctttgccctgggacaaaaatagctgttggtgccccaggagagagtgcagagaaaattccagawcttgatgagggcagggtgtcaacctggcctacagctgttgggtgaccactggtgtcaacctggcctacagctgttgggtgaccactggggtgagagggca

SEQ ID NO: 310496 - DNA, 201 bp, Homo sapiens
cccctaactgggcaagtctcttcacctctctgaacctgtttctttatctatgagctggggaatgtgatgctttccacatcaggttccttgtggagatgaartaagacaattgcatagtgcctggcataaagcacatacttgttggatgaatggctgtcaggggaattcctgggcccccagtcctgtattttccccctctgt

SEQ ID NO: 310497 - DNA, 201 bp, Homo sapiens
gctttgggacactcaacttggatggaggcaggcgctgagtccagatgagcaggtgccatctcctagaggctcagttctagctctctgctggtctggggagsacaggctgagtgtgcaaggactgcctgctccacctgacttgcttctccccatcacctggttctgagcataattgccactccttccagaaaaccctactaa

SEQ ID NO: 310498 - DNA, 201 bp, Homo sapiens
tcctatggcctgaggcttccacagcctgaggcttcccaaggctacaagtcaacttagctgaccatgaaggcccctgatcactatgggctgaggaaaggatytggggtcttcccaatatcctccctgcctcctcagccagtggaggtcccagcattggagtcattccccagggcctggaaaacatctctcccttcccgttgc

SEQ ID NO: 310499 - DNA, 201 bp, Homo sapiens
cctcagtggatttttcagcaggatgggggtaactacctgctttgggacactcaacttggatggaggcaggcgctgagtccagatgagcaggtgccatctcmtagaggctcagttctagctctctgctggtctggggaggacaggctgagtgtgcaaggactgcctgctccacctgacttgcttctccccatcacctggttc

SEQ ID NO: 310500 - DNA, 201 bp, Homo sapiens
aagctgcagggcaggtgaacctgttgatgctatccatataggtcagcagtcagggcgcagagcaggggaaagaggagacaggagaggagatctggaagggyaagcagatgacatctgtcaagtgttaggtaacacttggtacagggagagtgctccataaattagttgtccaatcacagaagcatcccagagcatcataga

SEQ ID NO: 310501 - DNA, 201 bp, Homo sapiens
gggtaggcccatggctgggaactcaaaaaacgtaactcctgtcctacagtcagaaagggtccttgactgtcatgtgtccaaggccctttgggcaggctgargctcaagagtgccattgtgaggtcagccccttctgggcctacacctgtcccccatttcctgctttccaggccacaatgagtagccttctgcaggcacagc

SEQ ID NO: 310502 - DNA, 201 bp, Homo sapiens
atgccctgcaagtagcggaaggagcctgactgcttgggctccgcggccacgggctcggctggctcccgcagcatcctgtacacctcggagcccaggtcgaytctgcagtcccggctccgcgggaggcctctggctgggtcagcgctgggagggagaaagaaatagaggaggaagggatgcagttccagccttcaccctgtg

SEQ ID NO: 310503 - DNA, 201 bp, Homo sapiens
tgtttggttgggcgccagacgggccatcggcacccgagactggggaacgggtttggcgggcgtggggtgaggggcagcgacagggggtggagagggaatcrggaagccagggcgtagcaaggttgtagcaagggcgtgggaccgggccgcagagaccgaagagggcaggtgactgcgaggcgggacgtggggtcgctaggg

SEQ ID NO: 310504 - DNA, 201 bp, Homo sapiens
cgtggccgcagcgcgtgcactcgggcagcccctgcaggccgctcagcggagcgcccagcttgctggccgtgggcttgaggttccgggggccgccaggcccrggccaatcccctgaaacccggagcgtaggtggcatgaacggggtgaggaggtcagaactccatttctgcggggtgtttggttgggcgccagacgggccat

SEQ ID NO: 310505 - DNA, 201 bp, Homo sapiens; identical to SEQ ID NO: 64742

SEQ ID NO: 310506 - DNA, 201 bp, Homo sapiens
tgatctcggggtagcctatggtggcagggagcctcttgggtggtagtttctgttgggggaaggggttattgcatgtcatgggattaaggtgagtaccagcrgctagtggatctgtggtggccagtgggagagtcgagtttctgcgggtgagtgggagtgagaggtgggggccagggcccatggctcccggtatttttccac

SEQ ID NO: 310507 - DNA, 201 bp, Homo sapiens
ggcttatgtttttttgggaaagcatttgtatttcctttgttttgcttgctttgtcttagtgaatttccatttgagcactccagtggggtgctcaaaagcasggcaggaagaagaccggcagagctggggtacagatgggtgctaatcctccagcacagtctaggctgcatggctgagctgggagacggtatcggaggcttc

SEQ ID NO: 310508 - DNA, 201 bp, Homo sapiens
tcaaacatccccttggtgcctctgcctctttcttcctgaagttgcgagatagagccccatgagtgcctaggccccctttaactccaagtccccataatccycagagagctgacatgttcttatcccaggggacttgcttctgtgctggtattctgtgccccaaggaaggaggctggacatccctcatctgtttctcactgg

SEQ ID NO: 310509 - DNA, 201 bp, Homo sapiens; identical to SEQ ID NO: 64764

SEQ ID NO: 310510 - DNA, 201 bp, Homo sapiens
atctccacctcccaaagtgctgggattacaggtgtgagccaccatgcccgctgccttttttttttttttttttttttttaaagggacagggtctcactatwttagcctagactggagtgcagtggctattcacaggtgcgattgtagcacactgcaaccttggactcctggcctcacgtgatcctcctgcctcagcctcct

SEQ ID NO: 310511 - DNA, 201 bp, Homo sapiens
ctcaaactcctggccttgaaagatcctcccgccttggcctcccaaagtgctgggattacaggtgtgggccactgttccaggccacttgatccaaaaccacygtaatgaccaatgtttgacccctagatgccaagatattcatcagcaagatctttaaacaatgcctgtagaatagaaaactcttcataaagatgcttattt

SEQ ID NO: 310512 - DNA, 201 bp, Homo sapiens
tcccaaagtgctgggattacaggtgtgagccaccatgcccgctgccttttttttttttttttttttttttaaagggacagggtctcactatattagcctaractggagtgcagtggctattcacaggtgcgattgtagcacactgcaaccttggactcctggcctcacgtgatcctcctgcctcagcctcctgagtagctg

SEQ ID NO: 310513 - DNA, 201 bp, Homo sapiens
gaacagcctgttgcgtggcaagaatgatgcttttttttttttttaacagggtctcactctgttgcctaggctcgagtgcagtggcaagatcatagctcacygcagcctcgaactcctgggctcaaggggtcctcccacctcagccttctgagtagtttggactataggtgcatgccgccacagctggctattttttttttc

SEQ ID NO: 310514 - DNA, 201 bp, Homo sapiens
ggattacaggtgtgagccaccatgcccgctgccttttttttttttttttttttttttaaagggacagggtctcactatattagcctagactggagtgcagkggctattcacaggtgcgattgtagcacactgcaaccttggactcctggcctcacgtgatcctcctgcctcagcctcctgagtagctgggactataggcac

SEQ ID NO: 310515 - DNA, 201 bp, Homo sapiens
gcaaccttggactcctggcctcacgtgatcctcctgcctcagcctcctgagtagctgggactataggcacagtgccattgtacccagctcttcactgcctyttttccctgagctgtgagtgctgattaacttcagactagctgtctctctggctgagacattttagcccatgtggccagactgggttgggcctgggggcag

SEQ ID NO: 310516 - DNA, 201 bp, Homo sapiens
atgctgtaaacccactcataaggtaccctgagttctaggcagcaggtcagacaagctgcagattctatggcttctccagctctcccgaaagttctttaagraagccctcagatttccttttcccctgtaatggccttggtccttggagattgctgtattgctgagaccctatcatgctggaataccaagtcataaggcagt

SEQ ID NO: 310517 - DNA, 201 bp, Homo sapiens
tggcctcacgtgatcctcctgcctcagcctcctgagtagctgggactataggcacagtgccattgtacccagctcttcactgcctcttttccctgagctgkgagtgctgattaacttcagactagctgtctctctggctgagacattttagcccatgtggccagactgggttgggcctgggggcagggtggcctctggaga

SEQ ID NO: 310518 - DNA, 201 bp, Homo sapiens
gttttcccagcccatggactgatgggaaggtcaagaccctaatgatgctccatgggagaagaggacatgcttgaggcaaaggccagcccatgcttagcccstggccacgagccaggattgcctctgctgcttgccctgtggccctgcagatgaacttaggccctctccagagcagagcatttgttgcccttcctgctcctt

SEQ ID NO: 310519 - DNA, 201 bp, Homo sapiens
ggagggtggcaggccaggtgacaggttcaaggtggagcagaggagctttattagagggacagggtgaaacatatttacaccggccgagcagggaccttaaraagcaggcgtgggagcagggtcccagctcagacgagttccaccttggcattggggtacaccgccaccacgtcgtagccctcgggcggcttcacgcgcgcc

SEQ ID NO: 310520 - DNA, 201 bp, Homo sapiens
gtggagcagaggagctttattagagggacagggtgaaacatatttacaccggccgagcagggaccttaagaagcaggcgtgggagcagggtcccagctcaracgagttccaccttggcattggggtacaccgccaccacgtcgtagccctcgggcggcttcacgcgcgccttggcgtggctctcacagtagagccgctcgt

SEQ ID NO: 310521 - DNA, 201 bp, Homo sapiens
gggcctgcagagccagaggagacctgtggagaaggaaaaggggctccaggagccccccagtccctggcctacctagggacttcatcttgtgtttactgtcyccaacttcctattcctcgttattggttcctgagccaccggggttagcagaccctggtctctgaagcatttagcctactgtgtagtggtttcattccaggc

SEQ ID NO: 310522 - DNA, 201 bp, Homo sapiens
gaaaggtgagggtaagtgtcaggggctttcatttggcccttcctaccttaatggctcttaataaaatagggagtaaatgttagtgtactgccagttgctasaacatctgtcctagttatttacttagggataaggaaattagtacagtgtggatcttcagacttctggatctgtttgcaagagtactccatttacctggct

SEQ ID NO: 310523 - DNA, 201 bp, Homo sapiens
tactgccagttgctacaacatctgtcctagttatttacttagggataaggaaattagtacagtgtggatcttcagacttctggatctgtttgcaagagtaytccatttacctggctttcatgagcctctgtcacggggggaccatgatagtgtttccccccagcactgatgccagctcatactctgtacccaatagccttt

SEQ ID NO: 310524 - DNA, 201 bp, Homo sapiens
cctcctggagagagactctgatgtcccctgtctcagtactggcaccctgggccatacaaaccttgtcctatgaggaccctgtcccaagcttttcatggtckactacactcagggcccctgggcagacgaggtgggctgggggactgggtagaggctgggccttgaagctggggaaaggacaaatcaggctgtcagctctga

SEQ ID NO: 310525 - DNA, 201 bp, Homo sapiens
tagccaggtaggctggagcctggagcactgtgaattggggatcctggatctggttccccctcctggagagagactctgatgtcccctgtctcagtactggsaccctgggccatacaaaccttgtcctatgaggaccctgtcccaagcttttcatggtctactacactcagggcccctgggcagacgaggtgggctggggga

SEQ ID NO: 310526 - DNA, 201 bp, Homo sapiens
accaaggagataacaggttgtgccagaggcaccaggcaaaactggaagggatgggatggagggcatgtggatggaaactattaactctccctggggatggsagggccgaggctttgctctaggggagggggcagtagagttgggccttgaagagtgagtaggagtttgctgagccatgacaaaagaagaaaggcattttga

SEQ ID NO: 310527 - DNA, 201 bp, Homo sapiens
caggagatggagctcaggtggtaatgcaagcaatagtgagcggctgtaaatacagatgaagcttcactcgcttgcaagccactcacctcctgctgtgcaasccaatttctagcaggccatggtctatggcctggggattgaagacccctgctccaagacttacctcccactgagaactcaggcaggatgcttggaggtgag

SEQ ID NO: 310528 - DNA, 201 bp, Homo sapiens
agaatcctagaatccctactcctagaatcctagaattagagaatctaatgccactgttgatctgacaggagatggagctcaggtggtaatgcaagcaatastgagcggctgtaaatacagatgaagcttcactcgcttgcaagccactcacctcctgctgtgcaacccaatttctagcaggccatggtctatggcctgggg

SEQ ID NO: 310529 - DNA, 201 bp, Homo sapiens; identical to SEQ ID NO: 64761

SEQ ID NO: 310530 - DNA, 201 bp, Homo sapiens
tgcctcagcctcctgagtagctgggactataggcacagtgccattgtacccagctcttcactgcctcttttccctgagctgtgagtgctgattaacttcaractagctgtctctctggctgagacattttagcccatgtggccagactgggttgggcctgggggcagggtggcctctggagagggattggtgagctcagcc

SEQ ID NO: 310531 - DNA, 201 bp, Homo sapiens
ggctggacccaggcacaatttccagaggggaacttccaggtaactcaccactccaggcgttgcctgtcccgcatgtgtctctttagtggcgggacaggttkgagccaccaccaacttgtggcctttaacctcgggtgcacctctggtgcacctcttggctcaccagtttgtgctggactccctctcccatgacaggtttct

SEQ ID NO: 310532 - DNA, 201 bp, Homo sapiens
gggactataggcacagtgccattgtacccagctcttcactgcctcttttccctgagctgtgagtgctgattaacttcagactagctgtctctctggctgaracattttagcccatgtggccagactgggttgggcctgggggcagggtggcctctggagagggattggtgagctcagccaggctggagctgtgcccagtga

SEQ ID NO: 310533 - DNA, 201 bp, Homo sapiens
tgtacccagctcttcactgcctcttttccctgagctgtgagtgctgattaacttcagactagctgtctctctggctgagacattttagcccatgtggccaractgggttgggcctgggggcagggtggcctctggagagggattggtgagctcagccaggctggagctgtgcccagtgagctcactgcctccagaaaccac

SEQ ID NO: 310534 - DNA, 201 bp, Homo sapiens
agcctgtgtccattttttccctttatgcttttattgtgtggttattacatgctggggattgtgctgtgtacatgctggtgagcagaacatatgtggtctcycttgtgcttgaggtccaatatgagagacttattttaaacatcagagagattcttctttatcttttttttttttttttttttgagacagactctccctctg

SEQ ID NO: 310535 - DNA, 201 bp, Homo sapiens
gtgagtgctgattaacttcagactagctgtctctctggctgagacattttagcccatgtggccagactgggttgggcctgggggcagggtggcctctggaragggattggtgagctcagccaggctggagctgtgcccagtgagctcactgcctccagaaaccacggctgcctttcccagactcccgcctctccgcctggg

SEQ ID NO: 310536 - DNA, 201 bp, Homo sapiens
gtggccagactgggttgggcctgggggcagggtggcctctggagagggattggtgagctcagccaggctggagctgtgcccagtgagctcactgcctccaraaaccacggctgcctttcccagactcccgcctctccgcctgggcctgcagctcgggacaggctgttctgcctgcacggcaggagactaagcctacccaga

SEQ ID NO: 310537 - DNA, 201 bp, Homo sapiens
ctctcccacgcttcaggctgtggtcttgagcaccataactggagagcccatgccctgaactcattgaaggtctgagtggtgggagtacagaggagaacagrcccaccgtggtctcttaggggacggaccttgctgggttggtgcaaccccaccttggtccttggcctgtctaggtggtccttcagctgtcaacctaggggg

SEQ ID NO: 310538 - DNA, 201 bp, Homo sapiens
ttcccagacctgggccccacgtgggagggcgggcgcaagggaggagccgaggccagagagcgagttctcggaggggtcggccctcgatctgctcgggccgygtcgccccgggcccagaccccagcagggttccctccgcggtctcctccaatctggaggctgagcttaggctgccacgcgtggggcgcggaggggcgagtc

SEQ ID NO: 310539 - DNA, 201 bp, Homo sapiens
ggggtcggccctcgatctgctcgggccgcgtcgccccgggcccagaccccagcagggttccctccgcggtctcctccaatctggaggctgagcttaggctsccacgcgtggggcgcggaggggcgagtcagtggagtcggttcccgggaaacttctgggggcggcagagcgacaggagcgcgccctctcctgtggcgcctc

SEQ ID NO: 310540 - DNA, 201 bp, Homo sapiens
attctgagtaatgataccataaaacagaagtgagggactagggaggagagtgaacagagagggaggtaaagccaacatagactgtgaaattgagatggttwttggcgatgaccaagatcagtaacagtgttgtgtggagccctagtggagcctaagaataaatggaaaattagcaatactgagcctgtctttattgaaaat

SEQ ID NO: 310541 - DNA, 201 bp, Homo sapiens
cctatcatgctggaataccaagtcataaggcagtcacagggtctggaagccctcttcagggtggggatgtgtggtggccaggtcacacatcacccctgccmtagtggccttcacgtatttactgcacacccatcaggtgtctgtgctgctgggaataatcagactgcttatttcatgcattcttcttctctgcataagtac

SEQ ID NO: 310542 - DNA, 201 bp, Homo sapiens
agtatactgcttacagcttagcccactgggggaatttcccttcaaagttgtttagggctaccccctaaatggagctatgttacaggaacaatctctttttytttttttcttttttaactagtatcaatgtctaaagctaatccatctgtgagtaagggctattttcccctccatcagttggttacagagaactacctacta

SEQ ID NO: 310543 - DNA, 201 bp, Homo sapiens
ctgcaaagcttcctccactagcatggcagtaaatctggtcccagtgctctctgggaaaatattcaaggcaaaacaaacaaacaaacaaatcaagtcttccytctcctccttccttctagcttgcacgagccaccgttcgtgatcccaagacaggagtcctcactgtcgccagctaccgggtttccaaaaggtaagcaaaga

SEQ ID NO: 310544 - DNA, 201 bp, Homo sapiens
cttttgttgacttacatgcaccctattgacctgcttagtcctgatcctgaatttaccattcctgttctattattatatgatggattgctgataagtctgcttttttttttttttttttttttttttgagagagattctcagtctgtcacccaggctggagtgcagtggcacaatcacagctcactgcagcctcaacctccc

SEQ ID NO: 310545 - DNA, 201 bp, Homo sapiens
aaggcatctctgtgctacctggggggtggagacacatgcagggtgctcatctgggctggcagggtggcctcgctgctgccattgtgagggactggaaagcragggggttgtccatatggagatcccaggcttggtctgccatcttctggcccagtcccggtgcctgagggccgcctgctggttgttgggctgccgtcctat

SEQ ID NO: 310546 - DNA, 201 bp, Homo sapiens
tcctggagaatagctgagaacctaccaagggaaacagtcccatcacacacacatagtaggtaaagagacagaaaattagcttagagatgggaggtggcacrgatctctaaagctgtcctgctgccattcaggagtgcctcatgcataagtcctaataaactcatctactagccaagctgaacttgtcccagacatgcttgg

SEQ ID NO: 310547 - DNA, 201 bp, Homo sapiens; identical to SEQ ID NO: 64743

SEQ ID NO: 310548 - DNA, 201 bp, Homo sapiens
ccagagaccctctttgtggctgcctctctggtcccaagtggaattctgcccctggatcaagggtaatctcttgttctgactctcatttggaaggttttatygccaacctctctgtgcagcggcagttcttccccactgatgaggacgagataggagctgccaaagccctgatgagacttcaggacacatacaggctggacc

SEQ ID NO: 310549 - DNA, 201 bp, Homo sapiens
ttttgttgacttacatgcaccctattgacctgcttagtcctgatcctgaatttaccattcctgttctattattatatgatggattgctgataagtctgcttttttttttttttttttttttttttgagagagattctcagtctgtcacccaggctggagtgcagtggcacaatcacagctcactgcagcctcaacctccct

SEQ ID NO: 310550 - DNA, 201 bp, Homo sapiens
tttgttgacttacatgcaccctattgacctgcttagtcctgatcctgaatttaccattcctgttctattattatatgatggattgctgataagtctgcttttttttttttttttttttttttttgagagagattctcagtctgtcacccaggctggagtgcagtggcacaatcacagctcactgcagcctcaacctcccta

SEQ ID NO: 310551 - DNA, 201 bp, Homo sapiens
gtaagaaatttgggtatgggtctcagaaatgtccatctttaaggttcagaagtagggaatatttaggtctgggctggagatacctatttgggagtggtcayaactgcagagttcctgaggcccttgttgtgacagcagagccagccagggttcctggttgcaagcatgctcacagaattgatgggaaagctgaggtactgc

SEQ ID NO: 310552 - DNA, 201 bp, Homo sapiens
ttgttgacttacatgcaccctattgacctgcttagtcctgatcctgaatttaccattcctgttctattattatatgatggattgctgataagtctgcttttttttttttttttttttttttttgagagagattctcagtctgtcacccaggctggagtgcagtggcacaatcacagctcactgcagcctcaacctccctag

SEQ ID NO: 310553 - DNA, 201 bp, Homo sapiens
tccctaggctcaagcaatccttctacttcagcctcccaggttgctgggactacaggcaaacaccaccacacccagctaatttttttttctttattttttaragatggggttttgccatgttgcctcctgggctcaagtaattctctgccctcagcttcctcccaaagtgccgggattacaggtgtgagccaccatgcctgg

SEQ ID NO: 310554 - DNA, 201 bp, Homo sapiens
tattattattattatttttagacggagtctcactctgttgcccaggttggagtgcagtggtgcgatctcagctcactgcaagctccgcctcccaggttcaygccattctcctgcctcagcctcctgagtagctgggactacaggcacctgcgaccatgtccggctaattttttgtatttttagtagagatggggtttcacc

SEQ ID NO: 310555 - DNA, 201 bp, Homo sapiens
ggttggagtgcagtggtgcgatctcagctcactgcaagctccgcctcccaggttcacgccattctcctgcctcagcctcctgagtagctgggactacaggyacctgcgaccatgtccggctaattttttgtatttttagtagagatggggtttcaccgtgttagccaggatggtctcgatctcctgacctcgtgatccaac

SEQ ID NO: 310556 - DNA, 201 bp, Homo sapiens
ggaaatgaaaagacagttggtgacaaactcctttctccatcacctccttattggacagaaacgacccaggaatgcgcctcgcgtgagtcctattctttctkggggtgcacacccgctgctggaagtatgaacagcaggtttgagggggaggggagcgctgacccgggcactgcgcagggagtctcaaggggggctgacgca

SEQ ID NO: 310557 - DNA, 201 bp, Homo sapiens
cttccctctgtgaccatgaaactctgggtgtctgcattgctgatggcctggtttggtgtcctgagctgtgtgcaggccgaattcttcacctctattggtaygtgccaacaggactgtcgtctccctgacaccttggctcacatgccacggatgtctctggctgcagcctgttctcatttagagtgggatagccttaactac

SEQ ID NO: 310558 - DNA, 201 bp, Homo sapiens
gtgcagtggtgcgatctcagctcactgcaagctccgcctcccaggttcacgccattctcctgcctcagcctcctgagtagctgggactacaggcacctgcraccatgtccggctaattttttgtatttttagtagagatggggtttcaccgtgttagccaggatggtctcgatctcctgacctcgtgatccaaccgccttg

SEQ ID NO: 310559 - DNA, 201 bp, Homo sapiens
ggaagtttctggcatctctacttcatttccgaaggtcgtaattgtgtccaagtttcaaagaagcatctcagaagcatgtgaaaatggttttatgtatcctygattggatgttaatccctgaataatgagagtgcccccagattgatacattcttacaaccctctcctcacacccctgttatccctgttcctgccacaacat

SEQ ID NO: 310560 - DNA, 201 bp, Homo sapiens
tgttccagggttccatatgtttcctatcagggccatgactccattgtagaaagtagagctatcacggctgtgaatcccttccttgcaggtctgccttctakgaccactcttatgtcgactgtcttagcccagatttcctcctgaaagcaaagcctgagtcaagagtttgtgtgtaggtgatttatttgggaatggatccaa

SEQ ID NO: 310561 - DNA, 201 bp, Homo sapiens
tgtggtggctcacacctgtaatcctagcactttgggaggccgaggtgggtggatcatgaaatgaggagttcaagaccagcctggccaagatggtgaaaccycatctctactaaaaatacaaaaattagccaggcgtggtggcacacacctgtaatcccagctacttgggaggctgaggcagagaattgcttaaacccggga

SEQ ID NO: 310562 - DNA, 201 bp, Homo sapiens
ttcctttgtttttataaccttattgaattgcccagaacttctagagcataattacgtagaataggcatccttgtctcattcctgaatttcctggaaattcytatggtattttactgctaagaatgcagttggctgttggttttgtatatatgccatgttttaaaattattcttctgtttctagttcataaaagatttgttc

SEQ ID NO: 310563 - DNA, 201 bp, Homo sapiens
tgtttacatgtgtcttccttaccaattcttcagcaaattgaggcctgagatcatgtcttgtcttatttgtgtctgattccagggcacagtgcagggggtcwtcatgaaggagtcattcattcaggctactaaactgaccaataggattgtaacatgcttgctttcttttcacagtctccaataagtggttccatgaacgag

SEQ ID NO: 310564 - DNA, 201 bp, Homo sapiens
taaggcctaaatcacaggtgctttcaaagggccctgctctagctgatttgagaagggtggagcttctaggagcatttcagcctccacatcagtacccccaycccttgtcctccctccacctctgcatcaccaggggaaactcttcgttactggtgaatcccaaatctggaaccaagggtcctgcagaatgcagtggagcct

SEQ ID NO: 310565 - DNA, 201 bp, Homo sapiens
gacagacttcctccctggaatttatctggcctctaaaaaggtatgcaactgcaactggagacacacctgggtagagatgctgggttccccacttccaaccrtgtctggtttggaacctgcctgggccctgttctcccaccaccccagctctgaggagcagtcagctggtccctttctgatcacagatacatcctcccagct

SEQ ID NO: 310566 - DNA, 201 bp, Homo sapiens
gataggagcagaatgatttgaaaggaatggacagacttcctccctggaatttatctggcctctaaaaaggtatgcaactgcaactggagacacacctgggkagagatgctgggttccccacttccaaccatgtctggtttggaacctgcctgggccctgttctcccaccaccccagctctgaggagcagtcagctggtccc

SEQ ID NO: 310567 - DNA, 201 bp, Homo sapiens; identical to SEQ ID NO: 64767

SEQ ID NO: 310568 - DNA, 201 bp, Homo sapiens
acctatttgggagtggtcataactgcagagttcctgaggcccttgttgtgacagcagagccagccagggttcctggttgcaagcatgctcacagaattgaygggaaagctgaggtactgctgagataagcagaaatcagctgttggagatggcacccgcctgggaagtagacagaccagagtggagccctaacagggcagc

SEQ ID NO: 310569 - DNA, 201 bp, Homo sapiens
tgagtaggactggatagctgcaatatctagcagagtgtgttttgggtttgactcttggttctgtcattgatttgctgtcagatgtcagatatgtaggaaamcttctctcagcctcagctgtttgtcatttgtatctatcttatatctgaaatggaggtagttatctagcttagaaggtttgggtgagaattagatagtaga

SEQ ID NO: 310570 - DNA, 201 bp, Homo sapiens
tggctccttgactgggccaggtggcctctgatcactgtcctcccagaacaagtccagtgtggctggagtaagagcacaaaaggagggtagggacagtttaraagggatgtggttattagacagcgcaaacagcacaaacaaccctagacaatgagcatctggggaggaatggaggagctaggacagggccttgaggagtgg

SEQ ID NO: 310571 - DNA, 201 bp, Homo sapiens
ttgcactttaaggtaacagattattgagtaggactggatagctgcaatatctagcagagtgtgttttgggtttgactcttggttctgtcattgatttgctrtcagatgtcagatatgtaggaaaccttctctcagcctcagctgtttgtcatttgtatctatcttatatctgaaatggaggtagttatctagcttagaagg

SEQ ID NO: 310572 - DNA, 201 bp, Homo sapiens
ttagtctctgttaaatgaactaggatttcctttggcttgtacttaaactgcccctgaggtgtccaaggtgcagcctctcactgtggttctgggcctcagcrcccagtctctctggttgcttctccccactcacagaatgtttggtctttgaattcttttcttttagggcctccttgttcttacacagccgagtgtccactg

SEQ ID NO: 310573 - DNA, 201 bp, Homo sapiens
agggattggcagcattggcaagatttgtgtctacccttgggtccatggaatacctttgagaggttctatacggaaataacatgatgggaatcacatggttrcaatgtcactctgccctgtgtaatggagtaaggatagagggagcggagtagaaaagtgggctaagatggattgtccaagtgagagatggtggtgtcctga

SEQ ID NO: 310574 - DNA, 201 bp, Homo sapiens
tctggctcagaactatgccacgccaaacctggataaaacacttgatgaaatgaaaaagggcaatgccgagaaaacccccctagttcatgaggccgactccrgcactgccttctggatacactgattgcaccactcttgagggcctcctttaccatctcaaccaaaggcttttgttttcatctccaacctcagcgattttcg

SEQ ID NO: 310575 - DNA, 201 bp, Homo sapiens
cagcttcccatgaaaattcaattacagaccaagaacaccctggatggcagctgagtgttcttgcactgcagccattgtcagtgaagctggtgtgtgtgtgygtgtgtgtgtgtgtgtgcgcgcgcgcgcgcgtgggtgtcgggggtggtgcatcagcctctgagcttggctcaccgggcctgacagacccacttaagggct

SEQ ID NO: 310576 - DNA, 201 bp, Homo sapiens
tgaaaggcatgccaggttttctaggacaccagcaggttacatatgatggcctattcttgtgcacgttctaaaactgatgggcaaataacaacaacaacaamaaaaaagagctcaaatggttaagctgcaactatagagttaaatagcatcttcatatgctctctgtttctctctttcttttcccacatgctttgaatctgc

SEQ ID NO: 310577 - DNA, 201 bp, Homo sapiens
ggtgtttgtggcaaaagcaaccaacagtaatggtacttgtaagatttggtctcaattatggaagggggcataatcccactatatagtcctggagcaataastctggctgtatatagggcattgcaacaaatggaggccatcaccagaaagcaaaccatcacaataaaaacttcctctcctataaaaggggagatggagggc

SEQ ID NO: 310578 - DNA, 201 bp, Homo sapiens
gtctcactgctcttttgtgtgtgtgtgtgtgagacagaatcttgctctgtcccccaggctggggtgcagtggtgcgatcttggctcactgcaacctccgcytctcaagtagctgggatcacaggtgcccacctgtaatacaaaaacgcctggctaatttttatatttttaggagagatgggttttcaccatgttggccagg

SEQ ID NO: 310579 - DNA, 201 bp, Homo sapiens
agcgctggaggacaccatgaagactgactgaggggaaatggtcccagccgtgctccctgatggagatccgagatactgacgttatcaacatgcagcaacaccaacacctgctagatgcgttaaatgtggatagcacaggcaaggccagaaatttaccaattggctttatgcccacccctgtggagggaaaccctatatagt

SEQ ID NO: 310580 - DNA, 201 bp, Homo sapiens
tctcatcccagggaagatgaagagaaaatggcggatctgggcttgaagtgcacacagtgttggaaaaggccccacctaaggctctaggaccagcagtcccygagaagtagctgtgtgtaggattaagacaagctgactgcggagagctgtgacattgggcattcaagcatgaagcattgttggcccagagagggtgcacaa

SEQ ID NO: 310581 - DNA, 201 bp, Homo sapiens
tttagaagggatgtggttattagacagcgcaaacagcacaaacaaccctagacaatgagcatctggggaggaatggaggagctaggacagggccttgaggrgtggtgcctcaggggcaggcaagagagtggacaggaacactggctgggaaggcacagggtgacaggactgaggagaaagagacttcttccacccagaaat

SEQ ID NO: 310582 - DNA, 201 bp, Homo sapiens
gaagaaaggaatcttgtaattatctcaaaaggcattgacaaaattcatcagccattcacacgataaaagttagaaaaccatgaagagaggaaatgttcttmacattttaaagaacagatataaaaaaccaaaagccagcattagatttaacagtctaggaagttctattaatgggagaatccaatgtcctcttcactactg

SEQ ID NO: 310583 - DNA, 201 bp, Homo sapiens
tggcttggtcagagtcactaaaccattggtaggcaggcaacactctccatggaagactggtatgcgccgttactttggttgcccctgccatggagatttgmtagggtgtgtgtgaccttggcaagttttttaacctttctgagctcatccataaaatggggataataaccatacttcctttctggttggtatgaggattaa

SEQ ID NO: 310584 - DNA, 201 bp, Homo sapiens
ccaacttcaggacttctcagtgcctaccctagggatgggtggcttgccttttcctgcctgctggcacctcctcacccccttgcagcaggcatcctgtactrcctgttcatgctggccctgactctggggacagagttcaggacctcatggaagcctgcccttccgtcttcttttctctgcccttttctttttgcccagctc

SEQ ID NO: 310585 - DNA, 201 bp, Homo sapiens
ttcaattacagaccaagaacaccctggatggcagctgagtgttcttgcactgcagccattgtcagtgaagctggtgtgtgtgtgtgtgtgtgtgtgtgtgygcgcgcgcgcgcgcgtgggtgtcgggggtggtgcatcagcctctgagcttggctcaccgggcctgacagacccacttaagggctggttaatgcggtttct

SEQ ID NO: 310586 - DNA, 201 bp, Homo sapiens
ttgtcttttgctgtagagtgacacccgagatttgtgcttcttgataatagactacctggggcctcacagccccagccctcttgtaggaaatcctgtcctargagcaagggctggagtccgttacgttgtagcttggggcattcttaaatgtcccagactttgtggagatccattgtccacctaagaatttataggatgttt

SEQ ID NO: 310587 - DNA, 201 bp, Homo sapiens
tgcctggtctgttatgggaggttttgacctactcagggaagtaaggaaaatctctctgcctctgagggaatctgaaggattctgaaggttttaatcagggagggaaaaattttttctagacagaaggaacagcatgtataaaggtctggggtggggagggggaatggccagttagagagactggaggaagttcgatgtggt

SEQ ID NO: 310588 - DNA, 201 bp, Homo sapiens
aaaaggaatataaaaacaaatgaatggccacttcctgcaaggcaggaagaccaaggagacatgatcctcagaagtcctgccccttctcaaggctgcagatwttttaggaggatatctgaccaatgctgtggtcctgagctgccaggactccaagaccctgcggaggtcttactcatgcctttggagactaaatcttacagt

SEQ ID NO: 310589 - DNA, 201 bp, Homo sapiens
agtttctttcagtgtttcgggcgaccatctaaacacctttatcagtgcctgggaatgtttaaggccccagcttgggctcaagcctacaggaaaaaaccttyggctgtctgggtcatagagtggtcaaggcatttggtatttgtcaggagagagaaaaaagtgagggaacctgggggaccctacatgagacaatgagttcac

SEQ ID NO: 310590 - DNA, 201 bp, Homo sapiens
gcactaaatgccagggtgatcagtccaaagcatttattagggaaatttctcggtctctgagggggctgcagtacatcctgtaggcagacagcgagacaggsatgttctatctaggtatgcctgctgcaaggggggtctgggtatggaatttatatgagattttaaggaatttggctcagggtcggggctagtttctttcag

SEQ ID NO: 310591 - DNA, 201 bp, Homo sapiens
ggtctctaagactgggtctaggtaggcagtacctcctactagtagcctttcccagctggaaaggcttgggcttttccctccctagacaaagttgctgggcrggcctctgcttatctactagtttttatactagacagagcccctttgatatgtgtggtccctgaatcccccgccttgacctcaactggtgatcagcaaatg

SEQ ID NO: 310592 - DNA, 201 bp, Homo sapiens
gccattggccagggatattgcctagggacagcatggaggtagagcctcatttggcaatgccctggccatgctggggtgaaaggtcataggccatgcctgatcttgagcctaggaagggtctctaagactgggtctaggtaggcagtacctcctactagtagcctttcccagctggaaaggcttgggcttttccctccctag

SEQ ID NO: 310593 - DNA, 201 bp, Homo sapiens
cctgtccgcccagcacagatgtttttactatcccttctggggaaacaccaggttcttccttcggggtggggatggcaggcagacaagtccagactgcttcraggagccattggccagggatattgcctagggacagcatggaggtagagcctcatttggcaatgccctggccatgctggggtgaaaggtcataggccatgc

SEQ ID NO: 310594 - DNA, 201 bp, Homo sapiens
ttctggggattctgccagattatctttcccttttccagggtcaaccaccaggctataagaccagactactggataggccctatttcagaagcagtagggcyactactaggtagccccactcaagccacaagtcttgctgtctgtgtttggccttgagtcaaagcgccagccaactgagacacactcggtctttcctcagtc

SEQ ID NO: 310595 - DNA, 201 bp, Homo sapiens
agtaaggcttcacctctatgatctcacttaacatttattagctttattaaactttttataggactaatctctactggcttcctgacattttaacaaggccwgaaaaaaacattaaaaacactcaactttcagccttttagatagtagctacatcagatgcccaatagctatccttaaccctcaccttatcacctatcccta

SEQ ID NO: 310596 - DNA, 201 bp, Homo sapiens
atcctggagaaaagggaataatgtgtagtgagttccacatttacctttgctttttccctaggggcatttcacacattgttacttgagggaatagggaccargcagaaagcatcagtcttaccagactgaggatacaaaggtcagagttcagggctgccgaagaagatggaaattaagaaggaaaattccagaaggtaggaa

SEQ ID NO: 310597 - DNA, 201 bp, Homo sapiens
caattacagaccaagaacaccctggatggcagctgagtgttcttgcactgcagccattgtcagtgaagctggtgtgtgtgtgtgtgtgtgtgtgtgtgtgygcgcgcgcgcgcgtgggtgtcgggggtggtgcatcagcctctgagcttggctcaccgggcctgacagacccacttaagggctggttaatgcggtttctga

SEQ ID NO: 310598 - DNA, 201 bp, Homo sapiens
ctcaaggggtcctcccacctcagccttctgagtagtttggactataggtgcatgccgccacagctggctattttttttttcatttttattttttctagagrgggggtctcgctatgttgcccaggttagtctcaaactcctggccttgaaagatcctcccgccttggcctcccaaagtgctgggattacaggtgtgggcca

SEQ ID NO: 310599 - DNA, 201 bp, Homo sapiens
gtcccatctgggggtgatgggagacagtgacagatcatcagacgttagattctcataaggaatgtacagcctagatcccttgcttgcacagctcacaatarggttcatactcctggaatcctagaatcctagaatccctactcctagaatcctagaattagagaatctaatgccactgttgatctgacaggagatggagct

SEQ ID NO: 310600 - DNA, 201 bp, Homo sapiens
gaccttaagaagcaggcgtgggagcagggtcccagctcagacgagttccaccttggcattggggtacaccgccaccacgtcgtagccctcgggcggcttcwcgcgcgccttggcgtggctctcacagtagagccgctcgtccagaaagaagtaaccacgctgcttgaggttcaggccgcagtcactgcacatgaagcactc

SEQ ID NO: 310601 - DNA, 201 bp, Homo sapiens
ccctgcaggccgctcagcggagcgcccagcttgctggccgtgggcttgaggttccgggggccgccaggcccgggccaatcccctgaaacccggagcgtagrtggcatgaacggggtgaggaggtcagaactccatttctgcggggtgtttggttgggcgccagacgggccatcggcacccgagactggggaacgggtttgg

SEQ ID NO: 310602 - DNA, 201 bp, Homo sapiens
taagaagcaggcgtgggagcagggtcccagctcagacgagttccaccttggcattggggtacaccgccaccacgtcgtagccctcgggcggcttcacgcgmgccttggcgtggctctcacagtagagccgctcgtccagaaagaagtaaccacgctgcttgaggttcaggccgcagtcactgcacatgaagcactcgggat

SEQ ID NO: 310603 - DNA, 201 bp, Homo sapiens
catctcctagaggctcagttctagctctctgctggtctggggaggacaggctgagtgtgcaaggactgcctgctccacctgacttgcttctccccatcacstggttctgagcataattgccactccttccagaaaaccctactaacccagaaggatagtaataagttactatccttcctccaccctgggctaggccaagtg

SEQ ID NO: 310604 - DNA, 201 bp, Homo sapiens
cacgataaaagttagaaaaccatgaagagaggaaatgttcttaacattttaaagaacagatataaaaaaccaaaagccagcattagatttaacagtctagraagttctattaatgggagaatccaatgtcctcttcactactgttgttcagtgttgctctggaagtcctaaccaggacaatagggtgaaaagaagaaataa

SEQ ID NO: 310605 - DNA, 201 bp, Homo sapiens
aatttactttggcaatgtgattggaatgtatctggctcagaactatgccacgccaaacctggataaaacacttgatgaaatgaaaaagggcaatgccgagaaaacccccctagttcatgaggccgactccagcactgccttctggatacactgattgcaccactcttgagggcctcctttaccatctcaaccaaaggcttt

SEQ ID NO: 310606 - DNA, 201 bp, Homo sapiens
gattggaatgatgcaggatccgggtccaggccagtcattccctcacatgagctcatgttgacatccctgacttaagagaacatcagaggcttacttctgastgtgccttcccacaggggagatgccaggtcaggttctgtacctggagtttgggggtggcccttcttaggggccatgctgtaaacccactcataaggtacc

SEQ ID NO: 310607 - DNA, 201 bp, Homo sapiens
tggaatgatgcaggatccgggtccaggccagtcattccctcacatgagctcatgttgacatccctgacttaagagaacatcagaggcttacttctgactgygccttcccacaggggagatgccaggtcaggttctgtacctggagtttgggggtggcccttcttaggggccatgctgtaaacccactcataaggtaccctg

SEQ ID NO: 310608 - DNA, 201 bp, Homo sapiens
gtacctggagtttgggggtggcccttcttaggggccatgctgtaaacccactcataaggtaccctgagttctaggcagcaggtcagacaagctgcagattmtatggcttctccagctctcccgaaagttctttaaggaagccctcagatttccttttcccctgtaatggccttggtccttggagattgctgtattgctgag

SEQ ID NO: 310609 - DNA, 201 bp, Homo sapiens
ggccaggccaggcagtgtctgtacatacctggatctcaggatcgatgtggatcctgtgtgcctgagccttgctgtcatcaggggcactgggccagctcctrccctcaggcctgtggcagaaattgtgatggtcagatatgtctcctaccacgcccaccatgcctgggagccaggatcaagaggggctgggctctgggctgt

SEQ ID NO: 310610 - DNA, 201 bp, Homo sapiens; identical to SEQ ID NO: 64741

SEQ ID NO: 310611 - DNA, 201 bp, Homo sapiens
ctctcctcttcttataaggacaccagtcgtattcaagtaaggcttcacctctatgatctcacttaacatttattagctttattaaactttttataggactwatctctactggcttcctgacattttaacaaggcctgaaaaaaacattaaaaacactcaactttcagccttttagatagtagctacatcagatgcccaata

SEQ ID NO: 310612 - DNA, 201 bp, Homo sapiens
acatccaaatccttttttgtggtccatgaggcctcaggtgatctgtccctgggatctctgcagctttacctcttattactcccctactgtctgctccaccrttgttccccaatcaagagcttccagggtttggccttggaggcttgtgacaataaactggggagatgtattagtgtgctaaggctgccataacaaaatatc

SEQ ID NO: 310613 - DNA, 201 bp, Homo sapiens
tgctaatgttgttgtgcgtttacctctgtatttgctataaactccataataaatactcattatttttgctttaaacagtcaactgtcttttaagtaatttraaaaacaagaaaacctattttctatttacttgttaggtttactggtagcacttgttcttttgtttagagctgaatttccaacaggtatcaatgagccacc

SEQ ID NO: 310614 - DNA, 201 bp, Homo sapiens
aagacgaatatgttagtggaacaaaagagagtccatagcatgagataaagaaaacattttaattcagggaataaaaggtagtttactcaataactcatgtkggggccatttactattatgcataaaaaataaggctataattctatatgctatataatttcccacattataaagtaaatcccaaatggattcatgatctat

SEQ ID NO: 310615 - DNA, 201 bp, Homo sapiens
gccatgttggccaggctggtctcggtcttgaactcctgacctcatgatccacccaccttggcctcccaaagtgctggaattacagctgtgagccatcgcgyctggccaatttttttttttaattagcaaaagatactcccttttcaattcactttatttccatctactgaaaacttattgtaatgactatgcacatctatg

SEQ ID NO: 310616 - DNA, 201 bp, Homo sapiens
gagccattccctctcccaggctttgctcattctatctcctctgctgcaataccattctcccagacctccaacacttcccctggctgactatgcagggagayccacacctcatcctcctacctgaccactcggcaagtgagtctccccttctgtagtctccctcagcctctgcgattcaccgtcaatttcttcatctgtgcc

SEQ ID NO: 310617 - DNA, 201 bp, Homo sapiens
ttgtgcaaatgtggagagatacaactctcttgtctcttcctcttcttacaaggacaccagtcctattcaagtaagtcttcacccctgcgacctcacttagyctttatcagctttattaacctttttataggtcttatctccaaatgcagtcacatttaggtaagggcttcaacatatgaattttgaggctatgcaattcaa

SEQ ID NO: 310618 - DNA, 201 bp, Homo sapiens
tctcctgcaggagaaaccaggagctctaagagaatgtataatgagaacttctatgtgtggagagttaaacaagaagctgtctcatcccagggaagatgaasagaaaatggcggatctgggcttgaagtgcacacagtgttggaaaaggccccacctaaggctctaggaccagcagtccctgagaagtagctgtgtgtagga

SEQ ID NO: 310619 - DNA, 201 bp, Homo sapiens
atggcctcatctttgtgcaaatgtggagagatacaactctcttgtctcttcctcttcttacaaggacaccagtcctattcaagtaagtcttcacccctgcracctcacttagtctttatcagctttattaacctttttataggtcttatctccaaatgcagtcacatttaggtaagggcttcaacatatgaattttgaggc

SEQ ID NO: 310620 - DNA, 201 bp, Homo sapiens
ggacttgagcttccagcaagaggatgcctgatcaaattgtttgccccctgtgaaatcaccatattaatgggaagataggcttgcttaggaacaacggagtytgtgcctctcctgcaggagaaaccaggagctctaagagaatgtataatgagaacttctatgtgtggagagttaaacaagaagctgtctcatcccagggaa

SEQ ID NO: 310621 - DNA, 201 bp, Homo sapiens
attacaaacaagatagatggatatcacaaccataatgtggagtataagaagccgacccgaaagaatatatattgtataacttcacttttataaagttcaaratctgacaaaactaatcaaaagtgaacaaagaaaaaatagtgcttaactttgggagagtttactgactatgaaaaggtacatggaagccctctggtattc

SEQ ID NO: 310622 - DNA, 201 bp, Homo sapiens
gttgctgggagagtcaggcagagccatgtcgccgagtccagtagctgccagctggccgagaggtctgggaatccaggtgcagggggccatagggattaaartcggaagagccagatccaggcctgtgagggtgaagctgggctgaggttgctggaggctcttgagagaatggattggagcagggcccatgagtcagcctca

SEQ ID NO: 310623 - DNA, 201 bp, Homo sapiens
gaataccacatagcaatgaaaaagaatgaggaactattacaaacaagatagatggatatcacaaccataatgtggagtataagaagccgacccgaaagaayatatattgtataacttcacttttataaagttcaaaatctgacaaaactaatcaaaagtgaacaaagaaaaaatagtgcttaactttgggagagtttactg

SEQ ID NO: 310624 - DNA, 201 bp, Homo sapiens
gaggcccatgctacttccatatttcttcctcccatccttctttttttttttttttaatagcagctagaacgagcttggagcactttcatatttctacgttsccaataaaataaaaaaggaagaaatgtgaaaatagtgtttcaagaattatggcatttgttacttctgctttgtttatttattcatcagatatttttgaga

SEQ ID NO: 310625 - DNA, 201 bp, Homo sapiens
cctgagtggggaggtgcggtggagctgatgaggcagcccatatttgaggataccttcccgtgaggccctgggggctagccagagagctcagctgctgaccygctcctccctggcctggtggcctcaggtctctaggtagagtctgctccattctggctcagctcctggaggccaagacatctctccttcaaggcccagccc

SEQ ID NO: 310626 - DNA, 201 bp, Homo sapiens
cactccccagtaccagcctgtagcccagtagctcagctaggtggctagacccagaagagcaaaaacaatcactacagttcagctctcaggaagccccattcctaggggaagggggagaacaccacatcaagggaacaccccatgggacaaaataatctaaacaacagcccttgaattccagacctgccctctgacatagtc

SEQ ID NO: 310627 - DNA, 201 bp, Homo sapiens
gtgtctgtcttatttatttgtgtctctccagcaccccgcagagaacttggcacacacaaggcattaaaaaacatttgctattaacaacaccacagttacasgaattattatcttagcttaccctttggacatgacccagagggacgcagggagggcataagggggcttaggaaggtgaagaattctgcttctgttgccttc

SEQ ID NO: 310628 - DNA, 201 bp, Homo sapiens
atggcttctccagctctcccgaaagttctttaaggaagccctcagatttccttttcccctgtaatggccttggtccttggagattgctgtattgctgagascctatcatgctggaataccaagtcataaggcagtcacagggtctggaagccctcttcagggtggggatgtgtggtggccaggtcacacatcacccctgcc

SEQ ID NO: 310629 - DNA, 201 bp, Homo sapiens
ttcttgaccactagaactgacatccagggctactcagaaggcaggagaggcccatgctacttccatatttcttcctcccatccttcttttttttttttttyaatagcagctagaacgagcttggagcactttcatatttctacgttcccaataaaataaaaaaggaagaaatgtgaaaatagtgtttcaagaattatggca

SEQ ID NO: 310630 - DNA, 201 bp, Homo sapiens
gggaagataggcttgcttaggaacaacggagtctgtgcctctcctgcaggagaaaccaggagctctaagagaatgtataatgagaacttctatgtgtggakagttaaacaagaagctgtctcatcccagggaagatgaagagaaaatggcggatctgggcttgaagtgcacacagtgttggaaaaggccccacctaaggct

SEQ ID NO: 310631 - DNA, 201 bp, Homo sapiens
tggaaggacaggactcagtcaggaggcaacaaaactggtcctggagccgtggttggttcagcagaacacacaggggagggcgtgcctgtggcaaagggcgtttcccagctctagttttgtgccattcaatccctcaacaaacacttattgagtgcctgctctatgtccagcccagacctggtcaactaaccttggagtgtg

SEQ ID NO: 310632 - DNA, 201 bp, Homo sapiens
cctggttatgaatcatattttcctgcttcttcatatgtttagtaatgtttgactgtatattaggaattgtgaatacttcattgttaagagtttggatcatrtttaaagagtgttgagtttgttttattagatagtaaattcactagaggctcaatttgagcctgaggcttggttttaggctttattatggcaggtctaaga

SEQ ID NO: 310633 - DNA, 201 bp, Homo sapiens
ttcttatcctagtggtggtgagaacaaagggcctatgaactttgatctaggatagatttaaaagaagacaaaaggtatgcaggcatatgtcatgtttctakaaaaatcaatatttttaatttattagtaaattcaatgcaattccaaacaaaatttgtttgggtgggaggaattgacaagatgattctaaggatcaactga

SEQ ID NO: 310634 - DNA, 201 bp, Homo sapiens
atttacctttgctttttccctaggggcatttcacacattgttacttgagggaatagggaccaagcagaaagcatcagtcttaccagactgaggatacaaakgtcagagttcagggctgccgaagaagatggaaattaagaaggaaaattccagaaggtaggaaagaagagagaaggagcccaataattgcatgcaaattcc

SEQ ID NO: 310635 - DNA, 201 bp, Homo sapiens
acccagagactttccaacttttcatccaaaatgtgtgtcatctaatagagaagtatgagacatgctaaaaaacaaaacaaaacacaaacaaaaaaacaggkccaaatgactaaaaatcaagagaaaaggcagacaatggaaatagacccacaggtgtttcagaaatgagagacttccaataattatgatgaaaatgttcaa

SEQ ID NO: 310636 - DNA, 201 bp, Homo sapiens
caagagaaaaggcagacaatggaaatagacccacaggtgtttcagaaatgagagacttccaataattatgatgaaaatgttcaagaaaatagagggaaagwaaaaaaaaaaaaaagatgaaaagctagagaatttaaatatagaattgccagaatactgataaagatagcagataggaggcaggactagcttgcagctcct

SEQ ID NO: 310637 - DNA, 201 bp, Homo sapiens
atcctgtactgcctgttcatgctggccctgactctggggacagagttcaggacctcatggaagcctgcccttccgtcttcttttctctgcccttttctttytgcccagctcctggctagaggaagatgatgaccctgttgtggcccgagtaaatcgtcggatgcagcatatcacagggttaacagtaaagactgcagaatt

SEQ ID NO: 310638 - DNA, 201 bp, Homo sapiens
agagaaaaggcagacaatggaaatagacccacaggtgtttcagaaatgagagacttccaataattatgatgaaaatgttcaagaaaatagagggaaagtaaaaaaaaaaaaaagatgaaaagctagagaatttaaatatagaattgccagaatactgataaagatagcagataggaggcaggactagcttgcagctcctgc

SEQ ID NO: 310639 - DNA, 201 bp, Homo sapiens
gatcatatcacaggactctgcagacactccccagtaccagcctgtagcccagtagctcagctaggtggctagacccagaagagcaaaaacaatcactacarttcagctctcaggaagccccattcctaggggaagggggagaacaccacatcaagggaacaccccatgggacaaaataatctaaacaacagcccttgaatt

SEQ ID NO: 310640 - DNA, 201 bp, Homo sapiens
cacctcctcacccccttgcagcaggcatcctgtactgcctgttcatgctggccctgactctggggacagagttcaggacctcatggaagcctgcccttccrtcttcttttctctgcccttttctttttgcccagctcctggctagaggaagatgatgaccctgttgtggcccgagtaaatcgtcggatgcagcatatcaca

SEQ ID NO: 310641 - DNA, 201 bp, Homo sapiens
gttggaaggatggggcaccaagtggaggggctttttgagcaaggctggggctgctcctttgagtgagccctgttgagctccatgcaccctctggtggccawcctcatttttgcaactacagctctggacaagaaggaagcagctcccctaaaaagattctcccagaaggcctcacacacctttgccctgggacaaaaatag

SEQ ID NO: 310642 - DNA, 201 bp, Homo sapiens
acgcttgcgtatgcatgtgaatccctctgtgcgtgagcatataaatgtgtgtgtgtgtgtgcgtatgtgtgtgtgtttgtgggtgagagccctcttactakaggctatggccaagttgctctgtttttcaggcactagaagctcagggattatcaagcttctcacaggtttatgcaaatgtttgaaacatgaaaaaaatat

SEQ ID NO: 310643 - DNA, 201 bp, Homo sapiens
tagctcaatatatgcatgtcttatgacctaggaatttcactcctggatttttattatatttaaataagtgcttgtgcccaccaaaagacatgtgcaaacayatacaaaacagttttatttaacatgactaaaaacaacccaatgttcatcaacaaaaatggataaattgtgttatattcaaacaatggaataccacatagc

SEQ ID NO: 310644 - DNA, 201 bp, Homo sapiens
aaaaagatgctcaatatcaccagggaaatgttcttttaaattgcaatgagatattgctacacacccaccaaaatgactgaaattggaaaagctaacaatarcaaatgttgacaaagatatgaagcaactggaactctcattcattgccattgggaatgtaattttgttcatccatttagaaaaatggtaatatctacaata

SEQ ID NO: 310645 - DNA, 201 bp, Homo sapiens
tcccgagtagctgggactataggcgcccgccaccatgcccagcgaatttcttttgtattttagtagagacggggtttcaccatgttgcccaggctggtctygaactcctgagctcaggcaatccgcccaccttggcttcccaaagtgctaggattataggcgtgagccaccgtgcccagccagcaatttttaaaattacca

SEQ ID NO: 310646 - DNA, 201 bp, Homo sapiens
gaggctgtgtctgtcttatttatttgtgtctctccagcaccccgcagagaacttggcacacacaaggcattaaaaaacatttgctattaacaacaccacabttacaggaattattatcttagcttaccctttggacatgacccagagggacgcagggagggcataagggggcttaggaaggtgaagaattctgcttctgtt

SEQ ID NO: 310647 - DNA, 201 bp, Homo sapiens
tgtctccattggtcaactgcttgcacttccagattgcacataagtgagggctgaacaggtaccactcgactatttgccattgctcacaagtgtatgtaaayctctatctggaattgttttgtcctccatacaaaatgaatgaacaagtatactgcttacagcttagcccactgggggaatttcccttcaaagttgtttagg

SEQ ID NO: 310648 - DNA, 201 bp, Homo sapiens
atagcactgcaagccaggcctcacacattgaccagctagaagcctatccacgcatcctctgggcatctacagcctctggtggggtgtggggtcaggcgtcygtcggctctggggtaggtggaatggaggctctgaggggtgtgtctttcctcctgctgctgctgccggcagagtcatcactgagtctgcccagcccagatg

SEQ ID NO: 310649 - DNA, 201 bp, Homo sapiens
aagtggggaagcttcagaggtcactcatgggcagagcaatgctgacatttcccccatccagcctgtatctcagtctggaggagggtgatgaatgtgatccrttaatgggaaaggaaaccccgggctcatagaggtcatctgggcacctaaggctccagaggctggatgaggaccagctttgctgaactccaaagatggagc

SEQ ID NO: 310650 - DNA, 201 bp, Homo sapiens
aactttttttaactgcatatatacaatacatatgtatatacaaacattcacttgtatgtatgtgcatatttacctttacaagcttaatcagaacaggattrtgagaggaagagtctgggttaagtaaatcaatataaaaggagtaaatgaccaatatgaatcggggtcagattatagaaagctaatggatttcagacttag

SEQ ID NO: 310651 - DNA, 201 bp, Homo sapiens
agcattctccccttatttgtatatgaaactgaatggcttgtatatttcttgaattatcagggagctaatgttttaggtctatgttagtctttaaattgctsaaagagcttggatttgaaagaaaacaaatttgtagcatcacactaaattagtagtatagatcactaggtgttaaatagcaatatcattacccaaccttac

SEQ ID NO: 310652 - DNA, 201 bp, Homo sapiens
aaaatatactgtgccagctaatgaaaagaaagctgaagtgaccatattaataccagacagaagacatcagaactagggaaaatgaaacattttatgatgakaagaggtcaatttaatgcaaggacacaaaaattctaaatgtaaaacttccaaatatatgaggcagaaacctatggaacagaatggagaaatacacaaatc

SEQ ID NO: 310653 - DNA, 201 bp, Homo sapiens
ttgtagtccattaagttattgaactgtgtttgcaatttggatgcttctttttaacagaaaaaatttaaaaagcagaaaggtcatcagttactacctctcayccagcagcaaccattgggcatattttctttcacttgtctttctgtgcgtatatttatttacctgattgacagtataaatgtaatttttttcacttaccat

SEQ ID NO: 310654 - DNA, 201 bp, Homo sapiens
aaaaacttaactgcatgccagaacaaagttcagtactcattaaaggaataaaacaaaatctttcacccaacaatacaaaattcacaatcaaaagttaacargcatccaaagaagcagggaaataggacccataatcagagaaaaatcaatcatatgaacagatccaaaatgaaagaaataatagaattagtagataagaac

SEQ ID NO: 310655 - DNA, 201 bp, Homo sapiens
gttacactttttagcatgatgaagccatttctaacgggataggtgaagggcctttttttttattcttttaaagaagtacagtatgaattgattaagcaatmgaatagatacactgaaggttattttacatatattcttgattttcattttctgtaggcatggtgaaaaggtcagtctgagctctaagtgtgcagaaattga

SEQ ID NO: 310656 - DNA, 201 bp, Homo sapiens
tactcaagctcatttattccactctaggctgagttataggtgccttaaccttcagctggcatgaacacgcaccttcttctgccccacctaatggttttacractagattgtttggagaaagaagggtttttcttattttttattttattctttttgatagaaattgttctgaagtataatacacatttctttgttttaata

SEQ ID NO: 310657 - DNA, 201 bp, Homo sapiens
catctaaacagagtaataaaaactataaaaaaagacccaagaagctgaatgcatcacaagcagcataaacataactatgttgtacattacattcaaattgytcaaaactaaatataaaatcttaaaaacaggtggaggaaaaagtaacacatcatgcagagggaaagaataatgagtatgattacttcttaggaaaagcaa

SEQ ID NO: 310658 - DNA, 201 bp, Homo sapiens
gtatgccagtcttccttatcctgcgtaggctcttgactcttcattctgactccctcatgggatgcttttccattctgtatacactttgacttctggtgctrgatcatgtcctcattccccgcccttctctgataccaggtggcctcttgcagggatgcccactgtactctgacctgaatctccccagatctgtgtcactga

SEQ ID NO: 310659 - DNA, 201 bp, Homo sapiens
ttaaataggaatctgtctattgggagattttgagcagggaaaggacatggtctgatttatcttttaaagtgctcagtctggttgctgagagaagactgtcygtaggtagcaaagatagggcagagacaaattaagaagattttgtgatgatccaggtgagaaatataggtggcttcattaaggtagtggtagaatggtgag

SEQ ID NO: 310660 - DNA, 201 bp, Homo sapiens
tttgcacatatagaagtgaaacaacaatacacacacacacacacacacacacacatatatatatagtttattcgtttttagtggggtcatgtgcctctctmgccgctccctgaccccagttccactatgttttcgttacgtattcttccaagcttttttctgcttataaaaccatgtctacgtgagcacataaatgcattc

SEQ ID NO: 310661 - DNA, 201 bp, Homo sapiens
atctctcttggatgagcttattcagtctaacggctttaagtactggttatgtgctggtaactaccacatttatatatttgaccctgacttctttccttaaytctagacatatatgtctagctgtttgtttggatatttaatgggcatctcaaatttaacatgttcaaaacagaactcttgattccttgtacccacttcctg

SEQ ID NO: 310662 - DNA, 201 bp, Homo sapiens
gggagaatcgcttgaaccggggaggtggaggttgcagtgagccgagatcacgccattgcactacaccagcctgggtgacagagggagactctctccccccmcaaaaaaaaaaaaaaaaaaaaaaaagtttctacaggctgggcatggtggctgacgactgtaatccgagccgtttgggaggctgaggctgggggattgctt

SEQ ID NO: 310663 - DNA, 201 bp, Homo sapiens
cacacacacacacacacacacatatatatatagtttattcgtttttagtggggtcatgtgcctctctagccgctccctgaccccagttccactatgttttygttacgtattcttccaagcttttttctgcttataaaaccatgtctacgtgagcacataaatgcattcacacatacatattttagcacattaatataattt

SEQ ID NO: 310664 - DNA, 201 bp, Homo sapiens
tagttcttgtattcctgtgagtccctaagccagacctaagtgaggagtcaggccatgtgtccctactgtctggagaggagaagagactcctgcctggctgkcctgaaggcctggggccacccctccacttcctgcagggtagctggggccctgacacacagcacaagttcatgtgtctgacaaggtttgcggtgacttttc

SEQ ID NO: 310665 - DNA, 201 bp, Homo sapiens
actattcgtatgtgtaaaggacatagaatttggtctataggtttgtttttgcacatatagaagtgaaacaacaatacacacacacacacacacacacacayatatatatatagtttattcgtttttagtggggtcatgtgcctctctagccgctccctgaccccagttccactatgttttcgttacgtattcttccaagct

SEQ ID NO: 310666 - DNA, 201 bp, Homo sapiens
agtgctaggattacaggcataagccaccatgcccaaccaagaggactttttttttttttaaatatgggaaagcaattgcctaagagtgcagtcaggttgayttcaaattccaactctgctgggtgaccttagggatgttacttaacccatttgggccttcgtatcccccacgtaaagtgaggggattgatttacatgatca

SEQ ID NO: 310667 - DNA, 201 bp, Homo sapiens
aagagcgtgaactctggagctggactgggttaaaatcttggctgcttcatttactggctgttgtgaccctggacaaatcattctctgtgtctgtttgctcrtttgaaatataggactgaaaatgatggtactgtcctcatagggtcattgaaaggagcaaatgagttgacttttagagcctggcacatagaaagtgctttt

SEQ ID NO: 310668 - DNA, 201 bp, Homo sapiens
gaggcagtagtttgagaataaaaaggaaggagaggaataaggtagtatcttgaaaagaaaaagatcaaatggataaaatttgaaattggtagaaagtacaygtagtagaaatatgagcttagttctgtgttagactgttatacaataaatggcagaaattaacatcgtattatattttaggaccctagctatcacggctcc

SEQ ID NO: 310669 - DNA, 201 bp, Homo sapiens
gttcaagactcttctgagcagtgataccagcaatttagttcagtcctaaagaactgagggtcctgggaatttaaccatgtcagtgtagtcttttttacatygctagcataaaaatgggtgccctttaaagatttttttaagattaagaaactagaagacaggaggagccaaatcaggactgtaaggtggatgcctaatgat

SEQ ID NO: 310670 - DNA, 201 bp, Homo sapiens
tcagaatcttaaagtgcttgaggacctctgttttgaactgtggttatcatataactacgttgtagatttagtgttacaaggctaaataatggggacttctrtttagtaaaatagtttattacttgaaagccccgttccttccaaaatagttgtggagacaccaacattagtttaacagtatgcttttattaccatgaaata

SEQ ID NO: 310671 - DNA, 201 bp, Homo sapiens
agtgctttacttagcgtctaaaggccaggaactttatcagtgatcacatgctatgagggttctgtaatacacaaaattagctatttagcaacctatgtgcrgcagagatatggaaggaagagaggggttttctttagtaccaaagccctaaataataagcaaggagagactctgttataatatactgattgctaaggagaa

SEQ ID NO: 310672 - DNA, 201 bp, Homo sapiens
tatttgacttaaaatcatatgcattagttctcaaagtggtcgtggagcaccattatcagtatcaccttggaacatgttagaaatgcctctcagcttctacyccagacctcgatcaaaaatttgagaggtagggcccagcagtctatttttgacagacattttgggtgattctgatgcacatcaaagtttaaaaaccatagc

SEQ ID NO: 310673 - DNA, 201 bp, Homo sapiens
aggctcttgaatcctcccagccagagaaagagtttccacaccagccattgttttcctctggtaatgtcagcctcatctgttgttcctaggcttacttgatrtgtttgtaaatgacaaaaggctacagagcataggttcctctaaaatattcttcttcctgtgtcagatattgaatacatagaaatacggtctgatgccgat

SEQ ID NO: 310674 - DNA, 201 bp, Homo sapiens
tacaagataaccttactttaagaaaaagaaatgaggaactaaaagaagttgaagaagaaagaaaacaacatttgaaggaaatgggtcaaatgcaggttttrcaaatgaaaaggtatgcttttaaaataatcttcagtttaaataaacgtctttattactggaatgtgaagaatattaaatacctgttttaaaagaatttta

SEQ ID NO: 310675 - DNA, 201 bp, Homo sapiens
aatggaagtaagtcgcctcacatcctcacatcctttgtatgatgatcgcagtaatgtttgcctttttaccactggtgcaacatttattagttcataaaccygcttccaaagaacctaagggctttttgatgaaaggtgactgtggtgggaacaatgttaggttttgacaggctacttttgcttttacaaacatttctcctc

SEQ ID NO: 310676 - DNA, 201 bp, Homo sapiens
ttattactggaatgtgaagaatattaaatacctgttttaaaagaattttagcctcagcctggtatcctttgagagttactagaaggtgaacagtgttttgrtacaattatatttcatggccttaagaactttattactgaagaagtgatatagaattggtaatcacactgtagtgatgggccttagttattcagtattgaa

SEQ ID NO: 310677 - DNA, 201 bp, Homo sapiens
tccctgagctgtcctagataggttagatgctcctgctttgtactcccagattatcctgtgcttatgatggtgtttagcacaccttgtctacatttaacctrtcttgcatgcttcaaaggaaaaaaagtctgtcagtttgaaccaaaacaacacatgaaacctacaaagtgcctgtaaatatttgttgaatgattaattgaa

SEQ ID NO: 310678 - DNA, 201 bp, Homo sapiens
cctagcacctcatatgggctgactccatccctgtatgccagtcttccttatcctgcgtaggctcttgactcttcattctgactccctcatgggatgctttyccattctgtatacactttgacttctggtgctagatcatgtcctcattccccgcccttctctgataccaggtggcctcttgcagggatgcccactgtactc

SEQ ID NO: 310679 - DNA, 201 bp, Homo sapiens
ttttaaaagaattttagcctcagcctggtatcctttgagagttactagaaggtgaacagtgttttgatacaattatatttcatggccttaagaactttatyactgaagaagtgatatagaattggtaatcacactgtagtgatgggccttagttattcagtattgaacatgcttagtccccatacatctgctagcctgctg

SEQ ID NO: 310680 - DNA, 201 bp, Homo sapiens
tggaggttgcagtgagccgagatcacgccattgcactacaccagcctgggtgacagagggagactctctccccccacaaaaaaaaaaaaaaaaaaaaaaaagtttctacaggctgggcatggtggctgacgactgtaatccgagccgtttgggaggctgaggctgggggattgcttgagcccaggaggtcgagaggtcgag

SEQ ID NO: 310681 - DNA, 201 bp, Homo sapiens
gagaaagaaaggcctaagaagatgtggtttgtggcagccaacttctaagatggtccctagtaatctcggcctcttggtatttatactcttgtatagtcccmtctcatgctgttgcatgattggtctatataactgataaaacaggcagaagtgatagcatggcctttccaacattaggttatttaaggtactatggcttct

SEQ ID NO: 310682 - DNA, 201 bp, Homo sapiens
gttgacatgccactttctgaacccagcaaaagaatttaagtattgaaaagttctcccagaagacagattttaaactatgtttttaatgtcttttccacttkctaaaagaatgaatcatagatgattttcggttgtttatattttccatcacttatacaagaaattcgtgttatgttctgtttacaaacaaaaatcaagtca

SEQ ID NO: 310683 - DNA, 201 bp, Homo sapiens
ccacgcccagctaatttttgtaatttttagtagagatggagtttcaccatgttggccaggctaatctcgagctcctggcctcaaagtgattggcccacctyggcctcccaaagtgctgggatcacaggtgtgagcaccgtgcatagccagtaagcttatttcttaaactatgaggtagacacagtctttacgttcttttgt

SEQ ID NO: 310684 - DNA, 201 bp, Homo sapiens
ttgtactaaatactagcagaagggagagtagtactgtatagtgtttatgaggactggctgcctcaatacagctttttcgcttcatttattagttgtctgaktgtttgcgagtgacctcactgctctgtgccttagttttctcatttataaaatggagattaaaaatagtttctacagctgggcacggtggctcacgcctgt

SEQ ID NO: 310685 - DNA, 201 bp, Homo sapiens
tctatggtgttggctattgtttctgctgttaatcattgatcttcttcagttagggcatgaagaagatgattttttttcctcacaaattgatgtgaacagtstgtcactgtgggcttcatctttaatatcgtctcatcccttcttaaactgagttatccatttgtaaactgctgatttgtttggggcattgatctcataaac

SEQ ID NO: 310686 - DNA, 201 bp, Homo sapiens
agcagaagcgtccctagggctccacaggtgtaggcccttaaagtgccttagggtgtggcctgcaggctacagcgaccttaggagtttgcctgaagcagtcycggaaggatgtccggacctggcctggggacaaggtttacttaagaatcccacgataccgggagctgtcgccgctcactcagagttcagttcccactggat

SEQ ID NO: 310687 - DNA, 201 bp, Homo sapiens
gttgtctgcagctgatctggaagcagtgattttgggcatccatcaagtagaacgtttactcaactttaatttttcagtcagaattgtgtaacctgaatcarttgaggtgtctatggtgttggctattgtttctgctgttaatcattgatcttcttcagttagggcatgaagaagatgattttttttcctcacaaattgatg

SEQ ID NO: 310688 - DNA, 201 bp, Homo sapiens
aatgctttggctagctttctcagaacactctcataataagcagttgttacctttcttcggccctccagaaagtcagcaagcaaaatgccttgagcatcccmaacaactgttgccatgacctttgctcttatctggtctgcttttgctttgactggaccacttccaccacttgttagccattgctttcattgtgctttgtct

SEQ ID NO: 310689 - DNA, 201 bp, Homo sapiens
ttatttactaattctctaccattataacatagtaaggtcactttaataagatataccttagagcatatatagtgccttatgtttttttctcttgttggatrcaaacagtaatatttggaacattctgaggagtagttaatttctaatacactttgtcattattttaattcttgcacaaaatatataacacctttgcatttg

SEQ ID NO: 310690 - DNA, 201 bp, Homo sapiens
gggaggcagaggttgcagtgagccaagattgcgccactgctctccagcctgggtgacagagtgggactccatctcaaaaaaaagaaaaagaacacttgccraagttttaaaaaagcaagtatttttcctctaggtcacacacgttgtaattctagatgatttttgctgtattattactttttctgtgttaaaaactttctt

SEQ ID NO: 310691 - DNA, 201 bp, Homo sapiens
aagtcacctttgccccagttcccaacaagttccttatctccatctgagaccacctcaacctggatttcattgtccatatcctcatcagcattttggtcaaygccattcaacaaatctctagggagttccaaactttcccatattttcctctcttctgagccttctaaactgttccatcctctgcctgttacccagttccaa

SEQ ID NO: 310692 - DNA, 201 bp, Homo sapiens
gtaaaataaaattttgatgtcagttcagcttaagcttctaaatcattctcgctgaaccaaagcttccagttggtaaaaatctaagatctgaggaataaaascaacataagaagctgacttttggtaagccttaacagtgatagaagagggacaaggtggcagttcgattctcctattttccccatagactgcaggcccctt

SEQ ID NO: 310693 - DNA, 201 bp, Homo sapiens
caaggttgtcaagcagctcttgcataaggactatgctggcagagaaaaaggcagtttccctgaggtcaaaggaggtgtttcaggcactcctggctccagayagtccctttctggcagagagggccagaaggagagctcagcagcgcagggccacctttctgcagccatcatcacaagtaagggcgagtgcttttgaaacct

SEQ ID NO: 310694 - DNA, 201 bp, Homo sapiens
atctgacttccccctagccgacttaaccctcaggtgggcccccttctcatcattatcaggctctgaatccccacactattccctggcgtggacactctgcktctgagctggatcccccctatttgtggattcctctttcatcctgctggaactctgataccattggactcttgaaactctgtctatgccaagctgtttccc

SEQ ID NO: 310695 - DNA, 201 bp, Homo sapiens
gaagaattaatcaacaaaaaaaatacaagcaacaaaatagcacaggataaagtaagatttcatttatatatttacttatcaaatatctgtattaaacttaygttcatagcaccacgtcggacacttatttcacatgaaattaaatagcataagataaatagtattttcagattcatggtataattttgacattagaaattc

SEQ ID NO: 310696 - DNA, 201 bp, Homo sapiens
ttgaaaggagcaaatgagttgacttttagagcctggcacatagaaagtgcttttattaagactgtgaagtctgacccctaaagtaagataatggaatattrtataatactttatcttttttatatttttaggatgctaaagagcaggtaagccctttggaaacaacattggaaaagttccagcaagaaaaagaagaattaa

SEQ ID NO: 310697 - DNA, 201 bp, Homo sapiens
ttacaattagattcctgggaagcacaaacatttaaaatgttagcaggcaaaggaaaaggagcaagtgaaggaaactgggatgtgcccagggaaccagggtkagagccagatagctgtggtgtctaggtgccttgggaaaatagtcttcaaggagaaggtcaacagtgtttggtgctacgtagaggtagagtaagatgaaga

SEQ ID NO: 310698 - DNA, 201 bp, Homo sapiens
ctgttcatttgtggcaggagaattattacttaccttagattttggtggtggttgttttttccagaatggcaaatatcttccttagcactaagagagttacmcagagagcttctcttctaagacttctggtcagatacagcatagtcaacagaccaacctgagcagtggcattcagaccacagggctcaggaagacaggaga

SEQ ID NO: 310699 - DNA, 201 bp, Homo sapiens
gagccagtgcgcctggccatgagctgtattctttctcattcatacctgccctgtaagctttccctgtgagtggccagcagggaacatcaagctgatttgaraactagcagggttctcattgtatttttgttgcagtgggtggggcccacagaaatagcatttgtggattccatagaccgataaaaatgggaagaatgatac

SEQ ID NO: 310700 - DNA, 201 bp, Homo sapiens; identical to SEQ ID NO: 64791

SEQ ID NO: 310701 - DNA, 201 bp, Homo sapiens
cacatatatagaatcatacagtatgcagacttttgtgtctgggatttatctatgttgctgcatgtgtgagtaattcattccttttttttttttttttttttgagacggagtttcactcttattgcccaggctggagtgcaatggcatgatctcggctcactgcaacctccgtctcccaggttcaagcaattctcctacctc

SEQ ID NO: 310702 - DNA, 201 bp, Homo sapiens
gggaggattgcttgagctggggagttcaaggctgcagtgagcccttactacgccactgcactccagcctgggcaacagagcaagaccctgtctcaaaaaawatatatatatatatgtctatgtctccaatccacaccagtaaatcagaatcttgggggtttgggcagagatatgtgtgttttgttgaaattccttagaggt

SEQ ID NO: 310703 - DNA, 201 bp, Homo sapiens
ggcttgccatgtgtaccgacacagctgctttccacagtttaaaaagaaagtctgagcaacatagtgacatcccatctttacataaaatttttaaaaaattrgcaaggcatggtggtgcacacctgtagtctcagctacttggctgagataggatccctggagtctgagggttcaaggctgcagtgagctgtgatttgtgcc

SEQ ID NO: 310704 - DNA, 201 bp, Homo sapiens
gcacatgttagttactggcttgccatgtgtaccgacacagctgctttccacagtttaaaaagaaagtctgagcaacatagtgacatcccatctttacatamaatttttaaaaaattagcaaggcatggtggtgcacacctgtagtctcagctacttggctgagataggatccctggagtctgagggttcaaggctgcagtg

SEQ ID NO: 310705 - DNA, 201 bp, Homo sapiens; identical to SEQ ID NO: 64785

SEQ ID NO: 310706 - DNA, 201 bp, Homo sapiens
taagtgggcaattagagtttggtgccccagggagactctggggagtttggcaaaatatatacctcagaattatcccacctaaggggcaagagacctggagwatttatataacaacttgccagggttactgagtgaaggctattctagcacatgttagttactggcttgccatgtgtaccgacacagctgctttccacagtt

SEQ ID NO: 310707 - DNA, 201 bp, Homo sapiens
tttactattaagccagctacggtaagtgggcaattagagtttggtgccccagggagactctggggagtttggcaaaatatatacctcagaattatcccacytaaggggcaagagacctggagtatttatataacaacttgccagggttactgagtgaaggctattctagcacatgttagttactggcttgccatgtgtacc

SEQ ID NO: 310708 - DNA, 201 bp, Homo sapiens
taccatatagtctatgtgtgtattaaactataccatgtaggcttatgtaaatacattctgatgttcacacaatgataaaattgcctaatgatgcatttctyggaatatatccctgctgagcaacacacgactgtacttttttgtattttcttcagtgtacatatattccttttgcaattaaaaaacttaaattgtttagta

SEQ ID NO: 310709 - DNA, 201 bp, Homo sapiens
caaagtattcagtacagtaatatgctgtataggtttgtagcccataaacaataggctataccatatagtctatgtgtgtattaaactataccatgtaggcytatgtaaatacattctgatgttcacacaatgataaaattgcctaatgatgcatttcttggaatatatccctgctgagcaacacacgactgtacttttttg

SEQ ID NO: 310710 - DNA, 201 bp, Homo sapiens
atcatgttacagttgccaaagtattcagtacagtaatatgctgtataggtttgtagcccataaacaataggctataccatatagtctatgtgtgtattaarctataccatgtaggcttatgtaaatacattctgatgttcacacaatgataaaattgcctaatgatgcatttcttggaatatatccctgctgagcaacaca

SEQ ID NO: 310711 - DNA, 201 bp, Homo sapiens
atatagaacttaatatacacacatccacatgctcaggggtacaaataaaattggggaaatttgaataagattgatgaattatatcaatatcagtattctgrttgtgatattttactgcagttttgcaaaatgttatcattgggagaaactgggcaaaatgtacaagagacacactgcattattttttataactcgtgaatc

SEQ ID NO: 310712 - DNA, 201 bp, Homo sapiens
ctttacttgctcagagtcctctgtggttgagcaagctttggattaaagtatactcttcatgtaaatttgcctataggctcagaatgcattggtaactcacmatgaatttctagccttctcagtagtcctgacttaaaaaaatacattaaatagttacctttttaaggattaagtaactctaaatgcccaatgaatgaataa

SEQ ID NO: 310713 - DNA, 201 bp, Homo sapiens
tatgtttttttctcattggtgatataatttattttcttaaaatagccatgctggctggagccacagcagtttactcccagttcattactcagctaacagaygaaaaccagtcatgttgccccgtttgtcagagagtttttcagacagaggctgagttacaagaagtcatcagtgatttgcagtctaaactgcgacttgctc

SEQ ID NO: 310714 - DNA, 201 bp, Homo sapiens; identical to SEQ ID NO: 64786

SEQ ID NO: 310715 - DNA, 201 bp, Homo sapiens
gttgcaggataataaaaagtcgctcacagcagcgtaacttccagcttctggtaatcactcatgatgaagattttgtggagcttttaggacgttctgaataygtggagaaattctacaggattaaaaagaacatcgatcagtgctcagagattgtgaaatgcagtgttagctccctgggattcaatgttcattaaaaatatc

SEQ ID NO: 310716 - DNA, 201 bp, Homo sapiens
tgaggtaaaagttgaggtttactttcttacatacaaatgtccacttcttctagcacccagagcctagtcattatgataccctgccttctaatcttattgtyatcttgtctcccaatcttaactatacaattttgtacaagtcagttaagtcctttgaatttcctgcttagtatatacttttgtgaggattagagagaattt

SEQ ID NO: 310717 - DNA, 201 bp, Homo sapiens
ttgtttttcatctttagtcagcttccttttgtttacatcatttgaattgctgataattaatttcacttttatcctattaaactttgctaaaattgtatctrgaaatggtttataagtttagatttaaaaaataaatgataagagcaattaatttttaaagattttgaataatgcagtaagtttattaaaggaaatcatttt

SEQ ID NO: 310718 - DNA, 201 bp, Homo sapiens
cacttttggtcaatatgaccagttcattagtagaatatttctcagtttgacaaacaccacagtaataattattgcaagcaagatctgtcagtggatactamaatcagtaggcagaaagttgagaagcaagatatttacatagtctcaacatttctctcctaagatacttgttaattacaaagactaaaacagtaactttac

SEQ ID NO: 310719 - DNA, 201 bp, Homo sapiens
atttgaactggcagaagaaagaatcagtgagttcaaagaccggtcaattgagattatacagtctgaggaatagacagaagaatgaagaaaaatgaagagagcttcagagacctttgagacactatcaagtgtaccaaaatgccaagtataccaatcataatgagaatcccagaagagagagagagagaaaggagcagaaag

SEQ ID NO: 310720 - DNA, 201 bp, Homo sapiens
aatttgaactggcagaagaaagaatcagtgagttcaaagaccggtcaattgagattatacagtctgaggaatagacagaagaatgaagaaaaatgaagagagcttcagagacctttgagacactatcaagtgtaccaaaatgccaagtataccaatcataatgagaatcccagaagagagagagagagaaaggagcagaaa

SEQ ID NO: 310721 - DNA, 201 bp, Homo sapiens
agcaaatttgaactggcagaagaaagaatcagtgagttcaaagaccggtcaattgagattatacagtctgaggaatagacagaagaatgaagaaaaatgaagagagcttcagagacctttgagacactatcaagtgtaccaaaatgccaagtataccaatcataatgagaatcccagaagagagagagagagaaaggagca

SEQ ID NO: 310722 - DNA, 201 bp, Homo sapiens
gtaactcaagaaaatgtgtttctcacaggggtgtgggttagcaatttcgaaatttttatgtacatactaaagtcaaacaaatacatacctgtgttgtagayaatacgaactgagtttctcactgttggaaaaaggtgtttgcatatcaggaaaggaggccataaaaagaaccccttggtgttgattgaatccaaaggatct

SEQ ID NO: 310723 - DNA, 201 bp, Homo sapiens
cataataggttctgtcatagtgtagatagggataagccaaaatgcaataagaaaaaccatccagaggaaactcttttttttttctttttcttttttttttttccagatggagtctcgcacttctctgtcacccgggctggagcgcagtggtgcaatcttggctcactgcaacctccacctcctgggttcaggtgattctcc

SEQ ID NO: 310724 - DNA, 201 bp, Homo sapiens
tcagaaaagtttgaatattttacttttttggtcattattatggtttttacacttgtgcaagagaaattttgttttcatggaggaatctaaatttttaatawgtattactgcagaaaattaatatatgatttaattcgtattgtgcctttgacatgagcaaaatgatgatgaagcctgttatccataacttcttagtgttga

SEQ ID NO: 310725 - DNA, 201 bp, Homo sapiens
tttctaagcatgtctttgagattttctaagaattcttatcttggcaacatcttgtagcaagaaaatgtaaagttttctgttccagagcctaacaggacttacatatttgactgcagtaggcattatatttagctgatgacataataggttctgtcatagtgtagatagggataagccaaaatgcaataagaaaaaccatcc

SEQ ID NO: 310726 - DNA, 201 bp, Homo sapiens
aaaagatggaattttgactgccttttcaattttaactgtcatattcaagggctgttaatatcctagccacttttctctgatcttgaacaagtcactgattkcattgaatcttagttttgttaatggtaaatagagataacagtatctaattcccagtattgtcgtaaggattaaatgaaattgattatttagcatagtttt

SEQ ID NO: 310727 - DNA, 201 bp, Homo sapiens
tgttaagaaatccttccctactcctctctctctctctctctctctctctctactcctctctctctctctctctctctatatatatatatataaagatatatatatataaagatatatatatataaagatatatatatatagagagagagagagagagagatatatcttttttttttttgagacggagtctcactcagtcgc

SEQ ID NO: 310728 - DNA, 201 bp, Homo sapiens
gtcacagaggcatgctgagcagaatgaggacctatgagggagcttggtggagcctggcggggtggagaggtacaggagtgctttctagcaatttaggcttrttaaggaacaaagccaggctgtttactgagttctcttacctggtactcagatggattcttctaaatgaaaagaggtgatacaaatttccccaaaattgag

SEQ ID NO: 310729 - DNA, 201 bp, Homo sapiens
ctccatagtctgtttttgacctgggcctgggataagaaggaagggcttttcagcagagaaaagtgcctcagtcacagaggcatgctgagcagaatgaggayctatgagggagcttggtggagcctggcggggtggagaggtacaggagtgctttctagcaatttaggcttgttaaggaacaaagccaggctgtttactgag

SEQ ID NO: 310730 - DNA, 201 bp, Homo sapiens; identical to SEQ ID NO: 64790

SEQ ID NO: 310731 - DNA, 201 bp, Homo sapiens
taatttctcctattttaaaatgaaaatccatatttgctcttattttagcaaggaactagcttcatctgagcagaataaaaatcatataaataatgaactaraaagaaaggaagagcagttgtccagttacgaagacaagctgtttgatgtttgtggtagccaggattttgaaagtgatttagacaggcttaaagaggaaat

SEQ ID NO: 310732 - DNA, 201 bp, Homo sapiens
acaaattattcatatatatccctcatccagctcctcctgatgttaacaatttatgtactctgttataatacagttatcaaaaccaggattaacattgatayaatgctactaactaaattacagaccatatcgaatttagcagtttttccatcaatgccttttctgtttcagggttccatgcaggatcccacgtagcatcta

SEQ ID NO: 310733 - DNA, 201 bp, Homo sapiens
gaaatttcacagtatgaaaatggaagaaatcaataaaattatacgtgacctgtggcgaagtacctatcgtggacaaggtgagtaccatggtgtatcacaartgctctttccaaagccctctccgcagctcttccccttatgacctctcatcatgccagcattacctccctggacccctttctaagcatgtctttgagattt

SEQ ID NO: 310734 - DNA, 201 bp, Homo sapiens
aaatgggaattgctagaggaatatgtttctaactttttttttctgcacacaagttcatggtccttctatacttgatagcccagctgctctattttttttakctcatttcacactggcacctaagctttaaacccttggctgtttttgttattgttgtctgcctgcttgtcctagctccttttactaggtgtgtactctggg

SEQ ID NO: 310735 - DNA, 201 bp, Homo sapiens
cttgttaagaaatccttccctactcctctctctctctctctctctctctctctactcctctctctctctctctctctctatatatatatatataaagatatatatatataaagatatatatatataaagatatatatatatagagagagagagagagagagatatatcttttttttttttgagacggagtctcactcagtc

SEQ ID NO: 310736 - DNA, 201 bp, Homo sapiens
tgtcttgttaagaaatccttccctactcctctctctctctctctctctctctctctactcctctctctctctctctctctctatatatatatatataaagatatatatatataaagatatatatatataaagatatatatatatagagagagagagagagagagatatatcttttttttttttgagacggagtctcactca

SEQ ID NO: 310737 - DNA, 201 bp, Homo sapiens
gtgtcttgttaagaaatccttccctactcctctctctctctctctctctctctctctactcctctctctctctctctctctctatatatatatatataaagatatatatatataaagatatatatatataaagatatatatatatagagagagagagagagagagatatatcttttttttttttgagacggagtctcactc

SEQ ID NO: 310738 - DNA, 201 bp, Homo sapiens
tgtgtcttgttaagaaatccttccctactcctctctctctctctctctctctctctctactcctctctctctctctctctctctatatatatatatataaagatatatatatataaagatatatatatataaagatatatatatatagagagagagagagagagagatatatcttttttttttttgagacggagtctcact

SEQ ID NO: 310739 - DNA, 201 bp, Homo sapiens
gtgtgtcttgttaagaaatccttccctactcctctctctctctctctctctctctctctactcctctctctctctctctctctctatatatatatatataaagatatatatatataaagatatatatatataaagatatatatatatagagagagagagagagagagatatatcttttttttttttgagacggagtctcac

SEQ ID NO: 310740 - DNA, 201 bp, Homo sapiens
tttctggttagctctttgtgtgtcttgttaagaaatccttccctactcctctctctctctctctctctctctctctactcctctctctctctctctctctmtatatatatatatataaagatatatatatataaagatatatatatataaagatatatatatatagagagagagagagagagagatatatctttttttttt

SEQ ID NO: 310741 - DNA, 201 bp, Homo sapiens
gcttatttgagattaggtaaagtccagtgagggtaaaattgcacaccttttaccacattcacctggggtcagtgtagacgccaaggttgtcaagcagctcytgcataaggactatgctggcagagaaaaaggcagtttccctgaggtcaaaggaggtgtttcaggcactcctggctccagacagtccctttctggcagaga

SEQ ID NO: 310742 - DNA, 201 bp, Homo sapiens
cagaaaagtttgaatattttacttttttggtcattattatggtttttacacttgtgcaagagaaattttgttttcatggaggaatctaaatttttaataagtattactgcagaaaattaatatatgatttaattcgtattgtgcctttgacatgagcaaaatgatgatgaagcctgttatccataacttcttagtgttgat

SEQ ID NO: 310743 - DNA, 201 bp, Homo sapiens
cctatcaactcacagatgtatcacattctttttaatgattataaaatagtccattttgtgtatataccagcacttactcagattgatttcatttccttatsacaaactgtgtgacaatgaacatctttaacatgtatctgtatcttttcttattctaacatatctttatgtagcataaattcacaaaagacggattaaggt

SEQ ID NO: 310744 - DNA, 201 bp, Homo sapiens
ttggaaggccgaggcgggtggatcacttgaggccaggagatcaagaccagcctggccaacacagtgaaaccctgtctgtactgaaaatacaaaaattagcyggccgtggcggcgcgcacctgtagtcccagctactcgggaagctgaggcatgagaatcacctgaacctgggaggcagaggttgcagtgagctgtgattgt

SEQ ID NO: 310745 - DNA, 201 bp, Homo sapiens
atttttttagagcagttttgggtttatagcaaaattgggcagaaagtactgagcttccattttctccctacccccacgcacacacagcctcctccactatsaacatttgattttttgtggatactatttgtcagttaaatagaatgatcccatgaaagacttagggttatgttccattctcttgagtaatttctgaacagt

SEQ ID NO: 310746 - DNA, 201 bp, Homo sapiens
atttcatggccttaagaactttattactgaagaagtgatatagaattggtaatcacactgtagtgatgggccttagttattcagtattgaacatgcttagyccccatacatctgctagcctgctgcacagaatagtggtactaagcataaagaatatggagctgtggaccttgtctgggtcagagcttgtacagtctataa

SEQ ID NO: 310747 - DNA, 201 bp, Homo sapiens
aaagatacataacctgattctagtcgtgaggaaatattacccaaattttgggaggtattctgcaaaataatggtctgtacttttcaaaattatcagtcatkaaagtcaaggaaaatctgagcaactatttcaggctgaaagaaagtaaagagacataaccaccaaatacaaagtgtaattctgaactgaatccttttgctc

SEQ ID NO: 310748 - DNA, 201 bp, Homo sapiens
taagctatccatgtataggatgagatttaatgagggctagtagagaacaactaccaaggtggcaagtggggctgtgagtgttgtattctaaaggtcacacmatgctgtgagacatttgagtcctgatgtgccagaatggagtgaccttgtggaactctccagtgttcacttgagacctcagaaaggcccacctaacaaata

SEQ ID NO: 310749 - DNA, 201 bp, Homo sapiens
gtatgataaaatagacctatattgaagtaattactaaataattgtatctacctctatagattcactcagtacttcagaatcttaaagtgcttgaggacctytgttttgaactgtggttatcatataactacgttgtagatttagtgttacaaggctaaataatggggacttctatttagtaaaatagtttattacttgaaa

SEQ ID NO: 310750 - DNA, 201 bp, Homo sapiens
cactaaatgcccacaagagaaagcaggaaataactgaattcaacaccttaacatcaaaattaaaagaactagagaaacaagagcaaacaaattcaaaagcyagcagaagacaagaaataactaagattagagcagaactgaaggagatacacgaaaaacccttcaaaaaaatcaatgaatccaggaactggttttttaaaa

SEQ ID NO: 310751 - DNA, 201 bp, Homo sapiens
ctagcacatgttagttactggcttgccatgtgtaccgacacagctgctttccacagtttaaaaagaaagtctgagcaacatagtgacatcccatctttacmtaaaatttttaaaaaattagcaaggcatggtggtgcacacctgtagtctcagctacttggctgagataggatccctggagtctgagggttcaaggctgca

SEQ ID NO: 310752 - DNA, 201 bp, Homo sapiens
tggtagccaggattttgaaagtgatttagacaggcttaaagaggaaattgaaaaatcatcaaaacagcgaggtaagttgtctactttatattatcaggatmctttgacacctttgaattttcattcacaggtaactgttaaggatggggaatttaaaaacctggttatggagcctaatggcttggatttcagtcctggctc

SEQ ID NO: 310753 - DNA, 201 bp, Homo sapiens
atttttatagtttctacataccaggcaatatagtgaattacatggggacataataaatatttaattgttgactgaggactcactaatctgtgtacttagamacatgtctcctaattttacagtaattctcacatttctttcctgtttgacccttctaggtttatttactaattctctaccattataacatagtaaggtcac

SEQ ID NO: 310754 - DNA, 201 bp, Homo sapiens
caggtttgtaacaaagatgtcacagatacttgagctttctgctttcagatcaaggcagaagattacacttgataacacctctaggcccttgactttttttwaataaaattctaaaatcatagaaatagatgcttacattatctaactcattttcatagtttgcagtttttgcttaaagaacatgccatgcagctgggcatg

SEQ ID NO: 310755 - DNA, 201 bp, Homo sapiens
taaagcatggcaaacttcttaaagcccatcttgataatttatgtaaacatttatttttgctccataactcaccattgtagcatacatttttgtcagtttarcacttcatcagtgttgtcttgttggggtggggagatacttggtcagggaccacatcacactatttttatagtttctacataccaggcaatatagtgaatt

SEQ ID NO: 310756 - DNA, 201 bp, Homo sapiens
gagcctaacaggacttacatatttgactgcagtaggcattatatttagctgatgacataataggttctgtcatagtgtagatagggataagccaaaatgcrataagaaaaaccatccagaggaaactcttttttttttctttttcttttttttttttccagatggagtctcgcacttctctgtcacccgggctggagcgca

SEQ ID NO: 310757 - DNA, 201 bp, Homo sapiens
gaaactactaccttaaaagagagttgaggacagggacatgtctggactaagtggaatttagtgcttagagttaggatttggaatataaatatggaagttamtatttagaattaggatttctgaatctgtgaaggaaaggtaaaataaaattttgatgtcagttcagcttaagcttctaaatcattctcgctgaaccaaagc

SEQ ID NO: 310758 - DNA, 201 bp, Homo sapiens
cactaacccgagtgctttaaaatgtataatgtaaactccatagtaactgtgaggttgtataggcaggaaaactgaggtacaggtattcacagtggaaataagggttaaaggtaggatttgagtcctctgattcctaagtttatacctttttttctttttaagtcaagtttattaaggtataatatatatatggtaaaatcc

SEQ ID NO: 310759 - DNA, 201 bp, Homo sapiens
taactaatttaatgtttacctttagatacaagaaaggtggctacaagataaccttactttaagaaaaagaaatgaggaactaaaagaagttgaagaagaargaaaacaacatttgaaggaaatgggtcaaatgcaggttttgcaaatgaaaaggtatgcttttaaaataatcttcagtttaaataaacgtctttattactg

SEQ ID NO: 310760 - DNA, 201 bp, Homo sapiens
cacgatctcggctcactgcaacctctgcctcccgggttcaagcaattctcccacttagcctccagggtagctgggattacaggcatgagccaccacgcccrgctaaataaaaaaaaaaaatagaattttttgtatttttagtagagacggggtttctccatgttggtcaggctggtcgcgaactcccgacctcaagtgatc

SEQ ID NO: 310761 - DNA, 201 bp, Homo sapiens
gctttccacagtttaaaaagaaagtctgagcaacatagtgacatcccatctttacataaaatttttaaaaaattagcaaggcatggtggtgcacacctgtrgtctcagctacttggctgagataggatccctggagtctgagggttcaaggctgcagtgagctgtgatttgtgccactgcaccccagcctgggtgggtggc

SEQ ID NO: 310762 - DNA, 201 bp, Homo sapiens
ctttattacttttaaatttttcttccagagaaaagtagtaacaggtcaggaaaatcccaggcgaaggagtaagccttctatagttgaacagtttggatatkaaggaaaactcaataaaatatttatacctgctttagtgagaacttctgatctggaagaaactagttcttgtattcctgtgagtccctaagccagacctaa

SEQ ID NO: 310763 - DNA, 201 bp, Homo sapiens
tggagtgcagtggcacgatctcggctcactgcaacctctgcctcccgggttcaagcaattctcccacttagcctccagggtagctgggattacaggcatgmgccaccacgcccggctaaataaaaaaaaaaaatagaattttttgtatttttagtagagacggggtttctccatgttggtcaggctggtcgcgaactcccg

SEQ ID NO: 310764 - DNA, 201 bp, Homo sapiens
cccatttctgattttttttttttttttttttttttttgagatggagtcttgctctgtctgtcacccaggctggagtgcagtggtgaaatctcagctcactrcaacctccgcctcccgggtttaagcgattctcctgcctcagcctcctgagtagctgggactacaggcgtgcaccaccatgcctggctaatttttgtactt

SEQ ID NO: 310765 - DNA, 201 bp, Homo sapiens
tgtgcattctcagttcacaatcagaagattgtgaatttgtaatattaatcaccagagtgctttacttagcgtctaaaggccaggaactttatcagtgatcrcatgctatgagggttctgtaatacacaaaattagctatttagcaacctatgtgcggcagagatatggaaggaagagaggggttttctttagtaccaaagc

SEQ ID NO: 310766 - DNA, 201 bp, Homo sapiens
tgctaaggagaatgatacttaacctatctaaagaaatctatgacttttccacttcaggttgttaaaagctaaaaaatggtcctcatttgtcatttttcttktttacagtgaacatcagaagttggaagagaacatagacaatataaaaagaaatcataatttggcattagggcgacagaaaggttatgaagaagaaattat

SEQ ID NO: 310767 - DNA, 201 bp, Homo sapiens
ttggtacataacagtactttttacattcattcacattactaagtacaactatttttcaaacgtttcttcaaccaggacataacagaaatgccaacaagacwtgtaatccagtcgactctgtaaggatgcccataagcttgagagtagtgcctgacacataagaggatgcttaataagtgataataaataaatgaagatttt

SEQ ID NO: 310768 - DNA, 201 bp, Homo sapiens
atagacagaagagtggaagactatgttatattttaggatgagttgtcctgataactctgtgtgggtcccgtggtaattaccaagatattagaacagatttmctttttttttcttctttcccccttgccccactccacgttttattttcttgaggagcatcttggttggagagatgacaagcacatgtaatggtaaggcaga

SEQ ID NO: 310769 - DNA, 201 bp, Homo sapiens
ccgccactgcaatggcgtcatcacatgttatgtgatcactggaaattactacacgaacgttagagagagaatgagaatgaaaaggaaaatagttttgacaygaactgaccccgcttcctgggtctccaatccaccccaccactacccccattccaggagtcccaggatcaagctttgggaagcgccatccgtcacaggtct

SEQ ID NO: 310770 - DNA, 201 bp, Homo sapiens
acacacaaagaacaggaacatctgacccatgccataaacagcaatttaaaaaacagtcaatagaaacaatctatgaggaagcccagatgttagacttactrggcaaagactttagatatcagctattataaacatgttcaaggaactaacagaaacaaagtctaaagaattaaaggaaattatgagaatgatgtttcacca

SEQ ID NO: 310771 - DNA, 201 bp, Homo sapiens
aaccaccatggcacgtgtatacctatgtaacaaacccacacgttctgcacgtgtatcccagaacttaaagcataaaaataaataaataattaaaaaatttwaaaaaactataggtctgttgccacaggtcaggttggcatttcttggtcatagtttgcatttttaaaaaatcattaagtaatagccacttgagtttctggt

SEQ ID NO: 310772 - DNA, 201 bp, Homo sapiens
ggctgaggaactggggcatctgggttgcttctggccagaccaccaggctcttgaatcctcccagccagagaaagagtttccacaccagccattgttttccyctggtaatgtcagcctcatctgttgttcctaggcttacttgatatgtttgtaaatgacaaaaggctacagagcataggttcctctaaaatattcttcttc

SEQ ID NO: 310773 - DNA, 201 bp, Homo sapiens
gacctccatgatacaatactgttctctctttctatcacagctacatactacttcattcaccccatcaataaaggttggaagtctcattaggctcagtcctrtatcttctccttttttttgctctgtattttcttcctaggtaatcacattcttatccattgctcaaactactctgtgttcatagatgactcacagatttat

SEQ ID NO: 310774 - DNA, 201 bp, Homo sapiens
cattaacagaataaaaaagaaatatcatatgaacaccaatagatacagaaaacgcatttcaatttaatagtctttcgtggtaaaaaccctcagcataactratggaggaatattaattcctgaataattcagtccaaaatccgttaggtgtggctgagtgaggaaggcatccacaaaaacaagctgtgacagcctggtggg

SEQ ID NO: 310775 - DNA, 201 bp, Homo sapiens
tagtatatacttttgtgaggattagagagaatttatagcagcacctagtacagtgtctggaacatagcagacattcaatcagtgatacctgtgactgttgytcttggtaaaattatttttttcaaatctctctttcgtttagctaacattgaacacctattgcatgttctggggatacattagggaacaaagtaaacaaag

SEQ ID NO: 310776 - DNA, 201 bp, Homo sapiens
gatcatgccctcttactctgtcttcaaagcaagcaatagtgggcagagttcttctcatatcaaatcactgtgacctcttcttctctcttcttctgccttcytctctcacattaaaggacccatgtgattacatttgccccatccaaataatccaggatagtctattttaaggtcaaatgattaacaccctaattccatctg

SEQ ID NO: 310777 - DNA, 201 bp, Homo sapiens
cttgaattcctcctcagaaaatgggattttattttctatcacattgtcaagctgcaaattttccaaacttttatgctgtttcccttttaatactgcatccytttaacagcacccaagtcaccgcttgaatgctttactgcttagaaatttctttcaccagataccctaaatcatctctctcaagttcaaaggtccacacat

SEQ ID NO: 310778 - DNA, 201 bp, Homo sapiens
gcctcacaatcatggtggaaggtaaggaggcgcaagtcacatcttacatggacagcaacaggcaaagagagcttgtgcggggaaactccttcttataaaamcatcaggtctcgtgagacttactcactgtcacaagaacagcatgggaaagacctgtccccatgattcaattaccttcaactgggtacctcctgcaacatg

SEQ ID NO: 310779 - DNA, 201 bp, Homo sapiens
attggcctaatttccatattattgtgtctcaggcaatcaggttccaaggagagggagagagacgggaatggcaggtcagtaaagcagtcaggacacacacrttaatggattaagttcacctcttatatgtggatggtttgtggcacacaaacaattacagtagtaacatcaaagatcacttatcacagatcactataacag

SEQ ID NO: 310780 - DNA, 201 bp, Homo sapiens
cctttgccctcacaactcagctaactgatgaaagaggcctaactttcaacctgttttggattttgacatgcttttctcaactaagcttaatcatttctagyttttgatttaaaacgagatgtttgactcttctttcgcttaaacacttaggggctgttgtagggttactaattggcctaatttccatattattgtgtctca

SEQ ID NO: 310781 - DNA, 201 bp, Homo sapiens
ctacaaaaactacaaaaattggcggggtgtggtggcatgcacctatagtcccagctacttggggggctgaggtaggaggattgcttatgactcagaggtcrtggatgcagtgagctgtgttcatgccactgcactccagcctggatgacaaagtgagaccctgtctcaaaaaaataaataaagggattgaagttaataccc

SEQ ID NO: 310782 - DNA, 201 bp, Homo sapiens
tctcggctcactgcaacctgtgcctcccaggttcaggcaattttcctgcctcagcctcccgagtagctggaactacaggtgcccacgaccatgcccggctrattttttatttttttattttttatttttagtagagacggggtttcaccatattagccaacctggtctcgaactcatgaccttgtgatccgcctgcctcgg

SEQ ID NO: 310783 - DNA, 201 bp, Homo sapiens
ctttagactaccttccctgagctgtcctagataggttagatgctcctgctttgtactcccagattatcctgtgcttatgatggtgtttagcacaccttgtstacatttaacctatcttgcatgcttcaaaggaaaaaaagtctgtcagtttgaaccaaaacaacacatgaaacctacaaagtgcctgtaaatatttgttga

SEQ ID NO: 310784 - DNA, 201 bp, Homo sapiens
tcctgaggtctccccagtcttgcttcctgtatagcatgtggaactgtgagccaattaaacctcctttcattataagttacccagtttcaggttttttttttatagcagtgcaagaatgtacttatacaaccataatcttaatatattgacttaatcaatcctcctgtatgtaatcaatgtctcatcgttgcatcagggccc

SEQ ID NO: 310785 - DNA, 201 bp, Homo sapiens
aagtctaggctgaggaggtctcagatggagataaggagcttactgagaactggagtaaaggtcactcttgcgatgctttagcaaagagactggcagcattktgcccctgctctaggaatctgtggaactttgaacttgaaagagatgatttagagtatttggtggaagaaatttccaggcagcaaaactttcaacatgtgg

SEQ ID NO: 310786 - DNA, 201 bp, Homo sapiens
ttgacagcagtttggattcaaagacaggaaggaaatgcctgtccctcacagggccaagctgtggccctgtcttctggcttgcctaggcattaaagaaaagwcataaactattctaaaattaccaactcactgatgtgtgcgcacccacccacaaactgagggggaaaggggacttacagctcacaccagagtagtttatac

SEQ ID NO: 310787 - DNA, 201 bp, Homo sapiens
atgattgtaagtttcctgaggcctccgcagtcatgcttcctgtacagcctgcagaaccgtgagccaattaaacctcttttctttaaccagtttcaggtatytctttgtagcagtgagaaaacagactaatgcagaaagttggtaccgagagtagggtattgctataaagatagctgaaaatgtggaagtgactttggaact

SEQ ID NO: 310788 - DNA, 201 bp, Homo sapiens
tagcacctcccccttcactctcttcctcctgttctggccgtgtaagatgtgccagcctcctcttcaccttctgccatgattgtaagtttcctgaggcctcygcagtcatgcttcctgtacagcctgcagaaccgtgagccaattaaacctcttttctttaaccagtttcaggtatttctttgtagcagtgagaaaacagac

SEQ ID NO: 310789 - DNA, 201 bp, Homo sapiens
tgtcaaaatatctcgtgtactccataaatatatttatctatgtacccacaaaaattaaaagttaaaaaaatgcaatctaccatcttgtgtagaaataccamagaaggaaaatcagcacctgcaattgacttgagaaaagctgctggctgtttgggaatgcggattctgaaagctttaatgattaaccttattgggctggtc

SEQ ID NO: 310790 - DNA, 201 bp, Homo sapiens
cctgatgtgttactagacattgtatatctttgtcaaaatatctcgtgtactccataaatatatttatctatgtacccacaaaaattaaaagttaaaaaaaygcaatctaccatcttgtgtagaaataccacagaaggaaaatcagcacctgcaattgacttgagaaaagctgctggctgtttgggaatgcggattctgaaa

SEQ ID NO: 310791 - DNA, 201 bp, Homo sapiens
aaactgtaaaccactgatgaaataaactttaaaagttacaaataaacagaaacacatcccatgttaatatatccatactacccaaggtgatctatagattsaatgtaatccctactaaaatcccaatggcatttttgttttgttttcacagaaacagaagaaacaatcctaaaattcatattggaatcaaaaaagaccctg

SEQ ID NO: 310792 - DNA, 201 bp, Homo sapiens
cctgctctcgccacgatcttccccatctcatcaatgacaactttcatgtgctctagccaagaccttttttgccaactgtaaccttcttctccttctctcartcccctcagtcaattcttcagtaaatcatcttggctttacttttattattattattattattattattattatactttaagttttagggtacatgtgcac

SEQ ID NO: 310793 - DNA, 201 bp, Homo sapiens
caagttgtatacattaaatatgtgtagctttctgtatgtcaattatacctcaataaatggatttaaaaaatcaagaaggaataagtaatctgaaaacatakgttatttcacttattccacaaaagaaaatcatccaaaaattatctttgtttgaagaataactagtaggagggaaacctggctcaatgctgtcactagatg

SEQ ID NO: 310794 - DNA, 201 bp, Homo sapiens
taattttaaggtgctatcattgtttaatcagctctggagaccccgcatctgatttgacaaccacagatcccaccatgacacaatgccccttcaacacatgmttcttgcattcaagctgtttacaatgtaacaagagagttaagatgttataaaaaagcattttttaaaaaattaaatctccctcttagctgaaattcctat

SEQ ID NO: 310795 - DNA, 201 bp, Homo sapiens
gaataaatgacatatcctaatttaggatacatcaccagattcaagtcagagagtatcctgtgccagtcaataagagtgcgggtcactggaagatcccttcrtagaatttttctcagggcttcattggataactcctgtaattcttccaagactgcagcttgaaatttgttctcttgctcttccacaagccttgcaaaactt

SEQ ID NO: 310796 - DNA, 201 bp, Homo sapiens
gctggtggaagcaggcttgtgcgtcaaaaaaaaaaaaaaaaaaaaaaaagacagcttattactcacagaaatgacagttgtcagagtattagcattttgaygttatttccccaagccccagtttttaaagtgtggtacgaagaggaacaagtgacacacagtgagttgcattatagagtaggtaccttaagcttaaggaac

SEQ ID NO: 310797 - DNA, 201 bp, Homo sapiens
ttcattaccagaatatatcccaaagcaacaagagcagactcttctaattttaatccccaagaattttggaatataggttgtcaaatgggtatgttatatasgatattgagttgtttgcagaagtaacataaaatgaattcattttatgaatgtatgaaaaactcgtgaaaagggctttctgtaaaagattttttagcccgg

SEQ ID NO: 310798 - DNA, 201 bp, Homo sapiens
tttaagtagcactgatctagagaatattaccaaaacaattactttggcactgtaaacttcaggtggtaaattaaaagatacaaatgagatgttgggatggmggcagtgacactttggaattgtgtttgcattttaactacaatattatactgttcatccatttcctcttttgagccttcacctgcctcaaatactctccaa

SEQ ID NO: 310799 - DNA, 201 bp, Homo sapiens
aatccatgtgattaatccttatttcaaactggtagtttttaagggaacaaaatgagtttattttctattccattaccaaagatatttatttaattattcartagttcaaaagggctaagccaattactgctaattaaacagggaaaaataataaatgtatgcaagtcattactgttacaatgcatgattcatttgctccat

SEQ ID NO: 310800 - DNA, 201 bp, Homo sapiens
ttcaaaggccttgcaaggatgaaaagcctacagcttctaagattccaaaaagcaagaaatgggcaactagataagaaaaagagacaaaatgcaatgctttytattatttccaataggaagaaaagaagcaacattatgtttatttgcagatgacataatcctgtatgtaaaaaagcccaacgattccacacaaaaaaccct

SEQ ID NO: 310801 - DNA, 201 bp, Homo sapiens
cttcaaaattattgcttaaaaaaaatttacctcttttttatgttttctctcatatcaccgaattaagaaggcattttaacagcctcaaatctacttagctkctagcctttgtattaaatcaaaaatttgtgatttttgacacagcatattatatatttttataatgaattatttgaattattttagattaaaagtctatgg

SEQ ID NO: 310802 - DNA, 201 bp, Homo sapiens
tatttatatgtgaagtattttttcttttttcaaaaattatttcaaagcaaagtatttttatgaattgtggttatcaaattaccgtttttggatgggtcaartatctttgagaaaatatattttatagaattgataccttttagaatgctatagtatgcaaccatgacatcctttcctatacattgttcagctcctttcttt

SEQ ID NO: 310803 - DNA, 201 bp, Homo sapiens
gaacatttggggacatagaatccattattagatttcagtaagtggtttgtgttcctttatttgtattctctattacctgacaatgtcaaaatacttctttmttacagtggctttaaatttccagacccctggtctgcccatggatctgcaaaatgggaaatttttggataatggtggttctggatatattttgaaaccaca

SEQ ID NO: 310804 - DNA, 201 bp, Homo sapiens
aataatgtttttgtttcactttttaaaatctctaaatatttgtatattaacaataaaaatatagcatgctactttttggtaacttgcttttcttcataaayccgtagataactttctatagcagtatagatagctctgtcttcttctttttttttttttatttttatttttgagacagagtctcattccgtcacccaggct

SEQ ID NO: 310805 - DNA, 201 bp, Homo sapiens
tgcttttcttcataaacccgtagataactttctatagcagtatagatagctctgtcttcttctttttttttttttatttttatttttgagacagagtctcrttccgtcacccaggctggagtgcaatggtgcaatctcggctcactgcaacctccacctcccggttcaagcaattctcctgcctcagcctcccaggtaact

SEQ ID NO: 310806 - DNA, 201 bp, Homo sapiens
ctgctctcctcttaaagttgagctctttatatcctttatttttacattacaaacttttcctgagctatcttattgactcttaacggctacttcttaaatargaacaagttccaagttttctatcctgaacgttgaagacatgtaaatggcaccatttgttcatcatctgccataatgtagacactgattaggtgttgcact

SEQ ID NO: 310807 - DNA, 201 bp, Homo sapiens
aattccttttgcaggttatcgtcgtattcctctgttttccagaatgggtgagagccttgagcctgcttcactgtttgtttatgtttggtacgtcagataayagctaatgataaatgacatatcattagctatgcatcgcaataaaacagccaaaatgaatgtctttatgttttcttttttaaacataaagaaaaataatta

SEQ ID NO: 310808 - DNA, 201 bp, Homo sapiens
atagaatgttgagtaaaagaaaccaggtacaaaaaatacatactgtctgagtcaattcatataaagtgcaacaaccaaagaaaactaatctatgcttttcraagtcagatcagttgatatacttgggtgtggtgagtgactgggaagttagtcggaggcaggcttctggaacactgcaatgctttgttcctcaacctgtgt

SEQ ID NO: 310809 - DNA, 201 bp, Homo sapiens
cacatgcttagtatgaaagtctttcaaaatatttttccttgtgactagtggcataatatagtgtttaaatatcaatgtttaagtttctagtgctcatattycttccctttccctcatctgttaattttgtgacagatataaccattgtgtatctcgatttcctcatatttacaaaaggaaaaagaatattactgctgtaaa

SEQ ID NO: 310810 - DNA, 201 bp, Homo sapiens
ttatttccccaagccccagtttttaaagtgtggtacgaagaggaacaagtgacacacagtgagttgcattatagagtaggtaccttaagcttaaggaaccygggccttttatggtgggcagtaagcctacctgatctttgccctgtaggctgtcatcattattataggaaacagtaaacaaaactgctttttttcctctgg

SEQ ID NO: 310811 - DNA, 201 bp, Homo sapiens
aagtctttcaaaatatttttccttgtgactagtggcataatatagtgtttaaatatcaatgtttaagtttctagtgctcatatttcttccctttccctcawctgttaattttgtgacagatataaccattgtgtatctcgatttcctcatatttacaaaaggaaaaagaatattactgctgtaaagcattcaatatcttaa

SEQ ID NO: 310812 - DNA, 201 bp, Homo sapiens
tacaaaaattttaaaaagggtaactgtgaaatgatggatagatggatatgttaatttgattcactgtaataaccttcttactatctacgtgtgttccatawcatcatgttgtataccttaagtatacacaataaaatgcatttaaaaacacccaaaagagcaagaagtgagattttaaacaaggctttgagcagtggagac

SEQ ID NO: 310813 - DNA, 201 bp, Homo sapiens
tccaatgtaattttcatcttctttcaagtataaattactacatgttacataaatactctaatattcattttatgtattttttatactcacaatgtgagccyaccagtcatttttttagtaggacaatgacaggctgaaacaaggaagaatcaccatagaagaatttagagcaatttatcgaattatcacgcacagagaaga

SEQ ID NO: 310814 - DNA, 201 bp, Homo sapiens
acagtatctttacgaaagctgttcgctatacaaatgtccttgaaaatctagtatggaagaaaagcaatcaatacctctgctcagaaaacacatagaaacaygagagacctatggagaattgtcttccaacaaccacttctctcaataacatttagccctcaagtttacaaaccacaaagaggaggttaaaaaagaaaagtt

SEQ ID NO: 310815 - DNA, 201 bp, Homo sapiens
gttcctattcttttggtgcaaatagtaatacatttctttttatgcagatttaatggtctctgttttgccaaactcaaaagtactttcagtttaaagaatasttattttgcaaaggtactaaacgttagaagtaagttttaaaatacattaagcacttatattaattgccttacaattatttagaagttttgatgaataacc

SEQ ID NO: 310816 - DNA, 201 bp, Homo sapiens
ggaaattatatttccttttgcaggcaaggggtactcactgaaatttcttgagtaaagaaatattacatattttaggataaataacatggcactagttagartggattggaagctagtattcagagagagagagagaaattatttctctactgattctgccctacaaatccgctacctggaatcaactcagccacttatatt

SEQ ID NO: 310817 - DNA, 201 bp, Homo sapiens
ttggagttttatgtattcttacaacaaagtgaaataatttgggtgtaaaaaatatataaattatctaatcaattttttccttgaatgatcagtgtacatamattttatgataaaattgtcactaacatctaaataatagtgaattatactataaacataaaggcatggatttattttgatattcatgaattgcaaattttt

SEQ ID NO: 310818 - DNA, 201 bp, Homo sapiens
gacttaaaatctgtttattaaatgaattcttatatatggaccaacgaactcttctatagatagtttatagttcagtgtgaaagatgatgctataagtaaartaattatgatttagagtaattcgtgcttcaagaagagtacaaagatttgtactccaagggggcacttttggagatggttcttggagaatgagtagaattt

SEQ ID NO: 310819 - DNA, 201 bp, Homo sapiens
aatttacttacagattaaactttgcaactcatcaatatacattaatatagacatggcaggagaaagagttttaaaaatcatgaattattaggctaatgatrcttgctcatagaacatttggggacatagaatccattattagatttcagtaagtggtttgtgttcctttatttgtattctctattacctgacaatgtcaaa

SEQ ID NO: 310820 - DNA, 201 bp, Homo sapiens
tagagattggggacaaggacatttaaggcagaagccataatataagtcttaaaatatgaagaaaatacaatttaaacataccagagacagaacacaagtcytaaaatatgaagaaaacacaatttaaacatgctagagaaaagccaagaaactcaagatgggtggaatatagggtgcttaagaaagattagtgagagataa

SEQ ID NO: 310821 - DNA, 201 bp, Homo sapiens
gtctttattaagcagaatttatatttaatctggatgtgaatttcttgattctgttaaattacgctttactttttggatgatttgggtcatactgtgacacratgtggatttcttgcttggcagaaattggttgcttgggatgatttattttcttagagattgaaattcatcaactttggactttgaaaggagcacttagtc

SEQ ID NO: 310822 - DNA, 201 bp, Homo sapiens
accccgtctctactaaaaatacaaaaattagctgggtgtcgtggcatccacctgtaatcccagctactagggagactgaggcaggagaatcgcttgaaccygggaggcgggggttacagtgagccaagattgagctactgcactccagcctgggcaaaaagaacaaaactccttcatattgaaaaaaagaaaggaattact

SEQ ID NO: 310823 - DNA, 201 bp, Homo sapiens
caaacttctgtttaaaactgttatccaagctatacacaagtatgcattcatggtatgtacatatctttgttcaactgtagctatttaaacagaagcaattytaatttacttgcttcaaaatcctataatgcttagccttactttagatgatatttcaaattgtgggttatgatccattagtaggcagtgaaatccatgttg

SEQ ID NO: 310824 - DNA, 201 bp, Homo sapiens
tttctctcaaggaatgtgtaacttttgaaaataaatattgataaaattaactgtaatttttaatttgacaatgcttcctaaataatagtatttaggatgargggagaggtgattctattctagttggtttagcaaatgaagtgagccataagcagtaaccattctcccatgatgagtcactatatcagcaggaatggttgc

SEQ ID NO: 310825 - DNA, 201 bp, Homo sapiens
gtatcataagggtcattgtgaaagagggaagacccaagatgatggaataatttgaatggatgcctgaggatgacaaaagagaaaggacaatcaaagctccmtggagaaaagaactttactttataacccagatttcagcattgtatataacagagccggtacttaaatgtacttgttaaattaaagaaattatcctaaggg

SEQ ID NO: 310826 - DNA, 201 bp, Homo sapiens
taatcaaatggtgtttgaggagataatcttatgaaaagatgaaaatcatttgtttgaaagtgtattttctttactagaaaaaattttttttcccaatgatyagcataaaaatgtaaaattactgcattttatttttagaccaggaagctaaaaattgctctggccttatctgatcttgtcatttatacgaaagctgagaaa

SEQ ID NO: 310827 - DNA, 201 bp, Homo sapiens
ataacacatatttggtatctgatcaattattgggaccaagtgacctttggggatatgtaaggtatttattttatttttaaatctattacatttaaaaatasttggaagttcctggcagtgtctacctcagtaggcaagagtgcacaataaaaagaagactctccatgttatccaaactcatagggaatagaaatttttact

SEQ ID NO: 310828 - DNA, 201 bp, Homo sapiens
acacaataaatatttactaacagtcagtttatgtcaaacatgttttatggactgaaatttcaatccctgctgttgtagaaacagcactaaccattgccttrtgttagtgttgctgaccctgtctgtggttggcacatattagctccatgtcaggccaggttcataggtaataggaacaactatgcaactctttgtatgtgt

SEQ ID NO: 310829 - DNA, 201 bp, Homo sapiens
aaagaattagataagattttattaatatattttactattctgagagggctttgaacattatcacttttgaatggtatggcattgaacagtaaatgccaccrtaagtaaaattatatgggttgggagtagggatgtttcagagctacaactatggagcaggtatcctcattgcttactgaaaaccaagccttgtatggagag

SEQ ID NO: 310830 - DNA, 201 bp, Homo sapiens
cttctaatgttacattccctgttttagcagataaaccaaaagaatcctttacatttctttctccactcgttcaatgatccattgcaatctgttttgctttyatacctatctcgaaaatctttttaggtcataaatgctaaatccactggttagcctctctgtgcatttcacttatccctttttataaaaaatttccctgtt

SEQ ID NO: 310831 - DNA, 201 bp, Homo sapiens
acattccctgttttagcagataaaccaaaagaatcctttacatttctttctccactcgttcaatgatccattgcaatctgttttgctttcatacctatctygaaaatctttttaggtcataaatgctaaatccactggttagcctctctgtgcatttcacttatccctttttataaaaaatttccctgttctgacttctat

SEQ ID NO: 310832 - DNA, 201 bp, Homo sapiens
actcatatgcatatcaaagttggaaaaaccctacagattggtttgttttaaatcccaacatctaccttctacactgctgccagagtaatctttctagaacraaaatctatgggatttctctcttaaaactgatcaataactctttattctttccaaagaagtctaaatttctcactgtggcttccgaggaaccctgggatt

SEQ ID NO: 310833 - DNA, 201 bp, Homo sapiens
ctttgctgggcctttctccctatcccaaattttatcagattacaaataaactttctttttgatgaatagtattgtctaacaacaaatagtttggttttgayatgtcttcatttttgctagacataacaatatttttgtaatatttgggtattgccctctgtattttccttattttttttgccaacttaaaataatcaaaag

SEQ ID NO: 310834 - DNA, 201 bp, Homo sapiens
ttctttttgatgaatagtattgtctaacaacaaatagtttggttttgacatgtcttcatttttgctagacataacaatatttttgtaatatttgggtattkccctctgtattttccttattttttttgccaacttaaaataatcaaaaggcttgggattcagttagaagaatttattcaagtgcatagtgtaagggtagct

SEQ ID NO: 310835 - DNA, 201 bp, Homo sapiens
tgaatagtattgtctaacaacaaatagtttggttttgacatgtcttcatttttgctagacataacaatatttttgtaatatttgggtattgccctctgtaktttccttattttttttgccaacttaaaataatcaaaaggcttgggattcagttagaagaatttattcaagtgcatagtgtaagggtagctttctgggaca

SEQ ID NO: 310836 - DNA, 201 bp, Homo sapiens
tacgatattgagttgtttgcagaagtaacataaaatgaattcattttatgaatgtatgaaaaactcgtgaaaagggctttctgtaaaagattttttagccygggggctttggggtcaggcactaatggtgggtcatgtgttgtaagagttgaagtcattcctatctgggttgaagcggggtaaatctcagtgatggtttgg

SEQ ID NO: 310837 - DNA, 201 bp, Homo sapiens
gaaataaatggtgatgtaacttaatatcttgctaaattcttatattcatatatatttgtgcagctcatcagtggtatccagttgcctcttactcattcatyatctaacaaaggtgattcattagtaattatagaagtttttggtgttccaaatgatcaaatgaagcagcagactcgtgtaattaaaaaaaatggtgagctc

SEQ ID NO: 310838 - DNA, 201 bp, Homo sapiens
tttgcaggttagcagcaaggtaaagagcttgcacaagaatactaagcgactatatcactaagcagaactgatgagttcagatgacttttttttttttttttaatagcaagactttctctaaggaagtagtgaattgatttatgttctggctcaagctctttatgtcattgccaactggaaacaaccagtttacagatgagc

SEQ ID NO: 310839 - DNA, 201 bp, Homo sapiens
tcttgaattcctgatgggttggaggaaagttgacagtaaataatgaagcatgtaaaaggatatcttaagagagtgctatgtgatacggaaacatagagcarggaaggtgatggagagtaaatgacctgggaggcctagttcaggttgggtgttcagaagaaccctctctgagagtgtgagatttgagctgagacttaaatg

SEQ ID NO: 310840 - DNA, 201 bp, Homo sapiens
agggaatagaaatttttacttgtacatatcttgaagatccaacatttggatgaagtggcaacgtaatttattgtatgcattagtatcatatgctttccttytaatcccacctgttaacctcctctccatggttatggcccctccgaagtttgctgaataacctagacacttctcaaaggaaagcatatgaagaagactctt

SEQ ID NO: 310841 - DNA, 201 bp, Homo sapiens
ctgatatttctctagtcctgctctcgccacgatcttccccatctcatcaatgacaactttcatgtgctctagccaagaccttttttgccaactgtaacctwcttctccttctctcaatcccctcagtcaattcttcagtaaatcatcttggctttacttttattattattattattattattattattatactttaagttt

SEQ ID NO: 310842 - DNA, 201 bp, Homo sapiens
aaattttcttttacattttttggttattatataaactagatagtgtacattagtattttgaattccactgatttgcttcaatttcttttaaatttctgttmatcttttcaggtactatatgtgggtagtattccagcatccttctatatctgaaaaatgtcttcctgttgtaattttacatgaatgattatctgcctgtga

SEQ ID NO: 310843 - DNA, 201 bp, Homo sapiens
tggtttgttttaaatcccaacatctaccttctacactgctgccagagtaatctttctagaacaaaaatctatgggatttctctcttaaaactgatcaatawctctttattctttccaaagaagtctaaatttctcactgtggcttccgaggaaccctgggattcagctgtgcttcctgccttatctgctcccgcagcttca

SEQ ID NO: 310844 - DNA, 201 bp, Homo sapiens
taacccagcatggcgttcttgtttgctgatttctcctgcccttctgctgctgagttgttttcaactggcttgtatcatttttaattactagaatttataarcttttgaaatacatctaattataaaatatacattggcaaatatttagcagtataaaagaaatgtgaaatctaagagtgttttaacttctagacacccact

SEQ ID NO: 310845 - DNA, 201 bp, Homo sapiens
ttaagactcagaagagtatgtgttttgcctaaggacagacatctgttaggactagataagggagcatgatacttggacacctatgctgtatttatacacayatggtttcaaaataaactttctctcaaggaatgtgtaacttttgaaaataaatattgataaaattaactgtaatttttaatttgacaatgcttcctaaat

SEQ ID NO: 310846 - DNA, 201 bp, Homo sapiens
ggtatcctggtttacttttttttatgttgacaactgaaagtgagggctttctcttataattaatccatattattgtgtgtgtgtgtgtgtgtgtgtgtgckcgtgtgtgtgtgtgacagagagagatacaggaggaggatggaagggaggcagaggcacatgtgtaatgaagtaggattggaggaagaagaaatcagtata

SEQ ID NO: 310847 - DNA, 201 bp, Homo sapiens
tggtatcctggtttacttttttttatgttgacaactgaaagtgagggctttctcttataattaatccatattattgtgtgtgtgtgtgtgtgtgtgtgtgygcgtgtgtgtgtgtgacagagagagatacaggaggaggatggaagggaggcagaggcacatgtgtaatgaagtaggattggaggaagaagaaatcagtat

SEQ ID NO: 310848 - DNA, 201 bp, Homo sapiens
actattttcatcactatcaaatttggtatcctggtttacttttttttatgttgacaactgaaagtgagggctttctcttataattaatccatattattgtrtgtgtgtgtgtgtgtgtgtgtgcgcgtgtgtgtgtgtgacagagagagatacaggaggaggatggaagggaggcagaggcacatgtgtaatgaagtagga

SEQ ID NO: 310849 - DNA, 201 bp, Homo sapiens
agttttggtcatgtctaggataactattttcatcactatcaaatttggtatcctggtttacttttttttatgttgacaactgaaagtgagggctttctcttataattaatccatattattgtgtgtgtgtgtgtgtgtgtgtgtgcgcgtgtgtgtgtgtgacagagagagatacaggaggaggatggaagggaggcagag

SEQ ID NO: 310850 - DNA, 201 bp, Homo sapiens
ccctcttcagtgatacaactctcactattctgtgtggttttcatttttctgtaatttgattaacatttgactttgaattcttctttgattttgatcaactrtagtgattctttggatttgtggaattttgtttggacttatatctccaattctttttagtacaagatggcaactttgaccttttagaagaacacgagacaa

SEQ ID NO: 310851 - DNA, 201 bp, Homo sapiens
cagttttggtcatgtctaggataactattttcatcactatcaaatttggtatcctggtttacttttttttatgttgacaactgaaagtgagggctttctcttataattaatccatattattgtgtgtgtgtgtgtgtgtgtgtgtgcgcgtgtgtgtgtgtgacagagagagatacaggaggaggatggaagggaggcaga

SEQ ID NO: 310852 - DNA, 201 bp, Homo sapiens
taattcttcagttttggtcatgtctaggataactattttcatcactatcaaatttggtatcctggtttacttttttttatgttgacaactgaaagtgaggrctttctcttataattaatccatattattgtgtgtgtgtgtgtgtgtgtgtgtgcgcgtgtgtgtgtgtgacagagagagatacaggaggaggatggaagg

SEQ ID NO: 310853 - DNA, 201 bp, Homo sapiens
agcagccaggttccagaagatccttgtctacaaatgaaagaatgctgacgtagtgttctgagcccacagatgtagacacgatggcatgattgtcatcaatratctcttccaagattcctactgacattggggtccccctcagatcatccacttttgatcttttcccttcttgcttttcttctaatggtttcatttgttcct

SEQ ID NO: 310854 - DNA, 201 bp, Homo sapiens
gtgcctcagcactcaaattgcaccttctttcttattgcttttcttctccccgcttcccttgatcatgatgctaccatgtcctgcttttcttccccattgtyacttgctccttgttgctttccttttccattctctttctactaaaattagatcttcccctcttcagtgatacaactctcactattctgtgtggttttcatt

SEQ ID NO: 310855 - DNA, 201 bp, Homo sapiens
aatggtatttttgcatccttttaacttattttattttatttttttagttaggaaagcacaccaaatgtcattagaaggttttacaagatacatggattcaygtgaatgtctactgtttaaaaatgaatgtagaaaagtttatcaagatatgactcatccattaaatgattattttatttcatcttcacataacacatattt

SEQ ID NO: 310856 - DNA, 201 bp, Homo sapiens
gactaagtttccagggctgaacttttctccctgacataataaatttggaagatcttcaaattttacttcttttaacattttatttaaatcagtgaaaaatwttcaagtgaaagtgttgtgacactagtgacaagacatatagggctgatgatagaactgagacagaaaaaaatgaactgtgtgataaatggaaagaccacg

SEQ ID NO: 310857 - DNA, 201 bp, Homo sapiens
ataaagaattaaagttaccctgtaatcccagctacttgggaggctgaggcaggagaatctcttgaacccaggaggcggaggttgcagtgagctgagatcawgtcactgcactccatcctgggtgacagagtgagactccgtctcaaaaaaaaaaaaaaaaaaaagttactttatcctacaatattcagtccttgtgtgtaa

SEQ ID NO: 310858 - DNA, 201 bp, Homo sapiens
caacttgggaaatataaaaaaaatggcatatggtaagtctcaatcataacaggcttattttttggtgaattacaatcaatagcattatatcactgtattcrttcctctactgagatgtgaataggggtatgggaaaaaatggagttcttacatatcttattactgtaggctaattggaaatatagtgaaacacttttcagt

SEQ ID NO: 310859 - DNA, 201 bp, Homo sapiens
tcagctttctcatcacattattttaaataacatttcatatttttactagcaaactgagcattggaaatggaaaatggtgacaatatggaaagccttcattstgtttctgaaagtgtacactcagaatgacaatcaatagaattattttgaattttattttcccttgtttattcaatcactcatttaaacgtatagtaatta

SEQ ID NO: 310860 - DNA, 201 bp, Homo sapiens
cgttttttaaacaggagacaaatgattttattactcttattttatgttgtatgtttaatgattaatacgaaacattttaaaggtggtagtgaaccctgagstggggcctgagattttgcatatcttctgggatatgcatttttaaatctcttttcctatcctccttaagtctagggagatacttaattcctttatgtaatt

SEQ ID NO: 310861 - DNA, 201 bp, Homo sapiens
tcagaggtggaaaaattaacctagaaaaaactcagaggttacttgaaaaattagatattcggtgcagttatattcatgtgaaacagatttttaaggtaagrtgacatccaccccctgcctatcctatcctaggtggaacttaatccaatgtcagtaattgtcatataaaggttagtctcttaagaagaaaagcaattaatt

SEQ ID NO: 310862 - DNA, 201 bp, Homo sapiens
tcctcattgcttactgaaaaccaagccttgtatggagagcacggaagagtaaaacatttgactagcgagaaagacacagtattgtactacacagatagtaygtgtcttcccttttaatgcaaatttctagagactcaaaacttgtcccaaagacaagtttttatagagttttatggactcatttatgcatttattataaaa

SEQ ID NO: 310863 - DNA, 201 bp, Homo sapiens
tcatccatcagcacccctatcatggtatgcaccttgtggttgagcctgaccgagcagccaggttccagaagatccttgtctacaaatgaaagaatgctgaygtagtgttctgagcccacagatgtagacacgatggcatgattgtcatcaatgatctcttccaagattcctactgacattggggtccccctcagatcatcc

SEQ ID NO: 310864 - DNA, 201 bp, Homo sapiens
tgtgaccaggggatccatgtcatccatcagcacccctatcatggtatgcaccttgtggttgagcctgaccgagcagccaggttccagaagatccttgtctrcaaatgaaagaatgctgacgtagtgttctgagcccacagatgtagacacgatggcatgattgtcatcaatgatctcttccaagattcctactgacattgg

SEQ ID NO: 310865 - DNA, 201 bp, Homo sapiens
cttcgtcttttcatcaggcagggggaactcaatcttcctgccaatgcggcctggtctgataagcgctggatccaaagtttctatttggtttgtggccatgrtagctttcacatctaccctagaatcaaatccatccaactggttcagcagttccaacgttgttcgctgaatttctctctcaccaccagaattggagtcata

SEQ ID NO: 310866 - DNA, 201 bp, Homo sapiens
aaccctgagaacctgtgaaatgttcagtaggattaatttagctggaatcgtatagctttgtgtgacttccatatgattctgccctactgtgaaaatcaaastggaaaaataataagggaaaatgctgcttttgttttgaaaaatgaatggattatattttggagttttatgtattcttacaacaaagtgaaataatttggg

SEQ ID NO: 310867 - DNA, 201 bp, Homo sapiens
gaagtcgaactggacaactttggggtgcctttcaaccctgagaacctgtgaaatgttcagtaggattaatttagctggaatcgtatagctttgtgtgactkccatatgattctgccctactgtgaaaatcaaagtggaaaaataataagggaaaatgctgcttttgttttgaaaaatgaatggattatattttggagtttt

SEQ ID NO: 310868 - DNA, 201 bp, Homo sapiens
gtttgttcctgtttgtgtgtatactacaaatacgtagagattatcccagtaagaacgacatttgaaataattaaaagcattgaaagtttttcaatggagasatgtaaacacagattgaataaactttgggggaagatgctggagtgaagggattggaagtcgaactggacaactttggggtgcctttcaaccctgagaacc

SEQ ID NO: 310869 - DNA, 201 bp, Homo sapiens
atagaatagagtagtatagagtagaatggaatgggatggaatggaatggaatggagtagaatagaatagaatagaatagaatagaatagaatagaatagadgaaaagtgtattgcaagcagtaataataaatatggttttatgaagcaattgtgcatcgtgcatgtgagttggattgtaaaatgtatttcttgctgtaagg

SEQ ID NO: 310870 - DNA, 201 bp, Homo sapiens
tcaaacttttatcggaatatttatatgtgaagtattttttcttttttcaaaaattatttcaaagcaaagtatttttatgaattgtggttatcaaattaccrtttttggatgggtcaaatatctttgagaaaatatattttatagaattgataccttttagaatgctatagtatgcaaccatgacatcctttcctatacatt

SEQ ID NO: 310871 - DNA, 201 bp, Homo sapiens
agattttatcccagctgcactgagaaggattttccttaagatagtgtcataatttgatttattcaataatgtggaggaatgactgatggggccagagtggrggtagaagatgatttgggaagatggtgtagcagtgcaggtgatatagctggtggtgaactcatgaggcagcagctgagatgacaagtagttgaatttgag

SEQ ID NO: 310872 - DNA, 201 bp, Homo sapiens
tccctggcatgcaaggatggctcaacatacagaaatcaatcaatgtgatacaccacattaacagaatggagataaaaatcacatgattatctcaaaaatayagaaaaagcatgtgacaaaatttaactccctttcatgataactctcagtaaattaagtataaaaggaacttaacacattaaagtccatatatgaaaagct

SEQ ID NO: 310873 - DNA, 201 bp, Homo sapiens
taatgttgtagatgaatattattgaaatgaaatgatgttcacattattatagtaaataaagataacggtttgtgaaagggaacaaacattatcattcaacyaaaaattatacacatacaaaagaatgggaagatatatgtgaaggagttatcagtggttatcagttgaatgatgacatatggtttgatttgttctttgatg

SEQ ID NO: 310874 - DNA, 201 bp, Homo sapiens
agatgaatattattgaaatgaaatgatgttcacattattatagtaaataaagataacggtttgtgaaagggaacaaacattatcattcaactaaaaattayacacatacaaaagaatgggaagatatatgtgaaggagttatcagtggttatcagttgaatgatgacatatggtttgatttgttctttgatgtcctcctat

SEQ ID NO: 310875 - DNA, 201 bp, Homo sapiens
attttttcatgtgttttttggctgcataaatgtcttcttttgagcagtggctttacttttaaaatgtatcctgaatttaactatctctgcccatttttacygtcactgtcgtagtcaaccaacatcacctctcatttaaatgatcccactgccctcttctctgatattcttgcttcttttcttattcccctgcaatctcat

SEQ ID NO: 310876 - DNA, 201 bp, Homo sapiens
tatcagttgaatgatgacatatggtttgatttgttctttgatgtcctcctattttacagtaaacatgaactgtatttgtaataacaaacatgtttattttstaaaggttaatctcagaaataacaaaatcatattatgttatgagaccttagtcatcattcacatttattactttgtaaatgagaaacattaagactcaga

SEQ ID NO: 310877 - DNA, 201 bp, Homo sapiens
gtacttgctattccccctttatatgaaatactcttcccaaatatttgcatggctaactccctcacctaattcagagtggaaaaatgaattaaaaaaaatartgacagtcttaaaattcaaaggccttgcaaggatgaaaagcctacagcttctaagattccaaaaagcaagaaatgggcaactagataagaaaaagagaca

SEQ ID NO: 310878 - DNA, 201 bp, Homo sapiens
tgcaacctggggaggagatacagaggaagatttctagagtgggtgacactttttcaaggattagtagaaattggtaatttaaacagaaagaaggatattcyggaaagaaaaacaaacaaacaaaaaacaacaacgagaaacataggtaccatagcaagagatggtttggtacctgtactgcaactaattcagagcacctga

SEQ ID NO: 310879 - DNA, 201 bp, Homo sapiens
gccagttgagcttggttaactatttccaagctttctttcaggtccttggatatttcaatatgaaggttgacacacctgaagaagtgagcttgcacaaataytcttcccgttacttgggttagaaatgggttaacttggaaaatccatttagatttccaaagtccgttccagcactctcctgtttcatagttgtgatcttca

SEQ ID NO: 310880 - DNA, 201 bp, Homo sapiens
acagtcttaaaattcaaaggccttgcaaggatgaaaagcctacagcttctaagattccaaaaagcaagaaatgggcaactagataagaaaaagagacaaartgcaatgctttctattatttccaataggaagaaaagaagcaacattatgtttatttgcagatgacataatcctgtatgtaaaaaagcccaacgattccac

SEQ ID NO: 310881 - DNA, 201 bp, Homo sapiens
  misc_feature (1)...(201): n = A,T,C or G
aatatattttatagaattgataccttttagaatgctatagtatgcaaccatgacatcctttcctatacattgttcagctcctttcttttaactgcttccangtatctctcaagtgttcagaaatgagcttggaggtgaaagtaagacaatgattctattacatgtaccctattagaagaaagtatcttgatctcatgaata

SEQ ID NO: 310882 - DNA, 201 bp, Homo sapiens
gaactaaaacagagaggtcaggtgagaggcgatcttgaagtctagctgccttccaacttcatgccttcaggcaatagattgttataatgttttaatgtatkttctaagtaatgacttcaattctcaaattttaactttaattcttttttttgtatttttactgtgctatgccctttcatacctttaccatagcatagtaac

SEQ ID NO: 310883 - DNA, 201 bp, Homo sapiens
tttcttttacattttttggttattatataaactagatagtgtacattagtattttgaattccactgatttgcttcaatttcttttaaatttctgttaatcktttcaggtactatatgtgggtagtattccagcatccttctatatctgaaaaatgtcttcctgttgtaattttacatgaatgattatctgcctgtgaattg

SEQ ID NO: 310884 - DNA, 201 bp, Homo sapiens
acattgttcagctcctttcttttaactgcttccacgtatctctcaagtgttcagaaatgagcttggaggtgaaagtaagacaatgattctattacatgtaycctattagaagaaagtatcttgatctcatgaataagataaaaccccagttataggtggtcttccattttaatgcattatattattgaaaatatctatgaa

SEQ ID NO: 310885 - DNA, 201 bp, Homo sapiens
tcacctttctggaagagagaactaaaacagagaggtcaggtgagaggcgatcttgaagtctagctgccttccaacttcatgccttcaggcaatagattgtwataatgttttaatgtatgttctaagtaatgacttcaattctcaaattttaactttaattcttttttttgtatttttactgtgctatgccctttcatacct

SEQ ID NO: 310886 - DNA, 201 bp, Homo sapiens
tattataatgttgacatctttttgtagttgatctggtaaaaagaagtggcaaatcagccactttgaagagcccttccatttctacacacattgctcttctrtgctctgggactggactctccttttaccccctaccttccaagtgattgtcatttttacttgtggcttcctctttctctgccttcccttaagatatttatg

SEQ ID NO: 310887 - DNA, 201 bp, Homo sapiens
tcttgcaccaaaagttatagtaaataatcaatgatgtctgcaaaggtttaacttcaaggatgccaattattattataaacataatgaaaatcattaaaaaataatgttgtagatgaatattattgaaatgaaatgatgttcacattattatagtaaataaagataacggtttgtgaaagggaacaaacattatcattcaac

SEQ ID NO: 310888 - DNA, 201 bp, Homo sapiens
tgataattgtcattatctcatttcgatcttagtttttcaaatggaagtgtcctagtttttgtagtttatctatgataagtaagcttttaaaaatttttttygtttttcataccaaatatacactcaccatggtatttctgatgctttttgatggtactgtcttgagtgtgtgtgtagctgggcattggactaatgtagtaa

SEQ ID NO: 310889 - DNA, 201 bp, Homo sapiens
aattttagtgataattgtcattatctcatttcgatcttagtttttcaaatggaagtgtcctagtttttgtagtttatctatgataagtaagcttttaaaawtttttttcgtttttcataccaaatatacactcaccatggtatttctgatgctttttgatggtactgtcttgagtgtgtgtgtagctgggcattggactaa

SEQ ID NO: 310890 - DNA, 201 bp, Homo sapiens
ataaaatgaattcattttatgaatgtatgaaaaactcgtgaaaagggctttctgtaaaagattttttagcccgggggctttggggtcaggcactaatggtrggtcatgtgttgtaagagttgaagtcattcctatctgggttgaagcggggtaaatctcagtgatggtttggggaatggtggttaaattcacgaggagtta

SEQ ID NO: 310891 - DNA, 201 bp, Homo sapiens
gtgataattgtcattatctcatttcgatcttagtttttcaaatggaagtgtcctagtttttgtagtttatctatgataagtaagcttttaaaaatttttttcgtttttcataccaaatatacactcaccatggtatttctgatgctttttgatggtactgtcttgagtgtgtgtgtagctgggcattggactaatgtagta

SEQ ID NO: 310892 - DNA, 201 bp, Homo sapiens
gaaggtgccaaatggtaaagggtttaagttagtttgaatctcaagtgacttaaatattatatagacaagaagaaacacaaagaatatgtacagaaactaaratagactgtgtgtgtatgtttgttcctgtttgtgtgtatactacaaatacgtagagattatcccagtaagaacgacatttgaaataattaaaagcattga

SEQ ID NO: 310893 - DNA, 201 bp, Homo sapiens
gattagcacagaaataactaaaatagaaaagaaaaaaattagaagaaattgaggaaactaagacttgtttttttgaaaagttaaataaaattgacaaatayttagagtaagaaaaaagagagaggagtcaaataaaatcagaaatgaaagtggagacattacaacagatctcacaaaaatgaaaaacacatagagcaatca

SEQ ID NO: 310894 - DNA, 201 bp, Homo sapiens
taactaaaatagaaaagaaaaaaattagaagaaattgaggaaactaagacttgtttttttgaaaagttaaataaaattgacaaatacttagagtaagaaaraagagagaggagtcaaataaaatcagaaatgaaagtggagacattacaacagatctcacaaaaatgaaaaacacatagagcaatcatacaccataaaatt

SEQ ID NO: 310895 - DNA, 201 bp, Homo sapiens
cttgggccacacataaaatacactaacactaacgatagctgatgagctttaaaaaatgcaaaaagaatctcataatgttttaagaaagtttatgaatttgygttgggccgcattcaaagccaccatgggccacatgtggcccgcaggttggacaagcttgccctaaattctcattcagttttcatattcaattatgttttt

SEQ ID NO: 310896 - DNA, 201 bp, Homo sapiens
tgttaactaaagtctttccttaaaccttgtctcaaactattctccttggattctgttacataaacattcatagtttcaccaccaacaatgctcaagtcttyaattggacatgattttgggaatctaaaggcatattttagctcactgagcatccttacctccttaatcaccattctgtcaaatttaaaatagtaaaacttg

SEQ ID NO: 310897 - DNA, 201 bp, Homo sapiens
ggttgacacacctgaagaagtgagcttgcacaaatattcttcccgttacttgggttagaaatgggttaacttggaaaatccatttagatttccaaagtcckttccagcactctcctgtttcatagttgtgatcttcaatgcaagctatcaagtactccttacttttgacagtttttctcagcatgttgcaatttccttttg

SEQ ID NO: 310898 - DNA, 201 bp, Homo sapiens
aaaccctgttagaactcataaatgaattcagtaaagttgcagaacacaaaatcgacatatttaaatcagtagtatttttatacgcaaatagtgacctaatwgaaagaaattaagaaaaaatctcatttacaatagtataaaaatgacatatctaggaataaatttaaccaaggaagtgaaagatctgtatactgaaaacta

SEQ ID NO: 310899 - DNA, 201 bp, Homo sapiens
ccttaaaccttgtctcaaactattctccttggattctgttacataaacattcatagtttcaccaccaacaatgctcaagtctttaattggacatgattttrggaatctaaaggcatattttagctcactgagcatccttacctccttaatcaccattctgtcaaatttaaaatagtaaaacttgaacatcccttcctaatc

SEQ ID NO: 310900 - DNA, 201 bp, Homo sapiens
agccaaccagctatacctcttttgaagattttaagaacttagcctcctgaacagtcttcttcgaaagtggtgtgtctctgtgtgcattatatgttgtcaaygatctagagaagcagcccaaagtttcaagagtgacagcactttgcaacttcaggaatcacaatggtgttgatttatactcaggctctcagagtagctgcc

SEQ ID NO: 310901 - DNA, 201 bp, Homo sapiens
tacatacccaaagggaattaaataaccatctcataaagtttttgtgctgcagtgttcactgtagaattgttcacaatagacatgatatggaaacaacctaktgttcattgacagacaaatgaataaagaaaatggatatatgcaatggaatatgattcagtctttacaaagaatgagatctttccatttaccacagcatga

SEQ ID NO: 310902 - DNA, 201 bp, Homo sapiens
tttagctcactgagcatccttacctccttaatcaccattctgtcaaatttaaaatagtaaaacttgaacatcccttcctaatcaaatctacttctgctctwacttaaatgtcaacaaattgccccattcttccactctgctcggactagaaaattgggaaccattctaatctttcacatctccttcacatcccacatccag

SEQ ID NO: 310903 - DNA, 201 bp, Homo sapiens
aatggagaaaggtaggtcagaggctacaaagtagcacatatgtaggatgaaaaagtctagacatctaatgtatcatatgaggattataggtaataaagttrtactgtatatggtattcatgctgaatgaatagattttagctgctcttgctacaaaaattttaaaaagggtaactgtgaaatgatggatagatggatatgt

SEQ ID NO: 310904 - DNA, 201 bp, Homo sapiens
tggcggcagtgacactttggaattgtgtttgcattttaactacaatattatactgttcatccatttcctcttttgagccttcacctgcctcaaatactctycaacacagccaggaccttgcatttcatttacatgattattgatcactttggtgtcttattaaggccaatttgaattatgatcttatagttccaaatgctg

SEQ ID NO: 310905 - DNA, 201 bp, Homo sapiens
tgaacagtcttcttcgaaagtggtgtgtctctgtgtgcattatatgttgtcaacgatctagagaagcagcccaaagtttcaagagtgacagcactttgcarcttcaggaatcacaatggtgttgatttatactcaggctctcagagtagctgcccaaacccactggaagcatattatgatgaaaggtttgaggggtttaaa

SEQ ID NO: 310906 - DNA, 201 bp, Homo sapiens
cacttcttgaataaatgacatatcctaatttaggatacatcaccagattcaagtcagagagtatcctgtgccagtcaataagagtgcgggtcactggaagrtcccttcgtagaatttttctcagggcttcattggataactcctgtaattcttccaagactgcagcttgaaatttgttctcttgctcttccacaagccttg

SEQ ID NO: 310907 - DNA, 201 bp, Homo sapiens
  misc_feature (1)...(201): n = A,T,C or G
atataccttattgaatttccattagacttcttgttggaaagcttacaaattatatgttgatagagtttttgtacatatttattattcataagacaagggtnttccattatgtccaaaattagcaaaatgttatatgcaacaaaaacatttttataatgattaggttgtttagctgtattttcagattatgaatacagaaat

SEQ ID NO: 310908 - DNA, 201 bp, Homo sapiens
ttcaagaaccatataacccatcaagactgaaccaagaagaactagaaaggttaaacagaccaataacaaaaaggagactgagaggctgtgtgcagtgattygtacctgtaatcccaatgctttgagaggccaaggtgggaggatcacttggggctaggagtttgagaccagcctgggtaacatagtgagaccctgtttgga

SEQ ID NO: 310909 - DNA, 201 bp, Homo sapiens
ttgctggcagcatctggtccctttgttttcttcttctttttccccactgtagttggtacaggaggttcatatttctttttcttgtccttgagttgttagarcttgtcatccttcttgccacctccaggaccatgaccaccactctgactttgacccatcttgccttggcctgggagagcttttaacattttttctttatgt

SEQ ID NO: 310910 - DNA, 201 bp, Homo sapiens
agatgcaaaattccccaacaaaataatagcaaatcaaatttatagcactttaaaaggatcatattccatgaccaaataatatgtgtccctggcatgcaagsatggctcaacatacagaaatcaatcaatgtgatacaccacattaacagaatggagataaaaatcacatgattatctcaaaaatatagaaaaagcatgtga

SEQ ID NO: 310911 - DNA, 201 bp, Homo sapiens
gccagacgtggtagtgcacgcctgtaattccagctactcaggaggctgaggcacgagaattgcttgaacctgggaggcagaggttgcagtgagctgagatkgcgccactgcacttcagcctgggcaacagagcgagagtcctcaaaacaacaacaacaacaacaacaacaaaaacaactactagaactattaaattcagta

SEQ ID NO: 310912 - DNA, 201 bp, Homo sapiens
ttgaagattttaagaacttagcctcctgaacagtcttcttcgaaagtggtgtgtctctgtgtgcattatatgttgtcaacgatctagagaagcagcccaargtttcaagagtgacagcactttgcaacttcaggaatcacaatggtgttgatttatactcaggctctcagagtagctgcccaaacccactggaagcatatt

SEQ ID NO: 310913 - DNA, 201 bp, Homo sapiens
atagtatcctttgtaatttcaggattttttaaattggatttgccctgagtcttcaaattctttaaggaattaatagccactattaaatctatagtatgtgstgacactctgtaggaaactgtgaactgtaaaaaatgaataaagtgttatctttcttttaagggcagaaaaaggaatgcagaaattactgttttataagta

SEQ ID NO: 310914 - DNA, 201 bp, Homo sapiens
aaaagaatctcataatgttttaagaaagtttatgaatttgcgttgggccgcattcaaagccaccatgggccacatgtggcccgcaggttggacaagcttgscctaaattctcattcagttttcatattcaattatgtttttcaaaattagataattttttttttctttctggaatgaggtacaccgagctgaacctactcc

SEQ ID NO: 310915 - DNA, 201 bp, Homo sapiens
gtatcatatgaggattataggtaataaagttatactgtatatggtattcatgctgaatgaatagattttagctgctcttgctacaaaaattttaaaaaggrtaactgtgaaatgatggatagatggatatgttaatttgattcactgtaataaccttcttactatctacgtgtgttccataacatcatgttgtatacctta

SEQ ID NO: 310916 - DNA, 201 bp, Homo sapiens
ggttggacaagcttgccctaaattctcattcagttttcatattcaattatgtttttcaaaattagataattttttttttctttctggaatgaggtacaccragctgaacctactccattttgggaagggtctattacctgtaaagtgatatttagcgggtctatagtggtattgggaccagtgtactatatgtttatggcc

SEQ ID NO: 310917 - DNA, 201 bp, Homo sapiens
atttacatgattattgatcactttggtgtcttattaaggccaatttgaattatgatcttatagttccaaatgctgccaagttcctcagcctcatccctcawtggtatgtgacaggcaccaaatgaggtttttaaaaatccatgtgattaatccttatttcaaactggtagtttttaagggaacaaaatgagtttattttct

SEQ ID NO: 310918 - DNA, 201 bp, Homo sapiens
cttgtttacaaattggtaaatttgtgccctgataagtatatatgaaatcaaaacaaagaaaaaaattgtaaataagatccagtgatgttttgttccctatktaatggcaagttttgaagttacagcaatgagaaagggcagaaaatacctttgtagagccaccttcacttaataaaactcctttgctattagaaactggaa

SEQ ID NO: 310919 - DNA, 201 bp, Homo sapiens
tacatgattattgatcactttggtgtcttattaaggccaatttgaattatgatcttatagttccaaatgctgccaagttcctcagcctcatccctcattgrtatgtgacaggcaccaaatgaggtttttaaaaatccatgtgattaatccttatttcaaactggtagtttttaagggaacaaaatgagtttattttctatt

SEQ ID NO: 310920 - DNA, 201 bp, Homo sapiens
ctttatctttgtttctaattctaaaacaatgagttttgatttcagaacttaaaactgaaaaagcagaatattgacatttcccccaactcatcagtgttaayaatgtttttgtttcactttttaaaatctctaaatatttgtatattaacaataaaaatatagcatgctactttttggtaacttgcttttcttcataaaccc

SEQ ID NO: 310921 - DNA, 201 bp, Homo sapiens
taatagcattttgaatgctgtcttcttcatttttatgatgtcataacatttacttacatcactatatttttatgatacattattcttaatggctgcttagyattgtatcatattttgagctttaatttgtttattcccctgcacttatcttgcttttataaataatgctaatgtgagcattcttgtacatcactgtctgag

SEQ ID NO: 310922 - DNA, 201 bp, Homo sapiens; identical to SEQ ID NO: 64824

SEQ ID NO: 310923 - DNA, 201 bp, Homo sapiens; identical to SEQ ID NO: 64825

SEQ ID NO: 310924 - DNA, 201 bp, Homo sapiens
ttctttgtccattctctttttaaagagaaagaacaggagctttgtgttcgtgagagactagcagaggacaaactggctagagcagaaaatctgttgaagarctacagcttgctaaaggaacggaagttcctgtctctggcaagtaatccaggtatgagaatcaacttggtcaacagaagctggtgctacaaatgaagaaat

SEQ ID NO: 310925 - DNA, 201 bp, Homo sapiens; identical to SEQ ID NO: 64826

SEQ ID NO: 310926 - DNA, 201 bp, Homo sapiens
ctaagtccaagtgcaaggacctgaagaaaaggcttcacgctgcccagctgcgggctcaagccctgtcagatattgagaaaaattaccaactgaaaagcagrcagatcctgggcatgcgctagccaggtagagagacacagagctgtgtacaggatgtaatattaccaacctttaaagactgatattcaaatgctgtagtgt

SEQ ID NO: 310927 - DNA, 201 bp, Homo sapiens; identical to SEQ ID NO: 64821

SEQ ID NO: 310928 - DNA, 201 bp, Homo sapiens
gggaggttgggtggggcccagtgcactagagggtagggaggggtctgagaatcatcctgggagtctatggggctgatgggaggtgggatcatgcatgaggrgaggccctgagccaccacgcaggctcccattgtcccactggactccacttacaaaaggcaaattcaaagacacaagtagtagccaggcgtggtggctcgt

SEQ ID NO: 310929 - DNA, 201 bp, Homo sapiens; identical to SEQ ID NO: 64822

SEQ ID NO: 310930 - DNA, 201 bp, Homo sapiens; identical to SEQ ID NO: 64823

SEQ ID NO: 310931 - DNA, 201 bp, Homo sapiens
tcagtggggaaagtaaagagaacatcatgaggagtgagaattctgagagtcagctcacatctaagtccaagtgcaaggacctgaagaaaaggcttcacgcygcccagctgcgggctcaagccctgtcagatattgagaaaaattaccaactgaaaagcagacagatcctgggcatgcgctagccaggtagagagacacaga

SEQ ID NO: 310932 - DNA, 201 bp, Homo sapiens
gtctctctcccgcctttgctcagcatcatctatagcatggctttgcatttcctcaaaagcccaggccagatgcccagtaccttcaggcggtccagtgtccyccaccccctagagccatctcattcaggactgccctcccctgaaacgttttatgtttccagaagacccttctccttccagggcaaagccctttcagttagg

SEQ ID NO: 310933 - DNA, 201 bp, Homo sapiens
gctcagcatcatctatagcatggctttgcatttcctcaaaagcccaggccagatgcccagtaccttcaggcggtccagtgtcccccaccccctagagccayctcattcaggactgccctcccctgaaacgttttatgtttccagaagacccttctccttccagggcaaagccctttcagttaggcaagctagttccctcag

SEQ ID NO: 310934 - DNA, 201 bp, Homo sapiens
ttaaagagtttatttacatttgccctgatagtctttgagcaaaagatgaaaatagctaagtaaggatgatgtgttttactttataggatacacagataagkatgggaatctacttatatgtgaatcatggcaaatatttaaaatgagccataggaatcaagtatccactggggcaagcagacattttagggtattgagtgc

SEQ ID NO: 310935 - DNA, 201 bp, Homo sapiens; identical to SEQ ID NO: 64827

SEQ ID NO: 310936 - DNA, 201 bp, Homo sapiens
tctgggaacaagtggccccatagacgccagacacacagagcctgagctgggctcattctccagatagaagttcttcctcctattgccctgacacctggcaygcggcctgctcgatgtcccatctcacccatctgcgccctcccccagctgggcaccagcaccctggctgttgaaggccagtcggggagatggatgaggaag

SEQ ID NO: 310937 - DNA, 201 bp, Homo sapiens
tgactgaagtgcccttgtgggaccctgagcccgtgccctggagtggcacagggaggtgtgccagcaatggggaccgaggtcactggggactgctggggttmgggctagtggcctgtctggctgctgtctgcttccctcgttcacatcctgctggagccttaaataggagcccaaaagcttttctttcttacttttttttga

SEQ ID NO: 310938 - DNA, 201 bp, Homo sapiens
ctctggtaatccatagtactcccccgcctccacttgccagcctcgtgattccttcattgacacatagctcagttcccataaaagggctggtttgccgcgtsggggagtggagtgggacaggtatataaaggaagtacagggcctggggaagaggccctgtctaggtagctggcaccaggagccgtgggcaagggaagaggc

SEQ ID NO: 310939 - DNA, 201 bp, Homo sapiens
tggtgggggtaaggtgggctgtaggccagctcccaaatgtgtgctgggcataacagaagacccattcttgactgaagtgcccttgtgggaccctgagcccstgccctggagtggcacagggaggtgtgccagcaatggggaccgaggtcactggggactgctggggttcgggctagtggcctgtctggctgctgtctgctt

SEQ ID NO: 310940 - DNA, 201 bp, Homo sapiens
caacacccagagtcgccggactttcatcaagtcagtaccgccatttctgcgcacccatggctttgatgggctggaccttgcctggctctaccctggacggrgagacaaacagcattttaccaccctaatcaaggtgctggtcaggtcagggacagggagggaggtgggcaggcatgagggaatggggtgggctagaagccg

SEQ ID NO: 310941 - DNA, 201 bp, Homo sapiens
cattgacagcagctatgacattgccaagatatcccagtgagtctcctgccccaggcagcctccccagaacctctgccaacactcctgtttccccgccaccsccagccctagcactccatgtagactgaggacactgggcttccagtcccagttcttccaaagccttgatgtgtgaccttgagcaagtcacttccctgccct

SEQ ID NO: 310942 - DNA, 201 bp, Homo sapiens
gaggacactgggcttccagtcccagttcttccaaagccttgatgtgtgaccttgagcaagtcacttccctgccctgtgcctcagtttccccatctgtcaartgaggcataacaatccttgcctttcctttttcacctgggctgttggctgagcagttgagagagctgctatgaaagtattttggaaagggaagtggaaaaa

SEQ ID NO: 310943 - DNA, 201 bp, Homo sapiens
agtgaggagcttgggtctcccgcatccactgtatggatgttccaggggctccagactagataggtacaaggcctacctgtttgtcaagggcctgcctgatrtgtagcaaagaaagcagagcccagagagagagcaggacttgccaagagtcacacagcaagttaacagtggatctcccaattccctgccaatgctctattt

SEQ ID NO: 310944 - DNA, 201 bp, Homo sapiens
gggggcagcctaagtatctccagttaccaggggcagaaggagagtctaaacaaattgttcacaataccagcagcaatcactttaactttgggatttcatgyaccagctagaacaaagcacagaccgaaaggcaaatgtctcccaaagtcatctgtgggccaataggggtcacccactgtccgatgctccctccaggacagg

SEQ ID NO: 310945 - DNA, 201 bp, Homo sapiens
tccaccactatgaatctctatgggattcccatgatgtcctatgggaggacatcagcggcctaacccagcctctcacccaaagcaggaaaccttctatggcstctcagacatggggccacccagtgtcatgacaatgtcattccactcctgccctccccacctccctgtgctccacaggaaccccaacctgaagactctctt

SEQ ID NO: 310946 - DNA, 201 bp, Homo sapiens
tccacaggaaccccaacctgaagactctcttgtctgtcggaggatggaactttgggtctcaaaggtaggagcctctccccaggggcaggacggcagaggaygatggcataggagtgaggagcttgggtctcccgcatccactgtatggatgttccaggggctccagactagataggtacaaggcctacctgtttgtcaagg

SEQ ID NO: 310947 - DNA, 201 bp, Homo sapiens
ctgtcggaggatggaactttgggtctcaaaggtaggagcctctccccaggggcaggacggcagaggatgatggcataggagtgaggagcttgggtctcccscatccactgtatggatgttccaggggctccagactagataggtacaaggcctacctgtttgtcaagggcctgcctgatgtgtagcaaagaaagcagagcc

SEQ ID NO: 310948 - DNA, 201 bp, Homo sapiens
aggggcttggcttaaatgggtggaggggatgactgtaggtgctgggcaatatttggggtgatgagagactgtagacggaagcgcagctgagcccctctggragaggggaaccctctcctgcccctaacgtgctctccagggagcatggaaaatgagcaagactctactttgccatactctgtcttctccactggggaaaac

SEQ ID NO: 310949 - DNA, 201 bp, Homo sapiens
tgacagattcagcaacactgtgagttcccagaaggagggagggccaggagggggccgcaagacctgccatctgccagtgctcacacaccaatctctctagycctcagtacagtcctgcaagaggggggtcatgaggcccattccacagataaggaaactgaggcccaaagtctgggcatgctgcgttgctctgggaaggtg

SEQ ID NO: 310950 - DNA, 201 bp, Homo sapiens
tgagtgatgcccacattgtttgcagcaggagaaacagaattagaggcgaggaaggatttcctggtccattgtgatattgtgccccagcttgggggacatgscgagggagcacaggactgccattccgggtgggttacaagttagaggcactctcaccaggaggcagagaaaggtgggccagagtccctcatggatgaagga

SEQ ID NO: 310951 - DNA, 201 bp, Homo sapiens
agaaggagggagggccaggagggggccgcaagacctgccatctgccagtgctcacacaccaatctctctagccctcagtacagtcctgcaagaggggggtyatgaggcccattccacagataaggaaactgaggcccaaagtctgggcatgctgcgttgctctgggaaggtgatctgcagggtaaatggagtgagggcagg

SEQ ID NO: 310952 - DNA, 201 bp, Homo sapiens
gcccattccacagataaggaaactgaggcccaaagtctgggcatgctgcgttgctctgggaaggtgatctgcagggtaaatggagtgagggcagggggccraatggggagaggctgggagccgaggaggtaggagtcattgtgccctcagagccaaccacctgatttctgcatctgtcaaatagtaatagccccttcctat

SEQ ID NO: 310953 - DNA, 201 bp, Homo sapiens
ttttttgtttcactctagcctctgctactctgtgtggccttgggcctgtcctcagtgtcaaccagcaggcctcacatctctgtttaaatggaagaagctamgcagggccaaggcagccaccatctctgggtcatttgcctctggtttgtataaacttgtgtgatgcatgcagcctgcagaccctgcagagagtgaggctgc

SEQ ID NO: 310954 - DNA, 201 bp, Homo sapiens
caatctgcaccccactcctccctacccaaccccacaccccattggtgctcagctctgggctcagcctgaggtctcttgccgaatcctggcccgggccccaycccagacttctccttcaggctctgcatacaaactggtctgctactacaccagctggtcccagtaccgggaaggcgatgggagctgcttcccagatgccct

SEQ ID NO: 310955 - DNA, 201 bp, Homo sapiens
aaggcaaatgtctcccaaagtcatctgtgggccaataggggtcacccactgtccgatgctccctccaggacagggagtaattgagtgctgatgggtgtgcmtgggtttggggagaagattagtcagttttttaggaaaaggatgggtgacttgaggatgggaccactgatgagccactttatcacttccactaggccccag

SEQ ID NO: 310956 - DNA, 201 bp, Homo sapiens
tcaaccagcaggcctcacatctctgtttaaatggaagaagctaagcagggccaaggcagccaccatctctgggtcatttgcctctggtttgtataaacttrtgtgatgcatgcagcctgcagaccctgcagagagtgaggctgcaggatggagcaggagctaaaagagatttggagagtggcgtctcctggtgacctgcaa

SEQ ID NO: 310957 - DNA, 201 bp, Homo sapiens
ataggttatcctgagtggtttaagacaccaaaataataagccttggctatttcccataaatttggattcccagctgggtgtggttgcacacgccattgatsccaacactttgggaggctgaggcaggaggatggcttgagcccagaaggtcgaagctgcagtgagcccagatcacgccactgcactccagcctgggtgaca

SEQ ID NO: 310958 - DNA, 201 bp, Homo sapiens
catgcatgcctggaggcgacccctgtcccaatcatgccctcccagagctgtgtggcctcaggatcccagctctgcaggtcctggaaaccccaccagaggcscaaggcacctagcatatcagtgctgagcatgctacagggctgattttggtcctagattttccaagatagcctccaacacccagagtcgccggactttcat

SEQ ID NO: 310959 - DNA, 201 bp, Homo sapiens
ctctgggcctcccctgccaggtgcagtacctgaaggacaggcagctggcgggcgccatggtatgggccctggacctggatgacttccagggctccttctgyggccaggatctgcgcttccctctcaccaatgccatcaaggatgcactcgctgcaacgtagccctctgttctgcacacagcacgggggccaaggatgcccc

SEQ ID NO: 310960 - DNA, 201 bp, Homo sapiens
acactgagaaagcccatgcccacagcctgcttggaagagtctagaagcttcagagtgctctcctccactagggcatcttccagatctgcctacaactgcamcccatcccgaagggcgaggggttctctgtaacaggtggaaaactgaggcccacagcaggcatcaggggagacgagctccttaccagccgcccaactgaga

SEQ ID NO: 310961 - DNA, 201 bp, Homo sapiens
agtgctgagcatgctacagggctgattttggtcctagattttccaagatagcctccaacacccagagtcgccggactttcatcaagtcagtaccgccattyctgcgcacccatggctttgatgggctggaccttgcctggctctaccctggacggagagacaaacagcattttaccaccctaatcaaggtgctggtcaggt

SEQ ID NO: 310962 - DNA, 201 bp, Homo sapiens
caggagagaaggggatttcctggagagaagagggagaggaggctgtgaacaagtggggaacagccaggcttatcacagggcagagtgggggccctgtccasgatccttggctgctcagctgtctctccttggccacctggagctgccaagcattcttgaccccctgcagctgtccctagagcattccatgcctgagctccc

SEQ ID NO: 310963 - DNA, 201 bp, Homo sapiens
aaagtcatctgtgggccaataggggtcacccactgtccgatgctccctccaggacagggagtaattgagtgctgatgggtgtgcatgggtttggggagaarattagtcagttttttaggaaaaggatgggtgacttgaggatgggaccactgatgagccactttatcacttccactaggccccaggcaggttggggagtac

SEQ ID NO: 310964 - DNA, 201 bp, Homo sapiens
cctcccccagagctattcctggcctgggcgcctctccaccctccagtcctcctgcttgacctgaccccacagctgggaatcgtttgctgggggtggggcarcccctgactatataagcctggacctaggtgtcccaggcaccctagaggcccaggccccccaacggctgacccctgcacactccaccctggccccccagcc

SEQ ID NO: 310965 - DNA, 201 bp, Homo sapiens; identical to SEQ ID NO: 64847

SEQ ID NO: 310966 - DNA, 201 bp, Homo sapiens; identical to SEQ ID NO: 64848

SEQ ID NO: 310967 - DNA, 201 bp, Homo sapiens
gaggtcactggggactgctggggttcgggctagtggcctgtctggctgctgtctgcttccctcgttcacatcctgctggagccttaaataggagcccaaargcttttctttcttacttttttttgagacaaaatctcactctgttgcccaggccggagtgcagtggcacaacctctgccgcctgggttcaagcgattctcc

SEQ ID NO: 310968 - DNA, 201 bp, Homo sapiens
tcctcggccagcaggtcccctatgccaccaagggcaaccagtgggtaggatacgacgaccaggaaagcgtcaaaagcaaggtaggtttccccaaggccacrcctcaggacaaagagaaagaaggaggccccgctcccagcagccagattcctgtcccttgcactgaggtctgggctgggctcacagagcacatgtgccctg

SEQ ID NO: 310969 - DNA, 201 bp, Homo sapiens; identical to SEQ ID NO: 64849

SEQ ID NO: 310970 - DNA, 201 bp, Homo sapiens
caacggctgacccctgcacactccaccctggccccccagccagtccagcaatgatggaaaaaaacacctccgagggccctgcctgcagtccagaggagacygcatctgaatctgccaaggtgcccacagcagagcctcccggagaagtggcagtatcagagtccaccagagaagagcaggtgcccaagccgcaggcccctg

SEQ ID NO: 310971 - DNA, 201 bp, Homo sapiens
gaggctgatttccccagatcaccagcaggaaaagaagccccatggagaggggcgcctgtggccacattgcaaagacctcacactctctccatcccctcagsctcggagtgggtgcctgtgagtgcccggcccatgatggtgacccagcagactgtgcggaacctggctctgggagacaagttcctcctgcgcgtgtctgca

SEQ ID NO: 310972 - DNA, 201 bp, Homo sapiens
ttgccctgacacctggcacgcggcctgctcgatgtcccatctcacccatctgcgccctcccccagctgggcaccagcaccctggctgttgaaggccagtcrgggagatggatgaggaagtgactcctcaaggggcccttgtggttcctcccccagagctattcctggcctgggcgcctctccaccctccagtcctcctgct

SEQ ID NO: 310973 - DNA, 201 bp, Homo sapiens
atctttgagcgcccactagacccactggactcacctcccccatctcttctgggttccttcctctgagccttgggacccctgagcttgcagagatgaggccrccatgtcctctgcctagccgcagagagccccagtgggaggccagcgtcctcagattcacctgccttggacttaacccaagcatggctgatggccttccaa

SEQ ID NO: 310974 - DNA, 201 bp, Homo sapiens
aagctggtgatgggcatccccaccttcgggaggagcttcactctggcttcttctgagactggtgttggagccccaatctcaggaccgggaattccaggccsgttcaccaaggaggcagggacccttgcctactatgaggtaatggagttggggagaaggtaggattcccccacaccaccagcagccctggggaaggtgatt

SEQ ID NO: 310975 - DNA, 201 bp, Homo sapiens
tttcaccatcttggccaggctggtcttgaactcctcacctcatgatccacctgcctcggcctcccaaagtgctgggattccaggtatgagccaccacgccyggcctaaagcttttctattaataatttcctgcctcaccctccatccccttcctcctcagacacctggatttcattagcatcatgacctacgattttcatg

SEQ ID NO: 310976 - DNA, 201 bp, Homo sapiens
gtggcacaacctctgccgcctgggttcaagcgattctcctgcctcagcctcccgagtagctgggattacaggtgcctgccaccatgcctggctaattttcrtagttagagtagagacggggtttcaccatcttggccaggctggtcttgaactcctcacctcatgatccacctgcctcggcctcccaaagtgctgggattc

SEQ ID NO: 310977 - DNA, 201 bp, Homo sapiens; identical to SEQ ID NO: 64832

SEQ ID NO: 310978 - DNA, 201 bp, Homo sapiens
ctcagtgtcctgtggggttagtcacattcacttatagctgcagagtcagaggccaaggatggagatcccgtctccaggacccactccctgcctggcaagaygtggagtcacctagcagagggcgagggcatccagggagggccagatccagaggctcccaggccctgcactgccactccccagcagagacagcagggttga

SEQ ID NO: 310979 - DNA, 201 bp, Homo sapiens
ccagggagggccagatccagaggctcccaggccctgcactgccactccccagcagagacagcagggttgagaggcagccacaccctggtgtccccagtccycaggaaagggaagagcatgcatgctgctgagggccctgaataaatcacttttacttatttttaaattgtgagcacatcttacgtgctaaagagtgcataa

SEQ ID NO: 310980 - DNA, 201 bp, Homo sapiens
gcatgcctgaggaagtggaagggagaggttaggacatttgttgctgaaaatctccagcaggtacaggcacatgggcctgcaccactaggcacctgggatakccctctggctatggggctgaggtcttccttccagcccaggaaagagcagaggtcaagaggcagattttttgtttcactctagcctctgctactctgtgtg

SEQ ID NO: 310981 - DNA, 201 bp, Homo sapiens; identical to SEQ ID NO: 64846

SEQ ID NO: 310982 - DNA, 201 bp, Homo sapiens
tgctccaccagcaggagagcaagaaagggtaggtgggtgggttgaggggctcccttgtcctcagctccaaggagcttctgagtaagggaagggtaaggggrcactgggttctcctttggtgagaagggaaggaagtgctaagtctcagaggaccccgaactgtaggaagtggaaagggaggagctggagaggggaatgtta

SEQ ID NO: 310983 - DNA, 201 bp, Homo sapiens
gtctcccaaagtcatctgtgggccaataggggtcacccactgtccgatgctccctccaggacagggagtaattgagtgctgatgggtgtgcatgggtttgrggagaagattagtcagttttttaggaaaaggatgggtgacttgaggatgggaccactgatgagccactttatcacttccactaggccccaggcaggttgg

SEQ ID NO: 310984 - DNA, 201 bp, Homo sapiens
agaggctgccagaaaagccaggaaattgctggcaagaaaggccagtggtggggtgcaggagtgggaggaaggctgggaaatgcggctgagtcacatctccrgaagccccccatcatcaccctagtggctcttctgctggcaggtgcctcatgaagacctgacccaaagttttcaaaactctgcggtttctcaaccctcctc

SEQ ID NO: 310985 - DNA, 201 bp, Homo sapiens; identical to SEQ ID NO: 64845

SEQ ID NO: 310986 - DNA, 201 bp, Homo sapiens
gctgggagcccccagagaggctggggaggctgggcctccagggctatgtgctggagctctgcagagagggaggtgagtgctgggctaagtcttgcatacayccaggggaggttgtcatggagggctgcagggacaagtgcacaggccctgtggttggtcagtctgggagagatacagaaggaggggatgcgagcagtaggc

SEQ ID NO: 310987 - DNA, 201 bp, Homo sapiens
tgcttccctcgttcacatcctgctggagccttaaataggagcccaaaagcttttctttcttacttttttttgagacaaaatctcactctgttgcccaggcyggagtgcagtggcacaacctctgccgcctgggttcaagcgattctcctgcctcagcctcccgagtagctgggattacaggtgcctgccaccatgcctggc

SEQ ID NO: 310988 - DNA, 201 bp, Homo sapiens
agagccagacttggaaacctggaatgcctggctctaaggcacatgcatgcctggaggcgacccctgtcccaatcatgccctcccagagctgtgtggcctcrggatcccagctctgcaggtcctggaaaccccaccagaggcccaaggcacctagcatatcagtgctgagcatgctacagggctgattttggtcctagattt

SEQ ID NO: 310989 - DNA, 201 bp, Homo sapiens
tctccttttgacaagtcctcatcattctttgaggaattccttgctatctggcacaacagataatgcagatggatttgtaccagccagaaatcagccatctmtctaaggatccctaatttcctttagtagaaaatcatatttagaaattaagatctgggctctaggtgtgtccactgatttggggggagtcattgttccaag

SEQ ID NO: 310990 - DNA, 201 bp, Homo sapiens
tctcttctttaacagtaagaaatttagctgtatgttattccatgtataatttaatatttgtacttatttgattaattattttatatatatctaaactcctrttactgctactatgatttcccttttttaaaaaagatatatttgtcatgttttaacattaaggttttgttagcttcataaaacaagttgagcagtggtctc

SEQ ID NO: 310991 - DNA, 201 bp, Homo sapiens
cctactcgggaggctgaggcaggagaatggcgtgaacccgggaggtggagcttgcagtgagccgagatcgcgccactgcactccatcctgggtgacagagmgagactccgtctcaaaaaaaaatttttttttccccacaatctcttatctatccccatttccattcttgctctccttgttacattcacttgggctgccctt

SEQ ID NO: 310992 - DNA, 201 bp, Homo sapiens
ggcaatatctttttatattttttttagtgattgctcgaggaattacaatatacatcactaatttttcgtagtctacattgtaccccttgaaataaaaagtrcgaattgcccatccatttctccatcatccaggaaagacgttggttttgaggttgacatacctataaaggacagtaactaccatggcttccaccgctttgg

SEQ ID NO: 310993 - DNA, 201 bp, Homo sapiens
agctagggcacagctgcttctctgaatgagtctcacaggtggaaatcaaggtgtctgcagggctgcattattttctggaggcattggggagaaaccatttycaggttcacttgggttgttgggctaatttagttccatatggttgtagggcagaagtccctatttccttgctggctaacagctgggggttgttctcacctt

SEQ ID NO: 310994 - DNA, 201 bp, Homo sapiens
aaacggtaagtatagtacgttttaaagcttctattatctcgttctttgatctataaaagatttcaatcttttttttttttttttttttgagacggagtttmactcttgttgcccaggctggagtgcaatggcatggtctcggctcaccgcaacctctgcctcctgggttcaagcgattatcctgcctcagcctcccaagta

SEQ ID NO: 310995 - DNA, 201 bp, Homo sapiens
ttcttttttggcaataagaagaaatacaatgattagatatgcaaattcatttatctggtgaatgtaaacctgattttaaaagtgtttgttccttctctctrtatctttctgtgtatttatcaatcatctatctatagtctgtgttaggagtcccaaagaccaccccagatttgatgacttgttaggaggaatagcattaat

SEQ ID NO: 310996 - DNA, 201 bp, Homo sapiens
agattaaaaaaaacacaatactgtatatttagggcttggtactatctgaggtttcaggcatccgctgggggccttggaacatatccctcatggatcggggsgactacttaacacactaaattaatatctatttattttctcacagtttctgggtcaggagctagggcacagctgcttctctgaatgagtctcacaggtgga

SEQ ID NO: 310997 - DNA, 201 bp, Homo sapiens
aaaactaagaagtgttctattccatttgttaaaccgaacagacattccccatcaggcatttataacattaatgtgaccacattagtaagtaagcagttctyagtagtagaagagcaaacaccagtcagctctagacttttattaaaattaaatatgatagtgaagtattgagaattttgtttggatacacataaagtgaaa

SEQ ID NO: 310998 - DNA, 201 bp, Homo sapiens
taaaaaaaggatgcgtttaagagtttggctttaatgaagtcaatacctttttgctgattcatcagagacattcttaagcaagactgccttttttttttttwaaaaaaaaaagcaactgagaatgtgtggttatcaagaaagtaatgactgctagtacattttggttttgctgcttttcttcttggtaaggtgtcagcagtt

SEQ ID NO: 310999 - DNA, 201 bp, Homo sapiens
tggtatgataaacctaaagcctagtgcttaataaaacatactctcttaatggaagagaaaaaaattaagaagggatagaattatatggagattttttttttcaaatacaaacagtttattaaaaaatagttaatggaagtggaatagaaggtaaaatgtcaaatgcatggaaagttagtgtctgggacactgctctgtaaa

SEQ ID NO: 311000 - DNA, 201 bp, Homo sapiens
tcccctcaagagagaggaaaagagcagaggttgtgcatttctctgtacttttacataccgttaattacatgtagagaggatgcaatgatcatttattattsttgagtcagtaagcatttggtgtaatgtgactactgtccttactttcacattcaagaggagagacacagagatttccaaggttgatttaatcttggcaca

SEQ ID NO: 311001 - DNA, 201 bp, Homo sapiens
tccattaaaactaactttctctaggcttttctaattttgaaaatgaaaccaccattcttttaaattctcaggttcaaacaaaatatctacaaaatatctaygactcttctaaattctatttctttcttttcttttttttttttttcttgagatggagtctcgctctgttgcccaggctggaatacagtggtgcgatcttgg

SEQ ID NO: 311002 - DNA, 201 bp, Homo sapiens
cagcctcccgagtagctgggactacaggcgcctgccaccaagtccggctaatttttctgtatttttagtagagacggggtttcaccgtgttagccaggatrgtctcaatctcccgaccttgtgatccgcccaccttggcctcccaaagtgttgggattacaggcgtgagccactgcgcccggtctggaattgtgcttttta

SEQ ID NO: 311003 - DNA, 201 bp, Homo sapiens
tatttatatttaaagtgtttctttcacagacagcatataaataggatttttcctttgtatacattctgtcagtctttgccttttaattggaatgtgtattygtttattatttctgctaccttagagatgtggtagtccccccttatctatagttttgctttctgcactttcagttacctatggtcaactgtggtctgaaaa

SEQ ID NO: 311004 - DNA, 201 bp, Homo sapiens
ttatttatttttactttattatgttcactttctttttcttgatcagtatagttaggagtttgtcaattttgttgtgtttttcaacaaaatcaagcctttgrcattgttaatttcctctgttatctgtcagttccctattttattgatgtctcctcttagttttccccttttacttactttgagtttattctctcaattttt

SEQ ID NO: 311005 - DNA, 201 bp, Homo sapiens
ctcagtatgttgcccaggctggaattgtgcttttttttttttttttgagatggagtctcactctgttgcccaggctggagtgcagtggtgtgatcttggctcactgcaagctccgcctcccgggttcacgccattctcctgcctcagcctcccgagtagctgggactacaggcgcctgccaccaagtccggctaatttttc

SEQ ID NO: 311006 - DNA, 201 bp, Homo sapiens
atgttgagaatcttttcatgtgcttatttgcacatgagagagctgtatatcttctttgatgaaatatctgctcaaatcttttgcccatttttaatggttgkttgttttcacattgttgagtcattatttattttgatgttcaaattagtccagtttttctagtgggatccccttcaaggtagcttctgtctccttttgaca

SEQ ID NO: 311007 - DNA, 201 bp, Homo sapiens
ttgcccattggccaggtttctttttcgtttgtattacctttccgttcaagagtagaaggcatgagaagttatagtttatgagtaactgtttcaggaaacargaggctttgtaggctgtgatacttttaaagtatttgtggacagtgtcacttgaaaaagcaggtgtgttcaatgtggtgtgtccagatatgcaattggttg

SEQ ID NO: 311008 - DNA, 201 bp, Homo sapiens
caagagtagaaggcatgagaagttatagtttatgagtaactgtttcaggaaacaagaggctttgtaggctgtgatacttttaaagtatttgtggacagtgycacttgaaaaagcaggtgtgttcaatgtggtgtgtccagatatgcaattggttgggagaataaacttgaagcagtcaacttgcattaatgttagcttggg

SEQ ID NO: 311009 - DNA, 201 bp, Homo sapiens
ctcgatctcctgacctcgtgatccacccgcctcggtctcccaaagtgctgggattacaggtgtgagccaccgcacccggccccagtttagctctttctacyacagcacaggtggtctgagactggacctgtgtcctcatcactgatatctagggtaataaagttggtagcctatacaacgtgctcagcaatggcagattgc

SEQ ID NO: 311010 - DNA, 201 bp, Homo sapiens
gacggggtttcactatattagccaggatgtctcgatctcctgacctcgtgatccacccgcctcggtctcccaaagtgctgggattacaggtgtgagccacygcacccggccccagtttagctctttctaccacagcacaggtggtctgagactggacctgtgtcctcatcactgatatctagggtaataaagttggtagcc

SEQ ID NO: 311011 - DNA, 201 bp, Homo sapiens
tgaaattgtttttttttggtttgtttgttttctttttttcagtctcccaagtagctgggagtacaggcgttcacaaccatgcccagctaatttttgtattkttagtagagacagggtttcaccatgttggcctggctggtatcaaactcctgacctcaggtgatctgcccgccttggcctcccaaagtgctaggattacag

SEQ ID NO: 311012 - DNA, 201 bp, Homo sapiens
cttgtttaatttatctacactctttaactttttttggagtattttgaagcaaatcccagacgtattattttacttataagtagcacagttatgcagagaamttttcttgttcatttaaagctacttattgagtcccttctatttttactggcatgttaggggttttaatgaatcagaacaagactttgcaataaaataaaa

SEQ ID NO: 311013 - DNA, 201 bp, Homo sapiens
gctccgttgcttgtattgaaaaaatcagacatcagtcttactgtgttccttaataaccattttcttctagatacttttaaggttttctctttggttttcakgagtttacaataatatgcctaggtgtgggttttttttttttttgtctgttaattttatggctcttgcttctatcaaataatgtcatttgtcattttaaaa

SEQ ID NO: 311014 - DNA, 201 bp, Homo sapiens
ggggtttcaccatgttggccaggctggtctcaaactcctgacctcaggttatccgcctgcctcagccttccaaagtgctgagattacaggtgtaagccacygcgcctggccccctaatttttctgaattcttgtttagatgtatctcttgtgaaaaccgtatagttatattttgcttttttcctgtttgataatatttccc

SEQ ID NO: 311015 - DNA, 201 bp, Homo sapiens
tttttttttttgagacagagtctcgttctgttgcccaggttggagtgcagtggcacgatctcggctcactgcaacctccgcctcctgggttcaagcgattmtcatgcctcagcctcctgagtagctgggactacaggcacctgccaccacgcctggctaatttttgtattttcagtagagacagggattcaccattttggc

SEQ ID NO: 311016 - DNA, 201 bp, Homo sapiens
gtttcagtgagctgagattacgccactgcactccagcctgggcaacagagcgagactccatgtcaaaaaaaacaaacaaacaacaacaacaacaaaaaaaacaaaatgtagggcataggatcatgatctgtatgatattgtcaaaggggtttttgcttagccactgtattggctgcagccagtttacaaatggccaatact

SEQ ID NO: 311017 - DNA, 201 bp, Homo sapiens
acttgaacctgggaggcagaggttgcagtgagctgagattacgcgactgcactccagcctgggcgacagagtgagattctgtctcaaaaaaaaaaaaaaaattatccctatcatccctcagttctcttcattgttactgtatttatccttagcagccacctcctctttctggtatgctgttttcagtgtatgatggcatag

SEQ ID NO: 311018 - DNA, 201 bp, Homo sapiens
gaaaccaccattcttttaaattctcaggttcaaacaaaatatctacaaaatatctacgactcttctaaattctatttctttcttttcttttttttttttttcttgagatggagtctcgctctgttgcccaggctggaatacagtggtgcgatcttggctcactgcaacctccacctcctgggtacaagcaattctcctgcc

SEQ ID NO: 311019 - DNA, 201 bp, Homo sapiens
ataatgtcttttgcctagctgtagatttttaaatatatatatattatatatataatatatcatatatgatatatatctatataatattttttatatatatwttttttgagatggagtctctgtcgcccaggctggagtgcaatggcgcaatctcggctcactgcaaccttccccctcctaggttcaagagattctcctgcc

SEQ ID NO: 311020 - DNA, 201 bp, Homo sapiens
taaaaagtacgaattgcccatccatttctccatcatccaggaaagacgttggttttgaggttgacatacctataaaggacagtaactaccatggcttccaycgctttggcaaaacctcagatgtgtggtcttctggccaaatgtctgcaatttcatattgttggagcctttattgtatccctgggggttgcagctgtctgt

SEQ ID NO: 311021 - DNA, 201 bp, Homo sapiens
taaacgtgaaattctgaaagtttaagttttatgagtctaaaaactccttccttccttccttccttccttccttccttccttccttccttccttccttcctyccttccttcctctctttctttttcttttcttttttttttcatggagtcttgctctgttgcccaggctacagtgcagtggtgagatcttggctcactgtaa

SEQ ID NO: 311022 - DNA, 201 bp, Homo sapiens
cctgacctcatgatccacccacctcaacctcccaaagtgctgggattacaggcgtgagccaccgcacctggccagatttttaaatattatctgaatatcarcatcctgttttattcttacaaagtctctcctttagaaattttaatcactaatgtttttgtttactctttacatttctaattgcctgatgaatgtctatac

SEQ ID NO: 311023 - DNA, 201 bp, Homo sapiens
tgaaaccttaattgtgcatatattatcccaacccatcatagtcataaacgtgaaattctgaaagtttaagttttatgagtctaaaaactccttccttcctyccttccttccttccttccttccttccttccttccttccttccttccttccttcctctctttctttttcttttcttttttttttcatggagtcttgctctg

SEQ ID NO: 311024 - DNA, 201 bp, Homo sapiens
gaaataaaaagtacgaattgcccatccatttctccatcatccaggaaagacgttggttttgaggttgacatacctataaaggacagtaactaccatggcttccaccgctttggcaaaacctcagatgtgtggtcttctggccaaatgtctgcaatttcatattgttggagcctttattgtatccctgggggttgcagctgt

SEQ ID NO: 311025 - DNA, 201 bp, Homo sapiens
catgcctggataatttttttttttttttgtattttagtagagacggagttgcaccatgttgattgggatggtctcgatctcctgacctcatgatccgcccrcctcagcctcccaaagtgctgggattacaggtgtgagccaccacacccggtcgtttcattttgtttttttgagacagggtcttgctctgtcctccaggct

SEQ ID NO: 311026 - DNA, 201 bp, Homo sapiens
atgtgaacctgggaggcagagcttgcagtgagccaagatggtgccactgcactccagcctgggtgacagatcaagactccatcttaaaaaaaaaaaaaaaagaaaggttagtccaaacgttttctaatttcccttgtaatttcttctctcacctatgaattatttagaaatgttgtttaatagccaggtatttgaggtttc

SEQ ID NO: 311027 - DNA, 201 bp, Homo sapiens
gcatcaccatgcctggataatttttttttttttttgtattttagtagagacggagttgcaccatgttgattgggatggtctcgatctcctgacctcatgawccgcccacctcagcctcccaaagtgctgggattacaggtgtgagccaccacacccggtcgtttcattttgtttttttgagacagggtcttgctctgtcct

SEQ ID NO: 311028 - DNA, 201 bp, Homo sapiens
ctgatttgctttggaagattattttaatcaggaaggcttttcaaaatagctggttcaataccattttgccagaactgatatcaacctgctttcaggtattrcataatcaatgctggctgataattttagatctgatttattcttctttggaagaggtaatttattcttctttggaagaggtaatcaagagaggaggtgaag

SEQ ID NO: 311029 - DNA, 201 bp, Homo sapiens
gtgtgcatcaccatgcctggataatttttttttttttttgtattttagtagagacggagttgcaccatgttgattgggatggtctcgatctcctgacctcrtgatccgcccacctcagcctcccaaagtgctgggattacaggtgtgagccaccacacccggtcgtttcattttgtttttttgagacagggtcttgctctg

SEQ ID NO: 311030 - DNA, 201 bp, Homo sapiens
cagagtctcagtatgttgcccaggctggaattgtgcttttttttttttttttgagatggagtctcactctgttgcccaggctggagtgcagtggtgtgatcttggctcactgcaagctccgcctcccgggttcacgccattctcctgcctcagcctcccgagtagctgggactacaggcgcctgccaccaagtccggctaa

SEQ ID NO: 311031 - DNA, 201 bp, Homo sapiens
gtgtgagccaccgcacccggccccagtttagctctttctaccacagcacaggtggtctgagactggacctgtgtcctcatcactgatatctagggtaatawagttggtagcctatacaacgtgctcagcaatggcagattgccgtttaggatgctggtcttctgaaagagttaaaacaaatctatcttttttagttttcaa

SEQ ID NO: 311032 - DNA, 201 bp, Homo sapiens
cctcctcctcccgggttcaagtgatgcccctgcctcagcctcccaagcagctgggactacaggtgtgcatcaccatgcctggataatttttttttttttttgtattttagtagagacggagttgcaccatgttgattgggatggtctcgatctcctgacctcatgatccgcccacctcagcctcccaaagtgctgggatta

SEQ ID NO: 311033 - DNA, 201 bp, Homo sapiens
gacagagtctcagtatgttgcccaggctggaattgtgcttttttttttttttttgagatggagtctcactctgttgcccaggctggagtgcagtggtgtgatcttggctcactgcaagctccgcctcccgggttcacgccattctcctgcctcagcctcccgagtagctgggactacaggcgcctgccaccaagtccggct

SEQ ID NO: 311034 - DNA, 201 bp, Homo sapiens
tgcgaacggattgaagaaacggtaagtatagtacgttttaaagcttctattatctcgttctttgatctataaaagatttcaatcttttttttttttttttytttgagacggagtttaactcttgttgcccaggctggagtgcaatggcatggtctcggctcaccgcaacctctgcctcctgggttcaagcgattatcctgc

SEQ ID NO: 311035 - DNA, 201 bp, Homo sapiens
aaacataaaaacactgtatgatttttacgtttaacatttaaaatacacgccttgtttaaatggaaaagaaaataaaagtaggataagaaaataaaaagggkctgggcatggtggctcacacctgtaatcccagcactttgggaggctaaggccggtggatcacttgaagtcaggagttggagaccagcctggccaacatgg

SEQ ID NO: 311036 - DNA, 201 bp, Homo sapiens
tcagtatgttgcccaggctggaattgtgcttttttttttttttttgagatggagtctcactctgttgcccaggctggagtgcagtggtgtgatcttggctcactgcaagctccgcctcccgggttcacgccattctcctgcctcagcctcccgagtagctgggactacaggcgcctgccaccaagtccggctaatttttct

SEQ ID NO: 311037 - DNA, 201 bp, Homo sapiens
gagacagagtctcagtatgttgcccaggctggaattgtgcttttttttttttttttgagatggagtctcactctgttgcccaggctggagtgcagtggtgtgatcttggctcactgcaagctccgcctcccgggttcacgccattctcctgcctcagcctcccgagtagctgggactacaggcgcctgccaccaagtccgg

SEQ ID NO: 311038 - DNA, 201 bp, Homo sapiens
gtctcagtatgttgcccaggctggaattgtgcttttttttttttttttgagatggagtctcactctgttgcccaggctggagtgcagtggtgtgatcttgrctcactgcaagctccgcctcccgggttcacgccattctcctgcctcagcctcccgagtagctgggactacaggcgcctgccaccaagtccggctaatttt

SEQ ID NO: 311039 - DNA, 201 bp, Homo sapiens
agacagattcttgctccgttgctcaggctggtgtgcagtgccatcacagctcactgcagcctcaacctcctgggctcaagcaattctcctgcctcagcctsccaagtagctgggaccacaggcatacaccaccacacccagctaatttaaaaatgtcttttgtagagacagagtctcagtatgttgcccaggctggaattg

SEQ ID NO: 311040 - DNA, 201 bp, Homo sapiens
tgcctggctaattttttgtatttttagtagaaacggggtttcactgtgttagccaggatggtctcaatctcctgacctcgtgatccgcccgcctcggcctyccaaagtgctgggattataggtgtgagccaccagccctggcctctagttgatcttttaggtcaacaatttcctctaataattttaatttttgtacattta

SEQ ID NO: 311041 - DNA, 201 bp, Homo sapiens
tttcaagctcggtgcgatagcgtgggcctatagtctttgctattcaggaggctgaggtgggaggatcacttgagcccaggagtttgagactgtggtgtgcyatgatcatgcctgtgaatagccactgcactccagcctgggcactgtagtgagatctcatcgcttcaaaaaaaaagaaaaaaaggccgttttctcaggata

SEQ ID NO: 311042 - DNA, 201 bp, Homo sapiens
cccagatttgatgacttgttaggaggaatagcattaatttttgttctttattatttcattttttctacttatttgtatgggtttattttgcagcccttttycctaatttgttgagatagatgcttctctaatttccagacttttttcccctcaaatatgcatttaaggatatacattttcctgtaggaacagcttggtatg

SEQ ID NO: 311043 - DNA, 201 bp, Homo sapiens
agtctcagtatgttgcccaggctggaattgtgcttttttttttttttttgagatggagtctcactctgttgcccaggctggagtgcagtggtgtgatcttggctcactgcaagctccgcctcccgggttcacgccattctcctgcctcagcctcccgagtagctgggactacaggcgcctgccaccaagtccggctaattt

SEQ ID NO: 311044 - DNA, 201 bp, Homo sapiens
gagtctcagtatgttgcccaggctggaattgtgcttttttttttttttttgagatggagtctcactctgttgcccaggctggagtgcagtggtgtgatctyggctcactgcaagctccgcctcccgggttcacgccattctcctgcctcagcctcccgagtagctgggactacaggcgcctgccaccaagtccggctaatt

SEQ ID NO: 311045 - DNA, 201 bp, Homo sapiens
gtagagacagagtctcagtatgttgcccaggctggaattgtgcttttttttttttttttgagatggagtctcactctgttgcccaggctggagtgcagtggtgtgatcttggctcactgcaagctccgcctcccgggttcacgccattctcctgcctcagcctcccgagtagctgggactacaggcgcctgccaccaagtc

SEQ ID NO: 311046 - DNA, 201 bp, Homo sapiens
tctattagaaatacaaaaaaattagctgggcatggtggtgcatgtctgtaatcccagctactcgggatgctgagacaggagaatcacttgaacccaggagrcagaggttacagtgagctgagatcgcaccactgcactccatcctgggtgacagagtgaaactctctctttaaataaataaataaataaaggatagagaag

SEQ ID NO: 311047 - DNA, 201 bp, Homo sapiens
tgtagagacagagtctcagtatgttgcccaggctggaattgtgcttttttttttttttttgagatggagtctcactctgttgcccaggctggagtgcagtggtgtgatcttggctcactgcaagctccgcctcccgggttcacgccattctcctgcctcagcctcccgagtagctgggactacaggcgcctgccaccaagt

SEQ ID NO: 311048 - DNA, 201 bp, Homo sapiens
atttttaaataacagctattttgcattttttaataacagcaacttaggcatgaaaacttggtgaatctcttggaagtgtgtaagaaaaaaaaacgatggtmcctagtctttgaatttgttgaccacacaattcttgatgacttggagctctttccaaatggactagactaccaagtagttcaaaagtatttgtttcagatt

SEQ ID NO: 311049 - DNA, 201 bp, Homo sapiens
agaggttgaggcaggagaatggcgtggacccgggaggcggagtttgcagtgagccaagatcgcgccactgcactccagcctgggcgacagagcaagactcygtctcaaaaaaaaaaaaaaaatttcaaacacaaattcaaattatacttatagtgagtaatcattaacagggtttttgaaatacttttactgtacttggta

SEQ ID NO: 311050 - DNA, 201 bp, Homo sapiens
gcctgtagtcccagctactcgagaggttgaggcaggagaatggcgtggacccgggaggcggagtttgcagtgagccaagatcgcgccactgcactccagcstgggcgacagagcaagactccgtctcaaaaaaaaaaaaaaaatttcaaacacaaattcaaattatacttatagtgagtaatcattaacagggtttttgaa

SEQ ID NO: 311051 - DNA, 201 bp, Homo sapiens
gcagggtttcaccatgttggccaggctggtcttgaactcctgacctcaagtgatctgcctgcctcagcctcctgaagtgctgggattataggcatgaggcrttgcccccagcctcactgttaactcttcaatagttctgtagagctctacaaaggagtagtgttactgtgaggataacaaattatctagagatgctgatga

SEQ ID NO: 311052 - DNA, 201 bp, Homo sapiens
tcgcaccactgcactccatcctgggtgacagagtgaaactctctctttaaataaataaataaataaaggatagagaagtaggaaaatattaaaatgtaggrcataggatggccgggcatggtggctcatgcctgtaatcccagcagtttgggcggccgaggcacgtggatcatgaggtcaggagttcaagaccatcctggc

SEQ ID NO: 311053 - DNA, 201 bp, Homo sapiens
ttcatgttgagcaatgaacaactaattcatacaaaccgtgtaaactacagggtctgcaaaacttggatgcattttgtcaaaattagtcattatttgcataraaggagatgtgtgttacacatgatagtttttcttttttttgagacggagtttcgctcttgttgcccaggctggagtgcaatggcgtgatctctgctcact

SEQ ID NO: 311054 - DNA, 201 bp, Homo sapiens
tatgctaacatcacagtttacttacacaaacctagatgatataacctactatactcctaggctatatggtatagcctattcctcctaggctacaagcctgyacagcatgttactgtactgaatactgtaagcaattgtaacacaatagtaaatattcatatatcaaaacatagaaaaggtaatgcattgcactatgatgtt

SEQ ID NO: 311055 - DNA, 201 bp, Homo sapiens
caggggtacatgtgcaggatgtacaggtttgttacataggtaaacatgtgtcatggggtttgatgacttggagctctttccaaatggactagactaccaastagttcaaaagtacttgtttcagattattaataatggaattggattttgtcgcagtcacgatgtaagtcttgggtttaaacaattatttgtcagtcattt

SEQ ID NO: 311056 - DNA, 201 bp, Homo sapiens
ttatttgttccttgaatattaatggaattcactggtgaagccatctgtctcaagagctttattctggggaaagttttggataattttttttttttttttttgagactgagttttgctcttgttgcccaggctggagtgcaatggtgcgatctcggctcacggcaacctccgcctcctgggttcaagtgattctcctgcctc

SEQ ID NO: 311057 - DNA, 201 bp, Homo sapiens
tgtcttttcagggtatgtcactggcttcagagaactcttacgcttccagctttgtagccacagatgatcttttggtgccttcctatactcctgtttgaccktgattagatttagtagtcccatctcatttgttgtgagtagggggtcatagatccctcttagttttagcaaagatggagttacacttatttttcttattag

SEQ ID NO: 311058 - DNA, 201 bp, Homo sapiens
aaatgtgccaaaacagcccaatggaacaagtgacattctagtattatttagatttcttaatttgataaaatagaacttgtcagaatttatagttccattargatatgaaatttgtgggttttggggcatttttgttggtttgtttagtttttttggtttttttgagaaggtgttttaatcatgcctctaccagttattgct

SEQ ID NO: 311059 - DNA, 201 bp, Homo sapiens
tgttccttaataaccattttcttctagatacttttaaggttttctctttggttttcaggagtttacaataatatgcctaggtgtgggttttttttttttttgtctgttaattttatggctcttgcttctatcaaataatgtcatttgtcattttaaaaaaatgctgggcatggtggctcatgtctgttaatctcagcactt

SEQ ID NO: 311060 - DNA, 201 bp, Homo sapiens
cgcttggttggcgcgggcgcctggctgccttcctcgtggtggggccttcggagcaatcgtcctggttctggcgatggttgagacgcctcgattgcggcgtrtaacggtgagcgttgtttgggcggccggctcccgcctcggggtcccgggggccttccaatgtgaccgaacaatggagagcccgggcctcggcgcagtcag

SEQ ID NO: 311061 - DNA, 201 bp, Homo sapiens
tgagatgaatgctgcatctgtcatgtaaaagcactacagtgttatacactcttaaaggaaagggatgttgaccaaagaagccaagttatgtgtgtgtggtygcaggcaacatttcttttccacatttgcggtacaaaacataaccagaacaaacttcttcccttcctcttccaaaggcactggaagcataaattcttgctc

SEQ ID NO: 311062 - DNA, 201 bp, Homo sapiens
tgttaacctcagctacactgaaggaatagaccttagtcctcacaagtataagttctagcttggaagcctgggttctgcagtagctgtggaacttaagcctstgagctcagggatgcagaggcattgagttactaccaagggcctgatcttttctttagcaggcatctgtgttaattgtttcaaaaggtggtgatcagtttt

SEQ ID NO: 311063 - DNA, 201 bp, Homo sapiens
gcagaggggtgggcagcagcctttgactcagcctctggattaggcctctttcttctgtttgtaaaggttttctaaggcagggcttttcagactttattcaktcaacattaagctcctacactgcctcaaagcagagcgacgatggaaccctttatttcaatggaattgtgcacgtaggccagtgtattgaagaaaaactaa

SEQ ID NO: 311064 - DNA, 201 bp, Homo sapiens
ggaagactaggcaatttcagcactattttaagaatctgagtgattcttttccctgaacttctgctttgaggaagagataatatggcccatctttctatggkcttctctgttggttgcataaaatagcattggatttgtccagatctgtttgccggtcttggagtccccagtaacagccttcctgcctggaatgtaggccag

SEQ ID NO: 311065 - DNA, 201 bp, Homo sapiens
ggctggctgtatttgcattgcttggaaagctcctgtatgttttaaatgtaattttccctctttttgccccagagttgcctgagtggaatttcgatggctcyagtactttacagtctgagggttccaacagtgacatgtatctcgtgcctgctgccatgtttcgggaccccttccgtaaggaccctaacaagctggtgttat

SEQ ID NO: 311066 - DNA, 201 bp, Homo sapiens
tatcactggcttctagatgtgaagcaaatgctctacaatggtttttaaataggactaatttttagttgatgccacttttggaaattcttaaactaattgcrtatccctctaggagctacagttagattatagttgtgaccttcatttttcagtctagaacaagccatagtcttccctcttctggaaaggggccagaggaaa

SEQ ID NO: 311067 - DNA, 201 bp, Homo sapiens
gttaaagagggcaaccctaacgatacgcttgactttctgtggctggggtgagtgagggggcagggaggacgaccccggagttggtgggagctgcagaaackgctgaaaacttcagaatccatttcccccacgtaaacttggcaccgcagcagcagcagttgatagagtggcactaggctgctggcatgcaactcggctcac

SEQ ID NO: 311068 - DNA, 201 bp, Homo sapiens
gggcagcagcctttgactcagcctctggattaggcctctttcttctgtttgtaaaggttttctaaggcagggcttttcagactttattcagtcaacattargctcctacactgcctcaaagcagagcgacgatggaaccctttatttcaatggaattgtgcacgtaggccagtgtattgaagaaaaactaagtctggttta

SEQ ID NO: 311069 - DNA, 201 bp, Homo sapiens
ctggtcttgaactcctgatctcccaaagtgaggtcttgaactggtcttgaactcctccacctcccaaagtgctgggattacaggcgtgagccactgcaccyggcctagggccatgtaaaaagccagatctgtgctgctgtctgtgtagaagggtagacaagtggatgagaagttcctgaactattcttggcccttttacca

SEQ ID NO: 311070 - DNA, 201 bp, Homo sapiens
aagtggataattataactccctcgggggcgggaagcggggatcctcccccagccgcaagtccacgaagaaagcaacgaatgaaaattatgaagacaacgaraagtcagactcctccgggtcgcgctccagctgcttcggcttcgtcgcctactctgtgaactccggggagagatctcgagtcaagattaagaccttaaccc

SEQ ID NO: 311071 - DNA, 201 bp, Homo sapiens
tacagtctgggtttctgcgggtgaaccagttaagggttttcttctgcttttacttctcgcctatgctcaagcctccctggtcagttcttggactcatctgygccctaatttcatcattttaagtaaatgtggggctggccaaggaggacaaggcctcttgttcactcctgaaagagtcagtggtcatgtattatgttccta

SEQ ID NO: 311072 - DNA, 201 bp, Homo sapiens; identical to SEQ ID NO: 64869

SEQ ID NO: 311073 - DNA, 201 bp, Homo sapiens; identical to SEQ ID NO: 64870

SEQ ID NO: 311074 - DNA, 201 bp, Homo sapiens
tgtaatcccagctcctcgggaggctgaggcaggagaattgcttgaacccgggaggcagaggttacagtgagtggaggttgcagtgagccgagattgcgccmctgcatccagcctgagcaacagagtaagactccgtctcaaaaaaaaaaaaaaaaaaaaaaaaaaaaagagaaaagttgtttcctaatagagataagattt

SEQ ID NO: 311075 - DNA, 201 bp, Homo sapiens
agacatatcaaaaaataaacaaataaataaataaataagtggcagttcatcatttaactccaaagactttgcgtacatttctactgaaaacaatctgagcwgattagaaccctgccattttatagcctttagctcgatctccgaccgttcatttaaaaaaattctacttcaggccgggcatggtggctcaagcctgtaatc

SEQ ID NO: 311076 - DNA, 201 bp, Homo sapiens
ggccttccaacggcttcccagggccccagggtaagtctccttgggttagaggtgaaattcccagaagtgtctaactgtgcaggaatgccccttcccagggrtgggaatgactttcagaatcaagaagcaaaataatacagtaaaggcgaaacagccctcacatcaccaaagtccaaaaatggatatgaatatataaagtaa

SEQ ID NO: 311077 - DNA, 201 bp, Homo sapiens
gcacccctttggttggccttccaacggcttcccagggccccagggtaagtctccttgggttagaggtgaaattcccagaagtgtctaactgtgcaggaatrccccttcccagggatgggaatgactttcagaatcaagaagcaaaataatacagtaaaggcgaaacagccctcacatcaccaaagtccaaaaatggatatg

SEQ ID NO: 311078 - DNA, 201 bp, Homo sapiens
gcttgtatgctggagtcaagattgcggggactaatgccgaggtcatgcctgcccaggtaagtatagctccaatccatcaatgaagaagggtaggtaggtgyacataggacttttgctagtaagggctgctgatacaccactcactaacccaaaacctaagaacgggttggagtacaggtgagaagagaacaggtttaggag

SEQ ID NO: 311079 - DNA, 201 bp, Homo sapiens
cgcacctgcagatgaaggcaaggatagtgattcaagagggcaaggcttaagggccttctgatctctgactttgggattctctggatttcttgactcttagygttttgtcctgatgcttctgtaggtccatattactgtggtgtgggagcagacagagcctatggcagggacatcgtggaggcccattaccgggcctgcttg

SEQ ID NO: 311080 - DNA, 201 bp, Homo sapiens
ggtaagtatagctccaatccatcaatgaagaagggtaggtaggtgtacataggacttttgctagtaagggctgctgatacaccactcactaacccaaaacstaagaacgggttggagtacaggtgagaagagaacaggtttaggagattctgagttggagtgagcagttagctttgttttaatggccaagcttctcgtttc

SEQ ID NO: 311081 - DNA, 201 bp, Homo sapiens
ggctgctggcggccctgcagagtcgagagtgggagaagagcggagcgtgtgagcagtactgcggcctcctctcctctcctaacctcgctctcgcggcctasctttacccgcccgcctgctcggcgaccaggtaagcccccggacggcccggtgtcacgcaagcgaggcgcgccgcccctgctaccccgcgaggcgcgccgc

SEQ ID NO: 311082 - DNA, 201 bp, Homo sapiens
accccttgtcagcactgatatggtgtgtaccaagaaacagaaaagttcatgggttcaagcattctaatgctctttttatggtgggggtgaagaatgggggygggtggcaatttagggaagaaggggaaggagaagaaagggcagcagacacagcaaagtcaaactggatgaaacaggctgttttacttttaacttctctaa

SEQ ID NO: 311083 - DNA, 201 bp, Homo sapiens
cgcatcagctgatcggcccgggctcctggccgctgggagccaatcagggcaccgggggcggccccgggccgcggataaagggtgcggggctgctggcggcyctgcagagtcgagagtgggagaagagcggagcgtgtgagcagtactgcggcctcctctcctctcctaacctcgctctcgcggcctacctttacccgcccg

SEQ ID NO: 311084 - DNA, 201 bp, Homo sapiens; identical to SEQ ID NO: 64853

SEQ ID NO: 311085 - DNA, 201 bp, Homo sapiens
ccccgggccgcggataaagggtgcggggctgctggcggccctgcagagtcgagagtgggagaagagcggagcgtgtgagcagtactgcggcctcctctcckctcctaacctcgctctcgcggcctacctttacccgcccgcctgctcggcgaccaggtaagcccccggacggcccggtgtcacgcaagcgaggcgcgccgc

SEQ ID NO: 311086 - DNA, 201 bp, Homo sapiens; identical to SEQ ID NO: 64854

SEQ ID NO: 311087 - DNA, 201 bp, Homo sapiens; identical to SEQ ID NO: 64862

SEQ ID NO: 311088 - DNA, 201 bp, Homo sapiens; identical to SEQ ID NO: 64864

SEQ ID NO: 311089 - DNA, 201 bp, Homo sapiens; identical to SEQ ID NO: 64856

SEQ ID NO: 311090 - DNA, 201 bp, Homo sapiens
tagaggcaatattggggtgttggtcttccccaaggggaagggtggtgaggctgagggagaagcagttatgttttcagctgggcaaacatggacggttgccygtagaaactttgccactgtacttcagaacgttgccctagtcgttggaggagaacaatgtgttccctttctagccaccctggtccacggagggaggaggga

SEQ ID NO: 311091 - DNA, 201 bp, Homo sapiens; identical to SEQ ID NO: 64857

SEQ ID NO: 311092 - DNA, 201 bp, Homo sapiens
tcaaagcactcaagctttgggggagtttgtcattctcacaaaattccacaagagggcactaggttcacaccaccccggccaagcttctgattctccaaccscagtaaacaagtctccggagaacgggtttaaaagaagtggaagaggagaacggacaggaaaaatccagaagcagactaagaattgcccaagcatccagaa

SEQ ID NO: 311093 - DNA, 201 bp, Homo sapiens
tatcatattttggtgcacttcattcttggctccatacctggagacaaggttggactgccatcttttctgtttactctaggtacatcgaggaggccattgaraaactaagcaagcggcaccagtaccacatccgtgcctatgatcccaagggaggcctggacaatgcccgacgtctaactggattccatgaaacctccaaca

SEQ ID NO: 311094 - DNA, 201 bp, Homo sapiens
ttttcggctgcctgcccctccagtcccagccctacgctgcggcctctccggcccatgcctgagatccggcatgagtgctcctcccgcgtgcttccgccgcyggtggcttggacccgtcggggctggcgctggtggggcgcgcccttggccaggctctgggaagggcggggtgagttgttttgatcttcttttcactacttg

SEQ ID NO: 311095 - DNA, 201 bp, Homo sapiens
gtccccttctccatcgccctctcccagaaagctccggtgcttggaccagctagagtctgagaaagaggagaggcgcgaacgccactccaaaaagagaaggkttaaagagggcaaccctaacgatacgcttgactttctgtggctggggtgagtgagggggcagggaggacgaccccggagttggtgggagctgcagaaacg

SEQ ID NO: 311096 - DNA, 201 bp, Homo sapiens
gccatgtttcgggaccccttccgtaaggaccctaacaagctggtgttatgtgaagttttcaagtacaatcgaaggcctgcaggtgtgttatagcacagctrtggatacccctcctcaatctgtgaatgctgtgaaggggagggagaagacattctgaaatcagcattgggaagactaggcaatttcagcactattttaaga

SEQ ID NO: 311097 - DNA, 201 bp, Homo sapiens
cgggggccttccaatgtgaccgaacaatggagagcccgggcctcggcgcagtcagtggagaagccggtccgggcggaggcagcagcagcgcgcagtccctmcggcctgcgcccccaccctcccccggaccccccaacccctcggcggcagggtatggccacctccgtgaggccctgagattcggacgggggcccgaggggc

SEQ ID NO: 311098 - DNA, 201 bp, Homo sapiens
ttgtttgggcggccggctcccgcctcggggtcccgggggccttccaatgtgaccgaacaatggagagcccgggcctcggcgcagtcagtggagaagccggkccgggcggaggcagcagcagcgcgcagtccctacggcctgcgcccccaccctcccccggaccccccaacccctcggcggcagggtatggccacctccgtg

SEQ ID NO: 311099 - DNA, 201 bp, Homo sapiens
tgcggcgtgtaacggtgagcgttgtttgggcggccggctcccgcctcggggtcccgggggccttccaatgtgaccgaacaatggagagcccgggcctcggmgcagtcagtggagaagccggtccgggcggaggcagcagcagcgcgcagtccctacggcctgcgcccccaccctcccccggaccccccaacccctcggcgg

SEQ ID NO: 311100 - DNA, 201 bp, Homo sapiens
cctcatttacagaaggggaaactgaagcagaaagaggttacttaatgggctcaaggtcacctacctggtaagtggtggagccaggatgcagatccatgagrtctgactccagagctggccctctcacccctctacagtaaggaacaaaggagatggcaggtccctttgggcatgttaagttgagatgtttgtgggagtgct

SEQ ID NO: 311101 - DNA, 201 bp, Homo sapiens
atctcaggggcttactgcatagaagcaggcattgagccataaagaaaaggttgtagctccaggtgatgatgactgtaggataggagatggaagcaccttcstccaaggagagtaaggatggatgcagctgtagctgagtttgcaggtaaggagcagaactgagccaatttcagttttctctgggaagtagaaggcagtgcc

SEQ ID NO: 311102 - DNA, 201 bp, Homo sapiens
agacctctggactctgatgaaaaaataaaccctaccttttccatcagccccattgacacacccatacaagccagaatttccagaagtgactctcatacccrgttacgcattcttcacagtgaatggaacagactcttgtccacctgtggacagaccttttactggaacacaatgggtaacaacacttcaagatccaactta

SEQ ID NO: 311103 - DNA, 201 bp, Homo sapiens
tggcaaagatgggctgtttctttctgcatatttatgctaattgggctgtgttcatttattctttcaaaaatatttatcaaggtcagctgtgtaacagacargggactgcatgctggagatacaaaaatgaacaccacacggttaggagctcgcattcaaggaagccacagtctaacaggggaagcagacacgtctgcagac

SEQ ID NO: 311104 - DNA, 201 bp, Homo sapiens
agatcacgccactgcactcagcaagattatgtcaaaaacaaaacaaacaaaaacaaaaacaaaaccagtatgggacaggaggcaagtgttaattttccatrtctcatttctgtttctatacaacatattttcattattttaatataaatgagagagaggcagagattgaagaagaacgtttaaaactgagggagtaaactg

SEQ ID NO: 311105 - DNA, 201 bp, Homo sapiens
tggcgctatctcggctcactgcaagctccacctcccaggttcacgccattctcctgcctcagcctcccgagtagctgggactacaggctcccgccaccacrcccggctaattttgtatttttagtagagacggggtttggccatgttggccaggctggtctcgaactcctgacctcaggtgatccgcccacctcggcctcc

SEQ ID NO: 311106 - DNA, 201 bp, Homo sapiens
aatgattaaataatactacataataatagaagaaatctcacagagactgccgcttatcagaagggggttagaggcctgcagttcagcactgagccttttgytgcctctcttcttctaagccctactcattgtctgatatttagcttggctgtgaccttccccagtaagacgtttctggaacaccctcctgcctcttcacac

SEQ ID NO: 311107 - DNA, 201 bp, Homo sapiens
acgtttcggggtttccgggccagcggttccgggcgcgcctcgcgggcggcggcgcagaactacaacccccaggctccctggcgtggcggcacgtgggccckagccgggcggccgcggatataaagcgcggcggcggctgccgggcggagcggctgcacggacaagagcggaggcctgggtgagcgcggcccgcgacggcac

SEQ ID NO: 311108 - DNA, 201 bp, Homo sapiens
ggggtttggccatgttggccaggctggtctcgaactcctgacctcaggtgatccgcccacctcggcctcccaaagtgctgggattacaggcttgagccacsgcgcccggccaaagtcgtttttatcccatttcttcctgtaggcgtttcaaagtttgcaaaggcagcaaacttttacgtagtgtagttatctgtgcaaaga

SEQ ID NO: 311109 - DNA, 201 bp, Homo sapiens
aaagcacctcaagagattacctcatttgatagtgtgccaacacttaaggtattattttttatccccatttggagatgaaaatatatgactcagatatactmtaggttgccccaggccattcagccaagaagtggtagagtaacaaccaaaccctcttaagtaacaactaaacactcttctctcttttgtttatttatttat

SEQ ID NO: 311110 - DNA, 201 bp, Homo sapiens
caatggccttcccaaagaagaaacttcagggtcttgtggctgcaaccatcacgccaatgactgagaatgggtaactatcatttggggccttgaggggatcwgttctcattcaaccaaaaaggagagaagttctttgtaacaacagtcacttaagaccctgcacctctgtagaactgttgccaaaaggcagcttctgtctgt

SEQ ID NO: 311111 - DNA, 201 bp, Homo sapiens
aaatggcagcttgcctttctcccagtgtctgtagcaccacagagcaaattctccttggatttcaccacagccttggcctttctaaacagggccagtagcawtggatgagaatcccattttagcataattggatatcaagcactgacctaggccctctcaggatgctgtctctggacgtcagcatgattccacttcaggctg

SEQ ID NO: 311112 - DNA, 201 bp, Homo sapiens
gttcatagacttgataaaaatgtcctaccctgaggaaagtgggaggttatctgcaagatggactcttttttcctgtttacagcctcatttcaacattgacwagatgttgggcagcgggggaagggaagtaacaacagtccgttgttgactaatcattaccccaagcaagtattttgacctccagatgaatacagtggcagt

SEQ ID NO: 311113 - DNA, 201 bp, Homo sapiens; identical to SEQ ID NO: 64902

SEQ ID NO: 311114 - DNA, 201 bp, Homo sapiens
aatgggaagtttagcattataattggacaagcacataggagctgctagtcagggaccagtgattatgcctagtctgcagtcagttctggctgacagcagcrtgtggcagctcactgcagatgcatgacactatatgagatgttatttcctagagatgtgcagattaatgaggcacttattattttgagcagttcgtgctga

SEQ ID NO: 311115 - DNA, 201 bp, Homo sapiens
agtctgaggaggcattatatctctgaccccaaagtcagagaagcactatatcaccttgcagaaagggagaaggtgagaaatggcagcttgcctttctcccrgtgtctgtagcaccacagagcaaattctccttggatttcaccacagccttggcctttctaaacagggccagtagcattggatgagaatcccattttagca

SEQ ID NO: 311116 - DNA, 201 bp, Homo sapiens
atgaggtaagtcaccccctagcatgttgcagcaggtcagttccctccaaaacaatttgtgtagctatatagtagcatctcttctctttctcttttttatamaagtgaatattttttgtttctgattagcaactgttgagtgctctggtgatgggagcaactggagcagtgggcaggtaagcatgactcatttttcccagtg

SEQ ID NO: 311117 - DNA, 201 bp, Homo sapiens
gtcagagaagcactatatcaccttgcagaaagggagaaggtgagaaatggcagcttgcctttctcccagtgtctgtagcaccacagagcaaattctccttkgatttcaccacagccttggcctttctaaacagggccagtagcattggatgagaatcccattttagcataattggatatcaagcactgacctaggccctct

SEQ ID NO: 311118 - DNA, 201 bp, Homo sapiens
atttaagcttctcctttctttctatgtaatattataataataatcatacctacataatgaattataagcattaaatgagataattcatacaacagtgcttrgcacagggtcaatacgcacttaggtcaaaaagtttgaactgcctttatgtcataaggcagaggcaaaaggaagatgtatttagtacaccttttacaaggg

SEQ ID NO: 311119 - DNA, 201 bp, Homo sapiens
aacatgcagcagaaataggagctgatggcatcgctgtcattgcaccgttcttcctcaagccatggaccaaaggtaagtagataggtctgaatgcatggcayctcacatggtccacttcttcttgcctccattcaaaatggttatatttaatttgtgaaagtaaagcactatagattggaggcttgaagtcgcaatggtaca

SEQ ID NO: 311120 - DNA, 201 bp, Homo sapiens
cttgctccaatatggtcttctttcttcctttaaaggcccaacatgcagcagaaataggagctgatggcatcgctgtcattgcaccgttcttcctcaagccrtggaccaaaggtaagtagataggtctgaatgcatggcatctcacatggtccacttcttcttgcctccattcaaaatggttatatttaatttgtgaaagta

SEQ ID NO: 311121 - DNA, 201 bp, Homo sapiens
cgtattcagcaacccagaagccctgtccttttaagtttctatggagacttcattatataggcatgattgagtacctcattggccatgggtgatcagctcartctttagcccggctttcctccccagaggccaagggtgtgactgaaagttccacccctctaagtacatggttggttcccctggcaaccagccctcatcctg

SEQ ID NO: 311122 - DNA, 201 bp, Homo sapiens
agatctgtttccatccacaagcctagtagaagtcaagctttcttctttatccccagaccagtgggctgggtttttttctattgctttttacagaaggctgrctaccagttttacataggtagtttaattccagcttctcaccatgcatagatctaaggcttcattttccattcccatcccagccgtataacaccagcatga

SEQ ID NO: 311123 - DNA, 201 bp, Homo sapiens
tagtatatcaactgcacattcctaccacacggagatctgacaatgaagtatcttgagggtttttgggggtttttttgttttttaaactaagaataactgtratatgccagagaattttgaatcagccttatctgtagtctcaaatgaatatattcaaaagtcatattatagcagaaatgcaaatatcttgattgcatattg

SEQ ID NO: 311124 - DNA, 201 bp, Homo sapiens
aaatccgacaattctagtcatagtgtcctgcctaaacttggcctgaggtcccatgtcctatctccagatgggcctccacacccaagaccccagatcctggracctatgtgccgttctagcaacatcagccacagttattactctggctctgagttttcttttcacattgagaactagaagatttcccttacttttttcaat

SEQ ID NO: 311125 - DNA, 201 bp, Homo sapiens
tcaaactacatttgtggtaattagttttatttctttccattaaagacatataaaactgccaatttgagcttctgatgattctaagaacatcagtgttaccktccttagtatcaaataaatgcaggcaaaagcacaagactacggagttttatttagcctgaacagcctagtagtgttggatttaggaggtgtttaatgctg

SEQ ID NO: 311126 - DNA, 201 bp, Homo sapiens
cataaccctgtcataagtcagggagtgtaatgatgctttcaccccattttaaggtcaaaccatcataagttggggaccatccgcacaacccaaagtagacrgagtagctttagaagacagctgaaggcctggcacagtggctcacacctgtaatcccagcactttgggaggccaaggtaggcagatcacctgaggtcagaa

SEQ ID NO: 311127 - DNA, 201 bp, Homo sapiens
ctgaacagaacagaaattacatgagcagatatctcgattaactgttataacttatcaaaatgaaccacttacgtctccttagcaaggttttttgtactgamaaaatatgaagtataagattaagtgcacagctcaccttcatcggggagctctactttgcgacctgggattttcctggcaatgacattcattaaatttggt

SEQ ID NO: 311128 - DNA, 201 bp, Homo sapiens
tttcatcagatgattctcttttttaccaggaaagccactgttttacacctgttcacaccatgactgttcctactgttctttcagatatcctgattaatttyctaaaggaagtggctgctgccgcccctgccctgccattttattactatcacattcctgccttgacaggggtaaagagtaagtactgcttctgttgatctt

SEQ ID NO: 311129 - DNA, 201 bp, Homo sapiens
ggctgaacagaacagaaattacatgagcagatatctcgattaactgttataacttatcaaaatgaaccacttacgtctccttagcaaggttttttgtactracaaaatatgaagtataagattaagtgcacagctcaccttcatcggggagctctactttgcgacctgggattttcctggcaatgacattcattaaatttg

SEQ ID NO: 311130 - DNA, 201 bp, Homo sapiens
ggactctgatgaaaaaataaaccctaccttttccatcagccccattgacacacccatacaagccagaatttccagaagtgactctcatacccggttacgcrttcttcacagtgaatggaacagactcttgtccacctgtggacagaccttttactggaacacaatgggtaacaacacttcaagatccaacttaggtctcct

SEQ ID NO: 311131 - DNA, 201 bp, Homo sapiens
aatctgcaatcagagaagggttttggcaagaaagtgatccaaggagacactgaaaatagcaagttcattgaaggccaagggaacatccccttgtgaaagtaagaaaggatgataaaataagaagcttactggcagtgaaaagaaaacatcctgtctgagttgaattgcaggagggggagtcagggaaggctccagccacct

SEQ ID NO: 311132 - DNA, 201 bp, Homo sapiens
atctgcaatcagagaagggttttggcaagaaagtgatccaaggagacactgaaaatagcaagttcattgaaggccaagggaacatccccttgtgaaagtaagaaaggatgataaaataagaagcttactggcagtgaaaagaaaacatcctgtctgagttgaattgcaggagggggagtcagggaaggctccagccacctt

SEQ ID NO: 311133 - DNA, 201 bp, Homo sapiens
ggcctcccaaagtgctgggattacaggcttgagccaccgcgcccggccaaagtcgtttttatcccatttcttcctgtaggcgtttcaaagtttgcaaaggyagcaaacttttacgtagtgtagttatctgtgcaaagaaattttccaagctgccattgcccccagatggcagacagtctaggagaggagccaaaaccaccc

SEQ ID NO: 311134 - DNA, 201 bp, Homo sapiens
tctgcaatcagagaagggttttggcaagaaagtgatccaaggagacactgaaaatagcaagttcattgaaggccaagggaacatccccttgtgaaagtaagaaaggatgataaaataagaagcttactggcagtgaaaagaaaacatcctgtctgagttgaattgcaggagggggagtcagggaaggctccagccaccttg

SEQ ID NO: 311135 - DNA, 201 bp, Homo sapiens
ctgcaatcagagaagggttttggcaagaaagtgatccaaggagacactgaaaatagcaagttcattgaaggccaagggaacatccccttgtgaaagtaagaaaggatgataaaataagaagcttactggcagtgaaaagaaaacatcctgtctgagttgaattgcaggagggggagtcagggaaggctccagccaccttgg

SEQ ID NO: 311136 - DNA, 201 bp, Homo sapiens
ggagggagaaaaaacaaaaagccaaaaaatcttagtatatcaactgcacattcctaccacacggagatctgacaatgaagtatcttgagggtttttggggktttttttgttttttaaactaagaataactgtaatatgccagagaattttgaatcagccttatctgtagtctcaaatgaatatattcaaaagtcatattat

SEQ ID NO: 311137 - DNA, 201 bp, Homo sapiens
acttcagggatgccgcccagctcattctttctacaggacgggttctccaaagaaaggcaaacagctcccagttttggctaaggttggacttcccaaaaacmtgggtattcaaggattttctttatattttttgggcacaggaaggaagtaaaattctgacttgctacgttttaccgggccaagtcaaagatgaaaggctag

SEQ ID NO: 311138 - DNA, 201 bp, Homo sapiens
cacccttttggccataagagtacatagcaagaagactgtcctctatgaaccaggaagagtgccctcatcagaaaccaaatctgtgggccacttgatcttgsacttccagcctccagaactgtgagaaataaatgtctgttgtttgtaagccacccagtctgcggtattgtgtcatagcagcccaaacacatcaagacaata

SEQ ID NO: 311139 - DNA, 201 bp, Homo sapiens
aataagtgagattaataaggcatcagttaactgctaaaatcagcacaaaccaggatagtgcagcccttctgcatgcctctaaactctaagcgatgcagcaktgttttttcttttgcaggctggatcaggtgataattcacgtaggagcactgagcttgaaggagtcacaggaactggtatgtatgcagttccatctgggag

SEQ ID NO: 311140 - DNA, 201 bp, Homo sapiens
acccttttggccataagagtacatagcaagaagactgtcctctatgaaccaggaagagtgccctcatcagaaaccaaatctgtgggccacttgatcttggwcttccagcctccagaactgtgagaaataaatgtctgttgtttgtaagccacccagtctgcggtattgtgtcatagcagcccaaacacatcaagacaatac

SEQ ID NO: 311141 - DNA, 201 bp, Homo sapiens
gaagactgtcctctatgaaccaggaagagtgccctcatcagaaaccaaatctgtgggccacttgatcttggacttccagcctccagaactgtgagaaatawatgtctgttgtttgtaagccacccagtctgcggtattgtgtcatagcagcccaaacacatcaagacaatacttatttcatagtctcattcagagttttta

SEQ ID NO: 311142 - DNA, 201 bp, Homo sapiens
gctctgtgtgtttgtgtacttgtaagcacattttacagttctaaactagaaatggactttgcctgggagttttatcattgacattccttgaagaaagagakaaattacattgtatgttttccagacctaccagcagctcaatggccttcccaaagaagaaacttcagggtcttgtggctgcaaccatcacgccaatgactg

SEQ ID NO: 311143 - DNA, 201 bp, Homo sapiens
ccagaagagatctcccagtggctagtcacggtcaatctgcaatcagagaagggttttggcaagaaagtgatccaaggagacactgaaaatagcaagttcaytgaaggccaagggaacatccccttgtgaaagtaagaaaggatgataaaataagaagcttactggcagtgaaaagaaaacatcctgtctgagttgaattgc

SEQ ID NO: 311144 - DNA, 201 bp, Homo sapiens
taagaatttcacaaattgagtggatttttaataactattagcaagagggagcagtttatatacctgagcatttgttgaataataatctgaaaaagactaamtatgcctttttttccacatgtcttctagagaaatcaacttttcagtaattggtcagtatgtggattatcttgtgaaagaacagggagtgaagaacatttt

SEQ ID NO: 311145 - DNA, 201 bp, Homo sapiens
cattcaagcccagatataaaactgggtagtgtgtttggagattgacgtaaaatgtgggcagtcatctctgtctttatttaaaatatttcctgactgtcccyaatatcaaggtcagatttataattacaagtcacaattaaccttcccactgcctttgacaaggtgaaagtggaaaaaagatggagtctgaagtgaaaatgg

SEQ ID NO: 311146 - DNA, 201 bp, Homo sapiens
cttgtgaaagtaagaaaggatgataaaataagaagcttactggcagtgaaaagaaaacatcctgtctgagttgaattgcaggagggggagtcagggaaggytccagccaccttggaaaggcagcatggagcagcagggaagccaccagatttggaatctgaacaatcaagtctcagttcttcatttgatgagcgcactttc

SEQ ID NO: 311147 - DNA, 201 bp, Homo sapiens
tacacatttaacgattttcagcatatatttctgctgttggtaacatgaaacctccatgatactgtataaacataccaccttcccattggctctaaatgaartcattgcagaaatggctgtattcctacagaaaggaagaaatgaataccattttaaccttgcctttaaatacctcctttgggggctgaatattctctgctg

SEQ ID NO: 311148 - DNA, 201 bp, Homo sapiens
accgttcttcctcaagccatggaccaaaggtaagtagataggtctgaatgcatggcatctcacatggtccacttcttcttgcctccattcaaaatggttayatttaatttgtgaaagtaaagcactatagattggaggcttgaagtcgcaatggtacagtggttctctgaaatatttgctctccctggatccataaaagag

SEQ ID NO: 311149 - DNA, 201 bp, Homo sapiens
tgtgctggttctcctgctgctgcttttcctcatgggttttgtaatttttagctttgagctcatgttcagagactgttgttttctgggtaacccattgaacrttaggttgtaaggtgccctatcaagtgagtttacatttgcctctgctaggacactgtagttccaccagttctaaccagtctttcggttaattttttagta

SEQ ID NO: 311150 - DNA, 201 bp, Homo sapiens
cccgccaccacgcccggctaattttgtatttttagtagagacggggtttggccatgttggccaggctggtctcgaactcctgacctcaggtgatccgcccrcctcggcctcccaaagtgctgggattacaggcttgagccaccgcgcccggccaaagtcgtttttatcccatttcttcctgtaggcgtttcaaagtttgca

SEQ ID NO: 311151 - DNA, 201 bp, Homo sapiens
cctgcttaataactctgatgtaaggtttttaatgaaaagccactgtttgggggaattctgaggtttaagaaattattttcggctggggtatcaggaaatcycctggtttttaaaatgagaggttttttggtttttgtttgtttttgtttttaagctatacctgctggaatggataaagtgagctttaaaagttgatcagac

SEQ ID NO: 311152 - DNA, 201 bp, Homo sapiens
gtttcccaaaaatctgtggtcctgctgcatccattttactattttctcatcaattctgcgtttttcttctaggaaccttactttcctaaggtgtgaaatcaaaaaaaaaaaaaaaaaaaagaatgcattatgtgtaggctctttaagaaataaatagtgtaggtcagtgtatagcacagagtaggcatgtgagccatgtta

SEQ ID NO: 311153 - DNA, 201 bp, Homo sapiens
aatctcctaacactgcatctggtccatactactttaaccttttaataagacccctcttatcctggaagtggcttcttaaaacagtcttgtttgttcatcakggacccacggacaatgtcagtgtgttcttcctccctgttttgccgttttcctggaaggccagatcccatgatagagataactaaaatgactttttctgga

SEQ ID NO: 311154 - DNA, 201 bp, Homo sapiens
taaattattttctgtttcagactttatctttttatctgtaaatgagaaaaataatttctactttgctgggttgttgtgagagtaagtggatatgtaagagyacttggtataagaaatattaatatcctttgtgcttatttatgaaatatttatctaaaaaacgagttgtcctagagcactaccatcatgtcaaactgtaaa

SEQ ID NO: 311155 - DNA, 201 bp, Homo sapiens
ggaggcaagtgttaattttccatgtctcatttctgtttctatacaacatattttcattattttaatataaatgagagagaggcagagattgaagaagaacrtttaaaactgagggagtaaactgcacaggaagagtacacagaatgggagcagaaaactattatctaatacttttgttgttccctgatgtccccagaaatt

SEQ ID NO: 311156 - DNA, 201 bp, Homo sapiens
taaggcaggagaatcacttgtaccctggaggtggaggttgcagtgagctgagattgcaccactgcactctagcctgggcgacagagtgagactccatcttaaaaaaaaaaaaaaaaaagttgagaagctaggaggaaagcaaatggtgatatagccccacacacaggtggagagaaggaaggataagggagtctgtgtgtg

SEQ ID NO: 311157 - DNA, 201 bp, Homo sapiens
ctgcaactaagttaacttagcaaaagaaagttagttcttctatcttgaatctgaacgcaatagccagctaagaaaacaaattacagacattttagaagatggggattggggattatgatggataattattagttatgctttttacatattaacagtgtacctgatcttccatttgcctctccaatctgaaggctttgtctt

SEQ ID NO: 311158 - DNA, 201 bp, Homo sapiens
ttatgttaggctcaagtgttaaaaatgcaaaccgcctgtggtgcactgctggagctgctatccccacctagcaagagctgactgcacacgtctcttcccamctccttgaaattggccctggtagaagtgtttacctcatggtaattgacaaatgctacaaatcagggtgtcttttcttctctgtctccaggagcttgctta

SEQ ID NO: 311159 - DNA, 201 bp, Homo sapiens
tttctatgctgtattctggattatttccttagatctaccttgaaaatcactaattctttctttagctatgtttttactgtttgatttccctaaatatatatatttttttcagtatttcttgttgttttatactctactgttctttacttctcttagcctatggcttctattccttcttttatctctgagaagtctctttca

SEQ ID NO: 311160 - DNA, 201 bp, Homo sapiens
aatgcacgtgacctcattcttacttcaatttctcctctttatgtcatatttttctatctcattatttctctgtgctgcattttgggtgattgccttagttmtttctttcagtttacttgttttcttcagaagtctaatctgctatttaacatgtccctttgagttgttaatgtcaacaaatatattcttaatctctacact

SEQ ID NO: 311161 - DNA, 201 bp, Homo sapiens
ttctatgctgtattctggattatttccttagatctaccttgaaaatcactaattctttctttagctatgtttttactgtttgatttccctaaatatatatwtttttttcagtatttcttgttgttttatactctactgttctttacttctcttagcctatggcttctattccttcttttatctctgagaagtctctttcag

SEQ ID NO: 311162 - DNA, 201 bp, Homo sapiens
ttgattcaaggccagctgcagtggctcatgcctgtaatcccagcactttgggaggccgaggcaggcagaaaacttgagttcaggagtttgaggccagcctrgccaacatggtgaaaccctgtctccactaaaaatacaaaaagtagccagggatggtggcaggcgcctgtaatcccagctactcgggaggctgaggcagga

SEQ ID NO: 311163 - DNA, 201 bp, Homo sapiens
ccgaggcaggcagaaaacttgagttcaggagtttgaggccagcctggccaacatggtgaaaccctgtctccactaaaaatacaaaaagtagccagggatgrtggcaggcgcctgtaatcccagctactcgggaggctgaggcaggagaattgcttgaatctgggaggcagaggttgcagtgagctgagattgtgccactgc

SEQ ID NO: 311164 - DNA, 201 bp, Homo sapiens
gttggagacaagggaatgtccaggaacaagtcctcctgacttgtacttcagggatgccgcccagctcattctttctacaggacgggttctccaaagaaagrcaaacagctcccagttttggctaaggttggacttcccaaaaacatgggtattcaaggattttctttatattttttgggcacaggaaggaagtaaaattct

SEQ ID NO: 311165 - DNA, 201 bp, Homo sapiens
actaaaaagggttgaaacgtctattttaagaccttaaattagtcaaaacctagggaatggaagacatagagtcataggatgagaaaataatgtggttttgkattgaaatgtttcagagaaaggccccttttaaaacagttctaaataaagttcttggaacagaagaaaactattttgttttcactttagacatggaaaatc

SEQ ID NO: 311166 - DNA, 201 bp, Homo sapiens
aacatttcccacaacattacatatttttctacagtaccactttagtgactatacattccattttataaatatgtgtttatttcatcagtcctctctttggsggcatttagattgttcccagtttctcctaactctgtgataattatcattgtagtaaagttattcttgcagttggctattattattatgtccttaggataa

SEQ ID NO: 311167 - DNA, 201 bp, Homo sapiens
caggtcagttccctccaaaacaatttgtgtagctatatagtagcatctcttctctttctcttttttatacaagtgaatattttttgtttctgattagcaaytgttgagtgctctggtgatgggagcaactggagcagtgggcaggtaagcatgactcatttttcccagtggttataaagtcccccataaaggcattcatca

SEQ ID NO: 311168 - DNA, 201 bp, Homo sapiens
taaactaagtgatcatcaataatgcaaaagtatttttcatttatgaaaaggatttacaacatggctcctttaaacagtgagcttcctggtacatttaaaayattattcaatttaaaatatgattttaagtttctgtagaaattttctataacaaaactaataaagaaaataaaatatttctctatttgattttttttaatg

SEQ ID NO: 311169 - DNA, 201 bp, Homo sapiens
tggacaagcacataggagctgctagtcagggaccagtgattatgcctagtctgcagtcagttctggctgacagcagcgtgtggcagctcactgcagatgcrtgacactatatgagatgttatttcctagagatgtgcagattaatgaggcacttattattttgagcagttcgtgctgaggagttgttggatgggattctgg

SEQ ID NO: 311170 - DNA, 201 bp, Homo sapiens
cactgtccatctgtccaacctgctttgttgcctagtaagtcatttggttctctccacttaaatttttctgtatatagtcacacataacttacaacagggayacattctgaaaaacacgtcattaggcagtttcattgttgtgtgaccatcatagagtgtgcctacaaaaatgtagacactgtagcctactgcacatctggg

SEQ ID NO: 311171 - DNA, 201 bp, Homo sapiens
gtcttgccagtacctataactacctgggaaaaaagacaaaccagatgttggaggcttttgaacaaaaggacttctctttagccctgaactatcaggtaaaygttttcttctcttcccataaatcacagccttttttcttccccacttgaggattctttttcttctctctaccatgcctgccctcattaaaattgcccagcc

SEQ ID NO: 311172 - DNA, 201 bp, Homo sapiens
taacaatactgtacaccactgcagaccttataaacattgtacacgtaggctgtacttcataattttagaaaatatttcaacaatgataaacttagctaacygtaacttttttcctttatgaacttttaaatctttaaaaactttttgactcctttgaaatagcacttcacttacaaacattgtatagtcatacaaaaatat

SEQ ID NO: 311173 - DNA, 201 bp, Homo sapiens
aaggcagtctaggccacaaggactgcaattcctggacaagtcctggtgctgtgctgggctctgagccagttcacttcaggtacacacaacctagtgagacrccagctggggcagccaatggagtgtttacgtcacccctcccccaaaacagaaagcacagcttgtggcttctagaaggactccttccttcagctgaagaat

SEQ ID NO: 311174 - DNA, 201 bp, Homo sapiens; identical to SEQ ID NO: 64920

SEQ ID NO: 311175 - DNA, 201 bp, Homo sapiens
caaagtaaacctctctcaagatttagagcatcagctgcaaaacatcattcaagagctaaatcttgagattttgcccccggtaagcataaagctgtttagtkcacatttacgtagaactctccgtagacaagcaaatcatattttttgtttgtttttcttattttttaatagcctgaagatccttctgtgccagttgcactc

SEQ ID NO: 311176 - DNA, 201 bp, Homo sapiens
atgatttgcaagcagtaagtctgaattatttagacaagtagtgctcagagcttcagaatgttctaggtatgggtaaaaagtcaatgagcagtacattttgsccttttaaggagggcatatcaaaagatatgtaccaaactgctaatcctagttacccctgaagttagttgctatgagttgagggcctgtgagagaatttca

SEQ ID NO: 311177 - DNA, 201 bp, Homo sapiens
tctatacttcctcgtcctcatgccagtataatgttttgtactgtaggtcagtaatgtattttgatttttcatttggggtttatattgtggttgtgaagaaracttgatagcagaacagaatgactggaaagaaataatgagccagtctcagatttcttgtttaaataaaacttttggcagttttttccttcatggaaagta

SEQ ID NO: 311178 - DNA, 201 bp, Homo sapiens
tttcttaatcctggagattggagttacaatttaaagaatacttaaaatacaggacaaattatagtatcaaatgtatcatagcatttttgaggagtttctcktctgttattttatacagtagtgagtacagtctgagaagtgagaccaggtttcatttactacttgagtagtttgcatatgcagtaagtttccaggccttta

SEQ ID NO: 311179 - DNA, 201 bp, Homo sapiens
aatgatttctcatgccaatttattttagaatgggtggagaagaagcagagatacgtttttgtgagcacaaaagacttaatatggctacactaagaatgacytgggaagccaaagttcagctcaaagagattttgattaattctgggtttccagaaggtaagacttcttccattcttaagatatctttaaagtgacatttat

SEQ ID NO: 311180 - DNA, 201 bp, Homo sapiens
ccttttagtagccaagacatgaagtacccatctcccttctttgtatttggtgaaaaggtaagaaaagactagaaaagtttacattgaaagttgaaattgtstttacaatcattaggaacatgaattttgattttcaaagcacagtatatagcggtatttggaagttggaatgtcaaccattttgtattgtctctttctcca

SEQ ID NO: 311181 - DNA, 201 bp, Homo sapiens
ttgccacactcccctgaagaaaaatgacagatttctagtcaaatcaactagggatgaaaaacacttgtattttaaatgttttttgtttaagtcaagggctrttgaggaaactggaagttggtaaatcagagaagcatataaaatatgggaaagagattgcggggtcatttatttctttgctgttgaaatagttgtcatgat

SEQ ID NO: 311182 - DNA, 201 bp, Homo sapiens
gaattcagctgctaatctaacttaattatatactaattatatctaacttaattatatactatatacttaatcttaaattgataccagtagaagcaaatgcrttaggaatttgagccatgtctaccactaggcacaccaccactatggaatcagaatctaagtgaagcttgagtaccctttcacatactctgtatattgatt

SEQ ID NO: 311183 - DNA, 201 bp, Homo sapiens
atgttggaattcactggctagctaccataccgggcttaaagattttttctgatattttgatatgtgtgctgggatgaacatacttgtatacgcctttgatyaattggattaaattcctagacatagaattgttgggtcagagggtatgcatattttaactttcgtgcattttgccacactcccctgaagaaaaatgacaga

SEQ ID NO: 311184 - DNA, 201 bp, Homo sapiens
gttctaacatactcagaacaaagaatgtcatttacttttttgttagtagttggtctgctgcatcagtgcatgttggtagtgttagaaggaacttacaaatrcacatacatagttcagagtgggtcacatgacagggaagtgacacagcccagatagccctttttccatggtactgttttggcatctctaaagaaaaatatt

SEQ ID NO: 311185 - DNA, 201 bp, Homo sapiens; identical to SEQ ID NO: 64922

SEQ ID NO: 311186 - DNA, 201 bp, Homo sapiens
gaatttgaggtcctggagtggcaaggtggtagaaagaggaggacaagttagcattgtggtgccaggactgcccagtgaatttttcctgtgccttggttatyagggctgacccttgaataggttctactttgtctccataaccccaaccttggaggaacactatccttcaaggtataagctctctagaagaaagcagaaaag

SEQ ID NO: 311187 - DNA, 201 bp, Homo sapiens; identical to SEQ ID NO: 64923

SEQ ID NO: 311188 - DNA, 201 bp, Homo sapiens; identical to SEQ ID NO: 64925

SEQ ID NO: 311189 - DNA, 201 bp, Homo sapiens
acccaaggccttcataaatttgcacatattaccagatcatttatttttttcttagaacatgtggtacagcatagttctttgctgtcattggcttttactamatttttctctgaataaataggttttccacaggctagaatatttggtgaaagaatcttatgaattgccttttcttgttccttattcttactaaatatattg

SEQ ID NO: 311190 - DNA, 201 bp, Homo sapiens
cttgtatatgttgttacaggagctttattgcagaaatgaccatttatatcaagcagctgggcagaagtaagtgttactgtttccccaatattccaagtctytgtatagagaaggaatcttcacattttaagtcttgagtcacgtatacagaagctgtattatttgaaagagcacataatgtaagatagcatctagggtata

SEQ ID NO: 311191 - DNA, 201 bp, Homo sapiens; identical to SEQ ID NO: 64926

SEQ ID NO: 311192 - DNA, 201 bp, Homo sapiens
taattatcattgattctacagactctagaatcagaagaagtggatttaaatgctgggcttcatggaaactggaccttggaaaatgctaaagctcgtctaawccaatattttcagaaagaaaagatccaaggagaatataagtacacccaagtgggtcctgatcacaacaggtttgcttgtttcattcttttccttctgtag

SEQ ID NO: 311193 - DNA, 201 bp, Homo sapiens; identical to SEQ ID NO: 64928

SEQ ID NO: 311194 - DNA, 201 bp, Homo sapiens
gcccagaagaatcagtgcggtttctgtggcagagcgagttgcatttgaaagaggagaagagcctggaaaaagctgtggctacagcgttcgatttgagtctrtacttcctcgtcctcatgccagtataatgttttgtactgtaggtcagtaatgtattttgatttttcatttggggtttatattgtggttgtgaagaaaact

SEQ ID NO: 311195 - DNA, 201 bp, Homo sapiens; identical to SEQ ID NO: 64930

SEQ ID NO: 311196 - DNA, 201 bp, Homo sapiens
atcagtgcggtttctgtggcagagcgagttgcatttgaaagaggagaagagcctggaaaaagctgtggctacagcgttcgatttgagtctatacttcctcktcctcatgccagtataatgttttgtactgtaggtcagtaatgtattttgatttttcatttggggtttatattgtggttgtgaagaaaacttgatagcaga

SEQ ID NO: 311197 - DNA, 201 bp, Homo sapiens
attgtgacttgactgctattgtaaatcattttcaagtcagcattacttttaaaacaatctgacaggtaaattattctaattagagcctatatcttcctcarcttcctcagtaccagtagtggggatgggaaaagttggatcaactgtttgcagttttataagcacgtttagaaagcagagcaattcttgattgcttcaaat

SEQ ID NO: 311198 - DNA, 201 bp, Homo sapiens
gttccattcattaccaatgataatactttaaataaaatagaaaaatcagtaatattttagacatgtttgctcccattgacactccccctgccccgtaagcratgaggtcttgctctgttacccaagctagaatgcagtgacacaaccatagctcactgcagcctcaaactcttgggctcaagcagtccttcatccttaacc

SEQ ID NO: 311199 - DNA, 201 bp, Homo sapiens
acaaagtgtatgtgcatgtgtgagtttgcgtatattagcttaatagatcgcagtcattaatgggtggcctatgcaaaggaatcttaaaataattataaccrtaatgtaaaacatttggggcctactttatttcttggctccaagctaagtggaaaattccttttcattgaatgtgttctagctcttgagactccagccttt

SEQ ID NO: 311200 - DNA, 201 bp, Homo sapiens
tctcattttatttttacaactcttgaaaaacgtaaagccattcccagtcctatggtttatcaaactctgttgtcagtgactgctttcacacattaaaggcrgagttgagtagttgtgacaagatactatatggcctgcaaagcctaaaatatttattaattgaccgtttatagaaaaagtttcccaaatcctggtctaggt

SEQ ID NO: 311201 - DNA, 201 bp, Homo sapiens
tacatggtaattgataaattgaaaggacaaaaaagttgaaacttggttatatctggccaacttgtaccccatgacttctctttataattccttagtctgtyctgacaatgaaaacaatttgctgccaacatccattttaggaaatgatgaatagcattctgtgccaatcccagtcatttagtggcagctgtctctgtatgt

SEQ ID NO: 311202 - DNA, 201 bp, Homo sapiens
aaatcatttagagaataagccagatttagaaatatagagacctagattttaatattatttgtgcctaatacattgtataacactaagtggttactccttargcctgcatttccctcattctataaaatattaagttacttaacctctcttgtttcctcagttgtaaaaagaatataaataatgcctaacccatagggttgg

SEQ ID NO: 311203 - DNA, 201 bp, Homo sapiens; identical to SEQ ID NO: 64919

SEQ ID NO: 311204 - DNA, 201 bp, Homo sapiens
atggaatcagaatctaagtgaagcttgagtaccctttcacatactctgtatattgattcaaaactagtggtaagcactgggcaaaaatggaatagagcttratggacagccagtaggctcagccatcatattcttgaaaacctagaaaatgccagtattctgggtctcttaaattcattattttaaagtctggatgatctg

SEQ ID NO: 311205 - DNA, 201 bp, Homo sapiens
caaatgaatttaggtctgctccattgtgaaagttgatagtacttaacctgactggattgtccctggcagaatattttctggaagactgcattcagatgacycactttgttcctccaccaaaagacaaaaagaagaaggataaggatgatgatggtggtgaggatgatgatgtaagtgaatttcatgaagaatttccattat

SEQ ID NO: 311206 - DNA, 201 bp, Homo sapiens
aattgaacgaaaaggaaactccttttgaactcatcgaggctctacttaagtacattgaaacccttaatgttcctggagctgtgttggtttttttgcctggytggaatctgatttatactatgcagaagcatttggaaatgaatccacattttggtatgagtctttgaattctcacatatttgagagtgaaaatgaatgttt

SEQ ID NO: 311207 - DNA, 201 bp, Homo sapiens
tctacccctgcattctcagattcctcgagaggaacagcgcaaagtgtttgatccagtaccagttggagtaaccaaggtaaatattaaacattagagtgatrggattggaagtgacgtagatactaaacaaatgttacaggctttcaaagagctacccaaaaaattgtaacccatctaaattgaggaagaaaaaaggagtct

SEQ ID NO: 311208 - DNA, 201 bp, Homo sapiens
ataaacgttccaattatgtcgttaaaatttatggggagtcttaatagcaacatgatagaatatcctatgtttaacccagattcagtaatctagataattgsttcctcccagtttttgctattataaatgctgtttttaactgacttttgttttcttagatctgaagaagacacttgaatcatgggtgacgttaaaaatttt

SEQ ID NO: 311209 - DNA, 201 bp, Homo sapiens
gctggtatcaaccttatgattggcagtacacggtgagtaccaatatacttcttactgaaccaagtagaggggagagatcttatgtaggcctagaattcctraagttagtgatagaagccctattacttaagtaaaattctagatatagatagagctatatagatagagagtttgatgttctgagttctaacatactcagaa

SEQ ID NO: 311210 - DNA, 201 bp, Homo sapiens
ccttttaagtaactaataagaatattttctggagtgtaatttttctttcttcacaggttattttgtccacaaatattgctgaaacaagcattaccataaaygatgttgtttatgtcattgactcctgcaagtaagttactgggaaacctatttgtctgctccagtgttactaactggaaacttcttaccagttaacagaat

SEQ ID NO: 311211 - DNA, 201 bp, Homo sapiens
atagttattgataatacacatgagtcttagaattaaccactttttcctatgtaggcagaaagtgaaactcttcactgctcacaacaatatgaccaactatkctaccgtatgggcatcaaaaacaaaccttgagcaacggaaagggcgagctggccgagtacggcctggattctgctttcacctgtgcagccgagctcgttt

SEQ ID NO: 311212 - DNA, 201 bp, Homo sapiens
atttggcttcattccctttattaaattttcaaatataactaaatgtgtacatttggtaagtcgttgggaaataataagaatgctttgctaaagtgatggtyttgtgcttttcctaggtatggagatggtccacgtcctcccaagatggcccgatacgacaatggaagcggatatagaaggggaggttctagttacagtggt

SEQ ID NO: 311213 - DNA, 201 bp, Homo sapiens
aaaaatttaagaatagtgtcaatataatgagatatccaattaatgtttacattttcctgatttggtaatgtctggagatgtttgaacttgaaggaggtgtrttgatggcgtctagtgggtggaagccaaggatgttaaaaactatggtattcagaacagctttctgcaacaaataattacctggttgaaatgtcagtggtg

SEQ ID NO: 311214 - DNA, 201 bp, Homo sapiens
aaaataaaaggatgaggaaaaggcagctctgtatccctgattaccttgctgcaaaaagtttattaacatctgtgtatacacaaggaggatggttattttaygcttattttctcttagacttgaaacccacatgacaccagagatgttccgaacaccattgcatgaaattgctcttagcataaaacttctgcgtctaggagg

SEQ ID NO: 311215 - DNA, 201 bp, Homo sapiens
gaatagcagatcaattttatttcaatttctatttgtgcatttggcttcattccctttattaaattttcaaatataactaaatgtgtacatttggtaagtcrttgggaaataataagaatgctttgctaaagtgatggttttgtgcttttcctaggtatggagatggtccacgtcctcccaagatggcccgatacgacaatg

SEQ ID NO: 311216 - DNA, 201 bp, Homo sapiens
gtgcagtggcgtgatctcagctcactgcaacccccacctcccaggttcaagccattcttctgcctcagcctcccgagtagctgagactacaggcatacacyaccacacccggctaatttttatattttactaagacagggtttcaccatgttggccaggctcttctgaaactcccgacctcaagtgatccactcacctcag

SEQ ID NO: 311217 - DNA, 201 bp, Homo sapiens; identical to SEQ ID NO: 64924

SEQ ID NO: 311218 - DNA, 201 bp, Homo sapiens
aacattgtgatctagtctggatttaactgtctttgtgtatttcagcgtgggagatgctatctgtaccattgctgctgctacctgctttccagagcctttcrtcaatgaaggaaagcggctgggctatatccatcgaaattttgctggaaacagattttctgatcacgtagcccttttatcagtattccaagcctgggatga

SEQ ID NO: 311219 - DNA, 201 bp, Homo sapiens
ctggatttaactgtctttgtgtatttcagcgtgggagatgctatctgtaccattgctgctgctacctgctttccagagcctttcatcaatgaaggaaagcrgctgggctatatccatcgaaattttgctggaaacagattttctgatcacgtagcccttttatcagtattccaagcctgggatgatgctaggtatgagtaa

SEQ ID NO: 311220 - DNA, 201 bp, Homo sapiens
tggatttaactgtctttgtgtatttcagcgtgggagatgctatctgtaccattgctgctgctacctgctttccagagcctttcatcaatgaaggaaagcgrctgggctatatccatcgaaattttgctggaaacagattttctgatcacgtagcccttttatcagtattccaagcctgggatgatgctaggtatgagtaag

SEQ ID NO: 311221 - DNA, 201 bp, Homo sapiens
ttaaaagctctctagagacaagcagatgtgcaatgcacccccttaatacagaaactaaagaaaaggctgtcttagcagcagagcactgggagtagagccayggctctaaactttaatcaataacatcacaccaaccaggcaggccacactcccatcaggaacaatggctaccacagcagtgattctcaatcttgggaaggt

SEQ ID NO: 311222 - DNA, 201 bp, Homo sapiens
aagtgttctttcattaaaatagccacaattgtttcttcttgatttaggattcttgtctcaggtgttgttgatatcctgaatcaacgggaaacaaataggcygtgtactagctgggatttttatttgtcaatttgcatttccagctttgagaattcacgtgagtggctccaccatagccatcctgaagagaactgagtgcca

SEQ ID NO: 311223 - DNA, 201 bp, Homo sapiens
atccaacttcatctcttacacctgctcccacatccattctacccaactagactctgtactggcagtttcaagtaaaaattccctggggaacttgttaaacrattctgtttcttcattccaagcctagcaattttcagtcacataggtctcgggtagggcacaaaaatgtactggatttttaacaaacatctctccccatcc

SEQ ID NO: 311224 - DNA, 201 bp, Homo sapiens
ttaccataaatgtaatggattaaaacaacaaaaatttattcacttacggttctggagactagaagtctgaaatcaagtgttcagcaaggccacacttcctscagaagagctaaggggctaatccattccttacttcttccagaagcttctgatggctgttgacatttcttatcttatggccacacaattcaatctctgcct

SEQ ID NO: 311225 - DNA, 201 bp, Homo sapiens
caggtgtggtggcgcgcacctttagtcccagctactcgggaggctgaggcaggagaatggagtgaacccaagatgcggaggttgcagtgagccaagatcgmgccactgcactccagcctgggcgacagagcaagactccgtctcaaaaaaaaaaaaaaaatgcatgtactttgctaagccttgttccagtttgtactctac

SEQ ID NO: 311226 - DNA, 201 bp, Homo sapiens
tagttccaccatgcccggctaatttctgtatttctagtagagaaagggtttcaccatgttggtcaggctggtctcaaactcctgacctcaagtgatcctcycgcctcggactcccaaagttctgggattacaggcatgagccactgtgcccggatgaggttgagtttttttgttatgtttgttggcttttatttttctttg

SEQ ID NO: 311227 - DNA, 201 bp, Homo sapiens
tccaccttccagatgtagtaagtaatactactgtgaactgaagtcaggacatgatattgcaacttaaaggactcatcaaacaacagtctagtcaagccaasacaatcagaggtgttgaggtctagtattttgccatctccccataactgtcattctcttatccaggtaacttcccttgctcagcatggagtgaatgtctgt

SEQ ID NO: 311228 - DNA, 201 bp, Homo sapiens
actacatgtacagcattttgaaacagcaggatccctatcaaagctcttaactataggtcactctgctagactatagaacagtacaacagtggacacatccrccacattggcatgaaagtaacaatatggaaagacaggaagaagccctgctattgagggtcaatcttacacttaaaagaggtagaaattaaataatgtaaa

SEQ ID NO: 311229 - DNA, 201 bp, Homo sapiens
tagattacttttccttcaaccacctctgataagcttgaagtttcacttgtatgagtctgatatacacaattattcctcaccctctgtggcgtagtcactargtggtgatcttttcctccacatttctctgagccaaagagaaaaaatgctggagcgtagagagcacctttgttcacatcccatcttttttttaatcgctaa

SEQ ID NO: 311230 - DNA, 201 bp, Homo sapiens
caacgtaaaacttgcaagctcttgtaaattcacttagtctcccgtatcaacccggcctcatctaaattggtatcacatatttcattaatttcacccaaggraataactggataagataatgcaggtggtcatgcctgagacagaaaccagagagctggggatctcttgtccgcactgagttgaagatatttttaaactatt

SEQ ID NO: 311231 - DNA, 201 bp, Homo sapiens
tgtgcacacacaacatctctccaattctgaaactagattcacacataagtgaacggatttgatctagagccataatggaacaaggaggttatttagtgaartccccttatttaccgaggcagtgtggtacaatggaaagaacacttgatttgtcctttgaggacctggactgggatccctgccccaaagttttctctctct

SEQ ID NO: 311232 - DNA, 201 bp, Homo sapiens
aatagtaatagtatgttgaaatacagctttccgaagtacagctgctcctagccctgccttctcctcattcctttctttcgtcctgcttttctgaattccargattcctccacacaatcagcatatcctttctcaagccctttttttctaatctgagtatatccaaatagtaaaaccttattcactaaaacagcagcatctt

SEQ ID NO: 311233 - DNA, 201 bp, Homo sapiens
catgatgtaaatactatgtaaatatttgtggtactgtattgtttagggaataatgacaagaaaaaaaaggtcggtacatgttcaacacagacaaaaccatsctgttttttccaaacattttccattcccatttggttgaatccacgaatgcagaacccatggagacagagggctgacagtatttcactctgtggcacagga

SEQ ID NO: 311234 - DNA, 201 bp, Homo sapiens
gtgccacacctttttaaatgaccagatcttgtgacaactcagtatcgcaaagacagcaccaagccatgagggatccacccctgtgacccagacacctggtsgggggccaggactccagcactggggattaaaattcaacatgagatttgggtggggacaaatatccaaactataccatttcttatctctctgatgttattt

SEQ ID NO: 311235 - DNA, 201 bp, Homo sapiens
aggctaatcacatgacccataccctgtgtgtgctcccttgtgctgagctggtcccactcctagaccctagcaccaaggttttagcttcatgttggtccacrttggtccaaccccatccttaaacccttagataggaagagagagttctgagctcgccccatattgttcagctttccatccatcctcccaggaatgagatat

SEQ ID NO: 311236 - DNA, 201 bp, Homo sapiens
attgcaggatatgtgccaagtagggatagttgttctagaaagcaagacttagatgctttctaattttcagctctctcccttccccttgattctccattctmctacatgtcaactagttaatccaatgagcacttccctggaggctgagatatggtgtgttctcgttctttgcatcttatccagaatagaaatacacatatt

SEQ ID NO: 311237 - DNA, 201 bp, Homo sapiens
tctcccctgttcccatactggacacatatttgggttgcaatgatagttacccacctacttaagattaggtcctatcatgtcatgaatagccctaacatgayttggccagctttcacccgtgcaagctgcatactcaccatcagcagcaggcagggccactcaggatctcctgggcaacgaggcctcaggacaatctgtcca

SEQ ID NO: 311238 - DNA, 201 bp, Homo sapiens
tgaaaaaaaatgttttaaactattttcaatgatgatggtatagtttgtgtgaactatagaagatgcatctctatttttcctaattttcatgaggaacctgygctttttattacagtgaccagtacttggaggacaatgtcacagcccctgactatatgaaaaatgtccttgttctgacgctgtctcctgggaattcccttc

SEQ ID NO: 311239 - DNA, 201 bp, Homo sapiens
tcatctgtaaaatgataataatagctatgtcatagggttgtaggattttaggttatgaggattttgtgaaataatgcacgtgcttataacaagaccaggtmcaagtacatgttcaatatatatctatcagttattattattttattatattctttgtagtctgggtgtgaggcatgcagtttcacagattttccagaaatc

SEQ ID NO: 311240 - DNA, 201 bp, Homo sapiens
agttccaccatgcccggctaatttctgtatttctagtagagaaagggtttcaccatgttggtcaggctggtctcaaactcctgacctcaagtgatcctccygcctcggactcccaaagttctgggattacaggcatgagccactgtgcccggatgaggttgagtttttttgttatgtttgttggcttttatttttctttgt

SEQ ID NO: 311241 - DNA, 201 bp, Homo sapiens
cttgcttttggttttcatttgcatggaatatctttccatccctttactttcagtctacatatttctttacagataagatgagtttcttgtaggcagcctayagttgggtcatttttaaaaatccattgaaccagtctatatcttttaagtgaaaaattttgatccatttacattcaaagttattattatgtaagggcttat

SEQ ID NO: 311242 - DNA, 201 bp, Homo sapiens
gactagtgattcagtctcattactcattgttggtctgttcatgtattctatggtattctatttttttctgattcaatctatgtagattgcatttatccagkaatttctccacttcctctatatttttcagtttgctggtatatagttgttcataatagtctctgataatctttcacatttttgtgcaattggtttttatgt

SEQ ID NO: 311243 - DNA, 201 bp, Homo sapiens
cactaccgatttttgtatgttaatttttttttgagacagagtctcactgtgttgcccaggctggagtgcagtggagtgatctcggctcactgcaacctccrcctcccaggttcaagcaattctcctgcctcagcctcccaagtagcagggattacaggcagctgccaccaagcccagctaattttttttttatattttagt

SEQ ID NO: 311244 - DNA, 201 bp, Homo sapiens
gctggaaccccggaggcacaggttgcaatgagctgagattgtgccactgcatgccagcctgggcaacagagcaagattctgtctcaaaaacaaaacaaaamaaaaaaaaacaaagaaaattccaggtcatacaattcacaaaaaaatccaagatctctcttattgacagaggacttagtaaactcaaaaaaaaaagagcaa

SEQ ID NO: 311245 - DNA, 201 bp, Homo sapiens
ataagttgaaaacaaggaaacattttcattatgtgaatattatttatataaagctaaattgtataccgtgataacatctttctttttttttttttttttttgagacggagtctcattgtgtcgcccaggctggagagcagtggtgcaatcttggctcactacaacctccacctcccgggttcaagcgattctcctgcttca

SEQ ID NO: 311246 - DNA, 201 bp, Homo sapiens
aggtaaggagtccacagagacaatgcataggaaaagctctcagacacgcttgggccacctcctttgagacttggccaggaaagttgagcatgctaatcctyttctgtactcatcacgatgagcaccctccatcctctgcaagagaaatgaccaccaaaaaatgtgaactcaaaacttgcctttactccaaagagccctttt

SEQ ID NO: 311247 - DNA, 201 bp, Homo sapiens
ggagacggggtttcaccatgttggccaggctggtctcgaactcctgacctcgtgatccacccgccttggcttcccaaagtgctgggattacaggtgtgagmcaccgcgccccctcagggcttattcttattcatatttccttgccccaacacagtgccttggaatgaataaatgaatgaatgaatgaatgaatgaatgaca

SEQ ID NO: 311248 - DNA, 201 bp, Homo sapiens
attttgtatattttgggagatctataattgcatgcaacttcattatattgttcctttcattgactaaaaaccttatcctctgagagaaaatacctaagtaytattgagtaattatattaacataataacgataatgctaaaatccggcttttataaacccaaatgatattatgacccaccctcagcagactgtttttttaa

SEQ ID NO: 311249 - DNA, 201 bp, Homo sapiens
tctgaagttatatctgtgttcatgctgggaatcaataaatgatcctaactagctggttaacagttgccttttttcactgagaattgttatggaaatcaagygtcattgtgtagaatcattaatctcaccataatttgttctataatgttttactgttcatcctttttcttttttgtgccctgacacagtacaaggttcttt

SEQ ID NO: 311250 - DNA, 201 bp, Homo sapiens
tctatatccaggataggtctcaacagagattcaatatgccacatcctaacataaaggaaaaagaaagaaagagtaaagttatgaaaatgtaacattgggcwgggtgcagtggctcacccctgtattcccagcacttttggaggccgaggcaggcggatcacttgaggtcaagagtttgagaccagcctggccaacgcggta

SEQ ID NO: 311251 - DNA, 201 bp, Homo sapiens
ctcccgggctgaagcaatcctcatggctcagccttccaagtagctgggacgacaggtgcacaccaccacacctggctaatttttgtactttatgtagagayggggtttcaccatgttgcccagactgagctcctgagctcgagtgatcccccaacctcagcctcccgaagtgctgggattacagctttgaggcactgtgcc

SEQ ID NO: 311252 - DNA, 201 bp, Homo sapiens
tgagagcaggctgggatgggaggaggaggaagaggcaatgctgatgaccttaaacaactttgggatggcaagtcaagggccaggcccaaaaagctgcaaasaaagatggatacctctggggtgtcacagtttttcccagctagaagttctaagtcctctcatttacgaccgtgccaaaattagggactgcatcctcttttg

SEQ ID NO: 311253 - DNA, 201 bp, Homo sapiens
acagtacaacagtggacacatccgccacattggcatgaaagtaacaatatggaaagacaggaagaagccctgctattgagggtcaatcttacacttaaaakaggtagaaattaaataatgtaaaataaagcaagggttactggaaagttccctacgtcctaaagcaaaattttcctgtcactgatattaaaatcctacctt

SEQ ID NO: 311254 - DNA, 201 bp, Homo sapiens
aaaatcaatcaaatactgtcactgctctcaaaagtttatagtctagtgagacacacaaacaaactgttataatatgcatgtaaagagttacaccacaacastgtctcctaaatttcattgatttttgcagcgagtgattctcaaagatctcaagcacaatgatggtaatttcactgaaaaacagaagatagaattgaacaa

SEQ ID NO: 311255 - DNA, 201 bp, Homo sapiens
actccacaaaataataccctccaaaacaacacaaacctcctgagctgcatggatcaatgttgccctttcctacaagcccctagtgaaactcccgtctttcrtttcccagatctcatcctgagactatgaagaaattttcctctaaatgtaatgtatactaagtcaaagataaatgacagtggccttttctaacttgcctca

SEQ ID NO: 311256 - DNA, 201 bp, Homo sapiens
ctcctgcctcagcctcctgagtagctggaattacaggcatgtgccaccacagcaggctaatttttttgtatttttatagagatggggtttctgcatgttgracaggctggtctcaaactcctgaactcaggtgctccgccctcctcagcctcccaaaatgctgggtttacagacatgatccacctcacccggcctccaagg

SEQ ID NO: 311257 - DNA, 201 bp, Homo sapiens
caaggcactttcttcaaaaggtggcaggaaggaaaagtgctaagcaaaaagggaagagccccttataaaaccatcagatctcatgagaacttactcactaycatgagaacagcatgggggaaaccacccccatggttcaattacctccacctggtctctcccttgacacgtggggattattgggattatggggataacaat

SEQ ID NO: 311258 - DNA, 201 bp, Homo sapiens
tatatatatttactaaaagtcattgaatcgtaaactcaacatggatgatttttatgatagataaattatacctcaataaaactgttgagagagagagagaraaacagagatgaaaagatacagagagacagagacacacagaggaaaaaagtgaccaggagtaaaacaagggctcaggatgtaaatattcctaggcctgaa

SEQ ID NO: 311259 - DNA, 201 bp, Homo sapiens
gggagtagcccatagaggaaatgcctaacaccaggagtggtgttctggtcagtaaggccagccatccttgtgaccaaacagatattttgaagagaaacttrttttcaattcttgtattgctttctaagaggagaaatgtgtgagtcagagtgaaatccaaacaaaactctcatctaatttaggacactaatgaacacattt

SEQ ID NO: 311260 - DNA, 201 bp, Homo sapiens
cataaaagtaaaatattgagaggcagcatattatactatgctccatagaagccattctcaaatattttggtattaggacctctttatttatttatttattygggacagagtatcgttcttgttgcccaggctggagtgcaatggcatgatctcagttcaccacaacctccgcctcccaggttcaagcgattctcctgcctc

SEQ ID NO: 311261 - DNA, 201 bp, Homo sapiens
gttgagggccaccgctataaaagcccatcagaaatccttgcaggtccactggcagtaagcgcttttcagtttggaggacatggtgttctgtcattgggctrccttccctcacacatatctacctgagcataccagggttctaaacttcacccagtcttcagaagctgaatgacatggatattaataaaaacctattgacca

SEQ ID NO: 311262 - DNA, 201 bp, Homo sapiens
aatatccatatagataggtatagatattttaaatatccacccagaataaattacataatataacaaaaagactattgatgggataccaatgagaggatcamaagtctttcctaagaattgtttactcattttcacaactaaagatttcaatgaaatattccctgttatctccatttgaactctcaggaaaatcattaaatg

SEQ ID NO: 311263 - DNA, 201 bp, Homo sapiens
cctttgcagagcccctgaaaaacttggaagatgcggtgaatgaggggctggaaatagtgagaggacgtctgcaaaatgctggtaagaaaatgttaatagamtcttcctccactctgttactacctctggggacaaaatgttgctaagcaaagaccttgtgttctttgatcacacaactttctctaaggactgtccctaaac

SEQ ID NO: 311264 - DNA, 201 bp, Homo sapiens
atcctttcttgcaacaacttttcttcttcttcttttttcctattcaggaagttttaaatgacacaatttcctaccctgatggcacattcatggattgggartttaagatctctgtcttgtatgacattgctaaggtaagagaaacacacacacagaaaatatgaaaattaaatataagaaaacagatctaacaagttattc

SEQ ID NO: 311265 - DNA, 201 bp, Homo sapiens
taaccaggctgatgtctccagctagaaagttgatgtacttcttggttaacttttggaaaaccaacgatctgcccttcaaaacttattcctggagcacttcrtatgtttacaagaatggtacagaaactgaggactgtttctggtaagcaggatcattaatatttcactagcacttgccatggagagaagccataggatcat

SEQ ID NO: 311266 - DNA, 201 bp, Homo sapiens
tttgagctggagcatcttcctggcctcccaatatggattcgcattggagttcactctggtatggagttgagcatcttagcaaattgggaaccatatgtacygctgtgcaccaactaaatcagaaaggataaaaggtcttcaagtgtgatcgacctcacataatttttactcttaattctttttgccaaatgtgaggtccca

SEQ ID NO: 311267 - DNA, 201 bp, Homo sapiens
gagataatgcaaatcataacaggaatgtgtgatgtgcttaaatattggcactgatgagaaatgcggaagtgaaacatgtcacagaaacagatcattatggraacagtggtctacaactgaactgactccttggactccgtggtacgtaactcttttgtcttaccagggaagaggaaatgagactacctactggctgactgg

SEQ ID NO: 311268 - DNA, 201 bp, Homo sapiens
cacaattgcttaaattctcttatttaacctaacaagcacagaagaaaacaattctatctggggaaagtagaaagttttgcagattaatgaaaaaaaatgtwttaaactattttcaatgatgatggtatagtttgtgtgaactatagaagatgcatctctatttttcctaattttcatgaggaacctgtgctttttattaca

SEQ ID NO: 311269 - DNA, 201 bp, Homo sapiens
catttacagacctgtggacagctccagagcacctccgccaagccaacatctctcagaaaggagatgtgtacagctatgggatcatcgcacaggagatcatyctgcggaaagaaaccttctacactttgagctgtcgggaccggaatggtacatctaaacccattcatgtgtcccctctgggagtgagccaacctgctttct

SEQ ID NO: 311270 - DNA, 201 bp, Homo sapiens
accatctgctgaaatggtttccaaatgtcacttttttctttaaaataatcaagcagctgaagtgtgtcacatttctgtttttctatcatctaaaaaattamagggaatgtcatatctgcactccagtaagacagaagtccatggtcgtctgaaatctaccaactgcgtagtggacagtagaatggtggtgaagatcactga

SEQ ID NO: 311271 - DNA, 201 bp, Homo sapiens
ccctgacacagtacaaggttcttttgacctatgatacccacgtaaataagacctatcctgtggatatgagccccacattcacttggaagaactctaaactkcctaatgatattacaggccggggtaagatatccctaatgaattttctctccctgacactgttttcctggtaagaaaagtaaagtctattgtttatgtaat

SEQ ID NO: 311272 - DNA, 201 bp, Homo sapiens
aagccaatccaggtgccatctgattagactattaatgtcaacaatgttttcagtaaatttgaaacagagctatttgaacccattttacactctctgtcatratccaacttatctgtcaggcaaaaatcaagaatggcctctaacatactctgatcttgccctagggtatgacggtccagtgaccttggatgactgggggga

SEQ ID NO: 311273 - DNA, 201 bp, Homo sapiens
cttacttttcttccggcatgtgctctgtatttaaaaacaagttgtcttagttgggtatggtggctcatgcctgtaatcccagcactttgggagactgaggygggcggatcgcttgaggccgggagttcatggccagcaacatggcgaaaccccatttctacaaaaaatacaaaaattatccgggcatggtggcgcacacct

SEQ ID NO: 311274 - DNA, 201 bp, Homo sapiens
gatctctgggctaagaagccaatccaggtgccatctgattagactattaatgtcaacaatgttttcagtaaatttgaaacagagctatttgaacccatttyacactctctgtcatgatccaacttatctgtcaggcaaaaatcaagaatggcctctaacatactctgatcttgccctagggtatgacggtccagtgacctt

SEQ ID NO: 311275 - DNA, 201 bp, Homo sapiens
atgagacccctaatggcacaggagtctttctatatgaatttatttatgtattttaatgtccaagcaccttctccttgcctcttctcaggcaataagatgaycagggccaggtttttcttctattattttttattagccatttttattgatactttaccaggtcttgtgctgggtgccaaaggtgtaaggatgaacaggaat

SEQ ID NO: 311276 - DNA, 201 bp, Homo sapiens
aaaatcctgctcaagttccttttttgtacctgttcaatctgaccctgaatcaagaatcacgcttcatcgacacagagaaaactgtgcagaatatcacttgmaatggattttggagagtaaacattagacctctgaaaattctgttgcaaagtttgcttttgtcacctcacacccaccattacaaacagcctcagatgctca

SEQ ID NO: 311277 - DNA, 201 bp, Homo sapiens
taatgagactaaattagacataatgtgttcacattctaattctgacacttctggttgttttgactcttggatttttttagcattttaagattaaatcttcycatttgtaaaatgagaattaaaatgtcctcttcataagggtacttctaggattaatgtgataataggagtaaaatatccaatacagttctcagcacatag

SEQ ID NO: 311278 - DNA, 201 bp, Homo sapiens
gtctagacctcatgtgaaaaacgtttctaattttgaaagacctgaaatagttattattattcctagaaatttgtatttattttatcagtatcaattaaaaygatcactttaatcatccattaaaatgctcatgtggtttttctcctatgaccttttgatttggtacattataataatattgttccattcatagaattaacc

SEQ ID NO: 311279 - DNA, 201 bp, Homo sapiens
tcactagtttcctaactgatttttttttcaaacccatgtagcgtggtcaggaaattgtaatactgatcagaagataagcacttaaagccacaagagacaasagctggctcattctccagaacttcacacttgtcagtcaacgagtatttcctgagttaaacaaatgtcctctgtggatttccttcatccatgcgtcccttg

SEQ ID NO: 311280 - DNA, 201 bp, Homo sapiens
aacaaagaaaattccaggtcatacaattcacaaaaaaatccaagatctctcttattgacagaggacttagtaaactcaaaaaaaaaagagcaattaagctratttatataactgattatgtgagtaaaaacacaagcctaatgaaggaattttcttatagcaattgcctgttttaaaacatgggtccaatttagatgagac

SEQ ID NO: 311281 - DNA, 201 bp, Homo sapiens
gcctattgaaagggggaacttttgttcaatgctgtatcatgagcgcaaagaagagcgcctggcacatagcaggaacttaataactgtttgttgactggatrgataaagatcagagaccaaggaagactgcagcctcctgcaagttggcaacaaatagcacctggggaccatgaaagaacaggttatcataatgtttatgtc

SEQ ID NO: 311282 - DNA, 201 bp, Homo sapiens
aggcagtgagtaggatgagatatggagcttctggaataattagccttttcttgtgccagatcgatgatgacaaaagacgagatacaatccagagactacgrcagtgcaaatacgacaaaaaggtgacctctcccacttctctgaactctccactggggtatgctctgggccttttgacccctcattgccctggcccctgat

SEQ ID NO: 311283 - DNA, 201 bp, Homo sapiens
gactacgacagtgcaaatacgacaaaaaggtgacctctcccacttctctgaactctccactggggtatgctctgggccttttgacccctcattgccctggmccctgatgtcagtatcacaatggtgggagtccccagtctgttcctaggggctattcttagagcttcacagggatgggcagggccctgcttcaagggttac

SEQ ID NO: 311284 - DNA, 201 bp, Homo sapiens
tttcagtaaatttgaaacagagctatttgaacccattttacactctctgtcatgatccaacttatctgtcaggcaaaaatcaagaatggcctctaacatastctgatcttgccctagggtatgacggtccagtgaccttggatgactggggggatgttgacagtaccatggtgcttctgtatacctctgtggacaccaaga

SEQ ID NO: 311285 - DNA, 201 bp, Homo sapiens
cgttaaatacatactaagcatctacatacaagcctagatgactggagataccgaggtgaacaagctggggagaaggcaatgcatggcaaagtgtagatggmatctttttggctttacaacaactatggtggctgtggtggtccatcctttttcttagcccgacttcccctgtatcccagcccagatatcatgatgactcac

SEQ ID NO: 311286 - DNA, 201 bp, Homo sapiens
tgactcactttagaataaatcgaagtaaccaagccacatattcacaaaattgcttagagtgtgcttagaacatagcatgtgctcaataaatgtttttaaayttagctgtatgagaaagacacctatatacatgagaaacctgctttaatgatccgatttcattcttaccatttatacatacatgctgaaacaggttaaaga

SEQ ID NO: 311287 - DNA, 201 bp, Homo sapiens
attggaaagtgaggttgacggtgtaaaaaattctggaaatctactagtctttcctggaaagtggacctgatattatttgaaagtaaagtttatattcaagkcctcttactgacaaaggaaagtttgttgaatgagattgatataatgtgtgataagcaatgggtactgacattcaatttgttaagacaacacatcttctca

SEQ ID NO: 311288 - DNA, 201 bp, Homo sapiens
tagtcccagctactcgggaggctgaggcaggagaatggagtgaacccaagatgcggaggttgcagtgagccaagatcgcgccactgcactccagcctgggygacagagcaagactccgtctcaaaaaaaaaaaaaaaatgcatgtactttgctaagccttgttccagtttgtactctactaagtaatgttctgaaggtcac

SEQ ID NO: 311289 - DNA, 201 bp, Homo sapiens
atggtacagaaactgaggactgtttctggtaagcaggatcattaatatttcactagcacttgccatggagagaagccataggatcatgcaggccacctagytattaccagatgcaccttccactggtaacagcattgggtatagacatcagttcattttctcacacataaataaaagcaaaggggaccaagtaaatataga

SEQ ID NO: 311290 - DNA, 201 bp, Homo sapiens
ctgcccataactcccctctgtcaacttggcctggtacccacagcccaaccagccttatctgaaatgattaaggactttagacccctccttggaaattcttrgtacagtgcctgagttaaaactaaaaatcaaactgggctttttcctaaaataagaaactattgttatcagttagagtcctgtttagagttctaccgtgaa

SEQ ID NO: 311291 - DNA, 201 bp, Homo sapiens
aatcttatgaaggagatgcgattgtttgcatgttgaagaatgggtaaaattttaatgagtagagagatgaggagatgagctttctagccaggcagagggaragaagtacatgtaaaagcaaacaagcagggaaatgaagaactctgtattaaccagagttcaggaaatgtataggggaataatagagataagactaggaaa

SEQ ID NO: 311292 - DNA, 201 bp, Homo sapiens
ttagagtgtgcttagaacatagcatgtgctcaataaatgtttttaaacttagctgtatgagaaagacacctatatacatgagaaacctgctttaatgatcygatttcattcttaccatttatacatacatgctgaaacaggttaaagagggatcttatttgtgctacttaagttaatactgataatggcttttttcctcaa

SEQ ID NO: 311293 - DNA, 201 bp, Homo sapiens
agagacaggttcttgcctggtcatctaggctggggtgcagtggcatgatcacagctcattgcagccttgaactcctggcctcaagcaatcctcctcctgcyttagcctcctgagtagctgggtatacaggcatgggccaccatacctggctaatttttaaaaaatttttctttatagagacggggcctctccatgttgccc

SEQ ID NO: 311294 - DNA, 201 bp, Homo sapiens
aattgcagcagttcaaacataccagattcttttcaaatctccaaataataggaagcttagaaaccacagcatttgaggctgggtgtggtggctcacacctrtaatcccagcactttgggaggccaagacaggcggatcacctgaggtcaggagttcaagacctgcctggccaacatgctgaaaacccgtctctactaaaaa

SEQ ID NO: 311295 - DNA, 201 bp, Homo sapiens
atttgtatgtttttcatcatgggaatgaagtataactgcttatagttgcttccctcattttattgattccaagagaagacagaattgtgacatgggatcawaaagaacactgacccaaggaagagttttttttttttctttctttctttttttcttttttttttttttttttttttgagatggagtttcactctgtcaccc

SEQ ID NO: 311296 - DNA, 201 bp, Homo sapiens
agcagaaatgaattttagatgaacaaatcccaggatagatctgcaaataagaagtgaaaggcatgaaaggccatgagggaagtaagctgttttagtttctwttttcctattccaggtaccttaatgctctggaggctagcgtttcctatttctcccacgaactcggctttaaggtggtgttaagacaagataaggagtttc

SEQ ID NO: 311297 - DNA, 201 bp, Homo sapiens
agtagctcggcctcccaaagtgctgggattacaggcatgagccatcacggggaggcttccccttttgaaacagaatgaatgaaacattgcttcaaaatagsatgaaaccacttccactttaggaaataatctagcctggcaccctgcccctttggaaaagcaaggcactattattcatatttttattttaaattcatgtaa

SEQ ID NO: 311298 - DNA, 201 bp, Homo sapiens
aactcctgaactcaggtgctccgccctcctcagcctcccaaaatgctgggtttacagacatgatccacctcacccggcctccaaggaagagttttctaaamgtctcctttaataacatcccttcaattcccctgatatccctttaactttccagtaaccctgctgatcccaacaaccttttgttctaggctcaagacaaga

SEQ ID NO: 311299 - DNA, 201 bp, Homo sapiens
aaaaatatagaaggttagagcaggaagagaccttagacatcgtctaatttaagctttttcctttatagaggacagcactgagactcagatttgtccaagawggtagagtacaaaccagaagacccatttcccattcaagacatcattcatttatgtgtggtaataagaaatgttaaggaaaaaactctaaccagtaaaata

SEQ ID NO: 311300 - DNA, 201 bp, Homo sapiens
tgggctaagaagccaatccaggtgccatctgattagactattaatgtcaacaatgttttcagtaaatttgaaacagagctatttgaacccattttacactstctgtcatgatccaacttatctgtcaggcaaaaatcaagaatggcctctaacatactctgatcttgccctagggtatgacggtccagtgaccttggatga

SEQ ID NO: 311301 - DNA, 201 bp, Homo sapiens
ccattcaagacatcattcatttatgtgtggtaataagaaatgttaaggaaaaaactctaaccagtaaaatatattcttacctctttcaggattgtggtgaragtcaaaaaagataacataaagaaaacggatttgtaaagtataaagggcttttcgtgttgaacatttaccctttcttgactatgactcacagttaaacag

SEQ ID NO: 311302 - DNA, 201 bp, Homo sapiens
aagatatctgcaatggaaaatgtgaaaagctagagaaaagatgtccacgttgagaaagctaaaccagaaatttgctagcagcattccataaatgtaattcrtagtttctagatactatattgaaccttcaatataatgttatgtttcgcatacattccgtaagaataccttaacataagatcccatcaatacttcagttac

SEQ ID NO: 311303 - DNA, 201 bp, Homo sapiens
caagcacaatgatggtaatttcactgaaaaacagaagatagaattgaacaaggtatgtagcccttacttcaaacccttgagaaataacttcacttcatttsctctaatcactgaggttgctggtggagtaagaggctgacagaaaagccctcaggccaagaaatggtgactatatttcttgttgaaaattctaccaagaga

SEQ ID NO: 311304 - DNA, 201 bp, Homo sapiens
aaaaaggtgatgtacatttggacagagaaccaaataaggaaagtgtgcatcatcataaacatattattgcacctaacaacatgaatctatacatgtttcaytgaaactggtgaaggtaagtcttaaaaagtttataaggagctaggtgatcctgaaaaacttacgaagcatgttgaagaaaaattaattgcatgcccgtta

SEQ ID NO: 311305 - DNA, 201 bp, Homo sapiens
ccactacgcctggccaaaatttgtattttgaaggctttcataggttcattccatatgtcccataaactactaaattcctcagcctctcatattctactgtrttcattcaacatatatttactgagcatttaccacaatcagaccccattccaggtaaactttgagagttttcaagactatgatcctagcagttttaaataa

SEQ ID NO: 311306 - DNA, 201 bp, Homo sapiens
ttcagatttattgctatgattgctttttaaagtcgagttttatttaataagcttttaaaactttctggaaccatcttcaagctttctagttttaaaccaarcttgacttctgaaatatatctcttttctcatgggcttctgcaactctcaacttcttttgtaactttttgagttcaaattattttttctttcttcttaatt

SEQ ID NO: 311307 - DNA, 201 bp, Homo sapiens
aagccttttagtctaatatagtcccatttgtctatttttggtttggttgcctgtgcttttgaggtcttagccataaaatctttgcctaaaccaatgtcctraagtcttttctctatgttttcttctaatagtttcatagtttcaggtcctctgtttaagtcttaaatctatcttgagttgatttttgtatatgggaagaga

SEQ ID NO: 311308 - DNA, 201 bp, Homo sapiens
ttctttttcaatagtaatagtatgttgaaatacagctttccgaagtacagctgctcctagccctgccttctcctcattcctttctttcgtcctgcttttcygaattccaggattcctccacacaatcagcatatcctttctcaagccctttttttctaatctgagtatatccaaatagtaaaaccttattcactaaaacag

SEQ ID NO: 311309 - DNA, 201 bp, Homo sapiens
tcctttctttcgtcctgcttttctgaattccaggattcctccacacaatcagcatatcctttctcaagccctttttttctaatctgagtatatccaaataktaaaaccttattcactaaaacagcagcatctttaattcatttgtgtagttggacagttctggaattagaaatgaggaataaaatttcatgtcaagtaact

SEQ ID NO: 311310 - DNA, 201 bp, Homo sapiens
attccaggattcctccacacaatcagcatatcctttctcaagccctttttttctaatctgagtatatccaaatagtaaaaccttattcactaaaacagcakcatctttaattcatttgtgtagttggacagttctggaattagaaatgaggaataaaatttcatgtcaagtaactgattccaacagaatacagagtcgaaa

SEQ ID NO: 311311 - DNA, 201 bp, Homo sapiens
ccttcaatcttgaatctgatatgctgctcctcattcagcaaagatattctaaaagttgctttaatttgacttctacagttttagcatgatttaatttattkacaagattgattctgctttacaaaggacccaaatctggttcaaaatatcaaatgaactctggttcagaatatatcaaaatttatatttaaatgcatcatt

SEQ ID NO: 311312 - DNA, 201 bp, Homo sapiens
gaggcatttcactacctgatttcaaaatgtactataaagttgcagtaaccaaaactacagggtactggtataaaaacagacacatagacggatagaatagratagagaacacagaaataaatatatgtctttacattcaactgattttcaacaaaaacatcatgaacatgtactggagaaaagacagtctcttcaataagt

SEQ ID NO: 311313 - DNA, 201 bp, Homo sapiens
aggaaaaaagtgaccaggagtaaaacaagggctcaggatgtaaatattcctaggcctgaaaatggatatccattttttcccagaatcaatctcatggctgwtataaattactgaaaaataacactagtgttctattttccctcatctctgggcgacaggcctaaatgtgactgtgaacgctactttcatgtattcggatgg

SEQ ID NO: 311314 - DNA, 201 bp, Homo sapiens
aggaatctatcaccagtaagctattattttatgttatagtataaattatatattattattttatttgtcaagggtaagataatttttctccatttaggacmcaaattctaaaatgagcaattatttttacttgctctaattcattcaacaaatgttaactgaaaccaactacatgtacagcattttgaaacagcaggatcc

SEQ ID NO: 311315 - DNA, 201 bp, Homo sapiens
aggtaccttaatgctctggaggctagcgtttcctatttctcccacgaactcggctttaaggtggtgttaagacaagataaggagtttcaggatatcttaakggaccacaacaggaaaagcaatggtaagaagacatgaagataattgttttttgctaacttcttctttatgactaccacctccttataagtcatttcaaca

SEQ ID NO: 311316 - DNA, 201 bp, Homo sapiens
agggcaggtagcgcaggttctgtacttatgaacaagctcatcataaggcattttgagcagtaatgtcctgactgtgcttggagactaacaagaggataaayatttgcagtttgatttgggtccttccatatctccttttctatccttcaaggatctgggaccctgtgttaaaacctttagctatcaaaactccacaaaata

SEQ ID NO: 311317 - DNA, 201 bp, Homo sapiens
tttttgctttttctaaataaatacatctcccataaaaatgccctccagagatctctgggctaagaagccaatccaggtgccatctgattagactattaatrtcaacaatgttttcagtaaatttgaaacagagctatttgaacccattttacactctctgtcatgatccaacttatctgtcaggcaaaaatcaagaatggc

SEQ ID NO: 311318 - DNA, 201 bp, Homo sapiens
tgcatttttattgggtgaggcccagctaatctctctgtttatagctctgacctttctgggtgcaaacacaaagtgaactttggtttatctcctgccataaygtagctgctaattactggcaagcaggctgtgttccacggcccatgtgaccagttgggcatgaccagagagaagcgtggggaagagtgggctgagggactc

SEQ ID NO: 311319 - DNA, 201 bp, Homo sapiens
attattgcacaagtgactttcctagagcgtcatggcctttctagtcatcatgtgaattgatatataatatccgccagatattataatatccagtatgtatyatatccactggatataaattacctaatttgggggatatatatgataagatatatataaaataattctctgatgtaggatatttcatttgttttaaatttc

SEQ ID NO: 311320 - DNA, 201 bp, Homo sapiens
ccagccagaccattcacaacaggtatgaccttaagcagctagttaaattttcggaacctcagttcccacacctataaattagaataagtggtagttacccsatatgaatagcatgtggattcaatcagaaaactcatataaagtacctccttcactgactgaaacatagtaagaactcaataaatggtagttgttgctgtt

SEQ ID NO: 311321 - DNA, 201 bp, Homo sapiens
gagaaacacacacacagaaaatatgaaaattaaatataagaaaacagatctaacaagttattcaaccttctgtgcattggtttcttcatctgtaaaatgayaataatagctatgtcatagggttgtaggattttaggttatgaggattttgtgaaataatgcacgtgcttataacaagaccaggtacaagtacatgttcaa

SEQ ID NO: 311322 - DNA, 201 bp, Homo sapiens
catgcccatgccccttgcccccagaagccagatcacgtgacttcacttatctgactgggccattaatcattacctgtctgtattcagacaagaggctgctmctgtctagatctttcccatatttgcctgatcatttcacccacactaacgatacttctcacagcatgaatggaaatgaagtataggaactgcaggcctgtt

SEQ ID NO: 311323 - DNA, 201 bp, Homo sapiens
ttacttttcttccggcatgtgctctgtatttaaaaacaagttgtcttagttgggtatggtggctcatgcctgtaatcccagcactttgggagactgaggckggcggatcgcttgaggccgggagttcatggccagcaacatggcgaaaccccatttctacaaaaaatacaaaaattatccgggcatggtggcgcacacctg

SEQ ID NO: 311324 - DNA, 201 bp, Homo sapiens
taccatgtctcaatatctctaaattgttaaaagcacttaaagaaagtttctacctataaaccaagccttaaaagcaagcatgagctcacatgtccatagcmcccccaaatctcaaagaaatcaagaaatatctgtattctgattttcttttccttttgtgtatgttaaccacaattgcttaaattctcttatttaacctaa

SEQ ID NO: 311325 - DNA, 201 bp, Homo sapiens
aatgatgatggtatagtttgtgtgaactatagaagatgcatctctatttttcctaattttcatgaggaacctgtgctttttattacagtgaccagtacttkgaggacaatgtcacagcccctgactatatgaaaaatgtccttgttctgacgctgtctcctgggaattcccttctaaatagctctttctccaggaatctat

SEQ ID NO: 311326 - DNA, 201 bp, Homo sapiens
tggcactgatgagaaatgcggaagtgaaacatgtcacagaaacagatcattatggaaacagtggtctacaactgaactgactccttggactccgtggtacrtaactcttttgtcttaccagggaagaggaaatgagactacctactggctgactgggatgaaggaccagaaattcaacctgccaacccctcctactgtgta

SEQ ID NO: 311327 - DNA, 201 bp, Homo sapiens
taaatttttttaaagggttctcttttcccttccccaaattacattgtacagctagaatcttggaaatgcttttgctctcttgtctaaggtccttcctaackcattttccgccacaggccctcagatcctgatgattgcagtcttcaccctcactggagctgtggtgctgctcctgctcgtcgctctcctgatgctcaggta

SEQ ID NO: 311328 - DNA, 201 bp, Homo sapiens
tcgagttttatttaataagcttttaaaactttctggaaccatcttcaagctttctagttttaaaccaaacttgacttctgaaatatatctcttttctcatrggcttctgcaactctcaacttcttttgtaactttttgagttcaaattattttttctttcttcttaattataactgtcagtgacaaagttaggtttgtgtt

SEQ ID NO: 311329 - DNA, 201 bp, Homo sapiens
gactgtgcccccaggagtttagattatggtgtcatgatagagaatacagtgtgaaggtttaggattctgctttcataaagaagtcctaaaacctcattttyggggcacctacatcaattatattttagcacagaaaaattcacacatggctgggcacagtggctcacgcctgtaatcccagcactttgggagaccaaggtg

SEQ ID NO: 311330 - DNA, 201 bp, Homo sapiens
tggctcacgcctgtaatcccagcactttgggagaccaaggtgggctgatcacctgaggtcaggagttcgagaccagcctggccaacgtgatgaaaccccamctctactaaaaatacaaaaaattagctggacatggtggcgtgcgcctgtaatcccagatacttgggaggctgaggcaggagaatctttgaacctggaggg

SEQ ID NO: 311331 - DNA, 201 bp, Homo sapiens
ctaatgaccagtgcaatgctatgcccatgagggggcctggcagacaggtggtacacatgcagtttgccattacaacagcctatgcaagaaaactagcaaaycatttaagaaatcccctaattcagtatgaatgacagttggctctgctgggtcccaagagtctcctggggtacagagctgagaacccaagagcctttaagg

SEQ ID NO: 311332 - DNA, 201 bp, Homo sapiens
tgtcatatatttctctccttgtcttaccttctcctccagtgattattatgtgtggtggtccagagttcctctacaagctgaagggtgaccgagcagtggckgaagacattgtcattattctagtggatcttttcaagtaggtataacatttggaaaaaccctcctcctttcaaaaaggaagtattccaaggatttccagaa

SEQ ID NO: 311333 - DNA, 201 bp, Homo sapiens
tattaggattaataatcaaacactaagttaatgttgaacctgcttgtattcatctgtgttcacaacatgcattatatgtgtatttgtgtaatatgttcatrtatatgatatacacaacctctgtttccgattcactcaattcactggaagtctcaaattctagaattcttggtagacagtcactactacctgaaagattta

SEQ ID NO: 311334 - DNA, 201 bp, Homo sapiens
tgtatttgtgtaatatgttcatgtatatgatatacacaacctctgtttccgattcactcaattcactggaagtctcaaattctagaattcttggtagacartcactactacctgaaagatttatgtgaaacaagaagaaatttgctgaagttgaaggcattttttttcccttcgttcatctaggctagtggtaaagtctct

SEQ ID NO: 311335 - DNA, 201 bp, Homo sapiens
catactgggggcaaagaggctctctgcattccactcctgtcttcatctttctgttgagttgcctgatgaaaacaggacctgccccaaccccaagactgcgkttctgggtcttaacatgaagtctgtgttctccctgagatgaggaagacaaagtttcagggttaactgacaggtttcacttctcctaaaggtgactcaagc

SEQ ID NO: 311336 - DNA, 201 bp, Homo sapiens
cactctgtcacccaggctggagtgcagtggcatgatctcgactcactgcaacctccacctcccagtcaagcaattctcctgcctcggcctctggagtagtkccaccatgcccggctaatttctgtatttctagtagagaaagggtttcaccatgttggtcaggctggtctcaaactcctgacctcaagtgatcctcccgcc

SEQ ID NO: 311337 - DNA, 201 bp, Homo sapiens
cctaccgcattctccgtgcctttccaccactccccaactcaggaatgagctggcttctaaagcacacatctcattctctatttttttttttttttttttttgagacggagtcttgctctgtcactctgtcactagagtgcagtggcaggatcttggctcactgcaactccggcctcccgtcttcaagcaattctcctgcct

SEQ ID NO: 311338 - DNA, 201 bp, Homo sapiens
gtttagctgtatcagtcatgggctgccaggagcactggatttttaagtgtcattttcactgtccctcatggtggtaggacagaacaaagccctcatagagrcaggaggtcaagagagaggagctgcaagtgtggccatcttcatgtgactgtgtgctaccctccacgtcactttctgactcctcttgcagtgttccaagac

SEQ ID NO: 311339 - DNA, 201 bp, Homo sapiens
atagaattgaacaaggtatgtagcccttacttcaaacccttgagaaataacttcacttcatttcctctaatcactgaggttgctggtggagtaagaggctracagaaaagccctcaggccaagaaatggtgactatatttcttgttgaaaattctaccaagagatattggaaagtgaggttgacggtgtaaaaaattctgg

SEQ ID NO: 311340 - DNA, 201 bp, Homo sapiens
actgtccctcatggtggtaggacagaacaaagccctcatagaggcaggaggtcaagagagaggagctgcaagtgtggccatcttcatgtgactgtgtgctrccctccacgtcactttctgactcctcttgcagtgttccaagaccctctctaaccctattttctacagttcctcacatgccctctctcattcccccaggtc

SEQ ID NO: 311341 - DNA, 201 bp, Homo sapiens
ctcattcattctgttctcctggtttcaaattctctatatcctttctattgtcatgaaaattaaataaaaggcatatggggcttagtactgaagctgactcrcggttacactcaattaagtgtgaactgctattaaacccatcactccccacttctcttccattagatatctctgactggtctaattacattgaagtctcct

SEQ ID NO: 311342 - DNA, 201 bp, Homo sapiens
tctctgtcttgtatgacattgctaaggtaagagaaacacacacacagaaaatatgaaaattaaatataagaaaacagatctaacaagttattcaaccttcygtgcattggtttcttcatctgtaaaatgataataatagctatgtcatagggttgtaggattttaggttatgaggattttgtgaaataatgcacgtgctta

SEQ ID NO: 311343 - DNA, 201 bp, Homo sapiens
ggtagacatctctcaagtggctgtagaagtgcaaagactcctccattctttgaaagaacaagtctctacctttaaaaacattcttatttgttcagaagaasaacttctattatagacatgctttgctcttttaaaggtgctattaaaaattatcccattttacaaacttggttttaacctcattttacatgcgagaaacta

SEQ ID NO: 311344 - DNA, 201 bp, Homo sapiens
gacctctgttctttacctataacttgattctataagttgaaaacaaggaaacattttcattatgtgaatattatttatataaagctaaattgtataccgtgataacatctttctttttttttttttttttttgagacggagtctcattgtgtcgcccaggctggagagcagtggtgcaatcttggctcactacaacctcca

SEQ ID NO: 311345 - DNA, 201 bp, Homo sapiens
tttacaaacttggttttaacctcattttacatgcgagaaactaagtgagagaaattaaaatggcttgtacaagaacacataagaaatcactcataatgccrgactgtggactgaggtttccagactccctctagacttggcaaacttaagaacatccctgcagctgggcacagtggctcacgcctgtaatcccagcacttt

SEQ ID NO: 311346 - DNA, 201 bp, Homo sapiens
cgcgccactgcactccagccagagcaacagtgcagactctgtctcaaagaagaaaaagaaaaagaaaaaaaaagaacatccctgcttaggaatcagacatktgtcctgattattttttactggaaggaaccaaaatttaatagattgtggtcaaatggttctgctattcccttctaaaacgtggtgcctagcagtccccag

SEQ ID NO: 311347 - DNA, 201 bp, Homo sapiens
atggttctgctattcccttctaaaacgtggtgcctagcagtccccagggatatcgccagcaagacccttgctttcatctaaatatgggagttctccattayacaaagacctcaagccaggatgaacataattcactttggctttgggagtagcccatagaggaaatgcctaacaccaggagtggtgttctggtcagtaagg

SEQ ID NO: 311348 - DNA, 201 bp, Homo sapiens
tatcaaaactccacaaaataataccctccaaaacaacacaaacctcctgagctgcatggatcaatgttgccctttcctacaagcccctagtgaaactcccrtctttcatttcccagatctcatcctgagactatgaagaaattttcctctaaatgtaatgtatactaagtcaaagataaatgacagtggccttttctaact

SEQ ID NO: 311349 - DNA, 201 bp, Homo sapiens
ctagaatgaatatatttttctggctctgggaaaatcaccctcatctcttccattcattttacacaatgtaattatcaccaaaaaatactttgttctgctamttacaccttccctaatcaaaatcctgctcaagttccttttttgtacctgttcaatctgaccctgaatcaagaatcacgcttcatcgacacagagaaaact

SEQ ID NO: 311350 - DNA, 201 bp, Homo sapiens
acagtgaaaaaattttgatcttcctacaatctatgttaagattgtgcagtgaccctatacactatgctaggagttcaggaaatattcttagcaaaaatgtrtcactaataatcgagggacttattgactcattacatttagtgccaccctaaatgcaatgaaaaggttttttgctttttctaaataaatacatctcccata

SEQ ID NO: 311351 - DNA, 201 bp, Homo sapiens
ctgtgtaagcttctgggtgtggcagggacagggaggaaattagagatcttggctttgttagttacagccaatttaaattggcaaatgccttacaagtggcwtatattgcataagaagtaagggactatacatgagaaggtttagaaacctcccttcctagactgcaagaaggggattatcctgaaaccctgcattttcctg

SEQ ID NO: 311352 - DNA, 201 bp, Homo sapiens
aatgaaggaattttcttatagcaattgcctgttttaaaacatgggtccaatttagatgagacagaacatgcagggcagtcacttgttaagcagtctccccrcctgctgcttattcctctacacctgtctgatggaagaactgaaatttgggatgctatgggtacctcctgctcatatccaggtggcaaaaaccacccaatg

SEQ ID NO: 311353 - DNA, 201 bp, Homo sapiens
ttaaagggttctcttttcccttccccaaattacattgtacagctagaatcttggaaatgcttttgctctcttgtctaaggtccttcctaacgcattttccrccacaggccctcagatcctgatgattgcagtcttcaccctcactggagctgtggtgctgctcctgctcgtcgctctcctgatgctcaggtacagccgcct

SEQ ID NO: 311354 - DNA, 201 bp, Homo sapiens
tgtttgtttgtttaagacagagtctcactctgtcacccaggctggagtgcagtggcatgatctcgactcactgcaacctccacctcccagtcaagcaattstcctgcctcggcctctggagtagttccaccatgcccggctaatttctgtatttctagtagagaaagggtttcaccatgttggtcaggctggtctcaaact

SEQ ID NO: 311355 - DNA, 201 bp, Homo sapiens
caatttgttcctgatcctaaggtttcataatttgaagatcattatttgtttcataatagtctctccacaatatcctttcttgcaacaacttttcttcttcwtcttttttcctattcaggaagttttaaatgacacaatttcctaccctgatggcacattcatggattgggagtttaagatctctgtcttgtatgacattgc

SEQ ID NO: 311356 - DNA, 201 bp, Homo sapiens
ttcaccatgttgcccagactgagctcctgagctcgagtgatcccccaacctcagcctcccgaagtgctgggattacagctttgaggcactgtgccccaccyggtagcctatccttaaggtaaccttctggttataagtgggatgagaccctttcactgggtgcctcattgaatcaacacctgtctactgagtgctggtcta

SEQ ID NO: 311357 - DNA, 201 bp, Homo sapiens
tccttgccttaatcactcccatcaatgagaataagaattctctcttgatttagtttactatccccttagctaatttgcccgttttttttttcttccaggtrtacctacttgtaaaaaactgttgggaggaagatccagaaaagagaccagatttcaaaaaaattgagactacacttgccaagatatttgggtattgctgaa

SEQ ID NO: 311358 - DNA, 201 bp, Homo sapiens
agcccagtaagttggggctgcagtgagccatgattgtgccactgcactccagcctggatgacagagcaagaccctgcctcaaaaaaaaaaaaaaaaaaaaagaaaattattatatattcacaaatggagcatcaggcaaccaattaaaaataattatttatgaagaatgttaaatgacatgggaaaacttatgatgtaaag

SEQ ID NO: 311359 - DNA, 201 bp, Homo sapiens
cacaacaggaaaagcaatggtaagaagacatgaagataattgttttttgctaacttcttctttatgactaccacctccttataagtcatttcaacaaatcytccactgcagagctatcatccttactcatacatattttgtatattttgggagatctataattgcatgcaacttcattatattgttcctttcattgactaa

SEQ ID NO: 311360 - DNA, 201 bp, Homo sapiens
cagagttcctctacaagctgaagggtgaccgagcagtggctgaagacattgtcattattctagtggatcttttcaagtaggtataacatttggaaaaaccctcctcctttcaaaaaggaagtattccaaggatttccagaaggcacattctcttttctcttgctttgtacaaccccttatggggttaagtatgatgataat

SEQ ID NO: 311361 - DNA, 201 bp, Homo sapiens
accttccagatgtagtaagtaatactactgtgaactgaagtcaggacatgatattgcaacttaaaggactcatcaaacaacagtctagtcaagccaacacratcagaggtgttgaggtctagtattttgccatctccccataactgtcattctcttatccaggtaacttcccttgctcagcatggagtgaatgtctgtagc

SEQ ID NO: 311362 - DNA, 201 bp, Homo sapiens
cacccaggctggagtgcagtggcatgatctcgactcactgcaacctccacctcccagtcaagcaattctcctgcctcggcctctggagtagttccaccatrcccggctaatttctgtatttctagtagagaaagggtttcaccatgttggtcaggctggtctcaaactcctgacctcaagtgatcctcccgcctcggactc

SEQ ID NO: 311363 - DNA, 201 bp, Homo sapiens
aagactggaatgccaggtgggctggtcctcagggccccttggaggcactggtgccagcataagctgtccttgggccccaggacagcttatctggtaccagygttagtgggtctaggcagatcaattctttggcctccaagtaacttcctcaggtgccagcagtagcagcagtggcctaggctggtgggtggattcccgggt

SEQ ID NO: 311364 - DNA, 201 bp, Homo sapiens
atttttattgggtgaggcccagctaatctctctgtttatagctctgacctttctgggtgcaaacacaaagtgaactttggtttatctcctgccataacgtmgctgctaattactggcaagcaggctgtgttccacggcccatgtgaccagttgggcatgaccagagagaagcgtggggaagagtgggctgagggactccac

SEQ ID NO: 311365 - DNA, 201 bp, Homo sapiens
aacaggtgcatgccaccatgcccggctaattttttgtattttcagtagagatgggctttcatcatgttggccaggatggtctcgatctcctgaccttgtgrtctacccacctcagcctcccaaagtgctgggattacagacgtgagccactgcgccaggccccaacactcttttaaataaaataagctggttttaaaaaaa

SEQ ID NO: 311366 - DNA, 201 bp, Homo sapiens
gaatcatagtagataagccctctcaagggctgcagcacagatgcaaatcatttcagcccctgaaattgaattagagtgattttagatatatatatatatayacacacacacacacatgcacacacgcacacacacacaaatatacacacatacgcctacacatatgcaaatatatatacatgtggaatatgcataatccac

SEQ ID NO: 311367 - DNA, 201 bp, Homo sapiens
ttttaaaagttaaaatgtgtgtgcatgaatgtgtgtgtaagtgtgtgtgtgtgtgtgtgtgtgtgtgtgtgcctgaaggcattagagagccagtaaaagagggaaaatatctaggtcaagatctggaagaagatgaaaaccaaaaaagatgaaccctgcattgaggactgctttttgtctagacggctttggtcagttcta

SEQ ID NO: 311368 - DNA, 201 bp, Homo sapiens
gccccagagctgggggaggaggagccacaaaggaaacagtccacaaccatcataagctaactttatttcacaattgaatttggaaccagtcctatttatttcacctttctgaaaatatctggttttctaaacagagaaaagtaagactggaagtgggatggatctgactcatggctcctaattgcagaaaccttacatggc

SEQ ID NO: 311369 - DNA, 201 bp, Homo sapiens
taaagtttctgtaattgtttctaaacaaccatttcattttctgtatgtacctccttgcagaccagtaacaaacagttcctggtctggcagcagctgcaaaycatgctttgactagcacgtgcctacaccctcaccatgcctcagccttctctcctggtgtgtcttcctctggtgttgcatgctgcatgcaatctgagtaaa

SEQ ID NO: 311370 - DNA, 201 bp, Homo sapiens
tttctaaacaaccatttcattttctgtatgtacctccttgcagaccagtaacaaacagttcctggtctggcagcagctgcaaaccatgctttgactagcamgtgcctacaccctcaccatgcctcagccttctctcctggtgtgtcttcctctggtgttgcatgctgcatgcaatctgagtaaaggtggtgctccacctgt

SEQ ID NO: 311371 - DNA, 201 bp, Homo sapiens
gtgttactgggcagtaaatcaaatctatgatttctggtaaacatcatatcatatttcttttgcctatcgtttgtctctgcccttcgaaataaccactgtgrtattattttttctcttgtttttaggatttagaaataccagcagtgcccatactccatagcatggtgcaaaaattcccaggcgtgtcatttgggatcagca

SEQ ID NO: 311372 - DNA, 201 bp, Homo sapiens; identical to SEQ ID NO: 64994

SEQ ID NO: 311373 - DNA, 201 bp, Homo sapiens
gagaaaaaatgaaagaccctcttaatctgaacatcttggttccttcccacctgcaggtgaacagggatattgtgtcaggcctgaaatacgttcagcacacytacaggactggggtgaaaggtaagggaacccacatttccacactgtcccaaactgcttctcattgatactttaacttctggttattagcaacttttagct

SEQ ID NO: 311374 - DNA, 201 bp, Homo sapiens
cagtagggtgagtatagtcaacaatattgtattgtaatttaataatagctacaagaaaggattttttaatgttctcatcacaaagaatatttgaggcaacrgatatgctaaatactatgatttgattatttacacaatgtatacatgtattgaaacatcacactataccccataaatatgtacaaaactgaatagtaggtt

SEQ ID NO: 311375 - DNA, 201 bp, Homo sapiens
ctatgtaacttctaagccaataaagggaaagaagaaaataatataaaatactcagtcaattcaaaagtaggacagaaataaagaaaaatagcatttggaayacatagaaccaatggaaaatgcataattaaatacaccagtaatttcatttcgtggaaataatccaattaaaagacaaagattatcaggctggattgaaaa

SEQ ID NO: 311376 - DNA, 201 bp, Homo sapiens; identical to SEQ ID NO: 64985

SEQ ID NO: 311377 - DNA, 201 bp, Homo sapiens
aagaaaagaggtgaaataggaatcatcaccgggatgacaataaagagcaatcttagattcttgctgtttagtgactttaatttccctttgcctgaattccytcctaccttaactaacatgagatttgcttctgatcttactgggtagactaggagaaagtaccttggggaaaaaagggtggttctgatccaaggcaagatc

SEQ ID NO: 311378 - DNA, 201 bp, Homo sapiens
tcaccatctctaatcagcaaaacaaggtcaatgcttctggtctcctgaagagctcaccttctgctgacctttagtacattggttcaaccacatttgagatygagtttgtttatatggggttttgctatccactgtgcatgaggcagtccatcctgatgatcaagagcatggactctggagctagaccacctggtgtgaatc

SEQ ID NO: 311379 - DNA, 201 bp, Homo sapiens
aacctgttttatcagcaaggtctttatgacctgtatcttgtgccaacctgctatttcatcctgtgacttagactgccttaaccatcttggaatgcagcccrgtaggtctcagctcatttttcctatcccctattcaagatggagttgctctggctcaaacatctctgacagcgataggctcattctggggagaaaaggagc

SEQ ID NO: 311380 - DNA, 201 bp, Homo sapiens
ccttgtggtctacccacctcagcctcccaaagtgctgggattacagacgtgagccactgcgccaggccccaacactcttttaaataaaataagctggtttwaaaaaaagaaagatatagaaaatttcaactataaaattcaccaagtgacctgataaacatttatagaatactgtattcaaaagctgtaaaatatacttaa

SEQ ID NO: 311381 - DNA, 201 bp, Homo sapiens
tttaactcaagatttcaatttcatggtgcagaccataaattcaatcagtgtgagctgcaacaattacaaggtatctctttatccctggacgtcacctcagrtagaactttttctttcaaacttccccaactgcagattctctttattctggtggacagtggtatgaaagaaaatgggaaggtgatatcatttttcaaacta

SEQ ID NO: 311382 - DNA, 201 bp, Homo sapiens
ttaaaagaagtcagagaaaagagagactatcatcaaaatactctcaaagggacaaccataaggttcacagctgacttctcaatagcaacagtggaatgcaraatacaaagcattatatctttcaaatactgaaagaaaatcactgccaacgttagaattctacccccagcaaaaacagccttcaaaaataaaaggtgaata

SEQ ID NO: 311383 - DNA, 201 bp, Homo sapiens
atccaggtctgcatggcttccatattgccaaactcaatgaaccctttttaggtcttattttactcaacatttctgtcatgtatgatgttagtgatgacttytttctttttaatgttctctctttccttgaattctaggaaactacttctcctgatcctcctgctgcttttataatctctttgagaccttctcttcctgtat

SEQ ID NO: 311384 - DNA, 201 bp, Homo sapiens
aaataggaggtgaatctagtacaacacctttcacatcccctttgaatcctacagagctgtacctaaaaacaggaatgaatcatagtagataagccctctcragggctgcagcacagatgcaaatcatttcagcccctgaaattgaattagagtgattttagatatatatatatatatacacacacacacacatgcacacac

SEQ ID NO: 311385 - DNA, 201 bp, Homo sapiens
gccaggatggtctcaatctcctgacctcgtgatccacctgcctcagcctcccaaagttctgggattacaggtatgagccaccacgcccggcctgtgctttrgttctttacatgaaactccctttctaccttgtgttgcctggcaaaatcttacttacccagaactctgctccggcatcctccgcaggaagaacactttcat

SEQ ID NO: 311386 - DNA, 201 bp, Homo sapiens
gtgggaaatttctcttcacttttttggagtctacaggacagtttgtccccctagggcagagaaactctcttacttatcttttggtcttcagagctttaatyagtgcctgtcacatgggggtctaaagacgtttatcaatacatgaaaaaaagatggaatagtgacttcattcttttttgtgttatccaggtagacaatgaa

SEQ ID NO: 311387 - DNA, 201 bp, Homo sapiens
ttctgtttctctgttcaccagaaaaagagaaccaacaggagataggtaatatagatagatagatagatagatagatagatagatagatagatagatagatwgatagattgattatagatagatagatattatatagtaaaaattacatttttacattgtattatttttataacacaaattatatatatagtggtaaatatt

SEQ ID NO: 311388 - DNA, 201 bp, Homo sapiens
agaaagctttccaggaaatcctggataagatgcattttgcctggtagagagtagggaagtctggcagtatccttcagagacagaccatcagtagggtcacsttccatatgttagtaaaaatattatgccttggaatgccaacagtactcctataaattgtgctcttcttgcccttagtatagagataaaaggtatagatgc

SEQ ID NO: 311389 - DNA, 201 bp, Homo sapiens
attgcacagtagggtgagtatagtcaacaatattgtattgtaatttaataatagctacaagaaaggattttttaatgttctcatcacaaagaatatttgargcaacagatatgctaaatactatgatttgattatttacacaatgtatacatgtattgaaacatcacactataccccataaatatgtacaaaactgaatag

SEQ ID NO: 311390 - DNA, 201 bp, Homo sapiens
tttgaggcctctctcagcccctagtaaacttcaagctctatgacaaggcctgacaggagtctcaggctcagctacaatttcgtggttacctattaacttasagagcctggaaaattcaagaatgtcactgccagttaaacctgaattgttaggggtaaatcatgtgttactgggcagtaaatcaaatctatgatttctggt

SEQ ID NO: 311391 - DNA, 201 bp, Homo sapiens
catgatctcattcatacaagcaatctaaaaaatggatctatagaagtagagagcacaatactggttatggaaagctggggagcggagggggaagtggtgayggaagagggaagagggaagtggggacagggagaaattggttaataagttcaaagttacagttagatgaaaggaataagtttaggtattctattgcacagt

SEQ ID NO: 311392 - DNA, 201 bp, Homo sapiens
aggtcaggagttcaagaccagcctgacccacatggcgaaaccctgtctctccttaaaaaaaaaaaaacaagaaatacaaaaaaaaaaaaaaaaattggccrggcatggtggtgcaggcttgtaatcccagctactcagcaggctgaggcaggagaatcgattaaacctgggaggtggaggttgcagtgagccgagatcctg

SEQ ID NO: 311393 - DNA, 201 bp, Homo sapiens; identical to SEQ ID NO: 64992

SEQ ID NO: 311394 - DNA, 201 bp, Homo sapiens
tagtggataaagcaacatttatggttggcagctatggacctcggcctgaggagtatgagttcctcactccagttgaggaggctcccaagggcatgctggcscgaggcacgtaccacaacaagtccttcttcaccgacgatgacaagcaagaccacctcagctgggagtggaacctgtcgattaagaaggagtggacagaat

SEQ ID NO: 311395 - DNA, 201 bp, Homo sapiens; identical to SEQ ID NO: 64993

SEQ ID NO: 311396 - DNA, 201 bp, Homo sapiens
aatgctctaaatttaagtagcaggatttagtaaaacaagagtaaatcatgtgtcatccaatctcccaaatgaaaaatctaaaacttgattttaaactccayggagaaatctttaggaaaggacctactgggccctccttgcctacatattgtaggcagccaaaagagctggagaatctttacaaacttgtgtaaaaaatca

SEQ ID NO: 311397 - DNA, 201 bp, Homo sapiens
gcgtgtcatttgggatcagcactgattctgaggttctgacacactacaacatcactgggaacaccatctgcctctttcgcctggtaagttgggtgggtagsttgagctttctcccagattttcactgggttgtggactcataaacttgtgagactggaaaggactctatgtcttttacactaatgatggtaccaaattcag

SEQ ID NO: 311398 - DNA, 201 bp, Homo sapiens
gaccataagccactaacatgtttttgttcactctgtgggtgggatgggtggaaaatagagaccatcctgcatgaggattggaacaaatgtggcaactgagmtaggaagcaaattaggtgaaaggttggggagcagataggagaagcagggcactggcagtgggacgggctgaggctgactaagccttggattattgcaggt

SEQ ID NO: 311399 - DNA, 201 bp, Homo sapiens
gtatagagataaaaggtatagatgccctcattatttagagctgcttcttcttgcctcagtaccctgacatcttctgcttctctctctagatggtcctggtrctgcccaggaacccacgtggctcacagatgtcccagctgccatggaattcattgctgccactgaggtggctgtcataggcttcttccaggttagttccct

SEQ ID NO: 311400 - DNA, 201 bp, Homo sapiens
tgtcagaccataagccactaacatgtttttgttcactctgtgggtgggatgggtggaaaatagagaccatcctgcatgaggattggaacaaatgtggcaamtgagctaggaagcaaattaggtgaaaggttggggagcagataggagaagcagggcactggcagtgggacgggctgaggctgactaagccttggattattg

SEQ ID NO: 311401 - DNA, 201 bp, Homo sapiens
cagtcattggtcagggctgcagtcatctgaaggctcaactggagctggggatctgctcccaagatggctccctcacatggatagcaagtcaatgctggctsttagtagaaggacttagttcctggccatgcgtttctcctcagaggactgcttgagtgccctacactggggctggtattcctcagagtgagagatagagag

SEQ ID NO: 311402 - DNA, 201 bp, Homo sapiens
gtcggtagcagcattaagtatctagaggagctgcaaatattatttttttgtgtgctcattttatttctttactcattcgtcttgatatgggcaagggaagrggaaggaggtggtaggagggtgggcaaggatctacctaagaccttttctcttgctttcatgttttgttttgttttttcccaagctttctactcaaaactt

SEQ ID NO: 311403 - DNA, 201 bp, Homo sapiens
ttgaggtctcttgggaggttgcagtcattggtcagggctgcagtcatctgaaggctcaactggagctggggatctgctcccaagatggctccctcacatgratagcaagtcaatgctggctcttagtagaaggacttagttcctggccatgcgtttctcctcagaggactgcttgagtgccctacactggggctggtattc

SEQ ID NO: 311404 - DNA, 201 bp, Homo sapiens
ctatataaatgtaatcaggaagaatttaggtaaaattcatgaaaccataagttgcatataacagtcttgctgtgtgagggcacagcctgtcttttgtgagwgtaacagcatataaactctcaaatttttcaacaggactcttattgttgccctagcagagatgtaactcccaggttaaataaactatgagcctgtcctaaa

SEQ ID NO: 311405 - DNA, 201 bp, Homo sapiens
gctagggctaggtgcttctggtttgaggtctcttgggaggttgcagtcattggtcagggctgcagtcatctgaaggctcaactggagctggggatctgctyccaagatggctccctcacatggatagcaagtcaatgctggctcttagtagaaggacttagttcctggccatgcgtttctcctcagaggactgcttgagtg

SEQ ID NO: 311406 - DNA, 201 bp, Homo sapiens
agcacttgaccctgaagataaactttgtttttacactgaattctatctaatgtccctcattctaaagcctactttttttctttcaactattttctcttaawttattcctctagcctcctagcattccttaatcaaactgcagaattatttatcaagatttaatctagacattatatattgtctaaatttacaaaattttcc

SEQ ID NO: 311407 - DNA, 201 bp, Homo sapiens
ttcctacacctttttaagatttaacttgttcctgttaaacaaaaaaacagagaaaagttaaatgagctatcacactgctagtaataaagagaaccagaatrcacagttaaggtgactaactcaaggccaggtgcagtggctcacaaatgtaatcccagcactgtgggaggccaaagcatgaggatcactcgtgtccaggag

SEQ ID NO: 311408 - DNA, 201 bp, Homo sapiens
gaagcatttagacacatcaaatgttaaacgagtcctgattatgatgataatgatgatgattttggtggttgcaatagcaaagccttaagtatgaaggagaygtgccagctggaaatacaggtcggtagcagcattaagtatctagaggagctgcaaatattatttttttgtgtgctcattttatttctttactcattcgtc

SEQ ID NO: 311409 - DNA, 201 bp, Homo sapiens
gtttatgttactatccttcctacacctttttaagatttaacttgttcctgttaaacaaaaaaacagagaaaagttaaatgagctatcacactgctagtaakaaagagaaccagaatacacagttaaggtgactaactcaaggccaggtgcagtggctcacaaatgtaatcccagcactgtgggaggccaaagcatgaggat

SEQ ID NO: 311410 - DNA, 201 bp, Homo sapiens
gactgcccggaaaagagtacagggagggggggattcttgatccatgcacagcgatgtgagctgaggtgcaggcaccagacctaggaattcctagaaaaatwgtcaggaagcatttagacacatcaaatgttaaacgagtcctgattatgatgataatgatgatgattttggtggttgcaatagcaaagccttaagtatgaa

SEQ ID NO: 311411 - DNA, 201 bp, Homo sapiens
gataagaaatgcaagaagatatgtcagattataaaacattttttattttattctattttattttatttcattttactttaagttccaggatacatgtgcakaacatgaaggtttgttatatcgtgtacgtgtgccatggtggtttgctgcacctatctacccgtcacctaggttttaagccccgcatgcattagctatttg

SEQ ID NO: 311412 - DNA, 201 bp, Homo sapiens; identical to SEQ ID NO: 64989

SEQ ID NO: 311413 - DNA, 201 bp, Homo sapiens
gaaggttaggcaaatgcctttcgtgttgccattgaaccactggtagaaatccttcaatacaaaaattctaataagctacactccacacctacttctttctyagtttttcgtttgtcggtcttataaggcctgatttaaaaggcttagtaccaccaagatacgcacatggggaagaaaaacaagtgccgttgcttccaacat

SEQ ID NO: 311414 - DNA, 201 bp, Homo sapiens
atctttaagtatggtaggtattgtatatataatatgcaagtatctataataaaaagagaatcactatgggtaaagttttatcacagttcaaaggatagaarcagtgtgggaattctgaaaaaaaagaaaagaaaaagacaacagaattgaaacttgaaggatagataagtttagacaagctaaagaattcatggccaacgg

SEQ ID NO: 311415 - DNA, 201 bp, Homo sapiens
tgccctatgcaagataccgataataaaaacatattaaatatattctccagtctcatagatctttaagtatggtaggtattgtatatataatatgcaagtayctataataaaaagagaatcactatgggtaaagttttatcacagttcaaaggatagaaacagtgtgggaattctgaaaaaaaagaaaagaaaaagacaaca

SEQ ID NO: 311416 - DNA, 201 bp, Homo sapiens
atttgaagatccagtaaaccaagaagacagcggactagcatcctaaagtacatcttggccgggcacagtggctcacacctgtaattctagcactttgggarcctgagggaggtggattgcctgagctcaggagttcaaggctggcctgggcaacatggcaaaaccacatctctactaaaaatacagaaaaaattagccaag

SEQ ID NO: 311417 - DNA, 201 bp, Homo sapiens
ggaagagccggtgggaggaaaagccagtttatttgaagatccagtaaaccaagaagacagcggactagcatcctaaagtacatcttggccgggcacagtgrctcacacctgtaattctagcactttgggagcctgagggaggtggattgcctgagctcaggagttcaaggctggcctgggcaacatggcaaaaccacatct

SEQ ID NO: 311418 - DNA, 201 bp, Homo sapiens
gagattttaggtaaggacacagccaaaccatatcaactggccatcttcttttctccttgcacatctcctccttcagcctggggacttgcagggtagaacakgtttgttcctgttaatttcctggagctgctatggataaaggtcccgtgagagcagggaaaatgatgccagcgtctatggaaggcctggaatcactgttcg

SEQ ID NO: 311419 - DNA, 201 bp, Homo sapiens
tcactctactgtaacacatttcgacttgccagactgtgattgggttattcaacagcgtaattcagattcatctcctcctgataatgaacaaggcctccccwgagtatgaagagaacatgcacagataccagaaggcagccaagctcttccaggggaaggtaaggcaagaatgggaatatcctattgcatacacacctccag

SEQ ID NO: 311420 - DNA, 201 bp, Homo sapiens
atagacccagaggacattatgttaagtgaaataagccttgtacagaaagacaaataccacatgatctcattcatacaagcaatctaaaaaatggatctatrgaagtagagagcacaatactggttatggaaagctggggagcggagggggaagtggtgacggaagagggaagagggaagtggggacagggagaaattggtt

SEQ ID NO: 311421 - DNA, 201 bp, Homo sapiens
caccttccatatgttagtaaaaatattatgccttggaatgccaacagtactcctataaattgtgctcttcttgcccttagtatagagataaaaggtatagrtgccctcattatttagagctgcttcttcttgcctcagtaccctgacatcttctgcttctctctctagatggtcctggtgctgcccaggaacccacgtggc

SEQ ID NO: 311422 - DNA, 201 bp, Homo sapiens
ctcaatagcaacagtggaatgcagaatacaaagcattatatctttcaaatactgaaagaaaatcactgccaacgttagaattctacccccagcaaaaacarccttcaaaaataaaaggtgaataaatatatattaaacagccaaacggggagaatttgtcactgaacacctccatctcatactaaggaaaatagtaaaagg

SEQ ID NO: 311423 - DNA, 201 bp, Homo sapiens
aagcatttagacacatcaaatgttaaacgagtcctgattatgatgataatgatgatgattttggtggttgcaatagcaaagccttaagtatgaaggagacktgccagctggaaatacaggtcggtagcagcattaagtatctagaggagctgcaaatattatttttttgtgtgctcattttatttctttactcattcgtct

SEQ ID NO: 311424 - DNA, 201 bp, Homo sapiens
ctcactgcaacctcccctccaccttctgggttcaagtgattctcctgccttagcctccagagtagctggcattacaggcgtgcaccaccagctaatttttktacttttagtagagacagggtttcaccatgttggccggctagtcttgaactcctgacctcaggtgatccgctggccttggcctctcaaagtgctgggatt

SEQ ID NO: 311425 - DNA, 201 bp, Homo sapiens
agaaccaacaggagataggtaatatagatagatagatagatagatagatagatagatagatagatagatagatagatagattgattatagatagatagatattatatagtaaaaattacatttttacattgtattatttttataacacaaattatatatatagtggtaaatattatatatatgaatatacatattaagaga

SEQ ID NO: 311426 - DNA, 201 bp, Homo sapiens
cgtgcaccaccagctaatttttgtacttttagtagagacagggtttcaccatgttggccggctagtcttgaactcctgacctcaggtgatccgctggcctyggcctctcaaagtgctgggattacaggcgtgagccaccgcacctggcctaccttagcgtccattttaagaagtaagaaaaatgagttccaagtggatttt

SEQ ID NO: 311427 - DNA, 201 bp, Homo sapiens
gagaaccaacaggagataggtaatatagatagatagatagatagatagatagatagatagatagatagatagatagatagattgattatagatagatagatattatatagtaaaaattacatttttacattgtattatttttataacacaaattatatatatagtggtaaatattatatatatgaatatacatattaagag

SEQ ID NO: 311428 - DNA, 201 bp, Homo sapiens
agagaaccaacaggagataggtaatatagatagatagatagatagatagatagatagatagatagatagatagatagatagattgattatagatagatagatattatatagtaaaaattacatttttacattgtattatttttataacacaaattatatatatagtggtaaatattatatatatgaatatacatattaaga

SEQ ID NO: 311429 - DNA, 201 bp, Homo sapiens
accaagaaatggaatcaacttacgtgtccatgagcagatgaatggagaaagaaattgcagtacatatatacaatggacactattcagccataaaaaagagwgaagttctgtcatgtgtaggagcacagatagacccagaggacattatgttaagtgaaataagccttgtacagaaagacaaataccacatgatctcattca

SEQ ID NO: 311430 - DNA, 201 bp, Homo sapiens
aagagaaccaacaggagataggtaatatagatagatagatagatagatagatagatagatagatagatagatagatagatagattgattatagatagatagatattatatagtaaaaattacatttttacattgtattatttttataacacaaattatatatatagtggtaaatattatatatatgaatatacatattaag

SEQ ID NO: 311431 - DNA, 201 bp, Homo sapiens
ctcccatgttcattgcagcactattcacaataaccaagaaatggaatcaacttacgtgtccatgagcagatgaatggagaaagaaattgcagtacatatayacaatggacactattcagccataaaaaagagtgaagttctgtcatgtgtaggagcacagatagacccagaggacattatgttaagtgaaataagccttgt

SEQ ID NO: 311432 - DNA, 201 bp, Homo sapiens
gttcaccagaaaaagagaaccaacaggagataggtaatatagatagatagatagatagatagatagatagatagatagatagatagatagatagattgattatagatagatagatattatatagtaaaaattacatttttacattgtattatttttataacacaaattatatatatagtggtaaatattatatatatgaat

SEQ ID NO: 311433 - DNA, 201 bp, Homo sapiens
tgttcaccagaaaaagagaaccaacaggagataggtaatatagatagatagatagatagatagatagatagatagatagatagatagatagatagattgattatagatagatagatattatatagtaaaaattacatttttacattgtattatttttataacacaaattatatatatagtggtaaatattatatatatgaa

SEQ ID NO: 311434 - DNA, 201 bp, Homo sapiens
acatcctggacattagtcagtgcacagccttttaaagcctttcccccaaatatggtagactctccttctttctctttgccttgtctgaaatgttggaaaakgatggcattttgtatattcaaggtgttaacctccatcttccagattagcttcttgactaagaaaggcagccataaatgagactgcctcattccagcattt

SEQ ID NO: 311435 - DNA, 201 bp, Homo sapiens
ctgttcaccagaaaaagagaaccaacaggagataggtaatatagatagatagatagatagatagatagatagatagatagatagatagatagatagattgattatagatagatagatattatatagtaaaaattacatttttacattgtattatttttataacacaaattatatatatagtggtaaatattatatatatga

SEQ ID NO: 311436 - DNA, 201 bp, Homo sapiens
ctctgttcaccagaaaaagagaaccaacaggagataggtaatatagatagatagatagatagatagatagatagatagatagatagatagatagatagattgattatagatagatagatattatatagtaaaaattacatttttacattgtattatttttataacacaaattatatatatagtggtaaatattatatatat

SEQ ID NO: 311437 - DNA, 201 bp, Homo sapiens
cagttgcatgaaaacgagatggtaagacttaactgagagccatcttggaagctagttccatttgtgttaccagtggccagctctcatttaagtttcaatcyacctattcactccttcccaggtactaatgcattctttctcgctttcactctactgtaacacatttcgacttgccagactgtgattgggttattcaacagc

SEQ ID NO: 311438 - DNA, 201 bp, Homo sapiens
tctctgttcaccagaaaaagagaaccaacaggagataggtaatatagatagatagatagatagatagatagatagatagatagatagatagatagatagattgattatagatagatagatattatatagtaaaaattacatttttacattgtattatttttataacacaaattatatatatagtggtaaatattatatata

SEQ ID NO: 311439 - DNA, 201 bp, Homo sapiens
accaatacaatactgtattgtttatgttactatccttcctacacctttttaagatttaacttgttcctgttaaacaaaaaaacagagaaaagttaaatgarctatcacactgctagtaataaagagaaccagaatacacagttaaggtgactaactcaaggccaggtgcagtggctcacaaatgtaatcccagcactgtgg

SEQ ID NO: 311440 - DNA, 201 bp, Homo sapiens
ctcttcctcccagagttccaattcttcgaccaatacaatactgtattgtttatgttactatccttcctacacctttttaagatttaacttgttcctgttaracaaaaaaacagagaaaagttaaatgagctatcacactgctagtaataaagagaaccagaatacacagttaaggtgactaactcaaggccaggtgcagtg

SEQ ID NO: 311441 - DNA, 201 bp, Homo sapiens
gccttttaaagcctttcccccaaatatggtagactctccttctttctctttgccttgtctgaaatgttggaaaatgatggcattttgtatattcaaggtgytaacctccatcttccagattagcttcttgactaagaaaggcagccataaatgagactgcctcattccagcattttcatctttctctggtggtagcatctg

SEQ ID NO: 311442 - DNA, 201 bp, Homo sapiens
ggacgaagacattgaaagcattgatgccaccaaattgagccgtttcattgagatcaacagcctccacatggtgacagagtacaaccctgtggtaaacaatrcttcctgttcttagtcccttcagagcctgagtcggggaaggtactggtcttcataacagaggtctcttcctcccagagttccaattcttcgaccaataca

SEQ ID NO: 311443 - DNA, 201 bp, Homo sapiens
tctaagctgatctctctgcaaccctcacatcacatctggtagggtcacagtgaactaacagcagcttccagaacgcaacctctcacatctcacagtatttkcatatgctgttctctacttaaagctccttcctcatcctcatttatctgatcaagtcttagccacttttcaggagtaacttcttccttgaagcttttctgc

SEQ ID NO: 311444 - DNA, 201 bp, Homo sapiens
catgccttggcttcagaacacttccaaatttgctcttccttatccctctaagctgatctctctgcaaccctcacatcacatctggtagggtcacagtgaastaacagcagcttccagaacgcaacctctcacatctcacagtattttcatatgctgttctctacttaaagctccttcctcatcctcatttatctgatcaag

SEQ ID NO: 311445 - DNA, 201 bp, Homo sapiens
ttctcatactccagtgaatcagttcaggaatgttacccttcaggaaatatctctggaatctccaaatgggcctaagcattcctctatatgtaactccttawctctattttcatataccattttataattcatatcatatatttacgtatctgtctcctctattaccctcttaggccatgacctattcaaggctggaaacga

SEQ ID NO: 311446 - DNA, 201 bp, Homo sapiens
aaatgcaattaaaaccactgagacataaccatatccaccaaaatcagtaaaattagaaaaactgacaatggcaagtgttgacaaggatgtggagcaatggracctgtcatacacagtactggtatgtgtaaattatccactttggaagatagcttggcattttctactagttaactatatacatatcctataatcaaaaat

SEQ ID NO: 311447 - DNA, 201 bp, Homo sapiens
ccttaaattattattaagtggttaatgagagaaatgcaattaaaaccactgagacataaccatatccaccaaaatcagtaaaattagaaaaactgacaatrgcaagtgttgacaaggatgtggagcaatgggacctgtcatacacagtactggtatgtgtaaattatccactttggaagatagcttggcattttctactag

SEQ ID NO: 311448 - DNA, 201 bp, Homo sapiens
ctccagtttgcagtgtgtgtttttcctctatcaggctcttaccctaatgaactcttctttcttcttagtggataaagcaacatttatggttggcagctatkgacctcggcctgaggagtatgagttcctcactccagttgaggaggctcccaagggcatgctggcgcgaggcacgtaccacaacaagtccttcttcaccga

SEQ ID NO: 311449 - DNA, 201 bp, Homo sapiens
ttcatggcctctagaagagtagataccagctccctctgcttgaccccagatgcaagacgggtatgttagtttcttctcatgctgccaataaagacataccmaaaactggataatttataaaggaaagagttttaattgaatcacagttcagcatagcttggaaggcctgaggaaatttacaatcatggcagaaggaacctc

SEQ ID NO: 311450 - DNA, 201 bp, Homo sapiens
ggaggcctcaattaactattgttcatggcctctagaagagtagataccagctccctctgcttgaccccagatgcaagacgggtatgttagtttcttctcaygctgccaataaagacatacccaaaactggataatttataaaggaaagagttttaattgaatcacagttcagcatagcttggaaggcctgaggaaatttac

SEQ ID NO: 311451 - DNA, 201 bp, Homo sapiens
tgagagtaacagcatataaactctcaaatttttcaacaggactcttattgttgccctagcagagatgtaactcccaggttaaataaactatgagcctgtcytaaaatggaatttgaaatattatttgaatgtttaccctgctttggattttttcagtcactactatttaaagaaacataattaacctaactttgacctaat

SEQ ID NO: 311452 - DNA, 201 bp, Homo sapiens
ggaggagtgtgcaataacttaaacagccgccagatgccatcattttatcctccagcaattccatctgaaggagcagaataagagaggaggcctcaattaaytattgttcatggcctctagaagagtagataccagctccctctgcttgaccccagatgcaagacgggtatgttagtttcttctcatgctgccaataaagac

SEQ ID NO: 311453 - DNA, 201 bp, Homo sapiens
tttccatttctcagttacaactcctgattaccctgtcagttctgcgtacacagttggaaatcactgcaatgagatgcaagtcagggagaaagacagggacwacatttttcaggaatgagaaatctgagctgtagacaaaaacaccgtcagaaagatggggaaggggcaagagcatggaattggaggagtgtgcaataactt

SEQ ID NO: 311454 - DNA, 201 bp, Homo sapiens
ttctcatacttacttcaagagttctgagcctgtgggctgcatctcctcatctatggatgctttgaagctcaagtcagtatctgcagaaagaatgccttcayggaaccccaccattgtcctaaacacatttggtctatactctcatagcaccctatgaataggcaggggccagagtgaacccaatttatatcatccagcaac

SEQ ID NO: 311455 - DNA, 201 bp, Homo sapiens
gcattagaagtgggggtaaagggagacagccacccagtttgatttcatcttgtccattgggacctcttattttcaagacattcccagtctctaaattatawctttctcatacttacttcaagagttctgagcctgtgggctgcatctcctcatctatggatgctttgaagctcaagtcagtatctgcagaaagaatgcctt

SEQ ID NO: 311456 - DNA, 201 bp, Homo sapiens
cccaagagccagaaatgttctaccttaagggaaccacagcagccacctgctgctggcagatggcactgcattagaagtgggggtaaagggagacagccacscagtttgatttcatcttgtccattgggacctcttattttcaagacattcccagtctctaaattatatctttctcatacttacttcaagagttctgagcct

SEQ ID NO: 311457 - DNA, 201 bp, Homo sapiens
ttccataggtgacatgcgggcctgtgattctcctgtgatgacacctgccacatcatgtgggaaatttctcttcacttttttggagtctacaggacagtttktccccctagggcagagaaactctcttacttatcttttggtcttcagagctttaatcagtgcctgtcacatgggggtctaaagacgtttatcaatacatga

SEQ ID NO: 311458 - DNA, 201 bp, Homo sapiens; identical to SEQ ID NO: 64983

SEQ ID NO: 311459 - DNA, 201 bp, Homo sapiens
cagttcagcatagcttggaaggcctgaggaaatttacaatcatggcagaaggaacctcttcacaggatggcaggagagagaatgagcacaagcaggggaaygccagacgcttaaaaaaccatcagatcttgtgactcatgcactatcacgagaacagcatgggggaaactgcccccatgatcccattactgccacctggtc

SEQ ID NO: 311460 - DNA, 201 bp, Homo sapiens; identical to SEQ ID NO: 64984

SEQ ID NO: 311461 - DNA, 201 bp, Homo sapiens
gaatatatgaagaatcaatgaatgaatgaatgaatgaatgaatatgttcttcttaagaagtacaattcttttgcatattccactattatgtgcttgcggarcatttagaatattttatccctagtctggacttctctcatgattcaaatgtttgctgggtatataccctcataagcactatactcttaaaatgttcaaaac

SEQ ID NO: 311462 - DNA, 201 bp, Homo sapiens
tgccatggaattcattgctgccactgaggtggctgtcataggcttcttccaggttagttccctacttgcaattcccccaagagccagaaatgttctacctyaagggaaccacagcagccacctgctgctggcagatggcactgcattagaagtgggggtaaagggagacagccacccagtttgatttcatcttgtccattg

SEQ ID NO: 311463 - DNA, 201 bp, Homo sapiens
gagaaaatagagatccaaagagactgaaagcaaaatcacctctaagtcaccatttgtttaatccttcccataatttcatagagatttagacctcagggctyatttctcatataaaacacctatcaagtacctggtgcctgctcaatatacaatgaatatttctttctttccctcccctcctttgtggagttctgcttgata

SEQ ID NO: 311464 - DNA, 201 bp, Homo sapiens
ttgcttgtttgttttcagagcctaatctatgataggcactattacaatatttgaccatttaattcacacaagaatctgatgaagtaatttttattattccygcatttttaataaagaaatttccatgagagaatggtttagttgcccaaaatctcacaactgtgaagtaacagatgtctgattcgtacccagcattgctgt

SEQ ID NO: 311465 - DNA, 201 bp, Homo sapiens
tacatgtactgatactatataagcagaaactgacaaaattgaataaaaagatggctaaagccacaacataatagaaaaatttaacacctttttttttttttggagacagagtcttgctctgttgcccaggctggagtgcagtggtgcaatctttgctcactgcagcctctgcctcccaggttcaagcgattctcctgcctc

SEQ ID NO: 311466 - DNA, 201 bp, Homo sapiens
tttaaaagttaaaatgtgtgtgcatgaatgtgtgtgtaagtgtgtgtgtgtgtgtgtgtgtgtgtgtgtgcctgaaggcattagagagccagtaaaagagrgaaaatatctaggtcaagatctggaagaagatgaaaaccaaaaaagatgaaccctgcattgaggactgctttttgtctagacggctttggtcagttctag

SEQ ID NO: 311467 - DNA, 201 bp, Homo sapiens
caccatctttatctctgtggagttggtgactctatttccacttctgctaaggctccaaacacatatgcccctggggtattggcagtaataatcaaaaaggygttcttctgcatgtggggccagaaaagatgatcttatggtccctgggctatggcctccgtgttgtggcattttgcaagctagctaaggcaggggcatgca

SEQ ID NO: 311468 - DNA, 201 bp, Homo sapiens
agagtagctggcattacaggcgtgcaccaccagctaatttttgtacttttagtagagacagggtttcaccatgttggccggctagtcttgaactcctgacytcaggtgatccgctggccttggcctctcaaagtgctgggattacaggcgtgagccaccgcacctggcctaccttagcgtccattttaagaagtaagaaaa

SEQ ID NO: 311469 - DNA, 201 bp, Homo sapiens
tgcaagcaatcagaaagaaggagactttaatattcactttagagaagagtaatacaaaaatcaaggatcttagcatttttttttttttttttttgagacaragttccactctgccacccaggccggagtgcaatggcacgttctcggctcactgcaacctcccctccaccttctgggttcaagtgattctcctgccttagc

SEQ ID NO: 311470 - DNA, 201 bp, Homo sapiens; identical to SEQ ID NO: 64987

SEQ ID NO: 311471 - DNA, 201 bp, Homo sapiens
gtagttcattctaatgcctagattcttttgtggttgttgctggcccaatgagtccctagtcacatcccctgccagagggagttcttcttttgtgagagacmctgtaaacgacacaagagaacaagaataaaacaataactgtgtgtgttctggctgagaccttcatttccctgctttcttgctttgaacaaatatgataac

SEQ ID NO: 311472 - DNA, 201 bp, Homo sapiens
acctactgggccctccttgcctacatattgtaggcagccaaaagagctggagaatctttacaaacttgtgtaaaaaatcaggaagaattctacctagctgygcccttccccatcctcctaagactctgaccaaagatttgttaacccaccatgttctctctcttcctgtgtacacactagttttgtagcaatgctttctga

SEQ ID NO: 311473 - DNA, 201 bp, Homo sapiens
tttctctgttcaccagaaaaagagaaccaacaggagataggtaatatagatagatagatagatagatagatagatagatagatagatagatagatagatagattgattatagatagatagatattatatagtaaaaattacatttttacattgtattatttttataacacaaattatatatatagtggtaaatattatata

SEQ ID NO: 311474 - DNA, 201 bp, Homo sapiens
attttgttctttgttacagctgcaataatttattttaactcaagatttcaatttcatggtgcagaccataaattcaatcagtgtgagctgcaacaattacraggtatctctttatccctggacgtcacctcagatagaactttttctttcaaacttccccaactgcagattctctttattctggtggacagtggtatgaaa

SEQ ID NO: 311475 - DNA, 201 bp, Homo sapiens
gaatggctatcatcaaaaagacaaaaaataacaaacgctggtgtggatgtggagaaagtatttttatacactgttaatgggtatgtaaattagtatagccrttatggaaaacagtatgaacattcctcaaaaatttaaaaatagaactaccatatgaaccagcactttcactattggatatacatccaaaggaaatgaaat

SEQ ID NO: 311476 - DNA, 201 bp, Homo sapiens
gtttctctgttcaccagaaaaagagaaccaacaggagataggtaatatagatagatagatagatagatagatagatagatagatagatagatagatagatagattgattatagatagatagatattatatagtaaaaattacatttttacattgtattatttttataacacaaattatatatatagtggtaaatattatat

SEQ ID NO: 311477 - DNA, 201 bp, Homo sapiens
ctctgacagcgataggctcattctggggagaaaaggagcacataggtcaagtcaggggttgctttctacatttttttaattaaaaactggaaaaccacaawaagatatcacctcaccccaattagaatggctatcatcaaaaagacaaaaaataacaaacgctggtgtggatgtggagaaagtatttttatacactgttaa

SEQ ID NO: 311478 - DNA, 201 bp, Homo sapiens
tctgtttctctgttcaccagaaaaagagaaccaacaggagataggtaatatagatagatagatagatagatagatagatagatagatagatagatagatagatagattgattatagatagatagatattatatagtaaaaattacatttttacattgtattatttttataacacaaattatatatatagtggtaaatatta

SEQ ID NO: 311479 - DNA, 201 bp, Homo sapiens
gtctaaagacgtttatcaatacatgaaaaaaagatggaatagtgacttcattcttttttgtgttatccaggtagacaatgaacaactgaatttagaggacraagacattgaaagcattgatgccaccaaattgagccgtttcattgagatcaacagcctccacatggtgacagagtacaaccctgtggtaaacaatacttc

SEQ ID NO: 311480 - DNA, 201 bp, Homo sapiens
ctaagtcattgacaacttcatggaaaaatcaccatctctaatcagcaaaacaaggtcaatgcttctggtctcctgaagagctcaccttctgctgacctttrgtacattggttcaaccacatttgagattgagtttgtttatatggggttttgctatccactgtgcatgaggcagtccatcctgatgatcaagagcatggac

SEQ ID NO: 311481 - DNA, 201 bp, Homo sapiens
tagactgccttaaccatcttggaatgcagcccagtaggtctcagctcatttttcctatcccctattcaagatggagttgctctggctcaaacatctctgasagcgataggctcattctggggagaaaaggagcacataggtcaagtcaggggttgctttctacatttttttaattaaaaactggaaaaccacaataagata

SEQ ID NO: 311482 - DNA, 201 bp, Homo sapiens
ttttctgtttctctgttcaccagaaaaagagaaccaacaggagataggtaatatagatagatagatagatagatagatagatagatagatagatagatagatagatagattgattatagatagatagatattatatagtaaaaattacatttttacattgtattatttttataacacaaattatatatatagtggtaaata

SEQ ID NO: 311483 - DNA, 201 bp, Homo sapiens
gccaccaaattgagccgtttcattgagatcaacagcctccacatggtgacagagtacaaccctgtggtaaacaatacttcctgttcttagtcccttcagascctgagtcggggaaggtactggtcttcataacagaggtctcttcctcccagagttccaattcttcgaccaatacaatactgtattgtttatgttactatc

SEQ ID NO: 311484 - DNA, 201 bp, Homo sapiens
tttttctgtttctctgttcaccagaaaaagagaaccaacaggagataggtaatatagatagatagatagatagatagatagatagatagatagatagatagatagatagattgattatagatagatagatattatatagtaaaaattacatttttacattgtattatttttataacacaaattatatatatagtggtaaat

SEQ ID NO: 311485 - DNA, 201 bp, Homo sapiens
tcttgcctcagtaccctgacatcttctgcttctctctctagatggtcctggtgctgcccaggaacccacgtggctcacagatgtcccagctgccatggaaytcattgctgccactgaggtggctgtcataggcttcttccaggttagttccctacttgcaattcccccaagagccagaaatgttctaccttaagggaacca

SEQ ID NO: 311486 - DNA, 201 bp, Homo sapiens
ctcatcctcatttatctgatcaagtcttagccacttttcaggagtaacttcttccttgaagcttttctgctcttccataggtgacatgcgggcctgtgatyctcctgtgatgacacctgccacatcatgtgggaaatttctcttcacttttttggagtctacaggacagtttgtccccctagggcagagaaactctcttac

SEQ ID NO: 311487 - DNA, 201 bp, Homo sapiens
gtttttctgtttctctgttcaccagaaaaagagaaccaacaggagataggtaatatagatagatagatagatagatagatagatagatagatagatagatagatagatagattgattatagatagatagatattatatagtaaaaattacatttttacattgtattatttttataacacaaattatatatatagtggtaaa

SEQ ID NO: 311488 - DNA, 201 bp, Homo sapiens
atgacctgtatcttgtgccaacctgctatttcatcctgtgacttagactgccttaaccatcttggaatgcagcccagtaggtctcagctcatttttcctakcccctattcaagatggagttgctctggctcaaacatctctgacagcgataggctcattctggggagaaaaggagcacataggtcaagtcaggggttgctt

SEQ ID NO: 311489 - DNA, 201 bp, Homo sapiens
cttttatattagatatagagggtacatgtgcaggttcgttacatgggtatattgcatccaggtagtgagcctagtactaaatagatagtttttcaaaaaaygccccactccctcccttacccctcaggtagtccacagtgtctactgtttctatgttcatgtctatgtgtgttcagtgtttagctcccacttataactgag

SEQ ID NO: 311490 - DNA, 201 bp, Homo sapiens
atggaaagaaagaaaggaaggaaagagggaaagaaagaaagaaagaaagaaagaaagaaagaaagaaagaaagaaagaaagaaagaaagaaagagaaagamagtaaagtggaatgatggaaattttgcccacgcaatggctcagtgtaaacatcagacactgcagcatgggaactgggggttcactgagaaaccccaaagg

SEQ ID NO: 311491 - DNA, 201 bp, Homo sapiens
gttcatagcaacctccattcctgcaggttttgatttatttacaacacgatttgcatgcaccattgaagttagcaaagcataaaccagtatttccatcgtcktgaatcgactttcatctcaacaatgaaaactcactatttaagattaattgaaaataatggccaatttggattatagaacagttttagagaaatatatttc

SEQ ID NO: 311492 - DNA, 201 bp, Homo sapiens
gcaagtgaataacagttatctacagttcatagcaacctccattcctgcaggttttgatttatttacaacacgatttgcatgcaccattgaagttagcaaarcataaaccagtatttccatcgtcttgaatcgactttcatctcaacaatgaaaactcactatttaagattaattgaaaataatggccaatttggattatag

SEQ ID NO: 311493 - DNA, 201 bp, Homo sapiens
tgtttcccaggctggtctcaaactctggttttaagagaactgcccacctcagcctcccagagtgctgagattacaggtgtgagccactgcgcacagcctcrgctcttcttttccatcagtcacctttctgtttaaattagttcaaatggagttcttgtcacttgcagctgagaaaatcctgaattggacacttatcaaaaa

SEQ ID NO: 311494 - DNA, 201 bp, Homo sapiens
aggagatcctgagaacatgcgtccaaggtgatcaggacacaacttggttttatacattttagggagacagaagtcatcaatgaatacatgtacagtgtacrttggttcggtctggaaatgtgggacaactagaagcggcagcttccagatcatgggtagattaaaagaagttctgattggcaattggttgcaagggttatt

SEQ ID NO: 311495 - DNA, 201 bp, Homo sapiens
gaggggctgcaaagtggaagcagggaggcaagtgtagtggctcctgggacagtcctgggagaaatcatggtggcaatggactggcctgggggtgggggaayagcagtggaggtgccgagaggtagtcctggataaatttcgagggagttgaagatagttttctgctgtgttgcctgagggcgatgaaagaaaggagtcagt

SEQ ID NO: 311496 - DNA, 201 bp, Homo sapiens
aagactaaaattttcagtttacagtttagaaagaatagaacaaggccaagaaggaataaagtgatactttttttctcagtgaccctcttcaaatacagttyttagaatagaactccagctcggtgcagtagctcacagctgtaatcccagccctttgcgaggctgaggcaggagaatcacttgagcccagaagtttgagac

SEQ ID NO: 311497 - DNA, 201 bp, Homo sapiens
ggcctttcagaatggcttctttcacttagtaatatgcatttaagttttcttcatgtctttttatggcttgatagctcttatttgcactgaatagtaatacrttgcatagatgcatcatagctcattcatccattcacctactgaaggacctctgggttgtttccatagtttagcaattacaaataaagctgctggccaggt

SEQ ID NO: 311498 - DNA, 201 bp, Homo sapiens
gttttttgtttgtttgtttgtttgtttttgttttttgttttgagatagagtcttactctgttgcccaggctggagtgcagtggcaccatctcagctcactrcaacctccacttcccaggtgcaggcacttctcctgcctcaatctcccaagtggctaggactgcaggctggccaccaagcccagctaatttttatattttt

SEQ ID NO: 311499 - DNA, 201 bp, Homo sapiens
gctggggaggcctcaggaaacttgcagtcatggcagaaggggaagcgaacacatccttcttcacatggtggcagcaaggagaagtgcagagcgaagggagwggggggaagcccttataaaaccatcagatctcgtgagaactcactatgatgagaacaacatggaggttgttctccatgataattgaatcaccatgattct

SEQ ID NO: 311500 - DNA, 201 bp, Homo sapiens
tccagggaggacccactatgtgcttcttccctccaggaatactggtgagggtcaggtgctacacaagaatgttgtgcagtcaggcgaatctaggattgaaytgggctcattcgcttaccagcagcacctctttgggaaagtttctttctttttttttttaatacagtcttgctctgttgcccaggctggagtgcagtggtg

SEQ ID NO: 311501 - DNA, 201 bp, Homo sapiens
catgaaaataatctccttgtaaacatctccatcagagctcttaggtgaccaggtagattgttaatgagcataatattttgaaaggaatcttgttttctgcrcagtaggtctcaagaatggccataaaatattcatttcaataaaccatgctgtaagcatgttgtaagcagatgtgcctatataaacaggctttgctgctcc

SEQ ID NO: 311502 - DNA, 201 bp, Homo sapiens
actggtgagggtcaggtgctacacaagaatgttgtgcagtcaggcgaatctaggattgaactgggctcattcgcttaccagcagcacctctttgggaaagtttctttctttttttttttaatacagtcttgctctgttgcccaggctggagtgcagtggtgcaatcttggctcaccacaacctccacctcccaggttcaag

SEQ ID NO: 311503 - DNA, 201 bp, Homo sapiens
ctggtgagggtcaggtgctacacaagaatgttgtgcagtcaggcgaatctaggattgaactgggctcattcgcttaccagcagcacctctttgggaaagtttctttctttttttttttaatacagtcttgctctgttgcccaggctggagtgcagtggtgcaatcttggctcaccacaacctccacctcccaggttcaagc

SEQ ID NO: 311504 - DNA, 201 bp, Homo sapiens
gagtgcagtggcacgatctcagctcactgcaacctctgcctctccggtttaagcaattcttgtgcctcagcctctcgagtagctgggactacaggcgtgcrccaccatgcctggctaatttttatatttttagtagagacagaggttcaccatgttggctaggatgttctcaaactcctggcctcaagcaatctgcctgtc

SEQ ID NO: 311505 - DNA, 201 bp, Homo sapiens
tggtgagggtcaggtgctacacaagaatgttgtgcagtcaggcgaatctaggattgaactgggctcattcgcttaccagcagcacctctttgggaaagtttctttctttttttttttaatacagtcttgctctgttgcccaggctggagtgcagtggtgcaatcttggctcaccacaacctccacctcccaggttcaagcg

SEQ ID NO: 311506 - DNA, 201 bp, Homo sapiens
agatacaaaaattagtcattcccagtaactcaggaggctgaagcaggaggattgcttgagcccgagagtttgagaccagcctaagcaatatagtgagaccytgtctctacaaaaactacaaaaatttaaaatttaaaaacacagaagtgaacagatgcatatgcagtgaacaaggggtagctaatataacaaggaagtaac

SEQ ID NO: 311507 - DNA, 201 bp, Homo sapiens
ggtgagggtcaggtgctacacaagaatgttgtgcagtcaggcgaatctaggattgaactgggctcattcgcttaccagcagcacctctttgggaaagtttctttctttttttttttaatacagtcttgctctgttgcccaggctggagtgcagtggtgcaatcttggctcaccacaacctccacctcccaggttcaagcga

SEQ ID NO: 311508 - DNA, 201 bp, Homo sapiens
cccaggctggagtgcagtggtacgatctcagctcactgcaacctgcacctcccacgttcaagcgattctcctgcctcagcctcctgagtggctgggattasaggagcccaccaccatacccagctaatttttgtagttttagaagagatggggtttcaccaagttggtcaagctggtctcaaacttctgacctcaagtgat

SEQ ID NO: 311509 - DNA, 201 bp, Homo sapiens
gaagaaaaagaaattgggagactgaggtgggaggtttgcttggggccaggagttcgagaccagcctgggcaatacagtgagacttcatctctataaaaaartaaaataaataataataaattttttttttgagatggagtctcgctctgtcacacaggctggagtacagtgacatgacctcggctcactgcaacctccacc

SEQ ID NO: 311510 - DNA, 201 bp, Homo sapiens
tttcttttttttttttttttttttgaggcagaatctcgctctatcgcccaggctggagtgcagtggtacgatctcagctcactgcaacctgcacctcccasgttcaagcgattctcctgcctcagcctcctgagtggctgggattagaggagcccaccaccatacccagctaatttttgtagttttagaagagatggggtt

SEQ ID NO: 311511 - DNA, 201 bp, Homo sapiens
taaatgttctcaacacaagaaatgataaatatctgaagtgttggatatgctaattagccttatctgatcattccataatgtagaaacgtatcataacatcrcattgtacctcataaatattgtattagtccattctcatgttgctaataccaacacatacctgagactgggtaatttatagaggaaagaggcttaattgat

SEQ ID NO: 311512 - DNA, 201 bp, Homo sapiens
gtgagtcagattggcatcacattctaaaatatgggttttgtttatttcagaatgttctcattgttgaggtaagctggcatttccttttccatacttggagkttgaaagaatctaatggtgagttttaaacggtaaaccttgttatcaaattgaccaaggatttcttgagctcccactgggtgcatgctctccaaatttaat

SEQ ID NO: 311513 - DNA, 201 bp, Homo sapiens
ctccaaattggatggcatttttaattacgatgcattattaatcaggagtatctccctgggtgaaaagtctattgtgctgctcaaatgcattttgttgaatktatctgtcctttttgcaaaggatgttgtcggaactgggaggaccatgaaagcactactcagcaatatagagaaatacaagcccaacatgattaaggtagc

SEQ ID NO: 311514 - DNA, 201 bp, Homo sapiens
acatgggaattatgagaactacagttcaagatgagatttggtggggacacagcctaaccatatcaaatatatatagtaattgttggtcaattaaaaatttwaaaaaaacacgtttgtacacttggaagaagtaggactttcttaagtaacacttgcttggtaacataatctatgacttttagcacattatttagttatctg

SEQ ID NO: 311515 - DNA, 201 bp, Homo sapiens
ttgtcctcccaaagcactgggattacagatgtaagcactgtgcctgacctgctgtcttctttttatccagaaccatctatatagtgccacagtagcaaaayatgtatttcaagtacatcttttaatgatgcttgattctatttacaattcatagagatttgattgggttcactaaagcatgtcttttttaatggtagtttg

SEQ ID NO: 311516 - DNA, 201 bp, Homo sapiens
ggctgcaatgagctaggatcaccccactgcacttcagcctggccaaaagtgagaccctgtctcaaaaaaaaaaaaaaaaaaaaatatatatatatatatayacacacacacacatatatatatacacacacacgtgtgcacatatatttgtatatatatatatattttgtgtattatatatattttgtgtatatatatata

SEQ ID NO: 311517 - DNA, 201 bp, Homo sapiens
aggatcaccccactgcacttcagcctggccaaaagtgagaccctgtctcaaaaaaaaaaaaaaaaaaaaatatatatatatatatatacacacacacacayatatatatacacacacacgtgtgcacatatatttgtatatatatatatattttgtgtattatatatattttgtgtatatatatatatacacacacacacg

SEQ ID NO: 311518 - DNA, 201 bp, Homo sapiens
tccacctggcttttggggatcgggttattagacatgtttttgtttgtttgtttttgtctggtttggttttgccaaaggattatcaactgagctattattartacttacctaagtgagtttggtaggaatcaggagaagagagaaatcagaaatgattgttgtgtttctgttatggctggcttcctgtcaccccccatgaaa

SEQ ID NO: 311519 - DNA, 201 bp, Homo sapiens
ccctcctgcctcaatgaaaggtcctcaagtttgagtggcgacagcagcatatggtgacttgcatttatataatctaaattttgttcctttttttttttctstttctctgtctgctaagatgctggatttgagattccaaacttatttgtggtgggatatgccttagattacaatgaatacttcagagatctgaatgtaagt

SEQ ID NO: 311520 - DNA, 201 bp, Homo sapiens
actccagcctgggtgacagagtgggaccctgtttcaaaaaaaaattatggcagaggcaaagggagagcagcacttcagatgtctggagacagatatggagmaagagaaagagggggaggtgtcatacacctttaaacaaccagatacaacaccaccaaggggcatgatgatgctaaaccattcatgagacccacccccgtg

SEQ ID NO: 311521 - DNA, 201 bp, Homo sapiens
agggagagataaagatcttctctatccacctggcttttggggatcgggttattagacatgtttttgtttgtttgtttttgtctggtttggttttgccaaakgattatcaactgagctattattagtacttacctaagtgagtttggtaggaatcaggagaagagagaaatcagaaatgattgttgtgtttctgttatggct

SEQ ID NO: 311522 - DNA, 201 bp, Homo sapiens
ttttatgtttaagaatctttggtttcctatttgacagcattgcatgtggatttgaaactgtgtagggctgatagtcccacggattcctcatgatctccccmaccttgatagggaaaacagaacccttcaaaatgagggtcttcaatgttctaatttgcatctttcacaggaactctgttccgtgcattgggtatttttatt

SEQ ID NO: 311523 - DNA, 201 bp, Homo sapiens
aattgccacataagagaggtagatcctaaggtcagaaattttgctcagagttggcttgtcacttgatctggagctaatacagtcaccagattcctggttgwtacctctttgttacttctcagggagagataaagatcttctctatccacctggcttttggggatcgggttattagacatgtttttgtttgtttgtttttgt

SEQ ID NO: 311524 - DNA, 201 bp, Homo sapiens
ttcttcaagtctgacggaataatcttagcccttcttttatagctcacctgattagatcatgttcacccaggtaacctgccttttgatgaactcaaagtcayctgactagtcacctaatctttggtgcgaattcccaccacgtttacaagtcttacccacactcaagtggagaggattatgcagggtgtgtacaccagggga

SEQ ID NO: 311525 - DNA, 201 bp, Homo sapiens
gtgaaacaagccaggcacagaaagacaaactttgcatgttctcacttattggtgggagctaaaaattaaaacaattgaactcatggagatagagagtagawggatggttaccagaggctgggaaggggagtggtgagaggagggagcggggattgcaaatgggtacaaaaaataattagaaagaatgaatgagacctcaaa

SEQ ID NO: 311526 - DNA, 201 bp, Homo sapiens
tctgtaggtcagaaatctgagcatggtgtagctgagttttcagctcagaaccttacagggatgaaatcagtgtgttagttgggattttgatatcatctgargttttcaagatcactgactgttggcaagctcagttcccatttccttgttgactgtaggctggagttggtagactctccactcctaggggttgtccccagg

SEQ ID NO: 311527 - DNA, 201 bp, Homo sapiens
tagtcttggttctgatgtactccaccaaaccaccagatcttggacagaagttgactgggtctttcctttgcaaaaggcctgaactacacatttcctagaaytcattcctgctcaaggttccaatgacatgcaccttttcaagatgatcaactgtactgaaggttacagtctgtggccctggagcagataaaaataaagtgg

SEQ ID NO: 311528 - DNA, 201 bp, Homo sapiens
aatcactctttgaattggccttctattgctgtgtggcaaactcaccacaaacgtagtggcttaaaccaacatacacgtgtattatcttaaagtttctgtargtcagaaatctgagcatggtgtagctgagttttcagctcagaaccttacagggatgaaatcagtgtgttagttgggattttgatatcatctgaggttttc

SEQ ID NO: 311529 - DNA, 201 bp, Homo sapiens
gcatggtggtatgcatctgtagtcacagcccttgggaggctgaggcaggaggatcccatgagcccaggaattcaagactgcggtgagctataatccttackgtactgtagcctgagcaacaatgtgaaaccccatttcttaaaataaaaataaaataaaataaaaaagatattaaccacacatatttgatttgcattctcc

SEQ ID NO: 311530 - DNA, 201 bp, Homo sapiens
gtcagcttcataataagaatatttgcaagtctgagattccttgtgtgtgtgtgtgtgtgtgtgtgtgtgtgtattacattttagatgaaagagaatcttastggtataaatgtgcagcccactcagggccggtactgaaacaactccctttgttcccatcagataaatttcatccacacaagctacctctgttaaatttta

SEQ ID NO: 311531 - DNA, 201 bp, Homo sapiens
tagtaattttagaagattagtgaaatattttattttgaaaaccattatggaattccatgtttgtttcttttaatggataaatttaaatatatatcaaatgratagattattgtagactttttcagggatagttatttttccatcagcagtactgttagactactctatgcagaatacatctactagaatgacttatttcct

SEQ ID NO: 311532 - DNA, 201 bp, Homo sapiens
aaaagaaggtaagttgatttcaagggataaaagcattaacatgatattaggttggtgcaaaagtaattgcagtccttgccatttgataaaaggcaaaaackacagttacttttgcacccacttaatagttttcaaacttttgggttttttggtagcagaacatttcctccccagtgtcttctttagaattcagtaaataca

SEQ ID NO: 311533 - DNA, 201 bp, Homo sapiens
gtgcagaggctcatgcctgtaatcccagcattttgggaggccaaggcatgaggaccacttgagcccagaagtttgtgaccaacctggatgacacagcaagrccctgtctctatagagatacaaaaattagtcattcccagtaactcaggaggctgaagcaggaggattgcttgagcccgagagtttgagaccagcctaagc

SEQ ID NO: 311534 - DNA, 201 bp, Homo sapiens
acgcatctgatcccaagcattttggataaggggtactcaacttgtactaccgtaacatactacatacttttagaaaagaataaggtgaatctagatgcackgatagagtaggtaaattgttgaagtctaaaaaacaagtgagagaacactgtaaatagcccagtctattggtgtcaacagaggtcctcttggaagcaaggt

SEQ ID NO: 311535 - DNA, 201 bp, Homo sapiens
gagaccctgtctcaaaaaaaaaaaaaaaaaaaaatatatatatatatatatacacacacacacatatatatatacacacacacgtgtgcacatatatttgtatatatatatatattttgtgtattatatatattttgtgtatatatatatatacacacacacacgtatagttctgagtgtcatattcttaggactgcagaa

SEQ ID NO: 311536 - DNA, 201 bp, Homo sapiens
gagctgctttcaaaacagcagaagtgggcctggtgcagaggctcatgcctgtaatcccagcattttgggaggccaaggcatgaggaccacttgagcccagragtttgtgaccaacctggatgacacagcaaggccctgtctctatagagatacaaaaattagtcattcccagtaactcaggaggctgaagcaggaggattg

SEQ ID NO: 311537 - DNA, 201 bp, Homo sapiens
agaccctgtctcaaaaaaaaaaaaaaaaaaaaatatatatatatatatatacacacacacacatatatatatacacacacacgtgtgcacatatatttgtatatatatatatattttgtgtattatatatattttgtgtatatatatatatacacacacacacgtatagttctgagtgtcatattcttaggactgcagaaa

SEQ ID NO: 311538 - DNA, 201 bp, Homo sapiens
ataataatttctttttccacattgcatctggaaaccattgcctgcttttaagttttgctgtgttgagttatgtagagataccaccacattattgatgtatrttatatattatgttactttatggcttaccaagacctaagggtacattgataccttttctttctaagccctatctgactttggtcagtgatttgtatagaa

SEQ ID NO: 311539 - DNA, 201 bp, Homo sapiens
cacacacacacatatatatatacacacacacgtgtgcacatatatttgtatatatatatatattttgtgtattatatatattttgtgtatatatatatatmcacacacacacgtatagttctgagtgtcatattcttaggactgcagaaattggctgagacctcatcattcatgtcagaaggtctaagtgcaatacttctt

SEQ ID NO: 311540 - DNA, 201 bp, Homo sapiens
actggttaagtcaattattccagctgatcataataatttctttttccacattgcatctggaaaccattgcctgcttttaagttttgctgtgttgagttatrtagagataccaccacattattgatgtatattatatattatgttactttatggcttaccaagacctaagggtacattgataccttttctttctaagcccta

SEQ ID NO: 311541 - DNA, 201 bp, Homo sapiens
ctctcagggaatcagaatctgactgttctccactgcagatctttaatcagagcttggtggcaaagctgacacatactcagtccacccccagctaggcaaarcacagaagcatgactgtcttctccaattttctctgctccaggataggctcagacaccttccagagtgttttgtttcatgttagatttgtctgtcctctct

SEQ ID NO: 311542 - DNA, 201 bp, Homo sapiens
tacaggatggcattcggttattactgcatcaccttttctgtgtctcatattttgttaagaaactgatgcgtttaaatcctttattgtttcagcacatatgygtcatcaatgagcacggtaaagaaaaatatcgagtctaaagacatgaattctcaccactaaagtcccagatagcatcatatttacgcctgtacttgggaa

SEQ ID NO: 311543 - DNA, 201 bp, Homo sapiens
gaaaaaataaaatttaaaaaataaggattggcaagattttagaaataagttttagaggctctccaaaatcttcccatcatgcagaatatacactagctggaaaaaaaaaaaatgtaaaaggaaaaggcacccaacagttagtgggtacttgttttaatgggtgtagaagaaagtctgaaactgcaataaatatctgcagtg

SEQ ID NO: 311544 - DNA, 201 bp, Homo sapiens; identical to SEQ ID NO: 64997

SEQ ID NO: 311545 - DNA, 201 bp, Homo sapiens
ggaaacaggctcaaatctggcaccatgaaaacacagatgtgcaggttaagcccaagattttgggagacatgccccccaaacctgccctcaaataagttttyttttcttttttttttttttttttttgaggcagaatctcgctctatcgcccaggctggagtgcagtggtacgatctcagctcactgcaacctgcacctccc

SEQ ID NO: 311546 - DNA, 201 bp, Homo sapiens
tcaaatctggcaccatgaaaacacagatgtgcaggttaagcccaagattttgggagacatgccccccaaacctgccctcaaataagtttttttttcttttytttttttttttttttgaggcagaatctcgctctatcgcccaggctggagtgcagtggtacgatctcagctcactgcaacctgcacctcccacgttcaagc

SEQ ID NO: 311547 - DNA, 201 bp, Homo sapiens
cctccctttatttctcataaagaaaagcgcctttctctgtgcagtggggattagctaaccaggaccccttttggaaactgggtggagtagaataccaatcmcaatacagtgattaatcattgtcattaaacagaaagccattttgtcttagaagaaagtcacatcatgtttggagagttaagcacaccaaagtcaggaaat

SEQ ID NO: 311548 - DNA, 201 bp, Homo sapiens
taaaatattcatttcaataaaccatgctgtaagcatgttgtaagcagatgtgcctatataaacaggctttgctgctccatttatagaacacaggcaaagtygatttagcatcattttaagcaccctagcatttttggaatggtaagtgagcattgacttcaacttaaagtcaccagctgcattagtccctaaaaagagtca

SEQ ID NO: 311549 - DNA, 201 bp, Homo sapiens
acctcggcctcccaaagtgctgggattacaggcgtgagccaccgcgcccggccaatgaagtcctattttcacacttcctttgaggactacagtaatgttaycaggagacaagcagtttctgcacctcctctgccttgacccaagtacattccaatagacgtcatgaggtgacaaactgtgggtgcccatgttgagcactgc

SEQ ID NO: 311550 - DNA, 201 bp, Homo sapiens
tgggagcaaacagaggtgaagtgatggaggggtgtttttcttttaaaaacctttcaatctatttgatttggttttttgtttgtttgtttgtttgtttttgttttttgttttgagatagagtcttactctgttgcccaggctggagtgcagtggcaccatctcagctcactgcaacctccacttcccaggtgcaggcacttc

SEQ ID NO: 311551 - DNA, 201 bp, Homo sapiens
tttgtatggatttgtgtcatttccctgaagttcaacataatgctcaaacaggagggctctgctgtggggcaggcctgggttcacattcaggctctgccaaytactgagtgagcttggaccaacgatttaattaagattccattttctcatctagaaaatgagatcaagtaagtacgaccctgcacagtatccatcactata

SEQ ID NO: 311552 - DNA, 201 bp, Homo sapiens
tcggtgttcagaattcacatggccttttgcatttagatttttttttactttttttatttgtttttttaacattttgaggatgtggggcatggtggcacacrcctgtagtcccagctacttgggaggctgaggtgggaggatcacttgagcccaggagtccaagaccagcctggaaaacataatgagaccccatctctaaaa

SEQ ID NO: 311553 - DNA, 201 bp, Homo sapiens
attcaattacttcccacagggtccctcccatgacacatggagattattacaattcaaggtgagacttgtgtaagcgcacagagccaaaccatatcaatgcrgtaatcagtttaactgatatatacctgatcttttccaaaaaggatctaatgatgtattttattaattatgcccagataatttctcattttctgcaggaaa

SEQ ID NO: 311554 - DNA, 201 bp, Homo sapiens
tacaatgtggtagtcttctagttctttattccgtaaaagacagagggcatgacatgttcaattcaacgcaacgcaacgcaacaaaaatgtatctgctgcartggtggggatacgagagtatgatgtagccccaggccctgggggactttggtgtggatctcgcagtactcagtgaaacttactataaaaggccttattcaa

SEQ ID NO: 311555 - DNA, 201 bp, Homo sapiens
tggcacttcataaaatgtgtgtatctattaaagtaagattttattcatattcacgaggaacctctgaaagggtggaataaaacaaaatgcatggaaacagrctcaaatctggcaccatgaaaacacagatgtgcaggttaagcccaagattttgggagacatgccccccaaacctgccctcaaataagtttttttttcttt

SEQ ID NO: 311556 - DNA, 201 bp, Homo sapiens
acgctgttcactcattcttcattcagcctctccgtgaaaggttatcaattaagttagatagaacaaataagccccactattcaatggcaatgtagagcgaygatggttaacagcaatgtgttgtatatttcaaagtagctagaagacttgaaatgttcccaacacatagcaataatagacagtcaaggcaatggctacccc

SEQ ID NO: 311557 - DNA, 201 bp, Homo sapiens
ttattcgtctgccttttttttttttttcatccatcctctgcacccaggcacgtcagtaagacatttacacaggttcattgacaagtacaaaatctggggarggaagagaaaaggaactcttaagagtgcgttttcagcactttgcctttttttctattaaaaacaatgtaaactattagataataggaagaacacctccag

SEQ ID NO: 311558 - DNA, 201 bp, Homo sapiens
atggagatagtccctacatttacatccttttctccagtagaacttggaataattagattaacctcaagttggatataagcaggcaacttcagagcgaatcraagctgctggtagaaggcagctcatggcatgtaaggcaggagggaagggagagctggagaggatgagtttactgggagaatagaaagctctcaaggatgg

SEQ ID NO: 311559 - DNA, 201 bp, Homo sapiens
aaatttaatttatttaataatttaaaatggtggtgcacacctgtagactcagctactcaggaggctaaggtgggtgatcacttgggctcaggaggttgagrctgcagtgacttctcctttctcctgtagtgataatacaatttgtcagtcattcagtaaacttacatttaaagtacatttatcatcatgttattactctgc

SEQ ID NO: 311560 - DNA, 201 bp, Homo sapiens
tattgttagaatcaagggattgcaacatcacagcattcttgcttggtcatgaagcagactgccggaatgtatcggctttggttcctttaatgtgggtctgyaatgaggctgggagacaagtggctggttctgtttcttgttttgcctctgtgtcattctatcatgatggtcactatgtaacaatccattttgtttgtttgt

SEQ ID NO: 311561 - DNA, 201 bp, Homo sapiens
tgtgaatatctggtgatatatgaacaaaaacagcaaaacatctgtaaattcagaatatcctttgatttttctccttttgacatcaattcccataagaagaraatcactggttttatctaacttagtggaccactttcaggatgagctagtgtgtgaagcctctctccttgtctgcctgtgccccctccaaccatccatggt

SEQ ID NO: 311562 - DNA, 201 bp, Homo sapiens
cgagagcttcactgaccctggctctgcatcaacttccactttggctccatgcagcttaaaagactgagggactcaattacaagtcacatctcacatcaacsagtgattggaaaacgaggaatactggaatcaattcacctgtccttattatctgagctggtatcaaatgctcagagttttgaaaaaaatcaattcgagcca

SEQ ID NO: 311563 - DNA, 201 bp, Homo sapiens
agcctgggtaacaagagcgaaaccccatctcaaaaaaaaaaaaaatcagcaaatacaacagagacaggtagaacagctctggtggaagcaagggacagtgygagagcttcactgaccctggctctgcatcaacttccactttggctccatgcagcttaaaagactgagggactcaattacaagtcacatctcacatcaacg

SEQ ID NO: 311564 - DNA, 201 bp, Homo sapiens
agctagtaaagaggatgaaaaggaataaaggaaactccaaacttgattaattcaatagtagacacaaaataagaaacaggcagccttattatatttgtackacacataatgaaacagacacctgagatgttcagtaacatgcccaaggtcaagcagcatgtaagtggtggatctagtatttaaatcaaagttccacgccag

SEQ ID NO: 311565 - DNA, 201 bp, Homo sapiens
ttatttgtatgtttcacacagcaccttaactacagagaagtcagctgaaaagtttcagggagtagaggaagacctgatcccgctggactgactcagacacrtaggatccccgccttggcctctattctcaccagtcagacaaggagaggtgctatggaggtttagagggattcttatgccatcatccggaactattaccag

SEQ ID NO: 311566 - DNA, 201 bp, Homo sapiens
gccgtccccatccccgcgagccacggggagccgcttctgcgagcccggcagggccccagagacccccgcgtgctgctctggaggcctccttcttcctgggyctcctcttgactcctccagggcgggcttcaagttttgtttttaaaaagcacactgaggggttttgaaggcagctaggaaataaagtagctcaagtggaca

SEQ ID NO: 311567 - DNA, 201 bp, Homo sapiens
tatgaaaaatctcattattttaataattttatcatttttctgtattcattctcataccagctctagactatccctggactataactatccctgattggtcrccttacgtcaatcttttattattattattattatttgtttgtagggacagggtcttgctctgtcacccaggctggagtgcagtggtgcaattatgactca

SEQ ID NO: 311568 - DNA, 201 bp, Homo sapiens
aaaaaaaaaattaaacctacaaaaaccccaccaaaatttaatacaataccgcaacctatcccccactaataattagccctaatccttcataaataggtgayggctttgaagaaaattccacaaagcctacaacaagaataaaacttaataaaaataaaaatatggaatggggtaatcgagaaaagagtaggatcactggac

SEQ ID NO: 311569 - DNA, 201 bp, Homo sapiens
cccgagttcccagcgtccccccgtgtcctccggccggtagctcgctcctgcagcgtcccgccggcgcccagccgtccccatccccgcgagccacggggagycgcttctgcgagcccggcagggccccagagacccccgcgtgctgctctggaggcctccttcttcctgggcctcctcttgactcctccagggcgggcttca

SEQ ID NO: 311570 - DNA, 201 bp, Homo sapiens
caaagatgcacatctttattcttatagctctttcaaaggtatattagaaaatggacagtctgaccagggcctacttgagggtggagggcgggaggagggtraggatcaaaaaactatgtatcaggtgctatggttattacctgggtgatgaaataatctgtacacctaacccctgcgacatgcaattttcccaaacaaacc

SEQ ID NO: 311571 - DNA, 201 bp, Homo sapiens
caacagaaatttctttctcatggttctagagtctgggaattcccagatcaaggcgctggcagattcagtgtgtggtgagggcccacttgcagacgagatcrggcgtgttctaggtggtatggccatagacgaggtcccactttcatgtccatagatggtgccttcttgctgtgtcctcacttggtggaaggggcaagcaag

SEQ ID NO: 311572 - DNA, 201 bp, Homo sapiens
atttgcccttcaagtcttccactttctatttcacatcaattgccttttccccttagctctatattatgcctaatgatattgttaataattttttgcttaargtttcttacatttttcctagcatttgcatatatcagtaatttgttggctccttatgtaactttgagaagtgggtaaggtgctgtcttagtccgtatgggc

SEQ ID NO: 311573 - DNA, 201 bp, Homo sapiens
ttaaacaaccagatacaacaccaccaaggggcatgatgatgctaaaccattcatgagacccacccccgtgatccagtcacctcccaccaggccccgcctckagcactgagaattacacttcaacatgagatttgtgcagggacacagatccaaaccatatcacagtgttcttaggggagaggtagaggaatgccttgagag

SEQ ID NO: 311574 - DNA, 201 bp, Homo sapiens
tctgatgaaagcagttcaatcaatttatgggcaaaggagccagacagggaacagagttcatatagccctccctcctgttccctcttccctgccaccctgaytcagtcaaacttcttctcctccctcccttacaaaacagaagctctcatgctcatcagccaatgaccagaaatatttgatggggacagagggagagaagag

SEQ ID NO: 311575 - DNA, 201 bp, Homo sapiens
tctaaccaaatgaattgcccaaccctggctacattcagacctgttgttttgataatcagctcatgacagctgattcctgtccttaggacaataaatcgccrctgcccattctcctctaattgtgcagcagctcatcagcagagatgagcccgagctcactgcagccgtggaccctcagaattcacaggctgtcaccagctg

SEQ ID NO: 311576 - DNA, 201 bp, Homo sapiens
gctcaagtgatttggcctcccaaagtgctggaattacaagcatgagctactgtgcctggctgacagctacctttttaaaaagtttttttatattttatctrctttttgagacagggtctctttctgtcacctaggctggagtgcaatagtgcaatcaaggctcactgcagccttcaactcctgggctacaacaatcctccc

SEQ ID NO: 311577 - DNA, 201 bp, Homo sapiens
acaagcatgagctactgtgcctggctgacagctacctttttaaaaagtttttttatattttatctgctttttgagacagggtctctttctgtcacctaggytggagtgcaatagtgcaatcaaggctcactgcagccttcaactcctgggctacaacaatcctcccacctcagcctcccaagtagctgggactacaggcag

SEQ ID NO: 311578 - DNA, 201 bp, Homo sapiens
gcctcagcctcccaaagtgcctgcctctgcaggcatgagccaccaccctcagcctcaaggcaatttttaaaaagaacaaaaagtagacttgccctatcaartattaaaacatactaaaaagctctgataagtccaggcgtggtggcttacacctataatcctagcactttgggaagccaaggcaggaggattgctggcagc

SEQ ID NO: 311579 - DNA, 201 bp, Homo sapiens
aacttaaatgcccattacagccctggggaagggtttttggtcttatggagtgagtttgttagcatttacattatagttgctgccttaggatagtaggctgmtacaatgacttctttgggtagccattttcataagaaataaaatacaagatatgagtaaggttaaaaaaaaaaaagataaaggccttcatatgacccacgc

SEQ ID NO: 311580 - DNA, 201 bp, Homo sapiens
ttgcttgaatccggaaggtggaggttgcagcaatccaagattgcaccattgcactccaggcaacaagagtgaaactccttcttaaaaataaataaataaataaataaataaataaataaataaacaaaaaaaatgagtataaactggaccagctgccaaggggcttggtgcttgcatgagagcccacaaaggtgggaaata

SEQ ID NO: 311581 - DNA, 201 bp, Homo sapiens
aacgtggtgaaaccccatctctactaaaaatacaagaatgagctgggcatggtggcccatgcctgtattcccagctactcaggaggctgaggcaggagaaycacttgaaccaggaggcagaggctgcagggagctgagattgtgccactgcactccagcctgggtgacagagcaagactccgtctcaaaaaaaaaaaaaaa

SEQ ID NO: 311582 - DNA, 201 bp, Homo sapiens; identical to SEQ ID NO: 64998

SEQ ID NO: 311583 - DNA, 201 bp, Homo sapiens
gcctgggcaacgtggcaaaaccccatctctacaaaaaacacataaaaattagctgggcatggtggcacacacctgtggtcccagctactcaggggactgargctggacaatcagttgaacctgggaggcagggttgcagtgagcagagatcgcaccactgcactccagactgggtgacagtgcgggaccctgtctcagaga

SEQ ID NO: 311584 - DNA, 201 bp, Homo sapiens
cactccagcctgggcaatagtgcaagactctgtctcaacaaaaaaaaaaagaaaaaaaagaaaaaaaaatactaaagacagatgtcaagaagacagaacawactttatgtactatttattataaaataccaggcacttttctaagtgcttaatgcgtactaattcatttagtcctccctatgctcctatgaagtaggaacc

SEQ ID NO: 311585 - DNA, 201 bp, Homo sapiens
ctcactgtgtgacttctgatgtctgtgaggtttatttttctcttgtttttatttttaagcctcacttactagggatcaccctgtgtttgaatagcttagtrtttggcctacaattggttagaagttgtgctcaaatacgtcaagccagtaagtcttccactctctgctgatgggggtgtgtggggacttgaaagtagattc

SEQ ID NO: 311586 - DNA, 201 bp, Homo sapiens
ccggctaatttttgtatttttagtagagattgggtttcaccgtgttggccaggctgatcttgaactcctgacctcaagagatctgcccacctcactgtgtracttctgatgtctgtgaggtttatttttctcttgtttttatttttaagcctcacttactagggatcaccctgtgtttgaatagcttagtgtttggcctac

SEQ ID NO: 311587 - DNA, 201 bp, Homo sapiens
tttgacactttgtttttaggagcatatatattaggaattgttatgtctctttggataatcgacctccttattattgtgtaatgatgctctttatccctgcrtattcctcactcagaagtctgctctgtctgaaattaaaatagctactccaactttcttttgattaatgttagcatggcatgtcttactccatccatttaa

SEQ ID NO: 311588 - DNA, 201 bp, Homo sapiens
cccacaggttggcctgcactgtaggcaatttgaaattcacatttggaattctggagagtgattggagagatttggaagtcatcagcaaaaagaataatatktaatgttcgggagtgctcagtgaatatggaaaaaacaattaaagcaactgttaaggatggaagcctggaaagtcccaaatataagaggctgcctgtgggg

SEQ ID NO: 311589 - DNA, 201 bp, Homo sapiens
gaaagaaagaaagaaggaaggaaggaaagaaaagaaagaaagaaagaaagagatagagagagagaaagaaagagagaaaggaaggaaggagggagggaggragggaggaagaaaggaaagaaagaaagaagaaggaaggaaagaaagaaaggggaaagaaagagggaagaaagaaagatggaaagaaagaaaggaaggaaa

SEQ ID NO: 311590 - DNA, 201 bp, Homo sapiens
acaggatagagggtaattggaggagaaggggggagtgatgcttttgctcaggtggtcagggcagcctctctgcggtgacctttgagccaagatctgaaggrtacacaggagtagccatgtggactgcaggcagagacccgcataccaaatgcaaaagaatcattgtatccgatttatgcttttacaaaaaccattccagtt

SEQ ID NO: 311591 - DNA, 201 bp, Homo sapiens
gtggaatattgacttttcctgtaaactagagtgattgttgaggttcttttgtttacaagtagtgaattctttattaaattcccacaagctaaaatggtggwtttatagaaaggagttgacctgatccccaagataaaaatgcagccagacctggaaaaatatcaggaactccatgctcatgttctaccacagatcttctac

SEQ ID NO: 311592 - DNA, 201 bp, Homo sapiens
gggccccagagacccccgcgtgctgctctggaggcctccttcttcctgggcctcctcttgactcctccagggcgggcttcaagttttgtttttaaaaagcrcactgaggggttttgaaggcagctaggaaataaagtagctcaagtggacagagcttgagatttgaagcctttggtacccaggttgggggctctctggcag

SEQ ID NO: 311593 - DNA, 201 bp, Homo sapiens
tattacccaggctggtctcacactcttgggctcaagtgatcctcccacttcagcctcccaaagtgttgggattacaggcatgagccaatgtgccaggcctyaaatgtatagttttaactaagataataacactggcatataggtttgaggcacttctttagatgaattaaaacatataatttgttgttaaatgattgatgt

SEQ ID NO: 311594 - DNA, 201 bp, Homo sapiens
agaaggcaaattaggggcaaaatcatatcttacatggtggcaggcaagagggcatatgcaggggaactctcctttataaaaccatcagatctcatgagacytattcactatcatgagaacagcatgggaaaaccccacccctgtgattcaattacttcccacagggtccctcccatgacacatggagattattacaattca

SEQ ID NO: 311595 - DNA, 201 bp, Homo sapiens
tatgagtcttacattcattatcttatttaatgctcaccatagccatatgaggcaggcactaactccatttcatagatgaatacactaagagaatttaataygcccaaggtctcatggctggcaggcttgtcccaggtgtgtgagatttccatgtccatgctcttaacacactactctgtgtggcctctgggctatggatcc

SEQ ID NO: 311596 - DNA, 201 bp, Homo sapiens
gctaggaaagggaaatcacccaactccttgtgcttccaggtgaggcaatgccccaccccacttcggcttgccccctatgggccgcacccactgtccaaccmgtcccaataagatgaaccagctacctcagttggaaatgcagaaatcacccatcttctgcatcaatcatgctgggagctgcagactggagctgttcctatt

SEQ ID NO: 311597 - DNA, 201 bp, Homo sapiens
cacctactcgaagacttgcaggagccctttcgtactttacacctgatggaaatgcatgattgtgcagatgtctttgaggggggacatctcaataaagatawacattaatgtgacctgctcctcacaagtgggtcattcccacagactagcttttgtcagcttcataataagaatatttgcaagtctgagattccttgtgtg

SEQ ID NO: 311598 - DNA, 201 bp, Homo sapiens
gtcccagctaccggggaggctgaggtgggagaagcacctgagcccaggaagtcaaggctgcagtgagccatgatcgtgccactgcattccagcctgggtgkcagagtgagaccccatctgaaaaaaggggcagagggcaggtaataatagcaagcatttcttgagcacaaatctgtaagggaggtctagtgtgctccccat

SEQ ID NO: 311599 - DNA, 201 bp, Homo sapiens
atacttgttagctattcataagccttctttggagagaggtcttttcaagtcttttgccaatttttaaattcaattgttcatcttcttattgaactataagwgttctttatatattttggataatagtcctttatcagatatatgatttgcaaatatttactcccagcctatggtttgtcttactattttcttactggtatc

SEQ ID NO: 311600 - DNA, 201 bp, Homo sapiens
ataaggggtaatggatattttttaaataaaaagatagcttatagccacatatgtattaaaagttctacaatatctctttcttacctttgagttagatagtycccttttttttgagatgaaagtctcactgtgttgctcaggctggagtgcaatgacacaatcatgactcactgcagccttgaattgctgtactcaggcaat

SEQ ID NO: 311601 - DNA, 201 bp, Homo sapiens
tactattctaaccgtaaaactagcacatcaagtcctaagcgagagggagacttactatcagtccatccactatgtgaataggccaattttctggatcatcmgtttctaataggacggtttaagtgtctaacatagtacatccttttaaagtctttactatagtgactagacattcaaaagtttgggtctactctgatccca

SEQ ID NO: 311602 - DNA, 201 bp, Homo sapiens
atctgccacctcctccgccaatccctgctgcagttcctgcttttcctggttctccctgagaagcctcttctaggatccttagtgaagcctttgctgatggygccttttgagggagtgcccatataagtgccaagggctgcccaaagctgccaggcagggctagctttctcacagaggcaggcgaccctgaacagttctgaa

SEQ ID NO: 311603 - DNA, 201 bp, Homo sapiens
cctcctgcctcagcctcccaagtagctgggattataagcatgcaccaccacacctggctaattttttgtatttttagtagagatggggtttcaccatgttrgccaggatggtcttgatctcctgacctgaagggatctgcctgccttggcctcccaaagtgctgggattataggtgtaagccataaagtgagcttcttgtg

SEQ ID NO: 311604 - DNA, 201 bp, Homo sapiens
tactgaaatttctaacaccaattgtcattttctatgtagcttcaacccttggcataactggtcagtaaatacaaaattgggtccttttatgactatgcccraagtacattggatttgggtttaactcttcccaccttcctgagaatttctcagggttcccaaatgggtcctcccttgcatccacaaatgagcctgtcagct

SEQ ID NO: 311605 - DNA, 201 bp, Homo sapiens
gagtattgatataatgtttagtatctatcgtatttataactattttctattcattgctgttgttgtttccttttttgtcttccactctgtgaaattctactttttttttttttttttttgagtcagagtttcactcttatcacccagactggagtgcaatagcacagtctgggcttactgcaacctccgcctcctgggttc

SEQ ID NO: 311606 - DNA, 201 bp, Homo sapiens
aggtgaccattttagcttacagtgttccctatcaggtgagctccctctggcagtgcaccaccttggtggaactgcctgtttgaacaacagagctggggatrggggctggggggtaataagagcatccccacacaagaatgccccagactcatgctgtttccacccagtgttcagggttttcagaattaaatgcttctcagt

SEQ ID NO: 311607 - DNA, 201 bp, Homo sapiens
cggcagcttccagatcatgggtagattaaaagaagttctgattggcaattggttgcaagggttattatcaatagaaaggaatgtctgggttatgataaggrgttgtggaggaagccaaggtttaatcatgcagatgaagccttcaggtagcaggcttcagagagaatagattgtaaatgtttcttatcagacctaaggggt

SEQ ID NO: 311608 - DNA, 201 bp, Homo sapiens
tataaactgcattatgttaagggtatatatcctgtatatgtaaggatatatacccatactcagtggagtttcatgatatatcatgaattttacagcaaatkaaatttacatgatcacaagaagaataaatcgattctgaataagttactgaaatttctaacaccaattgtcattttctatgtagcttcaacccttggcata

SEQ ID NO: 311609 - DNA, 201 bp, Homo sapiens
ctttttcagcaattttatttgcaagtgttcaaatagctgaaatataacagaaaacattgtctttactctttggtcatttaaaaatcttgggtcctgtgccrggtgcaatagctcacgcctgtaggatcccagcactttgggaggctgaggcaggcagatcacagggtcaagagatagagtccattctggccaacatggtga

SEQ ID NO: 311610 - DNA, 201 bp, Homo sapiens
attgcttgagcccaggagttcaagatcagcctgggcaacataatgagatcctgtttcttaaaaaaaaaatagaactaccatatgatccagcaatcccactrctgggcatttatccaaaggaaacaaaatcagtatgtcaaagggatacctgctctcccatgtttattgcagcatgactcactataatagccaaactaagtg

SEQ ID NO: 311611 - DNA, 201 bp, Homo sapiens
agtgttcaaatagctgaaatataacagaaaacattgtctttactctttggtcatttaaaaatcttgggtcctgtgccgggtgcaatagctcacgcctgtargatcccagcactttgggaggctgaggcaggcagatcacagggtcaagagatagagtccattctggccaacatggtgaaacctcacctctactaaaagcac

SEQ ID NO: 311612 - DNA, 201 bp, Homo sapiens
gtgttcaaatagctgaaatataacagaaaacattgtctttactctttggtcatttaaaaatcttgggtcctgtgccgggtgcaatagctcacgcctgtaggatcccagcactttgggaggctgaggcaggcagatcacagggtcaagagatagagtccattctggccaacatggtgaaacctcacctctactaaaagcaca

SEQ ID NO: 311613 - DNA, 201 bp, Homo sapiens
gattattttttctgtttctatgaagaatgtcactcgtatacgaatggtcaataggtacatgaaaaaatgcccaatgtcatcaatcttcagggaaatgcaartcaaaaccagatgggataccacttcacacccgctagaagggctattatgaaaaagacaaaaaaaaaatcacaaatgctgatgaggatggagagaagggag

SEQ ID NO: 311614 - DNA, 201 bp, Homo sapiens
tagaaacgctgaaacatctgtcttattcctatgtgtactgaaacaaagagtattgacagtcctgttttctctttgacttttggtttttaagaggtatttaygatgggctttcagcagggcatggatgaagaaacttggcatgaaacaaatatctagtttggcctaaaaagagatcatctagcattgctctaggcaagttta

SEQ ID NO: 311615 - DNA, 201 bp, Homo sapiens
aagctctttagtttaattagatcccatttgtctattttggcttttgttgctgttagtctgatgggcttccctttgtgggtaacccaacctttctctctggstgcccttaacattttttccttcatttcaaccttgatgaatctgacaattatgtgtcttggggttgctcttctcgaggagtatctttgtggtgttctctgt

SEQ ID NO: 311616 - DNA, 201 bp, Homo sapiens
tctgtatttcctgaatttgaatgttggcctgccttgctaggttggggaagttctcctgggtaatatcctgaagagtgttttctaacttggtttcattctcyccatcactttcaggtacaccaatcaaacatagatttggtcttttcacatagtcctatatttcttggagactgtgttcgtttcttttcactcttttttctc

SEQ ID NO: 311617 - DNA, 201 bp, Homo sapiens
ggtctcaaactctggttttaagagaactgcccacctcagcctcccagagtgctgagattacaggtgtgagccactgcgcacagcctcagctcttcttttcmatcagtcacctttctgtttaaattagttcaaatggagttcttgtcacttgcagctgagaaaatcctgaattggacacttatcaaaaaaaagtactttaca

SEQ ID NO: 311618 - DNA, 201 bp, Homo sapiens
tgggaggctgaggcaggcagatcacagggtcaagagatagagtccattctggccaacatggtgaaacctcacctctactaaaagcacaaaaattagctggrcgtggtggtgtacacctgtagtcccagctactcgggaggctgaggcaggagaatctcttgaacccaggaggtggaggttgcagtgagccaagactgcgcc

SEQ ID NO: 311619 - DNA, 201 bp, Homo sapiens
cattttaagcaccctagcatttttggaatggtaagtgagcattgacttcaacttaaagtcaccagctgcattagtccctaaaaagagtcagtctagggggsgtcacagtgactcacacctctaatcccagcactttgggaggccaagccagcggatcacctgaggtcaggagttcaagaccagcctggccaacagggtgaa

SEQ ID NO: 311620 - DNA, 201 bp, Homo sapiens
ctttgggaggctgaggcaggcagatcacagggtcaagagatagagtccattctggccaacatggtgaaacctcacctctactaaaagcacaaaaattagcwggacgtggtggtgtacacctgtagtcccagctactcgggaggctgaggcaggagaatctcttgaacccaggaggtggaggttgcagtgagccaagactgc

SEQ ID NO: 311621 - DNA, 201 bp, Homo sapiens
tccatttatagaacacaggcaaagttgatttagcatcattttaagcaccctagcatttttggaatggtaagtgagcattgacttcaacttaaagtcaccarctgcattagtccctaaaaagagtcagtctagggggcgtcacagtgactcacacctctaatcccagcactttgggaggccaagccagcggatcacctgagg

SEQ ID NO: 311622 - DNA, 201 bp, Homo sapiens
tatttcgttggaatgtttcagtaaggtcaggttatgggcattgagaaaggctctacactgctagattagacccccacctaattactgaggtgctaagggcrtcatgaaatttcagtaggaggtgagataaagctaaatggcctttctcaatgtagagggtaaaatctggaatgagaacatttgaaatctaaacttattgcc

SEQ ID NO: 311623 - DNA, 201 bp, Homo sapiens
agaaataggtgtacagtccttaagcagtcttgaaaaaaagtacttagctgctggggatgctaaggtgggaagatcacttgagcctgggaggtggaggttgyaaaaaaaaaaaaaaaattacctaactctctaggcatctgtctccttagcaggaagatggagatcagggtgcctgatttggtaattttttttaaattttct

SEQ ID NO: 311624 - DNA, 201 bp, Homo sapiens
cctgaatagctgggaccacaagcatgtgccaccatacccggctaattttttgtatttttagtagagacagggtttcaccatgttagccaggatggtctcartctcctgacctcgtgatccacctgcctgggcctcccaaagtgctgggattacaggtatgagccaccatgcctggcccatgaaaacactttttatacaaag

SEQ ID NO: 311625 - DNA, 201 bp, Homo sapiens
tactcaggggactgaggctggacaatcagttgaacctgggaggcagggttgcagtgagcagagatcgcaccactgcactccagactgggtgacagtgcggraccctgtctcagagagagaaaaaaaaaaaaaaagaatgggaaactggaatacagctagagtatgatctgagtgtgtaacacttcattgttacatcttttc

SEQ ID NO: 311626 - DNA, 201 bp, Homo sapiens
gacagagaaagactctgtctcaaagtctcaaacaaaacaaaacaaatattttatgatgccaatagttgggaatggagtgctctgttcactttagtactgcrccttgtatcaggttgtggaaacaaataaccttgttccactaaacttttcataagttgagggaattctcctctcaagtgatactcttttgttatgttttaa

SEQ ID NO: 311627 - DNA, 201 bp, Homo sapiens
tttctaacttggtttcattctccccatcactttcaggtacaccaatcaaacatagatttggtcttttcacatagtcctatatttcttggagactgtgttcrtttcttttcactcttttttctctaatcttgtcttctcactttatttcattaatttgatcttcaatcactgatatcgtttcttctacttgatcgaatcagc

SEQ ID NO: 311628 - DNA, 201 bp, Homo sapiens
aggatacatgtgcaggacgtgcaggtttgttacataggtaaatgtgtgccatggtgatttgctgcatctatcaacccatcacctaggtattaagccccacatgtgttagctatttatcctgatgctgtcgccgcatcttccatccccaacaggacctagtgtgtgttgttcccctccttgtgtccatgtgttctcattgtt

SEQ ID NO: 311629 - DNA, 201 bp, Homo sapiens
ctgaggcaggagaatctcttgaacccaggaggtggaggttgcagtgagccaagactgcgccactgcactccagcctggtgacagagcaagactctgtctcaaaaaaaaaaaaaaaaaaattgggtcccgcaatatcacttcaatactcttttgcaaacagttgggtatttcctttgaagctacagattttttccatgttag

SEQ ID NO: 311630 - DNA, 201 bp, Homo sapiens
ggatacatgtgcaggacgtgcaggtttgttacataggtaaatgtgtgccatggtgatttgctgcatctatcaacccatcacctaggtattaagccccacatgtgttagctatttatcctgatgctgtcgccgcatcttccatccccaacaggacctagtgtgtgttgttcccctccttgtgtccatgtgttctcattgttc

SEQ ID NO: 311631 - DNA, 201 bp, Homo sapiens
atagtttcttttgctgtgtggaagctcttcagtttaattagatcccatttgtcaatttgtgcttttgttgcaattgcttttgatgtttttgtcatgaaatyttggcccatgcctatgtcctgactggtattgcctagattttctcctagagtttttatagttttgggttttccatttaagtctttaatccatctggagtta

SEQ ID NO: 311632 - DNA, 201 bp, Homo sapiens
aaacaaaccaacaaacaaaacaaaacaaaaaaacactaactggttgtggtggcactcgcctgtagtcccagctacttgggaggcctaaacagaaggattgyttgagtgcaggagctcaaggctgcaatgtgctatgattgcgtcactgcactcctgcccaggcaacagaacaagaccctgccaagagaaagaaagagagaa

SEQ ID NO: 311633 - DNA, 201 bp, Homo sapiens
tgtgaaaccccatttcttaaaataaaaataaaataaaataaaaaagatattaaccacacatatttgatttgcattctccactaaaatgacatggatatatataatatgatatgatatgatatgatatagttaaaagtgacctcatatgacaaactggacaagagagaagacagcaggtccagagaacatgaatgtaatggc

SEQ ID NO: 311634 - DNA, 201 bp, Homo sapiens
tgaggcagtagaatcacttgaacccaagaggcagaggttgcagtgagccaagatcgcgccattgcactccagcctgggcaatagagtgagacttcatcacaaaaaaaaagagaaatgtaaaaaacaaggtatgcctatactgcaaaagagactgttctaaattaaaagagaagggaagatccaatccatggtataggttgg

SEQ ID NO: 311635 - DNA, 201 bp, Homo sapiens
cacccagcaggcaatttcttataaagtaaacccacacttatcaatgtgatctacaatcatactctcctatgtatttatccaaatgaaatgaaaacaggtttttgtttgtttgtttgttttgttttttttgagatggagtcttgctctgtcacccaggctggagtgcggtgacgtgatcttggctcactgcaaactccgcct

SEQ ID NO: 311636 - DNA, 201 bp, Homo sapiens
acccagcaggcaatttcttataaagtaaacccacacttatcaatgtgatctacaatcatactctcctatgtatttatccaaatgaaatgaaaacaggtttttgtttgtttgtttgttttgttttttttgagatggagtcttgctctgtcacccaggctggagtgcggtgacgtgatcttggctcactgcaaactccgcctc

SEQ ID NO: 311637 - DNA, 201 bp, Homo sapiens
acttttctggttttcaagcattttataatgttttatatttatatattatagaaagtacaaactttctttgacaggtatatatttatatgtaaggaaatatrtgcactttctataataagaatgaatacacggctgggcgcagtggctcatgcctgtaatcctagcactctgggaggctgaggagggaggatcacttgaggc

SEQ ID NO: 311638 - DNA, 201 bp, Homo sapiens
cccagcaggcaatttcttataaagtaaacccacacttatcaatgtgatctacaatcatactctcctatgtatttatccaaatgaaatgaaaacaggtttttgtttgtttgtttgttttgttttttttgagatggagtcttgctctgtcacccaggctggagtgcggtgacgtgatcttggctcactgcaaactccgcctcc

SEQ ID NO: 311639 - DNA, 201 bp, Homo sapiens
ccagcaggcaatttcttataaagtaaacccacacttatcaatgtgatctacaatcatactctcctatgtatttatccaaatgaaatgaaaacaggtttttgtttgtttgtttgttttgttttttttgagatggagtcttgctctgtcacccaggctggagtgcggtgacgtgatcttggctcactgcaaactccgcctcct

SEQ ID NO: 311640 - DNA, 201 bp, Homo sapiens
gactacaggtgcacaccactgtgcctggctaattttttttttttttgtacttctagacacaaagggtcttcatgttgtccaggctggtttaaaactcctgygctcaagtgatccacccacctcggccttccaaagtgctgggattacaggcatgtgacaccacacctggctagcatagacttttgtacataatgacttgaa

SEQ ID NO: 311641 - DNA, 201 bp, Homo sapiens
cctgatcccgctggactgactcagacacataggatccccgccttggcctctattctcaccagtcagacaaggagaggtgctatggaggtttagagggattsttatgccatcatccggaactattaccagacaacgcacaatggtgacctttagcaagcctgaattgtaacgcacagaaggggaaatctaagacagctcccc

SEQ ID NO: 311642 - DNA, 201 bp, Homo sapiens
tggcccaggatatattttatattgcggaaactatcaccattgtaatccatgtcaaactaaatactactatttctttctaatttctcataccttttccttgygtatttctctaaacagcacctcttaagggtgaccactgaaaaaataggaatgttatttataatttttcagctagtaaagaggatgaaaaggaataaagga

SEQ ID NO: 311643 - DNA, 201 bp, Homo sapiens
aagatatacattaatgtgacctgctcctcacaagtgggtcattcccacagactagcttttgtcagcttcataataagaatatttgcaagtctgagattccytgtgtgtgtgtgtgtgtgtgtgtgtgtgtgtattacattttagatgaaagagaatcttagtggtataaatgtgcagcccactcagggccggtactgaaac

SEQ ID NO: 311644 - DNA, 201 bp, Homo sapiens
aaaatggagatgaaaatgaagggtaattttaatttgcaagaatacggcaacctaacataagaattcaaatgatactatttagggcgtggggtggggacctkctctctattttcacatatatgggaagactcagcagtaatgatttgtgctttcttttatggtgataaagtgagtggttatatcctggtgcccagccccaca

SEQ ID NO: 311645 - DNA, 201 bp, Homo sapiens
gatatacattaatgtgacctgctcctcacaagtgggtcattcccacagactagcttttgtcagcttcataataagaatatttgcaagtctgagattccttgtgtgtgtgtgtgtgtgtgtgtgtgtgtgtattacattttagatgaaagagaatcttagtggtataaatgtgcagcccactcagggccggtactgaaacaa

SEQ ID NO: 311646 - DNA, 201 bp, Homo sapiens
gagagggagacccgaagccatctgtgttcctggttctattatagagtgccactgtcacttgaactgccttcctaagcctgctggtccaactcttcattccttttttttttttttttttgagacagggtctcattctgtcacccgggccggagtacagtggcacaatcatggctcactgcagcctcgacctcccaggctcaa

SEQ ID NO: 311647 - DNA, 201 bp, Homo sapiens
ttggaatctccagaaccttgaacagtggtgctctttatcacaaggagacaaactgagaattcaggttggagttcaggttttcaggtagccggaagatggaractgtgtcatccattcattcatttaacatttttgagcactataccatattccagatcagcattctgggcactgagggattcaacaatgaatcagaaaaag

SEQ ID NO: 311648 - DNA, 201 bp, Homo sapiens
ttcctaattaaagacttggggaagcaccctctagaagagcagtccccgacctttttgtcaccggggaccagttttgtggaagacagcttttccatggactrgggaagggttgggggatggtttccagatgaaactcttccacctcagatcatcaggcattagttagattctcgtaaggaacatgcaacctagatccctcgc

SEQ ID NO: 311649 - DNA, 201 bp, Homo sapiens
caccctctagaagagcagtccccgacctttttgtcaccggggaccagttttgtggaagacagcttttccatggactagggaagggttgggggatggtttcsagatgaaactcttccacctcagatcatcaggcattagttagattctcgtaaggaacatgcaacctagatccctcgcatgcacagttcgccatagggttgt

SEQ ID NO: 311650 - DNA, 201 bp, Homo sapiens
tccaagggacaggagccttctcaaggatcctgcatgggagccttgggtaagacagagagctacaaggggcaccaggaatttgggaaagaagatcagaggcygggggcagtcagcaaggcctccaggaagaagtggggtgtgacctgggcttctgagttcggaatacagaggtagaggaggaaagggggagagaggatgaag

SEQ ID NO: 311651 - DNA, 201 bp, Homo sapiens
aaaaattgcatcaagggatattgatttccattttttaatcagtctccctctctagatatatggatagagaatgtgtgtatgcatgtgtatgtatttacagatatatatatatatatatatatatatatatatatatatatatatccaccccagctcttgccctcctaggtttttaggttttctttctcttctgttccagtg

SEQ ID NO: 311652 - DNA, 201 bp, Homo sapiens
aaaattgcatcaagggatattgatttccattttttaatcagtctccctctctagatatatggatagagaatgtgtgtatgcatgtgtatgtatttacagatatatatatatatatatatatatatatatatatatatatatatccaccccagctcttgccctcctaggtttttaggttttctttctcttctgttccagtgc

SEQ ID NO: 311653 - DNA, 201 bp, Homo sapiens
gtcccagctactcaggaggctgaggtgagaggatctcctgagcctgtggaggtagaggctgccgtgagccatgatcacacgcctggacaacagagtgagaycctttctcaaaaaatagccaggttcagtggcccatgcctgtaatcccagcactttgggagactgaggcggatggatcacttgaggtcaagagttcgagac

SEQ ID NO: 311654 - DNA, 201 bp, Homo sapiens
ggctgcaatgtgctatgattgcgtcactgcactcctgcccaggcaacagaacaagaccctgccaagagaaagaaagagagaaagagagagagagagagaaagagagagagagagagaacaaaagaatcagtgttttcagaaactttctgactatacatgcctatctaattattaagagatggactcatgaaaattttttca

SEQ ID NO: 311655 - DNA, 201 bp, Homo sapiens
gctgcaatgtgctatgattgcgtcactgcactcctgcccaggcaacagaacaagaccctgccaagagaaagaaagagagaaagagagagagagagagaaagagagagagagagagaacaaaagaatcagtgttttcagaaactttctgactatacatgcctatctaattattaagagatggactcatgaaaattttttcaa

SEQ ID NO: 311656 - DNA, 201 bp, Homo sapiens
cacaagggctcagccttcatgacctaatcaccccccaaagtccccacctcctagtatcatggtgattcgatttcaacatctgaatttggggcagggtcggrgaggggggtaacaaacattcagaccataacaggcaggtggtagcagcatttccattttccagatgaagtaaatgagaaatcaaatgagtttgccacagtt

SEQ ID NO: 311657 - DNA, 201 bp, Homo sapiens
ttcggctcgcagcaacctctgcctcctgggttcaagcgattctcctgcctcagcctcccgagaagctggggttacaggcatgtaccaccatgcctggctattttttttttttttttgtatttttaatagagacagggtttcctcacgttggccaggcttgtctcaaactcccgacctcaagcgatccacccgccttggcct

SEQ ID NO: 311658 - DNA, 201 bp, Homo sapiens
ttctaattcatacaagtcactgttagtcctcatttcctgagtaattttccatttttacttcattttttttttagagacagggtctagctcccttgcccaagttggagtgcagaggtgcgatcatagctcagtgcagtgtctgactcctgggctcaagcgaatctctagccacagcttcctaaattgctaggattacaggtg

SEQ ID NO: 311659 - DNA, 201 bp, Homo sapiens
  misc_feature (1)...(201): n = A,T,C or G
gtcgttggcataaggtggaaattgacactatggaagggattgactagggaatatgaaatggggttgaaggtggaggatagaatttgggatgaaatccacanaaggtgtcaggctggtgaagaggggcacatggacaggatcagtagcataggtaaaggaacaaataagagtggtctctctaaaccatggcttagtctcttt

SEQ ID NO: 311660 - DNA, 201 bp, Homo sapiens
atgttattttgtctttaagtgactcctggaactatggcaatctccttgggtcattgaaaagacaagcatatgaatgcagctaattactgaggatggcaaasgggaaggggacagagcctggatcctcgaatacaccattgagctgaggatctacatacagggtaatgagaagatacacatatatggtaattggactgtaag

SEQ ID NO: 311661 - DNA, 201 bp, Homo sapiens
cacactgcttcccagaaggagggccccattaccaccgttcactttggcaaggaactcatttttatgggttttcctttgttcatttgtaaaatgatgaggtwggatttcaagatctgtaaggtccctgacagatttgaagttatattatctttaatgtcttggaacgtctattgaaaaaggacagattggaccaggcatagt

SEQ ID NO: 311662 - DNA, 201 bp, Homo sapiens
tcttcccgcctcagcctctcaagtgctgggattacaggcatgagccactgtacctggctgtgatgtgcatttttaaaggagcatgcccgcttccatgtggrggggctgcaaagtggaagcagggaggcaagtgtagtggctcctgggacagtcctgggagaaatcatggtggcaatggactggcctgggggtgggggaaca

SEQ ID NO: 311663 - DNA, 201 bp, Homo sapiens
ggaaggcgtctttgcagaggtgacattgaatggagacttgaaagaagtagaggacagccatgtggaaatctggaggaagagtgttgcaggcaagaggaggygccagtgcaaagctcaggaggcaggggtgtgattggcagatcggaggacttgaaagagagcagctgctgaagcagagggaagaggaagagtgccaggaat

SEQ ID NO: 311664 - DNA, 201 bp, Homo sapiens
actaatcctaattcacaagggctcagccttcatgacctaatcaccccccaaagtccccacctcctagtatcatggtgattcgatttcaacatctgaatttkgggcagggtcggggaggggggtaacaaacattcagaccataacaggcaggtggtagcagcatttccattttccagatgaagtaaatgagaaatcaaatga

SEQ ID NO: 311665 - DNA, 201 bp, Homo sapiens
cctcttctaggatccttagtgaagcctttgctgatggtgccttttgagggagtgcccatataagtgccaagggctgcccaaagctgccaggcagggctagstttctcacagaggcaggcgaccctgaacagttctgaatataacctgcttctggcctttaactcctcccaggatcttacagtctctgatgaaagcagttca

SEQ ID NO: 311666 - DNA, 201 bp, Homo sapiens
cccactttcatgtccatagatggtgccttcttgctgtgtcctcacttggtggaaggggcaagcaagctctttggggtctcttttctaaaggcactaatccyaattcacaagggctcagccttcatgacctaatcaccccccaaagtccccacctcctagtatcatggtgattcgatttcaacatctgaatttggggcaggg

SEQ ID NO: 311667 - DNA, 201 bp, Homo sapiens
aatcaacatgcctacatcaaataagccatcttttcttattctgaaaaatggaaggtggttctagaaacattctgctctctgactttcttccacagtgttcrtgtctcatttgagacctggagaagtctgaacaaagaccttaagcctaaaaagtaataacaatgcataaaacacttgatatttgcccttcaagtcttccac

SEQ ID NO: 311668 - DNA, 201 bp, Homo sapiens
cctgttctaataggtgatgatatcacattgtggtttaatttgcatttccctaataaatgatgatttgaacatagttacatttgctggtttgctattcatayagcttttttgatgaagtgtttgttcaactatcttacccatttaaaaaattgggttgttttcttattattgtatttgagagttttaaaaaatatattggcc

SEQ ID NO: 311669 - DNA, 201 bp, Homo sapiens
tattatccccattttacatgtaaggaaagtgatccacagacagtttaagatagagctggccgagaatggggctaagatgtaaaactacacaggctgattcragagcatggaggccacagtctttccacactgcttcccagaaggagggccccattaccaccgttcactttggcaaggaactcatttttatgggttttcctt

SEQ ID NO: 311670 - DNA, 201 bp, Homo sapiens
tcattgtggacaggtgagtgtgatttcctgtgtcaatcttggtcctgcactgggccggcccacacttgtgtgaatcccacaatatactttaggaccctatycctgagctgcgttttatagtggtagagagaacttttatatagggcagtgaatttggaataaaatgaatgtatgcttaaattgaatggtttacctggacat

SEQ ID NO: 311671 - DNA, 201 bp, Homo sapiens
ctggggaggcctcaggaaacttgcagtcatggcagaaggggaagcgaacacatccttcttcacatggtggcagcaaggagaagtgcagagcgaagggagaggggggaagcccttataaaaccatcagatctcgtgagaactcactatgatgagaacaacatggaggttgttctccatgataattgaatcaccatgattctc

SEQ ID NO: 311672 - DNA, 201 bp, Homo sapiens
ttagtaatatgcatttaagttttcttcatgtctttttatggcttgatagctcttatttgcactgaatagtaatacgttgcatagatgcatcatagctcatwcatccattcacctactgaaggacctctgggttgtttccatagtttagcaattacaaataaagctgctggccaggtgcggtggctcatgcctgtaatccca

SEQ ID NO: 311673 - DNA, 201 bp, Homo sapiens; identical to SEQ ID NO: 64996

SEQ ID NO: 311674 - DNA, 201 bp, Homo sapiens
gatttaggatggccaatatccctttctctttgcctgtttccccaggtaggctgttcttttctccaccactgcccctaactctaccctgcaaagaggagggsaggcctacttcagcatacatgtcctcttgaataattccattagctcaatctgttacagaactttctaaagaaaatcttcttcataagaccaaaaagaaaa

SEQ ID NO: 311675 - DNA, 201 bp, Homo sapiens
aggtcactctgattcatgattgtcctgctgatccatcatccttttattctatgacatctcaagttttggccttctaaataggctttgggctctcattttcmcagtgtgagttgccctgcctaatggaaggattgcattgctccctataaagtcattattataaccctggttacaaacagggtttcttgggatttgctcata

SEQ ID NO: 311676 - DNA, 201 bp, Homo sapiens
aggctgaagcaggaggattgcttgagcccgagagtttgagaccagcctaagcaatatagtgagaccctgtctctacaaaaactacaaaaatttaaaatttaaaaacacagaagtgaacagatgcatatgcagtgaacaaggggtagctaatataacaaggaagtaaccagtgctgcctgaacgggtgctacatgcaaagga

SEQ ID NO: 311677 - DNA, 201 bp, Homo sapiens
tgaatagtaatacgttgcatagatgcatcatagctcattcatccattcacctactgaaggacctctgggttgtttccatagtttagcaattacaaataaarctgctggccaggtgcggtggctcatgcctgtaatcccagcacttgggaagccgaggcaggcagatcacttgaggtcaggagtttgagaccagcttggcca

SEQ ID NO: 311678 - DNA, 201 bp, Homo sapiens
agtacaatcatcgtgtattagtccttcctcacactgacataaagaaatacctgagactgggtaatttataaagagaaaaggtgtaattggctcacagttcygcaggctgtataggaagcatggtgctggcatctgttctgcttctagggaggcttcaggaaacttaaaactgtgacagaaggtggctgggtgtggcggctc

SEQ ID NO: 311679 - DNA, 201 bp, Homo sapiens
tactgtcattggggcacccatgcagaggaagccagggggagtccaggaaaatctcctagaagagatgatgcctgagtctttctctttttcttttcttttctttttttttttttttgaggcagatccgctctgtcacccaggctggagtgaagtggcaagatctcgactcactgcaacctctgcctcccggattcaagcgat

SEQ ID NO: 311680 - DNA, 201 bp, Homo sapiens
tcggcctcctaaagtgctgggattacagacgtgagccactgtgccaggccatgattcttaaagtattgtataaatcatagagataaatgaaacatcatctraagaaagagaaacaccattacgttgaaaggatagtctcaccatttagtaaactgggatggcatattaacagtcatattttaatttggtggggcagcatta

SEQ ID NO: 311681 - DNA, 201 bp, Homo sapiens
ggaagaaaggaaagaaagaaagaagaaggaaggaaagaaagaaaggggaaagaaagagggaagaaagaaagatggaaagaaagaaaggaaggaaagagggraagaaagaaagaaagaaagaaagaaagaaagaaagaaagaaagaaagaaagaaagaaagaaagagaaagacagtaaagtggaatgatggaaattttgccc

SEQ ID NO: 311682 - DNA, 201 bp, Homo sapiens
tcgatttgtctcaatgaaggttgatttcatcagactaaaaagttacagggtaagttattacaagttccgctttatgacatttcatttaacaatgctttagrataaaagaatcaataatgttatgaaaatgaagagtgcaatttttaaaaatggagatgaaaatgaagggtaattttaatttgcaagaatacggcaacctaa

SEQ ID NO: 311683 - DNA, 201 bp, Homo sapiens
aagaaagatggaaagaaagaaaggaaggaaagagggaaagaaagaaagaaagaaagaaagaaagaaagaaagaaagaaagaaagaaagaaagaaagaaagagaaagacagtaaagtggaatgatggaaattttgcccacgcaatggctcagtgtaaacatcagacactgcagcatgggaactgggggttcactgagaaacc

SEQ ID NO: 311684 - DNA, 201 bp, Homo sapiens
tcagactaaaaagttacagggtaagttattacaagttccgctttatgacatttcatttaacaatgctttaggataaaagaatcaataatgttatgaaaatraagagtgcaatttttaaaaatggagatgaaaatgaagggtaattttaatttgcaagaatacggcaacctaacataagaattcaaatgatactatttaggg

SEQ ID NO: 311685 - DNA, 201 bp, Homo sapiens
agatggaaagaaagaaaggaaggaaagagggaaagaaagaaagaaagaaagaaagaaagaaagaaagaaagaaagaaagaaagaaagaaagaaagagaaaracagtaaagtggaatgatggaaattttgcccacgcaatggctcagtgtaaacatcagacactgcagcatgggaactgggggttcactgagaaaccccaaa

SEQ ID NO: 311686 - DNA, 201 bp, Homo sapiens
caaccatgaatccctattagctatttgtgctatatttgtaaggcacattccggccactaactgggtagacaggaaaatgtgctttaaaggttttcttgtgyggtaaaattgtctcccttttttttcttcttttttgcagaatgaccagtccatgggtgagatgcagataatcggaggcgatgatctttcaacgctggctgg

SEQ ID NO: 311687 - DNA, 201 bp, Homo sapiens
atatttttttcttaaaggatgctaatctattctaatctacctaaaatggaggacaagtatggtttttaaaaaaatcagtatacatttaagtaaagcattgytttatattcaattttagattcaattcagatatttattaatccttaactatgtgttagacattgtgttaagcatttcacaccaagtgttcccctcaggtag

SEQ ID NO: 311688 - DNA, 201 bp, Homo sapiens
tggggagaaaagacattttcctacaatcctttttagtaagggcctgctttactttttatgcttccatctcatgtttgaagggtaagccctgactgctctgctgtattttgcccgtggctcaatgtgtgagttgggtagctaggttgttttgctattattgagctttattgtcttggttttagaagacattgtcttttgatg

SEQ ID NO: 311689 - DNA, 201 bp, Homo sapiens
ggctgatatttttttcttaaaggatgctaatctattctaatctacctaaaatggaggacaagtatggtttttaaaaaaatcagtatacatttaagtaaagyattgttttatattcaattttagattcaattcagatatttattaatccttaactatgtgttagacattgtgttaagcatttcacaccaagtgttcccctca

SEQ ID NO: 311690 - DNA, 201 bp, Homo sapiens
ttggggagaaaagacattttcctacaatcctttttagtaagggcctgctttactttttatgcttccatctcatgtttgaagggtaagccctgactgctctgctgtattttgcccgtggctcaatgtgtgagttgggtagctaggttgttttgctattattgagctttattgtcttggttttagaagacattgtcttttgat

SEQ ID NO: 311691 - DNA, 201 bp, Homo sapiens
cacacgctctggagaggttaccatatccattgagttgaagaagtctggtttcatgttgtctctacaaatgcttgagttgattacaagacttcaccagtatrtattctcacatattcttcggcttgaaaaacctgcactagaatttaaacctacagacgctgattcagcatactgtgttctacctcttaatgttggtaagaa

SEQ ID NO: 311692 - DNA, 201 bp, Homo sapiens
tttggggagaaaagacattttcctacaatcctttttagtaagggcctgctttactttttatgcttccatctcatgtttgaagggtaagccctgactgctctgctgtattttgcccgtggctcaatgtgtgagttgggtagctaggttgttttgctattattgagctttattgtcttggttttagaagacattgtcttttga

SEQ ID NO: 311693 - DNA, 201 bp, Homo sapiens
atttaaggagctgagctaggattcatgtcatggttatttaagtataaggagtgagtccaatttttgtttctttttggtcagaagagttagttcctgttcaracccttgaattaaacaaattcttccgcagtttcctagtgtgtgtaactggatatgagcctattgtctctcagtggtactgctttgagaagagatccctta

SEQ ID NO: 311694 - DNA, 201 bp, Homo sapiens
atgataaaactcccagtgatcagtcttcccattcttctttccgcttctgcgaagtgattgagtttcatgagtattttgaacacccttgttcctcattctgrcaaatgcctaagggggcaaaagatggaagtctaaacctaaaaaacaaaagaaaacaaactaataataatgaaatctattggcaaaattatttgaatatca

SEQ ID NO: 311695 - DNA, 201 bp, Homo sapiens
aagtcttagtaattcttggtaaactattgagtaaatgcagatttttgtttttagatttcaaaagcaataatattagttatcaatattgggagtttggctgyagtgtatgaatgaatgaatattaaattaatgttcatttaaatctataataaacttttaaacatcataataaattctatataattttcatagtgtatctaa

SEQ ID NO: 311696 - DNA, 201 bp, Homo sapiens
gtctttggtgtttttgtagtaccttgcagagagtacctatttaagtgaacaaatggcagtaaaaaggaatgggcaagagtaagaattctctataagtaccrttacctgtgagttcaagaatctaacgttgtttccacagagagtagcagacaggcatttctgccttaagagattatgtgtcagctcttcctatttgctgtt

SEQ ID NO: 311697 - DNA, 201 bp, Homo sapiens
tctgtaatcccagcactttgggaggctgaggtgggtggatcacctgaggtcaggagttcaagaccagcctgaccaatatggtgaaaccctgtctctactamcaataaaaaaattagccgggcgtggtggcgtagtagtcctaggtactcgggaggctgagacaggagaattgcttgaatccagaaggtggagtttgcagtg

SEQ ID NO: 311698 - DNA, 201 bp, Homo sapiens
tcagtgatcatgatagcacctgtgaggttttgtttttccttcttaacaagcgttagtcttttgaccacttgaagattttatgaccccagtttatataagaratgtacttaatttgtcattaaaatttagtttccagaggctttttagtatgatatgtcagatatcctttttgaagaatatatgtatgaaaatgattgtaaa

SEQ ID NO: 311699 - DNA, 201 bp, Homo sapiens
cttaccaagttaaatgcatgattcgttaattttttagaagttacctaatcctcaaattttgttttgttttgttttaattagtattatgtgttgaatgttayttgaatgttctttttggtaagtattgagagttttgtttttatacttggcccattaatatatcacaaaatcattctcataaatcctttgataaatcccatt

SEQ ID NO: 311700 - DNA, 201 bp, Homo sapiens
gtgaatatgtactcatttttgtgtgtttgataaaattgttttggaattcttacagacttaatcttttgacacctcgacatttgaatcagaaggggaaagcrcttcctttaagcagtgctgagaagaggaaagccaaatgggaaagtctgcagaataaacaggtaatgagttaattgtactagcataacttagtatttgttt

SEQ ID NO: 311701 - DNA, 201 bp, Homo sapiens
ccagtttattttgcaaagtctactttaaagctacctgtggcacgtgtgtattatatgtaatatgtgctgtgtacatgcacatacatacacaattatttcaraacttcattttagggcatattccataaaactcaatagataaaaaaacaaaaaactaaagattgcttttaacatggtcactataaacattgatcatggtaa

SEQ ID NO: 311702 - DNA, 201 bp, Homo sapiens
atttcagatagttgtttttttttttttttggcatggtaaaatatacataacacaacgttgaaccattttaagtgtacaactagctggcatacagtacattyacattgtttttagtcattaccagcatccatctccatactttttcatctttcccaactcaaactgtcctcattaacactaactcctgattccatcctacct

SEQ ID NO: 311703 - DNA, 201 bp, Homo sapiens
acccagtcttttttttttttttgagacggagtctcactacgttgcccaggctggagtgcagtggtgcgatctcagctcacggcaagctccgcctcctgggytcatgccattctcctgcctcagcctcccgagtagctgggactacaggtgcccgccaccacaccctgctaattttttgtatttttagtagagatgaggttt

SEQ ID NO: 311704 - DNA, 201 bp, Homo sapiens
ggcgaggaaatcctgctgacagtaaagccagtggtaggctttcacacagatatttgaatccctgaccctctgtttgaagggtaggaattttaaagtttcastttttatcattttacataatcaaatttatctgtgggaaaaactatatgaaatatagaaagtgcttagataccatgaaaaaatttttatttcacagagtgg

SEQ ID NO: 311705 - DNA, 201 bp, Homo sapiens
ttttaaagatgaatatttcaaatatggagattagaatttttaaaaacttgctggaatttttcaaaataaagaattttgttttggtaaattgaactttaaaratgttggggcagtggtttcataggtgtttcatgtgctagaggtaatacagcgatgtgcatatataatggaaaggtttttgttattttcagggtccaccaa

SEQ ID NO: 311706 - DNA, 201 bp, Homo sapiens
atttggggagaaaagacattttcctacaatcctttttagtaagggcctgctttactttttatgcttccatctcatgtttgaagggtaagccctgactgctctgctgtattttgcccgtggctcaatgtgtgagttgggtagctaggttgttttgctattattgagctttattgtcttggttttagaagacattgtcttttg

SEQ ID NO: 311707 - DNA, 201 bp, Homo sapiens
ctctgtttgaagggtaggaattttaaagtttcagtttttatcattttacataatcaaatttatctgtgggaaaaactatatgaaatatagaaagtgcttasataccatgaaaaaatttttatttcacagagtggtgtcatttgttttaatttatctaggatatgtataattttaaagatacatatttaaatagttgtgcat

SEQ ID NO: 311708 - DNA, 201 bp, Homo sapiens
caactgcggatgcaactggtcagtatctagagtgctgtgtgactttcagcaactgataaatgggtcaaagtgcagcctgattaatgctgatttttttttttgtcatgagtaagacgatatctactagattcctcttttgtaaagttcctgtttttttaaataagaatttcatggggagatgctttgaacctatgtaagtaa

SEQ ID NO: 311709 - DNA, 201 bp, Homo sapiens
taaccctgcatgattgtgtaatggtattctttttcccttttgtagtaagctgtgctagaacaaaaatgcaatgaaagaaacactggatgaatgaaaagccmtgctttgcaacccctcagcatggcaggcctgcagctcatgacccctgcttcctcaccaatgggtcctttctttggactgccatggcaacaagaagcaatt

SEQ ID NO: 311710 - DNA, 201 bp, Homo sapiens
aatatttgatccccctgtgaattggcttcctcctggttatgtagtaaatcaagacaaaagcaacacagataaatgggaaaaagatgaaatggtaagttttktgtgtgtgtgtgtgtgtgtgtgtgtgtgtgtgtgtaactggagggatttacttttcggtgagccaaataatttgttttattaattttttgtttcattttc

SEQ ID NO: 311711 - DNA, 201 bp, Homo sapiens
aaacaagatccagagctggcttatatcagtagcaatttcataactggacatggcattgggaagaatcagcctcgcaacaaacagatggaagcagaattcasaaaacaggaagaggtaacttaaatcaaaataagtgtacaataacagttttcgggacatatacagacaaagtgcccatagggtctcccttttttcatagtt

SEQ ID NO: 311712 - DNA, 201 bp, Homo sapiens; identical to SEQ ID NO: 65006

SEQ ID NO: 311713 - DNA, 201 bp, Homo sapiens; identical to SEQ ID NO: 65008

SEQ ID NO: 311714 - DNA, 201 bp, Homo sapiens
gcctgattatgctacctcggaaataaccaatattaacattttgggaggaattgtggatgtgtatagatataaacatatctaaaatgtaaaatggaattctrttatgtataggatactgtcacctgttcttttcacgtataatatattgtggctgactttccgtgtattgatgggtatcgtgatgctcaggggccacacgct

SEQ ID NO: 311715 - DNA, 201 bp, Homo sapiens
gagggcttccagcattgaggcatgccaaagaagtggcctccactgccggaccccaaggcaggtttagctttagtaaaagcccagtgtagcttatccttccytttttaaatggatcagaaatatttgctaatatctcagggaagcatcataaatatacattctgcttctacttgaagtgggaaaatctaatttaaaaaacaa

SEQ ID NO: 311716 - DNA, 201 bp, Homo sapiens; identical to SEQ ID NO: 65011

SEQ ID NO: 311717 - DNA, 201 bp, Homo sapiens
accacttgaagattttatgaccccagtttatataagaaatgtacttaatttgtcattaaaatttagtttccagaggctttttagtatgatatgtcagataycctttttgaagaatatatgtatgaaaatgattgtaaatacaaatcttcttcggatttggggatcagttgctatgtggggatagtgtaaatgcttctgcac

SEQ ID NO: 311718 - DNA, 201 bp, Homo sapiens
gaaatgagctcttcaggtggtttttggagaaccactgtgaatatgtactcatttttgtgtgtttgataaaattgttttggaattcttacagacttaatctkttgacacctcgacatttgaatcagaaggggaaagcgcttcctttaagcagtgctgagaagaggaaagccaaatgggaaagtctgcagaataaacaggtaa

SEQ ID NO: 311719 - DNA, 201 bp, Homo sapiens
agcctaattttcgttatggaggaaaaatgatacgtggctttcgactacattctgctggaagttccgagacctgggttctcgcctagcagtccctgcttctwaattccttgcttattctgggacaagtcaccatcggtccctgcctcagtttcctcagctggatatattattttaatcactgtgagaaaatagaggtgttga

SEQ ID NO: 311720 - DNA, 201 bp, Homo sapiens
  misc_feature (1)...(201): n = A,T,C or G
ggtttagtcgtagtgtcacagaacagggagacaggagggaacctcaaatccatctccttaaggagtttggggtagggttttttagggttttggagtgggcngaagggcagagatcattcattggttgaacagtgcaggttgaagtcatagggcaggagatgaggaagctgtcttctcatgctgattctgcgcttcaaaatg

SEQ ID NO: 311721 - DNA, 201 bp, Homo sapiens
gaaagaaacactggatgaatgaaaagccctgctttgcaacccctcagcatggcaggcctgcagctcatgacccctgcttcctcaccaatgggtcctttctktggactgccatggcaacaagaagcaattcatgataacatttatacgccaagaaaatatcaggtactaatgcgaacactaatactggagcattctacacta

SEQ ID NO: 311722 - DNA, 201 bp, Homo sapiens
gaacttaaaaaaaaaaaatcatccataaagattgttattttctggaaataatttaaatcttgccagtgacttaagaagactccaaatatcagcaacagccrcttcattttgtcttgtcttgaaggccaccagagggcacttgggagggcctccaaactgcaggaaccagcgcagtggtggttgactgggagagttctagtg

SEQ ID NO: 311723 - DNA, 201 bp, Homo sapiens
ttggagtgggccgaagggcagagatcattcattggttgaacagtgcaggttgaagtcatagggcaggagatgaggaagctgtcttctcatgctgattctgygcttcaaaatgcttatggaattcagggtctgtaaacatcttaactgatccttaagcaaaaaccttatggttttaatgtcagagattctatctataggaac

SEQ ID NO: 311724 - DNA, 201 bp, Homo sapiens
tgcaacaacaaatattcatgtacatctctttgtgcagttgcttgattcattctttaagacaaatttctaggcatagaatcactgggtaaggtacagaatgsttgactcctaaaatgatcctcttagatcaagaaaaagctaaaacaattataggaagagtttgaatggctcataggaatgatattctgatgtttctcttgt

SEQ ID NO: 311725 - DNA, 201 bp, Homo sapiens
ctgagtgatcgagtgattctcagtcttggtgaaaaaaaagaaaaaaagaaactggatccttgatcagtgagccactgtttgactgagaccacgctgagttkagcatggctattacctgtggaggaaatggagtatttgagagctagccagaatcacctgtccttgtgcttttgaatacataaaggaatgaggtatttattt

SEQ ID NO: 311726 - DNA, 201 bp, Homo sapiens
ggccacggtgggaggatcacttgagcccaggagttcgagaccagcctgggaaacatggggtggccccagctctacaaaatagaaaaaaaaaataaaaaacraaaagaaaaatgaaaacataagcactgacatattgggagataggaagatatgctcatatacagcatggtactgatttatcatagtgtttaagtattttta

SEQ ID NO: 311727 - DNA, 201 bp, Homo sapiens
ctaaaaacatctgagactttttctgctctacaacttagaaaagggaagtaggtaggagttgttttcaaacaacttggattctatgtgtggattcattttcwgtgtggctgtttgcccactttcattttcatttttaaaaattcctccatgtagttggccagcatattttagggcttctccagtatttaagttctaagaaat

SEQ ID NO: 311728 - DNA, 201 bp, Homo sapiens
attgtggaaggacaaaggaggggatgtttggatttctagggttgataaactgtgggaaggtgattagacggtgtatggaggaaaccattggtagaaaaggkttatttattaaggtttgtttatgcagattcatcttggtgccatctctctgtgctgtgataaggattgttcttttcttcctggtgtagaagaagggggagt

SEQ ID NO: 311729 - DNA, 201 bp, Homo sapiens
ccttggcctcccaaattgctgggattatgggtgtgaaccactgcacacggctgggaggatgttttcaatacctaaaacagaattgtatgtctctagcttaycgtcacacaaatcatccacagtttgaaagtttgttttccaattcccaattctgtgtgttcaagttgtaggaaatttaaaatgctgaaaagtttaaaggaa

SEQ ID NO: 311730 - DNA, 201 bp, Homo sapiens
cgctgcacccactaatgtgtcatctagcattaggtatatctcccaatgctatccctcccccctcccccgaccccaccacagtccccagagtgtgatattcyccttcctgtgtccatgtgatctcattgttcaattcccacctatgagtgagaatatgcggtgtttggttttttgttcttgcgatagtttactgagaagctg

SEQ ID NO: 311731 - DNA, 201 bp, Homo sapiens
attttggaccaatctaattttaggcatgattatattgaaatctaaacataacatatttatgttagagatttagagaaacccagaaatttatttggttcagrtacagtaatgcatgaaaagaaggctaatgaatttgtggtttaaattgtaggtactatgatactgtaaaatatatatttggtctgtcctctaccctattct

SEQ ID NO: 311732 - DNA, 201 bp, Homo sapiens
caaaacattctctgaggatgtcagtaagactgttactagaagtaagacatgacaggcttaagtttggccttagagttttttctttttgttttttaggcttrtaacagcattacatgttcttggttgtgttaaggtttatggaatagtaaggattagattcttcatgcatgttcattaccagacatggtgcttgacatatag

SEQ ID NO: 311733 - DNA, 201 bp, Homo sapiens
ggattgttgtgtttcatgttagtctaaattttcttccatttttgtcagttatgctataatctgttcccctgattaccgtagttcagagtggagggaaaaarcgtaacttctcaaattcatagcttagtgcagtgatcacttttattttttaaggaaagcagtgtagtttttttgtggcaagtatactttgaagtggaaata

SEQ ID NO: 311734 - DNA, 201 bp, Homo sapiens
agagtcgaatgggctcctgtcaggtcacctaactgttcatctgggagagtcaggagtgtgtccaaggcctcccaggatgatcttgaggtggactggaggcrcagtcataacaaccacgtaaactggcaacttgggggcagtggcagtagcagggaggtagggagaaatgtgggaagtccatgttagagttgagattttaga

SEQ ID NO: 311735 - DNA, 201 bp, Homo sapiens
ttggttgtttcccttagccagtttctaagaacctgccgaagacattaagtgaggacttacagcatatattatgctttttaaaatacgtttgtacatatttrtgatagtttaagatataaattaggcacagtaataacaaaatagaacaattgtaaccatatactgtaataaaagttatgtgaatgtggtctctctcaaaat

SEQ ID NO: 311736 - DNA, 201 bp, Homo sapiens
ggcttagaggaaatcagctatgaagaagaaaggtggtgtagggttctctgaagcgagtgacaaaaagtgaggtggcaagtctagtaggtgccatttttttrgaggataaccttggaactgtggttttaaagaggctatcaaaaacattgttggttaggtctaatataataataaggatttctgtagactgttaatcattag

SEQ ID NO: 311737 - DNA, 201 bp, Homo sapiens
gcataatttatgtagcttattttttaccagtagattttaaagttatttcttatttttaagtaataatgcaacaacaaatattcatgtacatctctttgtgmagttgcttgattcattctttaagacaaatttctaggcatagaatcactgggtaaggtacagaatggttgactcctaaaatgatcctcttagatcaagaaa

SEQ ID NO: 311738 - DNA, 201 bp, Homo sapiens
aaatatacataacacaacgttgaaccattttaagtgtacaactagctggcatacagtacattcacattgtttttagtcattaccagcatccatctccataytttttcatctttcccaactcaaactgtcctcattaacactaactcctgattccatcctaccttcaatgccagagaaccaccattctacttcctgtcactg

SEQ ID NO: 311739 - DNA, 201 bp, Homo sapiens; identical to SEQ ID NO: 65005

SEQ ID NO: 311740 - DNA, 201 bp, Homo sapiens
ctttcattgtgtgtcctaccagagttagacgacttagttgaagttttgcattgtggacattaattttaactttatatccatgttcaaagtccttaacttaaagcttcatactggataaaggtcattttataacttagaaaacgaacattcaaagaacatgttttactttgtttatatgattaaataacttattttatgtta

SEQ ID NO: 311741 - DNA, 201 bp, Homo sapiens
gctttcattgtgtgtcctaccagagttagacgacttagttgaagttttgcattgtggacattaattttaactttatatccatgttcaaagtccttaacttaaagcttcatactggataaaggtcattttataacttagaaaacgaacattcaaagaacatgttttactttgtttatatgattaaataacttattttatgtt

SEQ ID NO: 311742 - DNA, 201 bp, Homo sapiens
tgctttcattgtgtgtcctaccagagttagacgacttagttgaagttttgcattgtggacattaattttaactttatatccatgttcaaagtccttaacttaaagcttcatactggataaaggtcattttataacttagaaaacgaacattcaaagaacatgttttactttgtttatatgattaaataacttattttatgt

SEQ ID NO: 311743 - DNA, 201 bp, Homo sapiens
gtgctttcattgtgtgtcctaccagagttagacgacttagttgaagttttgcattgtggacattaattttaactttatatccatgttcaaagtccttaacttaaagcttcatactggataaaggtcattttataacttagaaaacgaacattcaaagaacatgttttactttgtttatatgattaaataacttattttatg

SEQ ID NO: 311744 - DNA, 201 bp, Homo sapiens
aaggaagttgagaatgatcacaaagacccggcagtgttatacaaagtgtttgaaagggcacaataagataacagtgaaaatgatcatcacatatgttattkgggatgaacgtctgggaaattgcattgcaaatatggacagtaactgttgactgcttaagttattgagtgattggaaaatgatgacatggtagttacattc

SEQ ID NO: 311745 - DNA, 201 bp, Homo sapiens
agtgctttcattgtgtgtcctaccagagttagacgacttagttgaagttttgcattgtggacattaattttaactttatatccatgttcaaagtccttaacttaaagcttcatactggataaaggtcattttataacttagaaaacgaacattcaaagaacatgttttactttgtttatatgattaaataacttattttat

SEQ ID NO: 311746 - DNA, 201 bp, Homo sapiens
actgccaaatttaggtaagcaaaaaatgtacatggaaaaaacattaacttaaaaacatcaaaggggaaaagttcacaaagatattgtaaactaatgattcygaaaaatatttacactgtggtgtgctgttgtcagatttctgtttgtaatctgattgacttctcttttttccttctgtttttatgaaataatgctgtaata

SEQ ID NO: 311747 - DNA, 201 bp, Homo sapiens
acagtcatcctcctttgttaataccgtttcataatgtttttggctctttttaaaaacttgtagcatgaaggtgacattggcatgtcattgattttttttttaagatacaacacaaagttcaatttatttttcttaatgtttctgatggcactttggttattggaattcattagaaatactgttcagatttttatttagtaa

SEQ ID NO: 311748 - DNA, 201 bp, Homo sapiens
gagacagtctggcaggtgtactatcccatgatgcggccactaataggtattgttggctccctttagaaagaaaaaaacccacaaaattaaaaacaacttcrgagatattattcatattattctttcattttgattgcagaaaagttttctgcaaatgtaccccgttcccctgtgcgagaattgcttgaaatggaaccagaa

SEQ ID NO: 311749 - DNA, 201 bp, Homo sapiens
gattaccaagtgatccgtttactcatctagctcctaaatgcagaacccgagagttgcctgatggtacattttattcaactctttatctgccaattaactcwcctcttcgagcctccattgttgtaagtttagaagaagaaatgattgttatcttttaaaatgtgtcattagtggattttttcagcttttctaagacttgca

SEQ ID NO: 311750 - DNA, 201 bp, Homo sapiens
caatatttgatccccctgtgaattggcttcctcctggttatgtagtaaatcaagacaaaagcaacacagataaatgggaaaaagatgaaatggtaagtttkgtgtgtgtgtgtgtgtgtgtgtgtgtgtgtgtgtgtaactggagggatttacttttcggtgagccaaataatttgttttattaattttttgtttcatttt

SEQ ID NO: 311751 - DNA, 201 bp, Homo sapiens
tattcattgctaccggtgtgttgctgctgccaggcgttttagtggacagagctagaatgtttgtttgttcatgtttacatctgtatttgtttcagtgtctwtctgttgatatctctattttcagtgtgacactagaggtttcattctagatttcctcctttctgtctttgtacctcctttctctaataatcagaaatttgg

SEQ ID NO: 311752 - DNA, 201 bp, Homo sapiens
gctttggaatactgacggccaaacccatacctcaggtaggtatttcataatgagtacttatgtcaaaaacgtcttgcttaggaaaaggaaaaaaaaaaaaactagtagtaagtaccttttgttacctcagtatgtttaatatttaaagatcgaggtgcctcttctatttctccactagaaagcatcatttctgttctgaag

SEQ ID NO: 311753 - DNA, 201 bp, Homo sapiens
ggtgttcttggtcaactctggtaataaaaaattattttatcaagttgtgcaggggaaattggatgggattttatgtttaaacagattttctgtgtttcttmagttaaattattgaagaaagtttgacagataatgtactcatttaatctcttctggcagaaattgttttgtcctatttctttttgctgtttctcttaaatg

SEQ ID NO: 311754 - DNA, 201 bp, Homo sapiens
aatgcattgttaggcgattttgtcattgtgtgaacatcatagagtgtacttaattaacataaacctacatggtatagcctattatacacctaggctatatrgtatgaccttttgttcctaggctactaacctgtacaccatgttactatattgaatactgtaggccgttgtgacacagtggtatttgtatatctaaatata

SEQ ID NO: 311755 - DNA, 201 bp, Homo sapiens
ctgccccagccttgatgttggcaatttcctcgaatttagtggagaaaaagttgtagttagaaaccaagaactggatactaggtttattcattgctaccggygtgttgctgctgccaggcgttttagtggacagagctagaatgtttgtttgttcatgtttacatctgtatttgtttcagtgtctatctgttgatatctcta

SEQ ID NO: 311756 - DNA, 201 bp, Homo sapiens
tttatttgtattgaaaaatataaatgtatatatgtttctatgtatttatgcatagaaaaagagtctaggaattatacagtgtatcaaaatgttaataaagrctgtctttgagtgataggattatatgtgattttttaaaaatttgcctaacttcattttctgatactctacagttaatacataaaaagcccaaggaagaga

SEQ ID NO: 311757 - DNA, 201 bp, Homo sapiens
acttttctgcaagtagtgatctcttaggaaaaactaagctttgcttcctaaggtaatttgggatttttttttttctttttctttctttgtgtgtgtgtgckcgcgcgcgcgcgtacacgcacgcgcacacgcgcttaactgcttctgaatgtttaggggttttaaaaacttttttgagtaacgagaaattggactcgaggg

SEQ ID NO: 311758 - DNA, 201 bp, Homo sapiens
aactaatttatgtttttgggtacattgtaatttactttgtccagagctgataataaaatttctaagagctaagaacagcaaatgcattcctggattatatrccaggataatttctattcagagacaaaagagcaagtataagattttctttgtaaccttttattttgaaacaatttcaaactttaaagtgttgtaagaata

SEQ ID NO: 311759 - DNA, 201 bp, Homo sapiens
ggcctgacgatggtggtccacgagtcacaatcaacacggccattggacacatcaataggtatggcatcatatcatttgtgtggaaaacctgggaatgttgyacagtttaagtctaaacctgtacattttgtattgttgacattttgcggttaccagtctttacttagacttgccatattttcgataaagaaaagttacttc

SEQ ID NO: 311760 - DNA, 201 bp, Homo sapiens
gaggtagccattacaaatgatgatattggctcatattgactcggacagatattctctttacagtaacgggataaaaatcaggctatctcacaaacacagayacacacataccctaatatacaccagtgttgtgtgattttatttgtattgaaaaatataaatgtatatatgtttctatgtatttatgcatagaaaaagagt

SEQ ID NO: 311761 - DNA, 201 bp, Homo sapiens
gtggttttgatgtgggtttcattaaggaaaaatgaattgactgttgttgcctctatttcttagctaattgaagtctgccagatggataatttataattttrgcaaagtaaaatacattctttgcctaattaacagtaagttaaaacacattctaaatctctattatattcaaattgatgcttatttatataaaatttggaa

SEQ ID NO: 311762 - DNA, 201 bp, Homo sapiens
ttaagtacaaagattgagaagaagcatttagaaactcttagagcagtttgacagtaattttatatctgctgaatacaataaaattgatgcttgaattttartactttttaaatttcattttcttagtcattcacttttatgaaattctacaaaactgcctctgatggattggaaatttaaaaagaaaagctggttcttcac

SEQ ID NO: 311763 - DNA, 201 bp, Homo sapiens
ttaggaaaaactaagctttgcttcctaaggtaatttgggatttttttttttctttttctttctttgtgtgtgtgtgcgcgcgcgcgcgcgtacacgcacgygcacacgcgcttaactgcttctgaatgtttaggggttttaaaaacttttttgagtaacgagaaattggactcgagggtcatcatctggcagtttttagtc

SEQ ID NO: 311764 - DNA, 201 bp, Homo sapiens
ttgatatctttggaaattaggttctggaatagccagtttattttgcaaagtctactttaaagctacctgtggcacgtgtgtattatatgtaatatgtgctrtgtacatgcacatacatacacaattatttcaaaacttcattttagggcatattccataaaactcaatagataaaaaaacaaaaaactaaagattgctttt

SEQ ID NO: 311765 - DNA, 201 bp, Homo sapiens
ttactttgataactctagacacatatacaaacatacagctttggtatgaaacttatctgtatcatgttttaacaagctaaagagtcgtttttctcttctargttaatgactccagcactttggatattgactttaaattcatggaagatattgagaagtctgaagctcgcataggcattcccagtacaaagtatacaaaag

SEQ ID NO: 311766 - DNA, 201 bp, Homo sapiens
tttgcctgaagtgtgaatctgattacttttaaattgtaaaaggcaaaggtgctttagtttccattacttttccaggtccttctaacatagttctgttctamattctttactaattaatcaggcaaaatctggattgtgttaattctctctttaaatttgttaggcgaactggatgaccatttgatgccagttgggaaagag

SEQ ID NO: 311767 - DNA, 201 bp, Homo sapiens
agaggctgtagttgaaatgagctcttcaggtggtttttggagaaccactgtgaatatgtactcatttttgtgtgtttgataaaattgttttggaattcttrcagacttaatcttttgacacctcgacatttgaatcagaaggggaaagcgcttcctttaagcagtgctgagaagaggaaagccaaatgggaaagtctgcag

SEQ ID NO: 311768 - DNA, 201 bp, Homo sapiens
actttagagccctgtgtgccaccctgtgttcctgtgattgcaatgtgagaccgaatgtaatatggaaaacctaccagtggggtgtggttgtgccctgagcrcgtgtgtaaaggactggggaggcgtgtcttgaaaaagcaactgcagaaattccttatgatgattgtgtgcaagttagttaacatgaaccttcatttgtaa

SEQ ID NO: 311769 - DNA, 201 bp, Homo sapiens
aacttttctgcaagtagtgatctcttaggaaaaactaagctttgcttcctaaggtaatttgggatttttttttttctttttctttctttgtgtgtgtgtgygcgcgcgcgcgcgtacacgcacgcgcacacgcgcttaactgcttctgaatgtttaggggttttaaaaacttttttgagtaacgagaaattggactcgagg

SEQ ID NO: 311770 - DNA, 201 bp, Homo sapiens
tgagatgttaatgttgaggagccctgaccttgtggtggtgttttcattgaaatcggataacaggggcttttggagaactgtgacagagtgtgtggaggctrccccagtgcagctgtcctagctccttttccacttccaaccaataaaggcctttcctactgtttagaaagaaagaaagaaaaaagaaatgatgatagagac

SEQ ID NO: 311771 - DNA, 201 bp, Homo sapiens
ggcatcatatcatttgtgtggaaaacctgggaatgttgcacagtttaagtctaaacctgtacattttgtattgttgacattttgcggttaccagtctttayttagacttgccatattttcgataaagaaaagttacttcttttttcatttttttttaaatcaaaaggcaaaaacagtatcgtgcagcaataaaagttcagt

SEQ ID NO: 311772 - DNA, 201 bp, Homo sapiens; identical to SEQ ID NO: 65009

SEQ ID NO: 311773 - DNA, 201 bp, Homo sapiens
gttgtggatttcagagaaagttgctgtttgtgatttctaggtttgactctttttgagagggttactattttgagtttcattgaaaagcgcacacacacacaaaaccttcataacttaggttggtggaagggagcctttacaaattaggaaaatggcttttcaaatgcaatgaattcgatttatgtcaaaatagccttccat

SEQ ID NO: 311774 - DNA, 201 bp, Homo sapiens
ggttgtggatttcagagaaagttgctgtttgtgatttctaggtttgactctttttgagagggttactattttgagtttcattgaaaagcgcacacacacacaaaaccttcataacttaggttggtggaagggagcctttacaaattaggaaaatggcttttcaaatgcaatgaattcgatttatgtcaaaatagccttcca

SEQ ID NO: 311775 - DNA, 201 bp, Homo sapiens
tgcccgacattaacattaacagtgttcttgaattattttatttataaactaattctataaaaatgtatagtgtagatgtaactgtccttttgtgtttttaatttcattttgggaaattggaattgctgatggatttcatacctgtgttaaagagttactactgggttatttggatttctcagccaagtacgtcttctggtg

SEQ ID NO: 311776 - DNA, 201 bp, Homo sapiens
tttacacaatacagctgtatatagcaggcattttattcctctgagttattctcgtataaagacgtagactgtggggttttttttgtaaatttattggaggrcgattttagagaatagtgaaatttcctgatttaaaataaaatccaattttataaattttgtacttaggtaagaagtgcataacttttttttcaccatgtt

SEQ ID NO: 311777 - DNA, 201 bp, Homo sapiens
aagtaattcatcattaatttttgggtaaactaattttctctcacctccttcctctcttccttttccttcttatcctttctcacttccttttccttcttagmcttcctcactccctccctttttcctttcctttagtttttaactaagacataattatagtctcactgtaaataaaagtgttctactttttcatttaaagcc

SEQ ID NO: 311778 - DNA, 201 bp, Homo sapiens
caatattaagtctttggtgtttttgtagtaccttgcagagagtacctatttaagtgaacaaatggcagtaaaaaggaatgggcaagagtaagaattctctrtaagtaccattacctgtgagttcaagaatctaacgttgtttccacagagagtagcagacaggcatttctgccttaagagattatgtgtcagctcttccta

SEQ ID NO: 311779 - DNA, 201 bp, Homo sapiens
ggggagaaaagacattttcctacaatcctttttagtaagggcctgctttactttttatgcttccatctcatgtttgaagggtaagccctgactgctctgctgtattttgcccgtggctcaatgtgtgagttgggtagctaggttgttttgctattattgagctttattgtcttggttttagaagacattgtcttttgatgt

SEQ ID NO: 311780 - DNA, 201 bp, Homo sapiens
aagtttgtgttaggaagccaaagtaaaaattatagaaagtgtgtattattttacctggcacagaaagcacccggtaaatggtagctggcttcgtattagcmcttgatggttttcaaatgtattttttcccagattatctagtccttaaagactcttggggataactgatcctccatttgctgtaggtgatagtggtggtgg

SEQ ID NO: 311781 - DNA, 201 bp, Homo sapiens
cagattatctagtccttaaagactcttggggataactgatcctccatttgctgtaggtgatagtggtggtgggtgggacctagaaagcatgttgagttgargagtcgagagggcaggttcaaattaccacgtatatgtaatattaccatgtgttattctcatgacccttttgtcttccttgtcaactagtatgccaccagt

SEQ ID NO: 311782 - DNA, 201 bp, Homo sapiens
tattctcatgacccttttgtcttccttgtcaactagtatgccaccagttactgggctcagttttatcatgtgcaaggcaagggacctgcagtcttccttcraagacagcttctctgcttaaaagaggagtaactattttgcagtcttttgacagagaccttgcagggagtcccctgcaaattgccaatatggcactagtaa

SEQ ID NO: 311783 - DNA, 201 bp, Homo sapiens
gcacacagaagacagtcacaaagggatcaggtcccagtagactgacatcatcatttcctaatcctggtcttaataaaggaacttatgctcatggaagcaaygtagaaaacactgaaaagtttaaagaaggaaaatcacctgtaatttatggaaactattgtattaacatttagatctagttcctaacagttttttttttaa

SEQ ID NO: 311784 - DNA, 201 bp, Homo sapiens
taaagaaggaaaatcacctgtaatttatggaaactattgtattaacatttagatctagttcctaacagttttttttttaacacattgagaccatgcttgtytatacatagtattttgccctccagagacgagggaatatgtcttatgccactgcctgtggtgctgtgtgtaccgcttatgcaaagcaagctttcagtgagc

SEQ ID NO: 311785 - DNA, 201 bp, Homo sapiens
tggggctctgtactgttgccaacttgagcagtaggtaaagtcctaaaggttcacttatcctcacttcgagctaatataggcgtttcggggcgatttgtcartgactgactcggaggagggtggcccgctgcctgactgctctgcacggttaggaaactcatagtaaggacccactgtgagataggtactttcgcggacact

SEQ ID NO: 311786 - DNA, 201 bp, Homo sapiens
ttttttaacacattgagaccatgcttgtttatacatagtattttgccctccagagacgagggaatatgtcttatgccactgcctgtggtgctgtgtgtacmgcttatgcaaagcaagctttcagtgagcattttaataaataaataaatactgcttttatttatcattatattgcaaactctgcggccttaaaggcattat

SEQ ID NO: 311787 - DNA, 201 bp, Homo sapiens
tccgccccgggcccaggagcatcgctgcacgaggccgaggggttccgccgcgccgggctggggagcggggctccatccgccggggtctgtctgaaggttcsagccgggttagggcgaggagtactgccctggagtagagtctgggctgagggtgtagttgatttcactgggtcttgaggatctggggctctgtactgttgc

SEQ ID NO: 311788 - DNA, 201 bp, Homo sapiens
aagcaagctttcagtgagcattttaataaataaataaatactgcttttatttatcattatattgcaaactctgcggccttaaaggcattataaacatttgytgccgatttagatcatcattgtagtccttgcatctggaacagtgacagaatagggactcaaatgatttgttgaataaataaccatatcctgttgttgaat

SEQ ID NO: 311789 - DNA, 201 bp, Homo sapiens
agcgtgaccctgatggacatccagtctctccaattaactaacaaagcggttgccgacgaccaatagtaaggcagtaggatgaggctccggcataaggcccmcctcctacctgccgggcgggacgagcaacatgattggtggaatcgagtaattactgatcagtattgtccaatcacggagggcagtttagagccggcccaa

SEQ ID NO: 311790 - DNA, 201 bp, Homo sapiens
gatttggcctgaagaccatagtttatctgtccctggcctagagactgacttctgcatgtgtgtgttaggacatgggtccccaacccccaggccagggatcraggacttacagcaggaggtaagcggtgggtaagtgagctttaccgcctgagctccgcctcctgccacatcagtgacgacattaggttctcataggagcac

SEQ ID NO: 311791 - DNA, 201 bp, Homo sapiens
gttgcccttgaggctagtgaggtcggaggctgatctcgcttggctcacggctcagggtgtcaagcatcatcctctgtggttgctacaagcaaagggttggracagctgtcggctgaccttagtcgggatctatgttgtcggggaagagtcatgacatttggctttagatactcaagcacagggctgaatttatgtgggcca

SEQ ID NO: 311792 - DNA, 201 bp, Homo sapiens
gcataaaacagtcccatatattgcagatatgtgtgcagtgcacttgtagctcctgggcaggagtgagatggcagctagagggtagaggccacctctggtgrgggactcaggtagcatgtggttaagagtctgggcttttgtactcctggaagcctggatataaatcctggtttcactgcgctgtcactgtgagtttcggta

SEQ ID NO: 311793 - DNA, 201 bp, Homo sapiens
acttcctccatgaggtcaggctagaactgatggagttgcccctgctccccttccccagaggttttggaaggggaaggaaagctgtagccccacgcccccaycctggggactgccccatcagattagagcactgctcctcagcagtcacccacctcaccgtgttagagaaaagaaaaatagattattctcagaaaaaggtta

SEQ ID NO: 311794 - DNA, 201 bp, Homo sapiens
cctgggcaggagtgagatggcagctagagggtagaggccacctctggtgggggactcaggtagcatgtggttaagagtctgggcttttgtactcctggaarcctggatataaatcctggtttcactgcgctgtcactgtgagtttcggtaagttacttaacccttctgagccttagtttcttcatcttatgtaaagtaggg

SEQ ID NO: 311795 - DNA, 201 bp, Homo sapiens
  misc_feature (1)...(201): n = A,T,C or G
ctccatgaggtcaggctagaactgatggagttgcccctgctccccttccccagaggttttggaaggggaaggaaagctgtagccccacgcccccaccctgnggactgccccatcagattagagcactgctcctcagcagtcacccacctcaccgtgttagagaaaagaaaaatagattattctcagaaaaaggttattaca

SEQ ID NO: 311796 - DNA, 201 bp, Homo sapiens; identical to SEQ ID NO: 65047

SEQ ID NO: 311797 - DNA, 201 bp, Homo sapiens
gagccaaggctacggcccgagcgctggaaccccggtcaggctccggctccccgccacgacgaactgcatgcggccgcggcgctccggaggcgcccggggasgctcacctaagctgggagaggcggatacccgcccggcctagccccgctacctcccaagagaccaacacgacaagcgcgcgcccaccgcattgccatggca

SEQ ID NO: 311798 - DNA, 201 bp, Homo sapiens
gctcacaggaggaaagtcgtcttccctcttgttttgcctctcgttgccctgcaagcgtgaccctgatggacatccagtctctccaattaactaacaaagcrgttgccgacgaccaatagtaaggcagtaggatgaggctccggcataaggcccacctcctacctgccgggcgggacgagcaacatgattggtggaatcgag

SEQ ID NO: 311799 - DNA, 201 bp, Homo sapiens; identical to SEQ ID NO: 65048

SEQ ID NO: 311800 - DNA, 201 bp, Homo sapiens; identical to SEQ ID NO: 65050

SEQ ID NO: 311801 - DNA, 201 bp, Homo sapiens; identical to SEQ ID NO: 65042

SEQ ID NO: 311802 - DNA, 201 bp, Homo sapiens
catggaagcaacgtagaaaacactgaaaagtttaaagaaggaaaatcacctgtaatttatggaaactattgtattaacatttagatctagttcctaacagttttttttttaacacattgagaccatgcttgtttatacatagtattttgccctccagagacgagggaatatgtcttatgccactgcctgtggtgctgtgtg

SEQ ID NO: 311803 - DNA, 201 bp, Homo sapiens
tcagatttttgtaaagattaaataagattatttttgtaaaacgcttaaagagtatgaaactcagtaatccttaactcaataaatggtatatatatatatatttttttttttttgagagagtgttactctgctgcctaggctgaagtgcagggggcaatctcggctcactgccacccctgcctcccgggttcaagcgattct

SEQ ID NO: 311804 - DNA, 201 bp, Homo sapiens
cactgcatattgcagtttttgaaaactaaagtgtgagagagattaaccatgtgtaaacagttacttgtggatccgcaggattcattttaatattcaacttatgaagagtagtcttttattattattaggagtttctcacttcactctataggaagcaattgggtatttccttaaatatttaaactggtaatcaactttctt

SEQ ID NO: 311805 - DNA, 201 bp, Homo sapiens
gcgctgtcacagagtgtccctcatctcatgtgtgtcctcagagccatttgcacacaggactgatcacatgcatgctggttggtttcttggctgctgtgagygcttaagagcagagcgggtctcactcccccacccctcagccctggacagggaccttgctgagctctgggccttcattagactcaccagtcacttcgggtt

SEQ ID NO: 311806 - DNA, 201 bp, Homo sapiens
tccacagagagcccatcacagtggctggatagatgggaactgacaacccatagctgtgggacagggatttttccctgggtaaaagtaattgttaaaaattaaaaaaaaaaaaaaaactcaacaactcatcatctcgaggagaagtgactgacggcctgcaccaacttagacagtcacagtcatgaaaagtgcacaggtggg

SEQ ID NO: 311807 - DNA, 201 bp, Homo sapiens
ccacagagagcccatcacagtggctggatagatgggaactgacaacccatagctgtgggacagggatttttccctgggtaaaagtaattgttaaaaattaaaaaaaaaaaaaaaactcaacaactcatcatctcgaggagaagtgactgacggcctgcaccaacttagacagtcacagtcatgaaaagtgcacaggtggga

SEQ ID NO: 311808 - DNA, 201 bp, Homo sapiens
taaatatttaaactggtaatcaactttcttaaaaatggaaaagagcatagtcattaagaagggtgccaacgtttggccttgatgccagctgcctattacayctattcatctaaaaattaaagaagcagctaagtttaattttgataaaccgtcagctgctgtcaagaacaggcaggtggctcatgagaagttagtatcact

SEQ ID NO: 311809 - DNA, 201 bp, Homo sapiens
aaaacactccatctgctaaacaatatctcgactgcaaagcttctcttactgttggcggatagataatgacatagcccagtcattatcaccgtggcaacagygaccagaaactatcagaggaaaattgcacatggaacagctggctctcgagcaggcatgcctcagcttcctctggagtatgctttttctgcaagtctggtg

SEQ ID NO: 311810 - DNA, 201 bp, Homo sapiens
tgtgtgtgttgggtgttgagaatgtctgaaagcctgcttgttttgataattttggtggtaaggattctgggggtctccccttctctcgtagtcaggacatrtgatcaacagcaacataaagtttaatcaatgaggcaagcccaatgcttcgattgagtgtgatactataaaagtgattgatgaaaagcaattttactttaa

SEQ ID NO: 311811 - DNA, 201 bp, Homo sapiens
tccctgggtaaaagtaattgttaaaaattaaaaaaaaaaaaaaaactcaacaactcatcatctcgaggagaagtgactgacggcctgcaccaacttagacrgtcacagtcatgaaaagtgcacaggtgggattgcccgagttggccatgaattaccgtgatggatccatttggaaatgaagttggttgtgacatttcttca

SEQ ID NO: 311812 - DNA, 201 bp, Homo sapiens
ggaagaggccaggcacaagggcctgctccttggccaggatggtcagggttggtggaaaactgggaaggctgtaccttttccttctagagagtgacttaggrtacctgcatcccagttagagactttcagtgactgagtccctgcatgtccctagctaaaaagaggtgccagttgtgtgctaaaaataggtgccaggttctc

SEQ ID NO: 311813 - DNA, 201 bp, Homo sapiens; identical to SEQ ID NO: 65044

SEQ ID NO: 311814 - DNA, 201 bp, Homo sapiens; identical to SEQ ID NO: 65045

SEQ ID NO: 311815 - DNA, 201 bp, Homo sapiens; identical to SEQ ID NO: 65046

SEQ ID NO: 311816 - DNA, 201 bp, Homo sapiens; identical to SEQ ID NO: 65049

SEQ ID NO: 311817 - DNA, 201 bp, Homo sapiens
tgtgtgtatgtgcttgtgtggtgcacatgtatgctgcagatgggagtataaaatggtaccaacactttggaggagtaactatcagtacccagtcaagctaygggtgaacagagcctaagacccagctgcgtgactcctaggtatatattctagagagggggatctgcaaacttaccctagtaaagggccagagactaagta

SEQ ID NO: 311818 - DNA, 201 bp, Homo sapiens; identical to SEQ ID NO: 65052

SEQ ID NO: 311819 - DNA, 201 bp, Homo sapiens
catacaagtagaaaaggaagtagactgatgaagaggaatgttaagagtaatcttttatgtcttaagattgaagccacatttctttcttaccattttgttayagtcatcatccttgtggctcagaattgaacagagtagttgcacagctgcgctgtcacagagtgtccctcatctcatgtgtgtcctcagagccatttgcac

SEQ ID NO: 311820 - DNA, 201 bp, Homo sapiens
ctgagttaatttcaagtgatatttgtaagaactaccactgcatattgcagtttttgaaaactaaagtgtgagagagattaaccatgtgtaaacagttactwgtggatccgcaggattcattttaatattcaacttatgaagagtagtcttttattattattaggagtttctcacttcactctataggaagcaattgggtat

SEQ ID NO: 311821 - DNA, 201 bp, Homo sapiens
tcttttattgattagaaaagtaaagattagtaagtattaacatttggactgggcagggtggtaaaagcacgttccccaaatggggattagttcagccaggktattaagactcttcccctcttccctatacagctttatttaccaagagcaactaacgggctgtccgatgcttgcttttgccagccgaaactatgtttgtac

SEQ ID NO: 311822 - DNA, 201 bp, Homo sapiens; identical to SEQ ID NO: 65051

SEQ ID NO: 311823 - DNA, 201 bp, Homo sapiens
ccttggggttttgaaagctcttagaggtcacctggtctgagtcagtgcatgatcaagccccagttggcgctgtgtgaacacctgccagggtggacctcagrtggctcatatgattgtgggacagctctaattcttggtaaattaaaaatctgccttctaatcatgcctagtgactagcctttgttctgcccccaaagccat

SEQ ID NO: 311824 - DNA, 201 bp, Homo sapiens
gtagaaaatttgaataatacaatcaaacaacatgagctaattgacatttttagaacatttcatccccaaactacagaagacatgttattttcaagtgcacrtgggaacattcactaagatagatcctctgctgggtcacaaaacaaagattaaagtcatgcagagtatgttttttgatcacaatgaattgaattagaaact

SEQ ID NO: 311825 - DNA, 201 bp, Homo sapiens
gcgagagtgctgtcagtcatacactgacagtctccacacataaccaggaactatcttttgactatttagaggtagctggcagagatggttgttgggagcargtggactttgtctgcagacagcagtatgccctgaaggccagaaaggctggatgtgttcaggaacccaggcagggtctgaaagggatagactgcacattca

SEQ ID NO: 311826 - DNA, 201 bp, Homo sapiens
gtgttccttggacttttgtccccagcaagataccatacggatgtttctttagttgggcctttgtttgccttgcggtcaagtggttaggcaggatgtctctsatggcctgaacccccgtgaaatgcttcactttgaccaaggtctgcacaatagctgggagcttacaaaatggtgcagtttggacgaacaggctctccgggg

SEQ ID NO: 311827 - DNA, 201 bp, Homo sapiens
cggcatgttttggggactaccatcagaggcagaccccatggctgacaaatctgggccaggaagtctctgggggtctcataaggcatcggattaggtgacaraaggaggctgcttgaaatccctttgcctgaaggtctttaggaacaggagagagacacctgtctgagctggtgtaggtggaagtgggggcgagagtgctgt

SEQ ID NO: 311828 - DNA, 201 bp, Homo sapiens
cagtcatatatttaataggcaggaaagccaggacacaagtgaatccacagctagaggctgggaactgttttccacagggtggcatgttccttcctgaaatrtcttgggagttctttgggctcttctcccaggaaggggatagaggacctcttcttttggcaagtcaggtaggggaagccttgctaagtcacaacttctgtt

SEQ ID NO: 311829 - DNA, 201 bp, Homo sapiens
cgctgcaggttctgttgaaacagactctttggggccttatagtccaacaatttgtcaatgggcagtcatatatttaataggcaggaaagccaggacacaartgaatccacagctagaggctgggaactgttttccacagggtggcatgttccttcctgaaatgtcttgggagttctttgggctcttctcccaggaagggga

SEQ ID NO: 311830 - DNA, 201 bp, Homo sapiens
ttcttgttatcaagcaccagggatctctgttccatgccagatggatcgtggtgatgcccttgcctccttggtctgggcaagacccatatttctgcatccayctggagccacgctggccatttggcagtcttctccccatcattaacaagaccctcacacggtggggagcagccccaccggcctgctgattaatagccatca

SEQ ID NO: 311831 - DNA, 201 bp, Homo sapiens
tccccatcattaacaagaccctcacacggtggggagcagccccaccggcctgctgattaatagccatcagtgagtgttgaggaaacgtggtgcggatagaytgggtttgattgatctgtaaatacaaacaagaaatgctgagtacaggggactattggggctggagagcacagcagggggtgactctggacacttctgttc

SEQ ID NO: 311832 - DNA, 201 bp, Homo sapiens
ggctgtatgatcgggggaggaggggacaaagtggtgttcatcccgtttgctgttccccaattctacagccatacccggcctgtggcaggcatcctaagtgkaagtctgtggaatggtgaatgaatgcactgcactaggaatgctgcaggcagtactggtcatgctcacttcaaaatgtagaagaaaagctgcctaaagcct

SEQ ID NO: 311833 - DNA, 201 bp, Homo sapiens
ctcaggagcccctgtgtaatcatgcccctgagtcctcttccatccccatttcttacaagcccttccctctgctccagccacactcagctgcctacctcccytcctcgactcgttgctcctactctctcttcaggtctcagtgtggatgtcgcttcttccaagaaggctttcctgctaccaccttcagatccaagtctcctc

SEQ ID NO: 311834 - DNA, 201 bp, Homo sapiens; identical to SEQ ID NO: 65064

SEQ ID NO: 311835 - DNA, 201 bp, Homo sapiens
tgcagagcctctccaaatccatccgtacttccactgaagatgtccaatataagcgggtcagggtcaccctgcctccaagtggaatgtaaatacataacacrtggagccttttttctgagtgtgccagcatcccacatgtgcccttccagttcactctgcacctgtctgcaccctgctctggagaggtttccttgcaaagct

SEQ ID NO: 311836 - DNA, 201 bp, Homo sapiens
ccacatgtgcccttccagttcactctgcacctgtctgcaccctgctctggagaggtttccttgcaaagctgacctttccggctgggttctgcctgtgggcracaggagcaccagtgggagggcaacaggagcaccagtgggagggtgggggagggaggggcattgattccctcggcccctccctatgggggtcactgtcga

SEQ ID NO: 311837 - DNA, 201 bp, Homo sapiens
ctggagactgcttaggataatgtccagccttggtccgggcgtggtaacagcggaatctgtgaaggatggaaatgcaatgtactttgcagggcgtggtggartgttttgatttggtctggtcttgggctatgctttagcttccaagaccatgattctcatctatgtcacctacctgggaagagacattccaggtgggggaag

SEQ ID NO: 311838 - DNA, 201 bp, Homo sapiens
tgacggtttttttgtgtgcgtgtgtgcgtgtgtgaaaggccacaagctagtagatggcacagctagcaatcaaaccttcaccttttgttcctaaccatcatgccatacagcccttaaaacaagtttcctttctttccatctggaaactgtaaaaattaaattgccatatttgttcctgctggttcttctgcagccctacat

SEQ ID NO: 311839 - DNA, 201 bp, Homo sapiens
taacctaactccagccagtttcttataaaaaggagaggagaataaaaaggcatcaaactgtaactgtttaaatatcataaaatatcaaactaaagttaaaycaaaccttaaaaaactccactacataatggaataaggctgtttgtaagtgggtcatcccaagtaatagatggtaaaaaaacacaataactatgctgtcat

SEQ ID NO: 311840 - DNA, 201 bp, Homo sapiens
ctcttcctatgtggaaatgatgaccctgccattgccggaagggtgtttagtaataatagccagctcttttgtttgtttgtttcgttttagtgcttactacrtgctggtgttgttccaagcattttatattattggttcatttattcttcaggtcaatcctgcaaggttggtgttattgcttgtccccattctccagatgat

SEQ ID NO: 311841 - DNA, 201 bp, Homo sapiens
gccccactcgcctttgccagcccgcccgggatctcaccgacgtgaaatctgatgttgctaaactgggaagtctgcttatttcccaagggcggtagcctagrtacactgggaagatgggaccatcccactgcccccagctcactcccctgcagccctggacacagaacagtcttgggactgcgcggagtgattccacggagg

SEQ ID NO: 311842 - DNA, 201 bp, Homo sapiens
agtcttagcctgtggagtcccaggaagcacatggaaaagagagccttggaaccagagtggagtgacagctaaggggtgctggaggcccctgtgaccttgaycatgcacaatgcccagaccagctccgactttttcctctccttcacatatttaaatggagtcgatattggggtcagcttcatgcacggagccttcttcagc

SEQ ID NO: 311843 - DNA, 201 bp, Homo sapiens
ggggagtcctgatcagccgctggcgtggtgagtcgaaggcaaatcacaagtattgacagtggagggtgattctcaccatatcagggaggcagacaacatcrggagacctccagcaagtaacagggccctgggcctgggcctttggacggaggtggggaaagagcaaggcagggtgctttctctgccctggggcccaagaac

SEQ ID NO: 311844 - DNA, 201 bp, Homo sapiens
gagtggggacaaaccggagaccctttgcagttgctgggtcaccagaaggggcgatgtaaaatacaaacagtgcatctctcggcctgtcgggaaaaccaatrgtgccttcaaagcaaagaaaaggaaaggagagtgaagccagggatgcctttgctcatgagagtgcccatcagggaaggagccacaggctgacagctcttc

SEQ ID NO: 311845 - DNA, 201 bp, Homo sapiens
ctgaagctgccctgggtaaggccagtctgggggcggaacactgtgttgggggagtcctgatcagccgctggcgtggtgagtcgaaggcaaatcacaagtaktgacagtggagggtgattctcaccatatcagggaggcagacaacatcgggagacctccagcaagtaacagggccctgggcctgggcctttggacggaggt

SEQ ID NO: 311846 - DNA, 201 bp, Homo sapiens
catggttgcgggtgcctgtagtcccagctacttgggaggctaaggcaggagactggcatgaacccgggaggcagagcttgcagtgagctgagatcacgccmctgcactccagcctgggcgacagagtaagactccgtctcaaaaaaaaaaaaaaaaaaaaaaaaaaaaaagagctctctctttagcttatctgcccaaacc

SEQ ID NO: 311847 - DNA, 201 bp, Homo sapiens
agggaaaaaggaaacagggaatgacagagagagagagagaaaaagaaaataagcgagatagagactggaaataacagagaccaaagggagacactgaagaygagactggggagaaaaataatggaaaaggaagaaagagtacaagaggaagtgagaggatgcggagaggttggcagggctgggggaaggttctagaggctc

SEQ ID NO: 311848 - DNA, 201 bp, Homo sapiens
gtgcgccctcctagagaagcctctatgggacagggaagagttaaatttgtgagtgtacctctaacaagtactagagttaggaattcttttttttttttttwaaaaaaaggccactctcggaaaatcccctcagtttaacaaagcagctaaatcaatttttaaaacccaatttttgtacctgggctaaggtaatgtcaatcg

SEQ ID NO: 311849 - DNA, 201 bp, Homo sapiens
caagaggagatgggttatgctctttgttggattagtgaactaacccacatgtttccccttaaagagaaaaaaaaaaagcatagtaaacagcccttgcccartgaaaagccctgggattccccaacacgcttgcccccctcaccatacatgtcacaaagtagaggacagggagactgggggcaacaggaaagtcggaggaag

SEQ ID NO: 311850 - DNA, 201 bp, Homo sapiens
ccactagtgcaactgaatttgccaaaatgacatgtggcagtgatatttaccattaggcatctgcacgtactggcttcagcttggggataaaattccttcartattcttggaccccaggttgctctctgcccctgacccaggccccattggcaggtgtagccactgcatttctgtttgcactgccggacacgtcagccactg

SEQ ID NO: 311851 - DNA, 201 bp, Homo sapiens
ttggctttgagtctaagcctcagactctccattcacagggttctcactacttcattcagccttttctgggtccaggcaggattaattgtgagcaaatgtgyccttttgtttctttctaccagtccctctgtccctgaagcctcttcctccttgccatcctaaacaagaacaaggaaagtatgcccccagcaagaagctcac

SEQ ID NO: 311852 - DNA, 201 bp, Homo sapiens
ggataaatggagtctaaaagccagtccagcactggattgaagggagatgggtccttttcctttgacaaagggctcatctcctcaccaagccaactgtgggrccatgtccacactgagaaatgtctgcacttgaatagatgtagaagggtgatgttaagagaacagaagtccagactgttgaggattttatagggttaactg

SEQ ID NO: 311853 - DNA, 201 bp, Homo sapiens
catggaggagaagggaagactgctgctgtgtgtgcccacacacttccttgagccagcctaatgccctatgttggccaatagcccctagtaagttggcataygccccaccatgacaggtagcattttgtagattggaaaattgaatctggaagtttaagtggttgctggtggtgactacagactgcaggaagaatattcatg

SEQ ID NO: 311854 - DNA, 201 bp, Homo sapiens
gttcccatgcctgtgaccctcatgcctcctcttgtgtggcacaggacctgctctctgaaagagtgaggacctaaaaatgatcactaacttcagatcctacrggcatcagctgaccctgatggatgcactggaggctcaaatgaggttgagctggcctgatttgtttaaaaacaaaaatgaccattaatgagaatgactaga

SEQ ID NO: 311855 - DNA, 201 bp, Homo sapiens
caagcaccagggatctctgttccatgccagatggatcgtggtgatgcccttgcctccttggtctgggcaagacccatatttctgcatccatctggagccaygctggccatttggcagtcttctccccatcattaacaagaccctcacacggtggggagcagccccaccggcctgctgattaatagccatcagtgagtgttg

SEQ ID NO: 311856 - DNA, 201 bp, Homo sapiens
tgcctagcgtgctaggcccagtgcctgctttgcataccagggagaagagcagaagataatccaaagtgttattttactttggaattcaacacatgctgctyttcctgggagaattattcctttagtcatatttagtttcagttaataatatattgaatttgtattcttggagaacctattctctttgatgaccggagttag

SEQ ID NO: 311857 - DNA, 201 bp, Homo sapiens
gctatagaaacacatttaaaacaggattacgtcttttatttcatggatcttcctcctcaagtgcgtgatccagggcgatgttgggtaggaaagggaaagawaattagatttgcaccttctgattgttccagctacagtcttagaaattacaatttcatgaggaactggcaatggatattaaggtaatatcactttggggga

SEQ ID NO: 311858 - DNA, 201 bp, Homo sapiens
cctatttgtcctggctctgtcttttgctgctcttctccctgatgaatttaactttacctgtaaggtctctggtagctccagcttatagtttggccttgtgkataaagtatccgccaatagttgacccagctttcttgggctctggagtgcccaacctccttctgagataaagcaaggcagggtgggccattcacatggtgg

SEQ ID NO: 311859 - DNA, 201 bp, Homo sapiens; identical to SEQ ID NO: 65062

SEQ ID NO: 311860 - DNA, 201 bp, Homo sapiens
ccttgggtcagagtccactgtaacaagtaatcttgtttctctctcactgcaaagccaatatgctggacagagaaacacattttctagtctttttttttttwaaaaaaaaggcaaacaaaacaaaatatacactcacaaaaacctctttgaatgacgtgttcaatgacaattctctcaccatgacagaaagttctgcttcgt

SEQ ID NO: 311861 - DNA, 201 bp, Homo sapiens
tgtaagtctttccatgtgacagcttttgaagtgttttgaagacccttatcttatccccaagtcttctcatctttatccttagtcctaaaaaaaaaaaaaaagaaatcctggtagaggaatgcaacagcccaaaccaagaggaacttcctgtaataagatgggttcttctgcagtctgtagattccaaaggcccccagggta

SEQ ID NO: 311862 - DNA, 201 bp, Homo sapiens
tgactctgacgtctctgcagctccaggcagaagctgtcacaaataggcacagacagccagggttccaggctgtggcagccagtgggcacggtgccccccccaccacaacacatcctcagtggggtgggggtagaagtgggaactggggcccctggggctgctgtgtaatccaggaaagccaggtagcaggtggaagggcag

SEQ ID NO: 311863 - DNA, 201 bp, Homo sapiens
ctgcagcctcactgaggctcaggtgatcttcctgtcttagcctcctgagtagctgaaactacggctacgtgccaccaggcatggctaatttttttttttttgtattaatggggtttggccatgttgcccaggctggtctcaaactcctgggcttaagtgatccacccacctcagcttcccaagtgctgggatgacagacat

SEQ ID NO: 311864 - DNA, 201 bp, Homo sapiens
atcctctgggccacatgtggtccaggatggctttgaatgcaacccaacacaaattcgtaaacttaaaacattaagagacttttttgtgggattttttttttagctcattagctatcattagtgttagtgtattttatgtgtggcccaagacagttcttcttctaatgtgacccacggtagccaaaagattagacacgcctg

SEQ ID NO: 311865 - DNA, 201 bp, Homo sapiens
ctgcatcctctgggccacatgtggtccaggatggctttgaatgcaacccaacacaaattcgtaaacttaaaacattaagagacttttttgtgggatttttyttttagctcattagctatcattagtgttagtgtattttatgtgtggcccaagacagttcttcttctaatgtgacccacggtagccaaaagattagacacg

SEQ ID NO: 311866 - DNA, 201 bp, Homo sapiens
tatttcccatcttctggtgactgtggccagccagaagcccaggcttccctggtggttggtttctcaggtctgtgtacctatttgtcctggctctgtctttygctgctcttctccctgatgaatttaactttacctgtaaggtctctggtagctccagcttatagtttggccttgtggataaagtatccgccaatagttgac

SEQ ID NO: 311867 - DNA, 201 bp, Homo sapiens
gtttttcggctctgggctgtgtgggcctgggtgttggagagaatccagtcccaggcagctgttctattggtgcctgcttcactgggcagttgatgcataamcttacataggtgtcaaggatctagactgttctgaatatgaaaagagctaaaggggaaaaaaaagcaaagatttgagtttcaaatccattaaagccatcct

SEQ ID NO: 311868 - DNA, 201 bp, Homo sapiens; identical to SEQ ID NO: 65061

SEQ ID NO: 311869 - DNA, 201 bp, Homo sapiens
catggcgaaaccccatctctactaaaaatacaaaaattaacccggcatggtggcgggtgcctgtaatcccagctactcgggaggctgaggcaggaaaaccrcttgagcccaggaggcggaggttgcagtgagcccagattaggcctctgggcgatggagccagtctctgtctccaaaaaaagaaaaagatagcaattatta

SEQ ID NO: 311870 - DNA, 201 bp, Homo sapiens
gttcaggggaaccccttagccagaaagccttaagacgctggtgctacccatccctgtggttccaggagcaggtggtgccagagagtggggctgtggcttcrtacccagacggccgcctgacccttcgctctctctctgccttgcagcgagacctcgatttcacagtagacttggattttaagggacagctgtgtgaaacat

SEQ ID NO: 311871 - DNA, 201 bp, Homo sapiens
cactatacatcctatgtattcaaatattactatattccctatgaatatgtacagttatgatttgtcaatgaaaaaattaaattgaattttaaaaatagatmaaaataagttgctccctactcgaagatgtaaagaaaaccaaactaatggcttggactgccagtactgcagggcctggggccttgtccacaaggccagctc

SEQ ID NO: 311872 - DNA, 201 bp, Homo sapiens
gtcctcattgccttcacatggaataggctgaggaggagggagaggaagggctggccttgctgtctcaggggtggctggaagaggtggaaggggaggcaggyacacttggtgtaaataaaaaaaaaaaatctgcgtgttcgtggacctgtgcagttcaaagccaggttgttaagggtcagttgtaatgtgcttacctcacag

SEQ ID NO: 311873 - DNA, 201 bp, Homo sapiens
acctggagggcttatgtttccagaccgggcagctttgtacgtggtagcgattgaagacagacagtacaaggacttcaaaatccactgtaagtcccctcttrcttctccggtggacttccactgcacaattggggtgggaggcactccagtgggcccgagatgagcaggcagtgacatgaacaccattgctgtccctgaaga

SEQ ID NO: 311874 - DNA, 201 bp, Homo sapiens
ctcatgtgtgctgtgggtccgacacaaccatgaacttttctctttataataaggtctagggttctatatattgcactgtaggatgactgcagtaaacaatratatactatacagtttcaaataaatagatggaagatattgaatgttcccaacacaaagcaatgacaactgtttgagttaatggatgtactaattatcctg

SEQ ID NO: 311875 - DNA, 201 bp, Homo sapiens
aaatcactctgcaagctgctattcaaatgctagtaattttttactgtcacaattaggactagtttgaatatcttttgtctcttaacccaatgccccccgccttttttccttcaacattgctcattcatccatccattcattgagtaatgattctgaatgtttgtgaggagtcaaatgctccgctatatcctggaaatagga

SEQ ID NO: 311876 - DNA, 201 bp, Homo sapiens
gcagctgatgtgcttcgttgattctgtgagttgtggtgctgtgggcttgttccaggcagggttctggtcaccttctctgcctgctgtctccgggtgacccyatccactctctcagcgtcatgaccagttcccattctcagactgcagcccacatctctcctctgagatacgcgaggcatagctgcctgcctgcgggacatc

SEQ ID NO: 311877 - DNA, 201 bp, Homo sapiens
gaaagctgctcttttccctttgtaattagtaagattttctgggggaggtactttgagagcatgtaaatatttcattattcaccaaactaacatttatctgkctatctatctacctatctatctatctatctatctatctatctatctgtctatctatcctgtctatctaatctatctaatctagctgtctatctgtccatc

SEQ ID NO: 311878 - DNA, 201 bp, Homo sapiens
acagacagctgaaagctggtctgggtcagagagctcacaaacagtggaggtatgatctgaatgcgggaatttgggatttgaatgctctagagtctgtgtayttaaccactgtgctgtatggttttccggcttactgagcacctgctatgcgccatgccccatgcctggttctagatataccatctgtcttgttgtctttgg

SEQ ID NO: 311879 - DNA, 201 bp, Homo sapiens
tggaagagacgggagcagaacagttgagggaaggcacctttgattcaggcaattcatcctcaggttagccaggtggagtcaagaaagcagctgaagacagkgctctttagcttccctgcccagaggtccactgtgccatgtgaagggcccattacaggaggaacagggagcctcgtgacccacaggctgcctaccgcactc

SEQ ID NO: 311880 - DNA, 201 bp, Homo sapiens
cttgagctgattctcctcatggaatagggcaggtatgggtataaggaaatgccaggacagcccctggcacatggcaaacacgcaatagtgttagttccatktacgctttctcctgatcactcagctatgcttctcttcctcggctaagggaatcaccattctgccagcctcttctccctctcccctgttccctaggtgtca

SEQ ID NO: 311881 - DNA, 201 bp, Homo sapiens
gttcatcccgtttgctgttccccaattctacagccatacccggcctgtggcaggcatcctaagtggaagtctgtggaatggtgaatgaatgcactgcactrggaatgctgcaggcagtactggtcatgctcacttcaaaatgtagaagaaaagctgcctaaagcctagaatcagagagactgtgatggggaagggaactgt

SEQ ID NO: 311882 - DNA, 201 bp, Homo sapiens
atccagaatcaagacatcggctctgggctgcctgaaagatggcgaggatttgccctgagtgttgaaggctctaacccagtggctttccttcctagtctttsgtcacacccccaccacagtcctacgtggctcaaagaccaaggatctaaacccagttgtgagcctactcctctttttgcaattatagtgttatgcctcctc

SEQ ID NO: 311883 - DNA, 201 bp, Homo sapiens
tgagtcttcctgggaattgggagcatgtcatcagggggtgaggaggtgagtagttgtatgtctagtagggggagtgggaaggtgagttctaccagaaatcraggacatgattctttacttccagaagccatgaagaaaatgatgctttttttttttttttttttttttttttctcagagacaaggtctcactctgtctccc

SEQ ID NO: 311884 - DNA, 201 bp, Homo sapiens
agcagaccctcgagtcctatgttctcgggtgagtgggggatttgggcagggagaggggtactatattgtggaagcgaccaccctgaggcttcatgacaccsggggctcccttatgccactgcagcaatagggtcagtttgctgcaggacatagtcccagtcccaccattcatggagggtagagatatcgacatcctttttc

SEQ ID NO: 311885 - DNA, 201 bp, Homo sapiens
ccccaacccatcccactcccactcttcagaggcaaatattattattaatgatttcttttgtatcattccaccaaatttcagtgagtgcacaagcacatgcrtatccatagatgcctcttttttggctttttattttgaaataattatagattcacaggaagttgtaaaaatagtacacagagttgtgtgaaccctttgccc

SEQ ID NO: 311886 - DNA, 201 bp, Homo sapiens
tgatgcctcctattgctgggaacttgcgtatcaaaaaattggggaaggagtagtctggttcatctacatcactggagggcctgataaaacacagattgctrttttggtccagcaggtctgcccccctcagaatttgcccccaggtactgttgatgctgatatttcagggaccacattttaagagcgatggatggagcagtg

SEQ ID NO: 311887 - DNA, 201 bp, Homo sapiens
aacagcacagtgcagacgtctttcaattccacctgctccccatgcgagattgattttcagccactttccagttgaaattcttaagagttattagttcttcrtgttccacgttccccagccagaactgaaaattctcacttcttattttccccttttatttatttttgaaaacagtccagccttgttaaaaatggccagcag

SEQ ID NO: 311888 - DNA, 201 bp, Homo sapiens
aaaggtttaagggacctgtgtgaattggaacacacatttggcttcttctgtgggtggaagttacagagggatgagtgtgaactttcttcattagttttgargaaggacctaatgactggagatgccaggacgtggactgatctgcctggcagatggtgaattctccatccctaaaggtgttcagcaagcactaggtgggtg

SEQ ID NO: 311889 - DNA, 201 bp, Homo sapiens
aggttcaggaaagactgtgaggcaaggaccagaaatgatggaatagaaaaatggaacagtagctgtaaaggaaggtggcattaagggaagaagtttttttwaaaaaaaaataggagatatgaaaacgtgtatgtgattcactggtgtagtagagggacagagaaaaattgcagatgcaggaaaaagtaaattcagcagcaa

SEQ ID NO: 311890 - DNA, 201 bp, Homo sapiens
cagaatgtctcaaaagcattcaaaatccaacaagaaaaagaggagactccctctgtgtttctgcaaaggctcttggggaccaaataagaaaatactcaggrttaaatccagaaacccagtagggcaaggccttttaaaggttaattttgtgactaaaagctgggctgatattactaagaaactgcaaaaaattaacaaata

SEQ ID NO: 311891 - DNA, 201 bp, Homo sapiens
ggctgcagcaggaactgaggcagcagtggagctggagagaagtaatccctgtgggacatgcttggagatggaggcacaggacctgagggtgcattgagtgyggggatgagaaaaaagagagaagcaaggattctttttgacttgggcaactgggtggatggtggttggctggaggtgaagtactcatgggggtggcaggag

SEQ ID NO: 311892 - DNA, 201 bp, Homo sapiens
tccagtgagaggggctgcagcaggaactgaggcagcagtggagctggagagaagtaatccctgtgggacatgcttggagatggaggcacaggacctgaggrtgcattgagtgtggggatgagaaaaaagagagaagcaaggattctttttgacttgggcaactgggtggatggtggttggctggaggtgaagtactcatgg

SEQ ID NO: 311893 - DNA, 201 bp, Homo sapiens
tgggggtcaagaagaagctaaacccaatgctcccttaaatccttacctaaacttgagggaagaattagaacaacgtgagaaggacattaagaatttccctmttccttgtaaacagcaggcatctaatgtgcgccctcctagagaagcctctatgggacagggaagagttaaatttgtgagtgtacctctaacaagtactag

SEQ ID NO: 311894 - DNA, 201 bp, Homo sapiens
catgcccagaaacacaaagaagatcatgccgtgtggccagggcatggaaagcacagggatcagagagggaggaggggaccagatcacacaggatttgtaamcaggaaaacaaggttagattttattctccaggtgctgcagtctgttggaggatttcaagcaagggaggtggcttctctatggaggatgggttggaataag

SEQ ID NO: 311895 - DNA, 201 bp, Homo sapiens
ccatttgcagaggcctcagcgacctgagcagcattcagtgggtctttgctcccatgcatttggttgggccatcccatagccagccctggggaccccccccccgcccactgactcccaggttgactagatccccctagatcctcctggccacctgctgcctccagaggtctgctcctaagtcacccagcagggcagcattcc

SEQ ID NO: 311896 - DNA, 201 bp, Homo sapiens
gttcaaaagctaaagctacggagagatactctaaccattgggcaggaagggagcaagtgaagaataaaactacttacattttgaccaaagcctccctccasaaagcgaagtacccagctagggtacgagagcatcaacatcacgtgcttgctggacactgttggcaatgggtggccctgggggcactcttcaaccgctctg

SEQ ID NO: 311897 - DNA, 201 bp, Homo sapiens
gaacaagacaaacagttcaagacaaaaatgaacagaggacttgaataggcacttcacaaaagatgatacatgtgaatagccaataagcacatgaaaaaaaagatctacttcagtaaccatcagggaaatacaattaaaactgcaatgaggcatcaaatcagtttacatccactaggatggctaaattaaaagatcagtaat

SEQ ID NO: 311898 - DNA, 201 bp, Homo sapiens
aaaataaaaggcatacagataggaaaaaagaagtaaaattgtctttattcacaagcgacaggatttttcacacagaaaaataaagaaatctaaaaaaaaaaccctactggaattaatatgtgaagagagaaaggctgcaaaatacaaggtcatgtatacaccaacccattgcaaaatgaaaaattttaaacaccatataca

SEQ ID NO: 311899 - DNA, 201 bp, Homo sapiens
gggcttatgtttccagaccgggcagctttgtacgtggtagcgattgaagacagacagtacaaggacttcaaaatccactgtaagtcccctcttgcttctcyggtggacttccactgcacaattggggtgggaggcactccagtgggcccgagatgagcaggcagtgacatgaacaccattgctgtccctgaagaggagctt

SEQ ID NO: 311900 - DNA, 201 bp, Homo sapiens
ggcaggtggatcacctgaggtcaggagttcgagaccagcctggccaacatggtgaaaccccgtctctactaaaaatacaaaaaaattagcctggcatggtkgcgggtgcctgtagtcccagctacttgggaggctaaggcaggagactggcatgaacccgggaggcagagcttgcagtgagctgagatcacgccactgcac

SEQ ID NO: 311901 - DNA, 201 bp, Homo sapiens
aagaggagcttatctgggaccctttctggagtctgctctctaaatgtttctatctagtcccaagggtgttaggtctacagacagaaaataagccatatggytgggatgagagaaatgtcctggggtgaaagaatgaatgcaatgtgaattaaaaattggactgaggcagcagaagctgagtttttgcagagatcagcaggg

SEQ ID NO: 311902 - DNA, 201 bp, Homo sapiens
aagcaggctccgtcattgggggtggatgcggttagaattaattctactaccaggggtaagggggttcacaattattaaatggagcctgatagaaaaaaaaatcccatcaaactaatagtcagcagaattaaaacctccaccccccaaaccataaagttcaatgcctgccaagtcttacagtgtgaaaatttaggaaaccaa

SEQ ID NO: 311903 - DNA, 201 bp, Homo sapiens
tcaacacggtgatctttgccagggacaagtggctggtaagtgtcctgcatgctgtccccgcgttggccggctggctgtcctgctcctctacccaaggcctrcagcctaggaggcatacgaagacttcagagaagactgaggccaggaggtcactgccccaagcccctctctctagagcagatctgtatcagggaacagaat

SEQ ID NO: 311904 - DNA, 201 bp, Homo sapiens
atgcctgtcagccaatgggcagagtgccaggctgcagaccagggtctgggccagtcatttatttgtccccatgacctgtggctattgaaatgaatgccccyaaatccatgcatccttttgcctcctgcatggcacacggcagacacttcataagctggctgttggggagagtctcagggagccccatggaaaagagaacct

SEQ ID NO: 311905 - DNA, 201 bp, Homo sapiens
agccataaggaatcattgaaggttatagatccagagactgacacagtctggatgaacctgagttacgaaagaggggcctaggcaaagaagtaagtcttcamgcagggagacctgttctgagaagaagattgatgagtcaacacatattgctgtgtattaggtgctgctgtgcactgaggatacacaggacaatgaggtgta

SEQ ID NO: 311906 - DNA, 201 bp, Homo sapiens
atctgacagcaagatcctttagaggtggaattcctgccagatggggggtgcgtgtgcgtgtgtgtgtgtgtgtgtgtgtgtgtgtgtgtacgcgtgcgcaygcgggatagaaggagaaagtaaccacgtctagattgtaagccataaggaatcattgaaggttatagatccagagactgacacagtctggatgaacctgag

SEQ ID NO: 311907 - DNA, 201 bp, Homo sapiens
tgctgtttctgctgcagaaaagaggaagcctcctagtcgaggggctgggctctggggagtcagggtaactggggctgatttggttgggggttggggaaccwgagcccagaggacctttgtgtttttgaagcctagctacagctgatcccatcctcacagatggcctggacccccattccaaaagaccacctgcccttattg

SEQ ID NO: 311908 - DNA, 201 bp, Homo sapiens
ctgaagcctcttcctccttgccatcctaaacaagaacaaggaaagtatgcccccagcaagaagctcacccatagtacaaggcacttctgtaaatgtagaayagatagaagtccactagtgcaactgaatttgccaaaatgacatgtggcagtgatatttaccattaggcatctgcacgtactggcttcagcttggggataa

SEQ ID NO: 311909 - DNA, 201 bp, Homo sapiens
aaaaatctggatgtctcacttacaaacttgaagctacaggagaagttttcccaatttagagtctattgctccctgctgtgcatttagttctgattaatcaytctgtaatttaccagccagagtcctgtcatagttcgttgaacaaactttccatcatccttctggaataaaaacatggatccggacggtgacctcagtgca

SEQ ID NO: 311910 - DNA, 201 bp, Homo sapiens
tgagacaggatctctttctctctctgtcacccaggttgaagtgcagtggtgtgataatagctcactgcagcctcactgaggctcaggtgatcttcctgtcytagcctcctgagtagctgaaactacggctacgtgccaccaggcatggctaatttttttttttttgtattaatggggtttggccatgttgcccaggctggt

SEQ ID NO: 311911 - DNA, 201 bp, Homo sapiens
agaggaagaccctggccttccaatttaggcctctctgggaaacatggaatcttgaacaggagctgaagtggaagatgtgtgcttcctgaggccgccacctrgagaggaggtggtaggctccatgacctcccagaccccagctctgaaatctcagcgtctctaacagtcggcactgggcttggtgcctcagccacgagaaga

SEQ ID NO: 311912 - DNA, 201 bp, Homo sapiens
ttttttttttgagacaggatctctttctctctctgtcacccaggttgaagtgcagtggtgtgataatagctcactgcagcctcactgaggctcaggtgatyttcctgtcttagcctcctgagtagctgaaactacggctacgtgccaccaggcatggctaatttttttttttttgtattaatggggtttggccatgttgcc

SEQ ID NO: 311913 - DNA, 201 bp, Homo sapiens
gaaatgctgagtacaggggactattggggctggagagcacagcagggggtgactctggacacttctgttctcatcccatgctccattcagagacaactctrtccccagcctccagagggcaggggctagcgagaggaagaccctggccttccaatttaggcctctctgggaaacatggaatcttgaacaggagctgaagtg

SEQ ID NO: 311914 - DNA, 201 bp, Homo sapiens
caggagttcaagaccagcctggccaacatggcgaaaccccatctctactaaaaatacaaaaattaacccggcatggtggcgggtgcctgtaatcccagctrctcgggaggctgaggcaggaaaaccacttgagcccaggaggcggaggttgcagtgagcccagattaggcctctgggcgatggagccagtctctgtctcca

SEQ ID NO: 311915 - DNA, 201 bp, Homo sapiens
gataagggagttcataggagacgctgctggcttggggaggggacaggaaggaagagtcagctagcctgggttctagtctttgccctgctgcactctagctrtaggagcttggagcagtttcccagcctctctgagctctagtttacctaacaacaaagtgggacttaccttttcccgaggtagaaatggaaatgggagtga

SEQ ID NO: 311916 - DNA, 201 bp, Homo sapiens
ctgaggcagagaattgcttgaacccaggaggcggagcttgcagtgagcagagattgcaccactgcactccagcctgagactccattaaaaaaaaaaaaaaacaaacaagctccacccaaactgggaaggtccccatcaggtgctcctaaccaccaaaccaccgtgcaaatagctaaacaagggtaaatacattacactagg

SEQ ID NO: 311917 - DNA, 201 bp, Homo sapiens
agagtggggacaaaccggagaccctttgcagttgctgggtcaccagaaggggcgatgtaaaatacaaacagtgcatctctcggcctgtcgggaaaaccaayggtgccttcaaagcaaagaaaaggaaaggagagtgaagccagggatgcctttgctcatgagagtgcccatcagggaaggagccacaggctgacagctctt

SEQ ID NO: 311918 - DNA, 201 bp, Homo sapiens
tagtccatgtgactttttcctccctccgcaaacactgatttcagtccttaagtgagctcaggagaattaagaagatacccaatttttttttttttttttttgcctggctaatttggcttttcagagtcctaaattggcttttggctgtcaaagacagtgaaacacaacactcctgtctccaattcaggagtgggtttcatt

SEQ ID NO: 311919 - DNA, 201 bp, Homo sapiens
ccccaacctgtgaaatagggcagatggttttccccattaacaggtgtggaaactgaggctaggagaggtgggtgactgagccctttgctaaggtgtgtttstgtggatgcagaagcaccaggagtgctgctgagcctgaaagcctgttgggaggggaggcagtgtgtgggcacagcaggatcagatgtcctctcagtggtc

SEQ ID NO: 311920 - DNA, 201 bp, Homo sapiens
gaggcatacgaagacttcagagaagactgaggccaggaggtcactgccccaagcccctctctctagagcagatctgtatcagggaacagaatggttgcccygggtccagcatgtgtaaccatcagagtggacttccgtgggtctcaccgcagcctcttttgcaataacagacatccgttctctcttgtcgagttaaaggtc

SEQ ID NO: 311921 - DNA, 201 bp, Homo sapiens
tcttcccacctcccctgttctctcacccctcagcccctgatgctccctacacccactggaagcagaccgtcttctacttggaagattacctcactgtccgraggggggaggaaatctacgggaccatatccatgaagccaaatgccaaaaatgtggtaagtgccgagggacataaggacataagggagaagggccccacag

SEQ ID NO: 311922 - DNA, 201 bp, Homo sapiens
tgttcccatgcctgtgaccctcatgcctcctcttgtgtggcacaggacctgctctctgaaagagtgaggacctaaaaatgatcactaacttcagatcctaygggcatcagctgaccctgatggatgcactggaggctcaaatgaggttgagctggcctgatttgtttaaaaacaaaaatgaccattaatgagaatgactag

SEQ ID NO: 311923 - DNA, 201 bp, Homo sapiens
agggacttcaaaatctggcgatggtgggggaagggtgaggagggagaagagaaatgcgtgggcagggggctgccagggaagactggagtggggggggggggcactgcagtctcgcatttgactttctcccaccctctttcccaagccactctggccgccacctttgcccctccctctcagcctgaaaggggcttggagtcc

SEQ ID NO: 311924 - DNA, 201 bp, Homo sapiens
acgtccacgccctggtcacctattttaatattgaatttaccaagtgccacaagaaaatggggttttccacaggtgagctgtttgttgcttcccagagcctyctccctctcccatgcttcctcaagtctttgtggggtgaccagagctggccttgacttggggagaaggggctgggtgttagctgggtgacacctatcaacc

SEQ ID NO: 311925 - DNA, 201 bp, Homo sapiens
tctccccatcattaacaagaccctcacacggtggggagcagccccaccggcctgctgattaatagccatcagtgagtgttgaggaaacgtggtgcggatasattgggtttgattgatctgtaaatacaaacaagaaatgctgagtacaggggactattggggctggagagcacagcagggggtgactctggacacttctgt

SEQ ID NO: 311926 - DNA, 201 bp, Homo sapiens
aaataaaaattgagcactgctgtcctagccctcaccccagacaaggtgacagtccactgcatgagagatggtggcaagggggtgcttgtctggtgactctrtgtgcagttcaaaatgtgatgtctttgtcaggtgaatagattacgagacccatttccccacaattcatcaacagaaacctggagggcttatgtttccaga

SEQ ID NO: 311927 - DNA, 201 bp, Homo sapiens
gggggctgggtttcggttttcagtctgccacaaagttgtgatgcagccgtgggcaagtcaccacccctgtctgggcctcagcgtctctatccattgaatcrgtgtgggtcttgctgtgattttttttgacgccttgctcctttgtcctatgccctttccagatcgaatgctccagtatttctgactactcagagaagatca

SEQ ID NO: 311928 - DNA, 201 bp, Homo sapiens
tctacattaggctcttaaccagctccttggaatagggtcatgcagccaagtcatgaatccacacagtactttgtcatcttctcccttaggatgccatggcrgtggggccttgtaaacgtccttgttgaagtcccacatgatatactgcaagcatgggctctggaatcagactttctggctcacacccagctctgccagaat

SEQ ID NO: 311929 - DNA, 201 bp, Homo sapiens
ccaacatcccaagctgagagtgggcacacctgctgcattctaatgaggcagccccactcgcctttgccagcccgcccgggatctcaccgacgtgaaatctsatgttgctaaactgggaagtctgcttatttcccaagggcggtagcctagatacactgggaagatgggaccatcccactgcccccagctcactcccctgca

SEQ ID NO: 311930 - DNA, 201 bp, Homo sapiens
gctgccaaggcaggggccaagaaggtgtttggggtgagcacgccgcttcctcctgcatgctggcttccacagagccagcctcttgccctctgcctccaccygcccttctagaagtacaaaatttggtccatctcttttgctggggtcacaccttcgaggagtagaagaaatcaggtgtgactctcaggaaggggagcaggc

SEQ ID NO: 311931 - DNA, 201 bp, Homo sapiens
ggtttagagaggggttgctcacccaggcctgcagagcctctccaaatccatccgtacttccactgaagatgtccaatataagcgggtcagggtcaccctgyctccaagtggaatgtaaatacataacacgtggagccttttttctgagtgtgccagcatcccacatgtgcccttccagttcactctgcacctgtctgcacc

SEQ ID NO: 311932 - DNA, 201 bp, Homo sapiens
tgctttgcacactgccagccctgggtttaaatcttggctttgccatgtcctaactgggtaaccttgagcaaattatctaatacctttgggcctcagttaarggataattttctcaatcccacagacttgtcatgaggattaagtgagatgacatatattaaaggacgtgacagttcttggtcctataatgggactagatgg

SEQ ID NO: 311933 - DNA, 201 bp, Homo sapiens
aggcagagatgctcctggacccacccaggtgagaaaactgaggttcagagaggttaggtcatttgtacaaaggctgaccagtaagtggtggtgctggaatwtaaactgtagttgatttcacgttaaaagcccatgattctctgtgctgcattaaaggttcagtggatggggacaggaaaagggagagagatgggccttcta

SEQ ID NO: 311934 - DNA, 201 bp, Homo sapiens
tttgaactccaaagcctaggcctttaaccattacatgcattgactctcaggcttttgcttagcactagcagtgaactcaaactcccggcagagtccagggrgaaaagagcaggtgcatagctgcaagtctcttgagaaagacacagaaggcaatgtgttttggcgtgtacgttttatctggggagagggtggatagctatt

SEQ ID NO: 311935 - DNA, 201 bp, Homo sapiens
gcttgcatggcagcaaagccagagctcaaaccacataatgataaccacttttatgtatcaagtgctttctgtgtgccaggcaatgtcttatgcactttacrtataatcacatttaatcctcatagcaatcgtatgggattaccatctttatcatcatttccattttacagaatccttagaaaccaaggcttagaaaggtta

SEQ ID NO: 311936 - DNA, 201 bp, Homo sapiens
taaatgtttgggaatgaatctcaattcaaaaaacattatctgtgagcctattctgtgctaaatgctgtactatgggtgttgagggtacaggagaggttatrtggtcaggagcgtttagagaaggtctcacaaaggccatgagacattaagatcaccatttttgggacttgaagacagtaaagatcatgtaccccaaaggtt

SEQ ID NO: 311937 - DNA, 201 bp, Homo sapiens
ccccgttttcaactttattggttattccctgatatattcattctgttaataagttcattttaaaaagtcttctttccttatattgttatttcgatttctarcatttccactggcttttttaaaaagtttccatctcgctaatgaaattctccattcattgatgcacactgtccaccttttccactagcttctttaacatac

SEQ ID NO: 311938 - DNA, 201 bp, Homo sapiens
tggctcagctgctgtctgtgggcttcacttccactcatgacatccagagtttcctctggttccagcccattttatgcaaggattccactttcttcatgagmgcctaaaatgtgtcaatctagtgtaaacactttcccttctgcacagaggagaatctgtaagtagcatctggtggcacttgttctatttttctctgacctc

SEQ ID NO: 311939 - DNA, 201 bp, Homo sapiens
cctcttggatggctcagctgctgtctgtgggcttcacttccactcatgacatccagagtttcctctggttccagcccattttatgcaaggattccactttsttcatgagagcctaaaatgtgtcaatctagtgtaaacactttcccttctgcacagaggagaatctgtaagtagcatctggtggcacttgttctatttttc

SEQ ID NO: 311940 - DNA, 201 bp, Homo sapiens
tatagcttgatggttgaagggcggccctcttggatggctcagctgctgtctgtgggcttcacttccactcatgacatccagagtttcctctggttccagcycattttatgcaaggattccactttcttcatgagagcctaaaatgtgtcaatctagtgtaaacactttcccttctgcacagaggagaatctgtaagtagca

SEQ ID NO: 311941 - DNA, 201 bp, Homo sapiens
aggggggcccaggttaaatgctttgcacactgccagccctgggtttaaatcttggctttgccatgtcctaactgggtaaccttgagcaaattatctaatayctttgggcctcagttaagggataattttctcaatcccacagacttgtcatgaggattaagtgagatgacatatattaaaggacgtgacagttcttggtcc

SEQ ID NO: 311942 - DNA, 201 bp, Homo sapiens
atccacagttcaacaaattgtggctctgtggatttaaacaattgccatctaatcgtcgttagtggcactgatgaaaactcggctggactctgctatggatrtgtgtatttgtgtgggttcatgcctttctggaaatataaactcaaagtgtgaagttcagagccaggttcagaagaagacaaaagtgggacagctgtttga

SEQ ID NO: 311943 - DNA, 201 bp, Homo sapiens
gtcgcccaggccatgtgtgatccaatactcaagaattatgggtgggccaggcatggtggctcatgcttgtaatcccagcactttgggaggccgaggcaggyggatcacttgaggtcaggagtacgagaccagcctggccaacatgacgaaaccccgtctctactaaaaatacaaaaattagctgggcatggtggcaggcac

SEQ ID NO: 311944 - DNA, 201 bp, Homo sapiens
aagggagtgctcccagtgttcctgagtcctctgaccctttctccaatccggggggcccctctgggagggggccaggccaggcctggagcaggggagcaggygaaagtgtgtgtctgtatactccacagccagagagagcacacaaggtgcttacggtccatttgttttacattccagctcccgtgtctctccccagccata

SEQ ID NO: 311945 - DNA, 201 bp, Homo sapiens
gcgctgggcagctgtttccaggggagcagaatgcttggcatcactttcaactcacggaacatattcttgaagcacctttcagaggctccgtgggttgtaaygggtttctgatatcatgacaactgctttttggccatggttggttagctccgttggatagagcatcgaacttcaagccaaagtcacaggctacatagacac

SEQ ID NO: 311946 - DNA, 201 bp, Homo sapiens
gaaggattttaatcaggaaagtgacaagacaagatttgcatgccacacatgctcaccagctaacgagctcaatttggcagttgtttcccttgaaaaatggyaatacgcttaacccactgcctacttcagaaaatcaaccgcagaacaggtcatccgtagcagcggcagaacctctaggaaccatgagtgaaggatggggac

SEQ ID NO: 311947 - DNA, 201 bp, Homo sapiens
gcaaactatgtcaaggacacattttccttaggcaatgagaaaacactgaaggattttaatcaggaaagtgacaagacaagatttgcatgccacacatgctyaccagctaacgagctcaatttggcagttgtttcccttgaaaaatggtaatacgcttaacccactgcctacttcagaaaatcaaccgcagaacaggtcatc

SEQ ID NO: 311948 - DNA, 201 bp, Homo sapiens
aaaggactttgggcaagtttactttctgcgccttgggctcaggcagctcctttctgccattgacatcctgtgacattgagtcattttcccacattaaagamgcttcttggtgcatagtcctcaattctccaaaaggcctatgaattctctagagaatataattccaaacttacagctagaaaaattatatcccagaaagga

SEQ ID NO: 311949 - DNA, 201 bp, Homo sapiens
cattcctacttggcaagattactgtggaggggttcacagattgagtagaagaataaatgcctccaagaggctaagactccatccacagttcaacaaattgwggctctgtggatttaaacaattgccatctaatcgtcgttagtggcactgatgaaaactcggctggactctgctatggatgtgtgtatttgtgtgggttca

SEQ ID NO: 311950 - DNA, 201 bp, Homo sapiens
tccaacctatccatcagactgggcacatctgcggttcctgccccaacagggtggtccattcctacttggcaagattactgtggaggggttcacagattgartagaagaataaatgcctccaagaggctaagactccatccacagttcaacaaattgtggctctgtggatttaaacaattgccatctaatcgtcgttagtgg

SEQ ID NO: 311951 - DNA, 201 bp, Homo sapiens
cacttctctgtgacacaggcctgatccttaatgagattataccaaacatgtttttgtaaagttgaacatggctgtgtctcctcaaccagaaccaaatacarcaaaggagcaaagaacccctcaaacaggcaaacacccaaaaatccaaattaaagcaagaggcagaagctccaacctatccatcagactgggcacatctgc

SEQ ID NO: 311952 - DNA, 201 bp, Homo sapiens
ctagagcagatctgtatcagggaacagaatggttgccccgggtccagcatgtgtaaccatcagagtggacttccgtgggtctcaccgcagcctcttttgcrataacagacatccgttctctcttgtcgagttaaaggtccgtttcggtcagcaagtacttaggacttgcatggctgccagagccaggtgtgctattcatct

SEQ ID NO: 311953 - DNA, 201 bp, Homo sapiens
ctgcgtgttcgtggacctgtgcagttcaaagccaggttgttaagggtcagttgtaatgtgcttacctcacagggctgttggaaggatgacgtgataccacrcatataacgggcttagcgctatgccaggcacatagtaatggctcaatttattttacagggaaaacatgcaggtagttttcaattatgttggtataaacta

SEQ ID NO: 311954 - DNA, 201 bp, Homo sapiens
tcatgatataaatgcaggaggaggaactgacccatagccacacagacacaggcagacattagggaagaaccttcaagaaacgtgcaaagaaaaaaaagtargggaggccattaaagacaatttttaagtttacaaaactaaggcaagccaggctttgcatgcaaatgattaggcaggtgagtcatgcatatatttgtcagt

SEQ ID NO: 311955 - DNA, 201 bp, Homo sapiens
agaacagaagtccagactgttgaggattttatagggttaactgattccttctgcctttttgcaagcagagattgtgatttttgctattctgtgaccccctrtatctagctatcatctatctgtcttctatatcgtctgtctatctatcaatcatctcttgtaatccatattgatgaggttacagcaactaattgataagag

SEQ ID NO: 311956 - DNA, 201 bp, Homo sapiens
gttctgattaatcattctgtaatttaccagccagagtcctgtcatagttcgttgaacaaactttccatcatccttctggaataaaaacatggatccggacrgtgacctcagtgcaaccttgagttgatgcagttttagtgacttggggtccagattgggcatggagctctgcagcctacggctgctcggaatcttaatatc

SEQ ID NO: 311957 - DNA, 201 bp, Homo sapiens
tttgaaatacaaacttgtctaatcctcaggacaactctaggaggcagggaccattttattcccattttagagaaaaggaaactgaggcactgagaagttcrtaagtttgcccaaagttgtatagctgggaaatggcagagctgggattcagctccggaatctacactctcaggcaccatgctgtgctatgcatctttccct

SEQ ID NO: 311958 - DNA, 201 bp, Homo sapiens
tcagactatgtatacaagattggagtttgaaagtcaccttcactcagagactctgcttgcctggtgtggcttagggaggagttgagccttctgactttacrgaggagaccactgtcatcccccaagacctatcccctgtgctcctcaagtctcaagagccttcagttgtggctgaacaatcatgtatatctcttggagatg

SEQ ID NO: 311959 - DNA, 201 bp, Homo sapiens
gaaaatcactctgcaagctgctattcaaatgctagtaattttttactgtcacaattaggactagtttgaatatcttttgtctcttaacccaatgccccccsccttttttccttcaacattgctcattcatccatccattcattgagtaatgattctgaatgtttgtgaggagtcaaatgctccgctatatcctggaaatag

SEQ ID NO: 311960 - DNA, 201 bp, Homo sapiens
gaagatggaagaaaggaaaatgaggagggaaggacaccgccccgcactctgagtgttgagcaagcttcggctgagtttaccctcacacactcacgtgcatygggggcttcgacttctctcgggaggacactgaggcgcagttaggaagggcagtggccaggcataaatccaggcctggctccgggtcgcatgctcctcatc

SEQ ID NO: 311961 - DNA, 201 bp, Homo sapiens
gcagacacttcataagctggctgttggggagagtctcagggagccccatggaaaagagaaccttggaatcagagttgaatgacagcttatgggtgctggargcccctgtgaccttgaccgtgcacaatgcccaggccagctaggactttttcctctccttaatatatttaaatggagtcaatactggggtcagcttcatgc

SEQ ID NO: 311962 - DNA, 201 bp, Homo sapiens
aagatactattttccccatttcacagatacagaaactgaggcctgcattgctcaggtcacctagctaataagagctgaaggtgggtgaaatctaggtgtgygtggctcctcggtggactgccatctctggacagatcacagccatgagcccaactgctgggagctggaagggctcacctacctccctttcaggaagggctg

SEQ ID NO: 311963 - DNA, 201 bp, Homo sapiens
agaaatcagatcatttgtcatcttgggagaggctgaagattgactacaaaagggcatgaaggactttctggggtgatagaaatgttctagattttggttayggtggtgcttacacaggtatacatttgtcaaagcccttttactgaaccagaagcttaaaacctgggctttttgttgcatgcaaattataccttaatagtg

SEQ ID NO: 311964 - DNA, 201 bp, Homo sapiens
ggtcagtttgctgcaggacatagtcccagtcccaccattcatggagggtagagatatcgacatcctttttcccatcactcctgaccagccgcaggagaagkgtaggttagtcctttgccttctctgatttcttttctctcaacatcccaagcagttgctccatgtccacaagaatcccaggtggtagggaggtcagatata

SEQ ID NO: 311965 - DNA, 201 bp, Homo sapiens
agacaacatctttgctctcataaagcttacagtctcgggggaagacagacatgaaggcaagcgaacaaacaaaatcacaacatcatcacaaactgtgaacrtgcttagaaaaaaacagcatggaataattgagaaaatggggatgtgttttttccaattgggtggttgcaggggcatgctggctgtcacacactgcctgcc

SEQ ID NO: 311966 - DNA, 201 bp, Homo sapiens
aacaaaccttattccagcatctatcagagacaataagggtcttagaatctagaaaacagggtcctgggagggcacagttcccacacgtctatttcttccayaggacctgcacgctgccttgctgttggagatctgtgcagtaggcagttgtggaattaaaagcaacaccccatgtcgctgaatgttcagggatcacaggcc

SEQ ID NO: 311967 - DNA, 201 bp, Homo sapiens
ttattaggggctcagagactgtggaggtcaagtgcctgatatagggcctcacatacagtaggtgctcaaatgtcagctacaggtcatttcaggtgtaaggktctgcaccttgatgattcttggccacacactcccagccttatataagtgctctgacagtaatcctctgtgctttgcaaccacccagtcctgggatgattc

SEQ ID NO: 311968 - DNA, 201 bp, Homo sapiens
cagctgggcctctgcaacttaatggtagggaggactttgtcaaatctcttcccccttctgagcctctatttgccccctttagaggagataggccagtgcamagctcgtaaggttattaggggctcagagactgtggaggtcaagtgcctgatatagggcctcacatacagtaggtgctcaaatgtcagctacaggtcattt

SEQ ID NO: 311969 - DNA, 201 bp, Homo sapiens
agtggcaagggacagctgggcctctgcaacttaatggtagggaggactttgtcaaatctcttcccccttctgagcctctatttgccccctttagaggagayaggccagtgcacagctcgtaaggttattaggggctcagagactgtggaggtcaagtgcctgatatagggcctcacatacagtaggtgctcaaatgtcagc

SEQ ID NO: 311970 - DNA, 201 bp, Homo sapiens
accgaggcaaaggcttgaagagtgcaaacctttgtccccaagggaatagctgccctcgtgcccattcctcccttcacacacctgttccagggaggagggamctccaggtccagggacctccataaagctgagtggtctttactttttcctcccagggtttgcaacaggtgggtagagccagcgaggccacgcagggccctg

SEQ ID NO: 311971 - DNA, 201 bp, Homo sapiens
ggtggcattaagggaagaagtttttttaaaaaaaaaataggagatatgaaaacgtgtatgtgattcactggtgtagtagagggacagagaaaaattgcagrtgcaggaaaaagtaaattcagcagcaaagaccttgagaaggtaaggtgtgtgtgtcaggggtggcttttgccctgcccagtggaggggtggtctttgcct

SEQ ID NO: 311972 - DNA, 201 bp, Homo sapiens
taaaggaaggtggcattaagggaagaagtttttttaaaaaaaaaataggagatatgaaaacgtgtatgtgattcactggtgtagtagagggacagagaaarattgcagatgcaggaaaaagtaaattcagcagcaaagaccttgagaaggtaaggtgtgtgtgtcaggggtggcttttgccctgcccagtggaggggtggt

SEQ ID NO: 311973 - DNA, 201 bp, Homo sapiens
atttggttgggggttggggaacctgagcccagaggacctttgtgtttttgaagcctagctacagctgatcccatcctcacagatggcctggacccccattycaaaagaccacctgcccttattgttgccattataatgtgcggcttcaatacttttggtcctaaaggcttttgttctatcagaggcctctattaagatgca

SEQ ID NO: 311974 - DNA, 201 bp, Homo sapiens
gcttccaaccattcccatgagggcctgctctcagggaaggtccactcatctctcaaataccttggccctttgcttaggaggtctggagagcctggaaagaygtctgaattaaaaggaataatttctttcaaagatgaagcggcgagagctaacgtggggggtgggaggggaagagaaagatcttaaaccagccctgaggtc

SEQ ID NO: 311975 - DNA, 201 bp, Homo sapiens
tgagcaatggcccacgctaacagatgacatgtaatgaaggacccctccccttgagggatgtggtggaggaaggggcttggccgacctaaatgcaagctgarccagcagtgtgctccttgggaacacaggctgctataagtatgtgccaatggaaggacgtggaggacctgatgtggtcagtataactctcagttttgcaag

SEQ ID NO: 311976 - DNA, 201 bp, Homo sapiens
ccccgtaggtgccctcacccttcctcaaggcgtggccagaggcgtcagaaactccctcagtgcccctttgcgagtacttctcaagggaatggtccctgccygaggcctgggggtagtctgaggggcccccaagtgtggaggtgagtagagcccagggccttagcacaggccagcctctgtaagagagccggctccggaggt

SEQ ID NO: 311977 - DNA, 201 bp, Homo sapiens
ctggccacctgctgcctccagaggtctgctcctaagtcacccagcagggcagcattcctcctccaagcctgacttggaaaacccttgggccatggctgccragggtcttctggaagcttgggctgccctcaagctgcctcaggtgcagctttgaccaggaaaagctgtgacgttctcagccgaggcacttgctgagggcag

SEQ ID NO: 311978 - DNA, 201 bp, Homo sapiens
cgcggctcgtttaccctggaagggctgggctgcggtggggaggatcatgtcgagggaggctcgcaactctggcttggatctgccttcccgcgtcccccacsgtggggaggacgtactgcctcctgccattctctgctggccaggagcatgaggtctgccagccccttttgagtctccagcacagagatcaatccctccatc

SEQ ID NO: 311979 - DNA, 201 bp, Homo sapiens
gtaaggaggcgagcgagcaggggctctcggagaccccgccgcccacccggaccaccgcgccgccgccgccgctcagcgccgagtgccaaactttccccagyttcatcccgctcgcttctgccggcctcctcctgtgtgtgtgtgtgtgtgtgtgtgtgtgtgtgtgtgtgtgtgtgtgtgtgtgtgtgtgtgttggtgggg

SEQ ID NO: 311980 - DNA, 201 bp, Homo sapiens
ctatggagtaatacacacctttggaaaaatctggacaaagcaaggcctaataaatagcaggtggaaagatttggtatgtggggaactggtcaaacaagttstaaaaagccacctgctcccagcaaagatagccatagttcatgtaaactgccatcagaaaggaaacactatagaagctttagggaacaggcttgtggataa

SEQ ID NO: 311981 - DNA, 201 bp, Homo sapiens
gcagccccaggtgtgggcatgagcgctaaaaacgtctgcagagtgctctgaaggtcacctcacagaacacttaaccaccccaatcagtttacttccaggaygaactcggaacgttttgttattagagcaggaaggatttagggagaaatggaagaacttcctgtgaggacaaggaggcagcagaatggattcctgtgggct

SEQ ID NO: 311982 - DNA, 201 bp, Homo sapiens
ggccaggtctgccccctgcagtgccttgaccgtctcctgccgctgcctcagctttacccttcaagctcgagtcggttcccgagctctccgtccccgcagcmgcgcggagagcccccggccgcgggggccgagccggcaggaggactcgggcacctcctacagaccctccggcccagatctgggccagagagaagtctgcaa

SEQ ID NO: 311983 - DNA, 201 bp, Homo sapiens
aggggtaggggttacagataataaataaagaagcagacactcaaagaaaaatatcaggtggtgataagtgctttgcagatcacaaagtcagctgacaggayggagagagaccccatggctgcgttaggttagctgctctctgagcaggtcacagtgaagctcaaatttgaatgacagaaaggagccaggctgacaaaggtg

SEQ ID NO: 311984 - DNA, 201 bp, Homo sapiens
gctggaggatgtttggcgtgcatttcttcagctggcctggtgcgagggagacttgctggcactttcggggcagccccaggtgtgggcatgagcgctaaaarcgtctgcagagtgctctgaaggtcacctcacagaacacttaaccaccccaatcagtttacttccaggacgaactcggaacgttttgttattagagcagga

SEQ ID NO: 311985 - DNA, 201 bp, Homo sapiens
cttgagccccggcattcaagaccatcctgggcaacatggtagaacaccatctctacccccaaaatacaaaaattagccagtctcataacccagcctcaaartaaataaaaagataaatttttttgaaaaactaaataaaatagttgaatggaaatgtaagacctttatataaaaatctatacaacattccagagataaatg

SEQ ID NO: 311986 - DNA, 201 bp, Homo sapiens
gtcccaggggaagcccagcaacttctatgcagggtcccagcctcatccctttggagacttcgtctctgactctttcttcccacctcccctgttctctcacycctcagcccctgatgctccctacacccactggaagcagaccgtcttctacttggaagattacctcactgtccggaggggggaggaaatctacgggaccat

SEQ ID NO: 311987 - DNA, 201 bp, Homo sapiens
agtatcacaaaataaaatagttgaatggggccaggcatggtggctcacatctgtaaccgcagcaccttgggaggccaaggtgggcagattacttgagcccyggcattcaagaccatcctgggcaacatggtagaacaccatctctacccccaaaatacaaaaattagccagtctcataacccagcctcaaaataaataaaa

SEQ ID NO: 311988 - DNA, 201 bp, Homo sapiens
tggctcatttcacagtttctcctgttccagacccccttccacccactgctgtcctccagtggggagacgagatggcgggagagagagacagagagagaggragggaggaagaccatcgtcccagagtggagacaggcacagagaaagagacagatgtgacaagagcaatggagaggagacagagacagagaaaggtgcaga

SEQ ID NO: 311989 - DNA, 201 bp, Homo sapiens
ttctttattttaacctttgaaatactcaatatacagaaaaggtgcgcacacagccgggtttttatggaatcctttgagagtaagtggttgatgcaatgctycgtcatccctgaatacattagtgtgcatttcaaaccaacgaggacattttctacaagccacatgcaaccatcaaagtcaggaaattaaaacgtcatcatt

SEQ ID NO: 311990 - DNA, 201 bp, Homo sapiens
aacagcagcatgttcagatgcatgtatgtccatgcatttagtgggtgacagggtattcctcatccatcccttgctatgaacttgtagtatcgggttgtttstcttctgatccccagcactgaggagatggggatgtgatgggaggagaggccactgggactgagagggagttctgatggggcttggaggaaggctataagg

SEQ ID NO: 311991 - DNA, 201 bp, Homo sapiens
ccttcaagctggcctgctcagactttccttgactttcatggtcttgacacattggaagagcacaggccagtgttttgtaggatgtcccccagtttgggatygtgcgctggttcctcgtgattggattcaggttctgcatcttgggtagaaatctcacagacaggatgctgtgttctcattgcgtacaatttcggcttgtct

SEQ ID NO: 311992 - DNA, 201 bp, Homo sapiens
aatggatatattattggaacaaaggaaggatgtctgtcctctgtaattctattcaacattttactggcagtctttgccagggcaataaagcaagaggaaaraaccaaaaaataaaaggcatacagataggaaaaaagaagtaaaattgtctttattcacaagcgacaggatttttcacacagaaaaataaagaaatctaaa

SEQ ID NO: 311993 - DNA, 201 bp, Homo sapiens
cattcatttattcaatactcgtagatctaccaagcacagaggcaggcaccgaggaagcaaggctggcccggtccctgccctcatggagcttgcagtccatrgaggatgcagacaaacggggatggggggaaggcatttatcttgtgtgacaggcaccgcaataacaggagctcagggtgccttgggagctctcagtccagg

SEQ ID NO: 311994 - DNA, 201 bp, Homo sapiens
ggttacaacacacgagctacaaactacaatgctggagacagaagcactgattatgggatatttcagatcaatagccgctactggtgtaatgatggcaaaamcccaggagcagttaatgcctgtcatttatcctgcagtggtaagacaagctaatatttgaccaatctggttatacttacaagaattgagactcaatacaaa

SEQ ID NO: 311995 - DNA, 201 bp, Homo sapiens; identical to SEQ ID NO: 65087

SEQ ID NO: 311996 - DNA, 201 bp, Homo sapiens
cagcatgaaatgttttattatttttatctactctacttgattaactatctttcattttctcccacacaattcaagatgtgccatgaggaaaagttattttrtagtttagtacatagttgtcgatgtaataatctctgtagttttcagattgaattcagacatttcccctcaatagctatttttgaatgaatgagtgaaggg

SEQ ID NO: 311997 - DNA, 201 bp, Homo sapiens
atgaatttacaaaatctactcaacagctctgttgatttttctgttcttggctgaatgttgcctgagggatgggagcacgggaagggtaaaagcaatggaasaaacatgtattttaatattttaaaagtatgttatattgttcgttggtgttacaagatgatttgcattacaaaaggattctcttacaagtcccttatctta

SEQ ID NO: 311998 - DNA, 201 bp, Homo sapiens; identical to SEQ ID NO: 65088

SEQ ID NO: 311999 - DNA, 201 bp, Homo sapiens
gatggcaaaaccccaggagcagttaatgcctgtcatttatcctgcagtggtaagacaagctaatatttgaccaatctggttatacttacaagaattgagaytcaatacaaatgaaaaagccttgaaaggttcatgagggacctagaaaaactacatctcaacttccagaaagtcattattattttcctcataattccctga

SEQ ID NO: 312000 - DNA, 201 bp, Homo sapiens
tggaatcctcagtgtcaaaaatattgcagaaatcttgcaaagttgatattattaaattgttaaatattaaaattcccaataaagaacattaatcttatttytaaaatccagttaattaaaaaaatttatattatataataatatttggtcattaaataaaaattagaaaatacaaataagaaaaataacacccataatctt

SEQ ID NO: 312001 - DNA, 201 bp, Homo sapiens
gtaaaatatcactaggtgtttttttacagtgtctagtgcaaagaagacctttaatcattttgttaatacttccagagcttccaatgactttggtaaatgamgaaaaaaatgcttcatttcatgctgaatgggagagaatgaagagagttttccccaacaattacacatatatggactcatagaaaataatatcttaccatt

SEQ ID NO: 312002 - DNA, 201 bp, Homo sapiens; identical to SEQ ID NO: 65091

SEQ ID NO: 312003 - DNA, 201 bp, Homo sapiens
tttacttttttttttatgaaatgttctaaatgtatagaaaattagagacattagtataataaacagccatatgcccattatgcactttaaaagttgttaayattttgccatagttgcttcttctatgcctttttttttttttttttttttttttgctgagagttttttgtttggttttgttttgttttattttgagacagg

SEQ ID NO: 312004 - DNA, 201 bp, Homo sapiens
gttaatacttccagagcttccaatgactttggtaaatgaagaaaaaaatgcttcatttcatgctgaatgggagagaatgaagagagttttccccaacaatyacacatatatggactcatagaaaataatatcttaccattctttccacagcctaacagaaaaaagctggctaaacctaaatttaaaataaaatatctatta

SEQ ID NO: 312005 - DNA, 201 bp, Homo sapiens; identical to SEQ ID NO: 65081

SEQ ID NO: 312006 - DNA, 201 bp, Homo sapiens
gatttctagagttttaagatgcttcacactctatcagttccttgtcatatcttgaaattctttttagaataagtaagtgtgggccgggcacagtggctcaygcctgtaatcccagcactttgggagaccgaggcagatggatcacctgaggtcaggagttcgagaccagcctgcctaacatggcaaaaccccatctccact

SEQ ID NO: 312007 - DNA, 201 bp, Homo sapiens; identical to SEQ ID NO: 65093

SEQ ID NO: 312008 - DNA, 201 bp, Homo sapiens
tttgtttgtttatttatttagaggcaggatttcactctgtcgcctaggctggagtgcagtggcgcgatctcagctcactgcaacctctgcctcccaggctyatgcaatcctcccgcgtcagcctcctgagtagctgggactactcgcacgcgttaccatgcctggctaatttttgtatttttagtagagatggggttttgc

SEQ ID NO: 312009 - DNA, 201 bp, Homo sapiens
atgggagagtggttacaacacacgagctacaaactacaatgctggagacagaagcactgattatgggatatttcagatcaatagccgctactggtgtaatsatggcaaaaccccaggagcagttaatgcctgtcatttatcctgcagtggtaagacaagctaatatttgaccaatctggttatacttacaagaattgagac

SEQ ID NO: 312010 - DNA, 201 bp, Homo sapiens
tgccttctgggctcaagtgattctcgtgcttcagccttctgagtagctgtgactacaggtgtgtaccaccacacccagctaattttttgtattttcagtasagatggggtttcaccatgttggccaagctggtcttgaactcctggcctcaaatgatctgcccacctcagcctcccaaagtggtaggattacaggtgtgaa

SEQ ID NO: 312011 - DNA, 201 bp, Homo sapiens
gtgatgtgactgcagccgccaggcgcgtgcgcagtgtacactgcgtgcgcatacgcgagcccgttgcgcctgcgcgcggtgccgccgtcgcccctcttttmgcggcgttctccacctgcgcgggcctgaatggccttcaggagcacagtcggcctgaggagttgatggttactcaccgccgtgagcccaagtaactcgccc

SEQ ID NO: 312012 - DNA, 201 bp, Homo sapiens
aataagttcttttcagggatgtgtttggccaaatgggagagtggttacaacacacgagctacaaactacaatgctggagacagaagcactgattatgggayatttcagatcaatagccgctactggtgtaatgatggcaaaaccccaggagcagttaatgcctgtcatttatcctgcagtggtaagacaagctaatatttg

SEQ ID NO: 312013 - DNA, 201 bp, Homo sapiens
tttggccaaatgggagagtggttacaacacacgagctacaaactacaatgctggagacagaagcactgattatgggatatttcagatcaatagccgctacyggtgtaatgatggcaaaaccccaggagcagttaatgcctgtcatttatcctgcagtggtaagacaagctaatatttgaccaatctggttatacttacaag

SEQ ID NO: 312014 - DNA, 201 bp, Homo sapiens; identical to SEQ ID NO: 65073

SEQ ID NO: 312015 - DNA, 201 bp, Homo sapiens
gtggagcccccaaaccacaaggggaagaaggaagttaaaagatgttaaatactggggccagctcaccctggtcagcctagcactctgacctagcagtcaayatgaaggctctcattgttctggggcttgtcctcctttctgttacggtccagggcaaggtctttgaaaggtgtgagttggccagaactctgaaaagattgg

SEQ ID NO: 312016 - DNA, 201 bp, Homo sapiens
aggtggggaacagaaggctgtgcctgtgacatttcctttcctttgctgcatctaccctcaatccttccctccagcatgcaggtaaaacttcaaacaccttkgcaaggacaagtgacttccagatcaaggcttctatcaaaactgttacgcatctcatgccctgaacatgggccctcagggagacgggtgggccagtggagg

SEQ ID NO: 312017 - DNA, 201 bp, Homo sapiens
gggcaggcatgcctttcagaggtaaccttcagtccctggagtgtccctgaggaaggcccttaatacctccttcttaataccatgctgcagagcagggcacrtcctagcccaggagaagtggccagcacaatccaatcaaatcgttgcaaatcagattacactgtgcatgtcctaggaaagggaatctttacaaaataaaca

SEQ ID NO: 312018 - DNA, 201 bp, Homo sapiens
gcaatcacagaggtggtaaaatgtgagcatgagcgagccgtccacctctttgttgactctctggtgaatcaggacaagccgagttttgccttccagtgcastgactccaatcgcttcaaaaaggggatctgtctgagctgccgcaagaaccgttgtaatagcattggctacaatgccaagaaaatgaggaacaagaggaac

SEQ ID NO: 312019 - DNA, 201 bp, Homo sapiens
aattcctacaaagactgctcttgtctctgaagcatggctgtgctgagggtggggagggggttatttcaaaaatgcagcctaatatctcttttctttgagayggagtcttgttttgttgcccaggctggagtacagtggtgtgatcttggttcactgcaacctccacctcccaggttcaagcgattctcctgcctcagcctc

SEQ ID NO: 312020 - DNA, 201 bp, Homo sapiens
acaatgcgtcaagtctggggtcccacatgggcttgtgaggaggaggttggcagctcctggggctgggtggaggtcaggccttagagggcaggcagagggcrttctgctgagggctgtggttggcactgcagtctccagtgagtacggcagctttgacctcctcaccatcaccctcccctctcttagatactgccagaaaga

SEQ ID NO: 312021 - DNA, 201 bp, Homo sapiens
tgatcacctagaaggatagatctgaacaattcctttccctgcagtgttttcattttaaaacaaaactcaggctgggtgtggtggctcacacctataatccyagcactttgggaggccgaggtgggtggatcacgaggtcaggagttcaagaccagcctggccaacatgatgaaacactgtctctactaaaaatacaaaaat

SEQ ID NO: 312022 - DNA, 201 bp, Homo sapiens
aagcaggagaatctcttgaacccaggatgcggaggttgcagtgggctgagattgcgccactgcactccaggctgggtgacaagagtgagactctgtctcaraaataaaaaataaaaaataaaaaacaaacaaacaaaaaacacctcatatatgacagctactctatgctatctctgaaccacatagcaaccctgaacattc

SEQ ID NO: 312023 - DNA, 201 bp, Homo sapiens
tgaggtgggagaatcacctgagcccaggaggtggaggttgcagagagccgagactgggccactgcactccagcctgggcaacagagtgagaccctgtcttaaaaaaaaaaaaaaaaaaaagtagccgttgaactacagcaggccctgccctgccgggccagaatgcacagccctggaagttttacatgtgtgcatgtgtgt

SEQ ID NO: 312024 - DNA, 201 bp, Homo sapiens
gggtgacttccagccaggctgtggactcaacgatgtcttgggatcaattgcatatggaagtgagttccctcttttctgctttgtgtttgactcagtttatyccatctccttctaaatcagccagagcctttagcactgcaggcactatttattcattattctcacctcccaccacagaggcctccaatgctgtatttaata

SEQ ID NO: 312025 - DNA, 201 bp, Homo sapiens
tccatctccttctaaatcagccagagcctttagcactgcaggcactatttattcattattctcacctcccaccacagaggcctccaatgctgtatttaatrtttctcattgttccccaagactaaccaacccagtggttcctgctttgctttctcacgctttaaggtcacagttgttattgattaatttcttttcttttct

SEQ ID NO: 312026 - DNA, 201 bp, Homo sapiens; identical to SEQ ID NO: 65105

SEQ ID NO: 312027 - DNA, 201 bp, Homo sapiens
ctctctttcatccaggctggagtgcagtggcacaatcttggctcactgcaaactccgcctcccggattcaagtgattctcctgactcagccttctgagtarctgggattacaggtgtgttgccaccatgcccagctaatttttgtatttttattacagacggggtttcgccatgttggccaggctggtttcagactcctga

SEQ ID NO: 312028 - DNA, 201 bp, Homo sapiens
tgcatgcacacacatgcctgttgatccaatgacttgattcatcccagcttgagagctttatttttgatttccaagactgtggggcttgagctgcccaaagygggctatgattgtgtggccacccatgactgctcattaaccccttgctggtgcaaagcagtttgactggaagccactcgggttccattgtctgagcgcctc

SEQ ID NO: 312029 - DNA, 201 bp, Homo sapiens; identical to SEQ ID NO: 65106

SEQ ID NO: 312030 - DNA, 201 bp, Homo sapiens; identical to SEQ ID NO: 65107

SEQ ID NO: 312031 - DNA, 201 bp, Homo sapiens
aatagtaaaataataaaaaattataaagttcttaatggtctgacaactcaattttttttttttttttttttttttttgagacagagcctctctctgtcacycaggctggagtgcagtggcaatcttggctcactacaacctctgcctcctgggctcaggtggtcctcccacctcagcctcctgagtagctgggattacaga

SEQ ID NO: 312032 - DNA, 201 bp, Homo sapiens
caacctgtaggggttcattgtacatgaccctactggcatgagatcttctctgtaactaagtccccaggttggtgcccattcctgccatctttgaagtatctttttttttttcctttgagacatggtcttactctgttacccaggctggagcgcagtggcatgatcctggctcactgcagcctcgacctccccaggcttggg

SEQ ID NO: 312033 - DNA, 201 bp, Homo sapiens; identical to SEQ ID NO: 65108

SEQ ID NO: 312034 - DNA, 201 bp, Homo sapiens; identical to SEQ ID NO: 65109

SEQ ID NO: 312035 - DNA, 201 bp, Homo sapiens
ttagtagagatggggtttcgccatgttggccaggctggtcaggctgggttcgaactcctggcctcaagtgatccgcctgcctcagcctctgaaagttctgrgattataggtgtgagccaccgtgcctggccaattcttaaagtttgaaagaatatagctgccccaacctagagtctgacaaaaagttactctaatataagg

SEQ ID NO: 312036 - DNA, 201 bp, Homo sapiens
tggcagggccagtgtggcaggaaggcagagggacgagagtgtgaggtgctgccactcacctgggccagtccatggaaggcggtgtaagcatgttaaggatsttgaccttgaagctgagccactgatggcataaaacatattaaaagtcctgagaagttctgcagtgaaagagcccgttcttgcttgtttaactcagcgttc

SEQ ID NO: 312037 - DNA, 201 bp, Homo sapiens
taagtcatccgtttcccttgctgggttcgggacagagaacaggttggtttgagaatgagagagcacaagggagcgtgtgaacgagtacagcacgcaggagrgtgcagtccgactgctcagggaggagccaggtggtctagctggcctctgcagtcctctctcccactgcaccttctctaccaagccctgactcagcgtttc

SEQ ID NO: 312038 - DNA, 201 bp, Homo sapiens
acaagggagcgtgtgaacgagtacagcacgcaggagagtgcagtccgactgctcagggaggagccaggtggtctagctggcctctgcagtcctctctcccrctgcaccttctctaccaagccctgactcagcgtttcggggagaaaagttcctgggatgaatcggcatcatgagaagctgctgggtcagcagctggatcag

SEQ ID NO: 312039 - DNA, 201 bp, Homo sapiens
gctgcggggagccccgtaccttttggtccagagggacggctggaaggtaacgtgaatttgtttttattccccccagccacttctctgtgctgggtcccctstgtcttgctgattcttcaaaccctccttgttcctatgaaattcttcctttcccactgcgctgcccattctctcctccaatccaccttggagtccacctgt

SEQ ID NO: 312040 - DNA, 201 bp, Homo sapiens
ccatttattctgaaaggaatacatgtaaaatagtcccataggggtgtcagaaagcttggccttaaggtcaaaagagcacaccctgaatacaggtttgcgcrtttgctggtgtgtgagctaacaaatgccactctcacacggtttctttcagtcccactgtggagcttccctgagggtgcccgggcaagtcttgccagcaag

SEQ ID NO: 312041 - DNA, 201 bp, Homo sapiens
ttgggagggggtgtggcggggcaggatgagcaactccgttcctctgctctgtttctggagcctctgctattgctttgctgcggggagccccgtaccttttrgtccagagggacggctggaaggtaacgtgaatttgtttttattccccccagccacttctctgtgctgggtcccctctgtcttgctgattcttcaaaccct

SEQ ID NO: 312042 - DNA, 201 bp, Homo sapiens
ggcactaatgcagattcccagactctgccactggaaatgtaagtcatccgtttcccttgctgggttcgggacagagaacaggttggtttgagaatgagagrgcacaagggagcgtgtgaacgagtacagcacgcaggagagtgcagtccgactgctcagggaggagccaggtggtctagctggcctctgcagtcctctctc

SEQ ID NO: 312043 - DNA, 201 bp, Homo sapiens
gctacacagactgaggtcaaaccatctgtgaggtttaacctccgcacctccaaggacccagagcatgaaggatgctacctctccgtcggccacagccagcycttagaagactgcagtttcaacatgacagctaaaacctttttcatcattcacggatggacggtgagcccggggagggagctctgcggctttatataagat

SEQ ID NO: 312044 - DNA, 201 bp, Homo sapiens
cccaccttttacgtcaccctttatggcactaatgcagattcccagactctgccactggaaatgtaagtcatccgtttcccttgctgggttcgggacagagmacaggttggtttgagaatgagagagcacaagggagcgtgtgaacgagtacagcacgcaggagagtgcagtccgactgctcagggaggagccaggtggtct

SEQ ID NO: 312045 - DNA, 201 bp, Homo sapiens
tcttctgcctggtgtaggtggggaacagaaggctgtgcctgtgacatttcctttcctttgctgcatctaccctcaatccttccctccagcatgcaggtaawacttcaaacacctttgcaaggacaagtgacttccagatcaaggcttctatcaaaactgttacgcatctcatgccctgaacatgggccctcagggagacgg

SEQ ID NO: 312046 - DNA, 201 bp, Homo sapiens; identical to SEQ ID NO: 65102

SEQ ID NO: 312047 - DNA, 201 bp, Homo sapiens; identical to SEQ ID NO: 65103

SEQ ID NO: 312048 - DNA, 201 bp, Homo sapiens; identical to SEQ ID NO: 65104

SEQ ID NO: 312049 - DNA, 201 bp, Homo sapiens
tggaggtcaggccttagagggcaggcagagggcattctgctgagggctgtggttggcactgcagtctccagtgagtacggcagctttgacctcctcaccaycaccctcccctctcttagatactgccagaaagaacaggaaatgtgtagggaacagccacatatgcagcctccagtcataccctccaccctgtccccacac

SEQ ID NO: 312050 - DNA, 201 bp, Homo sapiens
gagtgagaccctgagtcaaaaaaaaaaaattaattgggaagagggtcatatagaaaggaattccatattttttaggatttctgaaaccaagaataaaaaayaacttccacttttctctgcagatgagcggtatctttgaaaactggctgcacaaactcgtgtcagccctgcacacaagagagaaagacgccaatgtagttg

SEQ ID NO: 312051 - DNA, 201 bp, Homo sapiens
tgcaagccatattttgctgagccctgcgtgagatgatgtttaggatctgatccatttgcagcattctgtggctgtatagccctattaggaggtagtgactsctgctgcacagctggtctgcatcaccctacttagcacttattatatgggcgttcttgctctttattgctttgtgtgtattcgtgctgtcttcccatcaag

SEQ ID NO: 312052 - DNA, 201 bp, Homo sapiens
catcatgccaagtaatgttgggattgtgatgaaacatcatcaaagtagctcacttctcagggctcacagtctagctgggagaccaggtttgtacacgcacrtgcacacttacacacaggtagggcaaggcagatgaggccaagccaaatgagagggacagacaggaagaggctaggagtttgggggagacagatgcctgtc

SEQ ID NO: 312053 - DNA, 201 bp, Homo sapiens
cattttgttaggtgtgaatgggccccctgctgttgtttgaatttgcatttcctgattgtgcgtgagataggtcatgtttttatatgtgtataaacatatasgtcctaaggtccttagggcttcctgggaaaggttcttaagctcttctgaatggggcttttgtcctgcctcagctccagggtcaggtgccccacaccctta

SEQ ID NO: 312054 - DNA, 201 bp, Homo sapiens
aacgcacacgcatacaggtaactagttgcttgtgtgtccttccagatttttttgtagctgtatggtggaatttaaatttaacaagctcccaatttcaaatwtgagaaccagtgctctcaacagtgctgcttgcctgctcaacacaaaatgtttggaggcggaaaggttttctcacggtggctgcaaaatagaggaattctg

SEQ ID NO: 312055 - DNA, 201 bp, Homo sapiens
attttgttaggtgtgaatgggccccctgctgttgtttgaatttgcatttcctgattgtgcgtgagataggtcatgtttttatatgtgtataaacatatagktcctaaggtccttagggcttcctgggaaaggttcttaagctcttctgaatggggcttttgtcctgcctcagctccagggtcaggtgccccacacccttaa

SEQ ID NO: 312056 - DNA, 201 bp, Homo sapiens
cttgttggtcacatctcctcccagccttggtgtttcgaggccaggttttctcagcctaggcaatattgacatttggggccaggtaaggttttggtgtgggktgtgtgtgtgttgggattgacttgtgcactgtagaatgtttagctgtattcctggcctggccctgctagatgctagcaactctctccatcagaatggggg

SEQ ID NO: 312057 - DNA, 201 bp, Homo sapiens
gctgcatgaggccgaatcatggaagcctcaaagtgagacacaggttagagtccctgcagtagtgatggggaattctgaaggcttttgagtcggggcatggyatgaaaatttcacccctgcctcctcacccatctgccttgaatctagaaagcacagctggattccccctaaagttctgcctacatcagtggtttcttttcc

SEQ ID NO: 312058 - DNA, 201 bp, Homo sapiens
ctagctactcgggatgctgaggtgggagaatcacctgagcccaggaggtggaggttgcagagagccgagactgggccactgcactccagcctgggcaacasagtgagaccctgtcttaaaaaaaaaaaaaaaaaaaagtagccgttgaactacagcaggccctgccctgccgggccagaatgcacagccctggaagtttta

SEQ ID NO: 312059 - DNA, 201 bp, Homo sapiens
gtaactaagtccccaggttggtgcccattcctgccatctttgaagtatctttttttttttcctttgagacatggtcttactctgttacccaggctggagcrcagtggcatgatcctggctcactgcagcctcgacctccccaggcttgggtgatccttccgcctttgcctcctgtatagctgggaccacaggcacttgcca

SEQ ID NO: 312060 - DNA, 201 bp, Homo sapiens; identical to SEQ ID NO: 65110

SEQ ID NO: 312061 - DNA, 201 bp, Homo sapiens
ctatggatgtgagagcagaaagatgatcatttataaataaaatatttcaaagaaaataaacacctattaaatcaccattgagactcacaaatgtaaatagytttccatttgggtttagatatcagatttttaaaaagtaaaacattatagatacagttgaagcccctgtgtccttctctgctctacccttcttctttcaaa

SEQ ID NO: 312062 - DNA, 201 bp, Homo sapiens
caggtgagctccacttccatcactaaagggctccctcagctgcgctaagccggaatgctcccaaatgaggcagcagagtgagtcatagaaagttagctttrgaaggaacctggaaagcatctaattcaaaacttcccaagcgtttttagtcacaagaaacttttttttttttttccaaattgaactcgcataggcccgcag

SEQ ID NO: 312063 - DNA, 201 bp, Homo sapiens
tgcaggcaacttcgtgaaaggaacggtgggccgaatcacaggtgagctccacttccatcactaaagggctccctcagctgcgctaagccggaatgctcccmaatgaggcagcagagtgagtcatagaaagttagctttggaaggaacctggaaagcatctaattcaaaacttcccaagcgtttttagtcacaagaaacttt

SEQ ID NO: 312064 - DNA, 201 bp, Homo sapiens
aaacttctgtttcttgggagggggtgtggcggggcaggatgagcaactccgttcctctgctctgtttctggagcctctgctattgctttgctgcggggagycccgtaccttttggtccagagggacggctggaaggtaacgtgaatttgtttttattccccccagccacttctctgtgctgggtcccctctgtcttgctga

SEQ ID NO: 312065 - DNA, 201 bp, Homo sapiens
  misc_feature (1)...(201): n = A,T,C or G
ggatttctgaaaccaagaataaaaaataacttccacttttctctgcagatgagcggtatctttgaaaactggctgcacaaactcgtgtcagccctgcacanaagagagaaagacgccaatgtagttgtggttgactggctccccctggcccaccagctttacacggatgcggtcaataataccagggtggtgggacacagc

SEQ ID NO: 312066 - DNA, 201 bp, Homo sapiens
ctttgctgcggggagccccgtaccttttggtccagagggacggctggaaggtaacgtgaatttgtttttattccccccagccacttctctgtgctgggtcycctctgtcttgctgattcttcaaaccctccttgttcctatgaaattcttcctttcccactgcgctgcccattctctcctccaatccaccttggagtccac

SEQ ID NO: 312067 - DNA, 201 bp, Homo sapiens
gggagaagaggaggacaaaggggatgaccaggtggctctcccccgacggactcccggcccagggagcggatagaccactcccagagagagtgtggctttgmgccttggagaggatgctctccttctccagggatcgcctccccagcggacgcagagtttcagggaaatgtccgcctccgccacttgggatggcagtgggga

SEQ ID NO: 312068 - DNA, 201 bp, Homo sapiens
tcttaccggccgggattgctggaaacaccaagaggtggtttttgttttttaaaacttctgtttcttgggagggggtgtggcggggcaggatgagcaactcmgttcctctgctctgtttctggagcctctgctattgctttgctgcggggagccccgtaccttttggtccagagggacggctggaaggtaacgtgaatttgt

SEQ ID NO: 312069 - DNA, 201 bp, Homo sapiens
gtttgctataatcaggtaagcaagcagatgaatttattcaagaaatgtgtccatatgtgcaggctagatgctagctaatgtcaaatacctcatgtgtggcygggcgtggccgggcgcagtggctcacgcctgtaaccccagcactttgggaggccgaggtgggtggatcacctgaggtcaggagttcaagaccagcctggc

SEQ ID NO: 312070 - DNA, 201 bp, Homo sapiens; identical to SEQ ID NO: 65114

SEQ ID NO: 312071 - DNA, 201 bp, Homo sapiens
ggtgaaaagggaacattcagcagatgtaaaaaccgaaacccagatggcttaagcaaattgctcacgattgaactagaatcagaccccaggtctctcactcygcaagtctgctagatgcacccacgctctgttctgtctccccagataagctccacaaacccaaagctacacagactgaggtcaaaccatctgtgaggttta

SEQ ID NO: 312072 - DNA, 201 bp, Homo sapiens
taccagggtggtgggacacagcattgccaggatgctcgactggctgcaggtactgggggatgagagggagtctcctgtcaccagcaggatctcaaacccartcttcttaagaaatgcaggtcatgcatctgttgccatgaacttctggagtctgataaaaatctttgagattaaaagttttattgaattaagtattgtttg

SEQ ID NO: 312073 - DNA, 201 bp, Homo sapiens
gaggcaggagaatctcttgaacccaggaggtggagattgcagtgggccgagatcacaccactgcactctagcctgggtgacaaaattgagactgtgtctcaaaaaaaaaaaaagatatgaagacagaaacatcacctgttatcttaccacccagagctaacaattaatgattctagacactgctaacatttttatttataa

SEQ ID NO: 312074 - DNA, 201 bp, Homo sapiens
gaaacacagaaaggctaagtaacttgttaaaagtcacacagtagaaaatggtagggctatggttaaaatccaggcaatcggaccccaaagctcttagccaycatgctatactgccttccaagttatttttctgaaaatgcacacgaaacaaactgtcttaaaggccagtctttttttccaactgttcttcactcttcccca

SEQ ID NO: 312075 - DNA, 201 bp, Homo sapiens
ttctctcttcctctctgctggtctctcatgcctgccattctgacacctcccaagccctactcctctaaaattgttcttgccaaggtcaccagtgaccccaytgcctgagcactggtcagcctccatcgtctggaagctgtcagcagcatttggcgggggccctctgccttccctgggtctcctcccagttctcccaccctg

SEQ ID NO: 312076 - DNA, 201 bp, Homo sapiens
aggagaatcacttgaacccgggaggcagaggttgcagggagccaagatcgcgccattgcactccagcctaggcgatagagtgagactccatctcaaaaagaagacaaagaaactttaatacatattactaaattgtcttccttatcagtagtgctaatttagacttccaccaatagggttttcattggacaggcttgaaaa

SEQ ID NO: 312077 - DNA, 201 bp, Homo sapiens; identical to SEQ ID NO: 65124

SEQ ID NO: 312078 - DNA, 201 bp, Homo sapiens; identical to SEQ ID NO: 65125

SEQ ID NO: 312079 - DNA, 201 bp, Homo sapiens
ctactaaaaaaaaaaaaaaaaaaaaaattaggtgggcatggtggtacacgcttgtaatcctagctatgtgagaggctgaggcaggaggatcacttgaaccygggaggcataggctgcagtgagccaagatagcaccactgcattccagcctggttgatagagcaagactccatctcgaaaaaaataaaataaaataaaata

SEQ ID NO: 312080 - DNA, 201 bp, Homo sapiens; identical to SEQ ID NO: 65126

SEQ ID NO: 312081 - DNA, 201 bp, Homo sapiens; identical to SEQ ID NO: 65128

SEQ ID NO: 312082 - DNA, 201 bp, Homo sapiens
aactcctggtgctcagctgtgttttattttttccttttgtgcaggacttcagggtggtcgtgcgcatcgattcctgggagtcaacatctgtgtatccaaayggacattttgtgcgtgttttaggaagaatcggagatctggaaggggaaattgcaaccatcctggtggaaaacagtatttcagttattcctttctcagaag

SEQ ID NO: 312083 - DNA, 201 bp, Homo sapiens
tctcatacagatgtgtgagatgccagtaaacacaccagaaagtccctggaaggtgagtcctgaagaggaacaaaaacgtaaagacttgaggaaaagccatstcgtattcagcattgaccccaaaggttgtgaagatgtggatgacacactctcagtcagaaccttaaataatggcaacctggaacttggggtccacatcgc

SEQ ID NO: 312084 - DNA, 201 bp, Homo sapiens
gactttccagagcccagcacagtacctgggatatctgaggcacctagtaaacaattattgatcaaaggaagccaacataggttgatgaagaaggtaattgmgaatgaatgaatttctatgtggtcatactgagaatattagtgagtggatttttacagaaatttgtggtgcatgaattgctgaatatttggtttctcatac

SEQ ID NO: 312085 - DNA, 201 bp, Homo sapiens
tgtggatgacacactctcagtcagaaccttaaataatggcaacctggaacttggggtccacatcgcagatgtaacacactttgtggcaccaaattcttacrttgatattgaagctagaacaaggtaatgctatttgaaatcagctctatggttgtgtgtatgtgactggatattttgtgtctgtactagtttcaggtgttc

SEQ ID NO: 312086 - DNA, 201 bp, Homo sapiens
ctgaggcacctagtaaacaattattgatcaaaggaagccaacataggttgatgaagaaggtaattgagaatgaatgaatttctatgtggtcatactgagawtattagtgagtggatttttacagaaatttgtggtgcatgaattgctgaatatttggtttctcatacagatgtgtgagatgccagtaaacacaccagaaag

SEQ ID NO: 312087 - DNA, 201 bp, Homo sapiens
acctattgtcttgctggggttagatagaagaaacaagacagttattatgaagcgccttagacacacgaaggataatttaacgtggactatgcaaagtgcaraagtaaacgtggagtggagcaattaggccaaaaaatcctttgggggaaatggatttgagactggtctttaaggcgtattacgagtatgattgaagaagag

SEQ ID NO: 312088 - DNA, 201 bp, Homo sapiens; identical to SEQ ID NO: 65133

SEQ ID NO: 312089 - DNA, 201 bp, Homo sapiens
ataccatattcctatgtgtggctgtaactttgcgctagttattttaaaatagtttttgtttattttgatcttttgctttctttttgaaggtcttgcattasataaatatacccactttacttctccaataagaagatattcagatattgtagtacaccgcttgttaatggcagccatttcaaaagataagaaaatggaaat

SEQ ID NO: 312090 - DNA, 201 bp, Homo sapiens
taatcaatcttttgctctaaaataccccatccttttttgatccttagcaagagatagcagtggatgagtacctgctttgttagagttatttttctcctccktgtcacagacagtataacaaactgcgaaacctgctgaaggatgcgcgtcatgattgcattctctttgctaatgaattccagcaatgctgctatctgccac

SEQ ID NO: 312091 - DNA, 201 bp, Homo sapiens
actcctctaaaattgttcttgccaaggtcaccagtgaccccactgcctgagcactggtcagcctccatcgtctggaagctgtcagcagcatttggcggggkccctctgccttccctgggtctcctcccagttctcccaccctgctggctgctcttctcagttctcctcctggctctccatctcattgtcctcttgtatgtg

SEQ ID NO: 312092 - DNA, 201 bp, Homo sapiens
tggcaaacatggtgaaaccccgtctctactaaaaataccaaaattagccaggcatggtggcgggctcctgtaatcccagctgctcgggaggctggggcagragaatcacttgaacgtgggaggcagaggttgcagtgagccgagatcgtgccactgcactccaacctaggcaacagagtaagactccgtctcaaaaaaaaa

SEQ ID NO: 312093 - DNA, 201 bp, Homo sapiens
ccctactcctctaaaattgttcttgccaaggtcaccagtgaccccactgcctgagcactggtcagcctccatcgtctggaagctgtcagcagcatttggcrggggccctctgccttccctgggtctcctcccagttctcccaccctgctggctgctcttctcagttctcctcctggctctccatctcattgtcctcttgta

SEQ ID NO: 312094 - DNA, 201 bp, Homo sapiens; identical to SEQ ID NO: 65132

SEQ ID NO: 312095 - DNA, 201 bp, Homo sapiens
ctgaggcaggaggatcacttgaacccgggaggcataggctgcagtgagccaagatagcaccactgcattccagcctggttgatagagcaagactccatctygaaaaaaataaaataaaataaaatagacttcaaagaaattaggaactacctcccacacacaaaacattaagattgttgttttaaaacttaatttggagca

SEQ ID NO: 312096 - DNA, 201 bp, Homo sapiens
agctaaaatctgagaacaaatgtatgtagctttgtgcttatgcattccctggcggaagttgtttggcatgaggatcatgaactcggggagttttttgtttrttcatttgttgagtttaaactttgtttctctttgaatagctaatagaatcatataggcccgaactcatatgtcccaagaggtatttaatgaaaggttcct

SEQ ID NO: 312097 - DNA, 201 bp, Homo sapiens
attcgcccgtctcggtctcccaaagtgctgggattataggcatgagccactgtgtgtggctgacccaccataatttgtaatacagaagtagggaacctgtyagttacccttgatttaatttcatgtaccccttaagttacaaagaaataatcctatttatttcagtacttttaaaatgcagcatctttgtgacaatatcat

SEQ ID NO: 312098 - DNA, 201 bp, Homo sapiens
attattttgagaataaataaatagaatgcttactacctctttaaaaaagaaaaactaatttaggtttcttttacttgtacaccaagtccattattttaccyatatatagaatgtttaaggttaaggatgtaaagaattcaattcaacgagtatttgaccacctattatagccaagcactaacttaacctagtattaaaatc

SEQ ID NO: 312099 - DNA, 201 bp, Homo sapiens
caaagtgttgtcttgtaaattactgtctgggactagctaacggtttttctgttctttgtcaggtccaataaaacactggctgattctctggataatgcgarcgacccccacgatcccattgtgaacaggctactgcgctccatggccacgcaggccatgtcgaatgctctgtacttctccaccggatcctgtgcggaggag

SEQ ID NO: 312100 - DNA, 201 bp, Homo sapiens
catttcagatgatttcctggaaaaattcctagaaatggaattgctgagccaaaaggtgtgcatgcacaaatgaaactgataggtcaggtgcagtggctcaygactgtaatcctagcacttttcgaggtcgaggccggtggatcacctgagttcaggagttccagagcagcctggccaacatggtgaaaccccgttactact

SEQ ID NO: 312101 - DNA, 201 bp, Homo sapiens
aggcatggtggtgcatgcctgtaatcccagctaatcgggcggctgaggcaggagaatcacttgaacccgggaggcagaggttgcagggagccaagatcgcrccattgcactccagcctaggcgatagagtgagactccatctcaaaaagaagacaaagaaactttaatacatattactaaattgtcttccttatcagtagt

SEQ ID NO: 312102 - DNA, 201 bp, Homo sapiens
aggccgaggggggcggattacctgaggttaggagtttgagaccagcctggccaacatggtgaaacctcatctctactaaaagtacaaaaattagccaagcrtggtggcacacgcctgtagtcccagctactcgggaggctaaggcaggagaattgcttgagcccaggaggcagaggttgcagtgagccaagactgtgccac

SEQ ID NO: 312103 - DNA, 201 bp, Homo sapiens
aggctcaggaagtcctgctcactgagcaccccctcaagatggcaggccagcaattcctagtcaggagtttctgtcatagtaccatggtgaagaatcagtamcttctgaccgtgtttctctgtgcctttattaaatacagaattacctggacaatttctggcctgatttaaaagctgcccacgagctttgtgattctatcct

SEQ ID NO: 312104 - DNA, 201 bp, Homo sapiens
aagtcctgctcactgagcaccccctcaagatggcaggccagcaattcctagtcaggagtttctgtcatagtaccatggtgaagaatcagtaccttctgacygtgtttctctgtgcctttattaaatacagaattacctggacaatttctggcctgatttaaaagctgcccacgagctttgtgattctatccttcagtctcg

SEQ ID NO: 312105 - DNA, 201 bp, Homo sapiens
cacaaagtagcctaggaggtggaagtgttccacggtggagtggcttcctggggctcatttggcaggctcaggggttaatgtggtagtagagaatgaatggyggagtgaggctcaggaagtcctgctcactgagcaccccctcaagatggcaggccagcaattcctagtcaggagtttctgtcatagtaccatggtgaagaa

SEQ ID NO: 312106 - DNA, 201 bp, Homo sapiens
tgcaagtaaataattcattttatccaatatgcttttaggaacattcttggttaggaaagttttgtcagttaataatccctggtcctgtctggtgtctggtrtaggatgctttgcttgttccttttgactccctcctgaattccttctgtatagcttcagagagtctccatatttcatgcctcagtttcttgatggtatata

SEQ ID NO: 312107 - DNA, 201 bp, Homo sapiens
atgtaactggaatgacacagtgtttgtccttttgtgagtggcttatttcactctgcataatgtgtcagggttcacccatgttatggcatgtgttggaactrtcttcctttttaaatgtgaataatatattccacattttgtttatccattcatccattgatagattgcttccaccttttgcctgtgtactgtgagtagtgt

SEQ ID NO: 312108 - DNA, 201 bp, Homo sapiens
ccggcacctctggcaacaccataaaccacgttgagcttgtatttatcacagcttccaaaaaaatgagggtgctcaatatacctgaactttgggcctctacmaaagtagatttgtcttttaaaaactcccaccatggagttaagactggaagttattttgcatgccagagcaccgtgacatttaaataaaccaggtttgaaa

SEQ ID NO: 312109 - DNA, 201 bp, Homo sapiens
ctgggaggccgaggcgggtggatcacctgaggtcaggagtttgagaccagcctggcaaacatggtgaaaccccgtctctactaaaaataccaaaattagcsaggcatggtggcgggctcctgtaatcccagctgctcgggaggctggggcaggagaatcacttgaacgtgggaggcagaggttgcagtgagccgagatcgt

SEQ ID NO: 312110 - DNA, 201 bp, Homo sapiens
catatgataacaccctgattttgttcgttgggtaagcactttttaagctcttagttccaggccttggggaataaaaaagaagtctttttttttttttttttccttgagatggagtctggctctgtcgcccaggctagagtacagtggcgtgatttcggctcacaggtcactgcaacctccacctcccgggttcaagtgatt

SEQ ID NO: 312111 - DNA, 201 bp, Homo sapiens
acatcatacacagtcgggcgcggtggctcacgcctgtaatcctagcattttgacaggccaagttgggcagattgcctgacctcaggagttccagactgggyaacacggtgaaacccatctctactaaaatacaaaaaattagccagctgtgtgtgatgcacgcctgtagtcctagctactcgggagactgagacatgagaa

SEQ ID NO: 312112 - DNA, 201 bp, Homo sapiens
tttcataccatctggcaatttagtaataggaagaatgaaaaacaaaaaaaaaaccctaccatacaccactatttgcacctggccactctccttggaacccmgtattgtttgcctcttgtttgtttgatgcctctaattgacccacttaactcctggtgctcagctgtgttttattttttccttttgtgcaggacttcaggg

SEQ ID NO: 312113 - DNA, 201 bp, Homo sapiens
atatattacggctctcttcagcagactaaaatttccagccctcttcattgatgtagagaggtaatgcctcccttcaaagcattgggtcaagcatttcataycatctggcaatttagtaataggaagaatgaaaaacaaaaaaaaaaccctaccatacaccactatttgcacctggccactctccttggaacccagtattgt

SEQ ID NO: 312114 - DNA, 201 bp, Homo sapiens
gaccctacctgggttctgcaaaatccaggtgatgaaacacatttagtacagaattcactttgtaggtctttccactggtgtgggactcccacttctaatcsttagagagaacagtcagcagcggaaagggatgttgcatctgtaggtaaggtcaccactgaataaaaatagtaaaaaaaatcaacctaaagaaggtaggtt

SEQ ID NO: 312115 - DNA, 201 bp, Homo sapiens
tatacgttttgcattctttatttctatatggcataggttccccccaccttagaaaaggtcccttgtcggagggggatgggaggaattcattattttgtcaraagggacttttaaaactaatttcgtattctctttgatagtgaggaatgcagtaacattattttatatttctgcttcaacacctggccaagagatctgact

SEQ ID NO: 312116 - DNA, 201 bp, Homo sapiens
tgagtgatatatccatcttgtttctaaaagaaaaaaatcctcctggatacccagtgttattttcttctattgttatttaaatgtgtttaaacataaatctyggtataagtcctcatgtttaagtactttaatacaaccctagtgtaagttaaataatcaaagtaacaaaatcagaaaaccgcaaatgaacattattcaacg

SEQ ID NO: 312117 - DNA, 201 bp, Homo sapiens
tgttcatgtgttcacatgtgtgttggtttattcaacaaatgttcaccaagagactatatgtgccagaaactgctagcactgagggtacagtggcgaaccaragcagatggagtcctggcagggtgacaggcagtaatcgggcaattacacaaacagatgcagaactgcaactgtgacaaatgcactgaagcacagggatgg

SEQ ID NO: 312118 - DNA, 201 bp, Homo sapiens
tatatcaatagcaacagaaagtagattagtggttgccgggggctggggtcaaggggaacaggcaatgactgcttaatggatggatacagatttcttttccragtgattaaaatgttctgtaattagatcgacggtgatggttgcataactgtgactatactaaaacccactgaactgtgtgtgttttaagggcaaatttta

SEQ ID NO: 312119 - DNA, 201 bp, Homo sapiens
aacagaattcaagaatccctgggtctgcacggtggctcacgcccagcacgttgggaggccaaggcaagaagatagcttgagctcaggaatttgagatcagyctggctaacatagtgagaccctgtctcaatacaaaaaaaaacaaaaaaattagctgagcatggtggcctgcgtctgtagtcctagctgcttgtgaggctg

SEQ ID NO: 312120 - DNA, 201 bp, Homo sapiens
cccagcacgttgggaggccaaggcaagaagatagcttgagctcaggaatttgagatcagcctggctaacatagtgagaccctgtctcaatacaaaaaaaamcaaaaaaattagctgagcatggtggcctgcgtctgtagtcctagctgcttgtgaggctgaggtgggagaccacttgagcctgagagtttgaggctgcagg

SEQ ID NO: 312121 - DNA, 201 bp, Homo sapiens
gggtggatcacctgaggtcaggagtttgagaccagcctggcaaacatggtgaaaccccgtctctactaaaaataccaaaattagccaggcatggtggcggkctcctgtaatcccagctgctcgggaggctggggcaggagaatcacttgaacgtgggaggcagaggttgcagtgagccgagatcgtgccactgcactccaa

SEQ ID NO: 312122 - DNA, 201 bp, Homo sapiens
tatgtctatttttcctttctttgctgcagacatggggcactgccctatctatgccgtaggacactattcagatgcagtgggatgtctagttggtgttcccmagggcattcagtgcagcacccctcacctcccccagcagacctggcacatagaagcaaagattttctaaatgaaggatgcttagcaagagagatcatttgt

SEQ ID NO: 312123 - DNA, 201 bp, Homo sapiens
ggcaatctagtgagaccttgtctctacagaaaaaaaaaaaaaaaaaaaaaaaaaaaaaaaatatatatatatatatatatatatatatctccaagcatggkggcacgcacctgtagtcccagctactcaagaggctgagatggaagaatcactggagcctgggagatggaagctgcagtgagccgtgaacacaccactgta

SEQ ID NO: 312124 - DNA, 201 bp, Homo sapiens
gcacccctcacctcccccagcagacctggcacatagaagcaaagattttctaaatgaaggatgcttagcaagagagatcatttgtaaacaaataactacartaagttcagatactttgtaatggtgcacaaaatatgatggtaggtaaagggaataaaaacttctaggggacaaaggaagaacaggcaatattttttcaat

SEQ ID NO: 312125 - DNA, 201 bp, Homo sapiens
tatttatgtgaatgctgtcagatctgcttagtacagatctcagacaggagtggcattatcagtgactgtttctttgggctgtctcagcaacgcagttcttcctatctcttaggtaccttttgtgagagtaggatgactgttaatctctcaacagatcgctggtcgcttctgtctgcccagctggtcaattaggtttcactt

SEQ ID NO: 312126 - DNA, 201 bp, Homo sapiens
ggaggcagaggttgcagtgagctgagattgtgacaccgcactcctgcctgggtgacagagcagaactccatctcgacaaaaagagaaaaaaaagtgtatatgtgtgtgtgtgtgtatatatatatgtgtgtgtgtatatatatatgtgtgtgtgtgtacatctcgaaaaaaagaaaaaagtgtatatgtgtgtgcgtatat

SEQ ID NO: 312127 - DNA, 201 bp, Homo sapiens
ccttatgcaggctctccaggccagttgcacctaatacattttccattcccatggtttgctggaattttggggtagtggggattcagtttacacgacacctkcttctccaccaaagaccatcttaagaggtcttcaaagagaccaggcgcagtggctcatgcctgtaatcccaacactttgggaggccgaggcaggtggatc

SEQ ID NO: 312128 - DNA, 201 bp, Homo sapiens
tggctaaggctgatagattgctttagcccaggagctggagaccagactgggcaacatagtgaaaccctgtctctagaaaaaatttaaaaattagccaggcrtggtagtgtgcacctgtactcccagattacttgggaggttgaggcaggaggatcacttcagcctggatggttgaggctgcagtgagccatgattgcacca

SEQ ID NO: 312129 - DNA, 201 bp, Homo sapiens
gaggcagaggttgcagtgagctgagattgtgacaccgcactcctgcctgggtgacagagcagaactccatctcgacaaaaagagaaaaaaaagtgtatatgtgtgtgtgtgtgtatatatatatgtgtgtgtgtatatatatatgtgtgtgtgtgtacatctcgaaaaaaagaaaaaagtgtatatgtgtgtgcgtatata

SEQ ID NO: 312130 - DNA, 201 bp, Homo sapiens
ctgcctgggtgacagagcagaactccatctcgacaaaaagagaaaaaaaagtgtatatgtgtgtgtgtgtgtatatatatatgtgtgtgtgtatatatatrtgtgtgtgtgtgtacatctcgaaaaaaagaaaaaagtgtatatgtgtgtgcgtatatatatgtgtgtatatatatatatatgtgtgtgtatatatatata

SEQ ID NO: 312131 - DNA, 201 bp, Homo sapiens
tggattgagcccaggagtttgagactgtaacatattatgatagtatctgtgaatagccagtgcactctagcctgggcagcatagtgagatcctgtttcttaaaaaaaaaaaaaaaagaaacgaacaaaaacaaaaagtgtttttaaattatccatctttaaaataaaataccaagaaggcaaatcttcaaacatacctttt

SEQ ID NO: 312132 - DNA, 201 bp, Homo sapiens
ctaacggtttttctgttctttgtcaggtccaataaaacactggctgattctctggataatgcgaacgacccccacgatcccattgtgaacaggctactgcrctccatggccacgcaggccatgtcgaatgctctgtacttctccaccggatcctgtgcggaggaggagttccatcattacggtgaatcataccatattcct

SEQ ID NO: 312133 - DNA, 201 bp, Homo sapiens
ggattgagcccaggagtttgagactgtaacatattatgatagtatctgtgaatagccagtgcactctagcctgggcagcatagtgagatcctgtttcttaaaaaaaaaaaaaaaagaaacgaacaaaaacaaaaagtgtttttaaattatccatctttaaaataaaataccaagaaggcaaatcttcaaacataccttttc

SEQ ID NO: 312134 - DNA, 201 bp, Homo sapiens
caaggagtatttaataggtaaaaatatataaaacttcctaagtgtataactaagagaattgaaaacatgtcaacattgaaactaaaaacatcatacacagycgggcgcggtggctcacgcctgtaatcctagcattttgacaggccaagttgggcagattgcctgacctcaggagttccagactgggtaacacggtgaaac

SEQ ID NO: 312135 - DNA, 201 bp, Homo sapiens
gtatggtatgtctatttttcctttctttgctgcagacatggggcactgccctatctatgccgtaggacactattcagatgcagtgggatgtctagttggtrttccccagggcattcagtgcagcacccctcacctcccccagcagacctggcacatagaagcaaagattttctaaatgaaggatgcttagcaagagagatc

SEQ ID NO: 312136 - DNA, 201 bp, Homo sapiens
tttgtaaacaaataactacagtaagttcagatactttgtaatggtgcacaaaatatgatggtaggtaaagggaataaaaacttctaggggacaaaggaagmacaggcaatattttttcaatgttttctctgaaataacaaattgcagatgcttatgaaatcactccaaaaattgttcctattacttaacaaataagtgctc

SEQ ID NO: 312137 - DNA, 201 bp, Homo sapiens
ttttctacttttttgaaaattacttttctttgtagtccagtggtatagtacagttttattttctatagtgtttctcaagaaaactgtgtgaccaagggctycatagaggtgaatgatagtagaaaaaagagatattgtgaagttcagatgaaagggaagcctagaattctctgtggggacttgaagttagatggagaagag

SEQ ID NO: 312138 - DNA, 201 bp, Homo sapiens
tctccactcactcttattcatccttcagagctcatgggtcacctactccaggaagccttcccatccctcccatcttctcctttcaagcacttatcccaccraaatgggtggttctgtcttatgtttggtttgtttttgccaagtagcatagctttattttaaattgtggtaaaatgtacatacataaagttgtcattttaa

SEQ ID NO: 312139 - DNA, 201 bp, Homo sapiens
aaaactcccaccatggagttaagactggaagttattttgcatgccagagcaccgtgacatttaaataaaccaggtttgaaaacattgtctaatctcttacrttttgaattatgtttcagatgggaaactcttgtctagtgatgtgactcattacgtgatcccagactggaaagttgttcaagattatcttgagatccttga

SEQ ID NO: 312140 - DNA, 201 bp, Homo sapiens
cattatgttgcccaggctggtcttcagttcctgagttcaagcaatccacttgtcttggcctcccaaagtgctgggattatagatgtcagccactgtgcccrgccaggctcctactcccagtcttattaaactgaaactggtcatttaattctgaaaaagctgcttcaggaaacacagtgtcctgatttaagtctgctgaaa

SEQ ID NO: 312141 - DNA, 201 bp, Homo sapiens
cctggataacataatgagaccccatctgtacaaaaagttaaaaattagccagggatggtgatgtgcacctgtagtcccagctactcaggaggctgaggcargaggatcacttgagcctgggaattgaggttgcagtgagccattgttcaccactgcattccagcctgggcgacagagtaagaccctgtctcaatcagtcag

SEQ ID NO: 312142 - DNA, 201 bp, Homo sapiens
ctgcacacagttctccagacctgtttcccagttctctgtttcccagttccggttcttttttggaagatttccaggcattccatatggttccatatcagacyctattggattatgatcttcagctacttgcaccttagtttttctcttagccaaagacttgcttcttcatcttttaagcctcacataatatagcttgtcatc

SEQ ID NO: 312143 - DNA, 201 bp, Homo sapiens
ctggttcatatttgtatcccccagagcacccagcccagggcttctttataatggatactccagaagtatttgttgaacgaatgaatggttatctatatagwccaaaggatagcaaaagccagatgtgaaattctgaacaagagcttgtgtttgtctgcctggggagagctcatgtgccctttgcttttccaggagcatata

SEQ ID NO: 312144 - DNA, 201 bp, Homo sapiens
gtttgagactgtaacatattatgatagtatctgtgaatagccagtgcactctagcctgggcagcatagtgagatcctgtttcttaaaaaaaaaaaaaaaagaaacgaacaaaaacaaaaagtgtttttaaattatccatctttaaaataaaataccaagaaggcaaatcttcaaacataccttttcttgttgttgttatgt

SEQ ID NO: 312145 - DNA, 201 bp, Homo sapiens
tagggaaagaaaggaagcagtttgaacaggactctgaaattagtgggagaaatgctggagttgacagaaagtataacctgttttcttttcaatttgagaasagagaatgtgctagactctacccctcagacttaaagttgagttaaaatacataaaaaagacaagaatggcctggcacagtggcccacgcctgtaatccag

SEQ ID NO: 312146 - DNA, 201 bp, Homo sapiens; identical to SEQ ID NO: 65135

SEQ ID NO: 312147 - DNA, 201 bp, Homo sapiens; identical to SEQ ID NO: 65162

SEQ ID NO: 312148 - DNA, 201 bp, Homo sapiens
tcgatgggactcgagcagcagcctcagctgccttgcacagcctcgcaatgagctgccacaactgctccgacccccaggtcctttgcagctccgggcagctsttcctgcagcccctctgggaccacctgaggagctgggaggccctcctacagtcgcccttcttcccggtcatcttctccatcaccacatacgtgggctttt

SEQ ID NO: 312149 - DNA, 201 bp, Homo sapiens; identical to SEQ ID NO: 65163

SEQ ID NO: 312150 - DNA, 201 bp, Homo sapiens
tatatagtacgtcaattagaccaaatgttgatggtgatgataaattaatctaggacctcatgttctgagttttagctttgaagtcaatttaccatgaaaacacacacacacacacacacacacacacacacacatacacacaccagtctataatccatcctttgctcatccattctcctgacctaccagagaaagcctctg

SEQ ID NO: 312151 - DNA, 201 bp, Homo sapiens
gtatatagtacgtcaattagaccaaatgttgatggtgatgataaattaatctaggacctcatgttctgagttttagctttgaagtcaatttaccatgaaaacacacacacacacacacacacacacacacacacatacacacaccagtctataatccatcctttgctcatccattctcctgacctaccagagaaagcctct

SEQ ID NO: 312152 - DNA, 201 bp, Homo sapiens
atatagtacgtcaattagaccaaatgttgatggtgatgataaattaatctaggacctcatgttctgagttttagctttgaagtcaatttaccatgaaaacmcacacacacacacacacacacacacacacacatacacacaccagtctataatccatcctttgctcatccattctcctgacctaccagagaaagcctctgg

SEQ ID NO: 312153 - DNA, 201 bp, Homo sapiens
tgggaggtagaaccgcggaagtggaaaggatgagcaatttttcagatagcttgagaacctgttaataaaaatagtaaagaaaaagttcatatgcgcatgcrctgtcacacaatttctcacttgctccttacaacaacaccatagggatgtagaatagttactattatcatcatcacctctgttatggatagaggattggta

SEQ ID NO: 312154 - DNA, 201 bp, Homo sapiens
cagtgcctgtgtcatagaagcgtcagtgttgtaaaggaagtcttgaataattgcaattgccacccttctcctgaattgtctaatatcagtttgttttctarcactgcatctcccatgtcttctttcccatcgtctggtgctgttttagaagcactcgtctccatcaaatcatcttctgttaattcctctggtgtgtctatt

SEQ ID NO: 312155 - DNA, 201 bp, Homo sapiens
gcgcccggccaaaaaacaactctttaaaaatgtaccttagagcaacatgcaaagcttccctgctcagcaatcccaggttggggccccctgtcttcctatcstcctacccgtcacaaccaccactgcaggcttctgatgctctgttttcctcctctgtctcagttcagttgctctgagttagagaggagctctctgggactg

SEQ ID NO: 312156 - DNA, 201 bp, Homo sapiens
ttcatcttttccaccacttacaaacagacccacggaggctcagcttgagtctgactgaagtagtctccccaccacacaggccagattcccagacagaatgaatttgttgcaacaaacaaacaaaatggactcatttttgttttgtagttggaagatactaaaggagatcacttgccttatttagctggataaattgcaaga

SEQ ID NO: 312157 - DNA, 201 bp, Homo sapiens; identical to SEQ ID NO: 65166

SEQ ID NO: 312158 - DNA, 201 bp, Homo sapiens
tctcataacatttggctgcttgcagcagatctccattctgcttatgaattaatccttgaagataccaataatttggtgcattttgtggaagcagattttcrgatacattctgtggttggtctttgatctcttccttgtcagttgattttttgcttatggacaaaccctctaaaccatgttgcacagcagtgtcttcagact

SEQ ID NO: 312159 - DNA, 201 bp, Homo sapiens
aataaaagtaagaataaaaattaaaaaataccaagtcagttctcattccttgtacattctgggtaaggtttgtttagctatcccatgactctttattgggstacctctttttgtcactttattagatattatggatactaagaaaaatagagattatcccaaccttctctgcccgccaggtgctttcagttttgttaggag

SEQ ID NO: 312160 - DNA, 201 bp, Homo sapiens
aattaggaaggttaaaaggagaaagtgtgagtctcagatcaatagaatgtatctgcagatttgtaggtacatatgggtgcctgaaaaaaatagctgaacactctagtaattaatagagagtatccagtggacctgcaggatgacaggtgatgttggatgtattgttggatgtatttgcctcaacgaaaccggaaaccacct

SEQ ID NO: 312161 - DNA, 201 bp, Homo sapiens
cattatttctgggtatgtatgtgaggttgtttctggaagacatgaacatgtgaattggtggactgagtagagcagattgctctccccagtatgggtgggcrttatccattctgttgagggccttaatagaacaaaaaggcagaggaagggagaattctccctctgaccgactgcttgagctaggacattggtctttttctg

SEQ ID NO: 312162 - DNA, 201 bp, Homo sapiens
attaggaaggttaaaaggagaaagtgtgagtctcagatcaatagaatgtatctgcagatttgtaggtacatatgggtgcctgaaaaaaatagctgaacactctagtaattaatagagagtatccagtggacctgcaggatgacaggtgatgttggatgtattgttggatgtatttgcctcaacgaaaccggaaaccacctt

SEQ ID NO: 312163 - DNA, 201 bp, Homo sapiens
agatgatggaattcctgttttctgtcctttgttctcacaggttttatagcattttcacagatccctgagctggctaaaaggattaaaatgttttttgcccygggtcctgtggcttccgtcgccttctgtactagccctatggccaaattaggacgattaccagatcatctcattaaggtacttggacccctcccatccctc

SEQ ID NO: 312164 - DNA, 201 bp, Homo sapiens
ctttttctgcccttagactagacttggactagaactttcaccattggcttacctggttctcagacttttagacttggactgggactacaccatcaactttycttggtctccagcttgcagacaacagattatgggacttgccagtctccataatcaggtgagccaattcctcataataaatctctttatatatagatgttc

SEQ ID NO: 312165 - DNA, 201 bp, Homo sapiens; identical to SEQ ID NO: 65194

SEQ ID NO: 312166 - DNA, 201 bp, Homo sapiens
ccgcaccccggcccctgagagctggcactgcgactcgagacagcggcccggcaggacagctccaggtgagagtgccggcgccgcggcgctgccaggtgcgrgtgcggcgtggaagctggtgccttcagcaaggggagggtcgcgccccgaggctctgccggccggcaagaccctctgcgtttggacccagcgagtcttgcc

SEQ ID NO: 312167 - DNA, 201 bp, Homo sapiens
ttgccagcatttgttattgcctgtcttttggataaaagcaattttaaccagggtaagatcatatctcattgtaggtttttttttaacttatattttatgtkcaggtatacacgtacaggtttgttatttaggtaaattgcatgtcatgaggctttagtgtacagattatttagtcaccccactcataagcatagtacatga

SEQ ID NO: 312168 - DNA, 201 bp, Homo sapiens
gccactggtgttatttccggtgtttaaaggcaaatagataaaaagaatggagaaggcctttcacacccaaagtgaaacgcgtcctcttctcatgcatcccrcttcccctcctgacttcctcctctattattaatagcaccagcatcctcctaatgacctagcctggaatctgcagaatcattcttgaccacgggtcctctc

SEQ ID NO: 312169 - DNA, 201 bp, Homo sapiens
tgtcttcatcatgaaatctttgctggtttctatgttgagaatcgtatttcctaggttatcttccagggttttaatatttttaggttttacatttcatccakcttgagttgatttccatatatgatgtaaggaaggggtccaatttcagtcttctatatatggctagccagttatcccagcaccctttattgaacagggaat

SEQ ID NO: 312170 - DNA, 201 bp, Homo sapiens
tttggttactatagccttgtagtatagttcaaagtcaggtaacatgggctctctattctgttctattggtctatgtgtctgtttttgtaccagtaccatgstattttggttactgtagccttatagtatagttcaaagtcaggtaacatgatgcctccagctttgttctttttgcttaggattgctttgggtatttgagca

SEQ ID NO: 312171 - DNA, 201 bp, Homo sapiens
tagactaggcagtcccatgttttccgtgttaactacagaggcacagattggaacaagtgccaaggaattaggccacctaccgagccttcctcttgcctctstctgactctccatcctgagggaagacgattgcagtcgtttttgttggaaatgacctgacctgtgggagcagcccgttcctggcctttcaaagtcaagtcg

SEQ ID NO: 312172 - DNA, 201 bp, Homo sapiens
aggagagagacgggtcaaatttttcctttctgtttcttttgaaagctctattttctttcatttcacttttttcccatgaatgacaaatttaaatgctgacrtataatttggggcaagaacagaagtggttagataagtaggaggaagagctaatagtggttagataagtaggaggaagagctaatagtggctgaacttaaa

SEQ ID NO: 312173 - DNA, 201 bp, Homo sapiens
ttcagaaggagagagacgggtcaaatttttcctttctgtttcttttgaaagctctattttctttcatttcacttttttcccatgaatgacaaatttaaatrctgacgtataatttggggcaagaacagaagtggttagataagtaggaggaagagctaatagtggttagataagtaggaggaagagctaatagtggctgaa

SEQ ID NO: 312174 - DNA, 201 bp, Homo sapiens
ggcatgacatgcaaggacaagattacatacatccatctttagcacacacaggtaccaagggtcctctctcaaggtcggcatacctgtccattttaaccttycactcagaatacgtgtggtgttccttcccaggcaccagatgtagtcctaatttactcagatcaaggtgagctagatcttcccctgaaacatacacttgtc

SEQ ID NO: 312175 - DNA, 201 bp, Homo sapiens
aaaatacctggttttatttcaaatctgccttcttgctgtaaatgacctacagctcaggaatatctcaatgaatacccacacatgttatctgtctttacatyggctaaaacctttgactagattatgagtactgtcctgtcagttgtgattcttctttccctagcaggctcctcacagctccccaattcacaatatttttct

SEQ ID NO: 312176 - DNA, 201 bp, Homo sapiens
ccttcctcacagtcaagttcagaatactcaatactgtatggatttgaaaatttcttgcaggtttgtttcaccttatctacataaatctgagcatctgagartctgcccaagtgatagtagacccaggcgtagtttccccaagtgactagacttctgatttctgcttggtcagcatgttcttgctggattaactcttcagct

SEQ ID NO: 312177 - DNA, 201 bp, Homo sapiens
tcttgccaaggtgtctagaatgcttgctatttcctgcttacttggtctaaatcagcaaatactgtcagtatcacattggaccacatgatgtattgtgaaayggagaagtgataagttttggcaggtaaaaatctttgcagttctggagaattacatatccctaaaatgggacaatgaaggtggatttctggccctgactgg

SEQ ID NO: 312178 - DNA, 201 bp, Homo sapiens
tcagaaatcttcctcttctgccaccaataaatgctgaagagacctatatatacaagtggcctctggttcctttttgtttgtttcccttcagctgacgttayaaaagggaaagtgaaactagaaagtgaaattggcaggactctttttctttttttctttttattatactttagaggactctttttcctccggagctgagtt

SEQ ID NO: 312179 - DNA, 201 bp, Homo sapiens
aaaagtgattgtcaactgagaggaatcctagacaagagtccactgagatttctgaggaaatgtgaggaaagagtttggaattgttttgatgaaatttactwcaaatatgaaaaatacgtttaatatatagaattagaatcttgtaaagagtgcttctcaaacattcctcatgtgagtcaccctgcgatctgataaatttgc

SEQ ID NO: 312180 - DNA, 201 bp, Homo sapiens; identical to SEQ ID NO: 65203

SEQ ID NO: 312181 - DNA, 201 bp, Homo sapiens
ttcctgcaacatggcttgctggcagattctagtaactgggtcacaaaccttgccaacagcagcctgggcttcattcttgctgatgctggttttgacgtgtrgatgggcaacagcagaggaaatacctggtctcggaaacataagacactctcagtttctcaggatgaattctgggctttcaggtatatatgaattgataat

SEQ ID NO: 312182 - DNA, 201 bp, Homo sapiens
aaaacagcaactttaaaatagatgttgcagtgacccagctgaagaatcaggcaagcttagggactcgcagagaaattcacagtgagccaggagagtatgayctgataacagggtcttaaagttaagttttacttcttagctcaaagcttttcttttgcctcccaatttttccaacttttaaaataattttttaaataagaa

SEQ ID NO: 312183 - DNA, 201 bp, Homo sapiens
caacaacaacaacgaggctttctctggttccttttcattgtagagttatcctcccacatacaatgtgaaggacatgcttgtgccgactgcagtctggagcrggggtcacgactggcttgcagatgtctacgacgtcaatatcttactgactcagatcaccaacttggtgttccatgagagcattccggaatgggagcatct

SEQ ID NO: 312184 - DNA, 201 bp, Homo sapiens
ccctattttgttcaacttttcttccatcccaccttgacattctatgtaattattttagtccattgataaaaacaagttaatattttttatactttattggycagcaggggatctctcaaaacaaagaaagtgttttatacattgacagttctagctgggatatttagaaaagaaagaaatgagcatttatttgtgcccggt

SEQ ID NO: 312185 - DNA, 201 bp, Homo sapiens
ggccagcaggggatctctcaaaacaaagaaagtgttttatacattgacagttctagctgggatatttagaaaagaaagaaatgagcatttatttgtgcccrgtaggcaggatggaaacaaagaggcccaagatgtggtaaagttaggcaaatttggtataaaacatgctagaatgatgaaactgaagtttaaccagacacc

SEQ ID NO: 312186 - DNA, 201 bp, Homo sapiens
gttaggcaaatttggtataaaacatgctagaatgatgaaactgaagtttaaccagacaccggtaggtggaacacaagcgtgaaacaagggaggatttactsttgtgatgagaagttggctactagatttagcagactaaaatttcaatgacaaatgctttcttaaagcctggagaacatagtttatctgctcctttgcttg

SEQ ID NO: 312187 - DNA, 201 bp, Homo sapiens
tgaattcacataatctaaaaatcagagaattagaagacatacagtgaaatgcctcccttctctctcactccctacttcctgcttttttgtgtatctttttraaataacttcattttaaaatctttttatttccaaaaatctcattagaaacaaatacacacacagattcttatttttcccttgcctccatttgaatgcaaa

SEQ ID NO: 312188 - DNA, 201 bp, Homo sapiens
atctttttgaaataacttcattttaaaatctttttatttccaaaaatctcattagaaacaaatacacacacagattcttatttttcccttgcctccatttkaatgcaaaagatggcactattttgttctttgaattttttacttaatatcttggagatctttccatacaatacataaagcacatcttccagaagtgcatga

SEQ ID NO: 312189 - DNA, 201 bp, Homo sapiens
taatgcatatttgtgctatttcagtcttctgttaacaaatattgctgctgtaaataagcttttgtgtgtgcaagtttatttacatgatacatgtccagaartagaatttttggatcacaggatatatgcatttgtgattttgatatatattgccaagctgattttcatgtgcatgtgtcctgataattactatcactatga

SEQ ID NO: 312190 - DNA, 201 bp, Homo sapiens
ctttgaagcaattgtgaatgggagttcactcatgatttggctctctgtttgtctgttattggtgtataggaatgcttgtgatttttgcacattgattttgkatcctgagactttgctgaagttgcttatcagcttaaggagcttttgggctgagactatggggttttctaaatatacaatcatgtcatctgcacacaggga

SEQ ID NO: 312191 - DNA, 201 bp, Homo sapiens
taagctcagcagctgagagagtcttgagccatttccattttcaaggctcctcgtatactaacagaaagaaagaatttcaagacaggattatggaaattcastttgcttatatagtttaagaaattaatgcttttaatacacacaaaaatactgctatacattcatactatttacaagtaattacaaaatgtattaaaacat

SEQ ID NO: 312192 - DNA, 201 bp, Homo sapiens
atcccagtgatgaagctaacttgatcatggtggataagctttttgatgtgctgctggattcagtttgccagtattttattgaggatatttgcattgcatcratgttcatcaggggtattggcctgatattctctttttttgttgtgtttctgccaggctttggtatcaggatgatgctggccacatcaaatgagttaggga

SEQ ID NO: 312193 - DNA, 201 bp, Homo sapiens
cacagtaagaaactcaacttacaatttgcactcaaaaacaagcatgattatgcattcttatttcactgacctcatgactgccctctgtgtctctgctgttscgaaaagctggtgaccaggctgatttgttcttcagaagtcttcctgtctgcctcaagtaaatactgaaggaactatataaaggggtgggagagtagggca

SEQ ID NO: 312194 - DNA, 201 bp, Homo sapiens
ggttgatttctagatttttctttccttatagaaaaatccttcacttctaaagaaactattttttgaatcactgcagtgctctaacgggctacacataggcsttggtaatctgggatgtaattcctcacccctggtggtgccgaacagacatggtttcattaatcaatgcctgagcttggtgacttgggctgagctcaggct

SEQ ID NO: 312195 - DNA, 201 bp, Homo sapiens
ctctgatcttagttatttcttgccttctgctagcttttgaatgtgtttgctcttgcttctctagttcttttaattgtaatattaggtgtcaattttagatmtttcctgctttctcttgtgggcatttagtgctataaatttccctctatacactgctttaaatatgtcccagagattctggtgtgttgtgtctttgttctc

SEQ ID NO: 312196 - DNA, 201 bp, Homo sapiens
aaagttatgggaatcattttatactcttggcctggggtcctgctattttaacaacacgagggtatagcacccccaggttgtacaactccagggagtaccaygtatattttcatgtatgtgagcagtgccttccggagtagtctacggaagctaccttgcagcagaactgtcatttaaaaacaatttgctagttatcaaatc

SEQ ID NO: 312197 - DNA, 201 bp, Homo sapiens
ggctactgaaggttgtgcatgcgtcatatagttctcatgccatggttttcagctccatcacatcatttaaggtcttctctacgctctttattctagttagycattcgtcgaatcttttttcaaggttattagcttctttgccatgggttcaaacatcctcccttagctcgaagaaatttgttattaccgattgtctgcagc

SEQ ID NO: 312198 - DNA, 201 bp, Homo sapiens
tgatgctttacagaagcctaggtaaattgggttccagtgctcctggtctcctgagctcctgctacattgacactgtgtttatgccacttgtgttgatccasatgtgatattaacttcccagtacccccaaaacagtcacacatagtgccacaaatgcttcctctggctcatccagcaacccctacctctgactccatttcc

SEQ ID NO: 312199 - DNA, 201 bp, Homo sapiens
ctgaaggttgtgcatgcgtcatatagttctcatgccatggttttcagctccatcacatcatttaaggtcttctctacgctctttattctagttagccattygtcgaatcttttttcaaggttattagcttctttgccatgggttcaaacatcctcccttagctcgaagaaatttgttattaccgattgtctgcagccttct

SEQ ID NO: 312200 - DNA, 201 bp, Homo sapiens
ggactacaggcgcccgtcaccgcgcccagctaactttttgtatttttagtagagacagggtttcactgtgttagtcaggatggtctcaatctcctggcctygtgatccacccgcctcagcatcccaaagtgctgggaagcatttttaaataaagtacatcattcaaatgatttaaagtaaatcattgtaactccagatgac

SEQ ID NO: 312201 - DNA, 201 bp, Homo sapiens
cttttttcatttccctagaaatgtttctatagaatagcaattcttccatcatttgctttagtttcagtgcctgtgtcatagaagcgtcagtgttgtaaagraagtcttgaataattgcaattgccacccttctcctgaattgtctaatatcagtttgttttctagcactgcatctcccatgtcttctttcccatcgtctgg

SEQ ID NO: 312202 - DNA, 201 bp, Homo sapiens
agctgtaaaatgggcaaaagtaatacacatattattgtttaatggatggattatatatttatgctttgagctctgaaggagttgatactaccctgagaggttttttttttcttttcatttttataatacttcccaaccatgatgtaaatattcataaaaacctagggagtatagttgtcatgactaatttgataatgaagg

SEQ ID NO: 312203 - DNA, 201 bp, Homo sapiens
atttactagaaggaggattagcaatgtagtggtcagagaaccagaaatctaaaaatgaccacaggactagggtggattccggagaactgttgtcatcactmgctaatattaatagtgacatcagtagctaatgttaaaagaaaaaccttagacaaattaaatttagtagagtttaattgagcaaagaattattcaccaatc

SEQ ID NO: 312204 - DNA, 201 bp, Homo sapiens
gagctagatcttcccctgaaacatacacttgtccattttgatccaatgaaatgagtttacctttgcagttggtgtgatttgtgttttccattagaggcctmttgaaaaataatagagattttgggccttcttgtctcttcctattctttacttaatagggaagactctttaacatgcatttggattgcgtccaggatgggg

SEQ ID NO: 312205 - DNA, 201 bp, Homo sapiens
ctggaaagattttccattccctttagtgttggtcctcaaaataaataaataaaccaaaatcaaccaaaccaaaaaacaaaacaaaacaacaacaaaaaaamcccgaaaaaacccagagaacagacaaatgagcaaaagcctgtatttcgaattactttggagataaatagtattctatgccccaaattatttctcaacact

SEQ ID NO: 312206 - DNA, 201 bp, Homo sapiens
attctaagataagaccatgctaaaattctaagaaataagaaaagggttctatagattctgggtgactacaaaaaaaagaaatctgtaaatatctcaaatcttttttttttttttttgaaatcaggcagaacatttagactagcaggaaataatatcgtttcaagaagagaaatcaggaacctcacagacagaaggcaaggt

SEQ ID NO: 312207 - DNA, 201 bp, Homo sapiens
aaatgaggtcttaagggtggggcccctaatctggtaacccctaatctggtaacactgacgtcttcatacaaacaagaagaaaaagaagagacctcagatayctctctctctctctctctctctctctctctctctctctctctctcgtctcacacagaggaaaggccatgtgaagataaagaaaaggctgccatctccagg

SEQ ID NO: 312208 - DNA, 201 bp, Homo sapiens
gtgggaggcttagcaggtcactagacctgctagaggacaactcaagtagacatatcccccaattatgaaaaagtgcatttcaaggtaaaagtgacctcaayataaattggaattttgcagtgctgaattaattattgacacatttgctgagaagcaagcatggtttaaaaataaccacagtcacaacaaaaccacaaacct

SEQ ID NO: 312209 - DNA, 201 bp, Homo sapiens
tatttttgtgtagtaaaattcaagcaaataataatagactgttttattatacagaatgaaaatgcggttcttggggttggtggtctgtttggttctctggmccctgcattctgaggggtctggagggaaactgacagctgtggatcctgaaacaaacatgaatgtggtaagtttctcaaagttatgtacttttaaaatgca

SEQ ID NO: 312210 - DNA, 201 bp, Homo sapiens
tgtttttagcttactgattccaagcaaatgctgaagaggtttccacccagggtgctgttaggtctgtgcttttatgaaaggggaaaggaaagtgaaactgwtggaaccctatcaagatccctcttgaggggaaactgaaacagaatctgtgagaactgagctcactcacgccaggaacatgttccagacagatttggaaaa

SEQ ID NO: 312211 - DNA, 201 bp, Homo sapiens
ccacccagggtgctgttaggtctgtgcttttatgaaaggggaaaggaaagtgaaactgatggaaccctatcaagatccctcttgaggggaaactgaaacasaatctgtgagaactgagctcactcacgccaggaacatgttccagacagatttggaaaactgtggtttgaaagttgtaaaaaggcactgtaaaaagaaaat

SEQ ID NO: 312212 - DNA, 201 bp, Homo sapiens
gtgtgtatcacactgttgcaggggaaggtgcagtgccctggaatatgaagaaagtgagcatgagtcttgatatgctcccaggtaatagaaaggagacttakgggaccttggtgctacacctgggtttgcccctgacttcttgtgtgctttgttttttcttttttttttttaacctctgtgggatatattatatatacttta

SEQ ID NO: 312213 - DNA, 201 bp, Homo sapiens
ctcattgcaggaaatagctgcacacagggaggaaacatgagctgatgcattccccaccctgcctccccccatgtagttccgtagggaaccattccagaaayttaagaagcctgtgtgtacaccaaaaaaagccacagggaaaaacccctcaaacatcttacaaatgctcagactgataaagacatattgaatctataaaca

SEQ ID NO: 312214 - DNA, 201 bp, Homo sapiens
actgccctctgtgtctctgctgttccgaaaagctggtgaccaggctgatttgttcttcagaagtcttcctgtctgcctcaagtaaatactgaaggaactayataaaggggtgggagagtagggcacgcatcagctgatgttttctccgtttttgagtaattgcttttaggggaaggaagaggaaactggaaagtgaaacta

SEQ ID NO: 312215 - DNA, 201 bp, Homo sapiens
ggtttgcatttccacattctaaaacagagcatggacagaggctctttactgtccttcactcctattcaagagcaaggttgttgccactggtgttatttccrgtgtttaaaggcaaatagataaaaagaatggagaaggcctttcacacccaaagtgaaacgcgtcctcttctcatgcatcccacttcccctcctgacttcc

SEQ ID NO: 312216 - DNA, 201 bp, Homo sapiens
cactctgtcatccaggctggagtgcagtagcacgatctcagcttactgcaacctctgcctcccaggctcaagcgatcctcccatctcagcctctccagtcratgagactataggcacgtgccaccacgcctggctgatttttgtatttttagtacagacggggtctcactatgttgcccaggctggtctccaactcctgag

SEQ ID NO: 312217 - DNA, 201 bp, Homo sapiens
aaagaatggagaaggcctttcacacccaaagtgaaacgcgtcctcttctcatgcatcccacttcccctcctgacttcctcctctattattaatagcaccarcatcctcctaatgacctagcctggaatctgcagaatcattcttgaccacgggtcctctctaggccacccacgttaaattgcttcagttcatctttttctt

SEQ ID NO: 312218 - DNA, 201 bp, Homo sapiens
tggagtgcagtagcacgatctcagcttactgcaacctctgcctcccaggctcaagcgatcctcccatctcagcctctccagtcaatgagactataggcacrtgccaccacgcctggctgatttttgtatttttagtacagacggggtctcactatgttgcccaggctggtctccaactcctgagctcaagcatctgccctc

SEQ ID NO: 312219 - DNA, 201 bp, Homo sapiens
cctctccagtcaatgagactataggcacgtgccaccacgcctggctgatttttgtatttttagtacagacggggtctcactatgttgcccaggctggtctycaactcctgagctcaagcatctgccctcctcggcctcccaaagtgttgggcttatgggtgtgagccactgcggccagccatgttacctctttacaaaaga

SEQ ID NO: 312220 - DNA, 201 bp, Homo sapiens
tttcacctccattctgcacagtagtagcccttggctactcgtgcagtatgtgcatgctgtttcccaccattaagcaaccttcttaggaagtgttgagcaaygctttgctcctgaagggaattgaaattcagaaattacacttcatagggaagtggctctgttttcatctgctcagccttatttcagaaagtcatggggagt

SEQ ID NO: 312221 - DNA, 201 bp, Homo sapiens
tgatgccatgataggcacaatatatattttatatatatatacacacaccaagagtggcacatttgtatctgaaagttatgcatctgattgccgagtgggtraagtggcactctagactgtgaaagcctggaatgactgccttcagcatgcagaaacaggcttttcaactgtggcctcagcaaagattccccaggggttgtc

SEQ ID NO: 312222 - DNA, 201 bp, Homo sapiens
agcaactcagagagctgttaggtgacttatctgagataatgcgtgtaaagtgcttaagtgcttagcatggtgcctgtcacattgtcaacacttagtatgcrcttgctgttactatgattatattacctgggccaaagaatgccacttcactctatccttcttcatagtggttatgttctaataatattttattacatttac

SEQ ID NO: 312223 - DNA, 201 bp, Homo sapiens
gaatcactgcagtgctctaacgggctacacataggcgttggtaatctgggatgtaattcctcacccctggtggtgccgaacagacatggtttcattaatcratgcctgagcttggtgacttgggctgagctcaggctcatgtagcactctgatggcgcattgggtaggggattgcattcagaacctttgcctaatggagca

SEQ ID NO: 312224 - DNA, 201 bp, Homo sapiens
tctactatttaactggctgtgtgaccttggcaattttctttacctcttgaagttttgacttattcaattattaaacaggaagaataatactggctacttcrtaggctgttgtgaaaatttgataaggcctgtgaaatatatgcagtatagtaagtgcaggtgatacaatttcttttacaacatttatttatttaaaatatt

SEQ ID NO: 312225 - DNA, 201 bp, Homo sapiens
tttacagatgaggaaaccaaggtttatagggttaattaacttgcccaagataaagcagctgatgggtagtgaaggcaggagtcacacagcccgtgactgtytctgcccacttggccctcttctcaggctagagaacagctatgatgtccctgataaagtcacactgtggaaagtggaaagtatctgacttagatgtcctgc

SEQ ID NO: 312226 - DNA, 201 bp, Homo sapiens
gccaattaacaaatattttatatgttatatgtattatattccatatatacaataagtaagctagagaaaagaaaatgttataaggaaatcataaggaaaakaggatgtatttactattcattaagtggaagtggatcatcataaaggtcttcattcttatgttggaacaggctaaggaagaggaggaagaggaggagttgg

SEQ ID NO: 312227 - DNA, 201 bp, Homo sapiens
caattaacaaatattttatatgttatatgtattatattccatatatacaataagtaagctagagaaaagaaaatgttataaggaaatcataaggaaaagargatgtatttactattcattaagtggaagtggatcatcataaaggtcttcattcttatgttggaacaggctaaggaagaggaggaagaggaggagttggtc

SEQ ID NO: 312228 - DNA, 201 bp, Homo sapiens
ccctctactgtaagagttacctaaagcatctgtgatggtccaggaggcttctcaggtgatcgggcagtgtcagtcttcagccactaagcccagaagatctkggaagaagtcaatcagagagccttgggccagagttccaggggctctgggagtggctgccaggtgagctggacagtctgattttcagtggggtcccacaca

SEQ ID NO: 312229 - DNA, 201 bp, Homo sapiens
aattaacaaatattttatatgttatatgtattatattccatatatacaataagtaagctagagaaaagaaaatgttataaggaaatcataaggaaaagagratgtatttactattcattaagtggaagtggatcatcataaaggtcttcattcttatgttggaacaggctaaggaagaggaggaagaggaggagttggtct

SEQ ID NO: 312230 - DNA, 201 bp, Homo sapiens
ttccatcatttgctttagtttcagtgcctgtgtcatagaagcgtcagtgttgtaaaggaagtcttgaataattgcaattgccacccttctcctgaattgtytaatatcagtttgttttctagcactgcatctcccatgtcttctttcccatcgtctggtgctgttttagaagcactcgtctccatcaaatcatcttctgtt

SEQ ID NO: 312231 - DNA, 201 bp, Homo sapiens
tcccatacaccctctgcccccacactcccctgttatgaacatccctcacagagtggaattgtaattgttacagctgatgaacctacattcacacaaagtcygtagtttacattagggttcccttttttttttttttttgagactgagtctccctctgtcccctaggctggagtgcagcagtgcaatctcggctcactgcaa

SEQ ID NO: 312232 - DNA, 201 bp, Homo sapiens
tctggtaacactgacgtcttcatacaaacaagaagaaaaagaagagacctcagatatctctctctctctctctctctctctctctctctctctctctctctcgtctcacacagaggaaaggccatgtgaagataaagaaaaggctgccatctccaggtcaggaagagaggtctcaccagaaaccaacttggacttctagca

SEQ ID NO: 312233 - DNA, 201 bp, Homo sapiens
catcctcttcagcagttggtgttttcagcgtttttggatgttgctcattctgatacgtgtatagtgatgtctcattatgtgtgatctttttctttcctttkgtttattttgttaggaattattgtgagaaatgcaattacgaaagcaaattgtaaaaacattttataagaaaaaaattgtaaaaacattttataatttctt

SEQ ID NO: 312234 - DNA, 201 bp, Homo sapiens
ctggtaacactgacgtcttcatacaaacaagaagaaaaagaagagacctcagatatctctctctctctctctctctctctctctctctctctctctctctcgtctcacacagaggaaaggccatgtgaagataaagaaaaggctgccatctccaggtcaggaagagaggtctcaccagaaaccaacttggacttctagcat

SEQ ID NO: 312235 - DNA, 201 bp, Homo sapiens
ctgctaccttgccagtgctgttttaaaaaaattctttactaacattatatgtgagtacatcactatgtcaatctttcaatttatttctagttcattatttscttatggatcttttacgaatgttctatttagcaagatatcatatttgttttgaagcttggtgctactgcctcctaaacaatgaatgtttttcaggtccca

SEQ ID NO: 312236 - DNA, 201 bp, Homo sapiens
gtttttaggctctatctttgagttttttttattgttgtcatataccaggccagattgatttaggtaaaaacagcactcttcatgtgaaaatatacagagtccccccccccctttttttttagcagtgagtaagtcaaggcctcagcgattttgtaggaaagagaaatgcaaagccagcaattgtttgttaaagaaggatta

SEQ ID NO: 312237 - DNA, 201 bp, Homo sapiens
atgctttaatcctttttaaagcgtgctgtgggatgggatattggcattgagtggtgtaagggtgattaggttttaatgggatggtaaggggtgcatgatcrgtcaccaaggagggagtagaggtatcttatacttgtgggttaaggtggggggatatgaaaggaagacatgaaggaggctttgggttgggaagaagggtgg

SEQ ID NO: 312238 - DNA, 201 bp, Homo sapiens
ggacactcagctcatcctctcatcttcctcctataatgagggacaatatgttctactctgactctagaaaatgtatcaagttaatttcttttacaaaaaamaaagagaaaaatagaaaggaattccttatgcttccctcccctccaccaaaagaggaattctgatgttaactgtttagtcttcatttctaagacagggcac

SEQ ID NO: 312239 - DNA, 201 bp, Homo sapiens
ctgcctcagcctcccaaagtgctgggattagaggtgtgagccaccgtgcctggccctaagtatttttaaataaagtaaatcatttaaagtatttttatactttttttttttttgagacagagtctgtctctgtcgcccagactggagtgcagtggtgctatcttggctcactgcaagctccgcctcccaggttcacaccat

SEQ ID NO: 312240 - DNA, 201 bp, Homo sapiens
tgtttgtgtacactgaaccatcatcagaaagtaaaggtgtcactatctcagccacacatgtggatagtctgtggttgtttggcatcaccatcattcttgaytgaatttatatgctaccaatacacagtcattttcttacattaattcacacataagaattttacataaaaaaagacatatcattaatacagtaagaaagaa

SEQ ID NO: 312241 - DNA, 201 bp, Homo sapiens
taagacatttatttcatcttgtaatcaagagccagcattctctctgtttttcaagagaagccaggattatatatttttatgtgagctcttctgattttttwaattttaattttaattaattaatttatttttttgagacagagtctcgctctgtcaccccggctggagtgcaatggcacgatctgggctcactgcaacctc

SEQ ID NO: 312242 - DNA, 201 bp, Homo sapiens
tgtgcaggtttgttacataggtatacatgtgccatgttggttcatatgtttattgcggcactatttgcaatagcaaagacttggaaccaacccaatagacygggtaaagaaaatgtggcacatatgcaccatggaatacaatgcatccataaaaaaggatgagttgtgtcctttgcagggacatggatgaagctggaaacc

SEQ ID NO: 312243 - DNA, 201 bp, Homo sapiens
ctgtttactttactagttctcgaattttccaggggccatatcattgagccagaatttcctttttgcctcacactaaacatacgaagccaggccctggaggratctgtgagctgtttagctttccaagctctggataataatttagtttacccagctgtaaaatgggcaaaagtaatacacatattattgtttaatggatgg

SEQ ID NO: 312244 - DNA, 201 bp, Homo sapiens
ttgcgctaggtgcagatttgaacttcaattccaaattaagcaagcaaaactctttgtcaaattgtcttagcattactgaaaataatacttcacattttgtrttgtgccttacggggtttcaaagccttttcataaagctttaatatttgcaataatccctttgacaggtgaggcgagcatttgtttctctacaggcaaggg

SEQ ID NO: 312245 - DNA, 201 bp, Homo sapiens
agaggttttttttttcttttcatttttataatacttcccaaccatgatgtaaatattcataaaaacctagggagtatagttgtcatgactaatttgataaygaaggaattgttagctagaagcgtttcctccatcctgtagctgcacaaagcagagactcttgtgtagcaaaattaacatgacatatggtgtttccaacaa

SEQ ID NO: 312246 - DNA, 201 bp, Homo sapiens
accatgatgtaaatattcataaaaacctagggagtatagttgtcatgactaatttgataatgaaggaattgttagctagaagcgtttcctccatcctgtakctgcacaaagcagagactcttgtgtagcaaaattaacatgacatatggtgtttccaacaacagagtctcatgagatacttcgagttcagaggttgttata

SEQ ID NO: 312247 - DNA, 201 bp, Homo sapiens
cctaccgagccttcctcttgcctctctctgactctccatcctgagggaagacgattgcagtcgtttttgttggaaatgacctgacctgtgggagcagcccrttcctggcctttcaaagtcaagtcgccttactcatggcctagctcctgatcactcctggtgggtgaaaagtgcctcaacatacctaaagagctgtgacat

SEQ ID NO: 312248 - DNA, 201 bp, Homo sapiens
attgtgtagaatactcaaggttgatgatagactgggaaggaggaggaaggaggcagagataagcgatgggggatactgagccctatttagactttggtccsccagcttttggatgaacttagcacattactggctatgcaggactaacctctatgggatgcaaaatgactccaagtatggaacaacattgcaaaaatggac

SEQ ID NO: 312249 - DNA, 201 bp, Homo sapiens
ctctgactctccatcctgagggaagacgattgcagtcgtttttgttggaaatgacctgacctgtgggagcagcccgttcctggcctttcaaagtcaagtcrccttactcatggcctagctcctgatcactcctggtgggtgaaaagtgcctcaacatacctaaagagctgtgacatgagcaggaaagcccctctttctaga

SEQ ID NO: 312250 - DNA, 201 bp, Homo sapiens
atgcaaaatgactccaagtatggaacaacattgcaaaaatggacttcaatattacatgaaggatttggctgctttatataaatatagaaacaagcccagtrgattactccactaaaggtgactaagcaaatgttacagttcaaattgcactcaagaagtcaatcgagaaataattctatcaccaagcccgtggacctaccc

SEQ ID NO: 312251 - DNA, 201 bp, Homo sapiens
ctaggtgatagaatgagaccttttctctcttaaaaaaaaaaaaagttatgggaatcattttatactcttggcctggggtcctgctattttaacaacacgarggtatagcacccccaggttgtacaactccagggagtaccatgtatattttcatgtatgtgagcagtgccttccggagtagtctacggaagctaccttgca

SEQ ID NO: 312252 - DNA, 201 bp, Homo sapiens
tcatttggtacagctgaaagttgccataccgcagatggagcagttgtttcgctacaggagtaagctctttactgaattccttttggaagtaatactctgcktcttcatactgatctgctagagcatggaggctggcaagaatggaacagacacggaagagattatcattggcctcatcagctttcttcagatgagccacag

SEQ ID NO: 312253 - DNA, 201 bp, Homo sapiens
ggtaggcattgtttggtatgtattctaaagcctttttaagcagttcaatcgctttgtctggctcatcttttcttcgataaaacttggctgcactgcgaagwacatctgttacacctggggctttctccaaggcttcttcaactaacttctctccttcaccttcctcttcaccttcttcacgcatcttatgaagcttcagag

SEQ ID NO: 312254 - DNA, 201 bp, Homo sapiens
tcccctgcgttttgatatcagtggagcagtgggcttttctttttccgtttacccctccttccagacccaggggtggccggggacgcctgtcgtttcctgcrcactggtgccacgtgtactcatggttagcatgcgtcagtacagctctgcccacctcacagggagagcaaggagagtctgggagaaaataatttaagcatt

SEQ ID NO: 312255 - DNA, 201 bp, Homo sapiens
ccctaaaccaagacactgtaggtgtcttgaatagtaatttccaaacacctggcagtcactgcttgcatcagaatcaccaaattgctttaaaaagtacactrtttaataaatcattgcattaaaaaagtaatgagagttggaattatagtggaattcttggattggctaccatccaggcttataaaacaaatactcctgtgt

SEQ ID NO: 312256 - DNA, 201 bp, Homo sapiens
agtatctaaggctgttaactacctccttgcctgtgctcaggtgtcacttcataagagtcctttcctgattaccatatacatatcatcctccttatccctgtttttttttttttttttgggatggagtctcactctgttgtccatgctggagtgcagtggcatgatctccgctcactgcaacctccacctacctggttcaag

SEQ ID NO: 312257 - DNA, 201 bp, Homo sapiens
tgcctggggtgcctgcgggtgctttttctgcgggcgttggctcaaggcatctgccaatcaaccagggcaacttcagagagcaacttcagagagaagcccactctcttccctgggcgctgtccactttcctggacaggcgcggtctccggtcagtgaagctgcccagtgctcctggaccgcgaggacagcagggatgtctga

SEQ ID NO: 312258 - DNA, 201 bp, Homo sapiens
gcctggggtgcctgcgggtgctttttctgcgggcgttggctcaaggcatctgccaatcaaccagggcaacttcagagagcaacttcagagagaagcccactctcttccctgggcgctgtccactttcctggacaggcgcggtctccggtcagtgaagctgcccagtgctcctggaccgcgaggacagcagggatgtctgat

SEQ ID NO: 312259 - DNA, 201 bp, Homo sapiens
tgacttaggctttctaaatataagaaacaaaagacgaaccagaacctccagtaacttccctccaggccccagctttcactggcccgattttacctgaaagsatctgagcatgggctctctaggatctctcaatatgccccgtcccttcccagctcccagctcccatttccctgtgtcctttggctgcctaactctatacat

SEQ ID NO: 312260 - DNA, 201 bp, Homo sapiens
ggagcttgcagtgagccaagattgcgccactgcactccagcctgggcgacagagcgagactcagcctcaaaataaataaataaataaataaataaataaataaataaataaataataataataataataataattcctttgggaggcggaggcgggcaggtcacgaagtcatctgagaccagccttgccaatatagtgaaa

SEQ ID NO: 312261 - DNA, 201 bp, Homo sapiens
tgctgagaagcaagcatggtttaaaaataaccacagtcacaacaaaaccacaaacctctgacttaggctttctaaatataagaaacaaaagacgaaccagracctccagtaacttccctccaggccccagctttcactggcccgattttacctgaaagcatctgagcatgggctctctaggatctctcaatatgccccgtc

SEQ ID NO: 312262 - DNA, 201 bp, Homo sapiens
agcttgcagtgagccaagattgcgccactgcactccagcctgggcgacagagcgagactcagcctcaaaataaataaataaataaataaataaataaataaataaataaataataataataataataataattcctttgggaggcggaggcgggcaggtcacgaagtcatctgagaccagccttgccaatatagtgaaacc

SEQ ID NO: 312263 - DNA, 201 bp, Homo sapiens
gcttgcagtgagccaagattgcgccactgcactccagcctgggcgacagagcgagactcagcctcaaaataaataaataaataaataaataaataaataaataaataaataataataataataataataattcctttgggaggcggaggcgggcaggtcacgaagtcatctgagaccagccttgccaatatagtgaaaccc

SEQ ID NO: 312264 - DNA, 201 bp, Homo sapiens
gtatatttggtttcatttttttccacttagtattatttatgagattatctgtaagccattttctgtttgtattttatttatatttatgacagtggcatacyccttgtgtatatttatgtaacatatttacccaaatatctattatttgaaatggtaagttttggccacaaggtggcgcccggtaaaaagaaatgcccagac

SEQ ID NO: 312265 - DNA, 201 bp, Homo sapiens
gcagtgagccaagattgcgccactgcactccagcctgggcgacagagcgagactcagcctcaaaataaataaataaataaataaataaataaataaataaataaataataataataataataataattcctttgggaggcggaggcgggcaggtcacgaagtcatctgagaccagccttgccaatatagtgaaaccctgtc

SEQ ID NO: 312266 - DNA, 201 bp, Homo sapiens
tgatatgattatcacagaagtataaccttagtgtatatttggtttcatttttttccacttagtattatttatgagattatctgtaagccattttctgtttstattttatttatatttatgacagtggcataccccttgtgtatatttatgtaacatatttacccaaatatctattatttgaaatggtaagttttggccaca

SEQ ID NO: 312267 - DNA, 201 bp, Homo sapiens
catcagtagagaactgtttctctgggtgattatccagatggtacatcgcaattgccagtccagaggagaattctgggttgttgggcttttcttccagagcyttctcaaaacacaccttcgccctttcatttcttccacacttcagttgtgtccacccttcctcacagtcaagttcagaatactcaatactgtatggatttg

SEQ ID NO: 312268 - DNA, 201 bp, Homo sapiens
tgagccaagattgcgccactgcactccagcctgggcgacagagcgagactcagcctcaaaataaataaataaataaataaataaataaataaataaataaataataataataataataataattcctttgggaggcggaggcgggcaggtcacgaagtcatctgagaccagccttgccaatatagtgaaaccctgtctcta

SEQ ID NO: 312269 - DNA, 201 bp, Homo sapiens
gcagtgatagttgttttgcagtcataaatcatctgtccttatatgttagagtgttttcttaggatgatacatttatagcagtagacttagtaagggagagkgtaggcatagctttaagacttctaatacatattgtactttagaaaagttgaacccgtttacatttttattaccattcaagacctaaatataatttttaaa

SEQ ID NO: 312270 - DNA, 201 bp, Homo sapiens
aagctcccctactgagcaccttgtgacccccacacctgcccaccagagaacaacccccctttgacagtaattttcctttacctacccaaatcttataaaayggccccacccctatctcccttccctgactttcttttcggactcagcccacctgcacccaggtgaaataaacagccttgttgctcacacaaagcctgtttg

SEQ ID NO: 312271 - DNA, 201 bp, Homo sapiens
gtcacaaaccttgccaacagcagcctgggcttcattcttgctgatgctggttttgacgtgtggatgggcaacagcagaggaaatacctggtctcggaaacvtaagacactctcagtttctcaggatgaattctgggctttcaggtatatatgaattgataatggcatggatgtatttccttagtactcttaaagcagacaa

SEQ ID NO: 312272 - DNA, 201 bp, Homo sapiens
tgactttgtgcgaaggagatagcttagaagtgagcggtatggccatagcctggctgctcgcaggaggatgaggatgtggtttctatcttggcagccatgtrcttagggaaagctttagggattctgttactgaaaggaagaaggcaagaatgggaatgggtggcagtctctgccataattaaaaatgcctttccgggtcag

SEQ ID NO: 312273 - DNA, 201 bp, Homo sapiens
agggtttttatggttttaggtctaacatttaaatctttaatccatcttgaattaatttttgtataaggtgtaaggaagggatccagtttcagctttctacmtatggctagccagttttcccagcaccatttattaaatagggaatcctttccccattgcttgtttttgtcaggtttgtcaaagatcagatggttgtagatg

SEQ ID NO: 312274 - DNA, 201 bp, Homo sapiens
cctgcaggatgacaggtgatgttggatgtattgttggatgtatttgcctcaacgaaaccggaaaccaccttgcaagtctgatgacactatctctctctctyttttttttttttttggagggcagaaggctttgacatatcaatgcaccagggatcttaccaaactaaattttaagcacttatagctcaagattctccctct

SEQ ID NO: 312275 - DNA, 201 bp, Homo sapiens
caagattgcgccactgcactccagcctgggcgacagagcgagactcagcctcaaaataaataaataaataaataaataaataaataaataaataaataatwataataataataataattcctttgggaggcggaggcgggcaggtcacgaagtcatctgagaccagccttgccaatatagtgaaaccctgtctctactaaa

SEQ ID NO: 312276 - DNA, 201 bp, Homo sapiens
gagacggagtttcgctcttgttacccaggctggagtgcaatggcacgatctcggctcaccgcaacctctgcctcctgggttcaagcgattctcctgcctcrgcctcctgagtagctgggattataggcatgcaccaccatgcccggctaatttttttgtatttttagcagagacggggtttctccatgttggtcaggctgg

SEQ ID NO: 312277 - DNA, 201 bp, Homo sapiens
ggcccttgggaatgttgaaaccaaggctgtcctaggccaactctattttatattacagacctgtgttgcttcacccttctgtgtcttgggcctccactggkcatggggtttgcagtagagacattggatcggctatcatctaggctactggtcttgttccagccctcttatccagcagcttgccagggtcaaaggctgcag

SEQ ID NO: 312278 - DNA, 201 bp, Homo sapiens
attttggtttcctccacactttaaccgtgtccacccttcctcacagtcaagctctggactctcaattctatagggactggaaaacttctcacagacatgtytcaccttgtctacataaatctgaacgtctgagagtcggcccatgtgatagtagacccaggcatagtttccccaggtgaccagacttctgatttctgcctg

SEQ ID NO: 312279 - DNA, 201 bp, Homo sapiens
ggttaaagtacagctcaggccatggcttcacagggtacagtccctaagccttggcagtttccatgtggtgttgagcctgtgggtgcacagaagtcaagaaytgaggtttgggaacctccacctgtatttcagaggatgtgtggaaaagcctgaatgtccaggcagaagtttgctgcaggggtggggccctcaaggagagcc

SEQ ID NO: 312280 - DNA, 201 bp, Homo sapiens
cctatcatgaagaagtacaaagttgtaagtagaagcagtggccttgctttgccaatgcacactgaaggggataacgtttgctcctgttcagagttcacggycgggcgcggtggctcacgcctgtaatcctagcacttttggaggccgaggccggcggatcacgaggtcaggagatcgagaccatcctggctaacacggtga

SEQ ID NO: 312281 - DNA, 201 bp, Homo sapiens
ggcagatcctgagctttcccaccagcttagtgactgccagcagcccacacacagtacacgccaggcctcagcaaagtacaaatggccaccagacctgggaygtcagaggcccttgggaatgttgaaaccaaggctgtcctaggccaactctattttatattacagacctgtgttgcttcacccttctgtgtcttgggcctc

SEQ ID NO: 312282 - DNA, 201 bp, Homo sapiens
gtctgagagtcggcccatgtgatagtagacccaggcatagtttccccaggtgaccagacttctgatttctgcctggtcagcatgctcttgctggattaackcttcagctttacgtaagcattccagggctgcctcgttttgccctttgaggtgctttagataggccagtaggttgcacattgtggctttgaattcacgatt

SEQ ID NO: 312283 - DNA, 201 bp, Homo sapiens
ggtggccagaggcattttcctatatcaaaagaactttgaaaggcagtcccttactggcaaagcacttcctgacttcaggaaaaaagcatcaatggaaccartctggaaaaatagttctcattgtccagtccttcttattgtacagccaaaagactgacagctgatgtctatattttccctttaaggctcagggattagcag

SEQ ID NO: 312284 - DNA, 201 bp, Homo sapiens
cacagaacagtagagttagcctatcccttcttgccttaaatcctggtgcttgtttctcttccttactaataaacgtcctttgtgggatatatatatatatwtttttttgttagaatggaacactttcatctgcattaaaaacctgttcaggcagatacattttcctctaggaatttatatgcagcctcttggttggcagga

SEQ ID NO: 312285 - DNA, 201 bp, Homo sapiens
tcacacaaagtccgtagtttacattagggttcccttttttttttttttttgagactgagtctccctctgtcccctaggctggagtgcagcagtgcaatctyggctcactgcaacctctgcctcccgggttcaagcaattctcctgcctcagcttcctgaatagctgggattacaggtgtggggcaccacacccagctacct

SEQ ID NO: 312286 - DNA, 201 bp, Homo sapiens
acatttgtcaattcacttatagtcttatcatctggacaaatcattcttctcatttttccttggtattttacactcctctttggtgtacattaattttgcayagctgtaatttagagtagtctataattttgtattttgcttttttttcctttgcaaggtataagcttttctatgctgtcactgtccttgtcatggttgatg

SEQ ID NO: 312287 - DNA, 201 bp, Homo sapiens
ctcaaatcttttttttttttttttgaaatcaggcagaacatttagactagcaggaaataatatcgtttcaagaagagaaatcaggaacctcacagacagarggcaaggtgtctcataggaagtaagcacaggggttggtaacacgggattccagagctcccaggatgagggttaggcaaccaggtccggccaccccacctt

SEQ ID NO: 312288 - DNA, 201 bp, Homo sapiens
ctcgggtacaggtgagtagaaaataaattctcacaggcagacacagacacatatatttatgaatttgtgtgtgtgagcctttttatctatttaacttttaytcagctttaaaaatttttattaaattttattttttaaagcagttttaagttcatagcaaaattgagtggaaggtacagagatttcccatacaccctctgc

SEQ ID NO: 312289 - DNA, 201 bp, Homo sapiens
atttacattcctaccaacagtgtataagagttccctttcccctgcatccttgccagcatttgttatttttttttttaataatagccatactaactggggtkagatgatatctcattgtgatttttatttgcatttccttggggttgagtgatgttgagtattttttcatatgcctgttggtcacatataccagagctcctt

SEQ ID NO: 312290 - DNA, 201 bp, Homo sapiens
ttgatgtccactggttgccattctctcctgaggccattcgtggagacattgggtacttgtctctgcttctgaggtgagtcacggagacttatgcaccagartgaaatgctgagatgttcttgggtttctttttattttgtaggacttatttggagacaaagaatttcttccccagagtgcgtttttgaagtggctgggtac

SEQ ID NO: 312291 - DNA, 201 bp, Homo sapiens
cacatataccagagctcctttataggtgatgagatgcttttcctttgctgtctttaaaattttctttttgtcactgactttagatagtttgactataatgygccatggagaagaacgtttttcactgtatctgattggggattgctgggcctcctgtatctggatgtctaaatctcttactagacttgggaagttctcatc

SEQ ID NO: 312292 - DNA, 201 bp, Homo sapiens
ctgagattgcaccactgcactccagcctgggtgacagagcaagactccatctcaacataaataaataaataaataaataaataaataaataaaataaaaawaaataaataaaatttaaaaattccttattctcctttcagatatggctggagtcatttgtttcatattttcctttcaccttttacttgccctaaatctggt

SEQ ID NO: 312293 - DNA, 201 bp, Homo sapiens
tgggcctcctgtatctggatgtctaaatctcttactagacttgggaagttctcatctattatttcattacataggttttcaaaccctttcagtttcccttygcctttggagatactgataattcatatatttggtcaccttatggtgtcccatagatcgtgaagactttgttcatactttttaattctttttttttcttta

SEQ ID NO: 312294 - DNA, 201 bp, Homo sapiens
tgccagtccagaggtgaattctgggttctttggcttcttttccagagccttctcaaagcacaccttcgctctttcattttggtttcctccacactttaacsgtgtccacccttcctcacagtcaagctctggactctcaattctatagggactggaaaacttctcacagacatgtttcaccttgtctacataaatctgaac

SEQ ID NO: 312295 - DNA, 201 bp, Homo sapiens
agaagggagtcagttcacttttgcaatctcctgagaatcaatttcttaagacttgtggaatattcagtttaaacacaaaactaaaaacaaacagctgtatwggagtattattgacatacaatagcatggcatatttcaattgtacaattgtataagtttttgcatgtgtacacacctgtgaaaccatcagtacattcaata

SEQ ID NO: 312296 - DNA, 201 bp, Homo sapiens
tactagacttgggaagttctcatctattatttcattacataggttttcaaaccctttcagtttcccttcgcctttggagatactgataattcatatatttkgtcaccttatggtgtcccatagatcgtgaagactttgttcatactttttaattctttttttttctttattttcgtcttattggattatttcaaaagacct

SEQ ID NO: 312297 - DNA, 201 bp, Homo sapiens
tgcaggtcacaggggatatgttggcttagcttgggctcagaggcctgacattcctgtcttcttatattaataagaaaaatagcataaaatagtattgaagygttggcagcaaaaattttgggggtggcatggagagataatgggcgatgtttctcagggctgcttctagagtgggagagattaagctgaagaaagattttg

SEQ ID NO: 312298 - DNA, 201 bp, Homo sapiens
gagtgaaatacaccgctcctgccaagccttcctctcattgcaggaaatagctgcacacagggaggaaacatgagctgatgcattccccaccctgcctcccsccatgtagttccgtagggaaccattccagaaacttaagaagcctgtgtgtacaccaaaaaaagccacagggaaaaacccctcaaacatcttacaaatgct

SEQ ID NO: 312299 - DNA, 201 bp, Homo sapiens; identical to SEQ ID NO: 65184

SEQ ID NO: 312300 - DNA, 201 bp, Homo sapiens
gacaaacactttcatttctcttgagtaaatacttaagagtagaatagctgggccatatggtagatatacttataatcttttatctaaagtgattgtaccaktttacattcccatcagcgatgaaagagtttcccagctgcttcacatccttgccaacactttttaattttagccatcctggtgggtagaatagtgttatct

SEQ ID NO: 312301 - DNA, 201 bp, Homo sapiens
ttttgaagcttggtgctactgcctcctaaacaatgaatgtttttcaggtcccaaaccagttgtcttcctgcaacatggcttgctggcagattctagtaacwgggtcacaaaccttgccaacagcagcctgggcttcattcttgctgatgctggttttgacgtgtggatgggcaacagcagaggaaatacctggtctcggaa

SEQ ID NO: 312302 - DNA, 201 bp, Homo sapiens
gtttcaagcctttgactggggaagcagtgccaagaattattttcattacaaccaggtaaagtttttagtcttttcattaaagggggccctgaaaactcatyaagaaagccagcctggcctatcaggattctggccaggctcaggtgctgtgggaaatgtttgcaggagttgactagtgtttgttttccatcagtccattca

SEQ ID NO: 312303 - DNA, 201 bp, Homo sapiens
cggatgacaacctggatttagtttgcctgggttgcattttgggctacatcactttttacttttgtgaaattgtgctaagccctctacatacagtgtctcasttaatcctcaagactaccttcatacacccattttacaagtgaagacgctgaggcttagaaagggtaactatattgcccaatgtctgacacacagaaatgc

SEQ ID NO: 312304 - DNA, 201 bp, Homo sapiens
agcagcccacacacagtacacgccaggcctcagcaaagtacaaatggccaccagacctgggatgtcagaggcccttgggaatgttgaaaccaaggctgtcytaggccaactctattttatattacagacctgtgttgcttcacccttctgtgtcttgggcctccactgggcatggggtttgcagtagagacattggatcgg

SEQ ID NO: 312305 - DNA, 201 bp, Homo sapiens
ttaaaatgcatctatttccccgatccagttatgtgagctacatgaagccatacccatacattcatctctttataactcctttgcttttcaatttctctgawtttttttttttttttttttttttttgaggcagagtcttactctgtcacctgcccgcccaggctggagtgcagtggtgtgatctcggctcattgcgacctc

SEQ ID NO: 312306 - DNA, 201 bp, Homo sapiens
cctacatttttgaggatgcctaggacctcttacctaatggacattttcctaaaaggcccaatgtctgtcacctcatcagttattgcacccccagagatgayggagggtgactgagctggctggaggcagatcctgagctttcccaccagcttagtgactgccagcagcccacacacagtacacgccaggcctcagcaaagt

SEQ ID NO: 312307 - DNA, 201 bp, Homo sapiens
ttctagacagactgattgaaattattaagcagttatcagaagaaggatctaatctttattcaattatctctccagatgtagcttatttatttatttatttwtttgagacggattttcggtcttgttgcccaggctggaatgcaatggtgcaatcttggctcactgcaacctccgcctcccaggttcaagtaagatgtagct

SEQ ID NO: 312308 - DNA, 201 bp, Homo sapiens
tattctcctttcagatatggctggagtcatttgtttcatattttcctttcaccttttacttgccctaaatctggttcagaactttttgtgggagcattaakttaccagaatatttttgtgtagtaaaattcaagcaaataataatagactgttttattatacagaatgaaaatgcggttcttggggttggtggtctgtttg

SEQ ID NO: 312309 - DNA, 201 bp, Homo sapiens
catgagtcttgatatgctcccaggtaatagaaaggagacttatgggaccttggtgctacacctgggtttgcccctgacttcttgtgtgctttgttttttcttttttttttttaacctctgtgggatatattatatatactttattttatttttggcaagagggttggggattgggagagtggagagtctaggtctttagaa

SEQ ID NO: 312310 - DNA, 201 bp, Homo sapiens
agattccccaggggttgtccattgagctattagagtcatagctgaaaattcacagcgtggcttgtgagttaagtctttagaaggagaccatcagcttgtattttgctttgattgtttattttagaattctggttgatttctagatttttctttccttatagaaaaatccttcacttctaaagaaactattttttgaatcac

SEQ ID NO: 312311 - DNA, 201 bp, Homo sapiens
tggaattcctgttttctgtcctttgttctcacaggttttatagcattttcacagatccctgagctggctaaaaggattaaaatgttttttgccctgggtcytgtggcttccgtcgccttctgtactagccctatggccaaattaggacgattaccagatcatctcattaaggtacttggacccctcccatccctctcctct

SEQ ID NO: 312312 - DNA, 201 bp, Homo sapiens
tctttccagccactattgccttgagtctactacctatggagtacaacaccttccttgccggggattaaacattcattttggtgcccagcctacggcagcarctccacagctagtggcgattataattagcattctctcatttggggttagatttctttttttgtgccggtaatggcaacttgaaaagatactcaaagagat

SEQ ID NO: 312313 - DNA, 201 bp, Homo sapiens
attaacaagaaacaagtattctctaagatatgttaaatatttaagcagatgcccaaatccagcacctaagaaaatctaccttgaggttttcaaaggcacasaacataatttcaagggataaatgcaagaaaaaatcctttacctcatggtcgcaggctgggcgctgcactggtgtcctgcagtgttctggcaaaggctgat

SEQ ID NO: 312314 - DNA, 201 bp, Homo sapiens
gaggtgggaggatcacttgagtccaggagtttgaggctgcagtgagcagtcatgccactgcactccagtctaggtgatagaatgagaccttttctctcttaaaaaaaaaaaaagttatgggaatcattttatactcttggcctggggtcctgctattttaacaacacgagggtatagcacccccaggttgtacaactccag

SEQ ID NO: 312315 - DNA, 201 bp, Homo sapiens
cactgtagaagtccgctgaaaacttatttgattttctgcctccttctcttcatttggagaatttaaatacacctctgtagtgtgtgatttttgctttggtaaacttgtgcaaaagcatcctgatttgatgtccactggttgccattctctcctgaggccattcgtggagacattgggtacttgtctctgcttctgaggtga

SEQ ID NO: 312316 - DNA, 201 bp, Homo sapiens
cttggctgaatccacagatacaaaactggatatggagggccaattgtatattataattattttatctatatatatccatctctctctctctctctctattwtatatatatatatgtatatatatatgtagctacctatctgtctacctttatttcccaagtaaaatgactaactctttgaaaaagcttaggatgcaaattt

SEQ ID NO: 312317 - DNA, 201 bp, Homo sapiens
tttcaagactattacaatgagagagacagactattgcaatatgggagaaagactaaactcaacactgaatacaacaagtgtggatttgtagtcaacaggcyggatgaaggagtggatggaaaattactaaaaagaacttgcttagatatcaaggcctgggaaagaagtacttaattgtatatcagggtgggggggcattct

SEQ ID NO: 312318 - DNA, 201 bp, Homo sapiens
tgagagagacagactattgcaatatgggagaaagactaaactcaacactgaatacaacaagtgtggatttgtagtcaacaggccggatgaaggagtggatrgaaaattactaaaaagaacttgcttagatatcaaggcctgggaaagaagtacttaattgtatatcagggtgggggggcattcttgataaagtggctcagc

SEQ ID NO: 312319 - DNA, 201 bp, Homo sapiens
tattcagccatgaattccaaaattggccattgaaaccaacttcagaaatgataccattaaaaaacactggagcagcttagtcagaaatttctactttggartaataacgaggaagaaggcatcagataaaacatcctcacacattctatctttagtgaaaccagatggtgaagaaaacttcagacttccaaccgacacata

SEQ ID NO: 312320 - DNA, 201 bp, Homo sapiens
actctgcaggtagttcaagtgctgaccacacatttgcaagacgtgagagtgagtgtcttcttaatgtgcattaagtgccttgcttaccttacctatctagwcccagccctatccagagcctaccttttacaactctaccttttaaagcttaacatcctctacaaaattatactatggagtagaaaggttgtactgtgaact

SEQ ID NO: 312321 - DNA, 201 bp, Homo sapiens
agtgtcttcttaatgtgcattaagtgccttgcttaccttacctatctagtcccagccctatccagagcctaccttttacaactctaccttttaaagcttarcatcctctacaaaattatactatggagtagaaaggttgtactgtgaactgagctggcattattctcacacaagctatgtacttgagcatcaaagatagta

SEQ ID NO: 312322 - DNA, 201 bp, Homo sapiens
taccttttaaagcttaacatcctctacaaaattatactatggagtagaaaggttgtactgtgaactgagctggcattattctcacacaagctatgtacttsagcatcaaagatagtattaaaatagatgcaatcataacataatctccatacactgcagttagaaagttatttatgaagcatctggtatatctggacatac

SEQ ID NO: 312323 - DNA, 201 bp, Homo sapiens
ctgaaggaggattcaggggaagttggagtagttgcaggtctggtacaccaaggagttaacccaggagatgggccatagtattctgtggttcacaaacacamctgcttgaacgttccaagcataaaaaggctaaatagttgcttcttttccaccctctaaatcacatgcaaaaatgtctactgactcatcctgactgaaaac

SEQ ID NO: 312324 - DNA, 201 bp, Homo sapiens
atcaacaaattaattcattctgcatctttgtgtgttataggaggaagaaaactccaataaagtctgtctcaacagaggtcacctcccacccatcagacacrgaaattccagtacctgctgggagttctggtggccatccttatccctagtctcttgtcattgttcaaggattagggaaaattcctctcaacctgctagatt

SEQ ID NO: 312325 - DNA, 201 bp, Homo sapiens
actgctggattttgcttggatttggcctccctaaactacagcctggaaaatctgtccaggcaattatctgaggcattgcagggatcatttcatttgttttycttttctcaaggattgctctttcttttgcactatttgttgtccaatgtctgaaattatcgtttcatactttttccaacttagctgtttaaagtaggagag

SEQ ID NO: 312326 - DNA, 201 bp, Homo sapiens
cagacttcccattatatttctgaaggttgcagtagcgctgatgggattgttgcttttcagcatcagggacttccttattgaatggtgtctgataacattcygtctccaggaactcagcgagatcggagtatgcattcagaggattcagtcccttctcaagagctttattcgaatagtccatagcatattgctttagtgctt

SEQ ID NO: 312327 - DNA, 201 bp, Homo sapiens
cagaatactcaatactgtatggatttgaaaatttcttgcaggtttgtttcaccttatctacataaatctgagcatctgagagtctgcccaagtgatagtaracccaggcgtagtttccccaagtgactagacttctgatttctgcttggtcagcatgttcttgctggattaactcttcagcttgccgtaagcattccaggg

SEQ ID NO: 312328 - DNA, 201 bp, Homo sapiens; identical to SEQ ID NO: 65183

SEQ ID NO: 312329 - DNA, 201 bp, Homo sapiens
tcagacagtcctatgtctgttatctggtagctatggggccttggccagattacattgcttaagcctcttccctgcactaataaaattagcatttttgagcrtgctaaatgcactgaagtgtgaggcactttgctctgttttttaaatttaattcccagagcatctctgtgatgtaaacgtgattatctctgacttaaacat

SEQ ID NO: 312330 - DNA, 201 bp, Homo sapiens
gttgtggtacacacctgtaatcccagttcttcaggggcctgaggtgggaggatcacttgagtccaggagtttgaggctgcagtgagcagtcatgccactgyactccagtctaggtgatagaatgagaccttttctctcttaaaaaaaaaaaaagttatgggaatcattttatactcttggcctggggtcctgctattttaa

SEQ ID NO: 312331 - DNA, 201 bp, Homo sapiens
tctctgggtgattatccagatggtacatcgcaattgccagtccagaggagaattctgggttgttgggcttttcttccagagccttctcaaaacacaccttygccctttcatttcttccacacttcagttgtgtccacccttcctcacagtcaagttcagaatactcaatactgtatggatttgaaaatttcttgcaggttt

SEQ ID NO: 312332 - DNA, 201 bp, Homo sapiens
tttttttccaggaactcctatatttttaactttcaaatgtatgtgtatggtccattttgagttaatttttctatgacttaagggtctaggttcattgtttygcatatagctattcaagtgttctagcaccattgttaaaaagattattctttccccattgaattgtcatggaaccttggtaaaaatcaattgggggtctac

SEQ ID NO: 312333 - DNA, 201 bp, Homo sapiens
gtttatctgctcctttgcttgttaatgtgggagactgtttcagattctgtccacccaatttccatcgtcctttttctctacagagtgaaattatctcttastggggattccctagtgaggaatacctagttgagacagaagatggatatattctgtgccttaaccgaattcctcatgggaggaagaaccattctgacaaag

SEQ ID NO: 312334 - DNA, 201 bp, Homo sapiens
atccctctcctctccccgcagatttcctcctgagatctgaagaaatggcaaggggagggataatctgtgccttcctcccctgcgttttgatatcagtggarcagtgggcttttctttttccgtttacccctccttccagacccaggggtggccggggacgcctgtcgtttcctgcacactggtgccacgtgtactcatggt

SEQ ID NO: 312335 - DNA, 201 bp, Homo sapiens
tagtttgtgataactcatcaaactgcatactcagtatgtgtgtgctctattttatgtactatttcaatgaaagagttcctttcttggattacagttatgawgagatggcaaaatatgacctaccagcttccattaacttcattctgaataaaactggccaagaacaagtgtattatgtgggtcattctcaaggcaccacta

SEQ ID NO: 312336 - DNA, 201 bp, Homo sapiens
actagacaatgtttaatggagattgcgcttattgtgattttgaaaattaaaacaacaacaacaacgaggctttctctggttccttttcattgtagagttawcctcccacatacaatgtgaaggacatgcttgtgccgactgcagtctggagcgggggtcacgactggcttgcagatgtctacgacgtcaatatcttactga

SEQ ID NO: 312337 - DNA, 201 bp, Homo sapiens
cctcccacccatcagacacggaaattccagtacctgctgggagttctggtggccatccttatccctagtctcttgtcattgttcaaggattagggaaaatwcctctcaacctgctagatttcagcagcaataaacgggattgtttatagggtcagtgagcccaggatactaagggacagacatcagtcaaaagcattttcc

SEQ ID NO: 312338 - DNA, 201 bp, Homo sapiens
atggccaaattaggacgattaccagatcatctcattaaggtacttggacccctcccatccctctcctctccccgcagatttcctcctgagatctgaagaamtggcaaggggagggataatctgtgccttcctcccctgcgttttgatatcagtggagcagtgggcttttctttttccgtttacccctccttccagacccag

SEQ ID NO: 312339 - DNA, 201 bp, Homo sapiens
tgttcaaggattagggaaaattcctctcaacctgctagatttcagcagcaataaacgggattgtttatagggtcagtgagcccaggatactaagggacagrcatcagtcaaaagcattttccaaaaaaatcctttatattttaatcaaatcactataaagacatgatgtgtcctagtttctcagatgttcaacccaacagt

SEQ ID NO: 312340 - DNA, 201 bp, Homo sapiens
gtctcaggcctccgcgagagggcgtcgcgagtgacggcctttgtgttttctgagaaggaaatcccagatgatggaattcctgttttctgtcctttgttctyacaggttttatagcattttcacagatccctgagctggctaaaaggattaaaatgttttttgccctgggtcctgtggcttccgtcgccttctgtactagcc

SEQ ID NO: 312341 - DNA, 201 bp, Homo sapiens
acagctcaggaatatctcaatgaatacccacacatgttatctgtctttacattggctaaaacctttgactagattatgagtactgtcctgtcagttgtgaytcttctttccctagcaggctcctcacagctccccaattcacaatatttttctcagcacaacactttccagggtgtcaaaatgttcttaaccatcagctct

SEQ ID NO: 312342 - DNA, 201 bp, Homo sapiens
ttacaaaaaacaaagagaaaaatagaaaggaattccttatgcttccctcccctccaccaaaagaggaattctgatgttaactgtttagtcttcatttctawgacagggcacaaggttgtagctagtgtttataacttctttcttttacctatcttcagagtgaccagacaacctacagaatgggagaaactttttgcaatc

SEQ ID NO: 312343 - DNA, 201 bp, Homo sapiens
tattctaagcacttaacacatattatcttatccaaaatttgagatgtccctagacaatattaattctattttacagaagagaactctaactcaagaagaasttaaaaatcttacactagtttgcacagccagcaaattgtagattttgccttgaatgtgggcagcctgacccctgagtctgcactcctaactacaatcctg

SEQ ID NO: 312344 - DNA, 201 bp, Homo sapiens
taactaaacagcaccgtagcatcactggaatatctgcgtcagctgttaaatgacagcaacaacaaacaacagcaggctttcagtctccacctacgatgctrtgttttgattaaaaagttactgtacaaggtattttttatgtgagaatctgaggatagaaaacatatatcatatgtagaaaacatacatcacagctgaagg

SEQ ID NO: 312345 - DNA, 201 bp, Homo sapiens
gatggcagcaggaagcagataggcccctgggcagaaaggggcagtcccagtgaagcaccaccttgaagccagggagggcctgaagcctgggggccaacctrtcagttccaggtggtgtccacagcccagagtgagaacttatggtgctttttctgggcccacccatggccgcccatggaccaatcagcatacacttcctcc

SEQ ID NO: 312346 - DNA, 201 bp, Homo sapiens
aggtgatagaaggattatagggtgggggagcggaggctaagggagaattggaactggctcggcctggctaggagcagcctggggaggaggggagaggtcakatgggtccgtagaaaaggaagattggaaagacttagtgacacttggggttggaactgaggggacaggcaggagggaaagaaggaagatttgggatgagtt

SEQ ID NO: 312347 - DNA, 201 bp, Homo sapiens
atggctgtttccctgcagttctgaaaagctggggtcccggttgattttgtttttagcttactgattccaagcaaatgctgaagaggtttccacccagggtrctgttaggtctgtgcttttatgaaaggggaaaggaaagtgaaactgatggaaccctatcaagatccctcttgaggggaaactgaaacagaatctgtgaga

SEQ ID NO: 312348 - DNA, 201 bp, Homo sapiens
cctgtgtcctttggctgcctaactctatacatcacaaagagctacagaaataaaaatgcatgaattggtaaggcagatttatgcttgaattagataaatgyatatttcatctctaagcaaacactgaaatagcataagtcaggaagttgtacataagaaattctgtttcctatcagagaagcagggactatttacctcatg

SEQ ID NO: 312349 - DNA, 201 bp, Homo sapiens
tacctgaaagcatctgagcatgggctctctaggatctctcaatatgccccgtcccttcccagctcccagctcccatttccctgtgtcctttggctgcctawctctatacatcacaaagagctacagaaataaaaatgcatgaattggtaaggcagatttatgcttgaattagataaatgcatatttcatctctaagcaaac

SEQ ID NO: 312350 - DNA, 201 bp, Homo sapiens
gccgaggtgggtggatcgcttgagtccaggagtttgagaccagcctgggaacatggtgaaacactgtctctacaaaaaacacaaaaattagctgggtgtgktggtgcacgcctgaaatcccaactactcaggaggttgagatggaaggatcacttgagcccagaaggtggaggttgctgtgagcagagatcacgccactgc

SEQ ID NO: 312351 - DNA, 201 bp, Homo sapiens
tttgatggtggtctctgatattgacttcttcaggattaagccctccatgacagggatgtattctaaactgtgtggacaggaggaagatgcatttgtttacratggacagaagtaagaaaagtaagaaatgtcatagaactatgtctgggggtcaggtgacaagcactgtgtcatttctagccctgtgtcccctgcaggtgc

SEQ ID NO: 312352 - DNA, 201 bp, Homo sapiens
gagatcttggctctctgcaacctctgcctaccgggttcaagcagttctcgtgcctcaccctcccaagtagctggctacttggcccagctaccaggcccagmtgatttttgtatttttagtagagatggggtattgccatgttggccagtctggtcatgaacttctggccttaagggatctgcccgccttgggaagcactcc

SEQ ID NO: 312353 - DNA, 201 bp, Homo sapiens
gtatcacattggaccacatgatgtattgtgaaatggagaagtgataagttttggcaggtaaaaatctttgcagttctggagaattacatatccctaaaatrggacaatgaaggtggatttctggccctgactggtggaagcaaactgcttcagctgatctttaccaacacaaatagacaatataacatttgtcaaatatat

SEQ ID NO: 312354 - DNA, 201 bp, Homo sapiens
tgtcagtgattagtctaaattgttatcacaagcccagtctgaccaatgaatgtgagtgaggggccattttgattgtcagctcctgattctgcagaaaacaygaaactgagctgtacaaagatgctgatgaggggctgcagcatgcaattcacttcaccagcagtcactaaggtctgatctcttttctaaccatacctggaa

SEQ ID NO: 312355 - DNA, 201 bp, Homo sapiens
cttttctttttccgtttacccctccttccagacccaggggtggccggggacgcctgtcgtttcctgcacactggtgccacgtgtactcatggttagcatgygtcagtacagctctgcccacctcacagggagagcaaggagagtctgggagaaaataatttaagcatttgtggagttgccctttatcccatgaggtgagcc

SEQ ID NO: 312356 - DNA, 201 bp, Homo sapiens
caatcacctcctcactcctttcctagagatgcttggtgggaaaggcatccttttctcttagttctccctaacatgctatcccctgaagaactccaggaggwcaatatataaatttaaaaatcaagtttactgagattatgctttatatacaataagatgcacccattttcagtgtatagtctgatgagttttggtaaatgt

SEQ ID NO: 312357 - DNA, 201 bp, Homo sapiens
atcattggcctcatcagctttcttcagatgagccacagcgtgtcctattagttccagtaactttcttttcccatacattccattctctcttagattcattrcttggaagacttttgccctatagcagcacccaatttggcaatgcaggtaggcattgtttggtatgtattctaaagcctttttaagcagttcaatcgcttt

SEQ ID NO: 312358 - DNA, 201 bp, Homo sapiens
atcgagagaaggtggggagctgagtcctggtcccatgtgctggccaacatctccccttccagcctctgtcctggcctggctgccacatatcaccctccttytcctctctcaattatccttgccccagggccctctttggtttcaaaccattcctgcctttctctggacactctcccctgaggagtagactaggcagtccca

SEQ ID NO: 312359 - DNA, 201 bp, Homo sapiens
ggttttgtgttagtaaccaagttcagatttaacttaaaaacattgaaatgggattatttttagacgaaagcactaactgtgttgaggtttgcaaggcaaaraaaaataattttcttttaaagaagtaaggacaagagtcatctaattttttgttcaaaggccagattcatttgaggatatgctaaaatctctgaggctttg

SEQ ID NO: 312360 - DNA, 201 bp, Homo sapiens
catacatgcagacaacaatcaagtgaaaaaagctcaacattactgttcattagagaaatgcaaattaaaaccacaatgaaatatcatctcacgccagtcayaatggctgttaataaaacgtccaaaaataatagatgctggcgaggttgtagagagaaaggaacacttttacactgttggtgggagtgtaaattagttcag

SEQ ID NO: 312361 - DNA, 201 bp, Homo sapiens
gataggagctacccactccaggtctgctctccactgagctgcacactcattgggacaatctgcttgaagataggagctacccactgggggtctcctctccwctgagggctgatcacttgttgggacaacctgcctgtggaaaggagctacccactttgggtctcctgagagctgtactgttgctcaataaaggacttcttc

SEQ ID NO: 312362 - DNA, 201 bp, Homo sapiens
gtgggacaagaactcaggaccccctgaatggtgggactgaaagagctgtaacacaaatagggctgaaacatgcccctaccaccccccctgcttgccatgtygccagcaatgagaaggagagaagggcagcagagaagagcagaggcccttccaggagcccaaacctagaggctccccaagccagggctgtgccaccctctt

SEQ ID NO: 312363 - DNA, 201 bp, Homo sapiens
agctgcccaccccaccagagcagctggcttgctgactctccacagtggctggaccccacactcacttgcttatgcacctctcaccactctacacctggctkgaccttggaggcgtgggatctggttggttagcatgagccaagcacagcctgccaggccaagtgggcaaaacaagcccagcaggcctgagtaaagctcagg

SEQ ID NO: 312364 - DNA, 201 bp, Homo sapiens
gctggacttcatcttaagcaggcctgaagtaaaagagggagagaaacttttaattgaaaagcgagattggaattggattggttacggcaaaaaaatcaacygggctgttcagggatagggaggggagctcaggaatagcacattgcagggcagcaatagagagacagaatttcttaatgaatctgagcaagttcagcccat

SEQ ID NO: 312365 - DNA, 201 bp, Homo sapiens
aggcgaaactaatttctggtgtgaaaaatgaggacaatagttacttttgggagacacaactggaagagagcccaagggggcttctgcagtcctgctggtgktgtttcctggactcactgctggttttcccagctgtgtttagtttgtgataactcatcaaactgcatactcagtatgtgtgtgctctattttatgtactat

SEQ ID NO: 312366 - DNA, 201 bp, Homo sapiens
tagtaactattagtatttttttaaataggcttatcgaagtatgacagatgaagattaaactgcacatatttaaattgtacattttgatgagttttcacatrtgtatatacctgtgaaaccatcactacagtgaagataacaaatatatttattccctccaagtttccccatgcctctctgtcatccagcctcctctcctcc

SEQ ID NO: 312367 - DNA, 201 bp, Homo sapiens
tattccattgtatgaacatatcaaattttatttattcatgtcttcatcagttgatgaacatatggttgtttccactttttggctatattgagtgatgctcytatgaacattcatgtacaagtttttatgtaaacatcagttcttatttctactgggtatatacttgaaagtgcagttgatgggtcatatgataactctatg

SEQ ID NO: 312368 - DNA, 201 bp, Homo sapiens
atattttaattagattatatctgtataaacacactggggccaatttccagatctctagaagggtttcaggaatttctaggttcagggcagaatttactatrtatttttacattttactcagaaataacacaaactatgactcattatgtttccaaaacaagtgagacataaaccaaggctctggggtctatttgtatcgtt

SEQ ID NO: 312369 - DNA, 201 bp, Homo sapiens
acttgttattacctgtattttttattatagctatcctagtgggtatgaagtggtatctcatcatggttataaaacgtcttttttttagaaaaaaaagttaytttactttgaaggggtccaatttgttgatattttttcttttataggttgtgctttttgtgttgtatttaaacaatctttgacaaaactcaaatttcttaa

SEQ ID NO: 312370 - DNA, 201 bp, Homo sapiens
atactaagtatgtagtgttgtgttggaaggaaaacttaactgggtgagattttcagctgagtagctttagctgttactctcatggaccttcctctgggcgrttgatacaggttctgtaggaaaaccgctgaatgaaagcagctcctgcagatgctattctgttttcaattgtggtaattcctttaattttttccctttcaa

SEQ ID NO: 312371 - DNA, 201 bp, Homo sapiens
tttaggggaaggaagaggaaactggaaagtgaaactaatttaaaatcgttgggaggaggaaaatgaaacctaacggcttgagacctgcaatggctgagccrgagtacgttattcaaaactgtgactaaaatttgtttgagagaatgtggaagcattcctaatgtaaaccaaaaaattaaattctaaggccatactcaccaa

SEQ ID NO: 312372 - DNA, 201 bp, Homo sapiens
ggcccaataggcttgcagttcatttaagaaagttcactgagggagtcttggaggcggtgaagggcaattaggaggaagagaagtgaaagtcaaagccaaaytggccctgataccctatatctattttgtatgtgaagagaagttctaggaagaaagaggtaaggaattcatgaagacttgatggaatctctagttgcctct

SEQ ID NO: 312373 - DNA, 201 bp, Homo sapiens
ctgaatgaaagcagctcctgcagatgctattctgttttcaattgtggtaattcctttaattttttccctttcaatttactccttattctctagtaataatrgacttttgggaggttgcatttatgataaaaaatagcctggggctgtacaatccttcctatcatgaagaagtacaaagttgtaagtagaagcagtggcctt

SEQ ID NO: 312374 - DNA, 201 bp, Homo sapiens
catcacatgctttccttacaatatattcctagaaggagccttactatatgaaaggtatgaatgttttgaagggtctcaaaacatgtggttatattgccagraaaaaaatggagttaggcatttttctttatttatatttcttctttcatgacttgcctgcttgggacctttgccccactgcttcctaaagtgacattctgg

SEQ ID NO: 312375 - DNA, 201 bp, Homo sapiens
aattgcccataattctagtcagcaagagtttttgtaattagggactaggaacctgtcctataatttatttaattctcccttttaatgtttactatgactarcaccttagtgttcccatcacatgctttccttacaatatattcctagaaggagccttactatatgaaaggtatgaatgttttgaagggtctcaaaacatgt

SEQ ID NO: 312376 - DNA, 201 bp, Homo sapiens
ctgcttatgaattaatccttgaagataccaataatttggtgcattttgtggaagcagattttcagatacattctgtggttggtctttgatctcttccttgycagttgattttttgcttatggacaaaccctctaaaccatgttgcacagcagtgtcttcagacttcccattatatttctgaaggttgcagtagcgctgatg

SEQ ID NO: 312377 - DNA, 201 bp, Homo sapiens
tatatagtagaataagaatgaacaacttacaattatatgcagcaaaaaatggattaagccagatacaggagaatacacattgtataattctacttacagaratatttaaaaacaggcgaaactaatttctggtgtgaaaaatgaggacaatagttacttttgggagacacaactggaagagagcccaagggggcttctgca

SEQ ID NO: 312378 - DNA, 201 bp, Homo sapiens
catcccttagcaggcggcccagttccttctcataacatttggctgcttgcagcagatctccattctgcttatgaattaatccttgaagataccaataattyggtgcattttgtggaagcagattttcagatacattctgtggttggtctttgatctcttccttgtcagttgattttttgcttatggacaaaccctctaaac

SEQ ID NO: 312379 - DNA, 201 bp, Homo sapiens
tttttatttccaaaaatctcattagaaacaaatacacacacagattcttatttttcccttgcctccatttgaatgcaaaagatggcactattttgttcttygaattttttacttaatatcttggagatctttccatacaatacataaagcacatcttccagaagtgcatgatatttcactatatgactgtatcattattta

SEQ ID NO: 312380 - DNA, 201 bp, Homo sapiens
gacatcttacataagcctcctgtgtctcggtttccttatttgtaaaatggagcgtaataaacacctacctcataaggtcactgggggcttaaaggagaggrtgcagagaaggaacctccacagaacctggcaccttgtatgaactggctaggggttggctcttctcctgccagtggcaacatgcgcatgcatatacccata

SEQ ID NO: 312381 - DNA, 201 bp, Homo sapiens
tttctccataaatatgtaatccagatgttcacttttcttctttccagaaattatcctttcctccctcttccttctggctccaccagttaattgctgtatgmcattggacatcttacataagcctcctgtgtctcggtttccttatttgtaaaatggagcgtaataaacacctacctcataaggtcactgggggcttaaagg

SEQ ID NO: 312382 - DNA, 201 bp, Homo sapiens
attcagctttactatgtattaactacttcgtcattctcactttagaaaaggacacctatacttcagagagagttgagcaaatcctacaaagttttgtagcyagtaagaactgaggtctgcttcatgctaacgccctggtgtctgaccacctccttgttctctgttttggttctgccctggccctcagctgatttctcacat

SEQ ID NO: 312383 - DNA, 201 bp, Homo sapiens
cttagtaagaattgcttggcttagtatgttgagaaaaacatactaagtatgtagtgttgtgttggaaggaaaacttaactgggtgagattttcagctgagkagctttagctgttactctcatggaccttcctctgggcggttgatacaggttctgtaggaaaaccgctgaatgaaagcagctcctgcagatgctattctgt

SEQ ID NO: 312384 - DNA, 201 bp, Homo sapiens
aagcaaataataatagactgttttattatacagaatgaaaatgcggttcttggggttggtggtctgtttggttctctggaccctgcattctgaggggtctrgagggaaactgacagctgtggatcctgaaacaaacatgaatgtggtaagtttctcaaagttatgtacttttaaaatgcatctatttccccgatccagtta

SEQ ID NO: 312385 - DNA, 201 bp, Homo sapiens
ggaagaaagaaggggaggtccagctatttctagctcctctctttcttggccatgagtagtgtctctgacagagactgttgctcaacttctggtctatggtrtgacacttccttcatccaataatgccccagctctttccactgttgctaataatttctgtggtgccacccaaaccctgtttgtcttctcagcaatgtcatt

SEQ ID NO: 312386 - DNA, 201 bp, Homo sapiens
tttcacaagtgccttggaaattcagtgcaggagttcctgtaccacattttgagaagtgctgtcatagaggtattttaaaaagcagttttcccctttatttrtggagctaatgtggtgaattaagcagcattatcaggcatcttgagtgaagggaagaaaaccacaggacacctggatttcagtgacctctttgcttagttc

SEQ ID NO: 312387 - DNA, 201 bp, Homo sapiens
tctactcctgggactgctgccctcaactttttgttgaataaactcttttaactggatcctgagccttctgattattgtatattgacagtactgactatgcrgtcctactcccagagattctggtgcagtgaatctgatgtgagcttagaaacctgtgttttcacaagtgccttggaaattcagtgcaggagttcctgtacc

SEQ ID NO: 312388 - DNA, 201 bp, Homo sapiens
aagaatggaacagacacggaagagattatcattggcctcatcagctttcttcagatgagccacagcgtgtcctattagttccagtaactttcttttcccayacattccattctctcttagattcattacttggaagacttttgccctatagcagcacccaatttggcaatgcaggtaggcattgtttggtatgtattctaa

SEQ ID NO: 312389 - DNA, 201 bp, Homo sapiens
cctgaccaacatggcaaaaccccattgctactaaaatacaaaaaaattaaccaggcatagtggcgtgctcctatagtcccagctacttgggaggctgggtrggagaatcccttgagcccaggagtctgaggctgcagtgagccatgatcgggccactgcactccagcctgggtgacagagtgagactctgtctcaaaaaca

SEQ ID NO: 312390 - DNA, 201 bp, Homo sapiens
tatgtacagaaaaactgtcagggtgaacttaaaatatgcaaggaggcagctttaagtgaaacttaattcaacactaatattgattgagaatttttgctcakggctttataggacttacctaatttactccattttacactcatgtgaaatatggccatttaacagatgagtaagagaagattcagagaacttaagtgatat

SEQ ID NO: 312391 - DNA, 201 bp, Homo sapiens
cttcttcacgcatcttatgaagcttcagagccaggaggactttaaggtactggttgtcaggattcagccgaatggcttgcctcagagggtcaatggcgttmtgagatggtggccagttgtccagacggtagcttgctattgccagtccagaggtgaattctgggttctttggcttcttttccagagccttctcaaagcaca

SEQ ID NO: 312392 - DNA, 201 bp, Homo sapiens
aagaataaaaacagatctgtttggacatgagcttttcaacgggaatgcatctgccattaggatgcctgataccaagccaagcactctccggggctcccgcrcctggggttagttacatcaagggacttagacaacctggctctttgctaagacctatttggagctttgaatggaaggcgggtccttcctataaactcctgc

SEQ ID NO: 312393 - DNA, 201 bp, Homo sapiens
gcaaaccacttagaataacactttgcagccactaaatattaaataactggcatatgttattattattagatggatcctaccctcaaatgccttacagtttsgtagacagaaaaataagtctcttccaacgatactgttaaactaatcagaaacttggttaaggtcatttgatcatctaaggctctacaacagtacagtttt

SEQ ID NO: 312394 - DNA, 201 bp, Homo sapiens
gttaaactaatcagaaacttggttaaggtcatttgatcatctaaggctctacaacagtacagttttacagctcttattttaaaatgttcccctctaatccrtaaagatatctcaagatagggcaatgccattacttggtgtattatagttaaccaatactgtatgtggaacataatgtggtgtgatacttttgaatttgtg

SEQ ID NO: 312395 - DNA, 201 bp, Homo sapiens
tcaactgtgctgtaaaagtagtgtaaaagcagtcatagacaatacaaattccaataaaactttatttacaaaaacaggtggcagactggtttcagcccacragctgtagtgtgttaacctttgctctctggccctatgaattcttcatgttcacagagcatcttgaagaaatgaggcccaataaaatacctggttttattt

SEQ ID NO: 312396 - DNA, 201 bp, Homo sapiens
gagcctgggctaggtcagtgcagaagggaaatgtgggattggaggcctcacacagagtccccaatggggcactgcctagtgcagctgtgagaagagagccrctgtcctccagaccccagaatggtagatccaccgatagcttgcactgtgcacctgggaaagctacagacactcaacaccagcctgtgaaaggagccagga

SEQ ID NO: 312397 - DNA, 201 bp, Homo sapiens
aaatattttaattagattatatctgtataaacacactggggccaatttccagatctctagaagggtttcaggaatttctaggttcagggcagaatttactrtatatttttacattttactcagaaataacacaaactatgactcattatgtttccaaaacaagtgagacataaaccaaggctctggggtctatttgtatcg

SEQ ID NO: 312398 - DNA, 201 bp, Homo sapiens
tccttggcctcccaaagtgctgggattttaggcttgagccaccacgcccagccaggtttgagtttttaaatgtagtgcttgatgacaaattagtaagtttmatttaaaaatgagaaaggaaaatgtgtgctcagtggttttatatcacagtgcctttgctctgtaatatctgtgaatcaaaagcagaacataaataggctc

SEQ ID NO: 312399 - DNA, 201 bp, Homo sapiens
gaacctccagtaacttccctccaggccccagctttcactggcccgattttacctgaaagcatctgagcatgggctctctaggatctctcaatatgccccgwcccttcccagctcccagctcccatttccctgtgtcctttggctgcctaactctatacatcacaaagagctacagaaataaaaatgcatgaattggtaagg

SEQ ID NO: 312400 - DNA, 201 bp, Homo sapiens
ggtacatcgcaattgccagtccagaggagaattctgggttgttgggcttttcttccagagccttctcaaaacacaccttcgccctttcatttcttccacayttcagttgtgtccacccttcctcacagtcaagttcagaatactcaatactgtatggatttgaaaatttcttgcaggtttgtttcaccttatctacataaa

SEQ ID NO: 312401 - DNA, 201 bp, Homo sapiens
agcaggaggatgggggaggttatttctgctctcagcaaaagtcttagaaccagggtctcctcgtttgtaaggaagcaagtaggtccctggacctgggctgsgatatgatttgtgatcagccaggcaagagttaagagtggaagtctgtgctctctgcccatcttataatatcttaagggtgatcatctgtggtattcttga

SEQ ID NO: 312402 - DNA, 201 bp, Homo sapiens
gtctgttggctgcataaatgtcttcttttgagaagtgtccattcatagcctttgcccactttttgatggggttgtttgatttttttcttgtaaatttgttkaagttttttgtagattctggatattagtcctttgtcagatgggtagattgtaaaaattttctcccactctgtaggttgcctgtccactctgatggtagtt

SEQ ID NO: 312403 - DNA, 201 bp, Homo sapiens
ttgagctgtggtgggctccacccagtttgagcttcctagccactttgtttacctactcaagcctcagcaatggtgggcgcccctcccccagcctcactgcygccttgcagttccatctcagactgctgtgccagcagtgagcaaggctccctgggcatgggaccctctgagccaggagcaggatataatctcctggtgttc

SEQ ID NO: 312404 - DNA, 201 bp, Homo sapiens
ccctagcaggtctggatctttgagtttggaaatggtccaaggtgcatatactatgtctgtgaataccagagggcaactctttatgggttcctggtgtaggktctatattctaaattctgagagatgaactcctttagggccacagtctttctgccacttatgaacctacaagcaagtttccaggtgttaaatcagctaggg

SEQ ID NO: 312405 - DNA, 201 bp, Homo sapiens
acccaccaccatacccacctaatttttgtatttttagtagagatggggtttcaccatgttggccaggatggtctcgatctctaaacctcgtgatccacccrccttggcctcccaaagtgttgggattagaggcgtaagccactgcgctcgggcataaattcacattattcttaaacttgtacacatgcagatttgaactta

SEQ ID NO: 312406 - DNA, 201 bp, Homo sapiens
tagcctaacttcaaatagactaagatgttgataagccaatgaggaattcccaccatttaaaaagtggctttcaagatggagaactctgcatggctgtgcactctgcatggctctgtaggtgtcagtgaattttgtgtttattcccagtgtctatattctgtgggttttgttttaagtaaccaagcagaatattttatgtac

SEQ ID NO: 312407 - DNA, 201 bp, Homo sapiens
tttggtccaaaggacaactgaaagctctgtttttggaacatgaggtaggttgagcttgcatagacttactgtcatatgtggagtatattttggtttggctmacatatcagcaggtctcttagctttttaaattggtcaagtagaaaagttgccatttacactttgcatttacacaaaggataagaaaaaagcatatataaa

SEQ ID NO: 312408 - DNA, 201 bp, Homo sapiens
aatcaatatggtctccatgaagctgctggcatatgccatggatttttggtccaaaggacaactgaaagctctgtttttggaacatgaggtaggttgagctkgcatagacttactgtcatatgtggagtatattttggtttggctaacatatcagcaggtctcttagctttttaaattggtcaagtagaaaagttgccattt

SEQ ID NO: 312409 - DNA, 201 bp, Homo sapiens
aagcgaacgctctgtccgcccttctaattggtggctgggaaaacgcaggtgtgtgaacatttgctggggtccaggagtgaggataaagtgggcggcacacygagggtgctctctcctttctcacccctctcgcttctctgagcgcgtcctactggggttgcctgccctttgaatcacagagtagccagcagcgtctcgggt

SEQ ID NO: 312410 - DNA, 201 bp, Homo sapiens
gcttctatcatgggatgatgcagcaggaaggtccttgccatatgcagccccccaatcttggccttactagcctctagaattgtgagcccgataaatttctrttcattacaaattacccagtctgaagtgttctgttatagcagcacaaaatggactaagacactattaataccagtcttatttatattaatagaggacatt

SEQ ID NO: 312411 - DNA, 201 bp, Homo sapiens
gcacatgtacattctagtactcttggccttgatcctacactgaatctgagggtgcaaggactttagatagaggctcaggacagactggacctgtatgaacytctgaattgtagctagcctgggcagccagttacttggatccctctggggcttctggacaaacaactcttttatagcccaaggtagatggtcaggggcgac

SEQ ID NO: 312412 - DNA, 201 bp, Homo sapiens
tccaaggacaactataaaagagttacagggaccaggtaaacatgtttctgcttgtgcttgaacccagacctctttcttgatgaccagtttatagtaaaagkttatttatattgaatacatttttaaaagaaatatcttggcctccttggccaaccaaaaagaatttatcaaatggtgtgttaaagtggtatgtgggtgatt

SEQ ID NO: 312413 - DNA, 201 bp, Homo sapiens
cttttttttttaagagatggattttcgctttgctgcccaggccagagtgcagcaactattcacaggcatagtcgtagtacactacaaccttgacctcctgrgttcaagagattctcctgcctcagctgcttcagaatctgggactacaggcaaacagctctaaaatgccttttgaggcatataaatataattgattctcat

SEQ ID NO: 312414 - DNA, 201 bp, Homo sapiens
tcgtagtacactacaaccttgacctcctgagttcaagagattctcctgcctcagctgcttcagaatctgggactacaggcaaacagctctaaaatgccttytgaggcatataaatataattgattctcataactgtgtagcattctatcatataaatctgtcatattttatttacatatggatgaacatctagtttgttac

SEQ ID NO: 312415 - DNA, 201 bp, Homo sapiens
attgtgcttcctacctttcttctcttctcccttccttccttcttccttccttcctcccttcctctccctaaaccaaataggcttaaaaagttgtttacacytctaggcatttcttgcttttcttattaacagaagattggggaaatatttctagcctgctggaatacatttcactcttttttttttgagatagggggtctc

SEQ ID NO: 312416 - DNA, 201 bp, Homo sapiens
cctcccacctcagcctctcaagtagctgggactacaggcgtgcaccaccacacctggctaatttttgtattttggtagagatggggtttcgtcatgttgcycaggctggtctcaaactcctggacttaagcgatctgcctgcctcagcctcccaaagtgctaggattactggtgtgagccaccacacctggcctcactctc

SEQ ID NO: 312417 - DNA, 201 bp, Homo sapiens
tgggactacaggcgtgcaccaccacacctggctaatttttgtattttggtagagatggggtttcgtcatgttgctcaggctggtctcaaactcctggactyaagcgatctgcctgcctcagcctcccaaagtgctaggattactggtgtgagccaccacacctggcctcactctctttttaatagctgcctaatattctac

SEQ ID NO: 312418 - DNA, 201 bp, Homo sapiens
tccatctcaaaaaataataatatgaggcaggagaatggcgtgcaccccggggggccgagcctgcagtgagctgagatcgcgccactgcaagccaacctgcrctccaactccatctcaaaaaaaataaaaattaataataataataataataataataataataactgtggatgcatggctttctccagctagattccaaag

SEQ ID NO: 312419 - DNA, 201 bp, Homo sapiens
ttttggtagagatggggtttcgtcatgttgctcaggctggtctcaaactcctggacttaagcgatctgcctgcctcagcctcccaaagtgctaggattacwggtgtgagccaccacacctggcctcactctctttttaatagctgcctaatattctacagtttggaagtcatccattttactggacagttttcctgttaaa

SEQ ID NO: 312420 - DNA, 201 bp, Homo sapiens
agaccacccaaatagaagagatcatgatttggccccatttcataggtgggaaggctgaacaaagcactcaggttagtggctagttgaaggtctcacaacaraaatcagtgagagtctttctttggttttgttctcaaatttaggggcaaattttccttgatgtttatttttagtctctgccctcttttcatatccagtcta

SEQ ID NO: 312421 - DNA, 201 bp, Homo sapiens; identical to SEQ ID NO: 65208

SEQ ID NO: 312422 - DNA, 201 bp, Homo sapiens
tttcttagatcgcttctacagactttttccagtactgaaattctgcaggactactcacccattaggaggagaacattgcttttgcagtacatttccatgayttgtgataaatgagtggttccccactgaagaggggaagatttaacagtgtcccccaggacatgtttgacatctttttttctttggttgttacaactggca

SEQ ID NO: 312423 - DNA, 201 bp, Homo sapiens
tctttctaaaaacacacagggagaaaacaaaacaaatccaaatagcacacaaaccaaaacatgttcccaccgtagttttgtaggtaggctgaaaccagcartgtagaatgacatactgcattaaatgtgaataaagataaactttcttagaggaaatccaaagtttgtactgtgactaagttgtgaaggtaataatgtaca

SEQ ID NO: 312424 - DNA, 201 bp, Homo sapiens
ttagaggaaatccaaagtttgtactgtgactaagttgtgaaggtaataatgtacatggacctcttcctttactcatggaactgcatctacagtttgggtakctgctactggtggtacctagctacataattttccatgaaaacccataatttcaatcatatatatatgtgtgtgtgtacatatatatattagtaaatgaag

SEQ ID NO: 312425 - DNA, 201 bp, Homo sapiens
acttcaaatagactaagatgttgataagccaatgaggaattcccaccatttaaaaagtggctttcaagatggagaactctgcatggctgtgcactctgcawggctctgtaggtgtcagtgaattttgtgtttattcccagtgtctatattctgtgggttttgttttaagtaaccaagcagaatattttatgtacagattct

SEQ ID NO: 312426 - DNA, 201 bp, Homo sapiens
taagatgttgataagccaatgaggaattcccaccatttaaaaagtggctttcaagatggagaactctgcatggctgtgcactctgcatggctctgtaggtktcagtgaattttgtgtttattcccagtgtctatattctgtgggttttgttttaagtaaccaagcagaatattttatgtacagattctagtatttttattc

SEQ ID NO: 312427 - DNA, 201 bp, Homo sapiens
gtcaaggtcagccgcgtgggttgcaaatcaaagaatgtctgtctgcgtgacctaaatacatgagtactgttgctagagctaacctctttatggaggaatgyatgcttacttttaagatggcagtcagggggagagaggagcccatctagggaatttaattatatgtggaatgtttctaaaccacagccatggggtttagtc

SEQ ID NO: 312428 - DNA, 201 bp, Homo sapiens
tcagaaaagccagaggaagaaaaaaacatcaccccaatccatgatccagctattaacattttggcctaaagtttctagttttgtgtgtgtgtgtccaaatrgccatttaatttttagacaaaattataaccgcctgaaatgtaccatttaatccctgcccttttcacctaacgatagataatgaacatttgtctcacatca

SEQ ID NO: 312429 - DNA, 201 bp, Homo sapiens
ttcagggtccctgacttcccgcaacagaagtgtttaaagctttttttctgttgctcacatgatctttaaacattttcccccttgttgatttgcttaacaartctttacaaatattggaaaaagaaatttcagtcctgctgcaccctattcatagtaattacacctaactccaacttggtagaaccttgagagaattgttac

SEQ ID NO: 312430 - DNA, 201 bp, Homo sapiens
tgtcctcttttgatcttaactgtttgatatctcagcccttgagtgaggcagttatatgcaaaggagatgagaaggatgagaaaagtgagtacttttccttyataaaagccacatgaattgaacaagacttcagaattcagaagaactacatcaagttcttgggtcatttttttaacccattctccaagaattgaaaaaatg

SEQ ID NO: 312431 - DNA, 201 bp, Homo sapiens
ttctctgggcctcattttgtcatctgcaaagaggtgggagtaagacttcagaactgaaagtgacctctggaggtgagaaagtatagccttcttgtgctacrtagataagaaactaaagctgccagagagatcaaaagcttctagcagtgtcacctaggtaagggctgggacttggactcaattctgattcagaaggaaatg

SEQ ID NO: 312432 - DNA, 201 bp, Homo sapiens
ttcctaacttcaacaaccgtattctcaagaatgcaaggtatttttaacatcagaaaatttatttttaaaaagtcattaattctgcccatatagcttttcaytgcaatacaggcataccttgttgtattgcattttttacagattgaaggtttgtgttaaccctgcattgagcaagtctattggcaccacttttccaatggc

SEQ ID NO: 312433 - DNA, 201 bp, Homo sapiens
tcccaaagtgctaggattactggtgtgagccaccacacctggcctcactctctttttaatagctgcctaatattctacagtttggaagtcatccattttaytggacagttttcctgttaaagggcactcatcttgtttccaatttgccttggttttgtttttgttttttgatttgagcatggtaaaagatgctgcggtgaa

SEQ ID NO: 312434 - DNA, 201 bp, Homo sapiens
atacttgtgctttttttatggcccaggaaagggctttgctgagttaaaaatgcatgtgtactttcaattgtaatagatgttgtcaaaatatttcccagcartgttccaaaatacccttcccccatcctatccagtgtaggcatcttcgccgctctgatgagaatggatggcaactgcagcactggttgcatagcccaggca

SEQ ID NO: 312435 - DNA, 201 bp, Homo sapiens
caggagagccacaggcacctgacaccaacctgtgagagctgctgcatgggtagcaccaaacaaagctgtaggggtaggcctgcctacctgaggccttgggsgcccaactgctgctccagtgttcccagatggtaggatgtggagtcaaggaagattactctggagccttaagatttagtgttgtttgccctgttgggtttt

SEQ ID NO: 312436 - DNA, 201 bp, Homo sapiens
ggcccaggaaagggctttgctgagttaaaaatgcatgtgtactttcaattgtaatagatgttgtcaaaatatttcccagcaatgttccaaaatacccttcycccatcctatccagtgtaggcatcttcgccgctctgatgagaatggatggcaactgcagcactggttgcatagcccaggcacttgttaacatgccatagt

SEQ ID NO: 312437 - DNA, 201 bp, Homo sapiens
gattgaggtattacacatgaaaatttagctgaacttgaactccagttaaaattgtatatatacgtatgttttgagagcttaatgtcagacgtaaggcagtstgacataacacctgcaaataagtccaatatcagtttctgccttgcccaacaaaaatctcagcctcttgttcttgtggaatgcactataaggttggtttaa

SEQ ID NO: 312438 - DNA, 201 bp, Homo sapiens
acttgtttgatttcacaggcttacagctagagggaagtgtccctcaagatgaatcctgccttgaatctcatccatatctgattcagatgagactgtgtacrttgaacttctgagctgatgctggaaagttatgacttttggggctattgcatgacatgaatgtgtcttttatgtgagaagaacatgaatttggggagccag

SEQ ID NO: 312439 - DNA, 201 bp, Homo sapiens
ttcggagattggatttcagagtattccccaacctgatcggatatcacctcctcaatggaagcttccctaataccctctgatgtttctagaagcaggacacrtggcttgtgtcataagtcttgacctgattatcatagattgcctcaccaagtttagcataccctgtctgagagtgatgctggcaaattagtgaataagagg

SEQ ID NO: 312440 - DNA, 201 bp, Homo sapiens
catctggattaaagatcaaaccagccacaacattcccttaagccaaagtctaatccagagcaaggccctaactcttcaattctctagagtctgagagaggkgaggaagctgcagaagaaaagttgaaaggtaggcggggtcctgtggctcatgcctgtaatcccatcactttgggaggctaaggtgggtggatcgcttgaa

SEQ ID NO: 312441 - DNA, 201 bp, Homo sapiens
tgcatgtgtactttcaattgtaatagatgttgtcaaaatatttcccagcaatgttccaaaatacccttcccccatcctatccagtgtaggcatcttcgcckctctgatgagaatggatggcaactgcagcactggttgcatagcccaggcacttgttaacatgccatagtatatttccagggagtttaaaactccaccgaa

SEQ ID NO: 312442 - DNA, 201 bp, Homo sapiens
ttgatcctacactgaatctgagggtgcaaggactttagatagaggctcaggacagactggacctgtatgaacctctgaattgtagctagcctgggcagccmgttacttggatccctctggggcttctggacaaacaactcttttatagcccaaggtagatggtcaggggcgaccagagagagcaatagattcgttgacttc

SEQ ID NO: 312443 - DNA, 201 bp, Homo sapiens
gccgctctgatgagaatggatggcaactgcagcactggttgcatagcccaggcacttgttaacatgccatagtatatttccagggagtttaaaactccacygaaaaagactctggtcagactttatgattggggttacttgcaatttttcttttgtatttcttaaggaattcatggaaagttgatagtagggaagaaattc

SEQ ID NO: 312444 - DNA, 201 bp, Homo sapiens
aaatcagggctttattttcagagaaccagttgttaaacatttaccagtacacagtgactgggacacagttcacagaagaagctcagagaaaagtcccagcrggtatcagtaatactaattgaattattgatgcatttgaggtagagaaggggagtaaaggtcaacatgtcctttgctaagtaggacaatgtctgaagatga

SEQ ID NO: 312445 - DNA, 201 bp, Homo sapiens
tctcaggaaagaaagtattctacaaatacttcaggggtcactgtggttggtatgagggtagaatttctttggaatcacatcgttattttcctcccttcctscctcctaaattcctactgtaaatgtagttgggcttagtgctggattacccagcaggtagaccaagcaggtgttaacaattccatcaatgctagcagaaga

SEQ ID NO: 312446 - DNA, 201 bp, Homo sapiens
agtttcaccttgttggccaggctggtctcaaactcctgacctcaagtaatttgcctgtctcagcctcccaaagtgctggtattacaggcatgagccaccaygcccggtcagtttcgttttagatgcatcttcaagaactatgtacctatctacagttttgtaccttcttgttaacagttattgacattattaaacataacc

SEQ ID NO: 312447 - DNA, 201 bp, Homo sapiens
tatctctgctagagaagcaaggtcaggtaaaacacagcttttaagacaggccactcctggcacaatcctgggtcagttttgtcatcagagggtttggcttyatagctttgaactatgctttatgtacacacaaattctttttctaggtatttatattcagctgcatatggttttttaataggagttatttcttggttattt

SEQ ID NO: 312448 - DNA, 201 bp, Homo sapiens
cacaaatactcctgcagataacattactattgtagaacctaagattggccttttgagatgtcttttcagggttttgcatttttgacaaccagtggctccaygtggacctgccaacccatcctgtggcccctcccagaggcagactcagcacatatgcagaaggaccattttccacactcctatgattgcatccccagccaa

SEQ ID NO: 312449 - DNA, 201 bp, Homo sapiens
tgcttgttcttaaaataaggcaactttgaaagaaggttctagaaaactgcaatagtttcacctgttccattcttgtccagatatctagaggcattaatttyccccccccattaatggacatgctactttgtccctattaagaaaagggcggtcagccatgcatactataattctgtctgcttataaaccatagtagcaaaa

SEQ ID NO: 312450 - DNA, 201 bp, Homo sapiens
atggagaactctgcatggctgtgcactctgcatggctctgtaggtgtcagtgaattttgtgtttattcccagtgtctatattctgtgggttttgttttaartaaccaagcagaatattttatgtacagattctagtatttttattcccaaccacacttcctaacttcaacaaccgtattctcaagaatgcaaggtattttt

SEQ ID NO: 312451 - DNA, 201 bp, Homo sapiens
caaaggaaaagttcttgaaggaaattaaaagtgctactccagtgaacacacaaataataagagagaaaaacagatttatggctgatacagacttttagtcrtctggattaaagatcaaaccagccacaacattcccttaagccaaagtctaatccagagcaaggccctaactcttcaattctctagagtctgagagaggtg

SEQ ID NO: 312452 - DNA, 201 bp, Homo sapiens
tctgccttccaagttatcatacatgatcattttaccaaatgctgtgccagtctccagaatccatttcttcactccctgctgcctggcttctaagccactgscacattttgttgttgtgcagcagcacttcactttatcagttggaataggccaggttcttttgcagtaacaagcaacatcttttgcagtaacaaacaacat

SEQ ID NO: 312453 - DNA, 201 bp, Homo sapiens
tgctgtgccagtctccagaatccatttcttcactccctgctgcctggcttctaagccactgccacattttgttgttgtgcagcagcacttcactttatcakttggaataggccaggttcttttgcagtaacaagcaacatcttttgcagtaacaaacaacatccaaatctcaatggttgaaaagaacaaaggtttcttttg

SEQ ID NO: 312454 - DNA, 201 bp, Homo sapiens
tacagacttcctgtacctaaaaccaacatcactcctcttggcaaacacagaataagctcttattagtagttcaactgaattgatcaaagcatctgggtatsctggagtaaagaaaacatgagtcatggatcatagctgcactaggatgttcttccttccccttctcttctgtctccatccacagcttgtgcatgggaagct

SEQ ID NO: 312455 - DNA, 201 bp, Homo sapiens
ttccttttacagataaggaaattaaaatccaaagaggtagaaggagctacagtgagctacttactgtctgctgcttcagggaagcagatgttccgaatccyagtctggggctttacctattacaacatgctgctcctacactgtggcccatgctgacagtgagttttagagaataaaccaacagacttcatctgtgatctg

SEQ ID NO: 312456 - DNA, 201 bp, Homo sapiens
tacctattacaacatgctgctcctacactgtggcccatgctgacagtgagttttagagaataaaccaacagacttcatctgtgatctgaatcaacaaatgrggatgaccagtttccagttttttcatctcctgctaggacaagcgagtttcccaacctacactggttgcagaatttgctttgtaaacgtctgcaaagaaaa

SEQ ID NO: 312457 - DNA, 201 bp, Homo sapiens
ttgctctgtgttcattgcagagcatttgacagcatggcattaactttccaggctgtctctaaataaagtcagactgtttaggtagctcacctctgctcttktcagctcttaacaataaagagcttatataactaaaaaaatcatcatgatggagattcattttgtcatagataagcatcacaagcacattaagtatacttt

SEQ ID NO: 312458 - DNA, 201 bp, Homo sapiens
agggagtctcatttaacatattctaataatttagggacatcattaatatcaacttttatactgggttgtaatacaggaaagtcttaggtaatggtgtacargcatttgggtttgttcattcatggatatgtgttgtgtaacagctatatacagcatgtaaaaaaaaatgtttgtttagagatgcagttttgctgtgttccc

SEQ ID NO: 312459 - DNA, 201 bp, Homo sapiens
cacagacttttactatataatcgtgatgccaactttatgcatatataaacagagacccatgggaaggcttctatgaatcctaccaaaaatgattacttctrtctacccatttgctctcaagtgccttttttcagcatatgaatgccattcagaagttttgctcacaaacaaaaatgaaatctgtaatattacttatcagtg

SEQ ID NO: 312460 - DNA, 201 bp, Homo sapiens
agcatggaattgctcctgtttacttgatctctttcagcaccgattaatcctgcctacagttttgtccttcactgtccttacactgtattcctaggtttccyccctgcaaaagacaactccatgagaccacatggtgtttgagtgtgtgtgcgtgccagcaaagaaatttcactcccctccctccccaagtctgccaacttt

SEQ ID NO: 312461 - DNA, 201 bp, Homo sapiens
ccttttctctagatagtgcagctgtcaagcttggtatctctttacttaatttatgacaccttttaaatgcctagagttgttgggtaatcgtgtgtgtgtttgtgtgtgtgtgtgtgtgtgtgtgtattctctccttgagagtacatttgagagtagtagatgattcaaaggggcaaagaaatattatttaaagagaattac

SEQ ID NO: 312462 - DNA, 201 bp, Homo sapiens
cttttctctagatagtgcagctgtcaagcttggtatctctttacttaatttatgacaccttttaaatgcctagagttgttgggtaatcgtgtgtgtgtttgtgtgtgtgtgtgtgtgtgtgtgtattctctccttgagagtacatttgagagtagtagatgattcaaaggggcaaagaaatattatttaaagagaattaca

SEQ ID NO: 312463 - DNA, 201 bp, Homo sapiens
ttttctctagatagtgcagctgtcaagcttggtatctctttacttaatttatgacaccttttaaatgcctagagttgttgggtaatcgtgtgtgtgtttgkgtgtgtgtgtgtgtgtgtgtgtattctctccttgagagtacatttgagagtagtagatgattcaaaggggcaaagaaatattatttaaagagaattacat

SEQ ID NO: 312464 - DNA, 201 bp, Homo sapiens
atcagtgaatgacagggccaaaattgtaacccaagtctatcttccttgccaactggctttgttttctatcacaataagcctattatttatgttgggaaaaraaagtgtgttctgtaaaactttcggaaaagataggtccatgtaatctgtacacctttggcaaaatgctcatccatgtgtctgtggaggtaacagtggcca

SEQ ID NO: 312465 - DNA, 201 bp, Homo sapiens
tgatgagtaaagaaaagcgagattccatcagcaaggaagacctcgcccgggccacattggtcaccatcaccaacaacattggctccattgctcggatgtgygcgttgaatgaggtaaggccttactcaacccggtgaaagctgtgtgtcattcatatacatcatcttggcagtgcaacacctgttgactcttacacaacta

SEQ ID NO: 312466 - DNA, 201 bp, Homo sapiens
gaaggcactggatgataatgaatgataaaccattcacctgtggaaacaggatacaattacaacccatgtcatagtctctctaaccatcattattgccatgygtccactgaaatgtgaggaaaaggtctgagcatccttgcacataactgcaggtaaaatgctcgacttgcaatattcgatattctctctgctttcagcttc

SEQ ID NO: 312467 - DNA, 201 bp, Homo sapiens
acatgggtgttagccctgcctttgagttctgggttgacaaaaaacatactctccttgcataacactgaacagagtatgttactggcctgcagatcagcgayatacctttttggaagccctcagttcagacggagtttaaatgggaggctgatactcagagaaaagagcattccagagatgttttttcaaagtccacttgag

SEQ ID NO: 312468 - DNA, 201 bp, Homo sapiens
tacttcctctctctttcccctttctatacactgtatagattaaaacagtggaatcacatcttctaaagtcagttcataaagcaaaaatggaatcattgaawtgcgccctaggttagagaccgacataccatctcttggtacacccagcatggtcagtttttcctctaggattgaagcagatccgtttctttggtaaagatt

SEQ ID NO: 312469 - DNA, 201 bp, Homo sapiens
gccaatttgaaaatgtagccatgttatacactggtttgagcaactattttatatgtttctgtggggctgaatgagtgaagggaatcaccagtcgccttggrgccaaggctctaccagagggtgtccagtcagtgcagactcccagtggccgcaccagtgactggcagtgttgcatttcccatgagagcagccaccaagtcc

SEQ ID NO: 312470 - DNA, 201 bp, Homo sapiens
ctctctctttcccctttctatacactgtatagattaaaacagtggaatcacatcttctaaagtcagttcataaagcaaaaatggaatcattgaaatgcgcyctaggttagagaccgacataccatctcttggtacacccagcatggtcagtttttcctctaggattgaagcagatccgtttctttggtaaagattctgaca

SEQ ID NO: 312471 - DNA, 201 bp, Homo sapiens
aatcctatttctcatctcactcaattctgagtggagtgcagtggtgtgtgagcagagccttgggcactcttttgattgtaaaattttctctgtctgtgccrccttttaggcacatatagttgaattcaaataaattgaatgttaaatgcacatgtagatatgataccactgcttttgcttatttaatattcaaaaactgaa

SEQ ID NO: 312472 - DNA, 201 bp, Homo sapiens
acatggtaaaaccctgtctctacacaaaatacaaaaattagccagatgtggtggtgcacccctatagtcccagtgactcaggaggctgagatgggaggatygcttgagcccaggaggcagaggttgcagtgagctatgattgtgccactgcactccagcctgggtgacagagtgataccctgtctcaaaaaaacatgaaaa

SEQ ID NO: 312473 - DNA, 201 bp, Homo sapiens
atggtaaaaccctgtctctacacaaaatacaaaaattagccagatgtggtggtgcacccctatagtcccagtgactcaggaggctgagatgggaggatcgyttgagcccaggaggcagaggttgcagtgagctatgattgtgccactgcactccagcctgggtgacagagtgataccctgtctcaaaaaaacatgaaaaga

SEQ ID NO: 312474 - DNA, 201 bp, Homo sapiens
ctgtaatattacttatcagtgaattccttcattaatgaataccatttagggagtataattttatatagtaaggataatgctgtatcctgactggcagtacwtacaaactgtacgttgctcatttagatttaacaaatgaagctaaatggaagatacggataagtaacatgcagtccaatgtttctctcttttttttttagc

SEQ ID NO: 312475 - DNA, 201 bp, Homo sapiens
gtaaaaccctgtctctacacaaaatacaaaaattagccagatgtggtggtgcacccctatagtcccagtgactcaggaggctgagatgggaggatcgcttgagcccaggaggcagaggttgcagtgagctatgattgtgccactgcactccagcctgggtgacagagtgataccctgtctcaaaaaaacatgaaaagaaaa

SEQ ID NO: 312476 - DNA, 201 bp, Homo sapiens
gactggcagtacttacaaactgtacgttgctcatttagatttaacaaatgaagctaaatggaagatacggataagtaacatgcagtccaatgtttctctcttttttttttagcattcccttaacatctgtgcattccaatttcttcattttctacagtcaatataataatctctgtactgtgtagtcttcattttataaag

SEQ ID NO: 312477 - DNA, 201 bp, Homo sapiens
attcatggtatttaataaagctataaatgcaaattttacttgtgccatcaaaagtaaccccatttacctcattgattatagtaagtttctgtaagggcagrcaacagagtcctagaatagtatcctaagtgagactaattatcttcagtttttgtttttttttttcttctatgtcccctcctattacccagcagtagagtt

SEQ ID NO: 312478 - DNA, 201 bp, Homo sapiens
aatacctaatacaatacctacacatcactttattcacatggattctttatagcaccagcacgtggcaaatttaagttttgctttttggaacttcgtggaatttttttttttttttcaaatattttcagtctgcagttggttcaatccgtgattggaaccacagatatgaaggagtgactgtagttggtctcagattattta

SEQ ID NO: 312479 - DNA, 201 bp, Homo sapiens
atggcgtgcaccccggggggccgagcctgcagtgagctgagatcgcgccactgcaagccaacctgcactccaactccatctcaaaaaaaataaaaattaataataataataataataataataataataactgtggatgcatggctttctccagctagattccaaagaatgtcatagacagcctgatggcccaggcagaca

SEQ ID NO: 312480 - DNA, 201 bp, Homo sapiens
cacacactcacaaagcggggagggtaacgtgaatgaccttgcaaaggtatcttgctcactggggacaggattagcaaacctgacacctctgcaaataattrtcttcctcccgtattcctcctgaaacggttcgctcctttcgctgtctctcccagacccatctggttttcacatcgccatacaaagcccaacccgcccatc

SEQ ID NO: 312481 - DNA, 201 bp, Homo sapiens
ggcgtgcaccccggggggccgagcctgcagtgagctgagatcgcgccactgcaagccaacctgcactccaactccatctcaaaaaaaataaaaattaataataataataataataataataataataactgtggatgcatggctttctccagctagattccaaagaatgtcatagacagcctgatggcccaggcagacacg

SEQ ID NO: 312482 - DNA, 201 bp, Homo sapiens
taaccccatttacctcattgattatagtaagtttctgtaagggcaggcaacagagtcctagaatagtatcctaagtgagactaattatcttcagtttttgtttttttttttcttctatgtcccctcctattacccagcagtagagtttgacttgccacttacttaaatgacccacagaatccttttctcaccaaagaggct

SEQ ID NO: 312483 - DNA, 201 bp, Homo sapiens
aaaccctgtgtgtgagtcagtacttgaacattagtggaacctgtttactattcatactctcccaactacctatgtttgatttaaaaaaaaaattaaagggmtgttaatgtttttagggtgttccatactaggaagttagtgtacatttgactaaggagataatcagatcttcttaccttttatggaaggtcttatcctttt

SEQ ID NO: 312484 - DNA, 201 bp, Homo sapiens
gcgtgcaccccggggggccgagcctgcagtgagctgagatcgcgccactgcaagccaacctgcactccaactccatctcaaaaaaaataaaaattaataataataataataataataataataataactgtggatgcatggctttctccagctagattccaaagaatgtcatagacagcctgatggcccaggcagacacgt

SEQ ID NO: 312485 - DNA, 201 bp, Homo sapiens
attacccagcagtagagtttgacttgccacttacttaaatgacccacagaatccttttctcaccaaagaggctcatgatcaaagagttttaaaactgagaygtttgagatccatgggcttgagaactaagtttcagtccataatggaaaaaccattgaacctgaactccagtcctgtttctacatttcatcagctgggtga

SEQ ID NO: 312486 - DNA, 201 bp, Homo sapiens
atagctccagaaatcactaaaccctgtgtgtgagtcagtacttgaacattagtggaacctgtttactattcatactctcccaactacctatgtttgatttaaaaaaaaaattaaagggctgttaatgtttttagggtgttccatactaggaagttagtgtacatttgactaaggagataatcagatcttcttaccttttat

SEQ ID NO: 312487 - DNA, 201 bp, Homo sapiens
aacatggtgtaaccctgtctctactaaaaatacaaaaataagccaggtgaggtggcgcacgcctgtaatcccagctactcaggaggctgaggcacgagaayctcttgaacccaggagatcaaggttacagtgagccgagatcgtgccattgcactccagcctgggtgacagagtaagactctgtctcaaaaaagaaagtga

SEQ ID NO: 312488 - DNA, 201 bp, Homo sapiens
gttggttcaatccgtgattggaaccacagatatgaaggagtgactgtagttggtctcagattatttaaagcaagtgtttatttcagcttgtgttgccatgtgagcagttggcatacctttcctcagtcctctgccccccagctcaacttcaaagatttgccagactttcatagttaagaaataaatgaacaaggcccattt

SEQ ID NO: 312489 - DNA, 201 bp, Homo sapiens
gaaggccgaggcgggcggatcacgaggtcaggagatcgagaccatcctggctaacacagtgaaactcagtctctactaaaaatacaaaaaattagccgggygaggtgacgggtgcctgtagtctcagctactcgggaggctgaggcaggagaaaggtgtgaacccgggaggcagagcttgcagtacaccaagatcgcgccg

SEQ ID NO: 312490 - DNA, 201 bp, Homo sapiens
caaatcatgtccaattttataatattgaagcagacctcagaaatcatatgtttagtattaaatgtttttgtctttatttccaaaagaaaagaacccttttaaaaaaaaaaaaaacacacacacacacacacacaatctgttatttgctgtaaaagttagcagtgtattatatccagttgagactattgtgttttatgatgc

SEQ ID NO: 312491 - DNA, 201 bp, Homo sapiens
actcctctttttcccccacaatccccaaccctaggcaactaatctattttctgtctctagagttttgcttattctggacatttcaaatgagtgaaatcatatcatacgtgatcttttctgattggcggctttacttagcatagtgttttcaggattcatccatgttgtagtatgtattagtattttgtccttttttgtggc

SEQ ID NO: 312492 - DNA, 201 bp, Homo sapiens
ctcctctttttcccccacaatccccaaccctaggcaactaatctattttctgtctctagagttttgcttattctggacatttcaaatgagtgaaatcatatcatacgtgatcttttctgattggcggctttacttagcatagtgttttcaggattcatccatgttgtagtatgtattagtattttgtccttttttgtggcc

SEQ ID NO: 312493 - DNA, 201 bp, Homo sapiens
tcctctttttcccccacaatccccaaccctaggcaactaatctattttctgtctctagagttttgcttattctggacatttcaaatgagtgaaatcatatcatacgtgatcttttctgattggcggctttacttagcatagtgttttcaggattcatccatgttgtagtatgtattagtattttgtccttttttgtggcca

SEQ ID NO: 312494 - DNA, 201 bp, Homo sapiens
agctttattgaaatataattatatgctatacaattcaccctccatatactattctatatcttgctttatcagctttttattaagaaaattcataaacataygtaaaggagagagaacagtataaagaacctccattaatccatcagtgcagattctgcaatcattaaggcttcacaacacatgctttctctatattttctt

SEQ ID NO: 312495 - DNA, 201 bp, Homo sapiens
ttcagcttgtgttgccatgtgagcagttggcatacctttcctcagtcctctgccccccagctcaacttcaaagatttgccagactttcatagttaagaaayaaatgaacaaggcccatttctggtagacctgttgttccgcctggttatgtcacccagcaatgctgttctccctgaagcctctttaattaaccatgctctg

SEQ ID NO: 312496 - DNA, 201 bp, Homo sapiens
aacatatagatatgctgttattgatttgttcaatttcctaatgatatttaggtttttccagtcttttactattatttaaaaattcagtgtatttgtatacrgtatacacacatatatgtacacacatgtatattattttgcctacatgtgagtatatcaataggataaattcctagaagggaacttgctgagtcatcggat

SEQ ID NO: 312497 - DNA, 201 bp, Homo sapiens
ccatagctgtctgtaagtgtattttcctcccacctcctctgcacagcgtgagaacttaactgtggaatgggaaacaaatttcatctgcctaccatttcctytccttaacccctgaagcagaaatacacagcttgactgtaggcatgaaggggagaaggtgagctcactggtccctagagtgacgctcatctttctctctga

SEQ ID NO: 312498 - DNA, 201 bp, Homo sapiens
atatttggctaaggttcagagatcatcgttttgtattgttttcgtagggttattttggagccgttggggcactgttggaactgttcaaaatgactgatgayaagtagagacgagcagtggaggaaacagcctcccaaaaggacagagaactaaaaaattgctgctggagaaggtgaaagtcgctttgggacggaagccaag

SEQ ID NO: 312499 - DNA, 201 bp, Homo sapiens
ataggataaattcctagaagggaacttgctgagtcatcggatatgttgattgtaatattaacagatataaagttccctccataaaggtggttctaatttayattcccaccaagcagggttataacggtacaagtttctccacagagttatcaaactttttgatttttttcaatgtaataggttaaaaattataccttattt

SEQ ID NO: 312500 - DNA, 201 bp, Homo sapiens
ttataacggtacaagtttctccacagagttatcaaactttttgatttttttcaatgtaataggttaaaaattataccttattttgggattaactattaatrttatttactcattactctattgggttgttggactttttttcttgttgatttatggaactctttattaattaacaaatccattttatgtgaaatgtactga

SEQ ID NO: 312501 - DNA, 201 bp, Homo sapiens
ttactatgaatggagggaaaaaaccagggcaaagaagatagggagtgctggcagggtctttgtgtgactaggcaatgttggagcagagacctgaagaagayagcaaatcatgcaaagaaagagtgtgttaggcagatggagcagtgagtgctaaggcccttagtgtcctaataatccaagctctcctcatttctagaatag

SEQ ID NO: 312502 - DNA, 201 bp, Homo sapiens
gtgtgactaggcaatgttggagcagagacctgaagaagacagcaaatcatgcaaagaaagagtgtgttaggcagatggagcagtgagtgctaaggcccttrgtgtcctaataatccaagctctcctcatttctagaatagaaaatcgaagatgctaacttaattgtaaaggatcaatatatactactgtacgtattaaaac

SEQ ID NO: 312503 - DNA, 201 bp, Homo sapiens
tgtaactattcttcattccatttaaaatgtacaagaaagaactataaaccatgacacaatcattaaattagacctgtgtagaatactctcagttgaacagrtctgcactttgttcctcctttttctttccttctttttttcttcccaccatccctcccctccttctttcctttcttgttttcttttttaacattttaggat

SEQ ID NO: 312504 - DNA, 201 bp, Homo sapiens
tgcagccggtgacttgaagttgaagccgacgctcatggaccattctgaaaatcgtgtggcccttaagaattatgctacatctactctacctgtgctttacraatgtaacaataaggcatggatgatagtacatctgtttataacatggtttactaaatatttaagcccactatttagacctactgctcagaaaaaaaaatc

SEQ ID NO: 312505 - DNA, 201 bp, Homo sapiens
gaggagcccatctagggaatttaattatatgtggaatgtttctaaaccacagccatggggtttagtcatggctggataatacctagtacttcaaaagctgyatttaaaatttgaaaatcacctattacactcatgttataaattgccaataaataatttcattaacaagcaattagatgtgtctgggaatgggaacacctg

SEQ ID NO: 312506 - DNA, 201 bp, Homo sapiens
caactagtcacccaagagttctaatggagatgtaaaaggaaattaatgttttcatgcctattaatacaatatccattctgcagcccataaatcaaggaatrattacaagtttctagttttattatttaaggaatactttttttttttaaagaaatacttttcataggccatagctgccatagattacaattcctttgatgg

SEQ ID NO: 312507 - DNA, 201 bp, Homo sapiens
aaaagctgtatttaaaatttgaaaatcacctattacactcatgttataaattgccaataaataatttcattaacaagcaattagatgtgtctgggaatggsaacacctgccagttggtggctgtgcattgccctcagctgtctgcctcagagttctgtgctcagtttcaagcaagagccactcctacaaactccagtttct

SEQ ID NO: 312508 - DNA, 201 bp, Homo sapiens
gctagattgcagtggcacgacctcagctcactgcaagctccgcctcccaggttcacaccattctcctgcctcagcctcctgagtagctgggattacaggcrccagccaccatgcccggcaaatgttttttgtatttttagtagagacggggtttcaccatgttggccaggctggtctcaatctcctgacctcgtgatccgc

SEQ ID NO: 312509 - DNA, 201 bp, Homo sapiens
caatggcacgatctcggctcactgcaacctccacctcccgggttcaagcaattctcctgcctcagcctcctgtgtagctaggattacaggcatgtgccacmacaccaggctaattttgtatttttagtagagacagggtttctcagtgttggtcaggttggtctcgaacttctgacctcagatgatccacccatctcagcc

SEQ ID NO: 312510 - DNA, 201 bp, Homo sapiens
ataatagagacaaaagaagattcaaaccatagcagcctgggaagcgcatgtttacatgattcctgaggacatcaatgtacagtgagcacaataattgattstcatttgactgtgaatcatcaagaagacctcaaatttcattcagtctgttttgtttaagagtatggagaagtgggttgtgcattttagaaagattatctt

SEQ ID NO: 312511 - DNA, 201 bp, Homo sapiens
tagtagagacagggtttctcagtgttggtcaggttggtctcgaacttctgacctcagatgatccacccatctcagcctcccaaagtgctgggattacaggygtgaaccaacgcacccggccttaacaaggaattttttaaaacttgtggacgtccttaggcaacttgaacataattaatattcatttggtgtaaaatatct

SEQ ID NO: 312512 - DNA, 201 bp, Homo sapiens
ctgtaattaaatgccctgtcctggaagtaacaatgtatctatcacctttttcaaccctaaagttttccttcaacattgtttttcagttcctatccagtaaratactctttttttgagatggagtctcactgtgtcccccaggctggagtgcagtggagtgatctcggctcactgcaacctccgcctcctgagttcaagcga

SEQ ID NO: 312513 - DNA, 201 bp, Homo sapiens
ataaataatttcattaacaagcaattagatgtgtctgggaatgggaacacctgccagttggtggctgtgcattgccctcagctgtctgcctcagagttctstgctcagtttcaagcaagagccactcctacaaactccagtttctcacttttaaaacatagtccaagctggccgtggtggctcatgcctgtaattccagca

SEQ ID NO: 312514 - DNA, 201 bp, Homo sapiens
aaccatgacacaatcattaaattagacctgtgtagaatactctcagttgaacaggtctgcactttgttcctcctttttctttccttctttttttcttcccrccatccctcccctccttctttcctttcttgttttcttttttaacattttaggattggccagacgcggtggctcacgcctgtaatcccagcactttggggg

SEQ ID NO: 312515 - DNA, 201 bp, Homo sapiens
tttgataattggtttgatatgggcaggctgttgcatgagaagagaaggaactgttgttgagttagggaatgaaagcatattattttctatgggcaggaccrcagacctgctatctgttcactgaagcaaagttaaaataatttcattttcttttgcatcattacagagaagtttttaagaatttaaaaatagctctgatta

SEQ ID NO: 312516 - DNA, 201 bp, Homo sapiens
ctactaaaaatacaaaaaatcagccgggcgtggtcgcgggcgcctgtagtcccagctgcttgggaggctgaggcaggagaatggcgtgaacccaggaggcrgagcttgcagtaagctgagatggcgacactgcactccagccggggcgacgaggccagactccacctcaaaaaaaaaaaaaaaaaattttaggatcattgt

SEQ ID NO: 312517 - DNA, 201 bp, Homo sapiens
caaagttaaaataatttcattttcttttgcatcattacagagaagtttttaagaatttaaaaatagctctgattatgaagttcaagtgtgttgattatttaaaaaaaaaaaaattgggccaggcacggtggctcatgcctgtaatccagcattttgggaggccaggatgggagaatcgcgaggtcagaagatcgagaccat

SEQ ID NO: 312518 - DNA, 201 bp, Homo sapiens
cgggcgtggtcgcgggcgcctgtagtcccagctgcttgggaggctgaggcaggagaatggcgtgaacccaggaggcggagcttgcagtaagctgagatggygacactgcactccagccggggcgacgaggccagactccacctcaaaaaaaaaaaaaaaaaattttaggatcattgtcataaccaaatttttgactggcaa

SEQ ID NO: 312519 - DNA, 201 bp, Homo sapiens
aactttttgatttttttcaatgtaataggttaaaaattataccttattttgggattaactattaatattatttactcattactctattgggttgttggacyttttttcttgttgatttatggaactctttattaattaacaaatccattttatgtgaaatgtactgataatattttccatttattgcttcccgtttggatt

SEQ ID NO: 312520 - DNA, 201 bp, Homo sapiens
gggcgtggtcgcgggcgcctgtagtcccagctgcttgggaggctgaggcaggagaatggcgtgaacccaggaggcggagcttgcagtaagctgagatggcracactgcactccagccggggcgacgaggccagactccacctcaaaaaaaaaaaaaaaaaattttaggatcattgtcataaccaaatttttgactggcaaa

SEQ ID NO: 312521 - DNA, 201 bp, Homo sapiens
tgaggcaggagaatggcgtgaacccaggaggcggagcttgcagtaagctgagatggcgacactgcactccagccggggcgacgaggccagactccacctcaaaaaaaaaaaaaaaaaattttaggatcattgtcataaccaaatttttgactggcaaaaactagccttcaaaatcaatgagttatcaaaatggaacacaga

SEQ ID NO: 312522 - DNA, 201 bp, Homo sapiens
cagttaaaaggtgatgttcccagaccctgattactcttgatagactaagcagaaaataataccagcttcaaagactctcttgcctttgatatgagtgaccrtagcaactggctctaagtgagtgagtgagtggtgagcagtctctgcatggtagacaggttgagctccagtttgagcttaagaaatatctcggggagtggg

SEQ ID NO: 312523 - DNA, 201 bp, Homo sapiens
taagtgtatgttcagaatgcaaagccacatccatgatgacaaaaatagaattattttttgttaccatattttaactcatgtgttggccaaacaggatattmcaccacatatcctgagggcagagactgagtattctttcttctttgtatttctagtgtccagcacagaacaaattgagcattattcattacacaaataaac

SEQ ID NO: 312524 - DNA, 201 bp, Homo sapiens
ctaagagcatcatttaggaacacctgttaccttggtccctattattaatctgaggactgatttgtgatattgcaggagcataagatttggtagacactatsattctcaatttcattcttgcttgagactttgaccactcacagatggcccctttcgtcatttgatggagggtggaaaaagctatctggggttggggcccag

SEQ ID NO: 312525 - DNA, 201 bp, Homo sapiens
attattaatctgaggactgatttgtgatattgcaggagcataagatttggtagacactatcattctcaatttcattcttgcttgagactttgaccactcayagatggcccctttcgtcatttgatggagggtggaaaaagctatctggggttggggcccagcagcctgcattttaaccaaccctccaggtgattctgatgc

SEQ ID NO: 312526 - DNA, 201 bp, Homo sapiens
taagtagctaggagcagtagtgattaaacacaaggcagcctctccaccctggccattcactaagttgttttaaaatgtcagtccaccagcctggtgcagayacctgttgtatcagagctcagacttgatctcctgcccttgatgaagcactgagatgtttagctcttgatgcttgttcttaaaataaggcaactttgaaag

SEQ ID NO: 312527 - DNA, 201 bp, Homo sapiens
tgtgactctacatctagtcaaggcctttgctcctttgttttcttacagtctcctttaagcatttgagtctgtggcccttgatgtaaaggaaactaagcccsgagaaagagtgtttctcactagctgaaatctcaacatgctgttttaagctttccacaaagttcattcagttgtactaatggactgcaaagtctgataatt

SEQ ID NO: 312528 - DNA, 201 bp, Homo sapiens
gaggcaggagaatggcgtgaacccaggaggcggagcttgcagtaagctgagatggcgacactgcactccagccggggcgacgaggccagactccacctcaaaaaaaaaaaaaaaaaattttaggatcattgtcataaccaaatttttgactggcaaaaactagccttcaaaatcaatgagttatcaaaatggaacacagaa

SEQ ID NO: 312529 - DNA, 201 bp, Homo sapiens
tgaacccaggaggcggagcttgcagtaagctgagatggcgacactgcactccagccggggcgacgaggccagactccacctcaaaaaaaaaaaaaaaaaaktttaggatcattgtcataaccaaatttttgactggcaaaaactagccttcaaaatcaatgagttatcaaaatggaacacagaagaaaaacttagcctaac

SEQ ID NO: 312530 - DNA, 201 bp, Homo sapiens
aagatcgagaccatcctggctaacatggtgaaacctcgtctccactaaaaatacaaaaaaaaattagccaggcatggtggtgggtgcctgtagtcccagckactcgggaggctaaggcaggagaatggcgttaacccaggaggcggagcttgcagtgagccgagattgcgccactgcactccagcctgggccacagagcaa

SEQ ID NO: 312531 - DNA, 201 bp, Homo sapiens
cctaacttcaaatagactaagatgttgataagccaatgaggaattcccaccatttaaaaagtggctttcaagatggagaactctgcatggctgtgcactctgcatggctctgtaggtgtcagtgaattttgtgtttattcccagtgtctatattctgtgggttttgttttaagtaaccaagcagaatattttatgtacaga

SEQ ID NO: 312532 - DNA, 201 bp, Homo sapiens
agtcccagctgcttgggaggctgaggcaggagaatggcgtgaacccaggaggcggagcttgcagtaagctgagatggcgacactgcactccagccggggcracgaggccagactccacctcaaaaaaaaaaaaaaaaaattttaggatcattgtcataaccaaatttttgactggcaaaaactagccttcaaaatcaatga

SEQ ID NO: 312533 - DNA, 201 bp, Homo sapiens
ctaacttcaaatagactaagatgttgataagccaatgaggaattcccaccatttaaaaagtggctttcaagatggagaactctgcatggctgtgcactctgcatggctctgtaggtgtcagtgaattttgtgtttattcccagtgtctatattctgtgggttttgttttaagtaaccaagcagaatattttatgtacagat

SEQ ID NO: 312534 - DNA, 201 bp, Homo sapiens
aagttgaaaggtaggcggggtcctgtggctcatgcctgtaatcccatcactttgggaggctaaggtgggtggatcgcttgaacccagtagttcaagacccrcctgggcaacatggtaaaaccctgtctctacacaaaatacaaaaattagccagatgtggtggtgcacccctatagtcccagtgactcaggaggctgagat

SEQ ID NO: 312535 - DNA, 201 bp, Homo sapiens
gtctctacacaaaatacaaaaattagccagatgtggtggtgcacccctatagtcccagtgactcaggaggctgagatgggaggatcgcttgagcccaggargcagaggttgcagtgagctatgattgtgccactgcactccagcctgggtgacagagtgataccctgtctcaaaaaaacatgaaaagaaaagtgggaaggt

SEQ ID NO: 312536 - DNA, 201 bp, Homo sapiens
gagtgcagtgatgcgatctcggctcactgcaacacctgcctcctgggttcaggcgattctcctaccccagcctcccaagtagctggaattacagacacatsgtgaccatgcctggctaatttttgtatttttagtagaaacgagggtcttaccatgttggccaggctggtctcaagctcctgacctcaagtgatccgcctg

SEQ ID NO: 312537 - DNA, 201 bp, Homo sapiens
aaggcccattataggatcagcattaggatatatatagataaaattggtaatatgggaatcagattcagcccacagacatgttttgttggtctgcaatgtatttttttaatgttaaattacctgtcagcccttaaaaattggaagatttaacataaaaatttggatttctggctcttgaaaaatagggtcatctggtaacac

SEQ ID NO: 312538 - DNA, 201 bp, Homo sapiens
ttattaaattttatattcactactttcttcaaggtccttaaatagtcattaagttttcaactgtgtttcatgctattaaaagtatggttttggaggtcttygcatatgattatttaggatgatagaatgtgagaactagacagaactttagtgataggttaatctacctccatttaaagactagtaaatgggccagatgca

SEQ ID NO: 312539 - DNA, 201 bp, Homo sapiens; identical to SEQ ID NO: 65209

SEQ ID NO: 312540 - DNA, 201 bp, Homo sapiens
tgtatagaaatttatctaggaattccttttattctttaaaacttgttgctcaaagatggatgtacagccattttatctgtagcacttggttttatgaacakcagtttcaccagagtgaaaaccattttgaatgagtgggtcagtttatttgtttgcaaaagtcttcctgtgaagtttgagcctggtttcctgctgtacgtt

SEQ ID NO: 312541 - DNA, 201 bp, Homo sapiens
gaagtttgagcctggtttcctgctgtacgttgttgatgaatactctagaaatattttaaaatgacatctggtttaaggaggagtaaggggtgaatacagayttcctgtacctaaaaccaacatcactcctcttggcaaacacagaataagctcttattagtagttcaactgaattgatcaaagcatctgggtatcctggag

SEQ ID NO: 312542 - DNA, 201 bp, Homo sapiens
aaaacttgtggacgtccttaggcaacttgaacataattaatattcatttggtgtaaaatatctttgaagtgtatcggggaaaccagccccaatatttcaaygtaagttcttttctgttttccctaagtgttggccggtctgagaaataaagagaaagagtacaaagagacaaattttacagctgggcctctggcagtgaca

SEQ ID NO: 312543 - DNA, 201 bp, Homo sapiens
gcttccatccgccgccagtccagccgccgcacgtctgcagccggggtccagtgggcggcagcgacgcggcgccccagcgcctcccgctcctgccggagctscagccgcagccactgctccctcagcatgactccccggccaagaaatgccggctgcggaggaggatggactcggggagaaagaacaggccgcgtaagtccc

SEQ ID NO: 312544 - DNA, 201 bp, Homo sapiens
tacttcagttatttctcttatctacattgacagattgtactagagtttgcaatgaaaatagctaaaatataatgaaagggagcttctagcttaatcttctrtgtttaattgaggatataacacctcttgaaataacttctgaggaattgaaaatacaccctctaggaatatcttgaagacagagaaaaactaacctgagcc

SEQ ID NO: 312545 - DNA, 201 bp, Homo sapiens
ctaaaatataatgaaagggagcttctagcttaatcttctatgtttaattgaggatataacacctcttgaaataacttctgaggaattgaaaatacaccctytaggaatatcttgaagacagagaaaaactaacctgagccttaacttgtgcttgcaaacccacagaaattattttaaaatacaagaaaatgtaactatctg

SEQ ID NO: 312546 - DNA, 201 bp, Homo sapiens
tcatgaccacgattgttacttataatttttaaaaaacggttcgtcaaaattggatttacattatttaccatgttttcttctctcagatttgaacaatcatktctgaaataaattttacatgttcctaggagtcacatctggccttttcactaccaaaatttcttagttaaaaatggcttaacttaatatctttgtgccttg

SEQ ID NO: 312547 - DNA, 201 bp, Homo sapiens
tgagacatttaacaagtgactaaaaacctttcatggttttggagacagaataagtaggggaaacaaataagtattggttttaactgacaggctgttttgtstgtgtgggatagcctgcattttaatattttgtgtgtatatatgttaagtatgagccaattatcatgaaaattaatcagggcttgacttctaatatattta

SEQ ID NO: 312548 - DNA, 201 bp, Homo sapiens
cagatgggcagcgagaagaacttctctagccttcacaccaccctctgtgccacaggaggcggggctttcaaattcgaagaggacttcagaatggtaggtckggtttgtctttgttaaaacatcaaaacctctcacatgtccataatcatggccactcataccgaagaaccatactactagccttgggactctggacaagct

SEQ ID NO: 312549 - DNA, 201 bp, Homo sapiens
agtgtcacctaggtaagggctgggacttggactcaattctgattcagaaggaaatgctgatccactctcattgctctgagctcctcaggtccctcaaggaygccctatctgtccatttccactggagagcctgaagtgaaccaaggtgacccagaggattgatgcaacctctgtcaatgcctccatctctcccctggggta

SEQ ID NO: 312550 - DNA, 201 bp, Homo sapiens
gccaaacaggatattccaccacatatcctgagggcagagactgagtattctttcttctttgtatttctagtgtccagcacagaacaaattgagcattattyattacacaaataaaccataccatagccgttttatttgtgagttggttataagagtattttatacctagaagttgggggattgaggtattacacatgaaaa

SEQ ID NO: 312551 - DNA, 201 bp, Homo sapiens
ctgttttaagctttccacaaagttcattcagttgtactaatggactgcaaagtctgataattaattcccaacttgtcctgaatttcagatgtcctgtttgaaaatccaagtagcagtatgactcactgcctgcatttgggaccctgtcatttttcccagatggtgaagacttttgagggaggtctctgtagggctcagtga

SEQ ID NO: 312552 - DNA, 201 bp, Homo sapiens
atttgggtttgttcattcatggatatgtgttgtgtaacagctatatacagcatgtaaaaaaaaatgtttgtttagagatgcagttttgctgtgttccccargctaatctccaactcttgggctcaagcaaacctcctgcctcagcttcctgagtagttgagactacagggatgcgccagcctatccagcttgggtgtaact

SEQ ID NO: 312553 - DNA, 201 bp, Homo sapiens
acgcctatttttgagcatggtttctccgattggagtcctgtagttatctttctttcataatctacaatattatgcacctcctttgatttccagtttgtttccttaaagtggattaagaagataaagatacttatgaagtaaattggttgcagaatgtttacaggtttttctctctctctttcacgttgtggcatccaccta

SEQ ID NO: 312554 - DNA, 201 bp, Homo sapiens
tgattcaccccagttcccagtccctcgggacttcatgctctaccaaggaagtatagcatttttgttgctttctgaatattctcagtctgctcaccctgtgyaagcacctctttcttggcagcattccctattagattcctgtcactgctataacaaataaacttaatggttcaaacaacagaaatttattcgtttgtagtt

SEQ ID NO: 312555 - DNA, 201 bp, Homo sapiens
agtcctgtagttatctttctttcataatctacaatattatgcacctcctttgatttccagtttgtttccttaaagtggattaagaagataaagatacttaygaagtaaattggttgcagaatgtttacaggtttttctctctctctttcacgttgtggcatccacctaagtagacagcaattatttctgactacctttttc

SEQ ID NO: 312556 - DNA, 201 bp, Homo sapiens
cagggtttctcagtgttggtcaggttggtctcgaacttctgacctcagatgatccacccatctcagcctcccaaagtgctgggattacaggcgtgaaccamcgcacccggccttaacaaggaattttttaaaacttgtggacgtccttaggcaacttgaacataattaatattcatttggtgtaaaatatctttgaagtgt

SEQ ID NO: 312557 - DNA, 201 bp, Homo sapiens
aaaccctctcaccctcaccctggcttaggtcagttacataacaagtaaatgggtaacctgtcaagtcctggtaatgctgtcttagagttttagcactaatyaaaaggtttggatgttttttgtttgatttttatatgtgttgcaagcaaagtgagttgttaggtatttttagtattcagcaagaagctgaaacattttcag

SEQ ID NO: 312558 - DNA, 201 bp, Homo sapiens
atacctttttaacactcagctaccacatgtttgtctgtgatcatgacagttcctatatatagttctgctagagagggaatttttccagctttaaaaaccgygaaggattttgatttaggggtatattagtcagcataggcaaggttattctgtagtaacaaataaccctcaaatctctctggcttaaaacaacaaaagttt

SEQ ID NO: 312559 - DNA, 201 bp, Homo sapiens
cttttggaccctcattgatgcctagctcggagtgacttgcttgaaataatataccattccaaacagcaaaccaaactatgtctacaaagaatgtttttttmccctcagccaaatgctccacctgaaaactggaatagtcagcatacctcctagggaattttggagtggagtagacagggaaacagccccatggccatggtg

SEQ ID NO: 312560 - DNA, 201 bp, Homo sapiens
tggaccctcattgatgcctagctcggagtgacttgcttgaaataatataccattccaaacagcaaaccaaactatgtctacaaagaatgtttttttaccctcagccaaatgctccacctgaaaactggaatagtcagcatacctcctagggaattttggagtggagtagacagggaaacagccccatggccatggtggggc

SEQ ID NO: 312561 - DNA, 201 bp, Homo sapiens
attattttgagatgatttcctttattatgcattttctacttcaacttttttttccaattcttccatatttttccctatctctttttcttttctttctttctttttttttttttcttttttaacatctttgacccacctggaatttatttgaaacatggaatgctcttccagttttaatgccacttctactccttctgactt

SEQ ID NO: 312562 - DNA, 201 bp, Homo sapiens
aaaactagccttcaaaatcaatgagttatcaaaatggaacacagaagaaaaacttagcctaacttcaaatagactaagatgttgataagccaatgaggaaytcccaccatttaaaaagtggctttcaagatggagaactctgcatggctgtgcactctgcatggctctgtaggtgtcagtgaattttgtgtttattcccag

SEQ ID NO: 312563 - DNA, 201 bp, Homo sapiens
agctaccacatgtttgtctgtgatcatgacagttcctatatatagttctgctagagagggaatttttccagctttaaaaaccgcgaaggattttgatttargggtatattagtcagcataggcaaggttattctgtagtaacaaataaccctcaaatctctctggcttaaaacaacaaaagtttatttcttacagcacaag

SEQ ID NO: 312564 - DNA, 201 bp, Homo sapiens
gatttaggggtatattagtcagcataggcaaggttattctgtagtaacaaataaccctcaaatctctctggcttaaaacaacaaaagtttatttcttacarcacaagttcattgaaaggtggctggaagctccattctgattcatctttactttgagacccaggtgatagaacaattgtcttaatttttgctggttaaggt

SEQ ID NO: 312565 - DNA, 201 bp, Homo sapiens
gtcatttctacatcaactctggatgtggttcctcttgatctagagacttctgaactaaaagtggcaagttatctgctcttcatcaccacccccccacacaytgtatattagtatataatggtgaaacaaagattggaaaacttaatctatactcccattcagaaagggggtgaatgggagatacccagcagtcactggtgc

SEQ ID NO: 312566 - DNA, 201 bp, Homo sapiens
atctcactcaattctgagtggagtgcagtggtgtgtgagcagagccttgggcactcttttgattgtaaaattttctctgtctgtgccaccttttaggcacrtatagttgaattcaaataaattgaatgttaaatgcacatgtagatatgataccactgcttttgcttatttaatattcaaaaactgaacacttctttgcac

SEQ ID NO: 312567 - DNA, 201 bp, Homo sapiens
tatagttgaattcaaataaattgaatgttaaatgcacatgtagatatgataccactgcttttgcttatttaatattcaaaaactgaacacttctttgcacrcatagcattcagcagcactctttctttctgtcctttagcattcccatggtttggcatggacatcggtggaacgctggttaaattggtgtatttcgagccg

SEQ ID NO: 312568 - DNA, 201 bp, Homo sapiens
caagacctgtcccttctctgggcctcattttgtcatctgcaaagaggtgggagtaagacttcagaactgaaagtgacctctggaggtgagaaagtatagcmttcttgtgctacgtagataagaaactaaagctgccagagagatcaaaagcttctagcagtgtcacctaggtaagggctgggacttggactcaattctgat

SEQ ID NO: 312569 - DNA, 201 bp, Homo sapiens
gggcctcccaaagtgctgggattacaggcgtgaaccaccgcgcctgtcttttttttttaagagatggattttcgctttgctgcccaggccagagtgcagcractattcacaggcatagtcgtagtacactacaaccttgacctcctgagttcaagagattctcctgcctcagctgcttcagaatctgggactacaggcaaa

SEQ ID NO: 312570 - DNA, 201 bp, Homo sapiens
ttttgtgtgtgtgggatagcctgcattttaatattttgtgtgtatatatgttaagtatgagccaattatcatgaaaattaatcagggcttgacttctaatrtatttaactacatatgctttaggtttaataggtaagccagtattcatcttgggaccttgggatgacaagtatttagtgtatccactgtggcatacagaat

SEQ ID NO: 312571 - DNA, 201 bp, Homo sapiens
tcagatgggcagcgagaagaacttctctagccttcacaccaccctctgtgccacaggaggcggggctttcaaattcgaagaggacttcagaatggtaggtygggtttgtctttgttaaaacatcaaaacctctcacatgtccataatcatggccactcataccgaagaaccatactactagccttgggactctggacaagc

SEQ ID NO: 312572 - DNA, 201 bp, Homo sapiens
taactttacattagatgtgatgtgatttgtaaaatgagacagtgcaaataagacgtcacttttatctctttcatatctgggattcagaattaagatggaayttttaaaagttccaatgctaaagaatttgaaaaaatctcactcttcatggtgtggaagaacactatgcccccaaactaaatgatcccaggcgaataaaat

SEQ ID NO: 312573 - DNA, 201 bp, Homo sapiens
ggaaatggagagtgtcagtaaattcagagtcccttattggagtttcttttttttttttgagacagagtctccctctgtcacccaggctggagtgcagtggygcaatcttggctcactgctacctccacctcccaggttcaagcaattctcgagcctcagcctcccaagtagctgggattacagacgtgcgccaccacacct

SEQ ID NO: 312574 - DNA, 201 bp, Homo sapiens
gactctctgattgcatctaaagtgaacactgagaatatgcctgcgttggagcctgaacagccttctcagctgcttcctgactttagagagttgagggctcyagaggttttttaggtcttgaacagttttcccagctgttttaggtgtgagattgcagtttctttggcagtacaattatttttcaaaagaaaatcggtttct

SEQ ID NO: 312575 - DNA, 201 bp, Homo sapiens
  misc_feature (1)...(201): n = A,T,C or G
gtagtcgcctatatcaccctgtacaatcctaagcctctgtggactctggctttggtttgttaccctatatcataactcagtctctatggccagtgaaaatngagtattcttgtaaccctcataatgtgttcctcagaaaattctctacattcttaaattccctctggcttacgcgggccttactagagaatattatggaga

SEQ ID NO: 312576 - DNA, 201 bp, Homo sapiens
tgccctggccttaggagtcctcactaaatttctcattcattcaactaatgttactgaacatctcttaagagaagtcatctagccaggtagttaagaacacygcgttttactgactgtgagatcttagacaatgactctgtctctccatttctgttttagcatttgtaaaatggggcaattatatttgtctcatagagttat

SEQ ID NO: 312577 - DNA, 201 bp, Homo sapiens
aaacagccccatggccatggtggggcagagggccttgtttttcagtgcacacaccccaaggcccatgtaagagccaaggggctcagcttcctgttaacggrtattcaacatgggaaaaacatctagggtcagatctctctaagacatcacagtgtaaacaaaactaaataggttttccttaattctaggaggaggatttga

SEQ ID NO: 312578 - DNA, 201 bp, Homo sapiens
atgatgaattgactcttttatccttagaaatgttcatctttattcttaataacattctttactccaagtatattttgtctactttaagccattccagcttwattattattattattattattattattattattattattattattttgagaagcagtttcgctcttgttgcccaagctagagtgcaatggcgctatctcg

SEQ ID NO: 312579 - DNA, 201 bp, Homo sapiens
tgattttttttttttttcccagaatgggttttgagttctggtatgtctgaagtgacttctgaatcaggatttgcatgcattgcctaaagtaaaggcttaamatcaaattgccttaaagtaaattaggagttaatctttctctcatgtgaaatgatccccaaagcaggcaatgtaggatgactatgatggctccatggtgtc

SEQ ID NO: 312580 - DNA, 201 bp, Homo sapiens
ccctccaacctttgcatcccctctccccagcctttctggaaaccactgtgctttttctggcatctctgctgttcccactgcctcaatgtgaacctctgggkaattcctgttcctcctttgatacccagctaagatgtcacctactgaggctgagttcatgcctccatcaaggcacctgtcacacccaatgtagtgcttcca

SEQ ID NO: 312581 - DNA, 201 bp, Homo sapiens
actgtctcagcacatcacctcattgtcataagatggctgctgcgaaaggtgcaccctgcctgccactgcccgtgcccacatggggcctgggaaccaatctrccccacccgctgcagctaccaccacctgcacgcactgtccagggaccagacatgccccacccactgccagcacccgtgcgcatcatctaggggcctgagg

SEQ ID NO: 312582 - DNA, 201 bp, Homo sapiens
gaaaagatagactctaatacagtaatagctggggacttcaacaccccactctcagcactggacagatcatctagacagaaaatcatcacagaaacattggmtttaactacactttagaccgtatagacctaatagacatttacagaacttttcatctaatagctgcagaacatacattcttctcatcagcacatgaaagat

SEQ ID NO: 312583 - DNA, 201 bp, Homo sapiens
caaagaggtctgtctgatttcttgttcctgagggccacctgcccccacctcccatggttgagtcccctcaacatgccctgcttcccctgggccttggcacrtgctgttccctctcttggaagcgctctccctgcttttcccctggagaacacacctcctcctcccactcctcttctagaaagggcttctcagatccctaaa

SEQ ID NO: 312584 - DNA, 201 bp, Homo sapiens
aaaaaaaaaaaaaaaaaaaaaaaagacgtgtgactatattaaatgtgactatattaaactaaaaaggttccgcacagcaaaagaaactatcaacagaataragagacaacttgttaaatgggagaaagaatttacaaaccactcatctgacaaggaacacaacagcaaaaaaaagaaaagcaaataattccattaaaaagt

SEQ ID NO: 312585 - DNA, 201 bp, Homo sapiens
cccgcctcggcctcccaaagtgctgggattacaggcatgagccaccgtgcccggcagaactcccttcctttttaagacttactaatgttccattgtaagcrtcggtcccattttgcatattcatatatctgtccatgggtacctgggttgcttctaccgtttgtctattttgaataatgctgctatgaggatgggtacaca

SEQ ID NO: 312586 - DNA, 201 bp, Homo sapiens
tcagctcactgcaacctccgcctccccagttcaaacagttctcctgcctcagcctccagagtagctgggattacaggtgtgcaccaccacacctggctaatttttttttttttttgtatttttagtagagacggggttttgccatgttggccaggctggtctcaaactcctggcctgaagtgatccacccatcttggcatc

SEQ ID NO: 312587 - DNA, 201 bp, Homo sapiens
tttattatatgtctgaaaaagaattcaaaataatgatattaaactctgagatacaagagaacacagataaaaatgcaaagaaatcaggaaaacaattcatsacctgaatgagaaattcaacagagagacagatagatgtaaaagagaaacaaacagaaatcttaaaactgaggaattcagtgaatagaataaaaatataat

SEQ ID NO: 312588 - DNA, 201 bp, Homo sapiens
gccaccgcctagctccaataccgtttcctcatcccaaaatatgaccccaagcccatcaagcagccgctccccaccccccaccctctttcccgcatcacgtrtgtgtctcctacagactcttcggccaaggcttggtgtccgaatgcaactatgagcgctggcacaagcagcggagagtcatagacctggccttcagccgga

SEQ ID NO: 312589 - DNA, 201 bp, Homo sapiens
aacattacagatttttatgaaccactatacactaacgattggaaaacttaaaagaaatggaattcctggacacatacaccctgccaagatgattgaacaargaagaaatagaaaacctgaacagaccaatggtgagtaatgagattgaaatactaataaaaagtcttccaacaaagaaaagcccgtgaccagatgtcttta

SEQ ID NO: 312590 - DNA, 201 bp, Homo sapiens
tctgggcagagggtcgggccccgggatgcctcgagaactgcagcgttcttgcagagcgagggtcctcctgctcccctagcacctcgcctgaccacgtgggyacctggccagcccatcatcaagctgcaccctccaccctctccatttccagctcgctgtctgaggggcccccaaactcaccactcactttgagaatggtat

SEQ ID NO: 312591 - DNA, 201 bp, Homo sapiens
ttggcatcacaaagtgctgggattacaggtgtgagccactgctcctggcctccgtctccagacctttttcatcttcccaaactgaaaatctgtccgttctygcctccccatccctggtaaccaccattccacttctgtctctgtgtgtttgtctattctaggtgacttatgtaagtggactcatacagtatttgtcttttt

SEQ ID NO: 312592 - DNA, 201 bp, Homo sapiens
accctttcatctcggctgtcctatataatacggttaataacagactgatcagccatgtggggaggttggaggggtgaagcctagcgtggtggtgcccagcmtggtcagtattggggaatatctgagggtgatcccacacaatattattgagtcctttctatctgccagcccccaacttctgtgccagggagacaggaaaaa

SEQ ID NO: 312593 - DNA, 201 bp, Homo sapiens
ccagcccttcctcttccccgtactctgttctctttttctcctatcaccctctgacattgtctttacttgtttatttactctccgcctttccctgggagaaygtgattttgttgtcacccattggggatgctgcattgagcttggtaggaataaagtcatacaggagacaggaagtcatgggccccttggaatgagcttcag

SEQ ID NO: 312594 - DNA, 201 bp, Homo sapiens
ttttccaaagtggctgcaccaacttggatgcccagtagtggtgagagagagcacctgctgttcttcatcatctccagcacttagcatggtccgattttgtrtctgctgccatccaaatatgtgtttttaaaaaagtatttcactgtggtcttgatttatgctttcctgattactaactagtaagcgtgagcatctgaccct

SEQ ID NO: 312595 - DNA, 201 bp, Homo sapiens
cgggaggcgcgccgggcgggaacgcgcagctctggcgggaagtgcgtggggtcggggggctcgggcggggtgcaggctgctgctgccaccggggaggcccrggggatgccctcactaagcggctccagagactgcgggccccgccctgccctgccactccctctcttgtgacctcggccagtggcagccttttctgagcct

SEQ ID NO: 312596 - DNA, 201 bp, Homo sapiens
tggggttgccatttttgtgagtttggagtgcattcttccatatctctttctaagctctgtgcctgggagggagccctgtgggttgggagctctggggtgcraatggtatctgaggactcatttccacatagagttggacaccatgattgctcaaggacaggcagtgaagtgggaaaacaaaatgctgcagctggtgcccag

SEQ ID NO: 312597 - DNA, 201 bp, Homo sapiens
agccaaaatatagaatcaacctaagcatccatcaacagataaatggataaagaaaatttggtgtagctgggtgtggcggttcatgcctgtaatcccagcamtttggaaggccaaggcaggtagatcccctgaggtcaggagttcaaaaccagcctttcacatggtgaaaccccatctctactaaaaatacaaaaaattagc

SEQ ID NO: 312598 - DNA, 201 bp, Homo sapiens
gtgatcctccggcctcagcctttcaagtagctggggctacaggagtgtgccaccatgcccagctagtttttatttttattttttgcagagacggagtcttgctgtgttgtccaggctggtctggaactcatggccgcaagcaatcctcctgctctcgccttccaaagtattggggttataggcatgagcccctggccctgg

SEQ ID NO: 312599 - DNA, 201 bp, Homo sapiens
caacctccgcctccccagttcaaacagttctcctgcctcagcctccagagtagctgggattacaggtgtgcaccaccacacctggctaatttttttttttktttgtatttttagtagagacggggttttgccatgttggccaggctggtctcaaactcctggcctgaagtgatccacccatcttggcatcacaaagtgctg

SEQ ID NO: 312600 - DNA, 201 bp, Homo sapiens
cctggccaacatggtgaaaccctgtctctactaaaaatacaaaaattagctgagcgtgctggtgggtgcctgtaatcccagctacttgggaggctgaggcrggagaattgcttgaatcctggggggagggcggaggttgcagtgagccgagatcacaccactgcactccagcctgggcgacagagcaagactttgtctcaa

SEQ ID NO: 312601 - DNA, 201 bp, Homo sapiens
acctccgcctccccagttcaaacagttctcctgcctcagcctccagagtagctgggattacaggtgtgcaccaccacacctggctaatttttttttttttktgtatttttagtagagacggggttttgccatgttggccaggctggtctcaaactcctggcctgaagtgatccacccatcttggcatcacaaagtgctggg

SEQ ID NO: 312602 - DNA, 201 bp, Homo sapiens
tttttttttttttttttaagacagagtctcactctgtcgcccaggctgcagtgcagtggcacaatctcagctcactgcaagctccacctcccgggttcacrccattcttctgcctcagcctcccaagtagctgggactataggtgcacgccaccatgcctggctaattttttttgtatttttagtagagacggggcttcac

SEQ ID NO: 312603 - DNA, 201 bp, Homo sapiens
cggggcttcacgggttagccaggatggtcttgatctcctgacctcatgatccacccgcctcggcctcccaaagtgctgggattacaggcatgagccaccgygcccggcagaactcccttcctttttaagacttactaatgttccattgtaagcgtcggtcccattttgcatattcatatatctgtccatgggtacctgggt

SEQ ID NO: 312604 - DNA, 201 bp, Homo sapiens
tgtgtgtgcctgtgtgcattcacgcagtaatatattgtaggacttgttttttgactcagtataaagttggtaagatttgtgtaggtttctccacaaggccrtaggacaaccaccatcgctgatcagttctcaggtgacaggcatttgagaggtgtccagtttgtccctatctcgagcaccacagcaacgatgccatttctg

SEQ ID NO: 312605 - DNA, 201 bp, Homo sapiens
gacccctgattcctggtcccagctctgccattgtggccttgcacactcccttctccttctggacctcagtttctccatctgtcacgtgacggtgaggctgmtgtcccaggggcctgggacccaggccagggtgagggtatgcactcagcctgtgggtgggaaagacaggggtcccaggcatgccgccggccggcatgatct

SEQ ID NO: 312606 - DNA, 201 bp, Homo sapiens; identical to SEQ ID NO: 65222

SEQ ID NO: 312607 - DNA, 201 bp, Homo sapiens
gggcaggtaaggagagcaggcaacgggagtagagggcaggaggggaaccgggattgccctctcatggactgtaggaggcccaaagtttctacactgtcacrtccctttgaggtcagggctgaagggccacagtgaccaacagagtacctgtggaactgttaggacaagagcaagggaacagcatccatcctgagtggagga

SEQ ID NO: 312608 - DNA, 201 bp, Homo sapiens
tgctacctctaacaccacactgaccacactgtatcgtgagtgtccgttgacgtgaccaattgccctgccaggctgtcagcgcctcaagggtagggtctgcrtgtgatttgtctctgagccccctgtgcccacccagggcccggcacagagtcgatgctcaataaatgtgtgttgactgcatgaatgacctggaaccaggcc

SEQ ID NO: 312609 - DNA, 201 bp, Homo sapiens
aagttatttttaaaattccggtaaaactgacataacattcaccattttccccaccttagagggtacagtctagtggaattcagtgccttcacaatgtggcrcaaccgtcgccaccgcctagctccaataccgtttcctcatcccaaaatatgaccccaagcccatcaagcagccgctccccaccccccaccctctttcccg

SEQ ID NO: 312610 - DNA, 201 bp, Homo sapiens
ctttcactccaccacctacagctggccgctgagggagcattcacatgtgactctgtccccagggactccgatcttgccttaaagtcctccagggcctctgrggatgggggcacagccttcaccctcaccccctctaatccaacctctagtcaatagccaggatcagattctcagagaggggctgccctgcccagtgccaca

SEQ ID NO: 312611 - DNA, 201 bp, Homo sapiens
ctcggcagagtcagcggttcatgctttgcatgcaaagtgcccagcccctggctcaaagtctgtgttcatccagacctgggttaactactgtcttccttatkttgttcctgtggggacgcctggggctgctggcctcgtgattcctctctttccctgcaggccacggttcacctacttccccttctccctgggccaccgctc

SEQ ID NO: 312612 - DNA, 201 bp, Homo sapiens
ggccctggagcacccaagtaagtccctcctggagctgcccatgagtggggctggcgggagaaggacagacacagcggcctctggtctgagccagaggcacscactcagcccacatagccttccagatccctgtgaggtggttgtggaggaaatcacagctcagagaggttaagtaacttgcccaagtggcagagcaggggt

SEQ ID NO: 312613 - DNA, 201 bp, Homo sapiens
tgagtccaccaagggagtcaggattttattgttcacctaacgctgtagcccagttttgtttctacaatagctgcaagagattcagtgtttgtatgataacyggccacatactatctggataatcaacttaaatgagatttttttaaaaagacaactacaaatcatcttgcaaataaatatatacttgccaaccatgtaagc

SEQ ID NO: 312614 - DNA, 201 bp, Homo sapiens
taatattgataaatgataattgactatgttactgatttatgtgtttactatacttttaaacattcttttagaatgggttccttctacttacagattttttmaaagtttactatacaacagcctcaggcaggtccttcaggaggcatccagaagaaggcattattatcataggagatgacagctccatgcctgttattgccc

SEQ ID NO: 312615 - DNA, 201 bp, Homo sapiens
agaccagcctggccaacatggtgaaaccctgtctctactaaaaatacaaaaattagctgagcgtgctggtgggtgcctgtaatcccagctacttgggaggmtgaggcgggagaattgcttgaatcctggggggagggcggaggttgcagtgagccgagatcacaccactgcactccagcctgggcgacagagcaagacttt

SEQ ID NO: 312616 - DNA, 201 bp, Homo sapiens
gcacaccccggcctctgggcagagggtcgggccccgggatgcctcgagaactgcagcgttcttgcagagcgagggtcctcctgctcccctagcacctcgcytgaccacgtgggcacctggccagcccatcatcaagctgcaccctccaccctctccatttccagctcgctgtctgaggggcccccaaactcaccactcact

SEQ ID NO: 312617 - DNA, 201 bp, Homo sapiens
atcaacacagcacattttagaacattttcatcaccctcaaaagcagtcattcagccaggcgtggtggttcatgcctgtaatcccagcactttggggggccraggcaggcggatcacctgagatcaggagttcatgaccagcctagccaacatggagaaaccatatctttactaaagatacaaaaattagctgggtgtggtg

SEQ ID NO: 312618 - DNA, 201 bp, Homo sapiens
tcaaagagctccccaggtcaccccagtattcaacttaggttggaaactggccctttagtaaatggtgccgtatttgtgcttcccggctaggctggggttcyagatccttaagcttcccctggtggagtcaggctcagcagcgcctctccatgctgccgccgcacagcaggagggcttgcagcttctgctgtggctctctgg

SEQ ID NO: 312619 - DNA, 201 bp, Homo sapiens
aaagaaggagtgtttccaaccctattccatggctgtggaaactgaggcctgctgggggacatgactcggcaagtgagcaacagggcagagccttgcccccrgggctcctgggccccaggacagcactcttttggtagcatgcattgagcaccttctgggacgggaaacatcggtttctcagctgggcggggttggtgatgg

SEQ ID NO: 312620 - DNA, 201 bp, Homo sapiens
gtggaattcagtgccttcacaatgtggcgcaaccgtcgccaccgcctagctccaataccgtttcctcatcccaaaatatgaccccaagcccatcaagcagycgctccccaccccccaccctctttcccgcatcacgtgtgtgtctcctacagactcttcggccaaggcttggtgtccgaatgcaactatgagcgctggcac

SEQ ID NO: 312621 - DNA, 201 bp, Homo sapiens
gagcgctggcacaagcagcggagagtcatagacctggccttcagccggaggtgagtgtggccggaggctccgtggctcctgcctggccagaggcagtaggsgctgccgaagtgtaggtgggccttggggagggaagtgtccacccaagggggcctccctcagctgaagggagagaggaaaaaggggaaagacagggtgtta

SEQ ID NO: 312622 - DNA, 201 bp, Homo sapiens
gctgaagggagagaggaaaaaggggaaagacagggtgttaatagtcaaaagggagagagagagagacaggctgaccaagtggggatgaatgaggcccccaygcagtttgggaacatcaagggctgagtgcccacgatggccagaagcatgggggttcctgtcgtccaagagctccccacatcagacctcatcactccttgt

SEQ ID NO: 312623 - DNA, 201 bp, Homo sapiens
atctgtatgtaagatgagcataaaaacaacacccgcagccaggcgtggtggctcacacctgtaatctcagcaacttgggttgactgggcattgagtgaacygcagggtgcagctgtgcacctggcatttattgagcacctgctatgtgccgggcaccattcttagcacttcttatgtagaattgacactcttcacaacaaa

SEQ ID NO: 312624 - DNA, 201 bp, Homo sapiens
gagacaggctgaccaagtggggatgaatgaggcccccatgcagtttgggaacatcaagggctgagtgcccacgatggccagaagcatgggggttcctgtcstccaagagctccccacatcagacctcatcactccttgtcagggcttcttcttttattcatttgagtttttatgttttggtgatatagttgtgctttgtat

SEQ ID NO: 312625 - DNA, 201 bp, Homo sapiens
gtgtctaccatttactatgtgtgtaaccttgggtcagttttcaacctcagtttctccatctgtatgtaagatgagcataaaaacaacacccgcagccaggygtggtggctcacacctgtaatctcagcaacttgggttgactgggcattgagtgaactgcagggtgcagctgtgcacctggcatttattgagcacctgcta

SEQ ID NO: 312626 - DNA, 201 bp, Homo sapiens
ttgcacaggtgtatagcctaggagcaatagtctagaccatatggcctaggtgtgtagtaggctatactgtctaggtttgtgtaagtatactctatgctgtwcacacaatgaagacattccctaacaacacatttcttagaatgtatccttgtcgttaagtaacacatgactgtactttactttttaaataactattatgga

SEQ ID NO: 312627 - DNA, 201 bp, Homo sapiens
cccaggctgccccagactaatgacatcagagtcaaagagctccccaggtcaccccagtattcaacttaggttggaaactggccctttagtaaatggtgccrtatttgtgcttcccggctaggctggggttccagatccttaagcttcccctggtggagtcaggctcagcagcgcctctccatgctgccgccgcacagcagg

SEQ ID NO: 312628 - DNA, 201 bp, Homo sapiens
aaataatattataccacttcatctcagtctactgttaagatttttctctttatcactgatgtcagcaattgattatgatctgccttggtatactttatttsctgtacttttctttgttaattctatttgggatcctttgaatttcttagatatgtgggttccatgatcatattagtaatacatgttttatagttcttgtct

SEQ ID NO: 312629 - DNA, 201 bp, Homo sapiens
ttccctaacaacacatttcttagaatgtatccttgtcgttaagtaacacatgactgtactttactttttaaataactattatggaggtataattcacatamcatacagctcacccatttaaagtgtacgattcaatggcgttggtatattcatagaattctataaccatcaacacagcacattttagaacattttcatcac

SEQ ID NO: 312630 - DNA, 201 bp, Homo sapiens
ggggctgctcttggggctggcaaagaggtctgtctgatttcttgttcctgagggccacctgcccccacctcccatggttgagtcccctcaacatgccctgmttcccctgggccttggcacatgctgttccctctcttggaagcgctctccctgcttttcccctggagaacacacctcctcctcccactcctcttctagaaa

SEQ ID NO: 312631 - DNA, 201 bp, Homo sapiens
gagctcctgacctcaagtgatctgcccacctcagcctttcaaagtgctgggattacaggcgtgagccaccatgcccagcctccattccagctttcttatgyttagtgttgcatgttatatcttttttctgttatattacttttaacctatctgcatttttatatttaaaatgggtttcttatagatagcacacagttgatt

SEQ ID NO: 312632 - DNA, 201 bp, Homo sapiens
gtatattcatagaattctataaccatcaacacagcacattttagaacattttcatcaccctcaaaagcagtcattcagccaggcgtggtggttcatgcctrtaatcccagcactttggggggccaaggcaggcggatcacctgagatcaggagttcatgaccagcctagccaacatggagaaaccatatctttactaaaga

SEQ ID NO: 312633 - DNA, 201 bp, Homo sapiens
cccagtagactcagcagtgggcccagtaaccccaaaccccactttatgtgggggcggggcaggtcagggaactgcagtgtggggacagtgactggattcckctttatcacattgctattcctttatcatttttgctatccattcacttcactgtgaagctagtatagaatgaacacttaaggaaggttgcatttcagggga

SEQ ID NO: 312634 - DNA, 201 bp, Homo sapiens
accatccatctccagaactttttcatcttccctaactgaaactgtgtatcagttaaacaataactccccattcccctccccccagaccctggaaaccactrttctaccttctgtctccgtgaattggactactttatgtgcgtcatacatgtgtaatcatatggcatttgtcctttcgcatctgacttatttcacttagca

SEQ ID NO: 312635 - DNA, 201 bp, Homo sapiens
ttgtcccattgctggccatgttaagtttgcacagtggttgaggtggtgcctaccaggtttctccactgtgaagcaattcttgactatgtaatctgtggagractgtataaacatccttgccagaactcttgctacagcctcctcattggcctaccctcctcctgtctccctcctccaatgtatccactcaccatcctgaag

SEQ ID NO: 312636 - DNA, 201 bp, Homo sapiens
gcgggtcaacgtcttccacaaaacctcagtcatcgtcacgagtcctgagtcggttaaggtaggaggaagagtggtttccatgagggagttccctgcctttycttgggttgggggagtgaagcctggtcccagagactttggatgaatgttccagagccaggcgcatttcggctggtttcccaaagatccagaaaggaatgg

SEQ ID NO: 312637 - DNA, 201 bp, Homo sapiens
atcttaaccatttttaggtgtgcagttcagtggtattaaattcattcgcattattacgcaaccatcaccagatatttttattttttaatctcacaataagrtgttgtcttagagatgactgttctatagtaaatgccaaatttacaaggctttatgaaagaaactttagaagatgcctgtgtttatgaaagtattattgag

SEQ ID NO: 312638 - DNA, 201 bp, Homo sapiens
gcagctcccccaacccaatccagcacacagactcccagcctcaccttcccctagcccaggttactcccagccccagcagttcctcccctgagtggaggcargtgaggctggcttggaagccatgctctgccattcatccactgcaggaccttagaccagccgtcagaagctctctgagcctcagtttcctcatctgtaaac

SEQ ID NO: 312639 - DNA, 201 bp, Homo sapiens
gggtgatcccacacaatattattgagtcctttctatctgccagcccccaacttctgtgccagggagacaggaaaaaaaactgtttcttctccaagggggtstttggagctggtcagacctgggtttgcatcctgtcttcattcttactgcctggtgtccctgagccagtgctgtaacctccccatgcctcggtcctcctgt

SEQ ID NO: 312640 - DNA, 201 bp, Homo sapiens
ctggcgggtggtgcatctgatgagctttgggtgcccagctgagcactcgccaccctgcccctctggcatgagccacaatcatggtccctcaccctcacgcytacccctagtgggtagcccgctcctccactactggagcattcccttcatccctctgggtgacttcactgtgggctctccagatggcctctcctcgttcac

SEQ ID NO: 312641 - DNA, 201 bp, Homo sapiens
aggaccttagaccagccgtcagaagctctctgagcctcagtttcctcatctgtaaactgggtgggggggtgtgaccaggtaacagtcattgtttggtgtgwcacttttttacatttttcaaagtactttcaaagatgcgaatcatttgattcccaggacaaccttttgggacaatcaaagaaggagtgtttccaaccctat

SEQ ID NO: 312642 - DNA, 201 bp, Homo sapiens
gtcttgggggcctctgacctggtaatgcagctggcaattgtggggatgtgtgaagctggcctgtcagctccagagagcttggctgtgtgaatgcaggcatyccctcactcagaatttgtggggaggcctgcattagactggcacaagaagagatgctaagcagcttcattcatttgctcatcagatatttcctgaacatgg

SEQ ID NO: 312643 - DNA, 201 bp, Homo sapiens; identical to SEQ ID NO: 65221

SEQ ID NO: 312644 - DNA, 201 bp, Homo sapiens
ccctctgctgcactgacccccagcacagagagccaggggtggaacaggcttaggaggagattttgtcccagtgtttggaggccaaggacacagagtgagcrtcagccccactcaggaggcaccacacgtgcacgtggaaggctggtggggtctgcagttcctccactcccacccctgctgaagtaggccttgagttgaaga

SEQ ID NO: 312645 - DNA, 201 bp, Homo sapiens
cccatgacaggatcctttttatttttacctgtgaggaaggaggagccccagtccctgctcccagcccctctcctcccagggttctgccctgcctcctccascatccatccaagcctcatctgtggccactctgccatctgttttgccaagctttcttttttaatgctcctgtaccaataccactgtgccttaacagccatc

SEQ ID NO: 312646 - DNA, 201 bp, Homo sapiens
gcccatgacaggatcctttttatttttacctgtgaggaaggaggagccccagtccctgctcccagcccctctcctcccagggttctgccctgcctcctccwgcatccatccaagcctcatctgtggccactctgccatctgttttgccaagctttcttttttaatgctcctgtaccaataccactgtgccttaacagccat

SEQ ID NO: 312647 - DNA, 201 bp, Homo sapiens
ccgccgggaagccctgaagaggggcgaggaggttcctgccgacatcctcacacagattctgaaaggtgcaagggccccctctgcggactggggagggcggrgtgggccaggacgttccccaggtgatacatcgccactgactctgtttggcttaagaggagaaacacagttagttattttatgagccatggggaaagggag

SEQ ID NO: 312648 - DNA, 201 bp, Homo sapiens
tctgagatcaaggtgttggaggttggtttcttctgagggctcactccttggtgtgcagacagccaccttctccctgtgtctccacatggtcttccttctgygtgtctgtgtcctaatctcctcttataaggacaccaatcaggttggattagggcccatcctaagtacctcattttaagttaattacctcgttaaagacct

SEQ ID NO: 312649 - DNA, 201 bp, Homo sapiens
gttttcttgagtttgataattcacatatttcaagagatctgttcacttcacataatttgcttaaattattggcataaagttgttcatgagattttctttctttttttttttttaatgtctgtaggatctgtgatatgttccctctctcattcctgagagtagtaatttgggttttctttttttttttttttcttgatcagt

SEQ ID NO: 312650 - DNA, 201 bp, Homo sapiens
gagcattcagaatctgacctcttcttatcattgcctccgctgccctgctctgttctgagccctcgtcacctctcccagtccttccctgtcactagtgtccytgcttcctcccctaccctggttactctctgcactgctgcaaaacaatccattcaaacccaagtcagatcccatctctgctctgctcaaaaccctctagtg

SEQ ID NO: 312651 - DNA, 201 bp, Homo sapiens
aagttgttcatgagattttctttctttttttttttttaatgtctgtaggatctgtgatatgttccctctctcattcctgagagtagtaatttgggttttctttttttttttttttcttgatcagttcaccaaaaggtttatcaattttattcatctttccaaataagtagcttttagttttattggttttcttcattgttt

SEQ ID NO: 312652 - DNA, 201 bp, Homo sapiens
actgtacgtccacaggaaaatcacttcgcccctctgtgctgcattttccccatccccacacagctgatgttacttgaagatagggacgattgtgtgggatyatgcatgggaagtgggcacactgcggctgagactcagccaatggtgattatttggggcatgtctcagaagagcatcttgcagctactcatgggtgcatga

SEQ ID NO: 312653 - DNA, 201 bp, Homo sapiens
cttgcttagctcctctgccttctactttacctggatgcttcttcccccagccttccaggtttggcttcaatgctaactcctcagggaggttcctcctgctyccccaaaaatattatgttcattttataaaccctgaaatcactgtaattttcctttacagcataatgttaattgggcaattatttgtgcaagtttttccta

SEQ ID NO: 312654 - DNA, 201 bp, Homo sapiens
gaattgactcttttatccttagaaatgttcatctttattcttaataacattctttactccaagtatattttgtctactttaagccattccagctttattawtattattattattattattattattattattattattattttgagaagcagtttcgctcttgttgcccaagctagagtgcaatggcgctatctcggctca

SEQ ID NO: 312655 - DNA, 201 bp, Homo sapiens
acattgtattcatgtatcaaaatatcacatgtaccccatatgtgtgtataattattatgtatcaattaaaatatatagatttttaaaaagatggctgctgyagctccacatatcacctccttattccaggcatgaagaaggaagaaaggggaaaggtgatagctgagttcatctcagggccccctcccgttccctgggact

SEQ ID NO: 312656 - DNA, 201 bp, Homo sapiens
aggtgggccttggggagggaagtgtccacccaagggggcctccctcagctgaagggagagaggaaaaaggggaaagacagggtgttaatagtcaaaagggrgagagagagagacaggctgaccaagtggggatgaatgaggcccccatgcagtttgggaacatcaagggctgagtgcccacgatggccagaagcatggggg

SEQ ID NO: 312657 - DNA, 201 bp, Homo sapiens
atcttgatccagtctccctggctgcttcatcttttctagaatttctcacattctactgacctcccagcttgccagtgccgctaacgtcatttcggggtggygggggagaggggagagggaacatgcgtgttcacttggccatctggagctgaaactcttgtttagttcctgccagggaagaggaagcagctccgggaggtc

SEQ ID NO: 312658 - DNA, 201 bp, Homo sapiens
acctgctgccaggcatgtgcgtcggctagttgggcaatgaaaagctggttactattttagtttttcttctcccattctctctctcttttttagagacaggktctcactctttcacccagactggagtgcaatggtgtgaccatagcttactctaaccttgacctcctgggctcaagtgatcctccggcctcagcctttcaa

SEQ ID NO: 312659 - DNA, 201 bp, Homo sapiens
tggaccatggatccctcaaacccaactctttgggattttttgggctatctgagcagagctcaccgcagggctagggggctgggctgaagggagcagaagcmccatctcctagctgtcttgggggcctctgacctggtaatgcagctggcaattgtggggatgtgtgaagctggcctgtcagctccagagagcttggctgtg

SEQ ID NO: 312660 - DNA, 201 bp, Homo sapiens
aaccaatggctggtcctcattcctgcagctgggaacccaggtcctggatgaggcttctggacagacctagcctcagtctcctcatctgtaaaatgggggcyttgaggagctctccaggcttctatccagccttccagagagggtttattaatcccgtctcgtccctccagtctatccctgagccctgcgtccagatgctat

SEQ ID NO: 312661 - DNA, 201 bp, Homo sapiens
ttggccagaccctgccagaactcaaaatcagcctcccgaaatgtccaccaccccctcatagaacctcagggtcatggggggcttttgtgtgcaccctgcabcctgggaaggcgaggccttgggctcacggactttgaattgtgtcccccccactctccctgctgtgtgaccacagagacccattcctctccacctccactt

SEQ ID NO: 312662 - DNA, 201 bp, Homo sapiens
tgccagaactcaaaatcagcctcccgaaatgtccaccaccccctcatagaacctcagggtcatggggggcttttgtgtgcaccctgcatcctgggaaggcraggccttgggctcacggactttgaattgtgtcccccccactctccctgctgtgtgaccacagagacccattcctctccacctccactttctcttctccaa

SEQ ID NO: 312663 - DNA, 201 bp, Homo sapiens
ccctaaaggagccaccccacgtttcccctccgagcctgctcccgactcatgagtgtgtttccctgggattgtttcatgtctatttcagccatgagaccagragctccaggagggcagggaccgtggttttttccctccccacagcgtacccagtgcctggccagggcctggcagtgaggatggagcagaatccctgctaaa

SEQ ID NO: 312664 - DNA, 201 bp, Homo sapiens
aaaggcccctggaacaggaaggcaatgttataggtggaggtcagcgagaagcagactccagctcttaagctcaggtgaagattttcatccccctcctaagrgcaacagcatgcttcaaagtgttttatgttgcaaagggaccagatgagagtggagagccccaggctcacctgctgccaggcatgtgcgtcggctagttgg

SEQ ID NO: 312665 - DNA, 201 bp, Homo sapiens
gagggtgtccctggggaggtggtatttgagtcgggccattggtttccttaaatacaaacaggctccctctgggacagttgcatggagtggctgaagcaagkgtcaaagctctctgaatgcaccaacaggctgggtgggagctctggggaggtggggtcaggccttcaattacaattattagtcatcagcagcatataaggg

SEQ ID NO: 312666 - DNA, 201 bp, Homo sapiens
agcagactccagctcttaagctcaggtgaagattttcatccccctcctaagagcaacagcatgcttcaaagtgttttatgttgcaaagggaccagatgagwgtggagagccccaggctcacctgctgccaggcatgtgcgtcggctagttgggcaatgaaaagctggttactattttagtttttcttctcccattctctct

SEQ ID NO: 312667 - DNA, 201 bp, Homo sapiens
aaattttcagatacgtttcaagaataagaataggacaaagaatacccatgtactctttactcagattaatattaaaagattaacatttctaggtccgggtrcagtggctcacacctgtaatcccagcactttgggaggccaaggtgggtggatcatgaggtcaggagtttgagaccagcctggccaacatggtgaaaccct

SEQ ID NO: 312668 - DNA, 201 bp, Homo sapiens
ggagcctgagacagaaaaattgcttgaacccaggaggcagaggttgcagtgagccgagattgcaccactgcattccaacctgcatgacagagcaagactcygtctatggaaaaataaataaataaaaataacatttcttttaattataaaagcagcattttctcttagcaaaatttcagaaacatgtaatgtacaaaatgg

SEQ ID NO: 312669 - DNA, 201 bp, Homo sapiens
gaaccgggattgccctctcatggactgtaggaggcccaaagtttctacactgtcacgtccctttgaggtcagggctgaagggccacagtgaccaacagagkacctgtggaactgttaggacaagagcaagggaacagcatccatcctgagtggaggagaatggtgaaaccccagggtgtagttcagttactacaactccaa

SEQ ID NO: 312670 - DNA, 201 bp, Homo sapiens
ccagggtgtagttcagttactacaactccaacctgcaatctgggtctcaaggggaggccagaaagactgggagggaccacccaccttcactctgcacagtrtcctctctgtggagagggagggcacatggcagtccaccatattgggctggccagtggccgttgatgcctgtgctgtttctccagctccttggttagctta

SEQ ID NO: 312671 - DNA, 201 bp, Homo sapiens
aacctccttcagtgattttttttttttttcccagaatgggttttgagttctggtatgtctgaagtgacttctgaatcaggatttgcatgcattgcctaaartaaaggcttaaaatcaaattgccttaaagtaaattaggagttaatctttctctcatgtgaaatgatccccaaagcaggcaatgtaggatgactatgatgg

SEQ ID NO: 312672 - DNA, 201 bp, Homo sapiens
ccacagcaacgatgccatttctgtccgcatgtccaggaacagtgtgcaagccagctcctcggacatttacccagaagtgagagggctgggttgtaggaccyctgactgttcagctttacaaacgaacgccacattgttttccaaagtggctgcaccaacttggatgcccagtagtggtgagagagagcacctgctgttctt

SEQ ID NO: 312673 - DNA, 201 bp, Homo sapiens
agcatgccatctggaggcctggggattggcttgccctgcctaatgtaggtagtgcctgtgtgcaatattggaggacacctgaggataggcccatccctccygctactgctggcgcccacatatgccatccaagggcctgagcacaggcccatcctacccactgttgccaccagtgatgctcaaggactggcctgcctggca

SEQ ID NO: 312674 - DNA, 201 bp, Homo sapiens
ccaccagtgatgctcaaggactggcctgcctggcatctccatcctcagcaaagcctcaggatggcctccactaacaatgacagtctaagccactgagaaastcagagataccactgacactgattacagctgaagaaattaaacagaaactatgttactgtgccaatccataatcaagccaaagcaccctacccacccaac

SEQ ID NO: 312675 - DNA, 201 bp, Homo sapiens
ggcagaactcccttcctttttaagacttactaatgttccattgtaagcgtcggtcccattttgcatattcatatatctgtccatgggtacctgggttgctyctaccgtttgtctattttgaataatgctgctatgaggatgggtacacaaatatctttttaagtccctgctttcagttgttttgggtttatactcagaagt

SEQ ID NO: 312676 - DNA, 201 bp, Homo sapiens
tcaaaaacagggagatttgaaatgtttccaacacaaatgataaatgtttgaggtgatgaatatcctaaatatgctgatttgaccattgcacattgtattcrtgtatcaaaatatcacatgtaccccatatgtgtgtataattattatgtatcaattaaaatatatagatttttaaaaagatggctgctgcagctccacata

SEQ ID NO: 312677 - DNA, 201 bp, Homo sapiens
gtggaggtcagcgagaagcagactccagctcttaagctcaggtgaagattttcatccccctcctaagagcaacagcatgcttcaaagtgttttatgttgcmaagggaccagatgagagtggagagccccaggctcacctgctgccaggcatgtgcgtcggctagttgggcaatgaaaagctggttactattttagtttttc

SEQ ID NO: 312678 - DNA, 201 bp, Homo sapiens
gtagatggttcttcagtttgaatttgtcagctgtctctctgcactgttagactcaggctatccctctttggtggtaatgctacagagtgatgctgtgtccyctgtggggcattgtatcaggaggcacatgctactgatttgtcccattgctggccatgttaagtttgcacagtggttgaggtggtgcctaccaggtttctc

SEQ ID NO: 312679 - DNA, 201 bp, Homo sapiens
atttttgctatccattcacttcactgtgaagctagtatagaatgaacacttaaggaaggttgcatttcaggggaaatgcatcttgtcaaggaagaaagccwagtttattgagtagctactatgagctacttcatcctcatagcattccatggggatcaaattatcatgggtcattgtaagcagctgatgatatgatgcata

SEQ ID NO: 312680 - DNA, 201 bp, Homo sapiens
catcttccctaactgaaactgtgtatcagttaaacaataactccccattcccctccccccagaccctggaaaccactattctaccttctgtctccgtgaaytggactactttatgtgcgtcatacatgtgtaatcatatggcatttgtcctttcgcatctgacttatttcacttagcataatgtttccaaagtgaattaat

SEQ ID NO: 312681 - DNA, 201 bp, Homo sapiens
cgtcccgcaacactctggcaaaggtactgcctcagcaccccctctggtgaccagccaccagagctgttgtcttcatttgctgaagaacctccttcagtgattttttttttttttcccagaatgggttttgagttctggtatgtctgaagtgacttctgaatcaggatttgcatgcattgcctaaagtaaaggcttaaaatc

SEQ ID NO: 312682 - DNA, 201 bp, Homo sapiens
tggctgtttttattttctgggttttccagtttttttttttttttgttttgtttttttgagacggagtctcgctctgtcccaggctggagtgcagtggcacsatctcggctcactgcaacctccacctcccaggttcaagcgatactcctgcctaagcctcctgaacagctgggactacaggcacgcgtcagcacgcccaga

SEQ ID NO: 312683 - DNA, 201 bp, Homo sapiens
ttataactggttttttgggagtgggggttggtagggagagattatggctgtttttattttctgggttttccagtttttttttttttttgttttgtttttttgagacggagtctcgctctgtcccaggctggagtgcagtggcacgatctcggctcactgcaacctccacctcccaggttcaagcgatactcctgcctaagc

SEQ ID NO: 312684 - DNA, 201 bp, Homo sapiens
caggagcattacgttcaaggatgcattctcaaacaccttgcaaaattcaagacaaaacccaataaagaatggcccatttctctcttacccaccaagtgacwgtttactgttaggaatccagctttgtgggctttttttttttttttaagggaaggtgtgttattacaaatttggctttcatgtgagacttgttcatatgtt

SEQ ID NO: 312685 - DNA, 201 bp, Homo sapiens
acccattactgtggctctgattggccagacttgggtcatgtgctgcttcttggaattgggagcagctgcacctaaccctcctggactgagagtcaagaggrgtggtttcccatagaaaaatccaggtgctgctcacagaagagggggctgtggatgctggcaggaaagcctcggatgctaagcatgtgggtgaaggcagat

SEQ ID NO: 312686 - DNA, 201 bp, Homo sapiens
caacatgttataactggttttttgggagtgggggttggtagggagagattatggctgtttttattttctgggttttccagtttttttttttttttgttttgtttttttgagacggagtctcgctctgtcccaggctggagtgcagtggcacgatctcggctcactgcaacctccacctcccaggttcaagcgatactcctg

SEQ ID NO: 312687 - DNA, 201 bp, Homo sapiens
cccgtcaacatgttataactggttttttgggagtgggggttggtagggagagattatggctgtttttattttctgggttttccagtttttttttttttttgttttgtttttttgagacggagtctcgctctgtcccaggctggagtgcagtggcacgatctcggctcactgcaacctccacctcccaggttcaagcgatac

SEQ ID NO: 312688 - DNA, 201 bp, Homo sapiens
ttcattccaacataagttcttgtgtatcatagcagaagtaaatgacagaaatgctgaacctttctagtttaatagaaacaatgtttaaatattctaagccrtggattataagtagaattaaaataagtgatccaaaacacaagtcatccctcactttatagctacatggcttagtcacatgcatatttcaatccagcctta

SEQ ID NO: 312689 - DNA, 201 bp, Homo sapiens
accaaaacaaaaccctgcccgcacatttgaggatggcacaggtcccagatctacaccttgaaacgaatagaagatacaagatatttgatataaaagaaaaygaaagtgccggaaacagaagttttctctctcaaactgacttcctccaacgtgcacagagaataacaacaggactcctaaggataaaaatagtgtttgctg

SEQ ID NO: 312690 - DNA, 201 bp, Homo sapiens
tgtataaatagtctttgatatttgaaaataaaactgacaagcatgtcatgcagaagaaatgtcagcttccaagtgttgaggagacatatttcaaaagtcarttttcagatatgttaatgttcgcaacaccctgattcatatgacattgacttttcattcattttttgctaaaatgccccattcagaaattcctgaatttcc

SEQ ID NO: 312691 - DNA, 201 bp, Homo sapiens
atatgttaatgttcgcaacaccctgattcatatgacattgacttttcattcattttttgctaaaatgccccattcagaaattcctgaatttcctatggccyttcttccacctgatttctctttgcaaggtctccttttctctcttgctgcctctttgtaacctcctacagccactctgaatctcattttctaacatccttt

SEQ ID NO: 312692 - DNA, 201 bp, Homo sapiens
agtcttgctctgttgcccgggttggagtgcagtggcacaatctcggctcactgcaacctccgcctcccaggtgcaagtgattctcctgcctcagcctcccragtagctgggactacggacacgcgccaccacaatcagctaatttttgtgtttttagtagagacggggtttcactatgttgaccaggatggtctctatctc

SEQ ID NO: 312693 - DNA, 201 bp, Homo sapiens
cttggcctcccaaaatgctgggattacaagcgtgagcaccgtgcctggcctccaatatattttttacaataagcatatatatatgtatgtgtgtgtgtgtrtatatatatatatatatatatatatatataagcatatatatgtgtgtgtgtgtgcatatatatatatatattttttttttttttgaggcagggtcttgtt

SEQ ID NO: 312694 - DNA, 201 bp, Homo sapiens
ggtctctatctcctgactttgtaatccgcctgccttggcctcccaaagtgctgggattacaggcatgagccaccacgtctggccaaaaatagattttttgraaaagaaattaaaagccttagcaaatatggaactgcttttcatggtaaagaaatttgacaagggttaggcaggaaggaaagaaccagaagcaccacttac

SEQ ID NO: 312695 - DNA, 201 bp, Homo sapiens
catagatatatagactttaattggatagagaaataaaaattattgtaggggacaaatctctagatacgaaatttagaaacctcaaatcctggctctgagcytccccagccatggggtatgggacaaggtcccctctctcccgactgattttaatatcctgataaatggcctatctgatgtgatcaccaaatgagataatgc

SEQ ID NO: 312696 - DNA, 201 bp, Homo sapiens
ctggcctgggctcagaggcctgacaattagttaagcttactctctgtgtcttgacccaaatcattgatgctgaggaagaaaatgcacgaccaggaaggttrgctctccacctttgcatctacctagccgtttaacacttgccaagttccattgttcaagcagcttgacacccaccagaggatactgtcatccttcctagac

SEQ ID NO: 312697 - DNA, 201 bp, Homo sapiens
gtatttgtcaggttgtggagacacaaaatagtggaagacatgagtcctgcaaacaaggagtttacagtcagacaggaaagtcaggaattgtacctttgtcrtcacctggaattaaaaaagtagcatagcatatattccaagtttgaacaagttttctttaaaaaaaaaaaaaagttagcatttgcctgctcattttttact

SEQ ID NO: 312698 - DNA, 201 bp, Homo sapiens
aataaaatagttgcctttttaagtcattacattttgggatcactggttatgcaacagtagataacgaaaacagactgactatatcagaatcaccaatggarcttgtcaaaatgcatattcctgggcctcaggtgcaattctccaggaattctgaagtctcataatgggacccagtaatctgaattttaacctagcttcctg

SEQ ID NO: 312699 - DNA, 201 bp, Homo sapiens
ccctgctctcagggacaccaaggaccaagctgggcacctgacagtcaagcactagttgaaggaggagaccctgaatcttcttccctgtaggagactgaggkaccaatgccagttctctcagaattgctataatttgttcaagacctcccaaacttagtccaaagcactaacaatcggtcatggccaagaaattaggagaag

SEQ ID NO: 312700 - DNA, 201 bp, Homo sapiens
ttctcttcctaaaaggggctactttgatcctcatccccaaggctggcccccgagctcttttcatggactgattttagtatccaggtatggtttcctttgtyatgcgtgttctatttccagttcatcatagttgagggcagcaagaaagatttccacagactcgcagtttccacccggcccagaatgcaattcgagagattt

SEQ ID NO: 312701 - DNA, 201 bp, Homo sapiens
tgactttttctgtgtcataaatttattttgtaaggaacagcgatgtgtaaccaaggatattttgtttcttaaaaaaaagtcaagaaccttctatgttgcamatcttaagcatagggcatagaaacaaaggtgattttttaaaaatgaagactaatatctaattgatttccattttatactgcttttgaaaattaggggtaa

SEQ ID NO: 312702 - DNA, 201 bp, Homo sapiens
ataatagcaagttcaaatattagagatgtatataacataaattttgagtctcctataattttatcctccaactacagacaactacttccaaattttttccrtacatatctgttattactattaatttttattgaaaatggatgcttatgcatttgtttaggtgagaagagactattcagatagcaccaacccaggcccccc

SEQ ID NO: 312703 - DNA, 201 bp, Homo sapiens
atattagagatgtatataacataaattttgagtctcctataattttatcctccaactacagacaactacttccaaattttttccgtacatatctgttattrctattaatttttattgaaaatggatgcttatgcatttgtttaggtgagaagagactattcagatagcaccaacccaggccccccgaagactccaccaatt

SEQ ID NO: 312704 - DNA, 201 bp, Homo sapiens
ggcaagtcacttagctttactgagcttcagtctcttcctttataatatgacataacgataatgccagcctcacaaaatggtcatgaagattagaacaacayacatgtaaagcgctgaacacaatgtgttgactatagcaggcatctaacgagtggtcgctattttcccgaacacatttatacacaaatctttcaaaatatt

SEQ ID NO: 312705 - DNA, 201 bp, Homo sapiens
cagtcctgctaatgttgtctttattgttcgtgcatctgacatgtaacccggaccactgttgccatactaattaatgtagagagaattcccttgcatggagrcctaaattctccacacctatggttaggtctagcatgtgtctttctccatcagatggaatgctcagaaaccttgaggaaagaggagagcttctgattttga

SEQ ID NO: 312706 - DNA, 201 bp, Homo sapiens
cagatagcaccaacccaggccccccgaagactccaccaattgctgtacaaaagatctcccagtatgcgtgtcagagaagaaccactttaaacaactgtaaycagatattcacggtaacgggactttacatcaacacccagggcaaacgaagggcttgcagcttctttctgtggaccgcaaattaaattataaatttttctg

SEQ ID NO: 312707 - DNA, 201 bp, Homo sapiens
gcaaataaaaatagctgccactttcctcctggagggtttttctaattatacttcatgagaggcaggatcaactaggaaaagaaagacaggaagaacagggraattattgcctgagggaaaaaatgcagaactgaagtctgtgagttaattccataacccagggcttttcagacatctgagtgccacagtcacgattcttgt

SEQ ID NO: 312708 - DNA, 201 bp, Homo sapiens
ccagaagacacttgctgccaagaaccaaacacagctgttcaggcaacagaggaagctggtgctcggtgaaaaaccaaaccaaaacaaaaccctgcccgcayatttgaggatggcacaggtcccagatctacaccttgaaacgaatagaagatacaagatatttgatataaaagaaaatgaaagtgccggaaacagaagttt

SEQ ID NO: 312709 - DNA, 201 bp, Homo sapiens
cacctgctcgttatattcaggagaaactaggtcaaagatttgcttatactttttcttcattgcctgagacctagaaagggtcatgactcggatgttataaygattatcttagagactgatggcatgcctttccctccattttagctctttacttctgtatttggagtggggctgaagacttctgagaagtggttcaggatg

SEQ ID NO: 312710 - DNA, 201 bp, Homo sapiens
gttctcttgcttataaaatgtacctatgtaagtgaacaggtggtaatacccaccatgaaatactatggagcagttagaagcaacagagcaattagaatacrgatctggaaaacatagttccaagtgaaataaaaaggtgattggcaaaatgagaaatgtaacaatgccatttatgtaaagtcaaaacaaccacaagcagaa

SEQ ID NO: 312711 - DNA, 201 bp, Homo sapiens
catctgacatgtaacccggaccactgttgccatactaattaatgtagagagaattcccttgcatggaggcctaaattctccacacctatggttaggtctarcatgtgtctttctccatcagatggaatgctcagaaaccttgaggaaagaggagagcttctgattttgaaagatgtttcagctggtaactctgtcttgcat

SEQ ID NO: 312712 - DNA, 201 bp, Homo sapiens
taagagtgtaggtggttaggggtcccagggttcctctttaacatacccttctccctctcagggttaggtaaaactctatttattgtaataatattataatwaataataatgtatcataagtataataatataataataatttttccctccaaaaggcagaaatatagatggaaaatatagatggaataacacttcctatta

SEQ ID NO: 312713 - DNA, 201 bp, Homo sapiens
aaatagattgattataagatctctcctgagcttctgatttcactggactggggtatggctcaagcttcaatgtttattttttaaactccatcaggttgttytaataaacagctgtggttcagaactacagcccgtaggaaaaatatccaaatggcttttgctgaatatgttaaagctgttatgattttactttaattcatt

SEQ ID NO: 312714 - DNA, 201 bp, Homo sapiens
gccctgtgccatcaggaactcccaccaagaatggcaactcgattgggcacatcttagaatcacttgtccactttctggataggcaactttaagtgaaacatgtgtcattaactttatcccactttctccaaggcaggtggactaacactctcatgagaaagagtctcccaagtgctacctagaaatagcaagtcatcttgc

SEQ ID NO: 312715 - DNA, 201 bp, Homo sapiens
tgccctgtgccatcaggaactcccaccaagaatggcaactcgattgggcacatcttagaatcacttgtccactttctggataggcaactttaagtgaaacatgtgtcattaactttatcccactttctccaaggcaggtggactaacactctcatgagaaagagtctcccaagtgctacctagaaatagcaagtcatcttg

SEQ ID NO: 312716 - DNA, 201 bp, Homo sapiens
gaatttggccctgggggaggaaaatcactttgagaatgtttagtggagttacatatttcactagagggatgtagccacctaatactgaagacattctagaygtgttaataatttattttaactatctcctatccagcagtttgagagagacctccggcgctatgccacacatgagcggaagatgattctggataaccatgc

SEQ ID NO: 312717 - DNA, 201 bp, Homo sapiens
gatccaaattactttgtatttcaaaatttgcggctttaaattaacaaaaaatttcttaatcccatttaaggtgggccaaaaaaaatcgaggcaagatcgtytcagtcataagtacagcagggctggagacagaaacctgtccttagtggtgctaggtgctagtaagagtttgcaataaaaccaaacaaaactgcatgatct

SEQ ID NO: 312718 - DNA, 201 bp, Homo sapiens
tcttcattttggagaagaaaatgggaaccacccgcagagcgttcctcatggagctggcccgcaggaaagggttcagggttgaaaatgagctcaggtaggasagcatcgatcttgctttgtaaataagcagaggctttgtgaacagcttcttgggaacccaaggaacctgtgttttcttccacatgtggaagaggtgatctt

SEQ ID NO: 312719 - DNA, 201 bp, Homo sapiens
taacaaaaaatttcttaatcccatttaaggtgggccaaaaaaaatcgaggcaagatcgtctcagtcataagtacagcagggctggagacagaaacctgtcyttagtggtgctaggtgctagtaagagtttgcaataaaaccaaacaaaactgcatgatctttctgttccaaggatactgaaacagatcagttgctaagtga

SEQ ID NO: 312720 - DNA, 201 bp, Homo sapiens
ttcattttggagaagaaaatgggaaccacccgcagagcgttcctcatggagctggcccgcaggaaagggttcagggttgaaaatgagctcaggtaggacarcatcgatcttgctttgtaaataagcagaggctttgtgaacagcttcttgggaacccaaggaacctgtgttttcttccacatgtggaagaggtgatcttcc

SEQ ID NO: 312721 - DNA, 201 bp, Homo sapiens
aagacactctacacatgctcctggcaaggcagttctaagctccagaagacacttgctgccaagaaccaaacacagctgttcaggcaacagaggaagctggwgctcggtgaaaaaccaaaccaaaacaaaaccctgcccgcacatttgaggatggcacaggtcccagatctacaccttgaaacgaatagaagatacaagata

SEQ ID NO: 312722 - DNA, 201 bp, Homo sapiens
ttctattgcacagtatggtgactatagttaataaaagtgtatatttcaaagtagctaaaagagaggatttttaatgttcttaccacaaagaaatggtagawgtttgaggtgatggacatgctaattagtctgattttatcattctgcaatgtatatagatgtatcaaaataccatattataacccacaaatgcatacaatt

SEQ ID NO: 312723 - DNA, 201 bp, Homo sapiens
cagccacaacgcttttggctggttaaacctggtcatcagtataatatgaagggacactgtctttgtccatttaccttgctataaaggaacacctgaggctsggtaatttataaagaaaagacgtttacttggcccatggttctgcaggatgtataagaagcacgacaccaagcatctgcttctggtgcggcctcagggggc

SEQ ID NO: 312724 - DNA, 201 bp, Homo sapiens
aagtttgaacaagttttctttaaaaaaaaaaaaaagttagcatttgcctgctcattttttacttttagtcttctagtattattttggtctagttttatctmaactggctgcttgccctttccattcagtcattatataatgtttgacatgtggattctgtctcactcattatcccaaaaccatcgcctccaaaagtccctg

SEQ ID NO: 312725 - DNA, 201 bp, Homo sapiens
cacccataattttgtatacagttaagtttaataaacattttggaataaagactagaagtcacaaataagctgctgttgtccatcagttccattgttctaactatcacttctcatgttgtagatgaaggtgaacccctgttataactaaaatatagaaatttcttgtacttgttaggcacccaacatatatagctaccaaat

SEQ ID NO: 312726 - DNA, 201 bp, Homo sapiens
cagcagcagcaaccttacccaggaacaggttagacatggaaattcttcaccccactccaaacctatggaatcaaatcagcatctctggggatttcagcccrgaaatttgtttggaaaaggcttctaggtgtttctgatgcagctcaagtaggagaaccactgaagtacagaaaccagcaaggggattgaaataggaaacaa

SEQ ID NO: 312727 - DNA, 201 bp, Homo sapiens
tcacccataattttgtatacagttaagtttaataaacattttggaataaagactagaagtcacaaataagctgctgttgtccatcagttccattgttctaactatcacttctcatgttgtagatgaaggtgaacccctgttataactaaaatatagaaatttcttgtacttgttaggcacccaacatatatagctaccaaa

SEQ ID NO: 312728 - DNA, 201 bp, Homo sapiens
taatgttcttaccacaaagaaatggtagatgtttgaggtgatggacatgctaattagtctgattttatcattctgcaatgtatatagatgtatcaaaataycatattataacccacaaatgcatacaattattatatgttaattaaaaataaaatcaagctataaaatttttctgaaagagcacaagttgagttcatccca

SEQ ID NO: 312729 - DNA, 201 bp, Homo sapiens
ccctccattttagctctttacttctgtatttggagtggggctgaagacttctgagaagtggttcaggatgggtttcagaactctgagtaaagtaaggtcgsacaaaagcctgaaatttacacgaatgcagaaagcaggtaaattgtctctcctaaaagtcattgttgctatgggctggtcgggtcgtggtggagctctaag

SEQ ID NO: 312730 - DNA, 201 bp, Homo sapiens
ctccattttagctctttacttctgtatttggagtggggctgaagacttctgagaagtggttcaggatgggtttcagaactctgagtaaagtaaggtcggamaaaagcctgaaatttacacgaatgcagaaagcaggtaaattgtctctcctaaaagtcattgttgctatgggctggtcgggtcgtggtggagctctaagtc

SEQ ID NO: 312731 - DNA, 201 bp, Homo sapiens
ccaagtgctacctagaaatagcaagtcatcttgccccaaagttagactcagcctccagccacaacgcttttggctggttaaacctggtcatcagtataatrtgaagggacactgtctttgtccatttaccttgctataaaggaacacctgaggctcggtaatttataaagaaaagacgtttacttggcccatggttctgca

SEQ ID NO: 312732 - DNA, 201 bp, Homo sapiens
cccatttttagatggggatgatcatatctatctcatggcattattgataattaaatgaagtgatgtataaagtgtgcctaccagagtgtctagcatatagkaatattctaatattgttaacatttccagtattggagtgttcagagcagagagaaaaccactgtaccagcaaatagacaaacagctgccacaagatagtga

SEQ ID NO: 312733 - DNA, 201 bp, Homo sapiens
ggttgtttcacacacgtgtcactctctccattgacctgtcaaatggcctctcaggatttctgtattatgaagaccttgtcagctgtgtgaccagggcagamgcagaggccgtcagtgtgctggttaaagaggctgtctgggcatttcttccggatgctttcgtcaccatgacaggagggttccggaggtaaataacttggg

SEQ ID NO: 312734 - DNA, 201 bp, Homo sapiens
tctaccaaaagtgccattactttactgtgattaatatgctggagtaatatttgactccctccctgaattcatctttcataggtgagctgatgcagatgtcyaccatatttctcctctgcttttctgtgccagactgggttaaaatcatctcacacttacacaatcatttcatcttcctaagtagttccgcaaccctcccta

SEQ ID NO: 312735 - DNA, 201 bp, Homo sapiens
cacttgacctctctgttcctcagtttcctcatttttgaagtgtgaatgatgtaacacttattgaggagctaaatgagatgatgtaggtaaagcacatggcyaatgccttaaacatggtaagtgcttagtacctgttaagaaaaagatccctgtccatgcttcgaaaacatgtaaatcaaaatttcttgaaggctggttata

SEQ ID NO: 312736 - DNA, 201 bp, Homo sapiens
atgtaacacttattgaggagctaaatgagatgatgtaggtaaagcacatggctaatgccttaaacatggtaagtgcttagtacctgttaagaaaaagatcyctgtccatgcttcgaaaacatgtaaatcaaaatttcttgaaggctggttataaataattaatttattattaataataaactgtgagatcatttaatgggg

SEQ ID NO: 312737 - DNA, 201 bp, Homo sapiens
gcatgagcatgagatataagcttttttcttgctctgatccaaattactttgtatttcaaaatttgcggctttaaattaacaaaaaatttcttaatcccatktaaggtgggccaaaaaaaatcgaggcaagatcgtctcagtcataagtacagcagggctggagacagaaacctgtccttagtggtgctaggtgctagtaag

SEQ ID NO: 312738 - DNA, 201 bp, Homo sapiens
gtaagtgcttagtacctgttaagaaaaagatccctgtccatgcttcgaaaacatgtaaatcaaaatttcttgaaggctggttataaataattaatttattrttaataataaactgtgagatcatttaatggggtgtttctatggtctgaatatttgtgtcaccccaaaattcataaattgaaacctaatccccaaagcgat

SEQ ID NO: 312739 - DNA, 201 bp, Homo sapiens
ctctccctgggaagaagacagcaggtgaccatccatgaggatccagaaagtcagacagagggtgggaaggagtctatacccaggcaaataaaaatagctgycactttcctcctggagggtttttctaattatacttcatgagaggcaggatcaactaggaaaagaaagacaggaagaacagggaaattattgcctgaggga

SEQ ID NO: 312740 - DNA, 201 bp, Homo sapiens
gctataaaatttttctgaaagagcacaagttgagttcatcccagacctggttgcaagctcctgctctgcttcttgctgttgggtgatcttggacaagttcyctatatcctgtaaaactcaattttcccgtcaggaaaatgaggacgatgaccttagctacttccctgagttgcagagacattaggtgacatgatgttctca

SEQ ID NO: 312741 - DNA, 201 bp, Homo sapiens
gaatgtttaatagcagtgtactccaagtttccgcataatgcactctggtacctgtcttttcaattcaactctactccatgacaccagagaggcatacaagkgtatgggagaccccatcctgacctagaaggaaacacgcaagtggtattccaatatttaaaggagagcaagaggcgtttgtgagtgaccactggctcaggg

SEQ ID NO: 312742 - DNA, 201 bp, Homo sapiens
aagagacccaagtgggcaacttggaggacaagtgcagcgtttgaccttttgacttggggtatatgttggcatacttctggggtcctgcgtcacttttcccrtgattcttcccttagggtgagccacccgcatgcacagtgccctccttgtgcttgggaggggagcatgtgcagtgtgtctactggagttgtatgcatgctc

SEQ ID NO: 312743 - DNA, 201 bp, Homo sapiens
taggtgtggtgaggcatgcctgtaattccagctacttgggagattgagacatgagaatcacttgagtctgggaggcagaggttgcagtgagctgagatcaygccactgtactccagcctgggtgatagagtgagactgtctcaaaaacaagacaaacaaaaagacactaatcccatcatgagagccccactctcatgacct

SEQ ID NO: 312744 - DNA, 201 bp, Homo sapiens
gttaccctgaaaaattcacaaccaggagaaccacatggactattctgtctctgtgggaatggagtttggtgttgatgcctgtagtcatgttagctctatcrtggggacagaatccccttctactgagggctggttgtttcacacacgtgtcactctctccattgacctgtcaaatggcctctcaggatttctgtattatga

SEQ ID NO: 312745 - DNA, 201 bp, Homo sapiens
tgtaggggacaaatctctagatacgaaatttagaaacctcaaatcctggctctgagcctccccagccatggggtatgggacaaggtcccctctctcccgaytgattttaatatcctgataaatggcctatctgatgtgatcaccaaatgagataatgcatgtcaatgtgctttgataaattaaaacagttagacaaatgta

SEQ ID NO: 312746 - DNA, 201 bp, Homo sapiens
gatattttgtttcttaaaaaaaagtcaagaaccttctatgttgcaaatcttaagcatagggcatagaaacaaaggtgattttttaaaaatgaagactaatrtctaattgatttccattttatactgcttttgaaaattaggggtaagaagatggggcatgatgtagattttttaattaccagcccaggatcaacagaggat

SEQ ID NO: 312747 - DNA, 201 bp, Homo sapiens
gccaaacacatgtccatgttctgctcgaatctgaaaagatttcattaagaatccagtgttaaatcatagatcttcttcatcagggccttttcctgatgccrttctgtttcttttcagggattacttttatattatgaccttgtggagtcaacatttgaaaagctcaggttgcctagcaggaaggttgatgctttggatcat

SEQ ID NO: 312748 - DNA, 201 bp, Homo sapiens
agcgttcctcatggagctggcccgcaggaaagggttcagggttgaaaatgagctcaggtaggacagcatcgatcttgctttgtaaataagcagaggctttrtgaacagcttcttgggaacccaaggaacctgtgttttcttccacatgtggaagaggtgatcttcccactgggagaacagcagatttgaaatcaaagaaca

SEQ ID NO: 312749 - DNA, 201 bp, Homo sapiens
atgctcagaaaccttgaggaaagaggagagcttctgattttgaaagatgtttcagctggtaactctgtcttgcattttgcagtgattctgtcacccacatygtagcagagaacaactcgggttcggatgttctggagtggcttcaagcacagaaagtacaagtcagctcacaaccagagctcctcgatgtctcctggctga

SEQ ID NO: 312750 - DNA, 201 bp, Homo sapiens
caactcgggttcggatgttctggagtggcttcaagcacagaaagtacaagtcagctcacaaccagagctcctcgatgtctcctggctgatcgaatgcatargagcagggaaaccggtggaaatgacaggaaaacaccagcttgttgtaagtgtcatgggtgtgattttcactgttctttgcttgatggttaagaacatagg

SEQ ID NO: 312751 - DNA, 201 bp, Homo sapiens
ttatctcctgcctctcacatttcatttcagcaaccccaaatggcttgtcatcccctgcacattcagagctgtttcttgcctgttgctttgcttactcagamttttctgctttgactgccattcctcaaattgtcgcttggctgacttcccctcattctttaacactcaatttagatggcaccttctccagaaagccttcct

SEQ ID NO: 312752 - DNA, 201 bp, Homo sapiens
atctacaatagggaagtggttatccatcttcctttaattcttgtagaatgttgctttgccatgacttatttctgtttaggcacatcctgccatccagatgrtctcagctctgaccccagcccacacctctctctgagcaccaacctcagatcccaactgtcaaccagatattttaatttggatctcctgctgtccttcaaa

SEQ ID NO: 312753 - DNA, 201 bp, Homo sapiens
cgaatgcagaaagcaggtaaattgtctctcctaaaagtcattgttgctatgggctggtcgggtcgtggtggagctctaagtcagttacactgcaactccartctgggagagctgggacacttctttgatgtccattgatgcttggatctaaatcctagctccagcagtttccagctgtgtgatcttgagcaagttggttaa

SEQ ID NO: 312754 - DNA, 201 bp, Homo sapiens
agctgtgtgatcttgagcaagttggttaaaacctttgaaccttagttacctaatctatgaaagagagataacattgatacttagctgagaagtcaatcagwtaatgcaggcaatgcctcagcactgtgtctgacacagagcaaaggcgccctccactgtggctgtttgtggtccttcacccaaatgtcaagccaggttgtg

SEQ ID NO: 312755 - DNA, 201 bp, Homo sapiens
tgaacagagttgttgcctggcacaaatgtgaagatgccctagaaactgtaaaacaccaggaaaatagaagggaactggtggaaatctaggcacagggttgrtatacccaaccaggactctttagcctaagacaagaccgtggtgggacatgagtgctgtcatcacccacctgaaagcctggcagggcctctcagaggttga

SEQ ID NO: 312756 - DNA, 201 bp, Homo sapiens
aataagttagtcgccttgccataccaaaaaggaaagccaattaaattactttcatggatgtcaacaaatcatcatagtcttacatgttcattcctgatagstgcacatcttcttaaagaaatagttgtgaatcctgacttttggatcgtgtatatcactgcataagcacaggtgtttgtggttacccagtgagttgtactt

SEQ ID NO: 312757 - DNA, 201 bp, Homo sapiens
gtttgacatgcagaggcattaaagcacccaatcaaagtgaaaagtatgcactatgaagacctgggaaatgtaagctggaaagctgcaagcttgggtgaggkggcaggactgcaaagactgggataaaatcagtctaagaggtgttgatagtgcctcgatagattcgaggcacttcgtgctgagatggaatgaaggaaacta

SEQ ID NO: 312758 - DNA, 201 bp, Homo sapiens
aggcaggagaatcacttgaacccgggaggcagaggctgcagtgagccgagatcacaccactgcactccagcctgggcaacagagtgagactctgtgtcagraaaaaaaaaaaaaaaaaaagtaatgatcatttccctctaggagcttgtagtctaaatgagatgtattcagttagagttgtctcagttacaaatgttagaa

SEQ ID NO: 312759 - DNA, 201 bp, Homo sapiens
tcttttattataatatatacgtaatctgtttattttgtttgtttatttgtttggggggagacagggccttgctctatcacccaggctggagtgcagtggcrcgatctcagctcactacaatctccacctcctgggttcaagcgattctcgtgcctcagcctcccgagtggctgggattacaggcacgtgccaccacaccca

SEQ ID NO: 312760 - DNA, 201 bp, Homo sapiens
ctaaagagtacatggtaacaaatcacacatcccagtagcttgatgacattatttgagggttacttgctgtttttgttgccagatttagtggttgctagcaygtttctctctcctgtccccacatctgccctgtgccatcaggaactcccaccaagaatggcaactcgattgggcacatcttagaatcacttgtccactttc

SEQ ID NO: 312761 - DNA, 201 bp, Homo sapiens
tgcctctcccagcttacaccatgtttttttccttctctgaacatggcagatcttcatgcctcatgtcttgtcataattcacatcataagccatctgtttcrtgtaacatactagtgtctagtaacttcctttttcttctttggtacccaacctcctcctactaccatcaccgccaccactatcacaaggaatctagggttg

SEQ ID NO: 312762 - DNA, 201 bp, Homo sapiens
acagaggaagctggtgctcggtgaaaaaccaaaccaaaacaaaaccctgcccgcacatttgaggatggcacaggtcccagatctacaccttgaaacgaatrgaagatacaagatatttgatataaaagaaaatgaaagtgccggaaacagaagttttctctctcaaactgacttcctccaacgtgcacagagaataacaac

SEQ ID NO: 312763 - DNA, 201 bp, Homo sapiens
agcctccagaactgtgagcaataagtttctgttgtttataaattactcagtctaaggtattttgttatagcagcctaaatggattaagacagttgcttaawccatgtaagcatagctacatctgtacctatttctatgtctactttggatcataatataaaacgtatttctaactgtgggtcactgtcaaacaagtttgaa

SEQ ID NO: 312764 - DNA, 201 bp, Homo sapiens
gctcaagtaggagaaccactgaagtacagaaaccagcaaggggattgaaataggaaacaattaataaagtggagaggcaactcacagattgggaaaaaatrtctgcacatcatacatcacataagggccattatccagcatatacaaggaaaccaaaagactcaataacaagaaaacaaataatcctatttaaaaatgggc

SEQ ID NO: 312765 - DNA, 201 bp, Homo sapiens
atattcctcaaagcagaaagtgaagaagaaatttttgcgcatctgggattggattatattgaaccgtgggaaagaaatgcctaggaaagtgttgtcaacawttttttcctattcttttcaagttaaataaattatgcttcatattagtaaaagatgccataggagagtttggggttatttaggtcttattgaaatgcagat

SEQ ID NO: 312766 - DNA, 201 bp, Homo sapiens
gcatcttagcactgggatttcttactctaatcacaaatgttgactgacaactaaatgcttttttcattcctaaaaaaaggggaagaaaagaaaaaatataycataaatgcaacttgtctgatagacataaatctttgggaacacatagttgattgagaaaggggaacgttccagaaagaagtccttggttatgcaatgtca

SEQ ID NO: 312767 - DNA, 201 bp, Homo sapiens
gatgctcattggccaggcctgggtcatgtgcctatccctgaacccattactgtggctctgattggccagacttgggtcatgtgctgcttcttggaattggragcagctgcacctaaccctcctggactgagagtcaagaggagtggtttcccatagaaaaatccaggtgctgctcacagaagagggggctgtggatgctgg

SEQ ID NO: 312768 - DNA, 201 bp, Homo sapiens
aggcaaggaggcgatagaagcatttggaccacctagattggttcactcactaatccactcaccttgaacagcaattattcttgttgtttttctaacttctrtgtaagctcttcactgatctcaaatagatgaagagaaaacaagcaaaatccagaaacaaatggtattagaaccttgacataagtgatggttctggattaa

SEQ ID NO: 312769 - DNA, 201 bp, Homo sapiens
tgcaaccactttcttagtgttttctcctagtgtttgcaggtgggcctttaatgcaaggccaaacacatgtccatgttctgctcgaatctgaaaagatttcwttaagaatccagtgttaaatcatagatcttcttcatcagggccttttcctgatgccattctgtttcttttcagggattacttttatattatgaccttgtg

SEQ ID NO: 312770 - DNA, 201 bp, Homo sapiens
tgattctggataaccatgctttatatgacaagaccaaggtacagttctcttcctaaaaggggctactttgatcctcatccccaaggctggcccccgagctyttttcatggactgattttagtatccaggtatggtttcctttgtcatgcgtgttctatttccagttcatcatagttgagggcagcaagaaagatttccaca

SEQ ID NO: 312771 - DNA, 201 bp, Homo sapiens
ttcagaagtggagagggagattttcttgcagttttgccattaagtggctttgcttcagcctctctcatcgctaaattccttttccgtaaagggaagataakgcaaccactttcttagtgttttctcctagtgtttgcaggtgggcctttaatgcaaggccaaacacatgtccatgttctgctcgaatctgaaaagatttca

SEQ ID NO: 312772 - DNA, 201 bp, Homo sapiens
gacaggcctattgcctggtggaggaaaccaaagtaagctaagctaaccctgcagccagagccacatgcaagccctgactcctgtccaactctagtgagagyctcacttcctagagagaccagagggtcctacccttgggacctgtagataggtctggctgggctggtgtttctcctcacagcttcctccttcctgagtagt

SEQ ID NO: 312773 - DNA, 201 bp, Homo sapiens
caaatgtgaagatgccctagaaactgtaaaacaccaggaaaatagaagggaactggtggaaatctaggcacagggttggtatacccaaccaggactctttmgcctaagacaagaccgtggtgggacatgagtgctgtcatcacccacctgaaagcctggcagggcctctcagaggttgaaggtagcctggtcacttccatt

SEQ ID NO: 312774 - DNA, 201 bp, Homo sapiens
tgtttcagctggtaactctgtcttgcattttgcagtgattctgtcacccacatcgtagcagagaacaactcgggttcggatgttctggagtggcttcaagyacagaaagtacaagtcagctcacaaccagagctcctcgatgtctcctggctgatcgaatgcataggagcagggaaaccggtggaaatgacaggaaaacac

SEQ ID NO: 312775 - DNA, 201 bp, Homo sapiens
aaacgaagggcttgcagcttctttctgtggaccgcaaattaaattataaatttttctgaaaacctgggaaagttttcctcccacctacctgcagccctagmctgatctctgatccttctatccttcttctttctatcgagactgggtctccttccttcctggaaatagacaaatacatttaggttatattctttagagaca

SEQ ID NO: 312776 - DNA, 201 bp, Homo sapiens
tgtgaagatgccctagaaactgtaaaacaccaggaaaatagaagggaactggtggaaatctaggcacagggttggtatacccaaccaggactctttagccwaagacaagaccgtggtgggacatgagtgctgtcatcacccacctgaaagcctggcagggcctctcagaggttgaaggtagcctggtcacttccatttatg

SEQ ID NO: 312777 - DNA, 201 bp, Homo sapiens
tgatctctgatccttctatccttcttctttctatcgagactgggtctccttccttcctggaaatagacaaatacatttaggttatattctttagagacagyggattactatttacagatagttgtcattaatgggcgcaacacttgtcaaaagcaaatattctgaaaaaacaaatactggaattagtccaaaacatagtaa

SEQ ID NO: 312778 - DNA, 201 bp, Homo sapiens
ttatgcaacagtagataacgaaaacagactgactatatcagaatcaccaatggaacttgtcaaaatgcatattcctgggcctcaggtgcaattctccaggrattctgaagtctcataatgggacccagtaatctgaattttaacctagcttcctggatgtctctggtagacactagagtttgagagacattcctttagagc

SEQ ID NO: 312779 - DNA, 201 bp, Homo sapiens
gtgagcaccgtgcctggcctccaatatattttttacaataagcatatatatatgtatgtgtgtgtgtgtatatatatatatatatatatatatatatataagcatatatatgtgtgtgtgtgtgcatatatatatatatattttttttttttttgaggcagggtcttgttctgtcacgcaggctggagtgcagtggtgcca

SEQ ID NO: 312780 - DNA, 201 bp, Homo sapiens
ggaggcaatatagtgtttcatttggatgaaacccttatcaaatgacgtccagtgctctcaggatctaagggcttccaattccctagctttgtaaactggayttttgttcttcctgttgagcttttccaaccctttgaatgaaacagctttattcatttagtcaatcagtgatttccatctaactgtttaatgctaccagtt

SEQ ID NO: 312781 - DNA, 201 bp, Homo sapiens
gccttggcctcccaaaatgctgggattacaagcgtgagcaccgtgcctggcctccaatatattttttacaataagcatatatatatgtatgtgtgtgtgtrtatatatatatatatatatatatatatatataagcatatatatgtgtgtgtgtgtgcatatatatatatatattttttttttttttgaggcagggtcttg

SEQ ID NO: 312782 - DNA, 201 bp, Homo sapiens
agattgtctgacattggaaggaagccagtgcacatttgttaaatcaattcacgcattaagcaataattctcatcaagatggtgggagggcaaaggttataygacttcacaatctttcaaaaattagttatcactttttggtcttcaattaacatcgcaatgttgcagggaaaaacgccttaagcaaaactaataattgtta

SEQ ID NO: 312783 - DNA, 201 bp, Homo sapiens
cacaacacaggtttgaattatatgggtccactttgcaacaattggaaaaactcaaagatgaaccatatagcctagaaatactgaaaaaaattaggtaaaargtatgtcatgaatgcataaaatatatgtagatattaatctatcattactaccatgaaatatacacaaatctattataaaaagttaacatttatcaaagct

SEQ ID NO: 312784 - DNA, 201 bp, Homo sapiens
cactcagcaacatacaggttgggcaagttgctttgctctttagcttcagcttttgcacacctataaaatggaagcggtgtgtgtgtgtgtttgtgtgtgtstgtgtagtgtatgtatccgttgtctcctagggagtttctttgaggatcaaaaaagagagtggacaaaaatgaattttgtaaactgtttttgagagcatct

SEQ ID NO: 312785 - DNA, 201 bp, Homo sapiens
ggcagatgctgggcagaggcgccccccacctcccagatggggcggatgctgggcagaggcgcccccccacctcccagacggggcggatgccaggcagaggygctccccacctcccagacggggcggatgccgggcagaggtgctccccacctcccagacggggtggccgccgggcagaggcgctccccaccccccagacgg

SEQ ID NO: 312786 - DNA, 201 bp, Homo sapiens
acttttctcatggttatttacaactaattgtggagtaaatgaatttagccatgtttaaaaaaatttaagatgtcagcaggcaagtgatagaggttgtttaatagaagttctcttagcagcatgttaaaaataatgctgcaataatatcatctacctaaatggttactcctagcagtctgatgccaaaatctaaacaaatct

SEQ ID NO: 312787 - DNA, 201 bp, Homo sapiens
cccagaggtggagactacagaggcagtaggccttgctgagctgcggtgggctctgcccagttcgatcttccaggacactttgtttacctactcaaacctcrgcaatggcggatgcccctccgcctgcctcgcaggttgatctcagactgctgcactagaagtgagcaaggctttgtgggcatgggatccgctgaaccatgt

SEQ ID NO: 312788 - DNA, 201 bp, Homo sapiens
ttgtgcatgggtcacatagttctcatgccatggttttcagcttggtcatttaaggtgttctctacactgtttattctagttagccatttatctaatcgttkttcaaggtttttagcttccttgcgatgggttcgaacatcctcctttagcttggaggaatttgtcattaccaaccttctgaagcctacttctgtcagctcg

SEQ ID NO: 312789 - DNA, 201 bp, Homo sapiens
cttaaacttaaagtcactagcttcattatcctttaacaagagagtcatcctgtcctttgaagctttgaagccatccttttttatggctgcatagtattccrtggtgtatatgtgccacattttcttaatccggtctatcactgatgaacatttgggttggttccaagtctttgctattgtgaatagtgctgcaataaacat

SEQ ID NO: 312790 - DNA, 201 bp, Homo sapiens
tgctctaaggactgagccggatgctccaactttaaaggttggggataggaagagaaaccgtccaagaagattgagagagagagagagagtgagtgagtgagtgtgtgtgtgtgtgtgtgtgtgtgtgttggagtgggggaaggaggataaactaggtaggtgagtatggtgtcctgggagccatcggagaaaagtgtttca

SEQ ID NO: 312791 - DNA, 201 bp, Homo sapiens
ttgcctgcctgtggcctgcctgcctgcctccttccctctttctttctctttccctctctttcttctttctttcttttcttttttctttctttctctctctytttctttctccttccttctttattcctttcattttcttcatttatttttcattgcattctgagactattttcctaagaatttcctctatatcactgattc

SEQ ID NO: 312792 - DNA, 201 bp, Homo sapiens
ctttccccctcaagtcattggaaatattcctccattgtcttgagaagtttgatgctgtaaagaagttgctatagtttgaatatgtccccccaaaagcatatgttcaaaacttaatccccagtataacaatgttgggaggcaagacctactggaggtgcttgggtcatgagggctccaccctgatgaatggatcaatgccaa

SEQ ID NO: 312793 - DNA, 201 bp, Homo sapiens
tctttccccctcaagtcattggaaatattcctccattgtcttgagaagtttgatgctgtaaagaagttgctatagtttgaatatgtccccccaaaagcatatgttcaaaacttaatccccagtataacaatgttgggaggcaagacctactggaggtgcttgggtcatgagggctccaccctgatgaatggatcaatgcca

SEQ ID NO: 312794 - DNA, 201 bp, Homo sapiens
aagagttagggcaatttgaggaagtcctggcgcctaggctaggtggtgatgaacagggaagatgtgaaggaaaaaggaagagagaattttcccccttgccktattgatttcatcctgcattagttcatctcagctcttcctgttgttcccccaaccccaacagtttttctattcttttatctatttttgaattgattctct

SEQ ID NO: 312795 - DNA, 201 bp, Homo sapiens
gcctggttctgcctactttattctgcacctttgtgaaattctgcttggctaacatttttggaacgctttggaccatgttctctcaaagtctcactttaagkgtgtgtctataacttaacatagggtccagatatgctctgaaagacttaacctcaaatgggatactgtcattttattaatgtatgctggagttggcttagt

SEQ ID NO: 312796 - DNA, 201 bp, Homo sapiens
ttcctcactgctatttcagttcccctcccaccattgtgtgaaacagtgccaaagaatttcattaaactggctgacttcaaggatggtgaactaggactgcktctaaaaagcaggctgatagtaactgagggaattgcctaataaggaatagacgggaggcatgctgcccctacataatctcttccttataaagagagaagt

SEQ ID NO: 312797 - DNA, 201 bp, Homo sapiens
gctgtgggccaaaggctctggtcaagagcatatagaaaactcagattaaacaaagtctagggcatgaacagaggtactgaaatttagtgtttcagaacctrctagaccacaggaactacttttttcctggaggacctgttattatctcatagaagcctgtgcaggaaaagcttccttaagagaccctaaactataaaaccc

SEQ ID NO: 312798 - DNA, 201 bp, Homo sapiens
ctggacaggcaatgccaactgatgtccacaccaaggtctcaagaggatgtcacatgcagaggaatcaatcaaaggataatttccagaactgtgctgaaaaracaagctccaagctgggtcattctgagaatttcatcagagcaagacaaggcagtctagttatggacttatccttccagaaactggggacaggcaagaacc

SEQ ID NO: 312799 - DNA, 201 bp, Homo sapiens
cattggcaaggtaatttgggggcctgttgggctggggggaggttggggttcggtggtagtgactgaagcagtttggggcttgaaaaaggggggagtcagcmtggtgtagctttggcttgatgtcctgttctgccattctgcttcaaaccctggcattctgtgtcaagccctcctgggtctgttggcccactgtgagcatcc

SEQ ID NO: 312800 - DNA, 201 bp, Homo sapiens; identical to SEQ ID NO: 65232

SEQ ID NO: 312801 - DNA, 201 bp, Homo sapiens
gtcagaggggtcatgtgggtaccacaggtgacaacttaggcagcaggagagaagctgctgggcagaaatagagagataaggagatactgctggggctggartaaaaagttggccaagatgtaaaatggtcacaagaggtatctgaagtatcattgcacctcctgatttttgtggaggtgagggttcttcgtacaaataatt

SEQ ID NO: 312802 - DNA, 201 bp, Homo sapiens
gcaacagggtgctatcaaacctattgccttggtttgcaatagggtgactatagacaataataatttaattgaacatttaaaaataactaaaagagtataaytggattgtaacacaaaagataaatgcttgaggtgatggatacctcatttatcctgatgtgattattacgcattgcatgcctgtaacaaaatatctcaagt

SEQ ID NO: 312803 - DNA, 201 bp, Homo sapiens
actaaaataatatctgaagaatgattggaagttagctgggaaagacataggtaaagggtagtccaggcagggccgagcacggtggctcatgcctgtaatcsaagcagtttgggaggccgaggtgggcagattgcctgagctcaggagcttgagaccaccctgggcaacatggtgaaacccaatctctactaaaatacaaaa

SEQ ID NO: 312804 - DNA, 201 bp, Homo sapiens
cttcactccctctcccaacatggcctcagtcccacagctgctggttgaatacatagaatcacttaactttgggaaaaggggtggagaggccctttgtgctrtagaagggaaaggactttgactctcatttccttcaagtaccgttaggttacttctgaaaaataagtggaagatatcagagggggaaaaagcaagagacac

SEQ ID NO: 312805 - DNA, 201 bp, Homo sapiens
aggggtcgtgcagttgagatttcctcaggaggggtgccttcaatgccattaacatcagagcatgggctagcaggccggtccaggggtctgcagtagatctyagtcatggacagcatctggggctccatttgaagaacgatttgtaattttacagcttcgattctggaagaggcaaacttaacaaggagcttaaacatacag

SEQ ID NO: 312806 - DNA, 201 bp, Homo sapiens
gaggcgctcctcacttcccggacagggcggccaggcagagacgctcctcacatcccagatggggtggtggccgggcagaggcgctcctcacttcccagacrgggtttagttgccttttttattctatgtagatgaccccatccccaccatattcacatattccttcttcactcaggtacaaaattcagtaggacacgactt

SEQ ID NO: 312807 - DNA, 201 bp, Homo sapiens
tggggtggtggccgggcagaggcgctcctcacttcccagacagggtttagttgccttttttattctatgtagatgaccccatccccaccatattcacataytccttcttcactcaggtacaaaattcagtaggacacgactttctgagtcatatgctggatttgaggagatactgaagccacaagactgaaataactttta

SEQ ID NO: 312808 - DNA, 201 bp, Homo sapiens
agacagggtttagttgccttttttattctatgtagatgaccccatccccaccatattcacatattccttcttcactcaggtacaaaattcagtaggacacsactttctgagtcatatgctggatttgaggagatactgaagccacaagactgaaataacttttaaactgtgggtgatttggctaaaagctactctcatcta

SEQ ID NO: 312809 - DNA, 201 bp, Homo sapiens
gcacatgtcattcagcaaccaatggttaaggtgtcaggtttcaatgaccttctccatgaggtctgtgaggtcctctgacgtacttattgtgggtcagcttsgcagccacattcatcagcccctgggacaggttcttgaatttggtgttcctctcagagaacatcccaagctttccttagaaggtggtacacaccaggctct

SEQ ID NO: 312810 - DNA, 201 bp, Homo sapiens
ctcctgagttcaagcagttctcctgcctcagcctccggagtagctgggattacaggcatgtgccaccacacccggctaattttgtatttttagtagagacrggctttcaccatgttggccaggctggtctcgaactcctgacctcaggtgatccacctgcctcggcctcccaaagtgctgggattacaggcgtgagccacc

SEQ ID NO: 312811 - DNA, 201 bp, Homo sapiens
ccctaatcttgattcctttcataatgatctagtaagcatattaatttttagaaaggggatcagtgttataaaagagagacaacttctcttaaatatagcartctttccccctcaagtcattggaaatattcctccattgtcttgagaagtttgatgctgtaaagaagttgctatagtttgaatatgtccccccaaaagcat

SEQ ID NO: 312812 - DNA, 201 bp, Homo sapiens
tgaggtggagttttgctcttgttgcccaggctggagtgtgatggcgtgattttggctcactgcaacctccacctcctgagttcaagcagttctcctgcctyagcctccggagtagctgggattacaggcatgtgccaccacacccggctaattttgtatttttagtagagacgggctttcaccatgttggccaggctggtc

SEQ ID NO: 312813 - DNA, 201 bp, Homo sapiens
ttaaatatagcaatctttccccctcaagtcattggaaatattcctccattgtcttgagaagtttgatgctgtaaagaagttgctatagtttgaatatgtcyccccaaaagcatatgttcaaaacttaatccccagtataacaatgttgggaggcaagacctactggaggtgcttgggtcatgagggctccaccctgatgaa

SEQ ID NO: 312814 - DNA, 201 bp, Homo sapiens
ggcactcctcacctcccagacagggcggccgggcagaggtgctcctcacttcctggacagggcggctgggcagaggcgctcctcacttcccggatagggcrgccgggcagaggcgctcctcacttcccggacagggcggccaggcagagacgctcctcacatcccagatggggtggtggccgggcagaggcgctcctcact

SEQ ID NO: 312815 - DNA, 201 bp, Homo sapiens
ggcaggtcaagggtccttgcaaggtctgcacggtggtactccctggtctagtgaaatggagtagagtttgacactcaataggctctacttttagcttttcmtagtggtccagggaggtctcttaaatcctatttcttgtcttcttttctccctggagtctcttagattcatagcagatgatatatatacccattgccacct

SEQ ID NO: 312816 - DNA, 201 bp, Homo sapiens
ggttttgaaaatctattcatgtgtttagtgggcatttgtggatcttttttggaaaaatgcctgttcagatcctttgcccatttttttttttttttttttttgaggtggagttttgctcttgttgcccaggctggagtgtgatggcgtgattttggctcactgcaacctccacctcctgagttcaagcagttctcctgcctc

SEQ ID NO: 312817 - DNA, 201 bp, Homo sapiens
cctgaggagaaattaagtgtttaagaaacaacaaagaatccagtgtggttggagtggagaaagcaaggaggtgagagctgagaggtaggtttggcctaaayagaatgtctagcatcctgcaggccactgtatagcctttggcttttacttatagagcaatgggaaaccactgtgagtgttgagcacaggagtgactttatc

SEQ ID NO: 312818 - DNA, 201 bp, Homo sapiens
aactgccagactgttttccaaagtagctggaccatttacatttccaccagcaatatatggtgattccaatttctccacatccttgccaacactttttattmcctatcttttattatagccttcctaatgagtgtgaagtagtatctcattgaggttttgatttgtatttccctgatggctgatggttttgaaaatctattc

SEQ ID NO: 312819 - DNA, 201 bp, Homo sapiens
ctaaaataatatctgaagaatgattggaagttagctgggaaagacataggtaaagggtagtccaggcagggccgagcacggtggctcatgcctgtaatcgmagcagtttgggaggccgaggtgggcagattgcctgagctcaggagcttgagaccaccctgggcaacatggtgaaacccaatctctactaaaatacaaaaa

SEQ ID NO: 312820 - DNA, 201 bp, Homo sapiens
gtatttggttttctgttcctgtgttaattcgcttagggtagtggcctccagctgcattcatgttgctgcaaaggacatgatttcattcttttttatggctkcatagtattccatggtgcatatgtaccacattttctttatacaattcatcattgatggacacctgggttgattctatgtctttgctattatgaatagtgc

SEQ ID NO: 312821 - DNA, 201 bp, Homo sapiens
gttggagtggagaaagcaaggaggtgagagctgagaggtaggtttggcctaaatagaatgtctagcatcctgcaggccactgtatagcctttggcttttayttatagagcaatgggaaaccactgtgagtgttgagcacaggagtgactttatccaattcacgttttaataggatcactctggctgcattgtagagaacag

SEQ ID NO: 312822 - DNA, 201 bp, Homo sapiens
attgttaaagtctctcagttggtaagtgttgaagttgagattcaaatccatagttgttgatcttattatctggagacacaattcacatatcatacgattcrccaacttaaagtcgacaattcagtggttttagtatattcacaggattgtgtaccaccaccacaatcaattttggaacattttatcaccctgaaaagaaac

SEQ ID NO: 312823 - DNA, 201 bp, Homo sapiens
attaattccttcctcaagcagagggcaacaaatgggtgttcttttcctgtgttcaggtgtataatggccgctgcttttgctagaatgtctctccctaacargggagtggggctttcaggcataattagaaaagcatgtgaaagagtaatgttccccagtcacaacttagtggttgggagaaatatctagtgactggctgtc

SEQ ID NO: 312824 - DNA, 201 bp, Homo sapiens
gaaatgcatatgaatgtttctggcagctatatttccagtagccccaaactggaaataacccgaatgtccatcaacagttgaatggataaaaatatagtatmtccatataatgaaatactttgcagtgatggaaaaagatgaactactgatacacacagtttgagttcatcttacatagtgtaaagtgaaagaagttagaca

SEQ ID NO: 312825 - DNA, 201 bp, Homo sapiens
accaacaccttgatttcagtccagtgaaactgatttcagccttcagacttccagaactgtaagagaataaatgtgtcttgttttaaaccactgagttttttatggtaatttgttatagcaggcaaagaaaacgaatacggtaagtgtttaatgaaaggaagtgctggtggctttagttagttaacacacaggcttatagtg

SEQ ID NO: 312826 - DNA, 201 bp, Homo sapiens
gtacaattcagtggtttttagtatatttatagagtcattatctaatttcagaacattttaattactcccaaaagaaatcctgtatctataagcagccactmccatttccctctccctcatcccctgacaactacttatttatatttgtatttttgtttgcttgtttgtgacagggtttcattctgtcactcaggctgaagt

SEQ ID NO: 312827 - DNA, 201 bp, Homo sapiens
ggtggttcccttctatttccctttcctttcctttctggtgaccccagcagtgtaagactgccacctctttaggtttctctgtacagccaagaataatctcytaatggcttcctgatgtttgataggtgttccctcggaagttaggaatttcctttctctccatattgctgtgtgggcatggagaactaggtgagcatactt

SEQ ID NO: 312828 - DNA, 201 bp, Homo sapiens
actgatcatatattttctctctaaaatcttactcactgtagtacagacatactttaaagttattgcaagttttgttccagaccgctacaaaggaagtaacrtgattaaaagagtagtatgaatttttggtttcccagtgcatataaaagttatgtttacactatactgtatctattaagtgtacaatagcattatgtttaa

SEQ ID NO: 312829 - DNA, 201 bp, Homo sapiens
agatagctgtggctattccaggatcccagaaaatggtagccacaaatgaaggcctctgaagcagaactgccctggatctttactgtgctggtgccctctcrgactttctcttgcccttctgtctctggcctctcattctcccccgagaaatggaaactagaattcctcttcccccaggtgggtcatagaagccagcaacaa

SEQ ID NO: 312830 - DNA, 201 bp, Homo sapiens
acttcttttgtatactttttacatccttttcctgtttattataatacttatttggatttgatgtttttaatcaacttatgtgcatgctttatcatataaargtattcaagttttcctgccatacttataatagtttttctgtatttatttatttatttatttatttttgttatgacggggtttcaccatgttgcccaggct

SEQ ID NO: 312831 - DNA, 201 bp, Homo sapiens
gcgtggtctttgttagcgtaatttttatagtcacatagtttatttaacagttctcctgttattgaatattgaggatgtttccatttccaataaatgtcttygtgcaggaagttttttccatatgtaggattgcactctgaggacaggatcccagaaatagacttactagattgaaacttgttaatgttttttaaagttctt

SEQ ID NO: 312832 - DNA, 201 bp, Homo sapiens
ccattaaagaaaacatgatactatagattacagtagggaagaaaaacaatcacttgtaatattttggtgccatttcctggcagttttttttttttttttttactatgcctgggttgtttctctcatttggcattcacttgaataggaccttgaaaagttatgagatggcaccatgatcattaggctatatatgcagtttta

SEQ ID NO: 312833 - DNA, 201 bp, Homo sapiens
tgactacatttagattttgtctaaaaactacaagagcagcctggtttgcacagatggtgtgcagtctctatcttttacctcttttgggcattttctgccargacggagagccagctgcttgccagcgtgtgagagccaggaagaatctctgcagcagtgagggagtatagggttgtaaacctccttctcctccttctttat

SEQ ID NO: 312834 - DNA, 201 bp, Homo sapiens
gacttggtattcatagaaagggaggcagaaagctggtctgttcctgataggcttgtaatttaatatcattctgttcatgtgctttggatggaagcacatcyggcatatgatgctaatcagtggttcccatacccctggcttcctaattttaatgtttgctcacagcatagtagattgacatcaaatagtggccgatgatga

SEQ ID NO: 312835 - DNA, 201 bp, Homo sapiens
gttgctttcagtatgggattgtgctggatgcgggttcttctcacacaagtttatacatctataagtggccagcagaaaaggagaatgacacaggcgtggtscatcaagtagaagaatgcagggttaaaggtaagatgaagaccaagggaaggggaggccaacagtggggcatgagaacatgagaggtgtatgaccagtaga

SEQ ID NO: 312836 - DNA, 201 bp, Homo sapiens
ttaccctctaagtacaataacctaatgtatagtacatcaggaaattgttttcttgtatttttttcaaaacaccatattttgatctactattgtcaaggtaygttttataatttttttttaaaagattgttatcttctacatcttttcctaggtcctggaatctcaaaatttgttcagaaagtaaatgaaataggcatttac

SEQ ID NO: 312837 - DNA, 201 bp, Homo sapiens
ttcacaaagggaaagcagaatgcagtgactgaaaggaaggggtaggaacctggacaggcaatgccaactgatgtccacaccaaggtctcaagaggatgtcrcatgcagaggaatcaatcaaaggataatttccagaactgtgctgaaaagacaagctccaagctgggtcattctgagaatttcatcagagcaagacaaggc

SEQ ID NO: 312838 - DNA, 201 bp, Homo sapiens
tctttctacctttcttttcattctcacccccaccccttcccttccttcttatttcctggctctattttcttacctgtgtctcccaacccaatgtccatctyatttttcctccttcttttttgccttttgccctttaactaactggttatcattgagatctttaggatcaaagtttgtctttagcagttgtgtttctattga

SEQ ID NO: 312839 - DNA, 201 bp, Homo sapiens
atgattgttggctcggtgacccttcctgatgatggtctctcagaaaagactctccagtgctgagccatcaagaagtctagaaggcattgagaaggctgtcwcatgtgattatgtttactcctcctggatgcgtctgcccagacctggttttggcacaagctctgctctgatggagccaggctctgtccacacttggctgtg

SEQ ID NO: 312840 - DNA, 201 bp, Homo sapiens
cctagggcaggtctagttcatagtaataatgtgttcaataagtaattattgagtgaccaactgaaaaaatgaatgaggcatagtcccctctccaacaactwtagaactcccaaactgaaatggttcaagctatatctagaggtagcacatgaagagaggactactgacataactgagctttgtagagtatagggggagcat

SEQ ID NO: 312841 - DNA, 201 bp, Homo sapiens
cacagacaagtccatccctgagcttgggggaaaggcaagcatctgaacaaaatggagtttcttttgggaagggagaagcagggaagtgctgtgtatttcayctgctcttccttgtttggaagcaatagataatgatgttgctaaaactttttctcctaaattttgtattgtttggtctgatgggtaaagactgcctcaaga

SEQ ID NO: 312842 - DNA, 201 bp, Homo sapiens
tatctaaaggacatgctgcttagggctgtgtttgtcaacatcacaacgttgggaaccaaagtggggtgcccttagagggttcttttccagattccagaacrctggcatcaaagaggacatctctcccataccagttttatccagatgttttagcttcaagtagttaaaatcctgactctaattgggtcaaagcataagttt

SEQ ID NO: 312843 - DNA, 201 bp, Homo sapiens
aatcctataactataaagcatttcagaaataaagtattgttaaacagctccaaatttattaaagtataaaaaatgtattgagtatataccatgtggcaccrtgcaaagtaacagagatgcctaaactaaaaggttatcctttgtccttattaaagtatgactgaaagctcgctggagaatatagtttctacatagagtcaa

SEQ ID NO: 312844 - DNA, 201 bp, Homo sapiens
taaacaaatatataagggcccagatgataccaatatgctaatatgcatgtatgtacacatgggcagtaatatatctagaagttaacttgaccatggaggcstgggaatacatgtgtagaagtatattctcttgtatttgaagatgttgaactgggagcctggaaggatggttgtgtatgccaggcctctgaaacttttgcc

SEQ ID NO: 312845 - DNA, 201 bp, Homo sapiens
cctcctgaattggcctcccaaagtgctgggattacaggtttgagccactgcacctggccaatcttaccatttttgatgaagtgacagtcacttattatctytgcagacctttgagacatttagacaaattgaggcacttgatgtgggagtaggataaaggagttaaaggggatatttcaacagaacatttatgtaagagaa

SEQ ID NO: 312846 - DNA, 201 bp, Homo sapiens
cctcagaagctacatgtgttagcaggcatcctggggtgttctcatgccactgaagtctgtgaaccactgcctgtgagacacaatgagaacttaaaaaaaawtagccttaatgaactgaagagtcattagctgtacccaagactccccctgggaaagtacctttgttctggtggacctaggtggggcggtagctttgacgtc

SEQ ID NO: 312847 - DNA, 201 bp, Homo sapiens
tgtacccaagactccccctgggaaagtacctttgttctggtggacctaggtggggcggtagctttgacgtctgcttggttccccacttccttgtctactcrtaactgaacactggcagttagtggttgtcagatattcttttagcacaaacattccacattttggcacacactgagtctctgtcacacaagcaccagactg

SEQ ID NO: 312848 - DNA, 201 bp, Homo sapiens
tgtgctcaataaaaatataaaacaagccaaattttaaattttcaaagagctacattttagaaagtagaagaaaagaggtgaaattaattttaataatatawtttatgtggcccaatgcatccaaaatattacctcaacatttcatcaaaataaataattgttggctgggcgcggtggctcacacttgtaatcccagcactt

SEQ ID NO: 312849 - DNA, 201 bp, Homo sapiens
tcaataatttttttcttttaaggtcataatatgttagagtggttgacattcagctttcaatccctttacccagtaccctaccatgcaccattataccacartctctctgacttttatctctcttagccttttgagctgggaacccactgtttatttttagtcagactgatagcctagatcctagaagataattgattttca

SEQ ID NO: 312850 - DNA, 201 bp, Homo sapiens
ctccccctgggaaagtacctttgttctggtggacctaggtggggcggtagctttgacgtctgcttggttccccacttccttgtctactcgtaactgaacastggcagttagtggttgtcagatattcttttagcacaaacattccacattttggcacacactgagtctctgtcacacaagcaccagactgacccaatgcca

SEQ ID NO: 312851 - DNA, 201 bp, Homo sapiens
acaggaagcaactccacctcagaaactttaaggtgctggccaggatcagataactagttagtggcagcttccatctttttagtaaaagccaatttgtctgmcgcttaatttttattccaagtgttatctttaggtcttttaggaactagtgtcattaattacagtgttctggaggaaatatcaaaaagcagctaacagagt

SEQ ID NO: 312852 - DNA, 201 bp, Homo sapiens
agacagactgatgaggctgctgaagttaccattaaagctacaggaacttttaagaaagtttttgaagacacactgtgtctgaagggaccatgaaaagttartgatcatacttgcctgtgttaccagatgtcttagtctgttttgtgtggctgtaacagaatgtgacaaacttggtaatttataatataaagaacagaaatt

SEQ ID NO: 312853 - DNA, 201 bp, Homo sapiens
ctttcagacctgaaatgctaaggtttgcaacagccttgtggagggagaagctgccaagtcgccttgggacttgaggacttaccttcctttcaaaggattarcccttgttttgatttcaaaataattttgttacacagtttaaaaataatttggtcaggctctcatctacattggggtaatcttgacggtctggatgtggta

SEQ ID NO: 312854 - DNA, 201 bp, Homo sapiens
ctttggcttttcttggggtgagatggagccttttataaattttgagcaaaagagttccataatcttttgttttgtttaatttttaactgaattattatagkttctgggttgaaaataggctgaagagtttgaagagtagaatctgggaggagaccagtgaggaggctatcacaataatacaggatacaggtgagagatgat

SEQ ID NO: 312855 - DNA, 201 bp, Homo sapiens
tgtttaatctgaacatagattagtgcatagtgaagaggaagagaactcacccttactgagtgccacctatgtgccagagtctgtgttgggagttctcacakatttattctcttttttacctccaacatggctttgtgaagtagattaaaaaaaagacctttattttatggatacattggggttcagaagggctcgctaact

SEQ ID NO: 312856 - DNA, 201 bp, Homo sapiens
tgttcttgactttcagtttttcgagcgggtttcaaggtaacaactttcttattatctagcttcataattgcagtaaggaatagctttttttgcttgcagcygagatgactttttcaagggagaaaaagggatttctataacgaagagagggagagagagatgaagagggagggagtaagggagagagggaagaagggagaa

SEQ ID NO: 312857 - DNA, 201 bp, Homo sapiens
agtatcattgcttataggcccactctgctgacagagcaagaaaatatagatgtattttaaaccatatatatatatatatatatatatatatatatatatatgcacaactataaatagttctacatttattcatatgtatccctattaagctaaacctgagttcatactgatgtctctaacgttaatccattaccacatgga

SEQ ID NO: 312858 - DNA, 201 bp, Homo sapiens
tgtacttaagttgacagttgcaaaagtgaatggtgttttcattcttaagaaatactattaattaaaaatagatgcttatccctgactgcactgacaagggrgaagaaaggctgagcaagagcctggaagcttgccattctctccaggtattttgtctagaacatgaaagaaatgtggtcagggccttcatcaagagttgct

SEQ ID NO: 312859 - DNA, 201 bp, Homo sapiens
gccattctgcttcaaaccctggcattctgtgtcaagccctcctgggtctgttggcccactgtgagcatcctcgctaaggacagctacttgcattttcagtygcaccttcccacataacagtgactaattccttacaaaacaaaacacaaaacgagatatattaaagtaacagcatttcagcagctacagtgactctgtgtg

SEQ ID NO: 312860 - DNA, 201 bp, Homo sapiens
cagtatcattgcttataggcccactctgctgacagagcaagaaaatatagatgtattttaaaccatatatatatatatatatatatatatatatatatatatgcacaactataaatagttctacatttattcatatgtatccctattaagctaaacctgagttcatactgatgtctctaacgttaatccattaccacatgg

SEQ ID NO: 312861 - DNA, 201 bp, Homo sapiens
ggctgtggaaataaaagaaaagcattccatcctggctaacatggtgaaaccccatctctactaaaaatacaaaaaaaattagccgggcgtggtggtgggcrcctatagtcccagctactcgggaggctgaggcaggagaatggtgtgaacctgggaggcagagcttcagtgagccgagatcataccactgcactccagcct

SEQ ID NO: 312862 - DNA, 201 bp, Homo sapiens
gcagtatcattgcttataggcccactctgctgacagagcaagaaaatatagatgtattttaaaccatatatatatatatatatatatatatatatatatawatgcacaactataaatagttctacatttattcatatgtatccctattaagctaaacctgagttcatactgatgtctctaacgttaatccattaccacatg

SEQ ID NO: 312863 - DNA, 201 bp, Homo sapiens
gatgcttactgtgggttaagacaaagacaggtttcctgctagggaacccaggatgatggggaagctgattgtccaccttgatctcactttttccagtgtasaaattgtgagtttgggggaaattttccacaagcttggtgtcaggcagaatcgggggagaggtgacatggatgtggaagtttgattatcttcccgtctgct

SEQ ID NO: 312864 - DNA, 201 bp, Homo sapiens
ggtgtgaacctgggaggcagagcttcagtgagccgagatcataccactgcactccagcctgggagacagagcgagactccatctcaaaaaaaaaaaaaaaraaagaaagaaaaaaggaaagcaaaacattcctgagcttaaatttatcttaatatcaaagtgaaattagtaatttttgaccccattatgagagaaggatta

SEQ ID NO: 312865 - DNA, 201 bp, Homo sapiens
tcaactaaagtccatactttattcagatttctttagtttttacccaatgttcttttctgttccaagattccaaattacatttaatcttcatgactccttargctcctcttggctgtgagaatttctcagactttttatttttgatgaccgtagcagttttgagaaatactggtcagaaatttttgtataatgtccttcaat

SEQ ID NO: 312866 - DNA, 201 bp, Homo sapiens
agagaaggattaagagtttttgtgtccctgtgtcctcctttttcttattttaaatatttaatttgataatattataaattcaaatagtaaaaattatgttrgtcacttatttcacaggattttttctctttatttggatattaataatcaaattcatccatccatgaatttaatgaattttaatatagttcttatctcact

SEQ ID NO: 312867 - DNA, 201 bp, Homo sapiens
caaaatcatgtcgtcattaaagcagttactttaataaagatgggcttcacaaggggtttccggtacaacagctgcagttaaatatctatacactgttaacrtattttttaaaataagcttttaattatagaatagttttcaatttacagaaaagttatgaagatagtacagaaagttaccaggtactctctacccagttcc

SEQ ID NO: 312868 - DNA, 201 bp, Homo sapiens
tcttccccaggaatagattccatctcaagaaaccagtttctttgcttatccataagaagcaagtcctcatctgctccatttgtatcatgagatgtagcaaytcagtcacatatttagactccacttctaattctagttttcttgctatttccaccacatctgcagttacttccttcactgaagtcttgaacccctccaagt

SEQ ID NO: 312869 - DNA, 201 bp, Homo sapiens
ctgttttcctactatgtgcaggctctgtgtacagtctactattcagtgcaggacaaaacagaaatggttcctgcccttgtggagctcgtctagtgggggartaagatattaagcaatgatgtcatatgtaaatctttgcaaattgaataagtgctatgaagaatgaatagaaggtgctctgtgagagttaattgggggcct

SEQ ID NO: 312870 - DNA, 201 bp, Homo sapiens
aaattgttttcttgtatttttttcaaaacaccatattttgatctactattgtcaaggtatgttttataatttttttttaaaagattgttatcttctacatyttttcctaggtcctggaatctcaaaatttgttcagaaagtaaatgaaataggcatttacctgactgattgcatggaaagagctagggaagtgattccaag

SEQ ID NO: 312871 - DNA, 201 bp, Homo sapiens
ctaacagagtagctatctataatatccccattaaagtctgagaatgttatgcaattgaatatgaaattgcgccatccagtggcagaattattgaacactgracagacccaacttaaagtctggaaattaaatcctctcaaggctaggtccagtgaattaccctctaagtacaataacctaatgtatagtacatcaggaaat

SEQ ID NO: 312872 - DNA, 201 bp, Homo sapiens
ggaagtgtgagaggcatattcagaggactgtaagtagttctgcatagatagaagataggtaagtagtgtaaaataataatgataataatagtagcagctcrtatttattgagcccttcctatgttcttagcactacgctaagcacttaattgcactgtcataacaactctatgaaattaacaattattaacaagataagga

SEQ ID NO: 312873 - DNA, 201 bp, Homo sapiens
cccagtctggcagcagaggagattggatatctattccaggtcatttgccacctggtttctactagaaccctaattaaaaacctggagcagagtctggccaygtaaccagctaggagccacccacagtggttaatatagcacacatcagcttcaggtatggtcatcaaaccatacccagctatcaccaccacagtaatttta

SEQ ID NO: 312874 - DNA, 201 bp, Homo sapiens
ttccagggtgccaggatcattactggccaagaggaaggtgcctatggctggattactatcaactatctgctgggcaaattcagtcaggtgaatatctcacrgcatccatggaggtggctctctggaggccaatgccattgctatctcaggcagtacttgggtcgctagccagaatgaatgaatgaatgatagatggatgga

SEQ ID NO: 312875 - DNA, 201 bp, Homo sapiens
cgcctgtagtcccaactactcgggaggctgaggcaggagaatggcgtgaacccgggaggcggagcttgcagcgagcagagattgcgccgctgcactccagmctgggcgacagagcgagattctgtctttaaaaaaaaaaaaaaaaaaaataggctgtggcggcaagagtctttgttatcttaagtctacttctcagtgaat

SEQ ID NO: 312876 - DNA, 201 bp, Homo sapiens
tctacacacatagcttcttgtgctatgggaaggatcaggcactctggcagaaactggccaaggacattcaggcaagtataactcaatccagacctgccccyttcacatctgcacctccagcccccacatcctgttgttttctgtttcaaattcagtagtttgtctgaacttggttattgtactttccaaacctttttaggc

SEQ ID NO: 312877 - DNA, 201 bp, Homo sapiens
ccatatgcacaaacaccagccttaatagtctgtggtgggctgggcactgtggctcccgcctgtaatcccagcactttgggaggccaaggtgggcagaacaygaggtcaggagatcgagaccatcctggctaacacgatgaaaccccatctctactaaaaatacaaaaaattagccgggtgtggtggcggacgcctgtagtc

SEQ ID NO: 312878 - DNA, 201 bp, Homo sapiens
gtgaccatggcctgtcagccctcgggaggtcctgagaacatgtgcccaaggtgatcggggtacagcttggttttatatattttagagaggcatgagacatyaatcaaatacatttaagaaatacattggtttgtttcagaaaggtaggagaactccaagtgagggctaccaggctataggtaaatttaaatgttttctgtt

SEQ ID NO: 312879 - DNA, 201 bp, Homo sapiens
tatttataaaccaaaaactgagggaaaaattaccactaacagacccacacaaagaattgctaaagggaattcttcatgctaaagagaaaatgatctcagayggatgcatggaaatgcagaaataaatgaagagcaatggaaagaataaatataatgtcaatatagaaaattcaattgtattcctatattatagccataata

SEQ ID NO: 312880 - DNA, 201 bp, Homo sapiens
ttactttcattgtgggcatagggagatagaaagatggaaagataactgattggttaacatcgggttactctgttgtaagaattaaaacagagggaactgcwtgattgccagttgaagactgaaactggcctgttgggaaattaggctgttgcctctctctcctgatttcatggaagaccagataacaaactcaaggtttgg

SEQ ID NO: 312881 - DNA, 201 bp, Homo sapiens
tctgtggttggggggcatgaagccagcttgcttccatgccgccattttggaatcagacatccaagcatcatattttctttcacatgcaaagccaaagcagraaagatgtttaaggttttccttgcacacatctcttgcacacacattttgcagaagtgccaactgacatcttttcagatcctgctggccagaacttggtga

SEQ ID NO: 312882 - DNA, 201 bp, Homo sapiens
actacaagattctgtccttgttgttgtcttatgtggcacgatttatcaatgatatggccaaaaatttagaaagcatgcttagcagatttgctaacaatacrtagcttttagtgagactgcaatgtattacataaaaggatcaagtatcatcaggctggaaaaatgagctgaaaccataggttgacatttaattgatacaca

SEQ ID NO: 312883 - DNA, 201 bp, Homo sapiens
aaggataatttccagaactgtgctgaaaagacaagctccaagctgggtcattctgagaatttcatcagagcaagacaaggcagtctagttatggacttatycttccagaaactggggacaggcaagaaccaagtgagaaacagaccccagccagcggttaggatttgcatatgggttaggacccacggaagggagagaaat

SEQ ID NO: 312884 - DNA, 201 bp, Homo sapiens
cttcttctcttgtaagattactgtgagaattcagtgggataaagtacatgcaaatatgagtccagagcagaaggcctggcccactgcagacactcagtgaytgataactcatgtcttatcatttttgcagcttacctgccttagtgacaaattgacagttatctttattttattcccactgttccccatctgacttgccct

SEQ ID NO: 312885 - DNA, 201 bp, Homo sapiens
agattgcctgttttagctgaacaatgaatttgaaaacaataggagttgttacgtactttggtctattttagaacattttcaaagtttttttttttttttttgagacagagtctcactctgttgcccagatgggagtgcagtggcatgacctcagctcactgcaacatccgcctccctggttcaaggaattctcctgcctca

SEQ ID NO: 312886 - DNA, 201 bp, Homo sapiens
attctttgactagccaaatacatttatatctgataccacttctggtgcctgttacacaaatccatttttcatatttattcctaagggtaaaaaggcagggyaggacatattgattccaataccaagtggtgggatgttgtacagtgcctacatattgattaagtcagactgtaccttttgtatccaaagcgttcacacatg

SEQ ID NO: 312887 - DNA, 201 bp, Homo sapiens
tttttaaaaatgagggcactgaggttgagagaggttataccacttgtttgttactcaagctagtaagtgatggagctgcggttcaaaccaagttctgcccracttcaagtctgcatcttagccagtgcttctcaaacttgcatgagcttgttaaaaacacagatgatgggtcccatcccctagagtttctgagtcagcaga

SEQ ID NO: 312888 - DNA, 201 bp, Homo sapiens
ggctggagtgcagtggcacaatcttggctcactgcagcctccacctccatggttcaagtgattctcttgcctcagcctcctgagtaactaggactacaggygtgtgccaccacacctggccaattttgtatttttagtagagacggggtttcaccatgttggccaggctgttattgaactcctgacctcaggtgattctcc

SEQ ID NO: 312889 - DNA, 201 bp, Homo sapiens
cagctcagagagccagagacttgagatgaatttaagttgatataaagaaaataaagagcagaattttttggacacctatatgtggtggattaagatggaayttgctccatgcataaaaaacagagacaaaaagggcagaatatggcaagggctctaggggaggctaagcaatggaatgtatctataataaatcatgatatg

SEQ ID NO: 312890 - DNA, 201 bp, Homo sapiens
tgttcacagattgcagtaaagacaggcataagaaattataaaagttttaatttggggaactaataaatgtccatgaaatcttcacaatttatgttctcctgccatggcttcagtcagtccctcttttccgggtccctgacttcctgcaacattctctctggaactccaggtttggtagtaatggaggatggggtgaggagc

SEQ ID NO: 312891 - DNA, 201 bp, Homo sapiens
tcacaagagtattgattagggaagtgataaatgtccatgaaatcttcacaatttatgttcacagattgcagtaaagacaggcataagaaattataaaagtwttaatttggggaactaataaatgtccatgaaatcttcacaatttatgttctcctgccatggcttcagtcagtccctcttttccgggtccctgacttcctg

SEQ ID NO: 312892 - DNA, 201 bp, Homo sapiens
attttggtcccagaggctgagcattattataatcatagtttagtagcatattgaaaaattagctaccatctgtcaaatgccaattattgactatgcactayatgtatattatctcatttattcattcaagatattcaaagaaacaaggcttttgcctgccttcatgctttctcccttttcagaaaacagatcagcatgtaa

SEQ ID NO: 312893 - DNA, 201 bp, Homo sapiens
ccatgttaccccccagtctcaaactcctggactcaagtgatccgcccacctttgcctcccaaagtgctgagattacaggtgtgagccactgcaccctgccragattaaataattttgattttcaccttagtatgattataactggacatcatgatggctgtttctataagaatcaaaagaacctttgcttcctttgattct

SEQ ID NO: 312894 - DNA, 201 bp, Homo sapiens
tcctccaattctaaggaaggataggacagaatagcaagtgaaagtggtccaatattaccactttggatgtcccttcgtggtcaccaaaatgttaccggggyggggtggtccttgttcttagagctcccaagatcgtgggccatttccaagatggcggcaagcctcttgttctctgacctggggttcttggcctcacggatt

SEQ ID NO: 312895 - DNA, 201 bp, Homo sapiens
caggaggtggagcttgcagtgagccaagattgcaccactgcactccagcctgggtgacagagcaagactctgtctcaaaaaaaaaaaaaaaaaaaaaaaaagccctttcccagatagcctcacacctgagtcttaagtccagcggccacactaatcgtttttaactggccaacaggtgcctggtattttcctccaattcta

SEQ ID NO: 312896 - DNA, 201 bp, Homo sapiens
atttatgtggttcctgcttggtcactgttgggtttatggagtgtgccttaaaccatcaaaccacaatagcatattgcatattggacattgtgtatggtccytcctgatttctacatctgatgttaagttccacagggaaatctaaggaaaccttgatattgctgcctgattattacacaacagacaaattgcatggtgaat

SEQ ID NO: 312897 - DNA, 201 bp, Homo sapiens
ccaggaggtggagcttgcagtgagccaagattgcaccactgcactccagcctgggtgacagagcaagactctgtctcaaaaaaaaaaaaaaaaaaaaaaaaagccctttcccagatagcctcacacctgagtcttaagtccagcggccacactaatcgtttttaactggccaacaggtgcctggtattttcctccaattct

SEQ ID NO: 312898 - DNA, 201 bp, Homo sapiens
gggaaaaaggtacatacactctgactgggccgaattctccagaatacatcttaggggcgtttttgccttaggggtaatgtttcctatctgaaaaaaaaaaaccgggatgccatcacccctagtcattctctgatgagcattagtgctagagcgtcttctatggtcctaatgcttattgctttccagggtgcgtaactaccc

SEQ ID NO: 312899 - DNA, 201 bp, Homo sapiens
tggagggacaatggcctcactgataatcctgagatcttgctctaacctccactgtccattgggtttctgtactcctaaaattggagtattgcaggggctaytgcatggttttactaggccttgggcttttagtttcttaacaatcttttggagtccttgttgggcctcgggtgtaagggggtactgcctttggtagggaaa

SEQ ID NO: 312900 - DNA, 201 bp, Homo sapiens
ggcacacgccaccacacccggctaatttttgtatttttactagagacggggtttctccatgttggtcaggctggtcttgaactcccgacctcagttgatcygcccgcctcggcctcccaaagtgctgggattacaggcatgagccatcgcacctggccatgcccattttatagataacaaaatcaaagccttagatgttct

SEQ ID NO: 312901 - DNA, 201 bp, Homo sapiens
tttgaaatgtaacaatttaaggaaatatttattagtgctttattacatgctcattataaaaaaactgtacaaaaagcttaaagtaaagactaaaaggtctyttctccctctcaccccaccatcagttcactagaggaaaaatgaggaatagttgtaataaacaggaagaacttttccaggcattagctatgcgaatccaag

SEQ ID NO: 312902 - DNA, 201 bp, Homo sapiens
cttaactgcaggtctgttggagtttgctggaggtccactccagaccctgtttttctgggtatcaccagcagaggctgcagaacagcaaatattgcagaacwgcaaatattgctgcctgatccttcctctggaagcttcgtcctagaggggtgcccgcctgtatgaagagtcagctggcccctactgggaggtgtctcccag

SEQ ID NO: 312903 - DNA, 201 bp, Homo sapiens
atgctctaaggactgagccggatgctccaactttaaaggttggggataggaagagaaaccgtccaagaagattgagagagagagagagagtgagtgagtgagtgtgtgtgtgtgtgtgtgtgtgtgtgttggagtgggggaaggaggataaactaggtaggtgagtatggtgtcctgggagccatcggagaaaagtgtttc

SEQ ID NO: 312904 - DNA, 201 bp, Homo sapiens
cttctgttcctccctcagaggattcttgttcatcttttttcatgctcttgcatgatgtgcatatataggtttttgttaaaatgtagcaatgatggttgcaygcacaccccttcagatctcttcactatttctgtgcactccaactcctggtgtagttatcctcccaacagcccagccctgcatcactttatgagcaaatga

SEQ ID NO: 312905 - DNA, 201 bp, Homo sapiens
catcactttatgagcaaatgaccctcaggttactggaatgtgcttcatttatgcacatcgggggccataagtgcctttgaatttatgcttccaccccccawcccttaactaatgactgataggtgcaaaaatataaacttcagctcttgaccccctcatcagtataatttagtcaattactcccagtagtttctcagcttt

SEQ ID NO: 312906 - DNA, 201 bp, Homo sapiens
aatgaccctcaggttactggaatgtgcttcatttatgcacatcgggggccataagtgcctttgaatttatgcttccaccccccaacccttaactaatgacygataggtgcaaaaatataaacttcagctcttgaccccctcatcagtataatttagtcaattactcccagtagtttctcagctttgttctgctttctgaca

SEQ ID NO: 312907 - DNA, 201 bp, Homo sapiens
ttaactaatgactgataggtgcaaaaatataaacttcagctcttgaccccctcatcagtataatttagtcaattactcccagtagtttctcagctttgttytgctttctgacactaaaaacaatgctataatataaaactgtctacatatattctatatatttaccaaaagtaattttgtctgtgtgtgtgcatgaaagag

SEQ ID NO: 312908 - DNA, 201 bp, Homo sapiens
ccactctgcttcctctggtatttgggaaagcagagtataagggttaggtacagctgggtatggagggacaatggcctcactgataatcctgagatcttgcyctaacctccactgtccattgggtttctgtactcctaaaattggagtattgcaggggctactgcatggttttactaggccttgggcttttagtttcttaac

SEQ ID NO: 312909 - DNA, 201 bp, Homo sapiens
tttatttgacacactgccttccatttttaaaagttattttaatggccaagcacggtggctcatgcctgtaatcccagcactttgggaggctgaggtgggcrgatcacaaggtcaggagatggagaccatcctggctaacacggtgaaaccctgtatctactaaaaatacaaaaaaattagctaggcatggtggtgcgtgcc

SEQ ID NO: 312910 - DNA, 201 bp, Homo sapiens
tttaagagcgtttgggtggcttgatggcacaaggtttctgaacgggcggctaaaagtaaatcatccacgtgccaaaggacaagagtgtccaggtatgagawttgactcaagtcttgggctaatgcttggccaaatagatgggggctatccctgaacccttggggtaaaacagtccaggtgagttgagacattgggttcgaa

SEQ ID NO: 312911 - DNA, 201 bp, Homo sapiens
gaaaccttgtagccacaggtggcgaggaaatttaagagcgtttgggtggcttgatggcacaaggtttctgaacgggcggctaaaagtaaatcatccacgtrccaaaggacaagagtgtccaggtatgagatttgactcaagtcttgggctaatgcttggccaaatagatgggggctatccctgaacccttggggtaaaaca

SEQ ID NO: 312912 - DNA, 201 bp, Homo sapiens
cagcttcagaggatgtgatgtgtgcttccatcagaaggcagagaatgaatgtttatacccccttttgttatgtgaacagtcattgatgattattgtttatrttcattcctttgtgaggtattgcaagatggtgatacccaaatgctaccaattttagtctttcattatctggaatactttaaagacacttttccccatcaa

SEQ ID NO: 312913 - DNA, 201 bp, Homo sapiens
tggtggcctggccctcagctttcaggccctccatggcctgaaggtggtgccttactggggaccccacccccttctgcccagcaacctgtctgccttccgcygccattcatggcccgggtgttcagcccaaccccacttggagagatccgagcaggcactgggagagaagagaggtcaggcagtgggagcagacgctcctaa

SEQ ID NO: 312914 - DNA, 201 bp, Homo sapiens
tagaatctgggaggagaccagtgaggaggctatcacaataatacaggatacaggtgagagatgatgtggcttggatcagtgtggtagcagtagaagtaatragaagaggtcaggtcctggatgtatctggaagataggaaccgctgaatttgctaaaggattagacttggattgtaaggaaagaggattcaaatgtgactc

SEQ ID NO: 312915 - DNA, 201 bp, Homo sapiens
ttcacttgaataggaccttgaaaagttatgagatggcaccatgatcattaggctatatatgcagttttaaagcctggttttactgtagcagtgaagcacaygtattttccattttatagcgtggtctttgttagcgtaatttttatagtcacatagtttatttaacagttctcctgttattgaatattgaggatgtttcca

SEQ ID NO: 312916 - DNA, 201 bp, Homo sapiens
agaggtcaggtcctggatgtatctggaagataggaaccgctgaatttgctaaaggattagacttggattgtaaggaaagaggattcaaatgtgactccaasgtttaaggcctgagatgttaatgaaattataaaacatgataacacgagtggcatctcttttgtgggtcagcacagtgtttgtgtctgtgggaaaggagcg

SEQ ID NO: 312917 - DNA, 201 bp, Homo sapiens
tatataatagcctggctattttgccgtacctgggaatccatatttggcagaagcgtgttatgccaaggaaccctcgtagttgctttagggttttgggatgrggataagccagtataggctggatacgttccttactgaaggccctggtgcctttggataattttagccctacgtatttaacctgctgtgagcagagctgag

SEQ ID NO: 312918 - DNA, 201 bp, Homo sapiens
ggccaacaatggcccatgctacatagatccaagaagataaaacacaaaaattggtctttgctttacaggccattggcaatcttagggcagtttcattggcrtggtgcggtgagaaacgggaatgcaatggaaggaggagtaaatgaatgaggagagaatggaggtgatgaaggaaggcaaaggtagaccatggtctcaagt

SEQ ID NO: 312919 - DNA, 201 bp, Homo sapiens
gtctctcggacctgtgtaaggattcctagagctattcctcttttttctgtgacatataaagaaaagtctcgctccgttggcaagcttaatactggggcttsggttagggccttctttagggcctggaaagccgcttctgcttcaggtgtccttcttactaaatgggtattggctttctgagtttccttaattagtgtatat

SEQ ID NO: 312920 - DNA, 201 bp, Homo sapiens
acttaggtaagccatgggttgcaagctggtctctcggacctgtgtaaggattcctagagctattcctcttttttctgtgacatataaagaaaagtctcgctccgttggcaagcttaatactggggcttcggttagggccttctttagggcctggaaagccgcttctgcttcaggtgtccttcttactaaatgggtattggc

SEQ ID NO: 312921 - DNA, 201 bp, Homo sapiens
cccgggaggcggagcttgcagcgagcagagattgcgccgctgcactccagcctgggcgacagagcgagattctgtctttaaaaaaaaaaaaaaaaaaaataggctgtggcggcaagagtctttgttatcttaagtctacttctcagtgaattttcggggatcatggagactgtctcctccatatgctctcaaggaacacct

SEQ ID NO: 312922 - DNA, 201 bp, Homo sapiens
acccgggaggcggagcttgcagcgagcagagattgcgccgctgcactccagcctgggcgacagagcgagattctgtctttaaaaaaaaaaaaaaaaaaaawaggctgtggcggcaagagtctttgttatcttaagtctacttctcagtgaattttcggggatcatggagactgtctcctccatatgctctcaaggaacacc

SEQ ID NO: 312923 - DNA, 201 bp, Homo sapiens
tgctacatagatccaagaagataaaacacaaaaattggtctttgctttacaggccattggcaatcttagggcagtttcattggcatggtgcggtgagaaaygggaatgcaatggaaggaggagtaaatgaatgaggagagaatggaggtgatgaaggaaggcaaaggtagaccatggtctcaagtagcttgtttgtgaagg

SEQ ID NO: 312924 - DNA, 201 bp, Homo sapiens
aacccgggaggcggagcttgcagcgagcagagattgcgccgctgcactccagcctgggcgacagagcgagattctgtctttaaaaaaaaaaaaaaaaaaaataggctgtggcggcaagagtctttgttatcttaagtctacttctcagtgaattttcggggatcatggagactgtctcctccatatgctctcaaggaacac

SEQ ID NO: 312925 - DNA, 201 bp, Homo sapiens
gctagcagtcctcagcaaaatgctgcctaaactgtgtccacagctgtgtttctcaaactttactgtgcacgtgaatcacctgggaatcatattgggatgcmgattctgaattggtagttttaaggtgaggactaaccagctcccaagtgatgctgatgctgccagtccagggactaaagtgagtggtaaggctttttatgg

SEQ ID NO: 312926 - DNA, 201 bp, Homo sapiens
ttacaaaaaatcccatcatatcaccaaaaaccagttttatcataacaggatgaatatcagaccaatattcattattagagatgtagtctaaactgactcgrgagaagacatccattgagtctttcattcagtgtaattagttgttatcatacatgcaaaatcctataactataaagcatttcagaaataaagtattgttaa

SEQ ID NO: 312927 - DNA, 201 bp, Homo sapiens
gaacccgggaggcggagcttgcagcgagcagagattgcgccgctgcactccagcctgggcgacagagcgagattctgtctttaaaaaaaaaaaaaaaaaaaataggctgtggcggcaagagtctttgttatcttaagtctacttctcagtgaattttcggggatcatggagactgtctcctccatatgctctcaaggaaca

SEQ ID NO: 312928 - DNA, 201 bp, Homo sapiens
ggtcaccagaggtataattctcttacaagaccttctactattgggagaataaggacatgtctttaccttagggaggcataaaggaaattaaaaatttatcwttaaaaattagaatagctaacatttgccttctgctatgtgtctcccgctgtgctcagcacttttcatgttttctctgattttatccttagaacaacacta

SEQ ID NO: 312929 - DNA, 201 bp, Homo sapiens
ggaccccacccccttctgcccagcaacctgtctgccttccgctgccattcatggcccgggtgttcagcccaaccccacttggagagatccgagcaggcacygggagagaagagaggtcaggcagtgggagcagacgctcctaagcctgcagggactgaggggggtgccttcctgggcacccgagggtgcaggctgcagaga

SEQ ID NO: 312930 - DNA, 201 bp, Homo sapiens
cagtcatctctgaacgtctgtccccaccccaagctgcgcctcattgagttgctttcagttccccaaaggaactgcatctttcctcagactgaagctaggcrctttcttctgttttaagggcctatctggtactctgcttcccctttagtctggagccgagctgcctgggtttgaatttcagctccaccatttactgtgtgc

SEQ ID NO: 312931 - DNA, 201 bp, Homo sapiens
acctaatatcctaatgtaataaagtagagaaccgttgccacagcacccaccaaagtgtgtctctcattgacaagctcaggtacttgtttgtctgtttctcytgcctacccctcagccactctggatcttccctttgatcattcttttctctttctagctttgatgttttggtttccattctgtaattcgcacactattttg

SEQ ID NO: 312932 - DNA, 201 bp, Homo sapiens
actgagtgagaatttgaacttgaatgtgtctggcctcagacctcttgtttttaaacaccagttacactgcttctatgtccggcagtctgagctatgtcttygaagcccctcttttcttgctgataatctgttgtagatcaggagcctctagtgagctttgcctcacctttatgcccctgtttctttgccttaggaaatccc

SEQ ID NO: 312933 - DNA, 201 bp, Homo sapiens
gcccagatgataccaatatgctaatatgcatgtatgtacacatgggcagtaatatatctagaagttaacttgaccatggaggcctgggaatacatgtgtasaagtatattctcttgtatttgaagatgttgaactgggagcctggaaggatggttgtgtatgccaggcctctgaaacttttgccatccacccaaatcactg

SEQ ID NO: 312934 - DNA, 201 bp, Homo sapiens
tttttaggtattctgttataagcaacagaaaatggactaagatacacaccttgtcaaactccacatctaccattttcttcttcaaaaaccctgcaggtggratgcaataagcagatcccgcctgtgcataggctaacagggaatctcagttaccaaggtggacacacactcaaaagatctacatttgaaaaagaaaaaacc

SEQ ID NO: 312935 - DNA, 201 bp, Homo sapiens
tttcatcatccttgttggttattacttcaaggttgaccaatctgaaagctctgtgtgaagaaggggactgagtggctgtgaatgatgagaccgttgtttaraagccaggcttagcctgagtccggaagaagcaacctcaatgctgtgctttaccatagcaccacctgcaggtatccaggaatagagaacccagctgagcga

SEQ ID NO: 312936 - DNA, 201 bp, Homo sapiens
ccctgggtgacaaagtctcttaagtaaaggaaaaaggaaaaaaaaatttaaaaaggacaagttagaaaaatagtttagaacaaatataattaacatttatrgagagacatgagaattttgcatctattagagaggaatcaactaggaattgtgattaaagatggaagaaaaatgcacatttgggccaagtgtggtggctca

SEQ ID NO: 312937 - DNA, 201 bp, Homo sapiens
agcctcatgaatatttagcctttctagggaaaggcatcccattcttgaagatccatcaatgcccctttatgtggagggcagaaagaggatatccatgaagrgaaaagaacctcatcatgttccactgccctgggaatagaaaggagagaagagagaggggaaggtgggagagagaggagagaggagagtagacttcccctc

SEQ ID NO: 312938 - DNA, 201 bp, Homo sapiens
ttcacacatgatgctttcaagtgatttttccattcaggttgcaagtaatgaaattctcagggacccatgctttcatcctggatataagaaggtagtgaacrtaagtgacctttacaagaccccctgcaccaagagatttgagatgactcttccattccagcagtttgaaatccagggtattggaaactatcaacaatgcca

SEQ ID NO: 312939 - DNA, 201 bp, Homo sapiens
atcatagaatgagaaagatgctagaagcctatatactatattgaatagcagttgtcactaagtagtagaatttagaggtcattttaatagaatttttttttgttttactgatttgaacttttaactttttttatagttcttatgtttgatgatgataatgatttttaaaaaatttcagttgtgtctaaaatagtacctagc

SEQ ID NO: 312940 - DNA, 201 bp, Homo sapiens
tcaccccaccatcagttcactagaggaaaaatgaggaatagttgtaataaacaggaagaacttttccaggcattagctatgcgaatccaagcatatataaatttatccagatttaacagagattgttgtgccttaggaactagagagagagcagttttctgccacttatttacggagcactcacatatgccaagtgccatg

SEQ ID NO: 312941 - DNA, 201 bp, Homo sapiens
ttgactgaagaagcagcagcctagaatatccatggaaagggactgcagccaaaggagacagctgccttccagcagaataccacagagtagccagaactagygatagcaagtaagagagaagataaaaggtaaagttgatggaaatcaagaaaatacatcgaaggtctatatggtatatggaatagtttgcctttgtactca

SEQ ID NO: 312942 - DNA, 201 bp, Homo sapiens
tgttcacagcaacacaattcgcagttgcaaaaatatggaaccagtccaaatgcccatcaatcaacaagtggacaaagaaaatgtggtaaatatatatatgkatgcatatatatatatatatatatacacacacataaatgtatatacacacactatggaatactactcagccataaaaaggaatgaaatcatggcatttgc

SEQ ID NO: 312943 - DNA, 201 bp, Homo sapiens
agatgtggtaatagtaatgacagtcaaaatagaattccagcctagtgcagtggcttgtgcctataatttcagctactcaggaagggaagttgaagcagaargactgcttgagaccaggagttcaagaccagccgggcaacatagtgagaccttatctctaaaaatataaagataaaaataaaattctaagtgaattatatt

SEQ ID NO: 312944 - DNA, 201 bp, Homo sapiens
ctactaaaaatacaaaaaaattagctaggcatggtggtgcgtgcctgtagtcccagctactagggtggctgaggcaggagaatcacttgaacccgggaggyggaggttgcagttagccgagatcgcgccactacactccagcctgggcgacagagcaagactccgtctcaaaaaaaaaaatctagcagatgtccttcttct

SEQ ID NO: 312945 - DNA, 201 bp, Homo sapiens
aaaacatgtgaagtcttcccaaattcatgtatagattcatacagtccagtaaaaatttcagcatttttgggtaaaaattgacatgctgatttcaaatttaygtgtaatttcaaaaggtcaaaaatgccaagagaatcttaaagaagaacaaggctagaaggcctctacctactagatatcacatcttattattaagataaa

SEQ ID NO: 312946 - DNA, 201 bp, Homo sapiens
catgataggggtacaggaggtagccacagaggatgaccatatagcagtcatagagggccagaagccacgcaggaagtggacatatgctgagtactgattcrggaagagcacatgtcattcagcaaccaatggttaaggtgtcaggtttcaatgaccttctccatgaggtctgtgaggtcctctgacgtacttattgtgggt

SEQ ID NO: 312947 - DNA, 201 bp, Homo sapiens
gattttatacttagggaaaaaataaagcttctagaacgtgatgtaagataatacgatcctgaggtaggcaaagggtttttaagctggacaaaaatcactgrtaataaagaaaaagattgtttaattgtgtcttgttaacattgagaatttctcttaataaaaagacagtattaagagagtaaaaaggcaagctactcaatg

SEQ ID NO: 312948 - DNA, 201 bp, Homo sapiens
caaacattgtaatgtgtgttgtctcatgtaatctttacaaaaattccatgatattggtttctgcatcttccagctgtggaaggaggtcatttggttaaggycacacagctaataataggcagaggggaaattttgactgatgtggttaggctgcaaagtctgggatcctaatggatacgttctacctcctcaagagctgta

SEQ ID NO: 312949 - DNA, 201 bp, Homo sapiens
tgggtatggtgggcatgggggcagggctagaacatgcctggttttcagcgaccttgtaggatttgatttttattctaagtataattaggagccaccaaagrttttaagcaggggagtgatatgatcagatttgtttttaaaagattcctgtgactgctgtttgtaggatgggttggactagaaccagaaagctaatgtgga

SEQ ID NO: 312950 - DNA, 201 bp, Homo sapiens
tgaacccgggaggcggagcttgcagcgagcagagattgcgccgctgcactccagcctgggcgacagagcgagattctgtctttaaaaaaaaaaaaaaaaaaaataggctgtggcggcaagagtctttgttatcttaagtctacttctcagtgaattttcggggatcatggagactgtctcctccatatgctctcaaggaac

SEQ ID NO: 312951 - DNA, 201 bp, Homo sapiens
gcaccatatgcacaaacaccagccttaatagtctgtggtgggctgggcactgtggctcccgcctgtaatcccagcactttgggaggccaaggtgggcagawcacgaggtcaggagatcgagaccatcctggctaacacgatgaaaccccatctctactaaaaatacaaaaaattagccgggtgtggtggcggacgcctgta

SEQ ID NO: 312952 - DNA, 201 bp, Homo sapiens
ggggaccccacccccttctgcccagcaacctgtctgccttccgctgccattcatggcccgggtgttcagcccaaccccacttggagagatccgagcaggcrctgggagagaagagaggtcaggcagtgggagcagacgctcctaagcctgcagggactgaggggggtgccttcctgggcacccgagggtgcaggctgcaga

SEQ ID NO: 312953 - DNA, 201 bp, Homo sapiens
atgtatttcctaagaacaaagattttctcttatataaccacagtacagtagtcaaactcaggaaatctaacactgatagaatactttcaattgtagtccawaatcaaattttgttaattggtcaaacaattgttatcatagatttacttttaacctcaattacgctcaatactatattcctcataagttcttagattctct

SEQ ID NO: 312954 - DNA, 201 bp, Homo sapiens
ttcaccatgttggtcaggctggtctcaaactcatgacctcaggcaatccgccggccttggcctcccaagtgctgggattacaggcctgagccaccgggccygggcctcttgtcttttcataaccaaacccacctttcttttcccactcctgctccccaagatgcagtgttttttgttgttgtttgtttgtttgtttgtttg

SEQ ID NO: 312955 - DNA, 201 bp, Homo sapiens
ccggctaatttagcccctcccacgagcccaagggtctgttatatctctgtttccttgaggacctctctcacggagacggaccacagcaagcagaggctggrggggggaaagacgaggaaagaggaggaaaacaaaagctgctacttatggaagatacaaagggtaagaccaaaattgatttgatctgaatccttaagaaaa

SEQ ID NO: 312956 - DNA, 201 bp, Homo sapiens
aagtttcaccatgttggtcaggctggtctcaaactcatgacctcaggcaatccgccggccttggcctcccaagtgctgggattacaggcctgagccaccgkgcctgggcctcttgtcttttcataaccaaacccacctttcttttcccactcctgctccccaagatgcagtgttttttgttgttgtttgtttgtttgtttg

SEQ ID NO: 312957 - DNA, 201 bp, Homo sapiens
ttctgtttgtttgttttttctttgtttttttgagacgaagtttcgcttttgttgcccagtctagagtgcaatggcctggtctcggctcactgcaacctccrcctcccgggttcaagcgattcttctgcctcagcctcccgagtacctgggattacaggtgcctgccaccacgcccggctaatttttgtatttttagtagag

SEQ ID NO: 312958 - DNA, 201 bp, Homo sapiens
aaaggcagggcaggacatattgattccaataccaagtggtgggatgttgtacagtgcctacatattgattaagtcagactgtaccttttgtatccaaagcrttcacacatgatgctttcaagtgatttttccattcaggttgcaagtaatgaaattctcagggacccatgctttcatcctggatataagaaggtagtgaac

SEQ ID NO: 312959 - DNA, 201 bp, Homo sapiens
tgtatatttagttcatgaaattttaatgcatgtgtagtttcatgtttccaccaccacagtaaagatacagagcagttctgtctccctgaaaatctctcctyttttccttattttttttttctgtttgtttgttttttctttgtttttttgagacgaagtttcgcttttgttgcccagtctagagtgcaatggcctggtctc

SEQ ID NO: 312960 - DNA, 201 bp, Homo sapiens
ggccataggtcagtatctattaagtttttatatgcatatgcccctttattcagggatttaacttcttttttttaatttttatttatttttattttattttwttttttttgagacagagtctcactctgtccctaggctggagtgcagtgccgtgacctcggctcactacaacctccgactccctggttcaagtgattcttc

SEQ ID NO: 312961 - DNA, 201 bp, Homo sapiens
gcctcccgagtagctgggattacaggtgcgcaccaccatgctcggctaattttttttatctttagtagagacagtgtttcaccgtgttgtccaggctggtstctaactcctgacctcaggtgatccacccaccttggcctcccaaagggttgggattacaggcatgagccactgcccccggctgactttagtttttaatat

SEQ ID NO: 312962 - DNA, 201 bp, Homo sapiens
cccacttggagagatccgagcaggcactgggagagaagagaggtcaggcagtgggagcagacgctcctaagcctgcagggactgaggggggtgccttcctrggcacccgagggtgcaggctgcagagatggccgggtcctgtgcctgggagggtggccacagctatacctgggagctcccgccctgccaactcagggatcc

SEQ ID NO: 312963 - DNA, 201 bp, Homo sapiens
agagaccagttagcatgctcctgccatggtctaggcaaggcaggcgaggccagaattaaggcattgtctgtggggtaaggggaggggataatgtgaaagayacttgggttgaccagatctttgtgacaaaattcctttgaggaccttttaagattaagatggaacaggtaccttgggacggttaatgctgagagaaaactc

SEQ ID NO: 312964 - DNA, 201 bp, Homo sapiens
atcaaaagcaaaatgtatataaattgtagtatactcatacaatggaataataatattgcaatgaaaatgaacaaagtactgccacacaacaattttttttkttgttgttgttttttgagacagagtgtaagtctgtcacccaggctggagtgcaatggcgtgaactcggctcactgcaacctccacctcccgggttcaagc

SEQ ID NO: 312965 - DNA, 201 bp, Homo sapiens
gccattaaaggatgctacacaactggtgacactggtagagaagatggattggaggggagaaaagctggggataaaaggaaggcagttagtaggtgtggacrccatttagatgagagatgacaggggcctaatgccagctggaaggtagcatcctctcgctcagagactcccagtgttgggtagcctagatcttggaagcaa

SEQ ID NO: 312966 - DNA, 201 bp, Homo sapiens
gagcccaagaggttgaggctgcagtgagccttgattgtgccactgcactccagcctgggtgacagagcaaaatcctgtccaaaaaaaaagaaagagagagattgagagagagaaagagagaagaaaagaaaggaggtaagaaggaaagaaagatgcacatttgacccctcttttgaaattttattaaaatacctgttaaaa

SEQ ID NO: 312967 - DNA, 201 bp, Homo sapiens
ccaatgtttaaattatttacacagccctaaaattcattctaaagaattttgttttgtatttatttgaattgaatagacttggaattgagttttgctctaamttgcaatgactgtggaacagccacctttgttgcagaattcctctcaaacccttatgatggaacaacagaaaatctataactatgataggtggccaaatta

SEQ ID NO: 312968 - DNA, 201 bp, Homo sapiens
gactttcaccaccttgtttacccctacaacaacaatttttaaattgccctattaagatatagagcattctatcattctaaaatgtttcctgtgattcagtrtatatttatttactttttggttgatttattgagtgaagaactgaaaatcactttatgggtagtatatttccttttttgtatcacatctgaagtgagacat

SEQ ID NO: 312969 - DNA, 201 bp, Homo sapiens
ttaaattagaaagaactttaatttttttttcttaaaaagaagattttggagatctctcattctaaacaattgtcttacttgtatttatgggacaatcaaawtaaagaaagacacaatagtgtcttggcttagaaattctcttgacaaaattaaaatgcaaaagtctaacccaaaacaaaattaaaatcctttgtacactca

SEQ ID NO: 312970 - DNA, 201 bp, Homo sapiens
tggtctaaaattctctttttttgttgtgtctctgccaagctttggtatcaggatgatgctggcctcataaaatgagttagggcagattccctctttttctrttgattggaatagtttcagaaggaatggtaccagcttctccttgtatctctggtagaattcggctgtgaatccatctggtcctggactttttttggttgg

SEQ ID NO: 312971 - DNA, 201 bp, Homo sapiens
gtatgttgatccagccttccatcccagggatgaagcccacttcatcatggtggataagctttttgatgtgctgctggattcggtttgccagtattttattraggatttttgcatcaatgttcatcaaggatattggtctaaaattctctttttttgttgtgtctctgccaagctttggtatcaggatgatgctggcctcat

SEQ ID NO: 312972 - DNA, 201 bp, Homo sapiens
caaaaaattgaccaaaattttgaccagacttttcataaaggaggatatataaatgagtaataaacataaaagagaaactcaacatcattatcaaagaagtkcaaatgaagacaataataagatagaattccatatcttttaaagtggttaaactttttaaaggtggaggatatggagttactggatatttcatttgctact

SEQ ID NO: 312973 - DNA, 201 bp, Homo sapiens
gaggaatgagcataccagttcagaggctaaatgtatttataccattgctcataggggaaattgctggaaatcaggagaatatctaccagtagagagttgtygaataaattaagatacatctacaccgtagactcttatgtggccattagagtggccccagctgacttggagggatttctataaaggattgttaagaaaagc

SEQ ID NO: 312974 - DNA, 201 bp, Homo sapiens
ttttgcttaggattgccttgtctatttgggctcttttttggtctgtatgaattttagagtagatttttttctaattctttgatttctttgggcaatacgaygcattcaaaaaagacttggaaggaaataaataaaaataaaagtgatatctaattagtagaatcttaaacatctttttttacttcattttataagtgatat

SEQ ID NO: 312975 - DNA, 201 bp, Homo sapiens
agcaattgcatcccatcttcattaagacaaccctggaagattccttctttaggtctcaaggtctcaaacagacccaagaactgagctgtaatatgaggaakatttttcccagtctggcagcagaggagattggatatctattccaggtcatttgccacctggtttctactagaaccctaattaaaaacctggagcagagtc

SEQ ID NO: 312976 - DNA, 201 bp, Homo sapiens
gctctcttcagagctgtcagacagggatgtttaagtctgccgaagttgtctgctgccttttgttcagctaagtcctgcccacagagatggagtgtagaggyagtagggcttgctgagctgcggtgggctctgcccagttcgcacttccaggccactttgtttacctactcaagcctcagcaatagtggatgcccctccccc

SEQ ID NO: 312977 - DNA, 201 bp, Homo sapiens
cactagccacatttcaagtgctcaatagccatacatggctggtggctactgtattggacaacacagatatagaatattgccttgctgtagaaagttctatkggacattgccactttaaagcatactcttgaatgataactctgaagtcattcaaaactaagtttaatgaatagggtgtatgataaaacattttataaaatc

SEQ ID NO: 312978 - DNA, 201 bp, Homo sapiens
gggggcaagagagaatggatggtttggttggaggaagtgagaagaatcagggaagaggactcttttgcttcctcatttcccatacatagagcctctgtcascatttgatttttgcgatcattaacatttttagagtcaggtataaccaagtgcaaaccagttatgttagttacatgctgctaatctgagaagagtgtgttg

SEQ ID NO: 312979 - DNA, 201 bp, Homo sapiens
ctggttcccaccaagccaagtgcagtcctagattctggctccctgtgcccactgtcagcagagaaagcaccaaatctagtgagaaaaagtttcagcatatsttaaaatgacagaaaccaccttatccaacctagacttttctgccatgggaaaaagatgaaacctggaaatctgggaaacttaaaattttcaacaccattt

SEQ ID NO: 312980 - DNA, 201 bp, Homo sapiens
tgaacaaagtactgccacacaacaattttttttgttgttgttgttttttgagacagagtgtaagtctgtcacccaggctggagtgcaatggcgtgaactcrgctcactgcaacctccacctcccgggttcaagcgattctcctgcctcagcctcctgagtacctgggattacaggcgcctgccaccacacctggctaattt

SEQ ID NO: 312981 - DNA, 201 bp, Homo sapiens
attctgaaaaggaagggtccaggtcacaaagtgccctatggggccatgctaggaagtttggagtttatcttagagatagtaggaagccattaaaggatgcyacacaactggtgacactggtagagaagatggattggaggggagaaaagctggggataaaaggaaggcagttagtaggtgtggacgccatttagatgagag

SEQ ID NO: 312982 - DNA, 201 bp, Homo sapiens
ccaccttgcggttcaatctcagactgctgcactttcagtgaacaaggctccgtgggtgtgtgacccgccaagccaggcacgggagagaatctccttgtctsccagttgccaagaccttgagaaaagcacagtatttgggtgggagtgtcccgttttccaggtgtaatatgtcacagcttcccttggctaggaaagggaaat

SEQ ID NO: 312983 - DNA, 201 bp, Homo sapiens
tagccacatgcagctctttaagcttgtcaattaaaattaaataaaattaaaaattctgtccctctgttgcactagccacatttcaagtgctcaatagccayacatggctggtggctactgtattggacaacacagatatagaatattgccttgctgtagaaagttctattggacattgccactttaaagcatactcttgaa

SEQ ID NO: 312984 - DNA, 201 bp, Homo sapiens
ataaatgcaattgttttctaactaagaagctgtgaaccgagaataattggctaattaaaagttcaaagagtggaaataaaatagcattaaaaagagccagkaacttcctctgacgtctgtggttcaagagatcagtggaacaggacatgggttatttactcaattaccttgtctttctacctttcttttcattctcacccc

SEQ ID NO: 312985 - DNA, 201 bp, Homo sapiens
ggaggccctggagagggtggctcttctctgcagacaggttgtttggaggtctctgcaggcctctcaaactgtcagcagatggtagctcttctttgcagctkgttgtcccctcatctctgtcctctgcatcctctgtcctgctctggccatcctctctagtcctgtggctcatagggtagtaagtacatgcagattggtcca

SEQ ID NO: 312986 - DNA, 201 bp, Homo sapiens
atattcagaggactgtaagtagttctgcatagatagaagataggtaagtagtgtaaaataataatgataataatagtagcagctcgtatttattgagcccktcctatgttcttagcactacgctaagcacttaattgcactgtcataacaactctatgaaattaacaattattaacaagataaggaagctgtggcttacaa

SEQ ID NO: 312987 - DNA, 201 bp, Homo sapiens
ttgcctcatcagaagaaagaatgtgagggatataaagtagaaaaagagactgagtcaagtttcagagcaggactggaagtttattgaaaaggctttagaayaggaaagaaaggagagaacccttggaagagatccaagtgggcaacttggagaacaaacaacgtgtttagctgtgatcctaggactttataggcggccatc

SEQ ID NO: 312988 - DNA, 201 bp, Homo sapiens
ggttgtttggaggtctctgcaggcctctcaaactgtcagcagatggtagctcttctttgcagctggttgtcccctcatctctgtcctctgcatcctctgtyctgctctggccatcctctctagtcctgtggctcatagggtagtaagtacatgcagattggtccatgggtggtcataggcagcagggagtccccactctgg

SEQ ID NO: 312989 - DNA, 201 bp, Homo sapiens
gaacaggacatgggttatttactcaattaccttgtctttctacctttcttttcattctcacccccaccccttcccttccttcttatttcctggctctattytcttacctgtgtctcccaacccaatgtccatctcatttttcctccttcttttttgccttttgccctttaactaactggttatcattgagatctttaggat

SEQ ID NO: 312990 - DNA, 201 bp, Homo sapiens
caccttggcatcccaaagtgctgggattacaggtgtgagccacctctcctagccatcactttgtaaaaattagtggagctatatatacatttgatttatgygttgttctgtattcatgtttatacttcaacaaaaaagtttacttaaaaaaagatactagatttttccaaattagattgtcaacaatgaaaaagtttgatg

SEQ ID NO: 312991 - DNA, 201 bp, Homo sapiens
aatggagtctcctatgcctacttctttctacacagacacagtaacaatctgatctctctttcttttccccacatttcccccttttcttttcgacaaaaccrccatcgtcatcatggcccgttctcaatgagttattgggtacacctcccagacagggtggcagccgggcagaggcaccccccacatcccagacagggtggc

SEQ ID NO: 312992 - DNA, 201 bp, Homo sapiens
ccaagttacagaacagtacacagagcatactatcatttacactaaaaaaggcacatttaaactcttaacccagtgtctaataaaaagttaaacaatgtttktgtggtagtatgtatgttgtgtggtacttagattttgaaaaacagttaataataatttcgtgaaaaaaattctgctctggtagcaaaagaacagcggtga

SEQ ID NO: 312993 - DNA, 201 bp, Homo sapiens
cacggggttgggggtaaggttatagattaacagcatcccaaggcagaagaatttttcttagtacagaacaaaatggagtctcctatgcctacttctttctrcacagacacagtaacaatctgatctctctttcttttccccacatttcccccttttcttttcgacaaaaccaccatcgtcatcatggcccgttctcaatga

SEQ ID NO: 312994 - DNA, 201 bp, Homo sapiens
tgtgatgctgtttgatagcattttacccacagtaggactttcaaaattggtgtcagtcctctcaagccctgctgctgctttatcaagtaagtttatgtaayattttaaatcctttgctgtcatttcaacgatgttcactgcatcttccccaggaatagattccatctcaagaaaccagtttctttgcttatccataagaag

SEQ ID NO: 312995 - DNA, 201 bp, Homo sapiens
gctgtttggagtcttgattgcttggcaagtattaatacaattctggggcacttaacggttggttagtgtagtaaattttgcttaacactagcttttctgcrtctcagagctactttaagttgtctggcaatgttcccaaataagggtaaccccgtctggagaagcctaggccttttccttccttttgttattttttttttc

SEQ ID NO: 312996 - DNA, 201 bp, Homo sapiens
ggcggccgggcagaggcgctcctcacctcccggacgggttggccgggcagaggcgctcctcacatcccagacggggtggtggccaggcagaggcactcctsacctcccagacggggtggcggccaggcagagacgctcctcacctcccagatggggcggtggctgggcagaggtgctcctcagttcccagatggggcggct

SEQ ID NO: 312997 - DNA, 201 bp, Homo sapiens
ctccagcactcctgctgtttcattgagcaagtttacataatattctaaatcctttgctgtcatttcaacaatgttcacagtatcttccccaagagtagatkccatctcaagaaaccactttctctgttcatccataagaagcaactccacagctgttcaagtttcatcatgagattgcagccattcattcacatcttcagg

SEQ ID NO: 312998 - DNA, 201 bp, Homo sapiens
tgagcccaagaggttgaggctgcagtgagccttgattgtgccactgcactccagcctgggtgacagagcaaaatcctgtccaaaaaaaaagaaagagagagattgagagagagaaagagagaagaaaagaaaggaggtaagaaggaaagaaagatgcacatttgacccctcttttgaaattttattaaaatacctgttaaa

SEQ ID NO: 312999 - DNA, 201 bp, Homo sapiens
gatcacttgagcccaagaggttgaggctgcagtgagccttgattgtgccactgcactccagcctgggtgacagagcaaaatcctgtccaaaaaaaaagaaagagagagattgagagagagaaagagagaagaaaagaaaggaggtaagaaggaaagaaagatgcacatttgacccctcttttgaaattttattaaaatacc

SEQ ID NO: 313000 - DNA, 201 bp, Homo sapiens
cccagacggggcagatgctgggcagaggcgccccccacctcccagatggggcggatgctgggcagaggcgcccccccacctcccagacggggcggatgccrggcagaggcgctccccacctcccagacggggcggatgccgggcagaggtgctccccacctcccagacggggtggccgccgggcagaggcgctccccaccc

SEQ ID NO: 313001 - DNA, 201 bp, Homo sapiens
ggatcacttgagcccaagaggttgaggctgcagtgagccttgattgtgccactgcactccagcctgggtgacagagcaaaatcctgtccaaaaaaaaagaaagagagagattgagagagagaaagagagaagaaaagaaaggaggtaagaaggaaagaaagatgcacatttgacccctcttttgaaattttattaaaatac

SEQ ID NO: 313002 - DNA, 201 bp, Homo sapiens
cccctctgctgcaggtctgttggagtttgctggaggtccactccagaccctgtttgtctgggtatcaccagcggaggctgcagaacagcaaatattgcacmacagcaaatattgctgcctgatccttcctctggaagcttcgtcccaaaaggggacccgcctatatgaggtgtctgctggcccctactgggaggtgtctcc

SEQ ID NO: 313003 - DNA, 201 bp, Homo sapiens
ctaaccttctgaagcctacttctgtcaactcgtcaaagtcattctccatccagctttgttccattgctggcaaggagctgcaatcctttggaggagaagasgtgctctggtttttagaattttcagctttcctgctctggtttcaccccatctttgtggttttatctacttttggtctttgatattggtgacctacagatg

SEQ ID NO: 313004 - DNA, 201 bp, Homo sapiens
ttttccttcatttcaaccttggtgaatctgacaattatgtatcttggggttgctcttctcgaggaatatctttgtggtgttctctgtatttcctgaatttraatgttggcctgccttgctaggttggggaagttctcctggataatatcctgaagagtgttttccaacttggttccattctccctgtcactttcaggtaca

SEQ ID NO: 313005 - DNA, 201 bp, Homo sapiens
gttccataggagctttaaagtagttttcttccaattctgtgaagaaagtcattggtagcttggtggggatggctttgaatctacaaattaccttgggcagyattgattcttcctatccatgagcatggaatgctcttccatttgtttgtgtcctcttttatttcattgagcagtggattgtagttctcttgaagaggtcct

SEQ ID NO: 313006 - DNA, 201 bp, Homo sapiens
taaatgcaattgttttctaactaagaagctgtgaaccgagaataattggctaattaaaagttcaaagagtggaaataaaatagcattaaaaagagccagtwacttcctctgacgtctgtggttcaagagatcagtggaacaggacatgggttatttactcaattaccttgtctttctacctttcttttcattctcaccccc

SEQ ID NO: 313007 - DNA, 201 bp, Homo sapiens
actgtttgtctcattttcatctccaaaaccttgattaatgagaaaaaaggatttgtgtgactagttttgggtgtagcgactctggtgtccttttttggtaygaatattcacattgttcggtccctttccttccagaaatagtctttgtctttccgtgttgttgtgtcataaagaaggatgccatagggtaggacatgggcc

SEQ ID NO: 313008 - DNA, 201 bp, Homo sapiens
ccactttttgatggggttgtttttttcttgtaaatttgtttaagttctttgtagattctgaatattagctctttgtcagatgggtagatcgcaaaaatttyctcccattctgtaggttgcctgttcactctgatggtagtttcttttgctgtgcaaactttttagtttaattagatcccatttgtccattttggcttttgt

SEQ ID NO: 313009 - DNA, 201 bp, Homo sapiens
ttgtggtgcagtggctaagattctgtgctttcacacctgtggcctgggtttgattccttgtcagagaatcagtccctgtagtacttgtaagctctttaackcaacagcacaaacatttataaaacttggtttaatatttgtgtgactcttgacttttggggtacccatttgttattgatggacaaatgtccacaaaaaagg

SEQ ID NO: 313010 - DNA, 201 bp, Homo sapiens
tatggccattttaacgatatggaatcttcctgtccatgagcatggaatgtttttccatttgtttgtgtcatctttggctttttagattgctgggtcaaatrgtatttctagttctagatccttggatcaccacactgtcttccacaatggttgagctagtttacactcccaccaacagtgtaaaagcattcctgtttctcc

SEQ ID NO: 313011 - DNA, 201 bp, Homo sapiens
ataagcagccactcccatttccctctccctcatcccctgacaactacttatttatatttgtatttttgtttgcttgtttgtgacagggtttcattctgtcmctcaggctgaagtgcagtggtgtgatcatggatcactgcagccttgacctcccaggctcaagcaatccttccacctcagcctcctgagtagccgggacta

SEQ ID NO: 313012 - DNA, 201 bp, Homo sapiens
aggattctgagtgggattctgaaaaggaagggtccaggtcacaaagtgccctatggggccatgctaggaagtttggagtttatcttagagatagtaggaarccattaaaggatgctacacaactggtgacactggtagagaagatggattggaggggagaaaagctggggataaaaggaaggcagttagtaggtgtggacg

SEQ ID NO: 313013 - DNA, 201 bp, Homo sapiens
tagttctgtgaagaatctcaatggtagcttaataggaatagcattgaatctataaattgctttgggcggtatggccattttaacgatatggaatcttcctrtccatgagcatggaatgtttttccatttgtttgtgtcatctttggctttttagattgctgggtcaaatggtatttctagttctagatccttggatcacca

SEQ ID NO: 313014 - DNA, 201 bp, Homo sapiens
atttctgaagggcttggaggtctaggtagaccagtgtagctttcatctggcacacagcaggacataggttcttgataaggtagagtcttaggaacgtcaaytgtggaagatttctatagccacatgaaggagggattctgatagagaagataattaggaagtgtgggagtcaccagaaagggccattgtagaagatcagat

SEQ ID NO: 313015 - DNA, 201 bp, Homo sapiens
tcatttttcagtggttactctagggatttttatttttcttgaacttcataactttaacttaaaatccacttcaggttaatggtggtttacctgtgataagrtatggcaactttgctccactatagctcagttctctccttttgattttggttgcgaacggcagtcctttggttcctatttgttcctgcattgctgtggttt

SEQ ID NO: 313016 - DNA, 201 bp, Homo sapiens
cggggtacagcttggttttatatattttagagaggcatgagacattaatcaaatacatttaagaaatacattggtttgtttcagaaaggtaggagaactcmaagtgagggctaccaggctataggtaaatttaaatgttttctgtttgacaattgcttgagtttgtcaaaagacctgagatctataaaaaggaatgttcag

SEQ ID NO: 313017 - DNA, 201 bp, Homo sapiens
cttaaacttcccagtctccagaaccatgagctaaataaacttctttttaaaatcaattacccagtctcaggtattccattatagcaatgtaaaatgaactraaacatgcatatccttgctgagcgtgacagatggcaagctttatttgtcttctgacactgagccatttctgtagctagtcatatagtcaactagctggtc

SEQ ID NO: 313018 - DNA, 201 bp, Homo sapiens
cctctgtctctctctttctctctcttttctcctagccctttacaaacttggggccctggcaagggtggtggggaatgggtctcacataactgcccatgtckagagctgtatacctaaattgggagggataccagggacaagactctctgggttcatagcctaggggcctaaggatgcagtgtagagctcccttagatccct

SEQ ID NO: 313019 - DNA, 201 bp, Homo sapiens
gtcaaatgttatttctgtttttaggtctttgaggaatcactgcactgtcttccaaaatggttaaactaatttacactaccaccaattgtgtataagcgttsttttttctccacaaccttgccagcatccgttatttttttactttttaatgatagccattctgactggtgtgagatggtatcttattgtggttttgcattc

SEQ ID NO: 313020 - DNA, 201 bp, Homo sapiens
tttcatatcacttattttgcttttcttctctagaatttttatttgattctttgctatggcttttgtttcttattgatatttcctattgctgaatcattatyatatttttctttgattttttaacatcataataacttcttgaaatctctgctaaatcctatatatctggccccattcaaagtcagtttatactgacttctt

SEQ ID NO: 313021 - DNA, 201 bp, Homo sapiens
ttaacatttcttttctgcatagaaaacttctgtaactattcttttagggtatatatgctggtgatagattctgttcattttccttcatctgagactgtctyaattttcctttcattcctcaagaatatttgtgctagatataggattctgtgttgacaattcttttattttagtagttgaaaaatactgtgccattttctc

SEQ ID NO: 313022 - DNA, 201 bp, Homo sapiens
atcccaccatttgcttgtgagatcaatgttttaactcctttaagcacatgtattttcttattattttaacctagaaatgatatatgcttgcattacttttytcatggttatttacaactaattgtggagtaaatgaatttagccatgtttaaaaaaatttaagatgtcagcaggcaagtgatagaggttgtttaatagaag

SEQ ID NO: 313023 - DNA, 201 bp, Homo sapiens
ccatcttttaaacaggattaccacttggaaggagttggactaagttagaggttcacaagggagaactttggctgtacattagaatcacccggctgggggtrgaggtgttaaaagtgaacagtgcctgggccccatgctagaaattctgatgtaattgtcccaggtgagactacagaaagtccccagggaactctggagtgt

SEQ ID NO: 313024 - DNA, 201 bp, Homo sapiens
aagtgctagttactataatgagattttacctctcctggttaaaccagaagttgggtactagaacaatttactttttactaactctttctctccctgatgamatgtaaagagaatgagacaattgtcaaagtaaccttttgtcgacaacgtctgatacaacatgactgaagtgaccttgaattttaattttgtttaaaatag

SEQ ID NO: 313025 - DNA, 201 bp, Homo sapiens
actaaatatctgttggcgatgaggcatggaggaaaaaatgctaaagataacaaaagttattttggttacagttcagtggaagaacatgaacaggaagaggratgcatagtgatcatggatgatgcaaaggaattggaacctctgaacttctattttgcttccatctagaaaaatggagttcaatcagtacaaagtaaaaca

SEQ ID NO: 313026 - DNA, 201 bp, Homo sapiens
cagagggggaaaaagcaagagacacaagtacaaaaggcaatgttttgtttaatctgaacatagattagtgcatagtgaagaggaagagaactcacccttaytgagtgccacctatgtgccagagtctgtgttgggagttctcacatatttattctcttttttacctccaacatggctttgtgaagtagattaaaaaaaaga

SEQ ID NO: 313027 - DNA, 201 bp, Homo sapiens
tgaaaaataaaaggaaataatggggaaaaaaactatgactttattagaaactgatatataattagaatgcagatttttggtgagagattagtggtaagaawataattgtaagtaaatatgtgttatttatttatagccattcttattttaaaaaagatatgtggtggtaaatatttatgtaaatgtcttcctaattgaaaa

SEQ ID NO: 313028 - DNA, 201 bp, Homo sapiens
gataaaccaccccagttaagtgcaggctctggatgaagtatttctattacaaatgacagagctgggacagaagcaatgtagactgttgatgcagtatctcraggggagtttgcacactggatatgtaaattattattgtttaaagatattcttccatcttggggaagttgcttaacctatattatttgcatttttcttatt

SEQ ID NO: 313029 - DNA, 201 bp, Homo sapiens
ataaatataaaaagcctctggttacttgagtgttgcacatttagatatttgattttgtatgttgattacaaatggagttgtggccttgcaaaccatcacartcatcattataatcattgaatttatggttcatatggcagtttcttatacattattcaatttactttaatcctcttaactctgtcaagtaggtattaccat

SEQ ID NO: 313030 - DNA, 201 bp, Homo sapiens
actggcctcatttggctgaaggaagttgggaggtggataggtgggggaaataaaagaaaagagaagagttaaatgagtgtcaatgtctcctaataattaaragcttagaatccctggagtcagacaggcttgtcctcaaattccagctctgtgcttaccatttgtgtgaccacgaatatgttatcaaacttttggacccca

SEQ ID NO: 313031 - DNA, 201 bp, Homo sapiens
cctcacgtgtcaatcagttataaggactcaagatgtgccgtgggaagaatgcaatctctctacctccaatcccaccatttgcttgtgagatcaatgttttractcctttaagcacatgtattttcttattattttaacctagaaatgatatatgcttgcattacttttctcatggttatttacaactaattgtggagtaaa

SEQ ID NO: 313032 - DNA, 201 bp, Homo sapiens
cagagccttttggaaaacacctatcggcctcagtactcttttccctcaggctggcagacaatgaggaaggaggagagagagctacccattggaggaggaartaaagctggaggctggggtagtggcaagatatgagcattcaggtctacaaagcttcaagtctctcattacttcactccatcaggccaggacaatcatggg

SEQ ID NO: 313033 - DNA, 201 bp, Homo sapiens
aggcataactgaagaacttcatactagttagggccacatactgaggtttgcatttttaggatgactatgttagcttttaagtagatgatgtgttggaaggrgaagtacctagaggtggggaggactctacagaagttattgtaggagtccagggaagaaatacagagagaaatggcctgggcatggtggctcatactggta

SEQ ID NO: 313034 - DNA, 201 bp, Homo sapiens
cagtttagaatttaaaatccagagaactcccaagaacatgaagctccttcgtcagtgtttccacagtaaattatgccccagctcaggttcagaagttgatraaatgccaatttgtcccgtgtagtccaagcagtttagtcaggttatgagatttgtttggacaaaacatggagctctaacatttggagattcacagtgtga

SEQ ID NO: 313035 - DNA, 201 bp, Homo sapiens
cagagttggcatttttacaaaggtctccagtgaacctaatgtatatatccggaattgaggactgctctggtgaaagacttacatatgtaaacaattcattrtaatagccttaagtgctatgaagaaaaagctcagagtgttgtgaagggtaccagttagtgtggggttcagggtagggttttctgaggcatccttgaggaa

SEQ ID NO: 313036 - DNA, 201 bp, Homo sapiens
tctgtgttgacaattcttttattttagtagttgaaaaatactgtgccattttctctggcctctgtggtttctgatgagaaagctactgtaagtcaaattaktttccttctaaaagtaaagtgttgtttctctctctttactttcaagatattttatttgtctttaattttcaaaagtttgatgattgatgtgttttggtgc

SEQ ID NO: 313037 - DNA, 201 bp, Homo sapiens
cggctgggttgggtggcttgactgtgaccctttttcccgaaccttctcgtgacccctcagagtcaatggagtgggtgcttttctctgtggagggaggtggraggggggtgggtgagcagctgcagctgagaggacttcaattttctccttggctcaggctgtttcctcaaatgaggaagccgaggttttaatggctccctc

SEQ ID NO: 313038 - DNA, 201 bp, Homo sapiens
acctagatgctaacacacacacacacacacacacacacacacacgtatgtgcttagtggtatgagttactgtcaaggagaagggctacctagatgctaacacacacacacacacacacacacacacacacacacacacacacacacgctttgggtggtgggaagttggagaaaacatttggggcaagagaaaacaatgaag

SEQ ID NO: 313039 - DNA, 201 bp, Homo sapiens
cctagatgctaacacacacacacacacacacacacacacacacgtatgtgcttagtggtatgagttactgtcaaggagaagggctacctagatgctaacacacacacacacacacacacacacacacacacacacacacacacacgctttgggtggtgggaagttggagaaaacatttggggcaagagaaaacaatgaagg

SEQ ID NO: 313040 - DNA, 201 bp, Homo sapiens
ctagatgctaacacacacacacacacacacacacacacacacgtatgtgcttagtggtatgagttactgtcaaggagaagggctacctagatgctaacacacacacacacacacacacacacacacacacacacacacacacacgctttgggtggtgggaagttggagaaaacatttggggcaagagaaaacaatgaaggc

SEQ ID NO: 313041 - DNA, 201 bp, Homo sapiens
tagatgctaacacacacacacacacacacacacacacacacgtatgtgcttagtggtatgagttactgtcaaggagaagggctacctagatgctaacacacacacacacacacacacacacacacacacacacacacacacacgctttgggtggtgggaagttggagaaaacatttggggcaagagaaaacaatgaaggcg

SEQ ID NO: 313042 - DNA, 201 bp, Homo sapiens
gaacgtgatgccgctgggcgcacggacaggtccgcgagaacgggcgagacctcagtgtgggaagggggtacctgaaatttggtgtatcgggaggggggatygtagatgccgcggcggcagcctccgggtagggagtggaggtggcgttgatatatccagaaaatggggtggaggatcgcactgatcctgcgaagtcccggg

SEQ ID NO: 313043 - DNA, 201 bp, Homo sapiens
gaagagtagtatgtgacagctatttgtctttctgcctcagatgcactggcacctagacatgtacaacaggaaccgtgtggatacatcccccacacctgttycttggcatgtcatgtgtatgcagctcttcggtttcctggctttcatgatattcatgtgctgggtgggggacgtgtaccctgtctaccagcctgtggtgag

SEQ ID NO: 313044 - DNA, 201 bp, Homo sapiens
gcgtgtggaagactacgaaccttacccggatgatggcatggggtgagacagagagggtatgctcgcacccaagtagtgatgggagaaggccggctgggttkggtggcttgactgtgaccctttttcccgaaccttctcgtgacccctcagagtcaatggagtgggtgcttttctctgtggagggaggtgggaggggggtgg

SEQ ID NO: 313045 - DNA, 201 bp, Homo sapiens
gctgtcgccgccatctccgccgccagggacggcccccaccggaaccggaagctccgcctattccggaccccaaaaaaaaaaaaacaaaaaaaccacacacmcaacggaaaccatagagatgagctgcgagagagagcggtccagagacataaagaacgcggagccgaggcctgagggtgcgcctcctaatggtagtatgca

SEQ ID NO: 313046 - DNA, 201 bp, Homo sapiens
tctgaggaggcttcgtgggcttttgggtcctctaactaggactccctcattcctagaaatttaaccttaatgaaatccctaataaaactcagtgctgtgtwatttgtgcctcatttccccaggaatagtcactgccttgaggaacctcatccttttccctttttttctgcttgatgtctgctgtcttccctgttttctttt

SEQ ID NO: 313047 - DNA, 201 bp, Homo sapiens
gctggactcctgtcatgagaatcttatttgtaaacggagtactctatatttgtgtgtatgtctctttaaaaaaaatgtttttctgttagtgctgtggaaawcgtagcaactattaagcagattaaacagccagcccccttacgtactccagttgatgttatcctatcccttccacactcttccgtatccatacccacataa

SEQ ID NO: 313048 - DNA, 201 bp, Homo sapiens
gaaaaaggacacaacattctgaaatgtcagagacctgcctggttttcccttcttcccgcttatccttcccagcctctatccaacccttggcttcccaactscgtatttaaaccccgcccctgttgaacccttcggcttttcttcactcccggcttcctccgtcacgtttggcccggctcagccgccgtgacaggcctttgc

SEQ ID NO: 313049 - DNA, 201 bp, Homo sapiens
ctagttgtcatcatttcctgttttttcttatgttgtggacaagagcagccttgttcgaagccagtgtcagatgaacctggatttgttggggaaaacccagsttagcaagaggtcccatgaggtgtttgagacgcagagatgaatgccaactgggtggtcaagaacacagttattacgagaagagtgcttttctaatctgta

SEQ ID NO: 313050 - DNA, 201 bp, Homo sapiens
ggttgaactggggtgaaccggtaagagaaccatatctcatttgaccttccttctctctttgtcttcttggcgattctttagctcagatggcacttctttgrccaagtaacactaagctttcctgctcaaggaagcaaggtccagtgatgtgagatctgagattgcatgtggcacactgaatgggacgtctgggaatcatga

SEQ ID NO: 313051 - DNA, 201 bp, Homo sapiens
ggccccgccgaaagtctcttcaaggagtcctattaccagctcatgaagacagccctcaaggaagatggtgtcctctgctgccagggtgagccacaggcctrgagcactggggcggggcggggtggggcagggcaggccctgccggatgctgatgcttaggggcccccaggcgagtgccagtggctgcacctggacctcatc

SEQ ID NO: 313052 - DNA, 201 bp, Homo sapiens
gatagagcggcctcccaccccccgaactagagctgtacttttcccttctcatttgttacctgccctctgaaacatggctcaggacagtaggcaggagccargcgactgcccagattcacaagctggtgaccaaggagagtggggatctggcattgggacactgaggaccctgtgtcctcttcagcctcccctctgctctga

SEQ ID NO: 313053 - DNA, 201 bp, Homo sapiens
cttctaaaataggaaacaggccaagcgctggtggctcacacctgtaatctcagcactctgggaggctgaggcgggcagatcacaaggtctctactaaaaawaaaaaaaaaaaaaaaaaaatggcccagcttggtggcgtgcgcctgtaatcccaactactcgggaggctgaggcaggagggtgcagtgagctgagatcgtg

SEQ ID NO: 313054 - DNA, 201 bp, Homo sapiens
gctgcccgagtttgcccgcaaggtgggtggcctgcggggctgggtggtgggacccagggacccagagcgccctcctgactggcctcatgtccctccaggcmctgaatgatgtgagctgagcccaggcgccaccactgatgccacccaggacctcggaccttggagcctgcggggtgcctcggcccctccagccccgggccg

SEQ ID NO: 313055 - DNA, 201 bp, Homo sapiens
tatcattatttcagtcatccgtgtgtccagctaaaagcccagggttctactatagaatttgggaagaacagacatcgaaggacaaagaacagtcactgccyaaaaatggcagtctctgctataaaaaattgacaagtggaattttttttttttttttttcctgagacaagagtttcgctcttgttgcccaggctggagtgc

SEQ ID NO: 313056 - DNA, 201 bp, Homo sapiens
cccagtgtcccctggaacagtgccggacgaggggcggccccaggtgtgctccgggctcttcccagatgctgcctgcatggttgtcagagaaagtgctagcraggccaggggcgtcccgcggaggggtgggggccgacactgatgcggcctcggaatcctagggcagccctggaaggaacttccaggaaaggggacaccggc

SEQ ID NO: 313057 - DNA, 201 bp, Homo sapiens
ctccctgggctggggctgggactgcgggctggcctcttgggtgggggagtcggagtctgcgccccgctccacgtgtcagccctcaggacacgtcagagccmgaggagaccccgggtcccaccccggcctccacccggcggcccgcctgccgttcctcgccacgtgtcaccatcgctcctcatccctgggacccctaggcgg

SEQ ID NO: 313058 - DNA, 201 bp, Homo sapiens
tagcttatactagtttcatcttccttccttggcattcgaactgcgtgtggaacaattagcatttaatatttggtaattagcatgcttaatgtgattctgakaagttctttgacattctcataaaaacagcacattcccacccacccttcaaagagcaagacccagtttgtcaagaaaaattgcgtgccagtcttttctggt

SEQ ID NO: 313059 - DNA, 201 bp, Homo sapiens
ggtgtgctccgggctcttcccagatgctgcctgcatggttgtcagagaaagtgctagcgaggccaggggcgtcccgcggaggggtgggggccgacactgaygcggcctcggaatcctagggcagccctggaaggaacttccaggaaaggggacaccggcacgaaagcgtttccgagggtagaaaaagatgaggcccgtggg

SEQ ID NO: 313060 - DNA, 201 bp, Homo sapiens
catgagccaccacacccagctgagattaacattttgctgtatttccttataagctttcgctatgtgtatatagatatatttttaaaatatatcttgggttyaggtttctatcatttgtcaccttgaaagtttgtgttatgacacttttctcaatctaaaatttattttcgccaacccccattgttaaacgcttaggttttc

SEQ ID NO: 313061 - DNA, 201 bp, Homo sapiens
atggcagagggcctggcaggtggtgagggcacctgcgtggcgagctcttactaaaactgagctgattttttttttttttttttttttgagacagagtttcsctcttgttgcccaggctggagtgtgatggtgcgatctcggctcactgcaacctccacctcctgggctcaagtagttcttctgcctcagcctccggagtag

SEQ ID NO: 313062 - DNA, 201 bp, Homo sapiens
ccccttggcccagactggtccctcccatcccctccaggatgtcatccaagtctccaagaagttcctgccaggcatggccattggctactctagctcgaagstgaccctacatgtgggtgacggttttgagttcatgaaacagaatcaggatgccttcgacgtgatcatcactgactcctcagaccccatgggtaagcagtg

SEQ ID NO: 313063 - DNA, 201 bp, Homo sapiens; identical to SEQ ID NO: 65261

SEQ ID NO: 313064 - DNA, 201 bp, Homo sapiens
tcccagtagctgggattacaggtgcccgcctggctaatttttgtatttttagtagagacggggtttcgccatgttggccaggctggtctctctaactcctyacctcaagtgatcaaccctccttggcctcctaaagtgctgggattacaggcgtgagccactatgcctggccaatacctgctactttttaaacaatttcaa

SEQ ID NO: 313065 - DNA, 201 bp, Homo sapiens; identical to SEQ ID NO: 65259

SEQ ID NO: 313066 - DNA, 201 bp, Homo sapiens
acacacatgaacagcttttaacagaaattcatcaactcccccccaacattttttattataagataggtatcaaaacaatcctgaacatatttttcatactwctagtagtcagcacccacaccacttcaaaaattaacacatttgtgctggatgtggtagtttttacccataatcccaacactttgggaggctgaggcaggc

SEQ ID NO: 313067 - DNA, 201 bp, Homo sapiens; identical to SEQ ID NO: 65260

SEQ ID NO: 313068 - DNA, 201 bp, Homo sapiens
gaaaggtagtatttgagttgagttacattgaaggaggtaagaggtgagggagttggccaagcagatatctgagagaggagcatttcaggaaaagcaacagyaagtgccataggccttcaggcaggaatgtgtccaaagagcttacagagcagcaagaagtccagtgtgtgaatgaaggagagagtaaagagaggtaaagta

SEQ ID NO: 313069 - DNA, 201 bp, Homo sapiens
aggtggagattaattagaagcatgatgaagtttatgaacatggcaggcatattgccatgggagcatattgcaaggggatcaaatgtggcttaggggtgagrggaggtggtcctggggaatggtctttaaagtcttaaagggtgagtagagttagccaggccaagggaggggtgtctgaaggctctgacggattggaagaag

SEQ ID NO: 313070 - DNA, 201 bp, Homo sapiens
tttgagttgagttacattgaaggaggtaagaggtgagggagttggccaagcagatatctgagagaggagcatttcaggaaaagcaacagcaagtgccatakgccttcaggcaggaatgtgtccaaagagcttacagagcagcaagaagtccagtgtgtgaatgaaggagagagtaaagagaggtaaagtaagagaagtacg

SEQ ID NO: 313071 - DNA, 201 bp, Homo sapiens
gcacgccaccacgcctggctgatttttgtatttttattagagacggggtgtcaccatgttggccaggatggtctcgatttcctgacctcgtgatccacccrcctcagcctcccaaagttctaagattacaggcgtgagccaccgcgccctgtcaggacattttttaattttttttattttttttgagacagagtctcgctc

SEQ ID NO: 313072 - DNA, 201 bp, Homo sapiens
taacccacaccccgtcatcatccagaacacttccatcacccccaaaagcttcccagtgcttcttgcctgtcaatcccacactccctgcccccatccagagrcaggaaaagaaccactgttctgattcctctcacagagattagttttgcctgtcatataaatggaacctttcactatgaactatgtatgtatgtatgtatg

SEQ ID NO: 313073 - DNA, 201 bp, Homo sapiens
tagagacaaggtttcaccatgttggccaggctggtcttgaactcctgacctcatgacctgcctgtcttgccctcccaaagtgctgggattacaggcgtgarccaccatgcccggcctatatggacattttttctgtctcatttttttttttaatcactcatactttataatgccacagtttcaaatattagaattaaatct

SEQ ID NO: 313074 - DNA, 201 bp, Homo sapiens
ccgtcatcatccagaacacttccatcacccccaaaagcttcccagtgcttcttgcctgtcaatcccacactccctgcccccatccagagacaggaaaagarccactgttctgattcctctcacagagattagttttgcctgtcatataaatggaacctttcactatgaactatgtatgtatgtatgtatgtgtatttattt

SEQ ID NO: 313075 - DNA, 201 bp, Homo sapiens
actactagtagtcagcacccacaccacttcaaaaattaacacatttgtgctggatgtggtagtttttacccataatcccaacactttgggaggctgaggcrggcagatcacctgagttcaggagttcgagaccagcctggccagcatggtgaaaccccatctctactaaaaatacaaaaataagctgggcatggtggtgca

SEQ ID NO: 313076 - DNA, 201 bp, Homo sapiens; identical to SEQ ID NO: 65263

SEQ ID NO: 313077 - DNA, 201 bp, Homo sapiens
taccatctggagtgatgtcatcatgtgagaagggcaaggctggggatagaacaagttttgggggaaaagcaagcaattgacttcgtggttttttgttttgttttttgtttgttttgagacagagtctcactccgtctcccaggctggagtgcagtggcatgatctcggctcactgcagcctctgcctcccgggttcaagtg

SEQ ID NO: 313078 - DNA, 201 bp, Homo sapiens
ctaatttttttgagacagagtcttgctctgtctgccaggctggagtgcagtagcatgatcttggcttactgcaacctctgcctccaaggctcaagcatttyccctgcctcagcctcccgagtagctgggattacaggcgtgtgccacacgcttggctaatttttgtatttttagtagagatggggtttcaccctgttggcc

SEQ ID NO: 313079 - DNA, 201 bp, Homo sapiens; identical to SEQ ID NO: 65262

SEQ ID NO: 313080 - DNA, 201 bp, Homo sapiens
gtcatgccagcggggccaacatcaccaacgccaccactgccgccaccacggccgccactgccaccaccactgccagcaccgagggcagcaacagtgagagygaggccgagagcaccgagaacagccccaccccatcgccgctgcagaagaaggtcactgaggtacccttcccttcttccttattaacaaccaaccaaggtg

SEQ ID NO: 313081 - DNA, 201 bp, Homo sapiens
gtgaaccaatctgcacatctctggccttattcttcccccttgccaagtagtccccaccgctgccttcttgtttccctccttgcccttctgcagctctcttycagacctaccccaaatccctcttcttgacaaagctttccaaatgcctgtccttgctactcccattgtgccttgcagagtacctaggtcttcaggtttgtg

SEQ ID NO: 313082 - DNA, 201 bp, Homo sapiens
aaggtatgggaaaactgaaacctgggtcattgtagaattcttactcatcaagtaaaggttagttgtgatcaatctattctccttagttgagaaaacggatrcacctgtgttcaaggtttttggcaaggcatacaaacgaatttcccaattattcagaaagttcagctattaatgggtcacgtagtgtcctactatcactgc

SEQ ID NO: 313083 - DNA, 201 bp, Homo sapiens
agcttgggtctttgaaatatattctcagtagatagtgtagtgtggaaacccattccatagttgcctttatttgttcacatgagcttaaggtaagcctgggrgttcaatgtccttcatgataccagctggttgacctcttgtccatttcagtttttgttccagcagctgggaatgttggtgtcctttgtgaagagccacatc

SEQ ID NO: 313084 - DNA, 201 bp, Homo sapiens
taagtttaattgaattcagtctggagcagatggcctgtgggcctcagatcatataaagatacactggttctttcctgagaatagaaatcccttgccagccrccttcccccctttcggacgcacacacatacacacaaactggagtagttttcttagcagggattcttaagtttcttctcccctaaaggatgacatttcttt

SEQ ID NO: 313085 - DNA, 201 bp, Homo sapiens
ccaggagtttgagactagcctgggcaacacagcaagaccctgtctcaaaaaaaagaacttccaatggatcattaatagaagtataactatcacccgggtgyggtggttcatgcctataatcccagtactttgggaggcccaggcaggcggatcacctgaggtcaagagtttgagaccagcttgaccgacatggagaaaccc

SEQ ID NO: 313086 - DNA, 201 bp, Homo sapiens
gagcactgccacccatcacagacacctgctcccatgggaggccaaacacatttgagagttactggttggagtccctgccagctctcttctcaggagccttrgagatgaaaaacaggcaggcaaaaactgggaaactaaattttctgtgactttctcatttctttttcagagttctcaccttatggtttgattatggtcact

SEQ ID NO: 313087 - DNA, 201 bp, Homo sapiens
gggtaatttataaaggaaagaggtttaattgactcacagttctgcttggctggggagaactcaggaaacttacaatcatggtgggaggggaagcaaacacwtccttcttcacttgggggcagaagagagaagtacagagtgaaggggagaaaagccccttataaaaccaccagatctcatgagaactcagtcactatcacg

SEQ ID NO: 313088 - DNA, 201 bp, Homo sapiens
ggatcaggacagttacagccttctgagaacacgcttgttagagcccatcagttctccaaagtgcctttgtgatttttgtagcagttttctgttatttcctrttgtgttagaaatgacctatctatgaaaggcttaccacttcacttctgacctggtttcctgtggatcacagtcctgccctgattccttctcctaagacat

SEQ ID NO: 313089 - DNA, 201 bp, Homo sapiens; identical to SEQ ID NO: 65275

SEQ ID NO: 313090 - DNA, 201 bp, Homo sapiens
tctgtaggttgctatgacccgagagaagtttccagagaagattccatttagactaacaagaatgttgaccaatgctatggaggtgagtggatatcgggaaygagctgcttccaaatgggatcaggacagttacagccttctgagaacacgcttgttagagcccatcagttctccaaagtgcctttgtgatttttgtagcag

SEQ ID NO: 313091 - DNA, 201 bp, Homo sapiens; identical to SEQ ID NO: 65277

SEQ ID NO: 313092 - DNA, 201 bp, Homo sapiens
gcccaaactgccttactcttaacccctgctggccctaccaaggctgtagttaagtcagtctaagaaatgaaatctgggctcttagttggactctaaccccmttggagcaagggctgctgttcccatgccctctgagtagagtaggcccctaccctccataccacctgttgcccaagagcctggacacgatgcacatttgtc

SEQ ID NO: 313093 - DNA, 201 bp, Homo sapiens
atatcaagaccatcctggccaatgtggtgaaaccccgtctctattaaaaatacaaaaattagctggatgtggtggcacactcctgtagtcccagctacttrggaggctgaggccagagaattgcttgaactcgggaggtagaggttgcagtgagccgagatcgcaccgctgcactccagcctggcgacagagcaagactcc

SEQ ID NO: 313094 - DNA, 201 bp, Homo sapiens
tcccaagtaggtaggaccacaggcatgagtctccactcctggctaattttttaaatttattttttgtagagatgatttgggatctcactgtgttgcccaggctggtcttgaactcctgggctcaagcaattctcctgccttggcctcccaaagtgcttgggattacagacatgagctgtggcgccttgccaggaaattata

SEQ ID NO: 313095 - DNA, 201 bp, Homo sapiens; identical to SEQ ID NO: 65264

SEQ ID NO: 313096 - DNA, 201 bp, Homo sapiens
cttctgcggagctaggctgatgctgtgaacttactccttgagtccctggagcctatctataagaggcccagggagcctgcatttccccctacaagtttaaytaatacagaaagattattggagaaatacttgttacaccattattatgtgtatgtggtgttggggattgctgctgtcttacagactctgagctgcttgttt

SEQ ID NO: 313097 - DNA, 201 bp, Homo sapiens
agaaggagataaaaagacagatttatgatctgggagtctaacctcaagggccactctggggtgtgctttgattaattgcccaaggcatgcttgaaggcagmaacttgagagagcgggcgctggggaagtgtccttgcgggacctcggtgggcattagccttgactggaaatgatgagtgtgtcccatgcaattagctgtgg

SEQ ID NO: 313098 - DNA, 201 bp, Homo sapiens
cacaatgtcagggagtctcttcctgttacaaagctatttggcctgatttcatagagtgaatcatagttgaggagatggtgtgtataccattgatcaaaccratgaatgtgatcacagttatatgtatttgtatctagaaagtgctgggacatagaaagggcacactttctacccctaagagaagatggactgtttggtaca

SEQ ID NO: 313099 - DNA, 201 bp, Homo sapiens
ttattttatttgtattagtttccagcacacacagcattgaagttactggttttggggggtttttttgtttgtttgtttgtttgtttgtttttgagtaaaaytgtttaactttgtttagccctcccctcttccccgcactccccatcccaccccttttttccttcgtgacatttagcaacaccctacatagttcatactttg

SEQ ID NO: 313100 - DNA, 201 bp, Homo sapiens
tattactacatccccaagatagaagatgttataatgttttgcatgaaaatttaatgttagtgaacttagccttaggcattggatcatatatatatatatakagagagagataatattccacaattatttgaaagtggcttgtctgatttaaccatcattaggaagatttttatttatttttatttttttatttataggaag

SEQ ID NO: 313101 - DNA, 201 bp, Homo sapiens
atctctttttttggggctatagctttacgaacaattatatttttatgactggaagaaaataaccaagtttctttcaagtcaaaatttgaagcatgtttcartactctttatttctctccctagcaaataccaaaggcaacaagcgatcccgaacgaggacggattcctactctgctggccagtcagtcggtaggtgcatcc

SEQ ID NO: 313102 - DNA, 201 bp, Homo sapiens
ggccttccaaagtgctaggattacaggtgtgagccactgtgcacagccttcttttttttttttaagaggcaggactttaatctgtctctcagtggagtacrgtggtgtgatcacagctcactgtggtcttgaactcctggactcaagcaatcctcccacctcagcctcctgagtagaaggaactacagaaatgcaccacca

SEQ ID NO: 313103 - DNA, 201 bp, Homo sapiens
aggctgtagctgtattaaggtaaaatttgtttctctttcgaggtccctaatcactacttcctaattttgatcagtttgttgtaaaactcattttttatgcrctgtgataattgggagagtggattaggaaaagacttgtatttgtttttgtttttgttgttttctcctcggaatgaatcgagcttcggtaatgttaaaatt

SEQ ID NO: 313104 - DNA, 201 bp, Homo sapiens
cacagagatatatttcagggggagaagttgatacttttgaaatttaagatcatataggtagtattggtcaagaatgtggggaaacaagcaagtacagaaarcctgaacatgctgtctggagacagccacccatggtttctctattgcagttcctccacttaacattgattcacacccatgataatttatttctagtgaata

SEQ ID NO: 313105 - DNA, 201 bp, Homo sapiens
gctcatccttcctagactctttccacgtattggtaattcctacttttgtttctttgtcccatactgagtttgggggcaaatggtttgagggaaagtatacrttgatccaaggaaataatgcttcagagacagatccccctcacatcctcacttttccacttctttgtagctgagatggtatgtaatgctttaaaatgtata

SEQ ID NO: 313106 - DNA, 201 bp, Homo sapiens
acgccattctcctgcctcagcctcctgagtagctgggactacaggcgcctgccaccacgcctggctaattctttgtatttttagtagagttggggtttcastgtgttagccaggatggtctcgatctcctgaccttgtgatccgcccacctcggctcccaaagtgctgagattacaggtgtgagccaccgcgcctggcctc

SEQ ID NO: 313107 - DNA, 201 bp, Homo sapiens
gtttcatcatgttgtgcaggctggtctcaaactcctgagctcaggcagtccacccgccttggcctcccaaagtgttgggattacaggcgtgagccaccgcscccgaccctgtactggttttttattagtttgagatggggtcttttttttttttttttttttaaatgagatgtagttttgctcttgttgcccaggctggag

SEQ ID NO: 313108 - DNA, 201 bp, Homo sapiens
tacataaacccagatggtatagcctactctacacctagctctgtggtgtagcctattgctcctgggctacaacttgtacagcatgttactgtaatgaataytctaggcaactgtaaaacagtggtaaatgtttgtgtatctaaacatagacatagaaaagatatgtaaaaatatactgtattataatcttatgggaccacc

SEQ ID NO: 313109 - DNA, 201 bp, Homo sapiens
aatttgatcaaagtctggcacattacccttgtaagttacccttgtaagttcagaaggctgcctagcagcaggatacaaaggctcagagggccctagatttsttcttttgatgtgggtgtttgttattgttgttgctctcttttttaaggttagtcaaggttgttttattaaatatgctaaaatatgccagtgacattcagc

SEQ ID NO: 313110 - DNA, 201 bp, Homo sapiens
ttctcgttgtatggtcagtggtattatttagtttgtctcttgtaacatttctgcttcggtttttgacataaagtgataggttgtctaattctattcatccrtaactctttagaagcaacagcacatctccagtgtatcccagggaggtgatggttgagtccttgatggtatagcacctgggggtcttttcactcactggac

SEQ ID NO: 313111 - DNA, 201 bp, Homo sapiens
ttcaggacccattgagagccaggaacataagcaaaaggccagcctggccctcagcagaccctattccctagcacacagactcacttcacgccacccagcccagacaaaccacaggagaaatgtagctggtcaggtgttaaacacgctgttcgaaagaagtagaacgtgttgggtgaggacatgacaattcgccacataaaa

SEQ ID NO: 313112 - DNA, 201 bp, Homo sapiens
tccctttatcgaccaactcgggcctcattggctgggttccccactgtgacacactgcacgccctcatccgggactacagggagaagaagaagatccttctyaacatcgagcatcgcatcatgttgcgggtatgtgatgcggccacgagagctagtgccccttccgtggcagggaatctccgtagcgctgcttttctcattc

SEQ ID NO: 313113 - DNA, 201 bp, Homo sapiens
ttctacgtgtccttggatttctttctagggctcctcttctgtttcattgctctttcggcctgtttctcaagttccatggtgttaatacaagtcccttctcrggggctatcgtcatctattttttttcttgaggctgttaacatctttatactcataaggggatatccttaaactgatatttttcatttactcagatcttta

SEQ ID NO: 313114 - DNA, 201 bp, Homo sapiens
gaggaagcagctcgtgtttacacagttgttatagaacccagagaattgagagttgataatgttttacagagcagggggaaagggccacatgggggacttgrcctagtcaataaattaagctatgattttttgaaaacctatttactgccatttatcaagtaatagtaacaactgacatttattgagtgctttccgtgtgtc

SEQ ID NO: 313115 - DNA, 201 bp, Homo sapiens
agagccctaataagtggaaaccattatatattattacagcctcctcaagctacttcaaatatgttttggaaatagggtagaggtaaaatttataatgctcyagttgcctgttcatacttaatgtccttgtcttacctctctacttgctgagtgtaggcacccagtcttgaacatctcttcccactttaccgtggtgctcat

SEQ ID NO: 313116 - DNA, 201 bp, Homo sapiens
tgtgatgataattagggattggtgcatttatcagtcttaaccaactttcagagtaacaatttgccacctcagtcaccattttatttgttatgataatattrgatttatgtgatacagaaaacataaaaaccatttatgtatacttctagaatgccttccagaattttcagcagctttactgtctgtctgaatgataatctg

SEQ ID NO: 313117 - DNA, 201 bp, Homo sapiens
gaagctaaattaaacagagcaatttagagaaaaccaacccatcatgtactgttttaggcttttgtggtttgagtaatagaaaagccaaaaaccgtttactycttgatggtgagaggctattcattggttcctaatagaccttgaactcccaacagtgttagaacatactaggaagaaagatatgaatgctaatgtctgtta

SEQ ID NO: 313118 - DNA, 201 bp, Homo sapiens
ggttttcaccatgttggtcagactggtctcgaactcctgacctcatgatctgcccacctaggcctcccaaagtgctgggattacaggcgtgagcccttgcrcctgactcaggatgagtgattaagcagcccattgtaaaggtaatagacatgagttctcagtcagcttattccatactacctgtggaatcctaggattctg

SEQ ID NO: 313119 - DNA, 201 bp, Homo sapiens
gactctgtctcaaaaaagaaaaaaaaaacagtctgcctgtgttctgagctgctcaagggtatactctctttacggtacactaaccctgcttttctgtgggygccagcatccagagatacgctgtcatccctttatcgaccaactcgggcctcattggctgggttccccactgtgacacactgcacgccctcatccgggact

SEQ ID NO: 313120 - DNA, 201 bp, Homo sapiens
gatactgaatagttctggggagagagctgggcaagggggatggatttgggcattgtcagcgtatagatgttatttcatcatgagactgggtgagaagcacagggaactagtacagttggagaagagatggagtctgcaaacctgaggtcaggagatgaagaggaccaaggcagatggggaaggaacagccagggagggagg

SEQ ID NO: 313121 - DNA, 201 bp, Homo sapiens
tcactgaaaaatctctttgagagaatcagctttgaagaaggtttaataaagtgagtcctaaagcagataagcttgtaagaaactgaaggacccttaagctragaaattgttttcaccatcctagggaagactagacagataaatattcggcaccatatatttactaatgtatacaaagcactggccatatggagaaataat

SEQ ID NO: 313122 - DNA, 201 bp, Homo sapiens
tgtccaaacacattttgtcacgaggcttttgacctgttcttattcctatgagtttattttgttaatgcaatttgcctgaaaatccatgtttcaattctgakaagcaccaaattttttcaataattattaactcacatttgaaaatggctttacagatttaaaaattttttttttttttttttgcaaatggagtctcaggct

SEQ ID NO: 313123 - DNA, 201 bp, Homo sapiens
ccatcttctccctatacctgtcgattggtcctcagggctgggaaccctccttccctcgctcccggcttagaggacagcggggaaggcgggcggtggggcasggggcctgaagcggcggtaccggtgctggcggcggcagctgaggccttggccgaagccgcgcggtgagtctagggcctggcacgacccctctagggcggc

SEQ ID NO: 313124 - DNA, 201 bp, Homo sapiens
ttagtggagggggtgaaagccatccagattgatacctggctacaggtgaggatacttggttacaggtgaaggtggctccaagtctctcttctgtgtgtctyctcttacaagcatgctgtgttcagtgtcacaaggcagtgtgtgttaatacagtgctaaggaagtagggctcggtcccagtgtcaagtgtccatattttct

SEQ ID NO: 313125 - DNA, 201 bp, Homo sapiens
ggcattttatagagctgtgctggcactgcatcaggacctcttctccttggcacaacaggtaaaaacctacatgcacccagatctctcagtgaggaaaagawtgtagtgcttctaagcccacggtgctttggtaaagaagctgttgtacttcaggtctgatgtttactcggctctgtgagtacatttgaatggttttgattc

SEQ ID NO: 313126 - DNA, 201 bp, Homo sapiens
ctgtaggttgctatgacccgagagaagtttccagagaagattccatttagactaacaagaatgttgaccaatgctatggaggtgagtggatatcgggaacragctgcttccaaatgggatcaggacagttacagccttctgagaacacgcttgttagagcccatcagttctccaaagtgcctttgtgatttttgtagcagt

SEQ ID NO: 313127 - DNA, 201 bp, Homo sapiens
aggaaacaaaatacacaagaaaacaggcctttcctgtgaggttgatgagacagccacgtaaacagagggttattatagcctgagaggatgttgataatgtrtgagccatgctaccttgaaagcccaaaggaggaagcagggtgattttgcagtacttcctggaggaaggactgagagttaggagataggtaaaggagaagg

SEQ ID NO: 313128 - DNA, 201 bp, Homo sapiens
tccttgcctgtacagtctctgggctaagacaagaggactgtgaatttgtgtgtttccagtttcgcctattagattatgcccctgccagccactggctcaastctatcagcaagcaggacagggtcagaagaatttccaaattccgttcaaaaggttatataaccatggggtgagcgtaaggtaggcgaaagagacgctact

SEQ ID NO: 313129 - DNA, 201 bp, Homo sapiens
gctgttcttaattaaatattattcttttgtatttgtactctaggggaattttatcgtgaaagatggattttataaatctaaaagtagaataatcattaaakagatgaggacttttttcaattggcccttgaaactgattgttttccattgtcacctgtgggatcacaggcctggggcgctgccaggagggtctccaaagat

SEQ ID NO: 313130 - DNA, 201 bp, Homo sapiens
tattgatttgcatatgttgaaccagccttgcatcccagggatgaagcccacttgatcatggttgataagctttttgatgtgctgctggattcagtttgccmgtattttattgaggatttttgcatcaatgttcatcagggatattggtctaaaattctcttgttttgttgtgtctctgccaggctttggtatcaggatgat

SEQ ID NO: 313131 - DNA, 201 bp, Homo sapiens
agtggcacaaataaataagtgaatagatgattctttttaaaaagttttaaaaagccaggggatgggggctgtttgccacctttgctccaaacactttatcrcttttcccattgccgacaattgtttatctttgctagttgcatggttgcttgatcttaatactaagtcagtgcttgtcagtaactaggagtgactagcaaa

SEQ ID NO: 313132 - DNA, 201 bp, Homo sapiens
ctctgtctcaaaaaaataagtaaataaataggttagattagataggcaggtagggagtggcacaaataaataagtgaatagatgattctttttaaaaagtkttaaaaagccaggggatgggggctgtttgccacctttgctccaaacactttatcgcttttcccattgccgacaattgtttatctttgctagttgcatggt

SEQ ID NO: 313133 - DNA, 201 bp, Homo sapiens
tataaattaccttgggcagtatggccattttcacgatattgattcttcctatccatgagcatggaatgttcttctatttgtttgtgtcctcttttatttcrttgagcagtggtttgtagttctccttgaagaggtccttcacatcccttgtaagttggattcctaggtattttattctctttgaagcaattgtgaatggga

SEQ ID NO: 313134 - DNA, 201 bp, Homo sapiens
aggaggcagaggttgcagtgagctgagattgcgctactgcactccagcctgagagacagagctagactctgtctcaaaaaaataagtaaataaataggttmgattagataggcaggtagggagtggcacaaataaataagtgaatagatgattctttttaaaaagttttaaaaagccaggggatgggggctgtttgccacc

SEQ ID NO: 313135 - DNA, 201 bp, Homo sapiens
ttctgttccattggtctatatctctgttttggtaccagtaccatgctgtttggttactgtagccttgtagtataatttgaagtcaggtagcgtgatgcctycagctttgttcttttggcttaggattgtcttggcgatgcgggctcttttttggttccatatgaactttaaagtagttttttccaattctgtgaagaaagt

SEQ ID NO: 313136 - DNA, 201 bp, Homo sapiens
gccccaaggtgattttgaggtgggacattaaagaatgtcattatgtctcaactagccactctccatttctctacaggaggcagaaggcaatgcaggtggaygccacagtcttcacttgcatcagcatgctggctcgagcaatggggccaggcatccagcaggatatcaaggagctgctggagcccatgctggcagtgggac

SEQ ID NO: 313137 - DNA, 201 bp, Homo sapiens
gctggtcttgaactcctgggctcaagcaattctcctgccttggcctcccaaagtgcttgggattacagacatgagctgtggcgccttgccaggaaattatrctcttgattttaccccgtttcctgccgaaatgctatccccttagtttttcttgttgacccactctaattttagggttgtatctccttggtcacctgtctt

SEQ ID NO: 313138 - DNA, 201 bp, Homo sapiens
cattaaaacaggacagtatcacctagctcatagagtggttgtcagatttcattgaaatagttcttgtgcaggtggtttgtaaattataagaaactatccarggctgggcatggtggctcatgcctgtaatccaatccaagcattctgggagaccgaggtgggagtttgagctcaggagtttgagaccagcctgggcaacat

SEQ ID NO: 313139 - DNA, 201 bp, Homo sapiens
ccattaaaacaggacagtatcacctagctcatagagtggttgtcagatttcattgaaatagttcttgtgcaggtggtttgtaaattataagaaactatccraggctgggcatggtggctcatgcctgtaatccaatccaagcattctgggagaccgaggtgggagtttgagctcaggagtttgagaccagcctgggcaaca

SEQ ID NO: 313140 - DNA, 201 bp, Homo sapiens
gtcactggccagatgtcaatgaggccttagtggagggggtgaaagccatccagattgatacctggctacaggtgaggatacttggttacaggtgaaggtgkctccaagtctctcttctgtgtgtctcctcttacaagcatgctgtgttcagtgtcacaaggcagtgtgtgttaatacagtgctaaggaagtagggctcggt

SEQ ID NO: 313141 - DNA, 201 bp, Homo sapiens
atccatgtttcaattctgataagcaccaaattttttcaataattattaactcacatttgaaaatggctttacagatttaaaaattttttttttttttttttgcaaatggagtctcaggctggtcttgaactcagctactcaagtgatccttccacctcagcctcttgagtagctgagattacagctatgtccagcttaaaa

SEQ ID NO: 313142 - DNA, 201 bp, Homo sapiens
agataatatacaagtaaaaacctattatatatcatatggttataagagctatggagaaaagtagggcaaggaaggggaatagagtatgctcacctggattraggattacattttaaaacacggtgctatttgagcacagccatgaaggaggttagaaaaaagccctacaggtatctggggaagagcattctaggcagtggt

SEQ ID NO: 313143 - DNA, 201 bp, Homo sapiens
atcatcacaccatggttgtccaggccatcaccttcatcttcaagtccctgggactcaaatgtgtgcagttcctgccccaggtcatgcccacgttccttaaygtcattcgagtctgtgatggggccatccgggaagtaagtacctcaaaccccaatccttctctttctcctctgcaccacacatgcacagatccatctgtgc

SEQ ID NO: 313144 - DNA, 201 bp, Homo sapiens
tactaatttagaaagtgccatttctctctgctctagtataatgaggcctgtgctgattactgctgcagagggaacttatcagtgagtcttatattagaaataagagctctgaacatgggattgggagatgcgggttccagtcttgcctttgctgtgtgatcttggacaagtcacttaaattctttgagcctgtgtttttag

SEQ ID NO: 313145 - DNA, 201 bp, Homo sapiens
cagcctgggatacattgcagagctattgcattacatttgcacagagtaactctgacacctggaaaagaacttcaagtatttttattaactaaaacagaaaatgccattatcaatttagatactaaaatattcttcagtattaaccaagtatcctagtgatttttctctgggctttatatagagtagtaagctgaaatttta

SEQ ID NO: 313146 - DNA, 201 bp, Homo sapiens
agtagatacctaataaatatttgttaaataatcagatgattgcaagttcaggtactctacagtgtaatcctatagaaatgggcagtaacttgtcttctttsgtttgaactatacctcctgcctctcaggatctaatctttagatgccagcccactcccaccaccacagttagagaattattagaaattgttctgattatat

SEQ ID NO: 313147 - DNA, 201 bp, Homo sapiens
tatttctttcttttttttttttaattatactttaagttctagggtacatgtgcacaacgtgcaggtttgttacatatgtacacatgtgccatgttggtgtrctgcacccattaactcgtcatttacattaggaatatctcctaatgctatccctccccgctccccacactccacgacaggccccggtgtgtcatgttcccc

SEQ ID NO: 313148 - DNA, 201 bp, Homo sapiens
cggggtttcaccatattgcccaggctggtctcaaactcctgacctcaggtgatctgcccaccttgggctcccaaagtgccgggattacaggcgtgagccastgtgcccggcctaaatttccattagatagtgctgctgtagaataataatctctctttttagactgaacttgaggaaaggggcagtcttagtcatttttaa

SEQ ID NO: 313149 - DNA, 201 bp, Homo sapiens
attttgtatttttagtagagacggggtttcaccatattgcccaggctggtctcaaactcctgacctcaggtgatctgcccaccttgggctcccaaagtgcygggattacaggcgtgagccactgtgcccggcctaaatttccattagatagtgctgctgtagaataataatctctctttttagactgaacttgaggaaagg

SEQ ID NO: 313150 - DNA, 201 bp, Homo sapiens
attaatgttagatgtaagggatggcaaatgtgtccatcatgtggtactgtggtaatgtaaagtggtcatagtaatctttgaaatggaacctctggttccaygtctttgtgaggccccaactgttggcttagaaaatcttttagaacttaaggatttggatcctatttgctaatgcttctagtcctgttgtcattttttatg

SEQ ID NO: 313151 - DNA, 201 bp, Homo sapiens
caggcagcaacggacatgagtttgttttccttctaaaaggccatgaagatctgcgccaggatgagcgtgtgatgcagctcttcggcctggttaacaccctyctggccaatgacccaacatctcttcggaaaaacctcaggtattcagaaaccctgaaatggcaacaatttgagaagtcttctggttttttcctacatttgt

SEQ ID NO: 313152 - DNA, 201 bp, Homo sapiens
tctgctttttgatgccaatgcaagagatacacattatcaccccatcacctctatctatctctcattctttcttagtgcctctttgatggttctcattcccrtggtatctacagaagaagaggatagaattgattcttcctgttttaattgatagggaaatcagaggcgaggctcagggccatagggaaaactagcagcaat

SEQ ID NO: 313153 - DNA, 201 bp, Homo sapiens
tctgaagaacatgtgtgagcacagcaacaccctggtccagcaggccatgatggtgggtcggagccactgtggggcttcatagaccctggtcccttagctgrtgggcgcaagtgggattgtttttcttcctcgcattggtgctgtgcacttcctctgactgctggaaatagtacctcctgtgtctccaaaacagacctttct

SEQ ID NO: 313154 - DNA, 201 bp, Homo sapiens
tcatttttgaggcttatttccatacttttttcagaatgggctattgagaacttacaggctgctggaaacatgcctgttttctctgatcggcagataccctkacaccagaaggaatgatttaaattaatcctgtcttttggattgttcgtgcagtaattagtttggaatgcgatttgcttccatcaggccatggtttcttgc

SEQ ID NO: 313155 - DNA, 201 bp, Homo sapiens
caaacctagccaagcttgggtctttgaaatatattctcagtagatagtgtagtgtggaaacccattccatagttgcctttatttgttcacatgagcttaakgtaagcctgggggttcaatgtccttcatgataccagctggttgacctcttgtccatttcagtttttgttccagcagctgggaatgttggtgtcctttgtg

SEQ ID NO: 313156 - DNA, 201 bp, Homo sapiens
attgcttgagcccagaagtttgacactagcctgggcaacaacaacaacaacaaaaattccatgttcatttacctcaataaatttaggaagcatgtcttttmaaatccgctttatttatttatataactaaagctgttgttgttgttgttgttgttgttgttgtttttctcagtccaacaagtatctaaagctgtattgtcc

SEQ ID NO: 313157 - DNA, 201 bp, Homo sapiens
agtagtttgagaactactgctctaagggaacccctagcagggcccaggagtgaagatttctaagtctcggtggcagaaaaccaacacagaggtttatcctkttcccttaatggagcttcagtaaatgcatagggcatcatggccaccagttcctctttttggtctcagctctgtattgagccagagtgcttgtgtccctgg

SEQ ID NO: 313158 - DNA, 201 bp, Homo sapiens
tcctccctcctgaggcaaagatattgccagaatgaaatgggcaagctatttgtctaatcctgtcccctatcatctgtgtaatggctattttcaattgtttrgaggaaaatgtaatttcccaacataccattgaactgtgagctgtctcagtagtaaggaagaaagcaattttgttgcacctggagaaacctgagagagttc

SEQ ID NO: 313159 - DNA, 201 bp, Homo sapiens
caggtatctggggaagagcattctaggcagtggtccctgaggcaggagcgtgctggtgtattagaggagcagcaaatactgcagtagcagctcccctaccrtggctgagcagagtgagcaggagaagtgtgtggggatatggggtcagaggaacacctaagggaaggagggggcatatcacatagggcctttgtgtgggaa

SEQ ID NO: 313160 - DNA, 201 bp, Homo sapiens
agatcataggccctcaaccctaagaggagccatggagccattccaaatgaaagaatacttcctaagctttttatttgttttaaatcttcagggaccatgcyatcttctctgtatcgttccaattttagtatatgtgctgccaaagcaagcactttctgcgttttttgccagaacgctaggtgagaaaatcaaagtctcaga

SEQ ID NO: 313161 - DNA, 201 bp, Homo sapiens
agatggctccggactatgaccacttgactctgatgcagaaggtggaggtgtttgagcatgccgtcaataatacagctggggacgacctggccaagctgctrtggctgaaaagccccagctccgaggtaggccactgggccctgcagacctgcgctctcctggaacccccactcgcaataggatggccctcccatctgttca

SEQ ID NO: 313162 - DNA, 201 bp, Homo sapiens
tctgctggattgttgtagaaatgtacaaatctacagtaattgtgatgtgatgggtccctttgaactgtgctctggacaatttgcatacccatctgtggtakccctgcctgagtaacctgctctccttgccccaaggtgattttgaggtgggacattaaagaatgtcattatgtctcaactagccactctccatttctctac

SEQ ID NO: 313163 - DNA, 201 bp, Homo sapiens
cagtttgtactcaaagcagtaaactggatccttgctcattaaaccagtctagactcccaggttgatgtgtcacattttgctccctacctttaaacagatayaatcattgtggtcttgtggatttctcaagcgagctccttcaccctcccctctttcccttccttccataactcaggcttatatttagtattgagcttagtt

SEQ ID NO: 313164 - DNA, 201 bp, Homo sapiens
ttgcttgaacccaagaagcggagggtgcagtgagctgagatcgtgccattgcactccagcctgggtgacagagtgagactcggtctcaaaaaaaaaaaaaraaaagagagtggatatggacagtgaccttcttaccttcaggttctcaaatcagagacaaagaaattaatttctcagagcgagagtgttcatttttcatga

SEQ ID NO: 313165 - DNA, 201 bp, Homo sapiens
cactttgggagaccgaggcggacagatcacctgaggtcaggagttctagaccagcctggccaacgtggcaaaaccccatctctactaaaaatacaaaaatkagccaggtatgctggtgggcaccagtaatcccggctactcaggaggctaagacaggagaattgcttgaacccaagaagcggagggtgcagtgagctgaga

SEQ ID NO: 313166 - DNA, 201 bp, Homo sapiens
acaatcaagagagtaggtgtggctgggcgtggtggctcatgcctgtaatcctaacaatttgggaggctgagacaggcagatcacttgagctcaggagttcragaccagcctgggcaacacggcaaaacttcatttctactaaaaatacaaaaaaaaaataataatgtgtgtggtggtgtaggcctttgagaggctgaggtg

SEQ ID NO: 313167 - DNA, 201 bp, Homo sapiens
tccacctcagcctcccgagtagctaggactgcaggtatgcaccaccacacccaactatctttttttctttctttctttctttcttttctttttttttttttgtagtgatgggggtctcactgtgttgccagggctggtctcgaactcctgggctcaagtgatcctccagcctcagcctctcaaagtgctaggattacaggc

SEQ ID NO: 313168 - DNA, 201 bp, Homo sapiens
tttttttttttaattgaaatggagtctcactttgtctcccagattatagtgcagtggcgtgatctcggctcactgcaacctctgcctcctgagttcaagcratcctcctgtgtagcagggattacaggtgcccaccaccatgcctggctaatttttttgtatttttagtagagacagggtttcaccatgttggccaggctg

SEQ ID NO: 313169 - DNA, 201 bp, Homo sapiens
agccaagcgtggtggcatgaagctgtaatcctagctactcaggaggctaaggcggggggattacttgagtccaggagtttagaggctgcagagagccacartcgtgcccctgcattccagcctagatggcagagcaagactgcatctcaaaaaaatttttttttggtttataaaacttctaatgcatgtgaaagatttata

SEQ ID NO: 313170 - DNA, 201 bp, Homo sapiens
gaggctgagacaggaggatcacttgaggccaagagttcaagaccagcctgggcaacctagcgagactctatctctacaaaaatgaaaaattagccaagcgyggtggcatgaagctgtaatcctagctactcaggaggctaaggcggggggattacttgagtccaggagtttagaggctgcagagagccacaatcgtgcccc

SEQ ID NO: 313171 - DNA, 201 bp, Homo sapiens
ggtcttgaactcctgacctcaaatgatccacctgccttggcctcccagagtgctgggattacaggcgtgagccaccacgccccgcctggttttttgtttttgtttttgttttggaaacagggtctctgctgcccgggctggagtgcagtgggacgatctcggctcactgcagcctcaacctcctgggctcaagtgatcctc

SEQ ID NO: 313172 - DNA, 201 bp, Homo sapiens
ctccagcctgggtggcagagtgagaccctatctcaaagtagattaaaggctaggcacaggggctcatgcctgtaatcccacaactttgagaggctgaggcrggaggatcacttgaggtcaggagttcaagaccagcctggccaacatggcgaaacctcgtctccattaaaaatacaaaaattagccgggcatggtggtgtg

SEQ ID NO: 313173 - DNA, 201 bp, Homo sapiens
gcatctacaagagaacaaaccacagggtgagcatttagacccagtggctccatctgagttgagtgtttagagactgagcctttatttctaccctgggattctcagtggtgttaattacccatcagtgtctgcatttgggagaggtggatatggggagatccagagggggtgtattttggctttactagcggtggagcagag

SEQ ID NO: 313174 - DNA, 201 bp, Homo sapiens
tcgccctccctgcgctcctgctgggccctggcacaggcctacaacccgatggccaggtatagtgtgtcagggcgggtggagaagatcagcacatagaaaaygatatatacaaattagtttttattagaagtaataatcaaggggctggtatttttaatttttctaattttgtgggatacaaagaaagagaaagacaaattc

SEQ ID NO: 313175 - DNA, 201 bp, Homo sapiens
tacatgcacccagatctctcagtgaggaaaagattgtagtgcttctaagcccacggtgctttggtaaagaagctgttgtacttcaggtctgatgtttactyggctctgtgagtacatttgaatggttttgattcattgtactcagaagactgccagcaggtcagctggggctacttattgttctgagggggacaaatgtgt

SEQ ID NO: 313176 - DNA, 201 bp, Homo sapiens
caatcatcagcgctatgatgtgctcatctgcagaattgtcaaggtgaactatacttcttttctgttctgaagtccctgttgtctttactacttgatattcytgtaatcttggctatgggagtttgtgtagctttttggctgtaaattagggattggcaaacttttttccagttttgtagactatgtggtctcttttgcagc

SEQ ID NO: 313177 - DNA, 201 bp, Homo sapiens
tatgttagcagttactgtatgttagtgattgttgtagggcagcgctagagactgtggaccgcctgacggagtccctggatttcactgactatgcctcccgsatcattcaccctattgttcgaacactggaccagagcccagaactgcgctccacagccatggacacgctgtcttcacttgtttttcagctggggaagaagg

SEQ ID NO: 313178 - DNA, 201 bp, Homo sapiens
ggtatcttatcagttcctgagaaattctcatctattatcttttttggaattttgtccttatacccttctatttttttttttctttcttttcttttcttttyttttttttttttttgagatcaagtctcactctgctgccaggccggaatgcagtggtacgatctcggttaactgcaacctccaccttccatgttcgagtga

SEQ ID NO: 313179 - DNA, 201 bp, Homo sapiens
attgcttaattctgaaagtcttgtgagaagaatggcaagaatcagagtcaggcacacaccatgatggtggagaaaggaagagagggcttttttaaaaaaawttttttattttatttatttgtttttgagacagtttcactttgtccaggctggagtgcagtggtgtgatctcggctcactgcaacctccatctcctgggtt

SEQ ID NO: 313180 - DNA, 201 bp, Homo sapiens
catagagtggttgtcagatttcattgaaatagttcttgtgcaggtggtttgtaaattataagaaactatccaaggctgggcatggtggctcatgcctgtartccaatccaagcattctgggagaccgaggtgggagtttgagctcaggagtttgagaccagcctgggcaacataatgagaccttgtcactaaaaaaaaaaa

SEQ ID NO: 313181 - DNA, 201 bp, Homo sapiens
ctgggcatggtggctcatgcctgtaatctcagtaatttggcaggccaaaatggaagaatcacttgaagcaggagtttgagaccagcctgggcaacatagtraaacaccatctgtataataaaaatgaaaaatgaaaaaaattaatttcagcctgggcaacagagtaagaccctgtctcaaaaaaaaaaaaaaaaaggaatt

SEQ ID NO: 313182 - DNA, 201 bp, Homo sapiens
tttttcttcctcgcattggtgctgtgcacttcctctgactgctggaaatagtacctcctgtgtctccaaaacagacctttctgaggttagctgattcttgrtgcttctctccttcttctcttggcttcaggtgagcgaggagctgatccgagtggccatcctctggcatgagatgtggcatgaaggcctggaagaggcatc

SEQ ID NO: 313183 - DNA, 201 bp, Homo sapiens
gccaatgacccaacatctcttcggaaaaacctcaggtattcagaaaccctgaaatggcaacaatttgagaagtcttctggttttttcctacatttgtctcrtgtagtcatgtattatatcttaacaaaaaactataaaattagggagccaggcatggtaactcatgcctgtagtcccagaaactccagaggttgaggcagg

SEQ ID NO: 313184 - DNA, 201 bp, Homo sapiens
ttgcttgaacctgggaggcagaggtggcagtgagctgagatcctgccactgcactccagcctgggcaacagagcgagactctgtctcaagaaaaaacaaamcaaacaaacaaacaaacaaacccagctcagaattccttggggagatggatttgaaggtctcctcctgttacagtagatagctagtcaggcatgagcagag

SEQ ID NO: 313185 - DNA, 201 bp, Homo sapiens
gatatagttcaaggccatttaataaagagttttcccagtccccagagaactttgaattgtctacaccaccacccgctgcgtgtccttagatacttgggacytgactattcatcaccatgcttttgctcccttttgcagttactggctgcaatccagctgtttggcgccaacctggatgactacctgcatttactgctgcct

SEQ ID NO: 313186 - DNA, 201 bp, Homo sapiens
atcccacacatgctgcgtgtcttcatgcatgacaacagcccaggccgcattgtctctatcaaggtgagtagcctacgtcatcctccagagagattttctgmtttcctctgagtccctgggtgatcagctaaaagctgagacctcattctgagtgacaggttgatgcccattccataagacagaatcccaagaatactaata

SEQ ID NO: 313187 - DNA, 201 bp, Homo sapiens
actgttgattctgggcattttaatgagctcccccgagcctgggaagaaaatagtctttgtgaacagtgatccagctgacatcccttggcaggctgcctgayatctttgaggtagagaagcccctgtgaggagctgatgataatgcagctgggaggtaggttggccttctctaaagaaggcagagtagggttcaagtggatg

SEQ ID NO: 313188 - DNA, 201 bp, Homo sapiens
acctcaaaccccaatccttctctttctcctctgcaccacacatgcacagatccatctgtgcttcagcttcttaattgtgcattctgtgtgcccctgagccyaatgccttcctcccccttaactcccaacatataaagtgtacaatcagctcactccagtgtcctggctaaaagggccaggtgcagtggctcacacctataa

SEQ ID NO: 313189 - DNA, 201 bp, Homo sapiens
gcgactcaggcaagttacctgtttagcctcatttttctccctttggacaggggctcttacctacctcattgggctcttgtgcggtttctatatgatgttgrctctctatatccatgagttctacatctggattcaactagtcatggttcacaaatacccagggctgggtgcagtggcccacacctgcaatttcagcacttt

SEQ ID NO: 313190 - DNA, 201 bp, Homo sapiens
taaaatgccactgcacaccaaccagaagggctgaaatggaaaaggctgaaaatagcaaatgttgacagagattgtgaagcaattgggcttttcatgtcctrttggtagaaatgtaaattggtaaagccactttggaaaacaatctgtcagtatcttataaagctaaacatatccttatatgtaactcaacaattctgctat

SEQ ID NO: 313191 - DNA, 201 bp, Homo sapiens
gagtgcaatggtgtgatctcggctcactgcaacctctgcctcttgggttcaagtgattctcctgcctcaccctcccaggtagctgggattataggtgcatsctaccatgcccagctaattttgtatttttagtagagataggatttcaccatattggccaggctggtctcaaactcctgaccacaagtgatccacccgtct

SEQ ID NO: 313192 - DNA, 201 bp, Homo sapiens
cggtgctggcggcggcagctgaggccttggccgaagccgcgcggtgagtctagggcctggcacgacccctctagggcggcgtaatgtccagacccacggcyagcctgcccgtgggggggccaggggaagccgcccgtctgggacgtggggtccccacattgccggccccacgacctgggcaccgtctgaggccttgactcc

SEQ ID NO: 313193 - DNA, 201 bp, Homo sapiens
cattctaggccaattgcatttattgtgattgctgttatatttggcctatttattttattttattttattttattttattttattttattttattttgagayggagtatcgctcttgttgccagggtggagtgcaatggtgtgatctcggctcactgcaacctctgcctcttgggttcaagtgattctcctgcctcaccctc

SEQ ID NO: 313194 - DNA, 201 bp, Homo sapiens; identical to SEQ ID NO: 65271

SEQ ID NO: 313195 - DNA, 201 bp, Homo sapiens
aataaccctaagctcccaagtccagagctcagtcccaagggttgtttctcttctagtgcattgacaaggccagggacctgctggatgctgaattaactgcratggcaggagagagttacagtcgggcatatggggtaagtgtcaactattctgcacattgtcatttttgaggcttatttccatacttttttcagaatgggc

SEQ ID NO: 313196 - DNA, 201 bp, Homo sapiens
acaggactctcgctgtgagaactgcttgaggaagcggagttgaggacaaggatgggggagaaagattgaggtacctggtaaaagccgcatttgtctgcaarggtccaaatgtttccctggctttataatggcagttccagtgctcatcacctcatgagccctttgtcaatatgactctaaggtggttcagagtcctctcat

SEQ ID NO: 313197 - DNA, 201 bp, Homo sapiens
aacccccttggagcaagggctgctgttcccatgccctctgagtagagtaggcccctaccctccataccacctgttgcccaagagcctggacacgatgcacvtttgtcttttttcctttttgttttctcttcttttctgttgttcgtttctttttttttttaagttgtctttcaaatccctgtgacaagtcctctcactaaa

SEQ ID NO: 313198 - DNA, 201 bp, Homo sapiens
aggcgtgaaccaccgcgcccggcctgtaataacatatttgtatagggaccactatacatatttgtatggggaatcactacaaaactgtagtgattcaattwgggggatggtggggaccaggagataggtagaaatgagcctactgagtcaaatgtgtgccacatggggaccaggctgtaatcaccttagaagtcaaagtta

SEQ ID NO: 313199 - DNA, 201 bp, Homo sapiens
gtcagtaaggcttcgggggatcctgccagtgtgatccccacctattgaggtttatctagatatgccccaaacagctacagagtatcagcacttctcttggyatcatagctgttctaactgttctttgattcctttgccattatttgtagtcttcagtaatttgctgtctggacaaagatttttctcccaaggggccctacc

SEQ ID NO: 313200 - DNA, 201 bp, Homo sapiens
actgggaaaggagagctctgctcttctcacttactcaaaacttttaactgtttaaactgggcaaccgaaaaccagcccaggtgttttttccagaaatctasataccatgaacttagatcattttgtctttttacaggtgcctaaattgtaattttgttttgaatagagaaaaagtagagaacaaaatgtccttttgtgctc

SEQ ID NO: 313201 - DNA, 201 bp, Homo sapiens
cctgaagcttctcttcttcattactattggcctgtttttcagtccatcttctccctatacctgtcgattggtcctcagggctgggaaccctccttccctcsctcccggcttagaggacagcggggaaggcgggcggtggggcagggggcctgaagcggcggtaccggtgctggcggcggcagctgaggccttggccgaagc

SEQ ID NO: 313202 - DNA, 201 bp, Homo sapiens
ttcactggatttaaaaatagaaataccatttcccacctgcctccttcactcctttctctaacactcaaaggcctatcctttgagaatcaaaataatatggktctttttagcaaagggatttgtgttttgccctcacatagcctaagccgtagagaaaatagataaaacgatctcaaaattattttctttcacagacaaatc

SEQ ID NO: 313203 - DNA, 201 bp, Homo sapiens
gtttttgagatggagtcttgctctgtcacccaggctggagtgcagtggcgcaattgtggctcactgcaacctccgtctcctgggttcaagcgattctcctgcctcagcctcccgagtagctgggagtacaggcacacgccaccacgcccggctattttttgtaattttagtagacgtggggtttcaccatgttggccaggc

SEQ ID NO: 313204 - DNA, 201 bp, Homo sapiens
aaagaaactagtaatacttccctgtttatgtgcagcttttaacaattgctgtataatataatacagctacacacaaacccatcttgtagggaagaaaccasgtatctgtgggcaggaaaggactggatgttcccattgtgctcaacagagcaaggtctaaaaatcagtctttggtatctagtctccctcttccttctcatt

SEQ ID NO: 313205 - DNA, 201 bp, Homo sapiens
tagggaggattgatgtgtcctgctggaaaaatctatgaagaacatattttaaaagttagggatttagtgtagttaggcctaggccagttcaaataggtgtygttttgacaataataacaatcattttttgctcctttattccggctaagccatttagacacattatccctagatgaggcactctgaggctcagctgcaaaa

SEQ ID NO: 313206 - DNA, 201 bp, Homo sapiens
gtaatttgcccagtgtcaactagcatcagtggtggagctgggatttgacctagatagcatgactccagagcccactctcttaaccactgtgttgaattgtstctgccttacccaggcccaacctcatttcattagagggaaaaagaaactagtaatacttccctgtttatgtgcagcttttaacaattgctgtataatata

SEQ ID NO: 313207 - DNA, 201 bp, Homo sapiens
aaccccatgagttaggtgctgtcgttgctgtcccactttacagatgtggaccgtgaggcactgacgggttaagtaatttgcccagtgtcaactagcatcartggtggagctgggatttgacctagatagcatgactccagagcccactctcttaaccactgtgttgaattgtgtctgccttacccaggcccaacctcattt

SEQ ID NO: 313208 - DNA, 201 bp, Homo sapiens
tgaaccaccgcgcccggcctgtaataacatatttgtatagggaccactatacatatttgtatggggaatcactacaaaactgtagtgattcaatttggggratggtggggaccaggagataggtagaaatgagcctactgagtcaaatgtgtgccacatggggaccaggctgtaatcaccttagaagtcaaagttatcatt

SEQ ID NO: 313209 - DNA, 201 bp, Homo sapiens
aaataatatattctcaataaaacatgtccaactctccagatagtggtgacattttcagcttgatatggtaatatcattgtgaccttcagacagcataaatrtgtgtgccatctcatgtgcaattccttatagaccctgcttggttcttctccaatgtctttttttggagttgtacctggttttattaccagttttcatccg

SEQ ID NO: 313210 - DNA, 201 bp, Homo sapiens
gagttctggggtttctcctaaagctggccaaaaggacagaggggctattgttacaaaacaagacccttctaaggggagaaacttgctgtatttcagtggtrtccctaaactcttctacaaaagctagcttatccttcagactacctggagatttaatgggactgctcttatgctgacttagagaaactgcttctgattttt

SEQ ID NO: 313211 - DNA, 201 bp, Homo sapiens
cgatctcggctcactacatactccgtctcccaggttgaagtgattctcctgcctcagcctccagagtacctggaattacaggcgcgtgccaccatgcccggcttttttttttttttttttttttttttctcgagacggaatctcagtctgtcacccaggctggagtgcagtggcgcgatctcggctcactgcaagctccgc

SEQ ID NO: 313212 - DNA, 201 bp, Homo sapiens
gagatgaacattagctttggagtcactctatcagcccaccccttttgctccttttccccatccttttcctgactgctgcttctttctagtagtctctctcrgagctctttgtttctctctggatgtgaagaagcagaaagggggagaagaacctgcaggcatcacaagaaaaggagcagtgctcattgttgtagaataaaa

SEQ ID NO: 313213 - DNA, 201 bp, Homo sapiens
tttgcaaaggtgctattactgctagcttatcacctgataagcatttaattgaacttcaaatacttggtctagaaatatttactgagcaccaagcagctaayatgttttttatttactgtttcacacatggagtgggtacctgaagctctgagatttttatcaaactatctgattttaatctatctgtaaaaacacagttta

SEQ ID NO: 313214 - DNA, 201 bp, Homo sapiens
tatctaacaagtgctgctgctaaccagccatgggatctatcagtgggaggaaacgggtatgcagccagtaaaagcaattatgaagactgaatggagtggaraatacctgtgttatgtgaaaaggcagcatacaaaattgtatctatactttcatcaccagtatgtataaaatatgcatttatgcagaatatgcgcaggtaa

SEQ ID NO: 313215 - DNA, 201 bp, Homo sapiens
tgggagagctgcacttgaccccaagaacctccttgcaggatggtgagaaagcctcctgtttggatgagcaggaagtggcacggtcagattcctctgtctgrcctggtcttccgcatgtctggtttcatctcacagaccaaatcaggactcacttgtctggaaaatggcctgagaatacctttctaatcccaaactgagggc

SEQ ID NO: 313216 - DNA, 201 bp, Homo sapiens
cacttgacagggaaccaaatgaaactcagactgtggtctgcactagaaatagacaggagaaagaaggtccacagccatttgggaagccagtgggtgtgttytcatacattcctgatgggagcgctggggaagcctgagcgttgccccagctgtgcctgcagatgctccttgctgcctgaggactttccgacaggcgccgcc

SEQ ID NO: 313217 - DNA, 201 bp, Homo sapiens
atgggagcgctggggaagcctgagcgttgccccagctgtgcctgcagatgctccttgctgcctgaggactttccgacaggcgccgccttgtgtggaagagkcttgcatcactttgctctgaaccccagaggtcacgcggcaccaagactgagggatgagggcgataaccaagtgggccactcaaggaggcactgccatgtc

SEQ ID NO: 313218 - DNA, 201 bp, Homo sapiens
aaatggtttgagggaaagtatacgttgatccaaggaaataatgcttcagagacagatccccctcacatcctcacttttccacttctttgtagctgagatgrtatgtaatgctttaaaatgtataagtaggggcttttgggtgtttccatgtctatggcagtatgatttcttttttctttcttttttttttttttttgagac

SEQ ID NO: 313219 - DNA, 201 bp, Homo sapiens
gagctctgtgacatctgcttttgtcactgctcatcgatttccttctggcagctttatccagaaatctgtctatattatgctgtctatgtcaccatgagcawgatatgctgatttgctggtgtcctaaggatgtcagctagaaccaatgtgttatctccagtcagtaaggcttcgggggatcctgccagtgtgatccccacc

SEQ ID NO: 313220 - DNA, 201 bp, Homo sapiens
ggcgggggctcattaaaaatagtcagggccgccgggcgcggtggctcacgcctgtaatcccagcactttgggaggccaaggagggtggatcacgaggtcargagttcgagaccagtctggccaacatagtgaaaccccgtctctactaaaaatacaaaaaattagccgggtgtggtgttgtgcatctgtaatcccagctac

SEQ ID NO: 313221 - DNA, 201 bp, Homo sapiens
ttttgtaactgctactctgagactttaggaggaagaaaaaggttatcagtcacttggcattcccaggtaatcattgaggccaccctgctgacacctcacastggagggaggggccaggcaggaggccagatgtacatttccacccagatgttttcatcctgactaggttcagaatgtccttccaaccaggcagccgtccac

SEQ ID NO: 313222 - DNA, 201 bp, Homo sapiens
cagtgcactgtctttctgtgatgccttattcttcacaaagcatccctcaacacacacttcacaccagcctgctgcggcgggggctcattaaaaatagtcarggccgccgggcgcggtggctcacgcctgtaatcccagcactttgggaggccaaggagggtggatcacgaggtcaggagttcgagaccagtctggccaaca

SEQ ID NO: 313223 - DNA, 201 bp, Homo sapiens
tgaggcaagaggattgcttgagatcaggagttggagaccaactccagacatagcaagaccctgtctccacaaaaaaatttaaaacttagccaggcgtaggracacgtgcctgtggtcccagctactcaggaggctaaggcagagggatcgcttgagcccaggagttccagactgcagtgacccccataattgtgccattgc

SEQ ID NO: 313224 - DNA, 201 bp, Homo sapiens
ggacattggagtgctgtgataaaaggaaagggagcaggttttcgaatagtttttcttcctgtcacagctgtatctaaggctgttctgcctgttgcagaaawgtctgttgctcattgagtatctagcagctacttcatctgtcgtggaggtctgggtttttcccccagttccctgccactttttctgttggacacagtctct

SEQ ID NO: 313225 - DNA, 201 bp, Homo sapiens
agatgctctgattgatagattctggggatacagagataggatacttgtccctaagtagcctacagtctagagggaggacagcaaagcaaaggaagtcttayaactgctatcgctatcaaagggagtgcaaaggacccaagtggatcatggaaggagaagaagaaagcctgcatgggagaagtgaggctagagccaggtcta

SEQ ID NO: 313226 - DNA, 201 bp, Homo sapiens
atccttgttgttatggacttctactttgaactatttagaggctccaagaatattaacattcatgtgttgccatcattagtagggtttctattatcattaartttcctactccagaacttttaaagatggtggtaggcagctgtctttttgagttgatagaaatgatatcttttcctggagttagaggcttggactaatttg

SEQ ID NO: 313227 - DNA, 201 bp, Homo sapiens
cccaggaggcagaggttgcagtgaaccaaaatagtgacactgcattccagcctgggcaacagaacaagactccatctaaaaaaaaaaaaaaaaaaaaaaaatagggctgggtgcagtggcttaggcctgcaatccagcactttgggaggccgaggcaggcggatcatgaggtcaagagattgagaccatcctggccaacat

SEQ ID NO: 313228 - DNA, 201 bp, Homo sapiens
gcattaagtaggtgccagaagacaccccatgggcaatatcatttttccttgtgttctatataatttaaatgtctctacggggaagattgcttcacagggayggcatgtcctcaaagagttggaagatttctgttctttcacaccagacctttgtagttagtttggactaaaatcaaaatggctggactatttgattttagc

SEQ ID NO: 313229 - DNA, 201 bp, Homo sapiens
gccttagagatgaaaaacaggcaggcaaaaactgggaaactaaattttctgtgactttctcatttctttttcagagttctcaccttatggtttgattatggtcactggccagatgtcaatgaggccttagtggagggggtgaaagccatccagattgatacctggctacaggtgaggatacttggttacaggtgaaggtgg

SEQ ID NO: 313230 - DNA, 201 bp, Homo sapiens
gtttgctttttcttggcagagcctgtgctttctcagcaaaatttatgtaacagcaatctcattagaattttgtgtgattcattgcttaaaccttatagtttctgcaatctattgcaattcaaaatatcctaccctctaactgacccactccatatgctgccccctctcccctctgcttgttcatgctgagtgtatgccaca

SEQ ID NO: 313231 - DNA, 201 bp, Homo sapiens
gtctcactgggctaaaatcaagatgttgacaggactgtgttcccatctggaagctctaggggagaattgttttccttgctttttctagcttctagagcacraggagttggacaagcttgttttagagggtgcctgcgttcctaggcccccttcctccatcttattaaacattattgtcgttttatgtcgtgtttgtttata

SEQ ID NO: 313232 - DNA, 201 bp, Homo sapiens
ttagtagagacagggtttcaccttgttagccaggatggtcttgatctcctgacctcgtgatccaaccgcctcagcctcccaaagtgctgggattacaggcrtgagccaccacacccagcctagtctctgctcttaaaggaagggccacagagcagcaagatgagtgttcccattactgacccccagaatcatgggaggaga

SEQ ID NO: 313233 - DNA, 201 bp, Homo sapiens
catagttccagagctagaactataaataaaatcttatctagcaacgtctagcttctgtcaccatctttatacctcgttttcttccttcctttattatttcytattgctgctataacagattaccacaaatttagtggcttaacacagatttcttatcttacagctctctaggttatatttctgacatgaggtctcactggg

SEQ ID NO: 313234 - DNA, 201 bp, Homo sapiens
agatgtgtctccctcaaacttgttatcacgtcagcatgtgatcagtctgacatggggaaaaaccccatcttctgactccaaatccaaggctgtttcacccycaacttttccttaacaaagaggcataaggtgcttgatttactgtggggactttcctgattcctgtgggccttggggaaaatccctgcctttcctgggctt

SEQ ID NO: 313235 - DNA, 201 bp, Homo sapiens
tcccaaacaagataacagactctcttgatcaccaggattaataagcctgctgacttcactgtccagagcatccacatccataattagtattctccagcagytttagaggcgtgcatgggaactcctcagaaggaaataagagaaatgtagcttagggagaaagtcctgtaggaaattaaagtgaaaaagggggaagaggaa

SEQ ID NO: 313236 - DNA, 201 bp, Homo sapiens
tccccatcccaccccttttttccttcgtgacatttagcaacaccctacatagttcatactttgggaattactgttagggtgtaaaaaagtatatcttttcyacaaatgtttacagagcacttacaactagttaataaactaagccaaataatgtctaggggtgcaaaaagaaaatgtgaggtacagtggtcgcctgaagaa

SEQ ID NO: 313237 - DNA, 201 bp, Homo sapiens
cataaaatagaagttgtgtttctgcagaaggcacacttaggagatctggggactgggtctagaaattgactaattttatacatgactgaatcagagtggcygtgaataccacccagagtgggatcagccagcctgtacccaggcacctggtctttgggatttactgcagtaccaatgacctaagtttccttcttcaaatat

SEQ ID NO: 313238 - DNA, 201 bp, Homo sapiens
taagcttttcactaagaatctatacaaaggttcctctgtccttaaaacagtaactctgtctttggaacatacgattgctgtttccatgttatggagccacycaggcagttacttgtactgttgtagtcagcgtgggtccttcccacataagcctgatgcctgacagctctcctcccatgccataatcccccagagctcttt

SEQ ID NO: 313239 - DNA, 201 bp, Homo sapiens
ggagattgcgccactgcactccagcctgggcgacagagcaagactccgtctcaaaaaaaaaaaaaaagaagagttccgggtcagtatcgtattgatcaatrtctagttgaaagtagaattagtagcctcaaaatggaaaattcagctagcaagctgcagacctacctgtctacagcagcagtgtttattctgttttctctc

SEQ ID NO: 313240 - DNA, 201 bp, Homo sapiens
tgtatccgtgctccacggcagcctccttttaaggcttgaagtcttctgggcggattttcatctccacccgtttgagggagtaggtagatccatgccagccrtaccaggtgatgccatccaggtgcttattgtgctcacccaggcggtagtacactccattgaggttggagtctgtgcagcagttgtaccagtagccacctg

SEQ ID NO: 313241 - DNA, 201 bp, Homo sapiens
ccatcagctctggtattgccctttgggtcttttgcctgtcacagccaccctttcttttgagccacgtataaaaattgtgtatctctgccccagggaacacyagcgtccgtgtcagccccttgtcctccactgtggacacctctcagagatccagtccccgaaactgagcttggttacatcgttggggtacatcttctctcc

SEQ ID NO: 313242 - DNA, 201 bp, Homo sapiens
cggtgtggaacttggagagccagcccataagaaaacggggaccacagtgccagaatctattcattctttcagtaagttcagcctctgaggaaccgcaccartgactagctcattaagaaaatagcagctgtgttataccctgagaggggtcaacaagatgaagcaacaaaactgcctttgagcagaaaaggttccatgaat

SEQ ID NO: 313243 - DNA, 201 bp, Homo sapiens
ttcttccttattcatggcaccagtcagcccagctcttcatctgtttagttcttaccctcctcgctgcactcttcatgttagtatacctccctcccttgccrctgcccccgctgccaccgtcagagtccttgaggtccttactgttcaagtcaggtaggtagtatttgcctaccaacttgtctgaattccctaggggaacca

SEQ ID NO: 313244 - DNA, 201 bp, Homo sapiens
gttttattatgaatgtatattgaattctttagtctgtaatagtcatatggtttttctcttttaatgtgttaaatatgttgagtcacactgataacgtgttytaatgtaagaatgctggcattcttatattaaaaccaccttggttataatgtatttttaaatttcgatcttatgtcagttcagcttagaatttttggatct

SEQ ID NO: 313245 - DNA, 201 bp, Homo sapiens
ataaagagaatactaaagagttttattatgaatgtatattgaattctttagtctgtaatagtcatatggtttttctcttttaatgtgttaaatatgttgartcacactgataacgtgttctaatgtaagaatgctggcattcttatattaaaaccaccttggttataatgtatttttaaatttcgatcttatgtcagttca

SEQ ID NO: 313246 - DNA, 201 bp, Homo sapiens
gtttttgagatagggtctagctctgttgcccaagctggtgacacagaggttgcaataggtgatatgggctcactgcaacctccacctcctgggctcaaatratcctcccacctcagcctcccgagtagctgggactacaggcatttacaaccacacccagctgattttttgggtttcgccatgttgcccaggctggtatca

SEQ ID NO: 313247 - DNA, 201 bp, Homo sapiens
ccttgagcctgggaggcagaggttgcggtgagccgagattgcgccactgcactccagtctgggtgacagagtgagaccctgtctcaaaaaaaaaaaaaaaacctgctagggagagcctgagaggaaagggctatggggaggcagcaggcgccactgcccacgtgagctgctctaccgtcactcctgacagggcctttgccg

SEQ ID NO: 313248 - DNA, 201 bp, Homo sapiens
ttctaacactcattccaaagcatctggttttacttctgctttgggacaagtaattgttattagcaatccactgaaaaatacttaaattgcgtttaaattcytccctggaggcagaacactaaatcctttggtaattatttacagctcacatccttagagctgcaatatgtttccccaaaacttctgatgtgccgggacctt

SEQ ID NO: 313249 - DNA, 201 bp, Homo sapiens
gggaagaaaaattaaaaaaggaagttttgttttttagttttaatcttgtaaaccaccacttagtgacacagtaaggaaaagtaataagtactaaaaaagtmataagacctctactaccatgtttttggtttttgagatagggtctagctctgttgcccaagctggtgacacagaggttgcaataggtgatatgggctcact

SEQ ID NO: 313250 - DNA, 201 bp, Homo sapiens
tctcaaactcctgacctcaagtgatctgcctgcttcagcttcccaaaatgctgggattacaggcatgagccactgtgcctggacgccttttttttttttttaaaggtttgttttatttttaattgactcagggagggggaatagggagaggttggtgaatgagtgcaaggttccagttagacaggtggaataatttctggt

SEQ ID NO: 313251 - DNA, 201 bp, Homo sapiens
ttgcccaggctggaatacagcactgcaacctctgcctcccgagttcaagcaattcttctgtctcagcctcccaggtaactgggactacaggtgcacaccascacacctggctaatttttgcatttttagtagggaggggttttgccatgttggcctggctgttctcaaactcctgacctcaagtgatctgcctgcttcagc

SEQ ID NO: 313252 - DNA, 201 bp, Homo sapiens
gtagttaggcctaggccagttcaaataggtgtcgttttgacaataataacaatcattttttgctcctttattccggctaagccatttagacacattatccytagatgaggcactctgaggctcagctgcaaaatacaagtaatttgcccagggtgttacagctgctgagtggaagagccaggatcccaggcaggtgtttct

SEQ ID NO: 313253 - DNA, 201 bp, Homo sapiens
acactttatacccagtgcagctctgctttctgggtgaaagtgccagccctgtgcctgctccaggcgtgctttgctggcctcgctctcactcctcgcctgcmtgtatcccctgcacggtcacattcatgggcttgtttcccgtgaaccaatctgcacatctctggccttattcttcccccttgccaagtagtccccaccgct

SEQ ID NO: 313254 - DNA, 201 bp, Homo sapiens
ttcagcttgatatggtaatatcattgtgaccttcagacagcataaatatgtgtgccatctcatgtgcaattccttatagaccctgcttggttcttctccartgtctttttttggagttgtacctggttttattaccagttttcatccgaatccactggggaatgggacgattttacttttgtttcttggccaggaattgct

SEQ ID NO: 313255 - DNA, 201 bp, Homo sapiens
atccgggaagtaagtacctcaaaccccaatccttctctttctcctctgcaccacacatgcacagatccatctgtgcttcagcttcttaattgtgcattctstgtgcccctgagcctaatgccttcctcccccttaactcccaacatataaagtgtacaatcagctcactccagtgtcctggctaaaagggccaggtgcagt

SEQ ID NO: 313256 - DNA, 201 bp, Homo sapiens
ggtctttgaaatatattctcagtagatagtgtagtgtggaaacccattccatagttgcctttatttgttcacatgagcttaaggtaagcctgggggttcartgtccttcatgataccagctggttgacctcttgtccatttcagtttttgttccagcagctgggaatgttggtgtcctttgtgaagagccacatcagacct

SEQ ID NO: 313257 - DNA, 201 bp, Homo sapiens
tccctactacactgcctcttttaaacatcagtcattgtttaatgaatctaggctttctaaatgttcctcaatcagatctctcaacctttttagaatccccygcctgacaagggctagggggagatctgtgttgggtgaccagggccataagtaaatttatcatcatactttcttatccagaatattaaaggaaacttctct

SEQ ID NO: 313258 - DNA, 201 bp, Homo sapiens
caaagccctgcttgtactgcttccagtcccggtagaaggagacaaggccactttttcgtctctggatgatggtccagcctccgcctgaagtctccatgtcrcagaacacctgaagcagaggggatactctggtgagggacttgcaggggcagaaggcaggagcaagagggcaggcttcccaacctgttcctgtccctgcag

SEQ ID NO: 313259 - DNA, 201 bp, Homo sapiens
gccgctctcgctgcgatccggagatacccagacaccggactccttgagttcacagcccggatgcagaagggaatcctagcagcgccgtaccggatgtgtgrgtggaagtgactgaggtgaactcacgaccgattggttctcccgagtggacccaagcctgttttcacctgccactggccgcgtggtttgtctatttgaaca

SEQ ID NO: 313260 - DNA, 201 bp, Homo sapiens
caatgaatatacagatttgtcttgaatcagaataggaatggcacccccggagttgtacgcggtcatgtgtggtggcactggtccagtcatggggcccctgrccttgtgcttacctccatctctacacgcagccgggttggctgtctggagagccggtggatgtgttcgttccccagccagaagtccccacggatgctgcca

SEQ ID NO: 313261 - DNA, 201 bp, Homo sapiens
ttgtaaaatataccttagtagcgttgaaggggaaagttctaaccgtatttagaagacagaggaaataattcagttgagatggagaggttgattttttttttgaagaggagagatccactttggaacatgagttctttaggatatgtgaaacagcttgtctcaagatacagaggggaagatggagcacttcttagaatggca

SEQ ID NO: 313262 - DNA, 201 bp, Homo sapiens
agtctaaaaatctggatcctaagcctggcctttctatgatgacgcttatgatcccagacaagtcatggaaccattctcagcatgaattttataatttgcayattgggacaaataatacctggtctttatatttcagtatcattattatgagtaacaaagttaaaatgagataatgggtttaaaagtgctttgtaatgaatg

SEQ ID NO: 313263 - DNA, 201 bp, Homo sapiens
tcatcactggatgtccaaatatctgttatcttcatagggaaaggaaaacaatcgattagaagtgaggtagtgcaatggagttgctcagaagaatagctgaygggaactttaagatgtcttgtttttcaaatttagaaataattgaaaattaagacctttctttaatgaaaatttgcaggttgtctatggttgagaacaaaa

SEQ ID NO: 313264 - DNA, 201 bp, Homo sapiens
ctatccaagtcttttctggacctggatgtttaaatcaatcagtacatctgcaactgtaatggttatttttatcttttgacatatctcacctgaatctgaayacaatctaatgaatctgatgtatttttcttaaactttttttttttttttttgctgtgaaatagtctagtcacgcattttggtggctagaagagtgaatta

SEQ ID NO: 313265 - DNA, 201 bp, Homo sapiens
catctctttgctatgactaaaatgaattcccctatggggaagagcatgtggtatgacggggagtttttatactcattcaccattgacaattcaacttactctctcttcccacaggttagtatagagttggttgccttcagtatggtttcttaaatttcttgctgtcatagaaaagggataattgagtttgccttactcatc

SEQ ID NO: 313266 - DNA, 201 bp, Homo sapiens
ctttgtgccagttgcaagaccaaggaaacatccttgaataataaaggaagaatacttttttcttgggaatcagaagtcatgacatcattgtgtatgggcayagccattgcaaaaggcagaaccaattcaatgagtagattttttttaattgcatatgtatgtattttcctgctaagaatctgaaatgactaattaattcat

SEQ ID NO: 313267 - DNA, 201 bp, Homo sapiens
atctgtgaccacctgtacaaataaagcaattaatgtcaactgtttacgactcctacaaaagtttcttcttttaaaatttcaattttctttttgttcctatytttaaaatttgtgtaaatttatggggtacaagtataattttgttccatggatatactgtgtagcagtgaagtcagggcttttagtgtatccatcaccaga

SEQ ID NO: 313268 - DNA, 201 bp, Homo sapiens
ctttattcaacaaatatatattcgatgccttctatgtgccaggcacaatgctaattactgagaacagagcgataggccaagaggacgcaggccttcccccrtacagcaaacaagcacgcagcacacaatgggaaaggagcagcaacattctccagtctctccacttctttatatgggaggaaaaacaaacacaggtttgcc

SEQ ID NO: 313269 - DNA, 201 bp, Homo sapiens
agtttcttcttttaaaatttcaattttctttttgttcctatttttaaaatttgtgtaaatttatggggtacaagtataattttgttccatggatatactgygtagcagtgaagtcagggcttttagtgtatccatcaccagaatcacatacagcgtcctcattaaataatttctcattatccagccccctttcaccccttt

SEQ ID NO: 313270 - DNA, 201 bp, Homo sapiens
aattatattgaacatatttttgttttaattcagtattttaattttaaattggaaataattagtaagttaatttaaataaataaactcaattccgcaaaatrtgacactttaaggaaagtgcgtaggaaacattaatgaaactcaaatgtattagagaaaacctaccaaagagtaggttggttatattttctcaatttgatt

SEQ ID NO: 313271 - DNA, 201 bp, Homo sapiens
aaataattagtaagttaatttaaataaataaactcaattccgcaaaatgtgacactttaaggaaagtgcgtaggaaacattaatgaaactcaaatgtattmgagaaaacctaccaaagagtaggttggttatattttctcaatttgattcaattttgtggctacactctacaactatagtttgttgaagactaactatgtg

SEQ ID NO: 313272 - DNA, 201 bp, Homo sapiens
cctaccaaagagtaggttggttatattttctcaatttgattcaattttgtggctacactctacaactatagtttgttgaagactaactatgtgctagactstttgctaaatgttttgcatgcattatctgataatcccaacatatgatgctgatattattgtctccattttacatgtagaaattgaggctgagccaaaagt

SEQ ID NO: 313273 - DNA, 201 bp, Homo sapiens
tatgatgctgatattattgtctccattttacatgtagaaattgaggctgagccaaaagtgtcctgcctgggatttcccagttagacactggttccatgctrtgattccaagtcaagattcaaactgaggcctgttgaagctaacatctacaaatttaaccctttaaactgccttgcatttcctttcaaattaggtaatatg

SEQ ID NO: 313274 - DNA, 201 bp, Homo sapiens
cttggctttcaggctttaaactgtctgcagcttggaggtggggtttcgccaggacctgcccgtgtctatctaggcatttgtctgcctcctgtcattatcgktaagaaacctcagaataactgtcccagactgaagcctttaaggctaactgtgaagatagtcaaacagggtgaccccgagcgcttttgttaccatgttact

SEQ ID NO: 313275 - DNA, 201 bp, Homo sapiens
agatatcatatttgataaatattattgcaaatacaaatgaagggaaaggcagaaaaaggaagtgctacccacatggttaaattaccatattttattgattgtgagctgcacagtttttaatattttaacatctgtgaaacagctgcttcttacagcctctgttgtccagttggaagctgaggcatagttggcactgggagt

SEQ ID NO: 313276 - DNA, 201 bp, Homo sapiens
cagatatcatatttgataaatattattgcaaatacaaatgaagggaaaggcagaaaaaggaagtgctacccacatggttaaattaccatattttattgattgtgagctgcacagtttttaatattttaacatctgtgaaacagctgcttcttacagcctctgttgtccagttggaagctgaggcatagttggcactgggag

SEQ ID NO: 313277 - DNA, 201 bp, Homo sapiens
acagatatcatatttgataaatattattgcaaatacaaatgaagggaaaggcagaaaaaggaagtgctacccacatggttaaattaccatattttattgattgtgagctgcacagtttttaatattttaacatctgtgaaacagctgcttcttacagcctctgttgtccagttggaagctgaggcatagttggcactggga

SEQ ID NO: 313278 - DNA, 201 bp, Homo sapiens
aatagtctagtcacgcattttggtggctagaagagtgaattaatagtagtctaatcaccctggagatgctatgcttctgtgagctggcactgaggtaaggyggcacatctctgtgggaatgacaagtgaatgaatctgctcctcatttaacctgctgttcttttctctctctctgttttctctcctaggaaacaaatggaa

SEQ ID NO: 313279 - DNA, 201 bp, Homo sapiens
gacagatatcatatttgataaatattattgcaaatacaaatgaagggaaaggcagaaaaaggaagtgctacccacatggttaaattaccatattttattgattgtgagctgcacagtttttaatattttaacatctgtgaaacagctgcttcttacagcctctgttgtccagttggaagctgaggcatagttggcactggg

SEQ ID NO: 313280 - DNA, 201 bp, Homo sapiens
tatgactcttcagatttctaatgtagccatgcatttttgtcagttttgtatgtgacattagcgtgtgtatgtgcacgtgtgtgtgtgtgtgtgtgtgtgtggtgaagggaatgtgcttcattcatttgggatcaacatggtttgttctcctgggtaatggcactgaggggacagagaggacctggagaatataaccctcct

SEQ ID NO: 313281 - DNA, 201 bp, Homo sapiens
attaagtcctctcttgcttcttcagatgtagtctgaggcctgggaaatggtttcaagtgccctcgcctccaccctatcctggctctgaagtgcagctggtsctcccttccactgctgcatcccaagagaaggatccctgtcttcacacccttctcagattttcagtttgagtttatgacacaaagggaaattccaaattac

SEQ ID NO: 313282 - DNA, 201 bp, Homo sapiens
cctatgactctaactttttaaagcacagaagaggaattatattttatggtcactcctctgtgtttctattgatctctatattgtgctaaaattctttcagrtaatttttttcttgttgaagctgtgggatataatcaatgatgccaagctgtctgagaattttatagaataatatccaaatatattgatcctgcctctttc

SEQ ID NO: 313283 - DNA, 201 bp, Homo sapiens
gtaggaaactacaaatattctataattaacatgtacaaatatatatcttaagggaaaattatgtgtaacgttttttaaagggtttaataattaagtacctrtaatgagaagttttttttctctgaaataattgaactaattaccagatattttcatcataaaatgcttacgtatgcaaagtaagaaaacaactgaaatttt

SEQ ID NO: 313284 - DNA, 201 bp, Homo sapiens
agaaactaagcagtgaagtatggtaagagtgatcataataatctgatatatcctatattaaacttaaaacacggagactcctgttgtcgtcttcaaaagckagagaacatttcgaatatctgttcgttgcttagataattgttgaaattaaacatatttaattggccagtagtctgcttaaattgattcaatctagcactc

SEQ ID NO: 313285 - DNA, 201 bp, Homo sapiens
catgtgccctttgtttgccacagtctctagcacttcctattgccttccttccactcgtttatgttacccgcttgaattgtgtaggcatttcattttgcacytctggtgtgctagactttaaaataatctaaaaagctcgtctgtggatcatttagcaatttccttaacctttctgtcagtggtctgaaaaagggaacaggt

SEQ ID NO: 313286 - DNA, 201 bp, Homo sapiens
tgcacttcctactttttgccctgcctcccagaccagctcagactctgcaacaatgaatgatttatggtggttaactcatgtgcttctagaggtcacacaaytatcattcaagacatctagttatgtctgtgggttggaagatgagtaggtgtaaagtctccttgtgccagtggtggaggtcagtgccggctctgctgttca

SEQ ID NO: 313287 - DNA, 201 bp, Homo sapiens
ctatgactcttcagatttctaatgtagccatgcatttttgtcagttttgtatgtgacattagcgtgtgtatgtgcacgtgtgtgtgtgtgtgtgtgtgtgtggtgaagggaatgtgcttcattcatttgggatcaacatggtttgttctcctgggtaatggcactgaggggacagagaggacctggagaatataaccctcc

SEQ ID NO: 313288 - DNA, 201 bp, Homo sapiens
gcatcactttcatcatactctattgcttgaagcaatcacaaagtcccacccaggtacaagagagaagagttctagcacagatccacctcttgttgggggggagttctcaagtcacattattagagtatgcatggtaggagagtttttgtggccatctctggaaaatataatctgccacagtctgcccttgggtcacaacaa

SEQ ID NO: 313289 - DNA, 201 bp, Homo sapiens
tataattgttgaaatggaaagacatcaaattagacataactgaagagagaatttgtgaactggaatacagagcaaataattttccagataatgaggctatrgaaaatacaaaggcaagacaaagaaacatggacgatagaatgagaaggagtatgttaaagtggaattgtggaagtataaaatagggataagaactctttt

SEQ ID NO: 313290 - DNA, 201 bp, Homo sapiens
agtgcctggcacagtattaagcataatgtttctaaaatatggggagatgagggttgaaagaactcaaagaaggtagcaccataactagaactatgtatgcrtatgcctttgatttaatttcaagaatagttctgttttatgacacattttaatgtttaaaagccttatgtatgttttaaattataggagtaataaaagttg

SEQ ID NO: 313291 - DNA, 201 bp, Homo sapiens
aggaagaggtaagctgatcacctgaagtcaggagtttgagattagcctagccaacatggtgaaaccctatctctactaaaaaaaaaaaaaaaaaaaaaaaattagctgggcatggtaacgtgtacctgtaatcctagctactgaagaggctgagtcaggagaatcgcttgaatcccggaggtgggagttgcagtgagccga

SEQ ID NO: 313292 - DNA, 201 bp, Homo sapiens
taagtgcccagagagtgcactcaggcactcaggaaatatttattgaaatgaaatgaaattgcttgtcaataaaaagtcaaaatggctttttttaaaaaaamccctggacttttgtttgagggctttggggggtggtatttactagtgcatggatataatagctaagttttctgttaataaaaattattactaattgttaag

SEQ ID NO: 313293 - DNA, 201 bp, Homo sapiens
ttttaaatacaaacacatagacacacatgcatacatttttggatgttagcttgtaattaagctgacttttaaccactgagctccttaaaaaaaatcttttwaaatcttatgaccgtagttcagctggaacaaattgctgttattttagaagtaccaagtatcaaaccagaaagggcttgatttaggaaacaaacccaggct

SEQ ID NO: 313294 - DNA, 201 bp, Homo sapiens
ttatagacacaaggttgtgcagccactagagacctgggcttcagctgggcttggatctatgccttgaaagaaacagatcttctttttgaaactctcttgcyttccttctcctagtgttttattcttttgttaatgaaaataacccatattcatagagtcagaataacaattattgatgggcacttcctatgtactaggtac

SEQ ID NO: 313295 - DNA, 201 bp, Homo sapiens
acatagacacacatgcatacatttttggatgttagcttgtaattaagctgacttttaaccactgagctccttaaaaaaaatctttttaaatcttatgaccrtagttcagctggaacaaattgctgttattttagaagtaccaagtatcaaaccagaaagggcttgatttaggaaacaaacccaggctattgtggtggaaaa

SEQ ID NO: 313296 - DNA, 201 bp, Homo sapiens
gtgaattaatagtagtctaatcaccctggagatgctatgcttctgtgagctggcactgaggtaaggtggcacatctctgtgggaatgacaagtgaatgaawctgctcctcatttaacctgctgttcttttctctctctctgttttctctcctaggaaacaaatggaagactgctgcgaccctgcccatctctttgctatga

SEQ ID NO: 313297 - DNA, 201 bp, Homo sapiens
acttaaaacgaatgctactacaagcatttcttccatgccactaaactttagcccagacatacattttaacgcttgcataattttctgtcatatgaatatcmttaaatgtatttaaccaatgatctttgttggaaatttagtttatctactatttttatgatcatgaataacactgtcatttgatgactttaagttgtctta

SEQ ID NO: 313298 - DNA, 201 bp, Homo sapiens
gtgaatagtgctgcagtgaacatatgtgtgcctatatctttataatagaatgatttatatttctttgggtgtatacccagtaatgggattactgggtcaawtggtatttctgcctctaggtctttgaggaattgtcacactgtcttccacaatggttgaactagtttacactccctccatcagtaaacaccaattcttata

SEQ ID NO: 313299 - DNA, 201 bp, Homo sapiens
cagctgagtgggtgcctggatactgagggtaatttgtagggaaaatttagtagttggggaactagcagagactgcaatatttgtaagatatctttacctasaagtaaatgatgctttggtttactgaagtaataaaaagttacagatgccctaatgtggtaggaatcaagttagacatatggttgaagaggagaaatgagg

SEQ ID NO: 313300 - DNA, 201 bp, Homo sapiens
aattattttccctaaagacagaaagcactttcatttcaagtgatctaaggaaatgagttaagaacttcccattggtttgcaatgaaagagtccatttttttaatataggaggaggaataatgaagccctcttagaggatagatttcttgttggaggatacagtcaagtggaaaatgcttcaaattctgagacacacaggct

SEQ ID NO: 313301 - DNA, 201 bp, Homo sapiens
gagaatggcgtgaacctgggaggcggagcttgcagtgatcccagatcgcgccactgcattctggcctgggcgagagggagactctgtctcaaaaaaaaaaagaaaaaaaaatccatagtattttctcaattaagtttttttgtctgtaaagctttggtgtgctgttattgttcattgacgtattataagtgcccagagagt

SEQ ID NO: 313302 - DNA, 201 bp, Homo sapiens
ctcctggcctcaagcaatcctcctgccatagccttctgaagttctgggattatagatgtgagccaccatgcctggcctatatatatatatattttttttttaaataggggttttctggtataaccttgtctgagaaacaataaaggcttcgattttgaagcaaagaaaataacagtagcaacagtaataagtttggaagtc

SEQ ID NO: 313303 - DNA, 201 bp, Homo sapiens
gtctcaaactcctggcctcaagcaatcctcctgccatagccttctgaagttctgggattatagatgtgagccaccatgcctggcctatatatatatatatwttttttttaaataggggttttctggtataaccttgtctgagaaacaataaaggcttcgattttgaagcaaagaaaataacagtagcaacagtaataagtt

SEQ ID NO: 313304 - DNA, 201 bp, Homo sapiens
ccagaaatagagagaccaagaaattggggaagggtgcccactttacctcatcttctcttttgtgtatatgtgtgtgtgtgtgtgtgtgtgtgtgtgtgtgtatacttttgtgtatgtgtgtgggtgtgagtatgtgtacacacattttttcaagagacagggtctcactcggtcacccaggctgcaatgcagtggcacaat

SEQ ID NO: 313305 - DNA, 201 bp, Homo sapiens
tccagaaatagagagaccaagaaattggggaagggtgcccactttacctcatcttctcttttgtgtatatgtgtgtgtgtgtgtgtgtgtgtgtgtgtgtgtatacttttgtgtatgtgtgtgggtgtgagtatgtgtacacacattttttcaagagacagggtctcactcggtcacccaggctgcaatgcagtggcacaa

SEQ ID NO: 313306 - DNA, 201 bp, Homo sapiens
gagcctggggctttttatgggctcagaataggtagcttgtattgattgatttgtgactgtgcaaaaaggtcaaagcaaagatgccactcaaaggtggacaygacagtgtagaaagccaattaggaaagtgtgggtatatgaaaaataggtgaacggtggggatcaatcagaggaaagtgtgccaaacgggcaggtggggtc

SEQ ID NO: 313307 - DNA, 201 bp, Homo sapiens
ctcaaattgttgggattacaggcgtgagccaccatgcccagccccagcccctcattactttttacttttactaagtgacttgcatttcccagaacaattcrttttttcgttttgtcttcacatttgtacatgttgttccttctgcccaaaatgcccttcctatccttatctgatgaattcttgtttatttttcaagatcca

SEQ ID NO: 313308 - DNA, 201 bp, Homo sapiens
ttgaacccaggaggcagaggttgcagtgagccaaaatcacaccactgcactccagcctgggcaagagtgagactccatctcaaaaaaaaaaaaaaaaaaaagttcactattatgaatttgcctttctgtgacatcctccaccctctgccaattttgttgttataaaatgtaaactggtgtgtgtgacatctcttaactcac

SEQ ID NO: 313309 - DNA, 201 bp, Homo sapiens
caaggaacttcgcagtttcggttcaggatcccagcaaaaagaaggagtaaacagaagaggaaagctggacagattcctgctcatgtatcattaatcaggamtgagtcacatgggcatgtctaactgcaagaaagcctgggaagttcagttttccagctttaggcaaatgccttgcgtttgtcaactatacgggctgcctca

SEQ ID NO: 313310 - DNA, 201 bp, Homo sapiens
ataaataaatcaatgagtacagtgattgcttccaaagaaaacaaaaacctagagatacagtgtatataagtatatgtatatatgtatatgtgtatatatayatatatggtctttttctagttaactgtcaataagattacttacacttctttcacatacagtgctacttttaattaaaatattattggtattttgaatgaa

SEQ ID NO: 313311 - DNA, 201 bp, Homo sapiens
tttttttacttaaatggtgatagtctatagattagaatatacttcacttaatattatgtctcaaaataaattaatatctgtttttaaagtttagtatggcsttaatttcatataaagaaacttaaacaaataaattgctcttctgagaagttcaaaagggagagaccataagagatgaacacctatggtcaaaacaacagc

SEQ ID NO: 313312 - DNA, 201 bp, Homo sapiens
ctcattactttttacttttactaagtgacttgcatttcccagaacaattcgttttttcgttttgtcttcacatttgtacatgttgttccttctgcccaaartgcccttcctatccttatctgatgaattcttgtttatttttcaagatccagccaaagcatcatttctgcaaaccttcccagttccctctcccaagtctca

SEQ ID NO: 313313 - DNA, 201 bp, Homo sapiens
agttattctttttttttttttttttttttgaaacccggtcttgctctgttactcaggctggagtgcagtggtgccatcacagctgactgcagactcgaccrcctgggctcaagcaatcctcccactttggcctctcaagtagctgggactacaggtgcatgccaccatgcccagtgaattttttgatttttgtagagacaa

SEQ ID NO: 313314 - DNA, 201 bp, Homo sapiens
ttctcaaattcacttccttgagaactgagaggctggggtttttaaggataatttggtgggcagggggctagggaatgggtgcggctgattggttgggaatraaatcatagggatgttgaaactatcttcatgtcccgagtcagtttctggctggcaggggtgggtaacaggacctgtggacctgtcgagtcagttctttgg

SEQ ID NO: 313315 - DNA, 201 bp, Homo sapiens
ttagctttttaaaatgcaaatcagatcatgcaatcattttgcttaaaacccttgattgtcttcccattgatttttaggataaagataaaccccttaaggcytgatctcttcctgtggctccagcatcaatttccacaatgttgcttctcatcctcataccttgctttactggccttctttcatatcctcacaaacactgtg

SEQ ID NO: 313316 - DNA, 201 bp, Homo sapiens
cttttcttatgagggctcccatatcctgtaaaacttacattaaataaattttaaaacttttctcctgttaatctatcatgtatcaatttaattctcagacmcagccaggaccctacgaggagacagagagttttgactccactatactcttctttcagatattcacatggctttcttcttcacctccttcaggtctttact

SEQ ID NO: 313317 - DNA, 201 bp, Homo sapiens
ctttgcttacttaatatttattcttggttttctgggcattgaaataaaatgtttttctaatatacatgtaggcagcaagaggggggaaaagggaaattttmttttagggaaccctagttttggggaggggagatcttaggcaaaattgcaattagggaaaaattcagaaatgaatcatggcctccccaagacatcttttag

SEQ ID NO: 313318 - DNA, 201 bp, Homo sapiens
taggatgggagatatttctcaaattcacttccttgagaactgagaggctggggtttttaaggataatttggtgggcagggggctagggaatgggtgcggcygattggttgggaatgaaatcatagggatgttgaaactatcttcatgtcccgagtcagtttctggctggcaggggtgggtaacaggacctgtggacctgtc

SEQ ID NO: 313319 - DNA, 201 bp, Homo sapiens
gagtatttattcctcatggaactttttgagggcagatttaacatttaactttcagttcttcataacaagatgtgaagagttccaatttagcatttttttttccttgaaaatctcattgtctaaatggaattaaataactgaaaattaaatatagttcttcaaagttattttgtctaatgttttgagtgtcagtatgtaaaa

SEQ ID NO: 313320 - DNA, 201 bp, Homo sapiens
atattgtgcgatgctgaggtttggggtacaaatgattcaattattcaggtagtgagcatagtacccaataggtcgtttttcagttcttttctcccattctytctcccgctgctagtgctccccaatgtgtattgttctcatctttatgtccctgtgtacccagtgtttagcttccacttataagtgagaacatgcagtatt

SEQ ID NO: 313321 - DNA, 201 bp, Homo sapiens
gtttagtccctgagactgcccccgactttagatgccagtgacaagccccaggttgttttaccagtgcatctgactgactggctataaattggggattccamaacctcctccttgggttcgattaatttgctagagcagttcacagaactcagggaaacacatttactgtttattatacaggatattatgaaggatgcagat

SEQ ID NO: 313322 - DNA, 201 bp, Homo sapiens
caattgacaaagaaatttattacctctgtggcacacaataatttattataacaattataattattactgaaaatgtacactaagtcatatcagaatgatargagtgtctcataattttggaacacataccaataacatatttatacaaatacaacccaaagaaaaccaaacaccatttcagatttgacgatgcttcctata

SEQ ID NO: 313323 - DNA, 201 bp, Homo sapiens
ttttacagctgattataaaaccaccttctaaggaggatcaaaacaagacaataattgtccatggatgacaaaaagttttagggcagccatagtcaaagacrcaattgacaaagaaatttattacctctgtggcacacaataatttattataacaattataattattactgaaaatgtacactaagtcatatcagaatgata

SEQ ID NO: 313324 - DNA, 201 bp, Homo sapiens
tgaattctggagaaatcaggtggagagaaataaatatgctccaaattttatttataggagtatacttaattgttaaaagctgtcaatagctcaaaaaaaaagtttcctttactctgaaaaacaaaacaaaggatcagcaacattttaagcaaaaagtcaaaaatattactccagtcttctattagtttagtctgtgcagtt

SEQ ID NO: 313325 - DNA, 201 bp, Homo sapiens
atatggtatactcagtttagtaaagttttgcttgtgtccatcgggaccactttaatgcttttaggaatttaaataccaaattatttttacaaatttattgkttttttttttttttcatttccgtgacgcccctacttggttgccacaccaaatacaaacaatctgcttttgcttaatccagcaatgactaatttatattta

SEQ ID NO: 313326 - DNA, 201 bp, Homo sapiens
gcattatctgtttatcccgatggacttttgactctaagaacaatgatttcaccatacagcattgcctgtctgtgaggggaattttttttttttttttttttacattaaggggtttgtgaatgtgaatttatttgcttgccctaactactcttatctcttctggattgttcagaggtgtttagttccctcattacttcaagg

SEQ ID NO: 313327 - DNA, 201 bp, Homo sapiens
cacttccatgactgcctcccccaggcagccctccaggagcttgtgctaagctggggctgtggagaagctgcccatggctgagagcttgcgtgtttgggggktgctctcagcccctgtcacttgcacttctccatcttctagaaagaaacccaaaaaagaaagcagacgacaacctcgggacagaggagaaaaatcccgagt

SEQ ID NO: 313328 - DNA, 201 bp, Homo sapiens
taaggtttttcttttaatttttgaaataagaagtagaagctttagtttattgccagcatctacatgttttctctcttcatctgcccttgggaggcttccargtgtcaaaggaaataactaagagctatgatatatggaactgaattttgtctccatctcttactaactaaattccttggatgattacctaagtcgtctgag

SEQ ID NO: 313329 - DNA, 201 bp, Homo sapiens
aaaaccaggaagatgggctggaagtgtgtctgctctccccctacccacaggtgcaaggagttgccctttcccatctgttagaagactggagatgaaacagrgaggcactggacttgggacattagctgaagacaggaaaggtcgtatcctgaagagagagacctcagaccatcttatcacccggctggcagaatgttagca

SEQ ID NO: 313330 - DNA, 201 bp, Homo sapiens
agagagacccatatgttttagacaagcaggtggcacagttaatactctgtaaagaaagttgggaatctttgacttgtgtttacacggaattccattctgtraaaatggttcatagcacaaagccaaagtttttctcagaaaataattttgaatcttacccacagaaataccagaagtgtatgccatgaatcatgaaagaga

SEQ ID NO: 313331 - DNA, 201 bp, Homo sapiens
tattgttatagcccaacaaattcttcttgcctgctgcacagaaaaagcaaatacatggaaacatcaggtattatagtagagaaagaatttaatcattgtgkggtgtgaagcaagtaggatgggagatatttctcaaattcacttccttgagaactgagaggctggggtttttaaggataatttggtgggcagggggctagg

SEQ ID NO: 313332 - DNA, 201 bp, Homo sapiens
cttgcatttgtaagtcatattttattattgttatagcccaacaaattcttcttgcctgctgcacagaaaaagcaaatacatggaaacatcaggtattataktagagaaagaatttaatcattgtggggtgtgaagcaagtaggatgggagatatttctcaaattcacttccttgagaactgagaggctggggtttttaagg

SEQ ID NO: 313333 - DNA, 201 bp, Homo sapiens
tcacaactctaattttaagagtcattttcctatttactaaaattaaacgtcttcagcatgaatctgcagcagatcatacccacctggtgaagggtggaggygtcataaaaaggcacaaaaattccatgatgatattttgttgggtcagtgttttggtggtgaagtgttggtgactgtgacattgctcgatatcatctgtat

SEQ ID NO: 313334 - DNA, 201 bp, Homo sapiens
tttaacctgctgttcttttctctctctctgttttctctcctaggaaacaaatggaagactgctgcgaccctgcccatctctttgctatgactaaaatgaaytcccctatggggaagagcatgtggtatgacggggagtttttatactcattcaccattgacaattcaacttactctctcttcccacaggttagtatagagt

SEQ ID NO: 313335 - DNA, 201 bp, Homo sapiens
gcctgggctcttcatatattttcctaatttacttggcctttgtagacaacccatgatctagactgatttctactatgaaatcaatttcatagtaatttctrctattgatttctactataaaatatctcatacctttaatgactctcatattgcaaaatccccacagaccactttctgtctttattttattgatcttgcctc

SEQ ID NO: 313336 - DNA, 201 bp, Homo sapiens
taccccacttagtatgtgtaggacaaagcaatactgttttattttttaaagtagataaaatgtaaaatgattttagagttgaccataatgtttctcctttyctttttttaaataaaaaaaatgccttaaaaatccttggaaacatgttttttgctcctgcaattatctccacagagtagcttcttaaaggaaagatttctg

SEQ ID NO: 313337 - DNA, 201 bp, Homo sapiens
gcccaagcccctcacctcctttttatggggcttaccgtgaatgtcttgaactgtttcttcaccatttagaatcactcttcactgcctttttaaaaatttcyttttcttcttgcttaggaagctcgtggtcagatcaacacacctcctagctaagcagactccaaatggggaatgatgaatgatgcccctctggctaggtac

SEQ ID NO: 313338 - DNA, 201 bp, Homo sapiens
ttgtagagaagggatctccctatgttgcccgggctggtctcgaactcctgggctgaagcgatcctcccgcctcggcctcacaaagtgctgggattacaggygtaagccaccgctcccggcttcacttctttacaggtgatttgtttggagattcctctacccctcttctgtgttggcagggagggaaagcccttgtctccc

SEQ ID NO: 313339 - DNA, 201 bp, Homo sapiens
gtcatgcttcagcaggaagctggaaagagagtggtacagaggttaagcaagccaatccacaggatagtctatgtatgaaaactgctacaaactagttgtgscatgaggaagagataaggaagcaatctcctttaacagctcctcacatagaaacattttaaatgaaatccaaagtagcttttttttatagatgaggacttt

SEQ ID NO: 313340 - DNA, 201 bp, Homo sapiens; identical to SEQ ID NO: 65322

SEQ ID NO: 313341 - DNA, 201 bp, Homo sapiens
tgcttgtgttcaaggaacaccgattttattttaccagtggccccaaaatgcaagactgatgatgcaggtatattgttataattgttctattttattattakttattattgttcatctcttactgtgcctaatttataaatcaaattttatcataggcatgtatgtataggaaaaaataggaaaaaacggtatatagggctt

SEQ ID NO: 313342 - DNA, 201 bp, Homo sapiens
ttgttccctgctcatttgggataaatgaagcaatgctgtatacatctctctcatgatttggctctgattacttctccaatgtcatctttcatcagtttttstttttattctttgctaatattggaataattaaaaataggccaggctatattggttttgctcgagccacccactccacctggaatgacttgacttgaaggc

SEQ ID NO: 313343 - DNA, 201 bp, Homo sapiens
gcggaggagcccggggcaggatagcggtcccgggccgccgtggaaatttccaaggacttggtgcggcgcagagagcgcgtctcggggcggggtgggggggkgggggttgcctggcggcgcagcagcgcgggaggcggcgaagggcgcaggagcatcgctcggaggggacaaggggacgccacgggccacatgtttaggagg

SEQ ID NO: 313344 - DNA, 201 bp, Homo sapiens
ccatccttgatcctgtagttatcatcacagttattggcaccatctttcaagccatcatggtggataaccttgaagttattctttttttttttttttttttttgaaacccggtcttgctctgttactcaggctggagtgcagtggtgccatcacagctgactgcagactcgaccgcctgggctcaagcaatcctcccacttt

SEQ ID NO: 313345 - DNA, 201 bp, Homo sapiens
accatccttgatcctgtagttatcatcacagttattggcaccatctttcaagccatcatggtggataaccttgaagttattctttttttttttttttttttttgaaacccggtcttgctctgttactcaggctggagtgcagtggtgccatcacagctgactgcagactcgaccgcctgggctcaagcaatcctcccactt

SEQ ID NO: 313346 - DNA, 201 bp, Homo sapiens
aaccatccttgatcctgtagttatcatcacagttattggcaccatctttcaagccatcatggtggataaccttgaagttattctttttttttttttttttttttgaaacccggtcttgctctgttactcaggctggagtgcagtggtgccatcacagctgactgcagactcgaccgcctgggctcaagcaatcctcccact

SEQ ID NO: 313347 - DNA, 201 bp, Homo sapiens
gctcgctaggaattcgcttgtgggaatttgccagtccttaactgaagtaataaagtgactggggtacagggataaagagatgttcatgtgaggagtattgytggagagttgggggcttgattggtgcactggttagaatgtaattaggtcctggagcagggcagtgcaattaaatatgttaaggagggcataattaggtgg

SEQ ID NO: 313348 - DNA, 201 bp, Homo sapiens
cagtcaactcattagcatacaaaaagacatcatttttgagtttccgaggattttaagacttgtatgccaggaaacggggtcaaagagcaaatttatatttyataatttcacaaatataaagattctagctcccagaataagattcagctagcatgttccttaatggaaagtggatgacagtcagttaaaggttgttgacaa

SEQ ID NO: 313349 - DNA, 201 bp, Homo sapiens
tgattctttgcagtgaccagccccccactctgaagctgcatagggctgccagccgtcagtcaactccttaagatgcaaaaaggtatcactgggagttgctraagattttaggagttacgaagtcgaagatcaaatatatatttcacaacattacactatcacaccttctgatctttctccatgattcatgtgttgcacaag

SEQ ID NO: 313350 - DNA, 201 bp, Homo sapiens
cccaggaagctgtgatattagtgaactctctgggttattctaactaaagtgtgagaaccaatggctcaaatggagtagcaggttatctacacagtgtgtckatatgattgggaaagcattagtgccacccatattagaagatatgggtgggcgatggaagaaaggaattgctaagcagagcccatttggaagttgggaagc

SEQ ID NO: 313351 - DNA, 201 bp, Homo sapiens
tggacagatacagtgagagagaacatccaaaaatagcactgcctgtacacagtgatataccagattacagttcaaagtgtcttctaggactaggatataayaatttcataattttctttgcttaaatgttttcaaacacatcttctagtgctgaaaatcaatttcccatttctcaaagtaaacatttgctctgtagccaaa

SEQ ID NO: 313352 - DNA, 201 bp, Homo sapiens
agcagccatgaacatggaaaatggtccccaaatattagaaaagcaagtaaataatatgaggaaatgaattaacccattggaaaattgctgaagcatttgargaagaagtaaataaaggaagtgttcaaattaaagttattatacagagaaaaagtagaacaaatattgtgtgtaaaagaagtggacttttaaaacgcaata

SEQ ID NO: 313353 - DNA, 201 bp, Homo sapiens
ccaactggatgtagaagttacagaaaagggaagaatatatgtttttagtttggttgagtcactgatggatggttgtgcaatcttttcatgcaaggaatgtrgttgtcacaatagatattggaggaaagttgtgagtttgagatgcttcccacagatctccacagggctgactccctaactttctttgaacttgtgttaaaa

SEQ ID NO: 313354 - DNA, 201 bp, Homo sapiens
tacagcaaacaagcacgcagcacacaatgggaaaggagcagcaacattctccagtctctccacttctttatatgggaggaaaaacaaacacaggtttgccktagctttcagaacttagctgtgtctgcctgtatttgattcagtccataaagggcccaaatctccactctggtccattcagtgtggtgcctgaatcgtgat

SEQ ID NO: 313355 - DNA, 201 bp, Homo sapiens
ccatctctggttccaccattcccttagggctatagagtccttgagtagatcctgttgttgctgaaaggattctgttgttgctggcagaggaaacaactgtstttgacctgcataatggccactttatgtggctcagcctgtaacactgtaatagatagatggaaaggtaaacttaagagatgctatgaaaatggaacttag

SEQ ID NO: 313356 - DNA, 201 bp, Homo sapiens
atatattttcctaatttacttggcctttgtagacaacccatgatctagactgatttctactatgaaatcaatttcatagtaatttctactattgatttctrctataaaatatctcatacctttaatgactctcatattgcaaaatccccacagaccactttctgtctttattttattgatcttgcctcaacatttgccact

SEQ ID NO: 313357 - DNA, 201 bp, Homo sapiens
attaattttttattcactttgattcttgggacagtctcactctggtatttagctcagttttgtttattttaaagcacaatgaaaattctggcgtctaccasctccgcctgctcaggctctagaacctctaggcgcttgcggcagaaggcaagaagagcaatcgctgaggtggagcccactccaccctcctctaggagctgc

SEQ ID NO: 313358 - DNA, 201 bp, Homo sapiens
ttgaaggtaacctgaaattaaactgtggtactgaggatatgcattagttagggttggccaactgccatgataaactaccccaaactttcatgacgtaatasagcaaagcgttctttctcatccagacacaatttgagggtgcacagaaaaggggaatggttctattctgcactgtcatttatggaccccaaattattccat

SEQ ID NO: 313359 - DNA, 201 bp, Homo sapiens
agctcctactgcctctgtggtaacatcattttaccatggactattcacatgctaatgtgttttcattttccttgtaggtaaaatctcaaccttgagtggamtagatccttccttttttctgtcctgtgcatcaagctagctacacctctagctgctcccaaggctctcaactttaccatattaaattgtttgcatttcccc

SEQ ID NO: 313360 - DNA, 201 bp, Homo sapiens
gctactgaagaggctgagtcaggagaatcgcttgaatcccggaggtgggagttgcagtgagccgagatcatgccactgtactccagcctgggtgactaagsgagactgtctcaaaagaaaataataataataataattgcagttcctctctgaaagcatctcctaatcctttcatggcaatgctttctttctttccaaagc

SEQ ID NO: 313361 - DNA, 201 bp, Homo sapiens
agtaaatatttctagaaagcctctcacataaaaaaacagagaccaaacaaagcattagaaaaaacacagaaaacagacaagcaggaggcagaagaatacasaacaaatgatatagttatgatccttccaaagaaaatatactgctttcacaaagggtaggaatctgtgcaaatagaaccctttgaagccaagaaagacttt

SEQ ID NO: 313362 - DNA, 201 bp, Homo sapiens
cttttttctgtcctgtgcatcaagctagctacacctctagctgctcccaaggctctcaactttaccatattaaattgtttgcatttccccaggtactaccygctcttaccacatgcccttgcccatgctggtctttcagcaaagagtgctcttctccttcaactccgtttgcatagctactttttactcattcttcaaaat

SEQ ID NO: 313363 - DNA, 201 bp, Homo sapiens
agtgcatggatataatagctaagttttctgttaataaaaattattactaattgttaaggtagtgtgttaaattactgttttaccgtgttctacagaaaccrtgaaatctaggcatttcatggcttgaacaagccagggagactctgctagaaggaggaaagaaatgaaaaagggaaggaagatgagtggacttccatgcca

SEQ ID NO: 313364 - DNA, 201 bp, Homo sapiens
tgggcaagggaaaacatggtacttttttttttattagaaaagtgatttgcactagcttttgttttagaagaattaggatatgagagtgaaggattgatgayaggcaagaactagaggccaatttacagcattaaaccattttaaacaatagttacagtgagagtggaaagaggagaagaacagaagagcctctgcagaggg

SEQ ID NO: 313365 - DNA, 201 bp, Homo sapiens
ggaggctgaggcaggcggatcatgaggtcaggagatcgagaccatcctggctaacacggtgaaaccccgtctctactaaaaatacaaaaaattagccgggygtggtggtgggtgcctgtagtcccagctactcggggggctgaggcaggagaatggcgtgaacccgggaggcggagcttgcagtgagccaagatcgcacca

SEQ ID NO: 313366 - DNA, 201 bp, Homo sapiens
actgaggatatgcattagttagggttggccaactgccatgataaactaccccaaactttcatgacgtaatacagcaaagcgttctttctcatccagacacratttgagggtgcacagaaaaggggaatggttctattctgcactgtcatttatggaccccaaattattccatctctggttccaccattcccttagggctat

SEQ ID NO: 313367 - DNA, 201 bp, Homo sapiens
caaggagagggttgggttgagagtcataatctaaactaagcctgctgaaccagaatagcacagaaatctgggaagaagatgggaaaagactgtgactcaaycccactctatccactggcaaagaaacacagaaaatcccaaagctgtgtgaattcttttcttagctggctagggccatgccctttctgctcttaatcagtt

SEQ ID NO: 313368 - DNA, 201 bp, Homo sapiens
caacactctcactctgtcttttcttattatcccactttattctcttcatagctcttcccaaatattgttcattttttggtttactggttgtctcttcttayttgaatgaaagctccatgacagcagagactttgttagcattgttcattgctacatccctcagtgcatagaacagcacctggtacatgataggtactcaat

SEQ ID NO: 313369 - DNA, 201 bp, Homo sapiens
cccaggaggttgaagctgctgtgagccgtgattggaccactgcactccagcctgggggacagagtgaaactgtgtctcaaaaaaaaaaaaaaaaaaaacarcaactatataaatctttgaaattgaaaatatctcacacaaatatagactaaatactacagtggtctagcaaaatactaactttcccctaaggaatgcaat

SEQ ID NO: 313370 - DNA, 201 bp, Homo sapiens
atattaaattgtttgcatttccccaggtactacctgctcttaccacatgcccttgcccatgctggtctttcagcaaagagtgctcttctccttcaactccrtttgcatagctactttttactcattcttcaaaattcatttcagatatatgcatatctgaaaggcctgccctaactttcttctctcttagcaacatcgcca

SEQ ID NO: 313371 - DNA, 201 bp, Homo sapiens
tttacatttgtggtatgttactggcaagaacttttaataaaataataattgaataatgaaattcatcattaattaaataaatgtgatacctataataaatrtgtaatatattaaagctttcaatgctaatgcaaatagttctatcagttgttttaaattagagtatagagagggcatagccaagttctttgtcataaaata

SEQ ID NO: 313372 - DNA, 201 bp, Homo sapiens
tgtctctctctcttattcaatatgcatttattaaacactgtccctctgccaaacatactcctttgtgcttatctttatttctaaatttctctacaaataawatatttctgttttacttttgtgaagaggaagacataattgactgttatttaaaaataaatctatcctattcactcactgtagtatttgagtgctcgtgtc

SEQ ID NO: 313373 - DNA, 201 bp, Homo sapiens
attgccttccttccactcgtttatgttacccgcttgaattgtgtaggcatttcattttgcacctctggtgtgctagactttaaaataatctaaaaagctcrtctgtggatcatttagcaatttccttaacctttctgtcagtggtctgaaaaagggaacaggtttgctgcatttgcttagatagattcttggcatttctcc

SEQ ID NO: 313374 - DNA, 201 bp, Homo sapiens
atttgataaaatataatttgttttaaacaaaaaaatctgccaattcctctgaaatacaaatgattagatagaaaataaaacagggaatatttggaggaagsatggcacataaaagaaaatactaagcactgcacaaccatgaggcacatagaactgatacgctgagaggtaagtaatgcatgtattagcattatcctgatt

SEQ ID NO: 313375 - DNA, 201 bp, Homo sapiens
aacagcaggaggacctctatatggaatgggttagtgatggtgaacttgttaaaagagggttctgtctcttcaagactccttttatgtgaggtgttttacawacaattaagcaaactttattgtccatataaaagaagagaatacagtgggctgatactcccgtttctcagctaccttcttagctctgccacaattcaaaga

SEQ ID NO: 313376 - DNA, 201 bp, Homo sapiens
tgactagtctatccttttttctgataaaatgtttgatttaagcacttttatttttctttaagcccattcattagagctcttttatatatttttagcagtgmaacattgtgtacacagcacataaataaagagatatattaggcataccgatagaagtacatttatagattcctaagacctcttcttttgtgtttttcctat

SEQ ID NO: 313377 - DNA, 201 bp, Homo sapiens
tcacaaagtacattggaagtggcagaatcctctgatgctgtaattgtgtaaataaccattttattctccatgacctgggcacttagaagatgactgaggartgatttagatatgttatgtatattcatatagagtttatatatgctatcgttccatctgtctgtgaagttttcctcaattaagttgtgcttgagaagcatt

SEQ ID NO: 313378 - DNA, 201 bp, Homo sapiens
atgaggctagaccatgtgatgcttttacagtgcactttaaaaaaggtttttttaaacaaagacttttctgagtgtctaaactacactctccctaaaaaccygagagtagcctctgttgcaataattattttagtcaataaatcagataacaaaatacaaaagcaaatagtttaagagttgagatgaactggtctgtttatg

SEQ ID NO: 313379 - DNA, 201 bp, Homo sapiens
aaggcaaagtgttatcatatgaataaaaataatggtaataaaatgtcatagattatgtcatgtctttaaaaagagggtacctgaaggaaatttaaatttcrtgttttaggttatgtcataccatggggatcttgatatgtagaaatttcctttcacttttgcagatggttgagagatctaagaacagtggagggatgcaga

SEQ ID NO: 313380 - DNA, 201 bp, Homo sapiens
aagtatcaaaccagaaagggcttgatttaggaaacaaacccaggctattgtggtggaaaaaaagatggcagaacccttagctatggaacagcagcgtgagrcgacagccattgctcttttggttggcctgactagcaaaaaggtggccttgttatgtaaataaagccttttaagtagtcaaaaatgaaagtcttttctgtt

SEQ ID NO: 313381 - DNA, 201 bp, Homo sapiens
ggaattagtaaaggacatacattaagtaatcccctaggactgctttttcagcttgtaattacatttcaaggaaatggccctgtaaaacaagtagcaaagtkctctctgcaatatttgaaagtaagaccatagcaggtcaaaaattataaagtaaattatagtcattcacttaaaacgttcacttaaggcattttgtaattt

SEQ ID NO: 313382 - DNA, 201 bp, Homo sapiens
tgagtaaaaatagatccggttctgcacctattggatactgtcctcaatgttccataggttccttaccttttacatgctcacaattctgtccctttctcctrcttcttttcttctattcctgatctcaggtaatgacactatcgtctactcagtcacttgagctggacaccagggtcttatgtttgaatttcactgtccaaa

SEQ ID NO: 313383 - DNA, 201 bp, Homo sapiens
tggcaataaccagaagataataaggagtaacatgatgtgctgctagtatgcagaatgcagagatgaaaatggggtggatggagctatacccagagatccgkttaaaacaattgacttcaagttcccagtctctacgctggaggttttgacaactggcagcttccaagggtactggtcagaagaagccagagcctctgactt

SEQ ID NO: 313384 - DNA, 201 bp, Homo sapiens
ccatgaagcaaaacaaaaactaaaacaccactaaaaaaagggtgaaatcaattttacaggacagtgaaaagaaataaaggtgttgaagctgggatttcggraaacataaagtagtaacagagaatgttacagtctttgtttcattatatttggataataattacagtaaagtaaaagagcaaggtgaaataaatcattaac

SEQ ID NO: 313385 - DNA, 201 bp, Homo sapiens
catcctaaagatgacaagtttgctgaagaagaatcaataaagaattaaaaaaagtaatcatcagacccaataaggaaaaaaaaaaaagttttaacagccawaaggctttccagagctgaaacaggactgggtccacaggcagaagtacttagttacattccaggtaaaattaatgcaaaaagacccacatttagacatatt

SEQ ID NO: 313386 - DNA, 201 bp, Homo sapiens
tatagagaaatctttaggctgaacctaaaatatgtgaagaggcagctttagactaaacttaatttaacagtaatctttataataaaccagtaaatgtgaaygtttgcctgagatttgtgagttactgtagcaaattaatccaacatgaagaagggattgcaggaacctcagcgtgcagccagctggtcagaagttctggag

SEQ ID NO: 313387 - DNA, 201 bp, Homo sapiens
ggtatagaacacctcaaaacattttttttgtgtgtttttgttttgttttgttttttgagatggagtcttgctctgtcgcccaggctggagtgcaatggcaygatctcggctaactgcaacctccatctccgggttcagcaattctcctgcctcagcctcccgagtagctgggattacaggcgcccaccaccatgcctggct

SEQ ID NO: 313388 - DNA, 201 bp, Homo sapiens
agtgatcctcccacctcagcctcccaaagttttgggattacaggcatgagccaccatgctcagccattgaagtcattcttgtacatcctcattgtcatcawccctatctattaatctacaaacactgttaatatcacttttacattatccatgaactctgttgctgtctcagtatttccactgccattgtctttgttcagg

SEQ ID NO: 313389 - DNA, 201 bp, Homo sapiens
gatatcactaaaaccccagaaggcaaagatttcataacctttagatggaaaggttttctgatttttgtgtaagagcattattttgtaagagcttgacactrtttgtttgaacaattgttaaataaatattttgaaacagagatttaaagtcctggacgaatgaaactagtggttaccggtacttacattacttgatctctg

SEQ ID NO: 313390 - DNA, 201 bp, Homo sapiens
gcaccaccatgcctggctaatttttgtatttctcatagagatggggtttcaccatgttggccaggctggtcttgaacttctgacctcaagtgatacaccckcccttggcctctcaaattgttgggattacaggcgtgagccaccatgcccagccccagcccctcattactttttacttttactaagtgacttgcatttccc

SEQ ID NO: 313391 - DNA, 201 bp, Homo sapiens
attcacctcctccactgtcatgaccttggtccatgtgtctcccgaataattgcagtcatctcccaataagtttttatgcttccagcctcaccactgtgctrtttagtaacttattgcctctcagctgcaaaaccactttcatataccctggtttgtgttgctgaaaccatgattttacaaatcacgtttcccccttgccag

SEQ ID NO: 313392 - DNA, 201 bp, Homo sapiens
gagtagctgggactataggtgtgcaccaccatgcctggctaatttttgtatttctcatagagatggggtttcaccatgttggccaggctggtcttgaactyctgacctcaagtgatacacccgcccttggcctctcaaattgttgggattacaggcgtgagccaccatgcccagccccagcccctcattactttttacttt

SEQ ID NO: 313393 - DNA, 201 bp, Homo sapiens
tgcacagagttgattatgtattccgtgatttcagattgtccagctactaatgaactttcttcattatcctcatgaaaacggatgacagtaacatttattartatgtgaatatttctattactttattaaaataaaaatgactttattgctaaatttatatttgtaattcattttattggagaatagaaaccctgtagatta

SEQ ID NO: 313394 - DNA, 201 bp, Homo sapiens
aacattaggggaggacccagcaagggtacgaggtggagaatctttacccaggatttatattgatatgccgatatgccactgggccaacaatttgtaccagytttctcccatccacccctcctcagccctctttttaaagtgtgcttcagttaaatatattttcaaatcagtaaaatgtcagtgagttgcaatttcagtgaa

SEQ ID NO: 313395 - DNA, 201 bp, Homo sapiens
gacttacaaagctatttcattacagccaaggcatttgtgccccagcttaactgtggaaggcaaactttaagtgtaaagtgtgaaactggctaattatcttrccaattccatatatgccaagagcctctttgagcaagatggtaggggtccatctgtgaacaattcattgcacagagttgattatgtattccgtgatttcag

SEQ ID NO: 313396 - DNA, 201 bp, Homo sapiens
aaaatactggaaaatgacattgcataagttaggagggggagattgaagtgtttttagctcttctttcagttttttacttcttagtgacaggtcatcctttkgtcttaagcagcaacagcaataattttagtatctttcacgtttctgtgggtcaggaattcaggaagaactaggctgaacagatctgtctcatgatctctc

SEQ ID NO: 313397 - DNA, 201 bp, Homo sapiens
cctgggttgggaccagctctttcctgcttagccaggaactgccccttttaagcctgcatggtccagtgtttacaggaattattgaatgaaccctattttgrcctaagatatcttgccaaggaaggacacaaatttccatggaaatgagtgaggcagtagcaggaatgttagaaaccacaactgtgctgatacaatctgaaa

SEQ ID NO: 313398 - DNA, 201 bp, Homo sapiens
tataggaaaccaagcaggaaattcagaggtagctgtttccaaagggctctataaatgtattttggtgaaatatttgttgaatattattaggcatgaagggmagaatttttaaccttcacacaggatttttaaaacatgcgatgtatgtgtgcgtgtttgtatttggggaggacggtgtgatggtatcagccttcccacttt

SEQ ID NO: 313399 - DNA, 201 bp, Homo sapiens
acttgggctggacccctgcagtacccttgcttgaactataggaaaccaagcaggaaattcagaggtagctgtttccaaagggctctataaatgtattttgktgaaatatttgttgaatattattaggcatgaagggcagaatttttaaccttcacacaggatttttaaaacatgcgatgtatgtgtgcgtgtttgtatttg

SEQ ID NO: 313400 - DNA, 201 bp, Homo sapiens
acttacctaggaatgggtctcaggctgaagactgctctctaccatcctagaagcaggaaaaatctcaaattcatcttccctgttggaagagagttcagacwtcataaaatagttacctctgccttccattgccaaggaagcaggaaacctgctttccctgtgtgggaagcaagccaaattccaaaaaaaaaaaggagttgt

SEQ ID NO: 313401 - DNA, 201 bp, Homo sapiens; identical to SEQ ID NO: 65324

SEQ ID NO: 313402 - DNA, 201 bp, Homo sapiens
ccttaaatactccgtatatgttagccatcattatcaatgttattcgtttgcctacttttgtttttttgtcgttggtacaaagatgcagtgtaagaagggaratgctctggtacattagggaatggcaacaggtcctataatggctggggcagtgtatcctcaggaggtaactattgaaatgtctgtgaattgagatgccac

SEQ ID NO: 313403 - DNA, 201 bp, Homo sapiens
atttttggatacttgcagccaggaaaaattagaattcagtctaaacttagaaaataataaaaattgaaaaaccttaggcaaaactggaatctaacatcagrtgtactatagtttttgaaacataatttttctgtctccagtttcctatttttactaaagacaaatcatggtaggactgatttgctttattatattgcccag

SEQ ID NO: 313404 - DNA, 201 bp, Homo sapiens
ttcattctatttctactcaaaagattttcaagggattgttctctatcttgtcaccagttttggggagtgcactctctttagggtcactctgtgtattcccytgccatacagcttgctggaagtctcttttcactgaatttaaccacctgattgttaatgaagatagagatgcacctctgctgtagctgaatagctcaacag

SEQ ID NO: 313405 - DNA, 201 bp, Homo sapiens
catcattcatttcattctatttctactcaaaagattttcaagggattgttctctatcttgtcaccagttttggggagtgcactctctttagggtcactctrtgtattcccttgccatacagcttgctggaagtctcttttcactgaatttaaccacctgattgttaatgaagatagagatgcacctctgctgtagctgaat

SEQ ID NO: 313406 - DNA, 201 bp, Homo sapiens
gtgataatgttttgagttattgagagagaatccaatgtgtattttttttattaaaataattcacttgttgccttatgcaagtgtattaatcaaacataaargtcttatcagtttcatttcctagagataaataatgttaacattttgatgtctattcttccagatgttttcctatttagagtataattcattatttaaact

SEQ ID NO: 313407 - DNA, 201 bp, Homo sapiens
aagagacactcggtctaccaagtttgataagatgaaagctttcttcccgagctcttctccccttgtctgccttgagcccttctcttctgtccttctttccrttgaaaccttcacgaaggcaaagccaacgaagatctcagagagtgcaaggggaggcacagtgtggcaggaagagcacctcccccgcaggctgaggaagct

SEQ ID NO: 313408 - DNA, 201 bp, Homo sapiens; identical to SEQ ID NO: 65321

SEQ ID NO: 313409 - DNA, 201 bp, Homo sapiens
ttgtaccaattttcccacaaagcgaatgactgggatttgtattttaaaaccacagctattataataccagtatctttgaaattgacatactgtctccctgktagttttcaatttatcttggcccagctgctggaggaaaatacttttcagtctttgtagcgccgtggagccaatatgtttaggaaacaagccagtcaatat

SEQ ID NO: 313410 - DNA, 201 bp, Homo sapiens
ttgtgaagaagtccaggaaaggcagtttttaactgtcatgcttcagcaggaagctggaaagagagtggtacagaggttaagcaagccaatccacaggataktctatgtatgaaaactgctacaaactagttgtggcatgaggaagagataaggaagcaatctcctttaacagctcctcacatagaaacattttaaatgaaa

SEQ ID NO: 313411 - DNA, 201 bp, Homo sapiens
gaaataggggaaagaatatgagttccaattctcctcctcatttcaaatcttcctcaaatgcttctaatggagaaatgatttgcatccagaacactagttgygaagaagtccaggaaaggcagtttttaactgtcatgcttcagcaggaagctggaaagagagtggtacagaggttaagcaagccaatccacaggatagtct

SEQ ID NO: 313412 - DNA, 201 bp, Homo sapiens
gaacctactactgtaactgtggtctagggactgggaagccccaacttggcattgctgttagtgtggccacaactgcttctgttagaaataggggaaagaakatgagttccaattctcctcctcatttcaaatcttcctcaaatgcttctaatggagaaatgatttgcatccagaacactagttgtgaagaagtccaggaaa

SEQ ID NO: 313413 - DNA, 201 bp, Homo sapiens
cttatcactacaaatataaaaaataaaaaattagccagacatggcgtctatagtgctagttgcttaggaagctgacacaggaggattacttgagcctaggmgttcaaggctgcagtgagctgtgatcatgccactgtactccagcctggatgacagagtgaggccccatctctttaaaaaaaggccttgttattttataat

SEQ ID NO: 313414 - DNA, 201 bp, Homo sapiens
tccaaattaaataggtagacttgaaaaagacctaaattgaacttttagaaatgaaaaatataattgttgaaatggaaagacatcaaattagacataactgragagagaatttgtgaactggaatacagagcaaataattttccagataatgaggctatagaaaatacaaaggcaagacaaagaaacatggacgatagaatg

SEQ ID NO: 313415 - DNA, 201 bp, Homo sapiens
tttaactttcttttccatttttgaaaatgggtgaagaatggtggtattagccatattttagagagagaggagaatgactgctgtatatacatgtaacataygcaattcgttattcaaaatactttttaggctaggcagacagtaactgaggacacttagaaatggaagaaattactatttgccctacatctaatataggta

SEQ ID NO: 313416 - DNA, 201 bp, Homo sapiens
actagagatagcaagtaggagatagaaaagaaaagcccctaaaaatatggatacatggagttggtatctgagaggcaatattatatagcagtgaagaacayaagttttgattagaacggatttgttttcaaattatagtgctagtgctagtaagtgtttctgcctactagctatgtaaccttagttacttaatgtaccata

SEQ ID NO: 313417 - DNA, 201 bp, Homo sapiens
aataggcgaccgctaggaggtacccgagctatgcgtcggccgccggggcgagcagaaatggctaacagcgactctctcggctcggtgggtcaaggcgggtsgtgcttttccaaggtcggggttgcgataagcttatcgcttatcacaagcaagaagggcaagaaggacgtctaagaaccaacggtcctttaatctaaaagg

SEQ ID NO: 313418 - DNA, 201 bp, Homo sapiens
atactcacaatcatggcagaaggcaaagggggagcaggcatgtcacatggcccgagcaggagcaggagcaagagacagcgagtgagctgccacacttaaayagccaggtctcatgataagtcacttactattgcaaggaaagcaccaaggggatggtactaagccattgatgagaaatcgtccccataatccaatcacctc

SEQ ID NO: 313419 - DNA, 201 bp, Homo sapiens
aaaactaattatgttctccattatcagagtgtctgggaacagtctgcagctgctgtctgaaacacttacaggggctataatgcgtgtctcagctcttctgktcagcttgtgtttttctttagtcaattcattttgggttgccatgttgatttatcatatttttatttatttttatgggaaaaggaatgtacgatattgtaa

SEQ ID NO: 313420 - DNA, 201 bp, Homo sapiens
ctttggggcaatgaatcattataatatttgggataataggaggcatgactttcttttatgaaatagaaaaagaaaaattatggaaatagaatttggaaaasagagttctttagactgtcagattggtcttgagcaaatatatttgagaaaaatatacatatggagtttgaaggtctggaagtttatgggggggaggaggaa

SEQ ID NO: 313421 - DNA, 201 bp, Homo sapiens
tctttagcacagacaggccccttatagacacaaggttgtgcagccactagagacctgggcttcagctgggcttggatctatgccttgaaagaaacagatcytctttttgaaactctcttgccttccttctcctagtgttttattcttttgttaatgaaaataacccatattcatagagtcagaataacaattattgatggg

SEQ ID NO: 313422 - DNA, 201 bp, Homo sapiens
tggtgtaacatggatatacactttataatgattgcttaggctgcacatgtatgttagatgcactcttcaatagatatactttactaaaaacataagaaaaragtatgctaagtgatggaggactatacaacttatagttaattttaaaggttctcagtttgcttttttgacataattgagttcgagacgtatactagagtg

SEQ ID NO: 313423 - DNA, 201 bp, Homo sapiens
tctataagatgttaagacttattaaaaagctattataattaagacaatgtggctctggtgcaaggataaaccaactgagcagtgaaagagaataggctacycccaaatatttccacatagatataaaccagtatatatgacagatgtcatatttatatgagtgatataaatatgaagagccgagaatagcaaagaagtata

SEQ ID NO: 313424 - DNA, 201 bp, Homo sapiens
cttgaagaaaaaatgatgggcagagttgctctataagatgttaagacttattaaaaagctattataattaagacaatgtggctctggtgcaaggataaacsaactgagcagtgaaagagaataggctactcccaaatatttccacatagatataaaccagtatatatgacagatgtcatatttatatgagtgatataaata

SEQ ID NO: 313425 - DNA, 201 bp, Homo sapiens
gtttattatgttacaaaggattcagatgaaggagtgtgtaggatgagggatgggggaagggacatggagcttccatgccctccctgggcacaccacccccmagaaacctccaccttcttatctggaagctctccaagccctgtcctttcaggtttttatggaggcttcattagcaggcgtgattgatgaaaccattaacca

SEQ ID NO: 313426 - DNA, 201 bp, Homo sapiens
aaacttctgccaccaagtgtgtttgtgtttttcccccacacaccaagcaagcaatcaattctgcagcagacaccagcggggtatctccaactcaattccarcactatctacagatagtgtcagatcccacagattgagggctcagtcccacaagactaccccccacccccaccagtcacaagtctaggcctccggagcttc

SEQ ID NO: 313427 - DNA, 201 bp, Homo sapiens
ttgagtttgattggcatttaaaatatctccaaaaagattgaatatctattgtgtataaagatggaaacaaagcctgggatgtaaatttgatttgtaagcarattacttcagagaaataatggaagcaattttatattttcttgtaaagcaacataaaaaaagaagaagaaaataaccaccagcggatgatggtttatttta

SEQ ID NO: 313428 - DNA, 201 bp, Homo sapiens
taattctggatgatagggagttatgtgtctcagtttgtagcatagtgcttgagacatggtagagattcaataaattttagtggaatgatgaatgaatgaaygaatgagttcagctgcttagttttggtggatacaatcaccaagtgtatcctggtgtacctagagcctatgttttggtataaatataaagagacttggagt

SEQ ID NO: 313429 - DNA, 201 bp, Homo sapiens
taaaccatgtccaggtgttttctgttgactcaataagagcctaggatgcacttctgacaaaatgtttgcagtccagtataaaactttaccttagccaggcrtggtggcacatgcctgttatcccaaccatttgagaggctgaggcaggaggatcgcttgagcccaggagtttgaggttgcagtgactgcattccagcctgg

SEQ ID NO: 313430 - DNA, 201 bp, Homo sapiens
tgagcaggtagctcgcaaagaggagaaagcctggactctgcggacctggcttcctgttctgccctgtgtggcctgagcaagtcctggaaccgctctaagcytgtttcctcagatgagaattgggaggaatcatgatgataataataataataaccatacccttaattatctcttagggttgctctgaggactaaaaaatat

SEQ ID NO: 313431 - DNA, 201 bp, Homo sapiens
ggaaacggggtcaaagagcaaatttatatttcataatttcacaaatataaagattctagctcccagaataagattcagctagcatgttccttaatggaaastggatgacagtcagttaaaggttgttgacaacctgaaatgctgatattctgtgctgagtaaagagagacccatatgttttagacaagcaggtggcacagt

SEQ ID NO: 313432 - DNA, 201 bp, Homo sapiens
ttcagtgtggtgcctgaatcgtgattgcgatggcagaggtctccgtctagttcagtggtatgatatctttggactcttgctaacctatgcaacatgtgaamtgctggagaggaaaagcactttaaaaccttgctgaaagatacatgagcccatggggaaacacaaagctcaattactggtagaatcaaagagacagaggca

SEQ ID NO: 313433 - DNA, 201 bp, Homo sapiens
aaagatccccatacaactggatatgtacagtggcaggtaaacccttcatttgggattgcagagacccagctatgaggaatttatgtagtgcagtggtacaygtgcttttatttttcatggttatcagctccattacagtacagctgataattagcatggtgttttatctccatttaaaaagcaatagctttctttcttcta

SEQ ID NO: 313434 - DNA, 201 bp, Homo sapiens
aacgtggaggtaaggacattgcagcctgcccgcaatctcttgttctgccctttagtggttttaaagaacttctttttaattcttagattttgatttcataycaatgcatgatgctgatttttaaaattgtagacatgcctcaaaggcagcctctcacaaaggctcttgtaacttaatttgtaatcagaagtgctcttaata

SEQ ID NO: 313435 - DNA, 201 bp, Homo sapiens
ttattctataccttattcttcttagtttttgatcaaatcatgtgtaagtagcaagtgggatctgaagacggattaaatctttgagtgagtgggaaaacggsaacaaaggagcaggggtaaatttcaaacgaggggacgcttggtaaagggactgagcagagtggtgatgtgcacgtcagttccaggaaaaacaggaggccc

SEQ ID NO: 313436 - DNA, 201 bp, Homo sapiens
acagggattgcatcctcaaaaggaactggttggcttggggacatgaatgagggaacataattttggtgccttttgaattatgctcaaatgtatgttttgcmtgctcacatatacaaaaaaattaaagtaatttcatgatttttctgctttaagatttctttctctcaagcccatttcccacttacttccacatcccaattc

SEQ ID NO: 313437 - DNA, 201 bp, Homo sapiens
ggcagtatgtatttctatattagaagattatcctatttatattagatattttattcatatctcgtagtcttctctcaaagctgtgcaaatccaagacatcrgtagttatcttgtactttcatgtgatgaaaaattaaacttgttgggcagagatgtgcagtggaaatgctaattttcatagctgtctccaaaaccttgatt

SEQ ID NO: 313438 - DNA, 201 bp, Homo sapiens
ttagcagaaagatatttcatatagggaatttggcatttaaaaaaatcattggaagaatggagaaatgggagccaaagggtggttcctagaattactgagtwcaagaacctactactgtaactgtggtctagggactgggaagccccaacttggcattgctgttagtgtggccacaactgcttctgttagaaataggggaaa

SEQ ID NO: 313439 - DNA, 201 bp, Homo sapiens
tgtaaaacataataaatgtactttataaatacaaagcattatatgtttggtattaatgtgctgattcatacttagtatcttgaggctgaggcatgaaaagyagaattgtattggtgagggtttaggcaaggtacagaaatctctttaggtacttttagcagaaagatatttcatatagggaatttggcatttaaaaaaatc

SEQ ID NO: 313440 - DNA, 201 bp, Homo sapiens
aagtgaatacactaaggatgttggatccaaaagtcagttagtgacagctaatcccagcataattcggcaaaggtaagagtttatgacttctgtttgtgacraacgaagatgaagtcttctcaagtacttagcatttcaaaggcagtgagcataattcagtttgggaaatcaagaggaaaaccatctggacaggcaggaagg

SEQ ID NO: 313441 - DNA, 201 bp, Homo sapiens
tcctcattttgtataatggagaaactgaagtcaggcaaatgaattaacttgcctaatgttccacaggcagaaagccatgggatttgaattcgcagtggtcrtatttcccattgtaagcattcataagacatggtggccaaggagagcaactggggcagggtggggttttgggagtgggagtggggtggctgttcccatcac

SEQ ID NO: 313442 - DNA, 201 bp, Homo sapiens
atttgcacttagagaaaaagtttacccagaagaacttacaccaaaatgtattgtcattattttctggaaatacatcaaaattcatataaaatgttatcttyatggttttaagcattcacctctgttctagaagataataaatacctgcaagtttttattgggctattactctgtggcagtaaatatgaaaagacccagaca

SEQ ID NO: 313443 - DNA, 201 bp, Homo sapiens
ttggggacatgaatgagggaacataattttggtgccttttgaattatgctcaaatgtatgttttgcctgctcacatatacaaaaaaattaaagtaatttcrtgatttttctgctttaagatttctttctctcaagcccatttcccacttacttccacatcccaattcaaagaatattcacttctcattaattctctgatca

SEQ ID NO: 313444 - DNA, 201 bp, Homo sapiens
aaagaaaacatttgttatggagcaaataaaggagccttgaggatagactctgagggacctttcaggtggaccctgaagcctcactgaggtggaaatgactrtgaaccaagtgccagcagactctgtggccaggaagggtgaagactgcagcaacatcaaggacagaaagctgagcgagattttgtattcctgtttattttt

SEQ ID NO: 313445 - DNA, 201 bp, Homo sapiens
tgctacaaaatgattacaacctaatgaagtctctctcctgatatgtctgaaatacctataatagtgtataaggagattcccattttgttttccttggaaasggatggagacttactcagttgctaatttctgtaatgtggtccaaattgtttaaacctaacaattccatatttaaggatttatcttaaagaattaactgta

SEQ ID NO: 313446 - DNA, 201 bp, Homo sapiens
gtttgttgaagactaactatgtgctagactctttgctaaatgttttgcatgcattatctgataatcccaacatatgatgctgatattattgtctccatttkacatgtagaaattgaggctgagccaaaagtgtcctgcctgggatttcccagttagacactggttccatgctgtgattccaagtcaagattcaaactgagg

SEQ ID NO: 313447 - DNA, 201 bp, Homo sapiens
ccaaacaacctcttgccagagacagtaataattttttaaccccttgaactctaaataagaaaatggtttcatccagattatgaacactaaaccttggttgrtgtgggcagtttgaacaatcatccttcgagttgaaaactttttgactgtccttggaattagtaaaggacatacattaagtaatcccctaggactgctttt

SEQ ID NO: 313448 - DNA, 201 bp, Homo sapiens
actaggatataacaatttcataattttctttgcttaaatgttttcaaacacatcttctagtgctgaaaatcaatttcccatttctcaaagtaaacatttgstctgtagccaaaagcagtactttaaaaaataatatcattgaattcaatttattgggaagatttgccagacaaaagttaacagggattgcatcctcaaaag

SEQ ID NO: 313449 - DNA, 201 bp, Homo sapiens
atgttaaggagggcataattaggtgggaggctgaatgatgtaattacattcataagaggggggctataattaaatatgaggcaggggtgtgtatttagatrcctaagttgaggatataattaacatatgggcaagaaattaaattatgtgtgtggatgaagcataattgtgtgtgggagtccaggaggatacgtgggtgag

SEQ ID NO: 313450 - DNA, 201 bp, Homo sapiens
cgcagctttgcgcagtgtgcccacagcaagtgcatagtactgactgacgtctactaagagacgatactgtgcaatttttgtgttgaaatctcgaacagctktctagtattattatctcatcttgttgaccacaaattgattctttagaaggatgagtaacttccccaaggtcattacttttgacctgtgggtgctggattt

SEQ ID NO: 313451 - DNA, 201 bp, Homo sapiens
agtggaaatgctaattttcatagctgtctccaaaaccttgattctcctaaaaatattctatcagaagttataagcattaagagttttcactgtaaaattcygttagaaaatatcagtaacaagataaaacaggttttagaaaaattaagcatacatatgtgagaggcactcataattatagtgaaaaaaagaaagttagag

SEQ ID NO: 313452 - DNA, 201 bp, Homo sapiens
tttctactgccaactaaagaatgatgagattcaaaaatttggaaaggagagctttatttctcataaagtgttgcagcctgaaagtggccattcttctaggyttggaagcatagcctcccaccagaagccagaaacagatactttgagagaggggcaaagggatcaagaatttatactgagcagagtggccaaatctacata

SEQ ID NO: 313453 - DNA, 201 bp, Homo sapiens
tgagcttcatgccccttcttgggtctcatgtgcaaaaagcagtggtgttagcatgatctgagggtggagtgtttggccctctgatgtcaaaaggtgaagcrgaggacacaaagacccttactgtgcattctccatagactggccaaaaccactctgtagtcggtggtgtctcatcaggcaaaaaggaggggcagcgtcaga

SEQ ID NO: 313454 - DNA, 201 bp, Homo sapiens
agcaggaggcagaagaatacacaacaaatgatatagttatgatccttccaaagaaaatatactgctttcacaaagggtaggaatctgtgcaaatagaaccytttgaagccaagaaagactttttgttcttaaaaaatgtgatagtagaaattaaaacatcaacaaatggattagcaaaataatgtttaggaaatcactcct

SEQ ID NO: 313455 - DNA, 201 bp, Homo sapiens
tattgcaaatacaaatgaagggaaaggcagaaaaaggaagtgctacccacatggttaaattaccatattttattgattgtgagctgcacagtttttaataytttaacatctgtgaaacagctgcttcttacagcctctgttgtccagttggaagctgaggcatagttggcactgggagtacatagttgtcaccttgctcat

SEQ ID NO: 313456 - DNA, 201 bp, Homo sapiens
gtccagacatatcgcaatcaaatcaatagtcagtgtctacctaaatgtagttcacatctgagataaaaagtttattacaggaattgatagcctgtccacawgtaaattttctcccagagtgcataaagcccttccatgcagcagtcgcgaatccatctctggaatcctttgaaagtgcagctcttccatccctgctgcaca

SEQ ID NO: 313457 - DNA, 201 bp, Homo sapiens
gctcgtggtcagatcaacacacctcctagctaagcagactccaaatggggaatgatgaatgatgcccctctggctaggtacccccaactttgattctcttkgggcctccctcttcttcaggggagggaagaatccccattctcaataggtttttcttgctcccaattttcccttcatgttcgccaaggtgaagggcaatta

SEQ ID NO: 313458 - DNA, 201 bp, Homo sapiens
atagatcagtaagcctgagtaggaagactgaaaataagtattcattgaaatccttcctagaaacattgatattctttaatccacataattttgtgtacttsttcaataaattataaaacaaatatgtattagaaaaaacaaatcctccttaaaatatttatatttcaaaagttccttctttcaattttctctgcccttact

SEQ ID NO: 313459 - DNA, 201 bp, Homo sapiens
aggtcttcacgatatgaactctctgagaatgtcagctaatataagcttaccaattgccatccatctgcttcctccagctcctcattgcttttttttttgasacggagtctcactctgtcatccaggctggagtgcagtggtgtgacctctgctcactgcaacctctgcccccggggctcaagtgattctcctgcctcagcc

SEQ ID NO: 313460 - DNA, 201 bp, Homo sapiens
tgtctctactaaaaaatacaaaaatgagccaggcctggtggtgtgcatctgtaatcccagctactcaggaggctgaggcaggataatcgcttgaacccaaraggaggaagttgcagtgaccagagattgtgccattgcactccagcctgggcgcagagtaagactccatgtaaaaaaaaaaaaagtataaatatattttta

SEQ ID NO: 313461 - DNA, 201 bp, Homo sapiens
attctaagaggactagtttttttgttgttgctgggttgtgtaatgttttgtgttttcccagtgacaagcccagtccttggtaggcagaggcctgagggaawgatcactccccagtgttgtgctgaatcctgcctggaggctgctgcgctagatcctccctccatatcattcccctgactcacagcagtactggaataggaa

SEQ ID NO: 313462 - DNA, 201 bp, Homo sapiens
ttttactcaatacaagcattctacaagtgaaacagggcacaagccctaaaaaaatcaaagtgcatgaaattctaagaggactagtttttttgttgttgctrggttgtgtaatgttttgtgttttcccagtgacaagcccagtccttggtaggcagaggcctgagggaaagatcactccccagtgttgtgctgaatcctgcc

SEQ ID NO: 313463 - DNA, 201 bp, Homo sapiens
gtgattgagagactgagatataacatacttactaagatagggcagaaccctggctttggcctcttttatcaacttagtgtttgtagggaatagaaagccartgtagctatgatgggtgactcaggtacaagtcttgcagatacagttgaatgacatagatggccagaaacggtggccttttttttttccattttattttat

SEQ ID NO: 313464 - DNA, 201 bp, Homo sapiens
tcccctggggtgattgagagactgagatataacatacttactaagatagggcagaaccctggctttggcctcttttatcaacttagtgtttgtagggaatrgaaagccaatgtagctatgatgggtgactcaggtacaagtcttgcagatacagttgaatgacatagatggccagaaacggtggccttttttttttccatt

SEQ ID NO: 313465 - DNA, 201 bp, Homo sapiens
ctttaggagactgaggcaggcagatcatttgaggtctggagtttgagaccagcctggccaacatgatgacaccctgtctctactaaaaatacaaaaattakctgggcgtagtggcaggcacctgtaatccctgctattcaggaggctggggcaggagaattgcttgaacccaggaggcagaggttgcagtgagccaaaatc

SEQ ID NO: 313466 - DNA, 201 bp, Homo sapiens; identical to SEQ ID NO: 65323

SEQ ID NO: 313467 - DNA, 201 bp, Homo sapiens
tttagagtataattcattatttaaactgggatacctgagataaaatgccataattatgccgggacaacaggcacaaactaagactatttccaacaaactgrgatatataatctccttactgtgtatgaatttttacagctgtgtctacagaaatatctagatacactcaacatgtgttatacatggtgatgcacaacctct

SEQ ID NO: 313468 - DNA, 201 bp, Homo sapiens
aaccagctgccatgctatgaggccactcaggcagtctatggagagacccttgtgcgaaaaaactgcagttctggttgatagccagtgaggaactgaggccrccaacaaccacgtaagtgaactaggaagcgtatcctttagcttccgatgaccgcagccccagcagacagcttgactacacttcatgagagaccttgagct

SEQ ID NO: 313469 - DNA, 201 bp, Homo sapiens; identical to SEQ ID NO: 65326

SEQ ID NO: 313470 - DNA, 201 bp, Homo sapiens; identical to SEQ ID NO: 65327

SEQ ID NO: 313471 - DNA, 201 bp, Homo sapiens
gtttctttttctctaggtttaattgaacagttttttttttcttcaataggtttcagaaccttctgtggtccagaaagacatttgtggacaacatgaaaatytataaccacagttacatctacatgcctgccttttctatgaagacaggaacagagccatctttgagggtttattatacactgtcagatgttggtgccaatc

SEQ ID NO: 313472 - DNA, 201 bp, Homo sapiens
gctcagtttattctttgatgctgctgctccacctgcatataacccaagatgggcagctcccatggtgaaaggaattaaaagttgcaaggccctaatctagktcattgcttttctctctctctacccttctctctccctctctttctctctctctcttttttttaacttgagtgtattagcagcctcttacctggtctccag

SEQ ID NO: 313473 - DNA, 201 bp, Homo sapiens
tcttctaaataagtatgtcccacctgtgtcagattacccaggagtactaggtaaaaattcagcccctggatcactctcatcagaacccaggaagctgtgayattagtgaactctctgggttattctaactaaagtgtgagaaccaatggctcaaatggagtagcaggttatctacacagtgtgtcgatatgattgggaaag

SEQ ID NO: 313474 - DNA, 201 bp, Homo sapiens
actgggaacggtatgagcatattaagaagagttttttagttctaacctgcttgttgtaatcatttcacaatgtatgtgcatatcaaaacaccacattacayaccttaaatatacacgatttttatttgtaaaatataccttagtagcgttgaaggggaaagttctaaccgtatttagaagacagaggaaataattcagttg

SEQ ID NO: 313475 - DNA, 201 bp, Homo sapiens
cccacatataggtcacagaatttttctgtgttgattagtgttgagtgagagaacagaaaaatcactttgaatttgttttttctacacagagacccttaccrctacctccataccactgctatccctggaggtaaccattttttttcagctttatgtgtatcctttcaacattttcccatgcaccacatatgtatatgtaac

SEQ ID NO: 313476 - DNA, 201 bp, Homo sapiens
ccctggtatgtacaatcctagtccacacatcagagggggcaaggaacggctaagggacagctctttgagggagacattgtggaaggatctttgatttggtkctgtggggcccacatatgcaagtggtataggcttgccctgtgtccccagattgcaggaccaaacttcctggagtttcaggagtctaaatttgaatttggc

SEQ ID NO: 313477 - DNA, 201 bp, Homo sapiens
ttgagtttgccttactcatcagattgactttttgttttctttcttctctctttaaatgtttttctttatatctgtcatctgtgtgtgtgaataaatcacartgttttgatgcaagggtggaagcaggatgttacagagttacagttttcctagcctttctgatttgagtcctatgagactgaaggaagcaagaaatgaatg

SEQ ID NO: 313478 - DNA, 201 bp, Homo sapiens
aatcccagctactcaggaggctgaggcaggataatcgcttgaacccaagaggaggaagttgcagtgaccagagattgtgccattgcactccagcctgggcrcagagtaagactccatgtaaaaaaaaaaaaagtataaatatatttttatatatttataaagatgatatgtaaacaggtatgaaaaatattgtagtctcag

SEQ ID NO: 313479 - DNA, 201 bp, Homo sapiens
agaatattcacaaatagtttctgaattctggagaaatcaggtggagagaaataaatatgctccaaattttatttataggagtatacttaattgttaaaagytgtcaatagctcaaaaaaaaagtttcctttactctgaaaaacaaaacaaaggatcagcaacattttaagcaaaaagtcaaaaatattactccagtcttct

SEQ ID NO: 313480 - DNA, 201 bp, Homo sapiens
aattcataataacacttctaaaaaagtcagaaagtaataatctagcaatgtataaaggataaagatgtagaaagcaaaagaagatataacagaattaagtrttattttgcacaattagaaacattctattgttaaggatattgcagggaatataattcattctaactagcctaagcataaatgggtttatttaaagggatt

SEQ ID NO: 313481 - DNA, 201 bp, Homo sapiens
cagggccatatgtaaagcatcacaaaacatccttaatgcaccccacatagacactcatttccagcttcctaggttggctgtaggctcctgtcatgttccastgagcctggacctgcagcgttcttggcctgtgggaaacccagcaggatattttggagtagtttgtcaaaatagccttgttaaaatgaaaatacacatttt

SEQ ID NO: 313482 - DNA, 201 bp, Homo sapiens
ttgcaattagggaaaaattcagaaatgaatcatggcctccccaagacatcttttagccacccttggtttgctcagatgattgtacagaaagagaatttttragccttagaaagtgggactgaatctttcatgtgtctctgttaatagcccatgagactttaaaggaggaatcccacaaagctgaggcacaggttctaccag

SEQ ID NO: 313483 - DNA, 201 bp, Homo sapiens
ttgggtggttcatcttttcttttttgatactaagtgttctttatttgttaagggaatgtagtagacgtttttgtcacatctgttgcaaatatttttctcartttgtcttatgactgcttacgtttatgtttgaattttttttccataacgactttaaaaattatcaggcaatcaacctcatcagttttttcttttatagct

SEQ ID NO: 313484 - DNA, 201 bp, Homo sapiens
gttacagagttacagttttcctagcctttctgatttgagtcctatgagactgaaggaagcaagaaatgaatgatcagggacttgtggaattctagtgttcygaggttggctgtggaatgaccatgaggatttgtgtgatactggaatgttttcttaggactgatgttgctcagggagtggggaccatatggtgagaagttt

SEQ ID NO: 313485 - DNA, 201 bp, Homo sapiens
ttgctgtcatagaaaagggataattgagtttgccttactcatcagattgactttttgttttctttcttctctctttaaatgtttttctttatatctgtcayctgtgtgtgtgaataaatcacagtgttttgatgcaagggtggaagcaggatgttacagagttacagttttcctagcctttctgatttgagtcctatgaga

SEQ ID NO: 313486 - DNA, 201 bp, Homo sapiens
ataacaattattgtataacaattcaataactgaattgtcaacattgttattgaataacagttactggctcacatgctttctgctgaccacactgtgagccytttgaaggcagcacatagacagggtctggcacataacatagcaggtggtaaattaaaatgtgctgaatgaatgatgaaatggatggttgcttttcccaaa

SEQ ID NO: 313487 - DNA, 201 bp, Homo sapiens
cacactgtgagccctttgaaggcagcacatagacagggtctggcacataacatagcaggtggtaaattaaaatgtgctgaatgaatgatgaaatggatggytgcttttcccaaaacctttgcacccacatggcatcaagttacgtcaacctaggtcaatccaggcaacagcgatggaagaaggaaaggtcctggatgctca

SEQ ID NO: 313488 - DNA, 201 bp, Homo sapiens
acagggagactgaaaataaacattcactgaaattcttcagagcagcttctgccacttcttgttctagatcatatagaaaatatgtctgggccatcagccarcagtgacccttaaaaaaaaaaatacctgcttcaaaattgattatttcagacagatttctttaagtcaggggaaaaaattagcatatgctggcccaaactc

SEQ ID NO: 313489 - DNA, 201 bp, Homo sapiens
ctgaggtgggaggactgcttgaggccaggggtttgagaccagcctgggccatatagtgagaccttatcactacaaatataaaaaataaaaaattagccagrcatggcgtctatagtgctagttgcttaggaagctgacacaggaggattacttgagcctaggagttcaaggctgcagtgagctgtgatcatgccactgtac

SEQ ID NO: 313490 - DNA, 201 bp, Homo sapiens
acaggtaaaatataagtttagtgtttgtaagttgggggtttatggaattcactttgaaaaggtagtttgggaaaaagagggtttaataagttttgatgctyaagaaaatatgctacagttatgttgcaaatttacaaatgtggaaaaaaatctcatcagcaataatcacaatagcaaaaatcaatcactaacccttactgg

SEQ ID NO: 313491 - DNA, 201 bp, Homo sapiens
attttccattgttaggatagatacaaatgtatttaattaatatactgttattggatatttatgttgtaatttctcacttttatgaataaagatgtggtgaycatccttttgtatacatcttaaacacttacctgcttataaatttctagaattaatcttttcacactttttagtttgaagcgccagttctttttttaaaat

SEQ ID NO: 313492 - DNA, 201 bp, Homo sapiens
agtctcagatgttgcaatgaaatcaatcttaaaggacaccataatggagaaattgctgctgtttttgaagatgtaaaaatcacagtcagagatgtcagctmagtcagtctctgccttctccccaaccagaactaaatggcagagtgcagtgacagagcaaaaagctgaactggttccgaggtctcttccctgccaggagct

SEQ ID NO: 313493 - DNA, 201 bp, Homo sapiens
tcaatgatgttacctactgcagggaaccaatacagttgccccaatacctggggcaaaggtattgtctttgccccagaggcagtattatcaccacttgcctycattccccctccatgagcaagaccctgctgcttgattctcaaaacacaatattagaatctttctagctacatagactagtaggtataaacagggagactg

SEQ ID NO: 313494 - DNA, 201 bp, Homo sapiens
catcaggctaattaaaaattttttttgtagaaacagggtttcaccatgttgcccaggctggtctcaaactcctgggctcaagctgtcttcccgccttggcytcctaaagtgctgggattacaggtgtgaaccacagtgcctggcctgcatgtaggttttgccatgtctttgagtcctacttttcttatgagggctcccata

SEQ ID NO: 313495 - DNA, 201 bp, Homo sapiens
tgaggatctgtaagggagggcagattcttctccttttcacttagagtaagtgccgcatgcacccaaccctgtgtgagcctctcccccaatacaccagtccrtcccatgctcactttattctagattcgctggtttccttgatggcctttcagcataccaggcatgctcctctttaaggcctctgcacttgttctttgatct

SEQ ID NO: 313496 - DNA, 201 bp, Homo sapiens
gtgggttttctcatatctgagcatggtgttaaatgattatgaggggaatcaaaattgaagagtctaatagagggatactttgctgtggataggacagagayaagagtgagagagggtgggcttgacggggctggttagagaaaatgttagaaatatgtccaggagagaaacaggcatccactggaagattttgtgaagttt

SEQ ID NO: 313497 - DNA, 201 bp, Homo sapiens
ttttgacattggtaagttaagttttctctgttattcttttgtccaaaattactgtcagtatacatactaatttatacctctcatatgatgtttagaattaycttatcaaattttactttaaaataatgttgggatttttgttgagattgcatttgaacctacaaatttatctggggaggcatctttcaatattccttattg

SEQ ID NO: 313498 - DNA, 201 bp, Homo sapiens
ttgaaatgcaaaatcactttccaagctgtcagtggcaattcatactcccatttgaagcataaaagtgtactgtttctcacagatttctttgttattatcartttccttaatttgcaccagtcagatgtgtggaagactgttagtttgctatagttttgttataacttgaatgcgagtgaggtcgtgcttattttaatatgc

SEQ ID NO: 313499 - DNA, 201 bp, Homo sapiens
taattgaagaacagttaaaagtccttgagtggtaggaaactacaaatattctataattaacatgtacaaatatatatcttaagggaaaattatgtgtaacrttttttaaagggtttaataattaagtacctataatgagaagttttttttctctgaaataattgaactaattaccagatattttcatcataaaatgcttac

SEQ ID NO: 313500 - DNA, 201 bp, Homo sapiens
tataaaaagaatacaacaaagatgttgtaaaaaaacatacagaaagaaaacaaagatgagagagtaggtggcagtaaaggcttctatgaggagctttcatytgagccaagacctaaaagaagtgatggatggtgccctacaaatatcaaaggcaccagctgagaactggaaatgcagggtcaataggtgtgcatatttgaa

SEQ ID NO: 313501 - DNA, 201 bp, Homo sapiens
caaattttgacaccttatagaatttgccagggataagtatgagattgcttggtcaataaatgcaaacaaaaatgtatgctaggctgggcatggtggctcaygcctgtaatcccagcactttgggaggccgaggcaggtgggtcacctgaggtcaggagttcgaggacagcctgaccaacatggtgaaaccctgtctctact

SEQ ID NO: 313502 - DNA, 201 bp, Homo sapiens
aagtttgaaaatgatctcaaagaccagtcttaggttttacaatagtgatgaatatacaggagcaattgagaaagttacaaatcttgtgacttctggttatrtgattcctgagcagtgagcagttatggaaaagcaatctagggaacaatggctggttagtgtttaactatgcctacctcttagcagaattgaggccccact

SEQ ID NO: 313503 - DNA, 201 bp, Homo sapiens
agcagggcaaagggggcattcactttagacagaacaagtagcatgtgcaacagtttagaggcttcagcgagcatgacccttttgatgaacaccaagtaatygggcagggcaagggtagggagtgctgacgagcagtggcaagaaaagaggctgaaggtgtaggcagggattatatcatgcttagactttatctgaagatga

SEQ ID NO: 313504 - DNA, 201 bp, Homo sapiens
tgataaacttttgaaactcttttttcctctgttttctgtcaccttccttttttgtctactctttgctgcagctctgtctcctttgcccaccatttaagtgygataatttgtcagtgtttttattttagctcactgttcttcttgttggctcatgtctgtggctcaacatgttcaaatttggataatagtctttctcttcaa

SEQ ID NO: 313505 - DNA, 201 bp, Homo sapiens
atcctggccaaaggtgatccaggagaaagagccaggaggggagattttaacagctggttagtttatacgtttatttagaggagagggagggttttattaaygttaaccctctacctttggggcaacacactagaatttatggggaacatcatcagctcatctcagttgtggtttatgtacccacaaagcctggtaggttgg

SEQ ID NO: 313506 - DNA, 201 bp, Homo sapiens
tgatggaatttgttgattatttctgtaatttaattatagatcttttgatttttatctcaaattattactagtgtcataaataaacaagaggccctatctaktatatgttttttttgtttcatttgctccaaaaggatttgggatttcatgtcctttggaattttgaataagttttgagggttaacatcaaacttgttgtca

SEQ ID NO: 313507 - DNA, 201 bp, Homo sapiens
acatgagaaatgaacagttatttacattcatctcattattctgataatgcctatataaacaaatgcacagacataccaaggctaggaagtggtttcctatkaatttataacttgtgtccttggagataatgcttatttctttggaagggttcttttaagattcaaattttcatcacttgcttttgcaaagaggagagtaat

SEQ ID NO: 313508 - DNA, 201 bp, Homo sapiens
ggggtttcaccatgttggcaaggctggtcttgaactcctgacctcaggtgatccacctgcctcatcctcccaaagtgctggcattccaggtgtgagccacygcacccggccaataaaaatatttgaatagaaatatagttaaagccttatcagcaccactgtcagtgttgtgaagctctgtgctcaaattggaatacaatg

SEQ ID NO: 313509 - DNA, 201 bp, Homo sapiens
gtaagaaacctcagaataactgtcccagactgaagcctttaaggctaactgtgaagatagtcaaacagggtgaccccgagcgcttttgttaccatgttacycttgtgtcattagataatacaagtctcagatgttgcaatgaaatcaatcttaaaggacaccataatggagaaattgctgctgtttttgaagatgtaaaaa

SEQ ID NO: 313510 - DNA, 201 bp, Homo sapiens
gtggtccccctacccaaaggcagtaaagttctcaatatggctgagcctggggctttttatgggctcagaataggtagcttgtattgattgatttgtgactrtgcaaaaaggtcaaagcaaagatgccactcaaaggtggacatgacagtgtagaaagccaattaggaaagtgtgggtatatgaaaaataggtgaacggtgg

SEQ ID NO: 313511 - DNA, 201 bp, Homo sapiens
tgatgaaacagcttttagcaggggtggtccccctacccaaaggcagtaaagttctcaatatggctgagcctggggctttttatgggctcagaataggtagyttgtattgattgatttgtgactgtgcaaaaaggtcaaagcaaagatgccactcaaaggtggacatgacagtgtagaaagccaattaggaaagtgtgggta

SEQ ID NO: 313512 - DNA, 201 bp, Homo sapiens
ttttttgctcgttagctcagctaggtctgggttcttgtctcatgaccaggaagaagtaggcacacagaaatttgaagagtgagcaaggcggggagtttcaytgaatgatgaaacagcttttagcaggggtggtccccctacccaaaggcagtaaagttctcaatatggctgagcctggggctttttatgggctcagaatag

SEQ ID NO: 313513 - DNA, 201 bp, Homo sapiens
taaatataaagagacttggagttcattaatagagagtggaggggaaaatcctcacattggaagcagtcaacataatgatgagggatttttttgctcgttasctcagctaggtctgggttcttgtctcatgaccaggaagaagtaggcacacagaaatttgaagagtgagcaaggcggggagtttcattgaatgatgaaaca

SEQ ID NO: 313514 - DNA, 201 bp, Homo sapiens
aggtcatattgactgaatgatttctaagttccagacctggcactttttataattatcattttatttaattctttcaataactgtagaggtaatttcttacrtttcccttcaccccattttatagatgaggaagctgaggctaagaaaggttcagtacccatcacaaagtacattggaagtggcagaatcctctgatgctgt

SEQ ID NO: 313515 - DNA, 201 bp, Homo sapiens
gattaaaacttttagaagacttcggcattgaaaagaatatggtatactcagtttagtaaagttttgcttgtgtccatcgggaccactttaatgcttttagkaatttaaataccaaattatttttacaaatttattgtttttttttttttttcatttccgtgacgcccctacttggttgccacaccaaatacaaacaatctg

SEQ ID NO: 313516 - DNA, 201 bp, Homo sapiens
gagtaatgatgatgatgataatgatgatgtggtgatgatgatgatgaaagctagtagttgtaagacttattatgtgccaggcactattctaagtgtgttayacatatgaactcatctagtcctcacaacagccctatgaaatacacgctattattatttttttcaaatgagaaaattgaggcataaagcaatgaagtaacc

SEQ ID NO: 313517 - DNA, 201 bp, Homo sapiens
tcccctctccgtgggggtggaaaggctgtggcctcaccacaaaagcatgccactcccaaggcagctccttccctagtataaatcagctgggtggtgccagractggtcctcttagaaaacctgtggagtggtaaacataaaagatggggtacttagcctattttggcctcagggtggggccttgactgtaattcccagata

SEQ ID NO: 313518 - DNA, 201 bp, Homo sapiens
aatgtgtgtataaatgaaacaaaaatataatgaattcaacagtacattgcaaatatttttctagtaatagtatatgcagtctacatcatctcttctaatgrctgtaagattttccattgttaggatagatacaaatgtatttaattaatatactgttattggatatttatgttgtaatttctcacttttatgaataaagat

SEQ ID NO: 313519 - DNA, 201 bp, Homo sapiens
cagacaccaccagtgccaggtcccaaggacaagctcagatcaacttcaccacattggagacagcataaggatctactatttccgtgaggatcctgggaggraaaaattagctctgaaggagttttgcgttttaaatgaatgaaatatttgcccccaacactgtttttactttgaaagacacttaattgcttttaattggca

SEQ ID NO: 313520 - DNA, 201 bp, Homo sapiens
aatttatgttagactttttctttaatgatttcttcatatgtagttgttgtatagctgagcataggaaattaaaaagcctctttaaagatctgtactgtctygaggttgatatttaaaggataaaagcaacactattttcatttgtaaaagtaattgacatttaacaaacatcgctaatattttggtttatattcttctgga

SEQ ID NO: 313521 - DNA, 201 bp, Homo sapiens
tctggttgtcagcttggtgtccagaaaaaccagacataccagccatgcagacaccaccagtgccaggtcccaaggacaagctcagatcaacttcaccacaytggagacagcataaggatctactatttccgtgaggatcctgggagggaaaaattagctctgaaggagttttgcgttttaaatgaatgaaatatttgcccc

SEQ ID NO: 313522 - DNA, 201 bp, Homo sapiens
atattttgggaatcatgacatttccacactgccaatatgtagaaaagcactaaaagtactgatggagcaaaaagggctgaaggcagagaaaaggcaggcayggattactgggacagcagagaaggttagagacttgagttctggttgtcagcttggtgtccagaaaaaccagacataccagccatgcagacaccaccagtg

SEQ ID NO: 313523 - DNA, 201 bp, Homo sapiens
gcttcccattcttctgttctcttttttccctttcttctccatctgtctccactcatcattttttttctttccaggtgatgatgtaaattggaaagttaggrtagtggtattgctggtgggcaaggtaggtgtctgaaataactgcatgcttctccaaggagactggtggcctaggagggagccatcttggtgctaggagag

SEQ ID NO: 313524 - DNA, 201 bp, Homo sapiens
tgagtgtataatttagtctttgaaattgaagagagcaagtgagacatttcttctcacctcctcttctttgttattttctacactttgctatttctctcttygtctttattcattgtggcagataaataatgggatgagtgataggaaggaaaatgatttttgttctttttctctttttgcatctcaacctctttaatcata

SEQ ID NO: 313525 - DNA, 201 bp, Homo sapiens
ttgcagtctactgtggtttgtttggggctgtttgcagcacatgatttaaagaattggaggtgaaatgaaatgagtgtataatttagtctttgaaattgaaragagcaagtgagacatttcttctcacctcctcttctttgttattttctacactttgctatttctctcttcgtctttattcattgtggcagataaataatg

SEQ ID NO: 313526 - DNA, 201 bp, Homo sapiens
tgaaataaagcaagaaaacatttgattggtaacagttatagagttgccttaattggtctgtcctgcggaaaagtgtttagttatataaccataagtttgtwcgttggtggctattgagcttaaaaagtttcatttttctttaacataggtgtttacaagaaatattaatagctcaagttttgtttcacttatgtttgcaaa

SEQ ID NO: 313527 - DNA, 201 bp, Homo sapiens
ccctaatgtgctgtggcctcattttaacttaactattatatctacaaagatcctgtttctaaataaagtcacattctgaagttctgagtgggtgtgaactytctggggatcagtacaaggatttgacccaagagaaagattcacacattaaatgtaagaaacagactacaaaaattaaaagcattagtgtgaatacttatt

SEQ ID NO: 313528 - DNA, 201 bp, Homo sapiens
taatagctcaagttttgtttcacttatgtttgcaaatcaagcaaggttaaggccacttatgagctctgactggctttgtctgctcaggaattcctcagccstggtctccattttaatttactttaataggagaaatgtgagcaattggtcctcacatgcctactaggatccagctactagtaggatccagatcctaataat

SEQ ID NO: 313529 - DNA, 201 bp, Homo sapiens
ttttattagtttcttagggctgctaccacaaattaccacaaaccacaaaaacaacagaaatttgttttctcagaattttggaggctagaattttgaaatcraggtgtcagcaaggtcaggctctctgtgaagtttccagggctctagaggagggtccttccttacatcgtcctagcttctggtgctgtctaacaatctgta

SEQ ID NO: 313530 - DNA, 201 bp, Homo sapiens
atcaaaattaactgtataatcattttattagtttcttagggctgctaccacaaattaccacaaaccacaaaaacaacagaaatttgttttctcagaatttyggaggctagaattttgaaatcaaggtgtcagcaaggtcaggctctctgtgaagtttccagggctctagaggagggtccttccttacatcgtcctagcttc

SEQ ID NO: 313531 - DNA, 201 bp, Homo sapiens
atgggttttccaagatacagtctatttttaaaatataaggtgttgctttacgccatcatctccatttttttacttaaatggtgatagtctatagattagartatacttcacttaatattatgtctcaaaataaattaatatctgtttttaaagtttagtatggccttaatttcatataaagaaacttaaacaaataaattg

SEQ ID NO: 313532 - DNA, 201 bp, Homo sapiens
aaaaaaaaaagttttaacagccataaggctttccagagctgaaacaggactgggtccacaggcagaagtacttagttacattccaggtaaaattaatgcamaaagacccacatttagacatattgtgatgaatttttacacttcaaagataaagagaaaaactctacaagcatccaatcagaaaaatgtgatttacctaca

SEQ ID NO: 313533 - DNA, 201 bp, Homo sapiens
tgatgtggaccaggtcctgcagaaggtgagaaggaacccagactaccagggaatgaattcacaggacaggagggctatgtcttctactcagggaaaagctrcacaatataattcagagcatagaatcaagtgtcaggctgatctgagttggaagccagagtctactacattcttgctatgaaattttgctagaatacttaa

SEQ ID NO: 313534 - DNA, 201 bp, Homo sapiens
ctccagctcctcattgcttttttttttgacacggagtctcactctgtcatccaggctggagtgcagtggtgtgacctctgctcactgcaacctctgccccsggggctcaagtgattctcctgcctcagcctccgagtagctgggactataggtgtgcaccaccatgcctggctaatttttgtatttctcatagagatgggg

SEQ ID NO: 313535 - DNA, 201 bp, Homo sapiens
ttgatctatattgtgtacgtaaaatgaaagagaattaaaccatgctcactagacatgattatgcagatttcataattttcatcaaaattgtaaaaatatcyaattaccctaacttgccagaagttgtagactaataggggatcttatttggctttaaatagctttttccttcatatctgtttcagtcatagtagattctac

SEQ ID NO: 313536 - DNA, 201 bp, Homo sapiens
aggcaaagtaggtgaagtagctattgaagaacttttagttagttaatgccatagctaccactagaattatgtcttctgattcccgtccaatgttctattayattatggctgttatttttcccagaacatctttttaaaatttttcatgttgatctatattgtgtacgtaaaatgaaagagaattaaaccatgctcactaga

SEQ ID NO: 313537 - DNA, 201 bp, Homo sapiens
taaatgctaggtgtagttatacattgctaggtgatagaagtgatattacatgtcctctagttcaggactttaattttagtgagaaaaagtgatattacatrtcctctagttcaggactttaattttagtgagaaaaaaaataaggcaaagtaggtgaagtagctattgaagaacttttagttagttaatgccatagctacc

SEQ ID NO: 313538 - DNA, 201 bp, Homo sapiens
tagtgtaactggtccgaggtcttctaatgattgggtgtcaattgcattaaatcctaattttccaatactcagctagagttactcctgctgcttctcaagtrccagggcctttatgggttttaagagctacaatttgtgctgaaaaaactgtcaggcaagatactcttatcccttttattagttagttgattatgttaggtg

SEQ ID NO: 313539 - DNA, 201 bp, Homo sapiens
gaagttgtagcataatttatttctgattttttatataagaatgctgacttttttctgacacatatcactttattcaagaattgtttacctccagggactcrtctgaatttttgtctggttaattgtaatggtcctatgtgtctctcttgatcagattaatttgagcatggaaagtttttagcaagtcaactccataacttt

SEQ ID NO: 313540 - DNA, 201 bp, Homo sapiens
tttccttcctgatatgttccatggcagcagagactttatcgtaactgtatacctgagtaggaggataatgccaggcacttatatgataaataaatgaatastcctgctattacttgtaagcttcactcatgttttgtcaaacttggtcatggcttctgatttttttacatcttctactaccagactttacttttatcccat

SEQ ID NO: 313541 - DNA, 201 bp, Homo sapiens
ctaccttatggctgaaaaacttggcattcatcccagcagctgccatggatggattttgggggaacatggcgactcaagtggtaaagaaaaaaaaaagaaawaattacttgtgatgttggttttgccattttgaatttttcattttatttcaaattttatttttatagactttgatgtacttaagaacagttgcaaaaatag

SEQ ID NO: 313542 - DNA, 201 bp, Homo sapiens
tagcttcaacatctccttgtcttatgcccttcagagcacttctaccttcagagattagcctgatttgttgtttgtttaattcctatttccttcctgatatrttccatggcagcagagactttatcgtaactgtatacctgagtaggaggataatgccaggcacttatatgataaataaatgaatactcctgctattacttg

SEQ ID NO: 313543 - DNA, 201 bp, Homo sapiens
cctgccagtgcaacatgatggtaccatctctgacttcatctcttctatttgctttctgcctcccaaatgccaatctcatttttgcttaaactcttttgctygcatttcccttcacctggaatgttcttctctaggccacagggttgaccccttcttatcattcagatcttactgcaaatgcatgcctttgcaggcaggcct

SEQ ID NO: 313544 - DNA, 201 bp, Homo sapiens
catctatatcatatggctgaaatcaacaaaaaccaaacacctaagatcacacagatagtaagtgccagatctggcctttttgagctcatagatggtgtacyttgcccccagaagttaaataaaagcatagcattggagaggttgaggagggacatgcattagccagattcgcgaagcccactaaggcccctttgtacagtg

SEQ ID NO: 313545 - DNA, 201 bp, Homo sapiens
accatgcccagccgggtctcatggttctttaaaatatattctgctttctagaatatcattaggctcattttaagttgtacttcagttcgaaattgcaacastaacattttaaggatgatttctatttggatttcatatgcagatatatgtgtaatgttttgattctttccttgcagtgcaaaatggcaactcttaaggaaa

SEQ ID NO: 313546 - DNA, 201 bp, Homo sapiens
aaaaggaattcaggttgatatttttgcagactttgaataaaaattattcattgccattatattgtcactatgtattaagtatgcattctatgtccagtacrctgtaacacattttatgtgagacagagtagaagaatcagtccctatcttccaagaatgataaccattagtagtagaaattatgttcataattggccattt

SEQ ID NO: 313547 - DNA, 201 bp, Homo sapiens
ttcagttatctagaaaacacatctggttatctgatggcacaagtacatttggtgttactgtacagatcgttcattttccaacaggtttcggttttgttttkttttttacattttaggggtctttagtttggatggttagacagaaactgtttcagagactgatagtctcctaatgtgatcccctgaaacgacaatgtatta

SEQ ID NO: 313548 - DNA, 201 bp, Homo sapiens
tttgagacaggtatggtgacctcagatgcgacataaaaagtaaaaaacaagtgaaaatcatggacattacaatggactactacaattataagtaataattrtgaagaaaaggcttatttgccatctgtattctctgttcaagaagacagggtggtatatatttagtgtactataaattgccatggaattgatgtttatttc

SEQ ID NO: 313549 - DNA, 201 bp, Homo sapiens
tattaccactagacatgctctgtaagaaatgccaaaaggaatccttcaagttgaaacaaagggacagtagatagcaatattaagccatacaaaaatataasgctctctagtaatctaaatacatggactaatacagtaacctgtattatagtaattctggtgcatgaaatttaaaaacattaaaaataattgtaaatctat

SEQ ID NO: 313550 - DNA, 201 bp, Homo sapiens
aaaggcctttatgaaaggaaaagagctcttcagaatattggatgactctgaatggtgactctagaataacagggcaagactctatatgggctgtagaatcratcatatgagagatctgggtagaacatcttcacatattggaaaatgtaggggacaccacgctcctggggtttctaggctggcagtgaacacatggaaaat

SEQ ID NO: 313551 - DNA, 201 bp, Homo sapiens
aggagacagcaagaaagcatctttccataagtagaataaatatagtcaaagtttttccatgacgtttttcagatacccagagaaaacagcttgcaagagcmagagataaaaatgtatgcatattcatagctttgagcctaggtattttttaccgataaactacttctaaacatctgtcattcaagcacattagggacgtac

SEQ ID NO: 313552 - DNA, 201 bp, Homo sapiens
taaagtgggaatttttggccatcacttttaatttagagctactggttcatttctagaataacattaaacaagagaacgattaaaaaaaaaaaaaaagagaragaaatgaatgaataggttatcactgccatctggtggtgaaaatgcaagaaaacaggatatacattctgatagctcaaaatagaattagtttgggaaaag

SEQ ID NO: 313553 - DNA, 201 bp, Homo sapiens
aattatgtacagatattacgtattaacttaaaaatgaacttcaatacatattttgcaccatgtaaaaaattaactcaaaatggatcacagagctaaatgcraaacctaaaacttctatgaaaaaaataggagaaaaatatttgtaactttggattagttaataatttatttgatatgatatcaagtgtacaatacacaaaa

SEQ ID NO: 313554 - DNA, 201 bp, Homo sapiens
ataagcaaactggtacatccatataatggaatactcctccccaataaaaggaacaaactattgatacacaaaacaacatagataaatcccaaatgcattaygctaggtgaaagaagtcagtctcagattgcatactaagattacatccatttgaaattctggtaaagagaaaactacagagatgaagaacagatcagttca

SEQ ID NO: 313555 - DNA, 201 bp, Homo sapiens
ccaaaaatgttgtaagtgtgctacagaaatggcttgttctccctgagccttttaataaagaagtaaggcagtgtgccaggaagagtacagagtgaagagtrggtgactagaacttcagctatcctgataattctctgagggaaatggcacatcatacttaacctcacagggttttcactttcattatctgcaatatgaaga

SEQ ID NO: 313556 - DNA, 201 bp, Homo sapiens
tcaacagtggtattcttggtatctaagtgaccttgatccataataagaatactgcttttgcagttaatctaaaccttgctgtttcaaacattttaaacatrcttacagcttaagtgaaatatatatatggtaaattcattgtataaaatatgtgaatacagagggagatttatttaagccaaacaatagcaccagtactta

SEQ ID NO: 313557 - DNA, 201 bp, Homo sapiens
gcaacaaaacatattaatgtcactataatttggatattcatctccgcccaaatctaatgctgaaatataatctctaatgttagaggtggggcctgctgggrggtgattggatcacagggtcagatcccttatgaatagcttgggccatccccttggtgataagtgagctttcactctgagttcatatgagatctggcgatt

SEQ ID NO: 313558 - DNA, 201 bp, Homo sapiens
tgagtgtttatgtttgcttcagtcaactgtagccatgttcttgtggacaaacacagtatataacaaagctcttaggaggagcaaggtaggtacaacgacamattgcaaagtagtttttgcagtgcaagactgggcttaaaagtaaaacataatgaaaatttggtatttgtacaagccacctttggtatttcagccagaaac

SEQ ID NO: 313559 - DNA, 201 bp, Homo sapiens
atccaagttttagtttccagacaaaaccaaacacttcactgccttccttcccttcctaaattttaactttttaagataaaagtaacttaaaattggttttkgtttttgtttttttttttttttttttttgatgtctacctattggagtcactgtttacacttcattttattcctgacaattcattgaattcatagccaaaa

SEQ ID NO: 313560 - DNA, 201 bp, Homo sapiens
aacctaggcaattagctttaaaatcctttctctttgctgggcgcagtggctcatgcctgtaatcccagcactttgggaggcagaggtgggtggatcaagasgtcaagagatcgagaccatcctggccaacatgtgaaaccccatctctactagaattacaaaaatgagctgggcgtgggggcatgcccctgtagtccctgc

SEQ ID NO: 313561 - DNA, 201 bp, Homo sapiens
gaatgtcgaactcatcatgttgtaagggtcatgaagagctttgaggcaagattatcataaatccttagcttctaagtctgtctttggtttgagtgtttatstttgcttcagtcaactgtagccatgttcttgtggacaaacacagtatataacaaagctcttaggaggagcaaggtaggtacaacgacacattgcaaagta

SEQ ID NO: 313562 - DNA, 201 bp, Homo sapiens
tttttgtttttttttttttttttttttgatgtctacctattggagtcactgtttacacttcattttattcctgacaattcattgaattcatagccaaaaayatactttcgggtcatctttattttctgaggcagtttgatgtttggattattgcagtgtagctcaagggagaaaaaagaagccacaggaacattaaacttc

SEQ ID NO: 313563 - DNA, 201 bp, Homo sapiens
agctcaagtttctgtgggggtcataagagtctcctgaagctaggagtctggaggtccatggcaagagtcggccactgcttacctatttaacttatctcttyccccaggaactgcagagggccaggagcaagccttggtgtttcactgccctgggcaaggtttccagcttcctcccgcttcagcccagggtctgcgtcttcc

SEQ ID NO: 313564 - DNA, 201 bp, Homo sapiens
ccaccaggattactgtaagatcatatacggtagcatatttggacactatatagaaattaattgtgatctcaagtgttttgtgttttaatataattctaaaytaattaatttactaagagttaaacatcatgtaaaagtcttgacacaataataagtcttaaaaatgttaggtaaaaatactccacaaaattagtgggttta

SEQ ID NO: 313565 - DNA, 201 bp, Homo sapiens
actagactgggaagctctggtacagtttgagacaggtatggtgacctcagatgcgacataaaaagtaaaaaacaagtgaaaatcatggacattacaatggrctactacaattataagtaataattatgaagaaaaggcttatttgccatctgtattctctgttcaagaagacagggtggtatatatttagtgtactataaa

SEQ ID NO: 313566 - DNA, 201 bp, Homo sapiens
agataaaatagttgttacacagttgtctccaaattcagatgctttattccaactttgagtcctgctaactcttactttacgtatacagttaatagactagrcttattgcttagtccattgcagattagaattaaaaactagactgggaagctctggtacagtttgagacaggtatggtgacctcagatgcgacataaaaag

SEQ ID NO: 313567 - DNA, 201 bp, Homo sapiens
gtcaggagtttgaggtcaggagtttgagaccagcctggtcaacatggtgaaaccctgtctctactataaatacaaaaattagctgggcatggtggtgggtrcctgtaatcccagctactcagaaggctaaggcaggagaatcgcttgaacccaggagacggaggttgcagtgagcacagattgcaccacagcactccagcc

SEQ ID NO: 313568 - DNA, 201 bp, Homo sapiens
tcttgagtattgagagttgagagccagcaaggacagaggttatttccatatttttactttcgcaaaccaagattggagtttattaaatggttcagtcttayatataaaacttctcataaatatatatgtgccaggtagatgtagaataggaatgacaagtagctagcacatagtaagttactgcatcctgtgcctcaggca

SEQ ID NO: 313569 - DNA, 201 bp, Homo sapiens
agaaacactgtgaataagagctaggggaatccccacagtatcttgagtattgagagttgagagccagcaaggacagaggttatttccatatttttactttygcaaaccaagattggagtttattaaatggttcagtcttacatataaaacttctcataaatatatatgtgccaggtagatgtagaataggaatgacaagta

SEQ ID NO: 313570 - DNA, 201 bp, Homo sapiens
gacaaaattgaaaacgtaacttcagagtatgcatctgtaactatagctaagtcttggccattccagaggccatacttcaaccattcatacactgatgagtrttaaaactgtgttcaaataaggcaaacaccgagctgtaaccaatccagccattctgtacctcacttccaatttctgtacgtcatttccctttttttttgt

SEQ ID NO: 313571 - DNA, 201 bp, Homo sapiens
cctgatatatttttaagtatttttaatatttactttctagttagaaaaacaatctatccacaatgcacaaattgcttaacatgaataaatgtgtatttttwaaaaaatactcatattaatattaaaattgctaaaatttgaataaggtccctagtttagcttacagtagtgtaccagtgttcattttctgatattaacaag

SEQ ID NO: 313572 - DNA, 201 bp, Homo sapiens
ctccaacgttttctactctaaaagtaaaataaactcctgagtccactgatattgcctaaaaacctaggtagtgcctgatatatttttaagtatttttaatrtttactttctagttagaaaaacaatctatccacaatgcacaaattgcttaacatgaataaatgtgtatttttaaaaaaatactcatattaatattaaaat

SEQ ID NO: 313573 - DNA, 201 bp, Homo sapiens
ctcagaatgcctgaggcaaatgttctctccaacgttttctactctaaaagtaaaataaactcctgagtccactgatattgcctaaaaacctaggtagtgcytgatatatttttaagtatttttaatatttactttctagttagaaaaacaatctatccacaatgcacaaattgcttaacatgaataaatgtgtatttttaa

SEQ ID NO: 313574 - DNA, 201 bp, Homo sapiens
aagacataataattaacgtaaatgctcaatccactctcagaatgcctgaggcaaatgttctctccaacgttttctactctaaaagtaaaataaactcctgwgtccactgatattgcctaaaaacctaggtagtgcctgatatatttttaagtatttttaatatttactttctagttagaaaaacaatctatccacaatgca

SEQ ID NO: 313575 - DNA, 201 bp, Homo sapiens
taaaacacaggtgacttgttcattcacaatgcttggatcataaaattcaattcttggattcgaaaagcccaataagaaatatgttggcatttaagaaactrgttaaaaacatattttgcagctatagctttaatgaaaataatgttttcccaaacaggtagaatgaatagcttgacacagaagacattggctggcaacttc

SEQ ID NO: 313576 - DNA, 201 bp, Homo sapiens
ctgcctggaaatggcttttagaaacccattaagctgactgatttcaaccactggtgatggatgagggtaggaacaaattccttcgtggtacacgagaacaytgcaagaagttacattttaacctgtctgaaataatgagtaagacataataattaacgtaaatgctcaatccactctcagaatgcctgaggcaaatgttct

SEQ ID NO: 313577 - DNA, 201 bp, Homo sapiens
gtatttaaaattccactactataattacaaaatattgaatgtagtacagtttaaaggaaaattcagaatttctgaaaatgcttctaaatatgcaagaccaygcagtcaggctgcatcttcaccatctaaagcacctattttatatagggaattgagaattattcacaaggcttgattatgtaaaaaggctctggggccacc

SEQ ID NO: 313578 - DNA, 201 bp, Homo sapiens
gaaacggtaatctgtgcaaaacagaatctgtcagatacatcagaccagcactgctgcttctgctattgttagttatagggcagaagttgcaaaagcgaaaygaggaatgagaggcaacataaactcaatgctcagattcatagactaatctcccgaataatttttcagctatctcagacacaatctctaaaaaaagaatga

SEQ ID NO: 313579 - DNA, 201 bp, Homo sapiens
ctagtatgtaaaatgtacactgttagggtgatggatacactaaaagcccagacttcaccactatacagttcatccacataaccaaaaaaatggctggaccsctaaaagctgttgaaataattttgttttaatgggcaaaatatgtgaagagatacgtcaccaaaaagaagatatacatatgtcaaataaacacataaaata

SEQ ID NO: 313580 - DNA, 201 bp, Homo sapiens
atgtaaacacttgatggcaaagatttttattaatagtagatcatcaattaacaggcatagtatatagtgaattaacatttttaaataaatattgaatgttrcataaatctatttctcttttagtcttatttttgtaattgttacttttttctgtgatattctgaatgggttgagcagtaccaaatgatattttttgttgtt

SEQ ID NO: 313581 - DNA, 201 bp, Homo sapiens
tgcaaaagcaatcatagataatatacaaaaaacttgcaaggctgtgttctaataaactatatgcacaccaataggcatgggccacatttggtctgtgagcygtagtttgtagcaacttgcattatacagctcctgtttctttcctgaacctagtctgtttagaatgtaaacacttgatggcaaagatttttattaatagta

SEQ ID NO: 313582 - DNA, 201 bp, Homo sapiens
ggcagtggttcccaaactttgctgatgttgaaatcatctagggatcttacactattcgaatcctgcttctacctccccagaaattctgatttagttggtaygggctgtgaactggaatgccaggtgttttaaagctcctcagattattctaatgtacagcaaaatttggttaccactgtcctagtaattgtttagacttct

SEQ ID NO: 313583 - DNA, 201 bp, Homo sapiens
gggaaggtacaaaaatgttttcattggaagaatttacatttattaagggcactgtggacattcacattctgtcagtatttgaaaggtatatattttgatcycttttttaaaataaagagactaaagataaagttaagtacctggagcaaggccacatggctattaaagttatcatctaaactaaagcaccccctcaaattc

SEQ ID NO: 313584 - DNA, 201 bp, Homo sapiens
aggggccccctgaggcagaaaatcttatatgtctcccctctctcgggaaaaaaaaaaaaagtctgattttatttgagataggaatgtacctagctaaatayttttcttatcatcccttccagctagagttggctatgtgacacatgactaataatatttaaataaaaggctgaaagaaattctgggaaaggctatgtttac

SEQ ID NO: 313585 - DNA, 201 bp, Homo sapiens; identical to SEQ ID NO: 65331

SEQ ID NO: 313586 - DNA, 201 bp, Homo sapiens
tgatcatttttacttacagtttcatgtcttaatctcgatgctttgttgttctggcaggggatgtatggcattgagaatgaagtcttcctgagccttccatrtatcctcaatgcccggggattaaccagcgttatcaaccagaagctaaaggatgatgaggttgctcagctcaagaaaagtgcagataccctgtgggacatc

SEQ ID NO: 313587 - DNA, 201 bp, Homo sapiens
ggttagaatcttattgtttactaacaaaatttcaactatatcttttatttttaggttgtgggagacagaaaggacgcatattaatatgttaaagacaattmcccctaggcagaggaatcggggtatggggaaagtaaggacttttgctttcttacaccttcccgtattttttcaattctttataaaagatcatgaattatt

SEQ ID NO: 313588 - DNA, 201 bp, Homo sapiens
ccctttagagattagttcttgctctgtcacccaggctggagagtagtaccgctgtcatagctcactgaagcttcaaactcctgggctcaaacagtcctcccacctcagcctcctgtctttgatcatttttacttacagtttcatgtcttaatctcgatgctttgttgttctggcaggggatgtatggcattgagaatgaag

SEQ ID NO: 313589 - DNA, 201 bp, Homo sapiens
ctggaaaatcacacaggaggtggagattgcagtgggcggaggctgcagtgagccgagattgcaccactacactccagcctcggcaacggagcgagacttcrtctcaaaaaaaaatatgactccagatcaagattaaatagtatattcattgctttagattgtattttgaatgggggacagagaatgacaattggaatagaa

SEQ ID NO: 313590 - DNA, 201 bp, Homo sapiens
gttgtttgtttaattcctatttccttcctgatatgttccatggcagcagagactttatcgtaactgtatacctgagtaggaggataatgccaggcacttayatgataaataaatgaatactcctgctattacttgtaagcttcactcatgttttgtcaaacttggtcatggcttctgatttttttacatcttctactacca

SEQ ID NO: 313591 - DNA, 201 bp, Homo sapiens
ccctgaatcctggcccacaggcaagcctgatgggacgtgcggggtagtacttgtatggggagacgcgggaaggaggaagaagcacatctgtcctccgcggyctttagctctgagcatccggccgcgggccctgactttgccgctcagtttggggcgcagcgggggccgtgccctggcggaggagcagaaggcagagggtag

SEQ ID NO: 313592 - DNA, 201 bp, Homo sapiens; identical to SEQ ID NO: 65340

SEQ ID NO: 313593 - DNA, 201 bp, Homo sapiens
gagaaacactgtgaataagagctaggggaatccccacagtatcttgagtattgagagttgagagccagcaaggacagaggttatttccatatttttacttycgcaaaccaagattggagtttattaaatggttcagtcttacatataaaacttctcataaatatatatgtgccaggtagatgtagaataggaatgacaagt

SEQ ID NO: 313594 - DNA, 201 bp, Homo sapiens
aatggggacgagttggaccagaatattccctcctttattcctttctcaaatgtagacaagaagctggtagaactgcaggcgccatcttaaagccataaggmaaatcacagagatcttggcagtgaatttgaactgctgaacccacagcagaccgcctaccctcagacatcttatcacagaaagaaaatataggcatacctt

SEQ ID NO: 313595 - DNA, 201 bp, Homo sapiens
cctggttcaacctgttttgtttttttcaactttaagttaattaatctgcaaggttcttaaatattcttgtttcacataataatgcaaatgtaaaagcacartattgcatttttcatgtcttgcaatcttcatataaggcttaaaagtttgtttttgtcactgtcattcctggtatctctaacaatgaaaagttaaagtatt

SEQ ID NO: 313596 - DNA, 201 bp, Homo sapiens
ttaactttcagctcttcaccttccttgtgtgcacattttttactttttacagcttagcctgcaagtgctgtgatcctgtctggatcagcaaaagttttatstctgtggttttaaggctatgccacgctggagcaaaggttctgacatagatgttcttttattaaatagaaatttttaatactacgtattatcacagttgtt

SEQ ID NO: 313597 - DNA, 201 bp, Homo sapiens
actcttttgctcgcatttcccttcacctggaatgttcttctctaggccacagggttgaccccttcttatcattcagatcttactgcaaatgcatgcctttkcaggcaggccttccctgccttccgatataaaataaacttccttcccagtagcttcaacatctccttgtcttatgcccttcagagcacttctaccttcaga

SEQ ID NO: 313598 - DNA, 201 bp, Homo sapiens
gtgtgggggtggaggctgcaggattaactttcagctcttcaccttccttgtgtgcacattttttactttttacagcttagcctgcaagtgctgtgatcctrtctggatcagcaaaagttttatctctgtggttttaaggctatgccacgctggagcaaaggttctgacatagatgttcttttattaaatagaaatttttaa

SEQ ID NO: 313599 - DNA, 201 bp, Homo sapiens
tggttaggcttttagagcatgtcatataggttatgttataatgaagagttgcatttaaagtacctgtttttgcttttctttttaaagattattctgtgacygccaattctaagattgtagtggtaactgcaggagtccgtcagcaagaaggggagagtcggctcaatctggtgcagagaaatgttaatgtcttcaaattca

SEQ ID NO: 313600 - DNA, 201 bp, Homo sapiens
agtttgatgtttggattattgcagtgtagctcaagggagaaaaaagaagccacaggaacattaaacttcaagcccttacaatacagaaaacttaattcacrtatatgttctagaagcttatgtatggttaggcttttagagcatgtcatataggttatgttataatgaagagttgcatttaaagtacctgtttttgctttt

SEQ ID NO: 313601 - DNA, 201 bp, Homo sapiens
aaagtattaccaatcatcaaaagccgcactgtaacccagtttaattatgtgaatcatccatagctgttgagtcaaatgatcacatcaaatcgcaatatctrtatatttcgaaaaaggacacacttccttaagaaaaaaatcaaatctccagggaaacttgcagcgctaaaaagcaaataagcttcctaaaaatattgagta

SEQ ID NO: 313602 - DNA, 201 bp, Homo sapiens
agttccaaatttacatgtcatatgtaggggtcaatttaggtagtgtttaaaacatgagttttggtgtcatataaacctggacttgagtgctggccttatcrttgattaactgtgatcttagtcaagttaactacttaatcactcctaattctcattttcctcacctataaaacagtgatgataacaacacctcttcaatat

SEQ ID NO: 313603 - DNA, 201 bp, Homo sapiens
tcaagtcttcccttatcagtaattactttaaatgtaaatgaattaaactctccaatcagaagacatagattggctgaatggattaaaaaaaaaaaaaacaygatccaactacatgctctctaaaagagattcactttttagatgtacaaatacacataggctgaaactgaaaggatggaaaaagatactgcatgcaaatag

SEQ ID NO: 313604 - DNA, 201 bp, Homo sapiens
ccttgggctacactggaagaagaaaaattgtcttggaccacacataaaatacactaacacaatagctaatgagctttaaaaaaaaaaatcacaaaaaacarcctcataatgttttcaaaaagattacgaatttgtcttgggccacatccaaacccatcctgggctacactcagcctgcaagctgcaggttggacaagcttg

SEQ ID NO: 313605 - DNA, 201 bp, Homo sapiens
gtttcatagagtgatgtcaacaaaatgacagactaggaatctttacgctctctttccctgacagagacactgagttaacaacaaggtttcgttggaaacakaagaatagaccgtgtatctacattctagcttgtttgggggctacacaaaagactagtttctgtctctcctaactccaggtgctgacaggaccagcggcat

SEQ ID NO: 313606 - DNA, 201 bp, Homo sapiens
tgcccactctctgcagcccattgcttatataataaccatagagagcttttgtaaaactagtggctccgctacttaaaactctccagtcattttacagtgcrcatatgctacacacatacataaaatcccatgaggcctcacaaatcctccctgcctgtttctcagagcagagcaatggagcacacaactgcaggggcacca

SEQ ID NO: 313607 - DNA, 201 bp, Homo sapiens
aactttttttggttggtaggctattaattattgctcaatttcagagcctgttattggtctatcagagattcagcttcttcctggtttagtcttgggagggygtatgtgtgtctaggaacttatccatttcttctagattttctagtttatttgcatagaggtgtttatagtactatctgatggtagtttgtatttctgtag

SEQ ID NO: 313608 - DNA, 201 bp, Homo sapiens
ttcatcctccaacaccctcatccccatcatccaaaatcacagctgagaactgctcagtgctacctaagttacttagttctcttttacttttggtgccccaraggtgatagaagtaacaacccccatacagtcagaggaaacccagatgattctacggatgctctgtgggtatgaagcaacttgacaaataggccaactgca

SEQ ID NO: 313609 - DNA, 201 bp, Homo sapiens
ttctctatcttccttcacttcgttcttcatgtggagcttcaaaagaattgaagttctcttctgcatcttgcaatggccacaaaaaacctgtctggggtgargggtcattcccactttcccaggggcactataccactgtttcttctctctgttgtcacaatcaattccagcaagccttataccttctccaaatgacaagct

SEQ ID NO: 313610 - DNA, 201 bp, Homo sapiens
ctccttgcagattctagggaacacaagtaaaggcttgtcaaaaagtggcccaccctctccatctgagaggacctgtaagttctgcaagttaggaaacatcyttcagagcatgtgatggcagtcttcatattttacagacacccctaagcttcatgaatgattctgttaaactggtctcatagagagtaggaggaaaaacca

SEQ ID NO: 313611 - DNA, 201 bp, Homo sapiens
cttcctgaagttttttgatctcctctgttgtgttcccaaattacatcttaaaagcatcatcctagtgctcctgaaagaagtcattatgggaaaatagcaargcctctccttttcctagtgtcacagaaaatgcaggaaatgttcaaagactgcaatgagttccccaaacacaaaatgtttctgcactcaacactttactag

SEQ ID NO: 313612 - DNA, 201 bp, Homo sapiens
gtaaaattaaatattgacgatcacaatccatttttctgagggaagttgttttactgctacacaaggaaaatggtcatttcacaaaccatggaagatgcacrtgtgctcaggctcccgaatatacatcatgctgggaaacccacatgaatccttgtatagttgtttccagtggaagattgccccaataccatcaaatcccac

SEQ ID NO: 313613 - DNA, 201 bp, Homo sapiens; identical to SEQ ID NO: 65332

SEQ ID NO: 313614 - DNA, 201 bp, Homo sapiens
tccttgtcatatttctgcttaggaagccccaatgagcatttggagagaagggtaaacacagctgcctggaaatggcttttagaaacccattaagctgactratttcaaccactggtgatggatgagggtaggaacaaattccttcgtggtacacgagaacactgcaagaagttacattttaacctgtctgaaataatgagt

SEQ ID NO: 313615 - DNA, 201 bp, Homo sapiens
ttaggggctacttttggttcacctgttttcaaattgttttttgtttgttatcactttttattttcttttttgccataggccaaaatcagagaaaacaaaargagacactaaacttttatatttatatacacaaggcttttatatttaaatacagatgagtgaagtgttccttgtcatatttctgcttaggaagccccaatg

SEQ ID NO: 313616 - DNA, 201 bp, Homo sapiens
cttgaaaatataattctggtaaagataatttaaaattatttaaataacatttatttatattttaaaaggatatttgagaaaaaaaagaatatttcatagaycactttacataataaagtaaaatatttttattatgtaaaggtctattgtaattattttattgtgcaaagatctattgtcatagaccactttacacaataa

SEQ ID NO: 313617 - DNA, 201 bp, Homo sapiens
ttctgggcttgccaatgtaaacaactagaaaactgaacaagacgggagaaacaggtttttagacattataaaataggcacaagaatgtgatccttgaaaamtaggaaagaagatgatcactataattgccttgactttcttcctgaagggattttttggaccacattggaggtataagtccaagcagaacactgcagtgtc

SEQ ID NO: 313618 - DNA, 201 bp, Homo sapiens
aaacccaccagaaggaagaaactctgaacacatccaaacatcagaaggaacaaactctggacacgccacctttaagaactgtaacactcaccgtgagggtycgcggcttcattcttaaagtcagtcagaccaagaacccaccaattccggacacagtatgagtaggtatagtgtgtcccaccgctcccaggggcccctttt

SEQ ID NO: 313619 - DNA, 201 bp, Homo sapiens
ccgcagcttcactcctgagccatcgagaccacaaacccaccagaaggaagaaactctgaacacatccaaacatcagaaggaacaaactctggacacgccasctttaagaactgtaacactcaccgtgagggttcgcggcttcattcttaaagtcagtcagaccaagaacccaccaattccggacacagtatgagtaggtat

SEQ ID NO: 313620 - DNA, 201 bp, Homo sapiens
acagggaagaagaccaaatacacacttcacaatatcacaaccattaaattatttcctataatatgtcttgaactctttcacacactgaagatacagagatracagatgagcctctagaagtttgcagtgtacaagtaaattagcagactatacctgctgatattgagaggtgacagcgcactggcagccctcacagccctc

SEQ ID NO: 313621 - DNA, 201 bp, Homo sapiens
agaaactcaaaaggccatatataaggaacatgaataaacatttttatttatttattatttttgttttttgagataaagtctcacttactctgtcacccagkctggagtacagtggctcaactcactacaacctccgcctccccaattcaagcgattctcctgtctcagcctcccaggtagctgggattacaggcacccgcc

SEQ ID NO: 313622 - DNA, 201 bp, Homo sapiens
ccagcactgcctattccagcattttgggaggccggggcgggtggatcaactgaggtcaggatttcgataccagccttggcaacatggcaaaaccccatctytactaaaaatacaaaaattagctgggtgtggtggcatgtacctgtaatcccagctactcaggaggctgaggctggaaaatcacacaggaggtggagattg

SEQ ID NO: 313623 - DNA, 201 bp, Homo sapiens
ttataccttttcctcccgcaaaattttatgcatactaaacacttggagagagagatatatatgtgtgtgtgtgtgtgtgtgtgtgtgtgtgtgtgtgtgtrtatttttttttttctcttgagagagagagtcttactgtcacccaggctggagcacagtggcagaatctttgctcactgcaacctctgcctctcggattca

SEQ ID NO: 313624 - DNA, 201 bp, Homo sapiens
ggttataccttttcctcccgcaaaattttatgcatactaaacacttggagagagagatatatatgtgtgtgtgtgtgtgtgtgtgtgtgtgtgtgtgtgtrtatatttttttttttctcttgagagagagagtcttactgtcacccaggctggagcacagtggcagaatctttgctcactgcaacctctgcctctcggatt

SEQ ID NO: 313625 - DNA, 201 bp, Homo sapiens
ttctaatgatttatatccacagcagtgaggagacataagggaccaagactcagagatttttaccgtttgtcgttcttgttccttacagcctgcactctgahgttggcacaggcctgtatatcatgcagaccattttcttctcatttcttaaaactccttttaaggaaaaattgaagaaaagcactttctccagaaatatct

SEQ ID NO: 313626 - DNA, 201 bp, Homo sapiens
gagacgcgggaaggaggaagaagcacatctgtcctccgcggcctttagctctgagcatccggccgcgggccctgactttgccgctcagtttggggcgcagsgggggccgtgccctggcggaggagcagaaggcagagggtagcagctgcggctcagcggagagacttgttgcatttgcagctaaaaccaggccctacttgt

SEQ ID NO: 313627 - DNA, 201 bp, Homo sapiens
aatacatggtaaagattagaaatcccactagcttaatagagaaaggaatataactgcatgttggtgtttgtatattacttcatttattcctttctgtaacmtgtcagaggatattgtcatctatatcatatggctgaaatcaacaaaaaccaaacacctaagatcacacagatagtaagtgccagatctggcctttttgag

SEQ ID NO: 313628 - DNA, 201 bp, Homo sapiens
cagctaacatgtaaacggaaaaaggtactctatgttacaactatctaatgaagggctagacaattagaatcgaattattttgctttttgagacattaaacyctcagttctccttttccccactagtattattttctctccctggaacctttttcttcttcttgttagagatacccaccaaggccagttgctgtccatttac

SEQ ID NO: 313629 - DNA, 201 bp, Homo sapiens
ttctttctacacagacacagtaacagtctgatctctctttcttttccccacagtacaaagtaatttcaatgccttgaagaaactaaataatagctattatktataaatttttaacattctgggtactgtgtgaaacattttgcacatattatttcatctgacttcatctttgcaacaaccttatgaaatgtagggactata

SEQ ID NO: 313630 - DNA, 201 bp, Homo sapiens
ttcagtaagtagtttaattgagactgtgcctggagttatataacactttggctcaactcaagggcttgagagaatagcccctgctgctaccacagttggamtcttcagattcagagactatgatttctgtttttcaatctagcgttcttttccctttatcttttgcaaaatggagtacattttcttagaaattatgtggag

SEQ ID NO: 313631 - DNA, 201 bp, Homo sapiens
tcttattccccttgtttggctccagttttagataggtttttcctttgggaagctttgatgtatttaaggagaggaagagatgagaggatagaaaaccccgwggctgttttcagaagtaaagtgaatagttgctaagtagagaaacaaaacaagaagaatgctcactttggtagaggagcagataatggaaagtttaaaaaa

SEQ ID NO: 313632 - DNA, 201 bp, Homo sapiens
ctttaaagatttcttatctttttataaacctttgtctgtattctaaaacctctggcagggcctgcacagctctcaatttagatataacctgcatttcctcrtggctcatcattctcctctcctccctcagtctgttataaaattagtcttcccatcctggtgaatctggtgttggcagtttcttttcatctgggtccagtt

SEQ ID NO: 313633 - DNA, 201 bp, Homo sapiens
tgtgccatgttcaaagataaaatactttattttaaacaaccttaggagataggaactgttcatatacttgctgttggatgagatgtctgatgcttaaagakcctgtccacagtctcacatgtggcagtggtggagctgtattttgaacccagggctctgaactcttcaccatagtgacttttcaattttctttttattcaa

SEQ ID NO: 313634 - DNA, 201 bp, Homo sapiens
tcactaggggccatcttagactccaatctgtaacagtctcctttgggtaagcctggaccactcccatcctcctaccttattctctatcttccttcacttcrttcttcatgtggagcttcaaaagaattgaagttctcttctgcatcttgcaatggccacaaaaaacctgtctggggtgaggggtcattcccactttcccag

SEQ ID NO: 313635 - DNA, 201 bp, Homo sapiens
ataaaaagctcttatttctctactgtattctactttttatttctcaaatattttatattcacttattaatggacagctacctaaaatgagtttgctagccrtaagtgatcactgatatgtcactaacaggaaataacaaattggatttatcgcattgtttggcttattttaccacgtttcttctataggccaattttcttt

SEQ ID NO: 313636 - DNA, 201 bp, Homo sapiens
tgacatgactttaggcagtgcaaaagttaaactaaaactcttcaggaaataaaaatattaggcacataagacattccctggtttaaacacataacacacamacccaccacacacacacagccagagttcttgaattcagttaggaagatgacgcatctaaagtcatcattagctacctcacacaagctctgacaactccaa

SEQ ID NO: 313637 - DNA, 201 bp, Homo sapiens
aatgaaattttcatagaagtgaaactacgatcatattttttcttcaaaaaactccaaggtgttctctttccttcttaaattcagattcctcactttgacaytcactaatctcccttctgaatccatcagtctccctcctcctgtcatttatttcctttatacaggctaaatcttacccctcttgctgttctctagaaagac

SEQ ID NO: 313638 - DNA, 201 bp, Homo sapiens
gtcaagtacagtcctgattgcatcataattgtggtttccaacccaggtattattgtatactttaagtctctgttctgttaagttcagtgttttggtgtttytgttgttattgttttggactaaaatcagtcccagtattcatttacagaagcagtttacatgtcttctttcattggccctaaatagtggtgtttgcaaaac

SEQ ID NO: 313639 - DNA, 201 bp, Homo sapiens
agcaggtggcagtatttaagaacattactggtagtcacaactttggcagctattgctgcaaagagagattgggtgtcaaaagtctttttttttttttttttgagacggagtctcgctctgtggcccaggcgggagtgcagtggcgcaatctcagctcactgcaagctccgcctcccgggttcacgccattctcctgcctca

SEQ ID NO: 313640 - DNA, 201 bp, Homo sapiens
tcccttccaaaccactgcaatagactgagtattgcaatacagccagttacacattttttggattcctagtacctataaaagttacatttacagtatactgyagtctactaagtgtgcaatagcattacgtctaaataaatagtgtatataccttaattttaaatactttattgctaatgatcatctaagcttacagcaagt

SEQ ID NO: 313641 - DNA, 201 bp, Homo sapiens
taaattaaaaggtctatcagaacaacgaatctgtatttatatagccactgtttcttcattttcattttccactgcttcctgggccccctgtataccaaaayggtcgtaaacagaccatctaacaacaataaacttaagtgcagaacaactattcatgtgtgtcgtccttcaaaaagagatgcagcattctttcttctgagc

SEQ ID NO: 313642 - DNA, 201 bp, Homo sapiens
tgatcttattgaatccatgttgaaaaatctatccaggattcatcccgtgtcaacaatggtaaaggtaagacaaactaccacaaaatgtaatatgatttctmgcattgtattctacaaaaagattcatttaaagaggctcagaccagataaaatcatagttcaaggttatttctgtctctcaaagttttatgtaaactattc

SEQ ID NO: 313643 - DNA, 201 bp, Homo sapiens
tgctatttcctcctaagtcacctacagtgacttcctccactgaagtcttgaacctctcgaagtcatccattagggttggaatcaacttcttccaaactcayattaatgttgatattttcacttgttcccatgaagcatgaatgttcttaatgacatctacaattgtgaatatttttcagaagatttttcattaactttgcc

SEQ ID NO: 313644 - DNA, 201 bp, Homo sapiens; identical to SEQ ID NO: 65337

SEQ ID NO: 313645 - DNA, 201 bp, Homo sapiens
aaactatggctcacccagatagtgtaactggtccgaggtcttctaatgattgggtgtcaattgcattaaatcctaattttccaatactcagctagagttaytcctgctgcttctcaagtaccagggcctttatgggttttaagagctacaatttgtgctgaaaaaactgtcaggcaagatactcttatcccttttattagt

SEQ ID NO: 313646 - DNA, 201 bp, Homo sapiens
ttccttcccttccctgggacagatctcagcgacgaaaactctaagtctctaatttattgaatgttcactctatgctaggccctgaaggaagggtgccacayacagtgcctcttttaaaatcaccaataacctgggaaagaaggtaatcttattatccctgttttatgaaaattaaagctcagatatgtcaaataatttgtt

SEQ ID NO: 313647 - DNA, 201 bp, Homo sapiens
tttgcttatttttcaatatgttggcatatagtttcccaatgatttttttcaaaatagaatggtatggggcatatattttctggatcattgtatatataaamttgtgttttacacataaaagataacttgccagggtatacaattctcaactatttgagaggggtagtatgctctcctggcatttagagttacatactagag

SEQ ID NO: 313648 - DNA, 201 bp, Homo sapiens
gccacaaaaaacctgtctggggtgaggggtcattcccactttcccaggggcactataccactgtttcttctctctgttgtcacaatcaattccagcaagcyttataccttctccaaatgacaagctgacgctagagtttatattcatgtactccttgcagattctagggaacacaagtaaaggcttgtcaaaaagtggccc

SEQ ID NO: 313649 - DNA, 201 bp, Homo sapiens
cctactgtaaacattctgctggagagcatgctcaacatagcaaaaaacaaattctgtgtattttctaggagtcaccccctcatctgtaatcttttgatggygagaaccagtgttgaattatagttgctttttcttatcccctaaattatccctggccttcttaataaatcagtctccaaatatcacagatttcctctagca

SEQ ID NO: 313650 - DNA, 201 bp, Homo sapiens
cattccttccttgctcatcattctaacagggctttagtacacacacatatatgatgtaagaacaatacatatatgttcttacatccctttcctgtgcaatatgatccattcctctcaagaaagtatgaatgacatttcctttagcaactccagagaaccctcattagctaatgaagtggtctcttggttaacagtgtggat

SEQ ID NO: 313651 - DNA, 201 bp, Homo sapiens
ggagaataaaattaagataattaaagtgagaggatctgacagtatagtatcacttaattagccagaagttggattgtaccttctgcctctggctttacaaygcttcttttgccccgttacactgtaatccctattcattaaatactattagacatttgtctcaaggtcaacatcatgagtacacttttgactacaccacca

SEQ ID NO: 313652 - DNA, 201 bp, Homo sapiens
agtacctgtttttgcttttctttttaaagattattctgtgaccgccaattctaagattgtagtggtaactgcaggagtccgtcagcaagaaggggagagtyggctcaatctggtgcagagaaatgttaatgtcttcaaattcattattcctcagatcgtcaagtacagtcctgattgcatcataattgtggtttccaaccc

SEQ ID NO: 313653 - DNA, 201 bp, Homo sapiens
cccccatgacccaaacacctcttattaggcccagcatcaccaaattggaccacatttcaacatgagttattgttgggacaaagcatactcaagccatgcartaatcaaatctatgttcaatgttttaaaataaagtaaaattaaatattgacgatcacaatccatttttctgagggaagttgttttactgctacacaagga

SEQ ID NO: 313654 - DNA, 201 bp, Homo sapiens
agtgcaaaagcaatcatagataatatacaaaaaacttgcaaggctgtgttctaataaactatatgcacaccaataggcatgggccacatttggtctgtgarctgtagtttgtagcaacttgcattatacagctcctgtttctttcctgaacctagtctgtttagaatgtaaacacttgatggcaaagatttttattaatag

SEQ ID NO: 313655 - DNA, 201 bp, Homo sapiens
ctaacattttaaggatgatttctatttggatttcatatgcagatatatgtgtaatgttttgattctttccttgcagtgcaaaatggcaactcttaaggaaraactcattgcaccagttgcggaagaagaggcaacagttccaaacaataagatcactgtagtgggtgttggacaagttggtatggcgtgtgctatcagcat

SEQ ID NO: 313656 - DNA, 201 bp, Homo sapiens
tggtgattcttcactctgagttgatgacctagattattattctgctgaaaactacgaatcagttgggagagaacattcatatgggtctaccccaaacctaytatgccatcttcatctgagcttacatactccattttccctcatgctctgtggataaatcctctgtgttcttatttaacaccacttcttccactgcacact

SEQ ID NO: 313657 - DNA, 201 bp, Homo sapiens
aaagggaagccagggcaccccaagctgcctaacagttgaagttggttttggtttacttacatatattatttccaaaatttttagtggacattcttacgtakgttacctggaaactaagtggattacccaaacaccgcgtgattggaagtggatgtaatctggattctgctagatttcgctaccttatggctgaaaaacttg

SEQ ID NO: 313658 - DNA, 201 bp, Homo sapiens
cctaggaaccaccaatatttaggacagatgcaagaagagctaataaccaaacccaggaagtctaagttagggtcaccctaacggcagatttaatagcagtwgattttcaaaatcaaaggaagagaaaattttacactctactctttaaattacactgatatgcactaaaaaggccagtattgtgaatactgaaaagagaaa

SEQ ID NO: 313659 - DNA, 201 bp, Homo sapiens
tgctaccattatctgaaaacagagtatgtgtttgtgtctagatatatttttaaaaaatcaatggaatgctaaattacaaagttttttttttttttttttttgagacagagccttgctctgtcaccaagctggagtgcagtggcgcgatctcggctcactgcaacttccgcctcccaagttcaggcaattctcctgcctcag

SEQ ID NO: 313660 - DNA, 201 bp, Homo sapiens
tattgtgctgtggttcaagagtgtggttgatatgtttttggtttctttgaatttgtcaagaattgttttatggctaagcatatacttaattttagagcatrtgccatgtgcagatgagaagaatgtatattcagttgttgctgggtggaatgttctataaatgcccattaggcccatctggtaaagtatcgtgtttaggtc

SEQ ID NO: 313661 - DNA, 201 bp, Homo sapiens
ttttgtcaattttgttgaagatcagatagttgtacatgtgtggttttacttctgggttctctaacctgttcccttagtcgatgtgtctgtttttgtaccarcactatgctgttttggctacaatagccttgtagtatagtttgaaattgggtattaaagtgcctctagctttgcttttttgcttagggttgccatggctat

SEQ ID NO: 313662 - DNA, 201 bp, Homo sapiens
ataacagaattttccaaaaattttgaaagacatcaaacaaagatacaagaagtgaaaggaggcagtaattatttgccacttttcaattaattctaatatcyttagcttgttaaggcactccattctgtgaagaccttccactccaaacccaacctaaatctgcagttgaccacctgggtggacttcaatggagaataatct

SEQ ID NO: 313663 - DNA, 201 bp, Homo sapiens
gactaggaaaatgtctgactcctcatcaatttttctctgctaaatttagcatctattaatgatttgtggttgaataaattaccatgatagttgtcaaacaygatctactaattccatcatttattctgtattagttgcattccactgtaagacagaaatttttcatcttccctctttatttatttgttgatatcaatgtgg

SEQ ID NO: 313664 - DNA, 201 bp, Homo sapiens
ttatccttcgttccgaggaatgataaaaatgttcccaaattaccctttaaaaaggcagtgattttacaaaatatatatatatacacacacacacacacacattaattcctcactttatatcttaaataggttctttgaacctattgcttgttaaacaaaagtttaaacaaaacgacatataacaaaaccaattttaccacc

SEQ ID NO: 313665 - DNA, 201 bp, Homo sapiens
agctttctttagttctcgaagacttgaggaaagaagcccttttcttatttatttcactgaatggattccttatttcttctgatggctgccttgaatgtagraacaacaacaaaaatgctgccttgccttcaggagaacacactgtccctttgtatcatatgtaaaggctgcctgaataacccctaaccaagccatgtcttt

SEQ ID NO: 313666 - DNA, 201 bp, Homo sapiens
tttatccttcgttccgaggaatgataaaaatgttcccaaattaccctttaaaaaggcagtgattttacaaaatatatatatatacacacacacacacacacattaattcctcactttatatcttaaataggttctttgaacctattgcttgttaaacaaaagtttaaacaaaacgacatataacaaaaccaattttaccac

SEQ ID NO: 313667 - DNA, 201 bp, Homo sapiens
agatatttataatgtagtttagcaaattcagattattgcaaaattgttatataattataaaatgtttccctctttttcctcattttataaaaagctcttayttctctactgtattctactttttatttctcaaatattttatattcacttattaatggacagctacctaaaatgagtttgctagccataagtgatcactga

SEQ ID NO: 313668 - DNA, 201 bp, Homo sapiens
cacagttaagctttctttagttctcgaagacttgaggaaagaagcccttttcttatttatttcactgaatggattccttatttcttctgatggctgccttraatgtaggaacaacaacaaaaatgctgccttgccttcaggagaacacactgtccctttgtatcatatgtaaaggctgcctgaataacccctaaccaagcc

SEQ ID NO: 313669 - DNA, 201 bp, Homo sapiens
gtttatccttcgttccgaggaatgataaaaatgttcccaaattaccctttaaaaaggcagtgattttacaaaatatatatatatacacacacacacacacacattaattcctcactttatatcttaaataggttctttgaacctattgcttgttaaacaaaagtttaaacaaaacgacatataacaaaaccaattttacca

SEQ ID NO: 313670 - DNA, 201 bp, Homo sapiens
ctcattgagtatctaactccatggtaaaattctcaagatgtttagatctttggtgcttagccatgttaaagatctttctttgggttagattgtgagctgasgcatcctagagtggcttagggttctaatgcctgtttttgcgtttacagtctctggctgatgaacttgctcttgtggatgttttggaagataagcttaaag

SEQ ID NO: 313671 - DNA, 201 bp, Homo sapiens
tgtttatccttcgttccgaggaatgataaaaatgttcccaaattaccctttaaaaaggcagtgattttacaaaatatatatatatacacacacacacacacacattaattcctcactttatatcttaaataggttctttgaacctattgcttgttaaacaaaagtttaaacaaaacgacatataacaaaaccaattttacc

SEQ ID NO: 313672 - DNA, 201 bp, Homo sapiens
agccgagattgcaccactacactccagcctcggcaacggagcgagacttcatctcaaaaaaaaatatgactccagatcaagattaaatagtatattcattrctttagattgtattttgaatgggggacagagaatgacaattggaatagaaaacaaaagaaatctgagactgggcaagtctcaggcacagatttggagtga

SEQ ID NO: 313673 - DNA, 201 bp, Homo sapiens
gaaaataaagtgggaatttttggccatcacttttaatttagagctactggttcatttctagaataacattaaacaagagaacgattaaaaaaaaaaaaaaagagagagaaatgaatgaataggttatcactgccatctggtggtgaaaatgcaagaaaacaggatatacattctgatagctcaaaatagaattagtttggg

SEQ ID NO: 313674 - DNA, 201 bp, Homo sapiens
accttaaaaaagttgaaagagtctttataatttcaattaacatatacctttatattacaagtgagaaaactatggctcacccagatagtgtaactggtccraggtcttctaatgattgggtgtcaattgcattaaatcctaattttccaatactcagctagagttactcctgctgcttctcaagtaccagggcctttatgg

SEQ ID NO: 313675 - DNA, 201 bp, Homo sapiens
tagtaattttttttttcaggaatttgaactatatgtggagaaaaggaaccttaaaaaagttgaaagagtctttataatttcaattaacatatacctttatwttacaagtgagaaaactatggctcacccagatagtgtaactggtccgaggtcttctaatgattgggtgtcaattgcattaaatcctaattttccaatact

SEQ ID NO: 313676 - DNA, 201 bp, Homo sapiens
tttatttagaaaagtaaacttagaaactattggtttcataattgccccaaataaataaacttgcttgctgattgctaacagtgtttaagttttaataacargactaactgatgtctcaaatatagaatcattttgttcaattttagtaattttttttttcaggaatttgaactatatgtggagaaaaggaaccttaaaaaa

SEQ ID NO: 313677 - DNA, 201 bp, Homo sapiens
cctgaagttttactttgtggttgttgggtgtttggcaggttttgctatcagaatgataccagcctcatagaatgagttagagaggagtttgtcatcctcartttttaaaaacagtttcagtaggattggtaccagctcttctttatacacctggtagaatacagctgtgagtccatctacttcaggactttttcttagtag

SEQ ID NO: 313678 - DNA, 201 bp, Homo sapiens
tttcagttttggagccccccctctctgtctctgcacgggggagcttcttcctcctgccttctcccttgttttttgtctactaaactctctactccttaaamccaaaataaataaataaataaataaaaattcaaagcagaaaaataaaaaccaggagaaaatataaacaaacattttcaaagctttatatggaaaagttaa

SEQ ID NO: 313679 - DNA, 201 bp, Homo sapiens
aaaatttttagtggacattcttacgtatgttacctggaaactaagtggattacccaaacaccgcgtgattggaagtggatgtaatctggattctgctagakttcgctaccttatggctgaaaaacttggcattcatcccagcagctgccatggatggattttgggggaacatggcgactcaagtggtaaagaaaaaaaaaa

SEQ ID NO: 313680 - DNA, 201 bp, Homo sapiens
tttttagtggacattcttacgtatgttacctggaaactaagtggattacccaaacaccgcgtgattggaagtggatgtaatctggattctgctagatttcvctaccttatggctgaaaaacttggcattcatcccagcagctgccatggatggattttgggggaacatggcgactcaagtggtaaagaaaaaaaaaagaaa

SEQ ID NO: 313681 - DNA, 201 bp, Homo sapiens
gcctcgcttgaggagcccttcagcccaccactgcactgtgggagcccctttctggcctggccaaggctggagccggctccctcaccttgcagggaggtgtkgagcgagaggcgcgagcagaactggggctgcgcagagtgcttgcgggccaacgcgagttccgggtgggcatggattgggctggcctgcactccgagcggc

SEQ ID NO: 313682 - DNA, 201 bp, Homo sapiens
taagttatttacatctgaaaaggattggttagaatcttattgtttactaacaaaatttcaactatatcttttatttttaggttgtgggagacagaaaggaygcatattaatatgttaaagacaattacccctaggcagaggaatcggggtatggggaaagtaaggacttttgctttcttacaccttcccgtattttttcaa

SEQ ID NO: 313683 - DNA, 201 bp, Homo sapiens
gggatgaggagaaaggcacctagatgaccagcacgtttggcgctgcacttatttttacccggctctgacggtctttccaggagccatgcgccagttctttsctgcagggcctcttttctggatgcttaggggcttcgtttactttaccagccttgggtgctccgagtaaggaagtcctagacttgtccccacagaccttac

SEQ ID NO: 313684 - DNA, 201 bp, Homo sapiens
aatttttcctgtgggtataatatccttgatttattactcacactttttgtctgttaggtttacgttttaaaccattttttttcagcaacaaaaacacttgyagacctttaaaaatatacttttaagtctgtattttttaaaaagcccttccaatggttccaattaggagccagggtgaagcccagtgtgtatcctagtggc

SEQ ID NO: 313685 - DNA, 201 bp, Homo sapiens
gcagctgactttgtcttctccgcacgactgttacagaggtctccagagccttctctctcctggtaggtttcggctcaggaccctgaatcctggcccacagrcaagcctgatgggacgtgcggggtagtacttgtatggggagacgcgggaaggaggaagaagcacatctgtcctccgcggcctttagctctgagcatccgg

SEQ ID NO: 313686 - DNA, 201 bp, Homo sapiens
tagttgaaatggactattgccatgtcagtcaggctgttcttgaactcctgacctcaggtgatccacccgcctcgcctcccaaagtgctgggattacaggcstgagccaccgtgcccagcctccatttgctttttgcaagcataataaaatttttcctgtgggtataatatccttgatttattactcacactttttgtctgt

SEQ ID NO: 313687 - DNA, 201 bp, Homo sapiens
acagaccactgggctctctgtaaaatggaccaatcagcaggatgtgggtggggccagataagagaataaaagcaggctgcccaagccagcagtggcaatcygctctggtccccttccacactgtggaagctttgttctttcgctctttgcaataaatcttgctgctgctcggtctttgggtccacattgccttcatgagct

SEQ ID NO: 313688 - DNA, 201 bp, Homo sapiens
actatacttctgatagaggactaatatccagaatctacaggaaactcaaacaaatcagcaagaaaaaaataataataatcttttttttgagagagagtcamgctctgtcgccctggttggagtgcagtggcacgatctgggctcactgcaagctccacctcccaggttcacgccattctcctgcctcagcctcccgagtag

SEQ ID NO: 313689 - DNA, 201 bp, Homo sapiens
tttcccatgacctaaagagactctgcaaagtgaccacagatggtttataccagaaaagctggaaaaattatatgaagtcctgtgaaaaaccttagtttggraaaaaaaataagaggaagcaaataaataggaggtcaccagcaagctccaaattaaaggaggtctctctgaatcaccctttctgagattttagcatatgga

SEQ ID NO: 313690 - DNA, 201 bp, Homo sapiens
atcttgttgaatcagaaaagaaggaatgccaagatcatgccaaaggactcactggccaacctgaagagattcccactgccctgaaattagacaattagagyatcaatagaacaataaatacaatcacatcacatgtattaaacctatggtttataataatattcaaacaaacaagcaaactcattggccaactttggagga

SEQ ID NO: 313691 - DNA, 201 bp, Homo sapiens
cacaaatccacatacacatttttgtagaaaaaaaaacagaaaataggcaaatacattgtttgcaatcttttgatcattcagatttgccttattgtcttggkatttcttagaataactgcaaggggtatgtattgttatttttagaaattattatttaaaataacatgtgcatgcagtaaccatgcatatgtctgatcttca

SEQ ID NO: 313692 - DNA, 201 bp, Homo sapiens
tctctataaatctattaattacgtaggatatattatggagtaaaaacaaagtaatgaaaaacttgtacactatgctaccattatctgaaaacagagtatgygtttgtgtctagatatatttttaaaaaatcaatggaatgctaaattacaaagttttttttttttttttttttgagacagagccttgctctgtcaccaagc

SEQ ID NO: 313693 - DNA, 201 bp, Homo sapiens
ctggcactagggaaccagttttgtgggagacaatttttccacagatgtgtgaggggatagttttgggatgaaattgttccagttcagatcatcaggcattrgctagattctctagattcagtactggctcgtgacctgggtgttggggacccctgttttagagtacgtttcctaagaataggacatattctgagatcatca

SEQ ID NO: 313694 - DNA, 201 bp, Homo sapiens
tagaaatacatagatgtccatgacgtatttgtctatatctatctatagatggctggaaccatttgagaataaattgcagatattatgccctttacttacaygtcctttagagcagcagtccccaacctttctggcactagggaaccagttttgtgggagacaatttttccacagatgtgtgaggggatagttttgggatga

SEQ ID NO: 313695 - DNA, 201 bp, Homo sapiens
gatatcaatgtggcctcggatttttatctcatgcccaaaatattgtgtcactatcatttgtaatgctcaagttgtcccaggcttttcaaactgactcttaygtctttttttttttaacatgtcccatcatttttgagcactgtcttgcacaataaattgcaccagcctcattttgaactttccccttcccagcactagaat

SEQ ID NO: 313696 - DNA, 201 bp, Homo sapiens
ctgtagtgggtgttggacaagttggtatggcgtgtgctatcagcattctgggaaaggtacatttcaagaacaccatagatgatagagaagttcagcatgtrtacacagtttctttgggcaccttggaattttattatatctttaaaagatttctttttttcctgagcaatttgaagttgtagatgtaatcccacttcactt

SEQ ID NO: 313697 - DNA, 201 bp, Homo sapiens
ggctggaaaatcacacaggaggtggagattgcagtgggcggaggctgcagtgagccgagattgcaccactacactccagcctcggcaacggagcgagactycatctcaaaaaaaaatatgactccagatcaagattaaatagtatattcattgctttagattgtattttgaatgggggacagagaatgacaattggaatag

SEQ ID NO: 313698 - DNA, 201 bp, Homo sapiens
ccgtgcccagcctccatttgctttttgcaagcataataaaatttttcctgtgggtataatatccttgatttattactcacactttttgtctgttaggtttmcgttttaaaccattttttttcagcaacaaaaacacttgtagacctttaaaaatatacttttaagtctgtattttttaaaaagcccttccaatggttccaa

SEQ ID NO: 313699 - DNA, 201 bp, Homo sapiens
tgttgttgtttgtttgtttttttgagatggagtctcactctgttgtccaggcgagagtgcattgacacaatcttggctcactttaacctccgcctcctggrttcaaacgattctcctgtctcagcctcccaagtaactgggactacaggcatgcaccaccatgcctggctaatttttgtatttttagttgaaatggactat

SEQ ID NO: 313700 - DNA, 201 bp, Homo sapiens
ggacattcttacgtatgttacctggaaactaagtggattacccaaacaccgcgtgattggaagtggatgtaatctggattctgctagatttcgctaccttwtggctgaaaaacttggcattcatcccagcagctgccatggatggattttgggggaacatggcgactcaagtggtaaagaaaaaaaaaagaaaaaattact

SEQ ID NO: 313701 - DNA, 201 bp, Homo sapiens
gggagaaagatacacagatatttgccaaaacatttttaataataaagtcaaaactgaaacaacttaaatatctaacaataggggaatagttaaataaattmcggttagtaagattatgcacttggataatattcataatcggttactttaaaaaaaaaatccagtaacaaaactgtatattgaataatccaagtttgatat

SEQ ID NO: 313702 - DNA, 201 bp, Homo sapiens
ggaactgtgactctagcatgctgacttgtcgtagaaaataaagtgggaatttttggccatcacttttaatttagagctactggttcatttctagaataacmttaaacaagagaacgattaaaaaaaaaaaaaaagagagagaaatgaatgaataggttatcactgccatctggtggtgaaaatgcaagaaaacaggatata

SEQ ID NO: 313703 - DNA, 201 bp, Homo sapiens
gtttctctccaggaattgaatccagaaatgggaactgacaatgatagtgaaaattggaaggaagtgcataagatggtggttgaaaggtaagtgaaagggarcttgattttagatgattaatttcaactctacttaaataaaattataaacattttccatggctgtctgctcagataaactcttaatgtagtaattatgcag

SEQ ID NO: 313704 - DNA, 201 bp, Homo sapiens
gttttattttaaattaatatttttctcatttaaattaattattctttgaacaattttatgtaaaactgtttttgaacaattttgattctgtttcatagatstaaatctgtttattaaaccacaatatattgaataagctcatggcaaaaaaataataataaaataatccaatattgaaactaataatttaaaatattttat

SEQ ID NO: 313705 - DNA, 201 bp, Homo sapiens
tactggaatctactggagagtcacttattggagcagttccagttggtattcagtaatttgcatcataggtgaaattgcactaaaagaagaaaatatttttwaaaataatgtaagaaataactgcaatgtcttttttttttttttaaacagtggctgtgtggagtggtgtgaatgtggcaggtgtttctctccaggaattga

SEQ ID NO: 313706 - DNA, 201 bp, Homo sapiens
tttctctgtaactatgacacagcaattctgctttgcactaaaattcttgaaagttaaaaggtcagacatgttgctatttgaaggcaaacgtcagccttttkggggaactatactggaatctactggagagtcacttattggagcagttccagttggtattcagtaatttgcatcataggtgaaattgcactaaaagaagaa

SEQ ID NO: 313707 - DNA, 201 bp, Homo sapiens
gttgaattttttgggtgggattggaactaggtgatgtcatgtccttctttgtgcagaccatcaggagacacatgatgttcaacttgtctcattactgctgracttaatcccctggttcaagtggtcacagcaagccttctccactgcaaagatccctttccctcctttaattaataagtaatctgtgccatgcatggcttt

SEQ ID NO: 313708 - DNA, 201 bp, Homo sapiens
ctgtgtctgtctgtaaaatgctctgttaaaggcaggattcctgcaaataacttcacacatgcaaatgacttcagagaaggcacaaatatacatctaaaacrcattccatttggggtttttttgtttttgttgttgttgttgtttgtttgtttttttgagatggagtctcactctgttgtccaggcgagagtgcattgacac

SEQ ID NO: 313709 - DNA, 201 bp, Homo sapiens
cttgaacccaggaggtggaggttgcagtgagccgaaactgcgccactgcactccagcctggcaacagagcgacaccgtctcaaaaaaaaaaaaaaaaaaargaaaagaaatattgtgagaattgccaaaatgtggcccagagacaaagagagaacctgctttcaggaaaatggcaccaattgacttgcttgatgcagggtg

SEQ ID NO: 313710 - DNA, 201 bp, Homo sapiens
tgctataaacagatgggctgtcattcaggttttgttctttttatagagcacaagctgagtccatttagcataaatctttttttttttttttttttttttttgagatggagtctcactctgtcccccaggctggagtgcagtggcacaatctcggctcactgcaacctccgcctcccaggttcaagcaattctcgtgcatca

SEQ ID NO: 313711 - DNA, 201 bp, Homo sapiens
ttacagtatactgtagtctactaagtgtgcaatagcattacgtctaaataaatagtgtatataccttaattttaaatactttattgctaatgatcatctamgcttacagcaagtcataatctttttgcttgttgagggtcttaccttgatgttgacagctgctgactgatcaaggtggtggttgctgaaggttggggtggc

SEQ ID NO: 313712 - DNA, 201 bp, Homo sapiens
ctagaatatcattaggctcattttaagttgtacttcagttcgaaattgcaacactaacattttaaggatgatttctatttggatttcatatgcagatataygtgtaatgttttgattctttccttgcagtgcaaaatggcaactcttaaggaaaaactcattgcaccagttgcggaagaagaggcaacagttccaaacaat

SEQ ID NO: 313713 - DNA, 201 bp, Homo sapiens
tccctcctttattcctttctcaaatgtagacaagaagctggtagaactgcaggcgccatcttaaagccataaggcaaatcacagagatcttggcagtgaayttgaactgctgaacccacagcagaccgcctaccctcagacatcttatcacagaaagaaaatataggcataccttggagttatcacacgttcccttccaaa

SEQ ID NO: 313714 - DNA, 201 bp, Homo sapiens
tctgcatgtatgagtttatcatgctagaaaaatataacaaaaaccagagctaacagaaacagaattatttacagtaaaaccccaaggaaaggaaagtatttgctttacgtttttggagaaataaaaggttaagaattaggggagaaatctccaagagacacaattgtttcatttaagaacaattctatataaagttcatag

SEQ ID NO: 313715 - DNA, 201 bp, Homo sapiens
accattagtagtagaaattatgttcataattggccatttattctttttatccaagcttaagtatgagtcaatactagacccaaacttagtttacatagttmcatatacattcttaatagaggaaacaaacaaattagctaatttaaacaaatgttcacaggtttttagccagaaatattaacaacctactaaatactcaca

SEQ ID NO: 313716 - DNA, 201 bp, Homo sapiens
aaaatctctatttggtaaaatctaattggtatgaaaatgactctttaaaccttccaaagtaattagagcattttcaaaaatgttttcttataaaatatggytcccaaaatagttcatactggttattttgagaaggtgcgattttttaaaaatctacatataaaactcagaattcattctgccattattgatgaaaacatg

SEQ ID NO: 313717 - DNA, 201 bp, Homo sapiens
tttttaccgtttgtcgttcttgttccttacagcctgcactctgatgttggcacaggcctgtatatcatgcagaccattttcttctcatttcttaaaactcyttttaaggaaaaattgaagaaaagcactttctccagaaatatctgaaagaaaatctggttcgagcctttaaattgtacttcctgaagttttctaaattaa

SEQ ID NO: 313718 - DNA, 201 bp, Homo sapiens
tataggtgtttttatagaaaaatgcatttcaaattctaacaaccaatctattaaaacatttttgaaaataagcctgtgtatgcatctaaaactaagaaacwttttttttcaggttttattattaaatagcccaggtaaacacatatgcagagaaataactaaagtctccttcttccaggtaatagcagactaaataactca

SEQ ID NO: 313719 - DNA, 201 bp, Homo sapiens
tcacctgtgtagctgatcacactactattcttagaagaggttgacccttgaacaacatgggccggttcacttacaggcagattttttttttcaaccaaaartatattgaaaatacagtattcaggggatgcgaaacccacatatatggagagtcttttgcatccggtgaatactgtcctttctgtatacttgattatgccc

SEQ ID NO: 313720 - DNA, 201 bp, Homo sapiens
cctgcctcagcctcccaagtagttgggactacaggcgcccgccaccacgctcgttttttttgttctgtttgtttgtttgtttttgtattttcagtagagayggggtttcaccgtgttagccaggatggtctcaatctcctgacctcgtgatccgcccaccttggcctcccgaagtgctgggattacaggcgtgagccaccg

SEQ ID NO: 313721 - DNA, 201 bp, Homo sapiens
acctacctatctggcccctccccccccattaatacccttcacctgtgtagctgatcacactactattcttagaagaggttgacccttgaacaacatgggcyggttcacttacaggcagattttttttttcaaccaaaaatatattgaaaatacagtattcaggggatgcgaaacccacatatatggagagtcttttgcatc

SEQ ID NO: 313722 - DNA, 201 bp, Homo sapiens
atctaattgccttggaatctaattggtatataggttttgttattttttgtgtgtgtgtgatggactcttgctcttttgcccaggctggagtgcagtggcgygatctcggctcactgcaaactccacctcccgggttcacgccattctcctgcctcagcctcccaagtagttgggactacaggcgcccgccaccacgctcgt

SEQ ID NO: 313723 - DNA, 201 bp, Homo sapiens
actccgttgaggaagggaggaagggagggaggaaggaaaagagggagggaggaagagaggaagggaggaagggagggagggaggtagggagggagggaggkagggagggagggaggaaggaagggacgaaggaaggaagggacgaaggaaggaagggacgaaggaaggaagggacgaaggaagagaaggaagcctgagaag

SEQ ID NO: 313724 - DNA, 201 bp, Homo sapiens
attacaaccaatgtcacaaaaataagaataataacagaatattatgagcaattttatgtcaacaaattgtataacttaggagaaatggatgaattcctagyaacacacaacttatcaagactgaatcatgaagaaacagaatatctaaacagaccaataattagaaaggagatcgaatcaaaaatcaaaaacctcccaaca

SEQ ID NO: 313725 - DNA, 201 bp, Homo sapiens
aaatgttcatcaaatgacaaatggataaatgaaatgtggtacatacatacagtggaatattaatcaaccttaaaaggaaattctgatacacacactacaayattgataaatcttgagaaaattatgctaagtgaaataatccagtcataaaaacacaaatactatatgatacccctagtcaaattcatagaaacagtagaa

SEQ ID NO: 313726 - DNA, 201 bp, Homo sapiens
cattatccacaaagctgagaggcagaagaaatgtaaatgttcatcaaatgacaaatggataaatgaaatgtggtacatacatacagtggaatattaatcawccttaaaaggaaattctgatacacacactacaacattgataaatcttgagaaaattatgctaagtgaaataatccagtcataaaaacacaaatactatat

SEQ ID NO: 313727 - DNA, 201 bp, Homo sapiens
caaagtattaccaatcatcaaaagccgcactgtaacccagtttaattatgtgaatcatccatagctgttgagtcaaatgatcacatcaaatcgcaatatcygtatatttcgaaaaaggacacacttccttaagaaaaaaatcaaatctccagggaaacttgcagcgctaaaaagcaaataagcttcctaaaaatattgagt

SEQ ID NO: 313728 - DNA, 201 bp, Homo sapiens
gagacacatgatgttcaacttgtctcattactgctggacttaatcccctggttcaagtggtcacagcaagccttctccactgcaaagatccctttccctcytttaattaataagtaatctgtgccatgcatggctttgtgaggttgtgggaatattctgttatgcccctgaaacttttacctaatggttttattttgaaat

SEQ ID NO: 313729 - DNA, 201 bp, Homo sapiens
tcttctcctttaaattaagtagacccttatttataatttttaccccactttcataattatgctttatttgggtcttattctaggattttttttctttactrtagaataaaggagcatatattagaaaaatatggaggagaaaagttaaacattcctcaaaccaaaagtttagcatagtccccaactagaatccctgtgatt

SEQ ID NO: 313730 - DNA, 201 bp, Homo sapiens
agctttttccttcatatctgtttcagtcatagtagattctaccccacacttttgctcctatttccagagtctacaatgtactcctccaaaggtctccaagraacatataacttaggttttaaggtccaattcaaaggcccattttgtgtagttctttctgatactcttctcctttaaattaagtagacccttatttataat

SEQ ID NO: 313731 - DNA, 201 bp, Homo sapiens
atttcataattttcatcaaaattgtaaaaatatctaattaccctaacttgccagaagttgtagactaataggggatcttatttggctttaaatagcttttyccttcatatctgtttcagtcatagtagattctaccccacacttttgctcctatttccagagtctacaatgtactcctccaaaggtctccaaggaacatat

SEQ ID NO: 313732 - DNA, 201 bp, Homo sapiens
aagagaattaaaccatgctcactagacatgattatgcagatttcataattttcatcaaaattgtaaaaatatctaattaccctaacttgccagaagttgtrgactaataggggatcttatttggctttaaatagctttttccttcatatctgtttcagtcatagtagattctaccccacacttttgctcctatttccagag

SEQ ID NO: 313733 - DNA, 201 bp, Homo sapiens
taatccattaagaaccacaattaaaagcaatttaatttgaagactcatatatcaaaatttattaaagtgtatttaaatagagcagtgttcaataaaatacrtatataataaaattaaataagtacttgttacttacaaatatctaattttctcatagtgtatgtttgcatattctatgtataaaacctaattcaaaacata

SEQ ID NO: 313734 - DNA, 201 bp, Homo sapiens
cacaaaactaatttgtgtgacctttaatgaaaactgaattcttgtttacataatggagaattcattatgtaggagtagtccaggaattaataattaagcaragccaaaaaggcgagaaatagcaaatgcttatcttcagatctctacaccataaaatctctatttggtaaaatctaattggtatgaaaatgactctttaaa

SEQ ID NO: 313735 - DNA, 201 bp, Homo sapiens
ttgaccctgtgaataaattacccacacgaactggtaaagtgttttggaaattgtatttttttttttttttttagcaattcttgggtattccaagcatcttsccttttaatggtctctaactattacccaggacctcataagttggctaccacctgaaatttcttcctaactaaaagtctttaagcaacttaaaatttcata

SEQ ID NO: 313736 - DNA, 201 bp, Homo sapiens
atatagcatgcataatcctgttcctcttgaagttaccaggtcttgtttgacagtctcagatctgtcttttaatgaacaatattgttacatcttatagcccwtcttaaatatacttcaacatatatgaataataaataaattactggtagcagagctccccaccttaggaaatatgaatccataattctgaattctaacatt

SEQ ID NO: 313737 - DNA, 201 bp, Homo sapiens
tcattttcagtaatagatagaataaccagactgaagatcaataagaaaataaagaactcagacactacgatagactaattggatctatcagacatatacasagcacttcacccaacaatagcagaatatatatttttctcaagtgtacatggaagatctttcaagatacaacaagttaggccataaaacaagtctaacaaa

SEQ ID NO: 313738 - DNA, 201 bp, Homo sapiens
taagagctacaatttgtgctgaaaaaactgtcaggcaagatactcttatcccttttattagttagttgattatgttaggtgacagtggcaagtgggacctyacaattgagatatattttgttctttcacttttattgtttcctgattttatgtgtttggaaatatgtttacagatttgttacaatgattggaaaatgtata

SEQ ID NO: 313739 - DNA, 201 bp, Homo sapiens
ttcattacaatgttttcagcaggagccaagtttccaagaatgaaacacaatcataggtaaacaattataaccatataaaattaacaatagatttaaattcrtgtcaataaattttgagttaatttgcttactaaatatgtatttagtgatcacttacagaaagacaagcacagagatagaaagatgaaaagatacaaatct

SEQ ID NO: 313740 - DNA, 201 bp, Homo sapiens
atatcaagtcttcccttatcagtaattactttaaatgtaaatgaattaaactctccaatcagaagacatagattggctgaatggattaaaaaaaaaaaaaacatgatccaactacatgctctctaaaagagattcactttttagatgtacaaatacacataggctgaaactgaaaggatggaaaaagatactgcatgcaaa

SEQ ID NO: 313741 - DNA, 201 bp, Homo sapiens
aatggggggaggggaggaattcaaaagcaaaacctggatttttaaaagattacggtgagaaagattctgcaaagaagatctttgttcctgaaattaaggcrctcctttatttctaatgatttatatccacagcagtgaggagacataagggaccaagactcagagatttttaccgtttgtcgttcttgttccttacagcct

SEQ ID NO: 313742 - DNA, 201 bp, Homo sapiens
tggaggcctctaacgacttgctttatgaatctgggtgctcctgtattgggtgcatatatatttaggatagttagctcttcttgttgaattggtccctttamcattatgtaatggccttctttgtctcttttgatctgtgttggtttaaagtctgttttatcagagactaagattgcaaaccctgctttttttttgctttcc

SEQ ID NO: 313743 - DNA, 201 bp, Homo sapiens
gtgccctgaggaaaagatggttgtgcgcaccgcgagcagtacaagctgcagtaagggcctggggaatggggggaggggaggaattcaaaagcaaaacctgratttttaaaagattacggtgagaaagattctgcaaagaagatctttgttcctgaaattaaggcactcctttatttctaatgatttatatccacagcagtg

SEQ ID NO: 313744 - DNA, 201 bp, Homo sapiens
aactagaagaaaactattttaaaattcacatgaaacaaaaaatgatcttgaatggtcaagataatcctaagcaaaaagaacaaaactggaggcatcatgcyacctgacttcaaactatactacagaattacagtaaccaaaacagcatggtactggtacaatactttcaatatttcaaattgaactaatataatcctacat

SEQ ID NO: 313745 - DNA, 201 bp, Homo sapiens
ggcatgagatggtatcttactgtggttttgatttgcatttctctgatgaccagtgatgatgagcatgttttcatgtgtctgttggctgcataaatgtcttyttttgagaagtgtctgttcatatcctttgcccactttttgatgggattgtttggttttttcttgtaaatttgtttaagttctctgtagattctagatatt

SEQ ID NO: 313746 - DNA, 201 bp, Homo sapiens
ggcctccgcattgaagagcctgcgagatgtgagaccagctgagagcggaagcctctggaaggagacctcctcatctggagggtgggggagggagtgtgcayacttgagcccttgtccttgaaggggattgagcgagccgaggggaggggtaggcggtactcggatttccaatcacaatggagaaacctaagaggctgcggt

SEQ ID NO: 313747 - DNA, 201 bp, Homo sapiens
ctttgctgcatctccgtctggtggcccctgctgcctgggctactccaccttattccaccttattcttcaaagtgcttcctgaactccagttacctacctayctggcccctccccccccattaatacccttcacctgtgtagctgatcacactactattcttagaagaggttgacccttgaacaacatgggccggttcactt

SEQ ID NO: 313748 - DNA, 201 bp, Homo sapiens
ttgatatctcaatcattaacttgttaatttgatgattgtttttcttttattattatactttaagttctagggtacatgtgcacaatgtgcaggtttgttayacaggtatacatgtgctgtcttggtttgccacacccattaactcatcatttacattaggtatttctaatgctatccctcccccatttccccaccaactga

SEQ ID NO: 313749 - DNA, 201 bp, Homo sapiens
gcctctccatttgggggatattcagtgctgcggatgcagctaaattcagtgttacaattattattatttaagtgttggatctcttccttccttttcagccraatatgcacttctcaggcaattctctacacccactgaaacagagacaggatctgacatcctgtgacatccttttctacttaagcactaaattgttttgcc

SEQ ID NO: 313750 - DNA, 201 bp, Homo sapiens
aggaagggacgaaggaaggaagggacgaaggaaggaagggacgaaggaaggaagggacgaaggaagagaaggaagcctgagaagttataagcatagcttgyggttgatgactcaataattcagggctacaaaagctcaacccctttgcctcaatttgggataatactgtggtattattttatgctctagagcttctcatgt

SEQ ID NO: 313751 - DNA, 201 bp, Homo sapiens
attgcatatattacaggtattatacaattaaaaccacatactatatatatggtgggattttaactgagagttgctacattgttaaaaaaaaaaaaaaaaaacttgtttggaagtctgtcctaagcttgcatattataaatgaattgtgcttctttgttttatgagagttgaaatcagacctcttaaacaatgcttacagaa

SEQ ID NO: 313752 - DNA, 201 bp, Homo sapiens
ccttgatccataataagaatactgcttttgcagttaatctaaaccttgctgtttcaaacattttaaacatacttacagcttaagtgaaatatatatatggwaaattcattgtataaaatatgtgaatacagagggagatttatttaagccaaacaatagcaccagtacttagtcacacatcacgcctctccatttggggga

SEQ ID NO: 313753 - DNA, 201 bp, Homo sapiens
ggatgaatgaacgaaagaaggaaggaaggaagaaaagcaaacctcctccaaaattctgttttttttcttgctttttaaacattacttaaagaccactgaaycctctggtattgaattttcattgcagtaaaaatcaggataatgaagtaaatggcttcagcaatttatttcaattaatgtaaattagatgccaaattacca

SEQ ID NO: 313754 - DNA, 201 bp, Homo sapiens
tcatagaggtgaaaagagttacaacctgggtgtcaggaaacccggaatctttttatatatatatatatatatatatttttttttttttattatactttaartcaactgcctcttactatgtaagcttgaatatgtatcattttatctgtcctgactctcattttcaaataacagatttaatgtctctctcattttagagcc

SEQ ID NO: 313755 - DNA, 201 bp, Homo sapiens
cagttgtagatgaatggagaaaagaaatgggcctgtgctggaaagaagtggcatatcttggttggtatctttttattcacccatagtaaaatggaccaggaattaattatttacttatttttaaagaaatgacaaagcacatcctccaaatgggtatgattgtagggaaataggaactcttttaacaaacactgctgatca

SEQ ID NO: 313756 - DNA, 201 bp, Homo sapiens
agttgtagatgaatggagaaaagaaatgggcctgtgctggaaagaagtggcatatcttggttggtatctttttattcacccatagtaaaatggaccaggaattaattatttacttatttttaaagaaatgacaaagcacatcctccaaatgggtatgattgtagggaaataggaactcttttaacaaacactgctgatcaa

SEQ ID NO: 313757 - DNA, 201 bp, Homo sapiens
gttgtagatgaatggagaaaagaaatgggcctgtgctggaaagaagtggcatatcttggttggtatctttttattcacccatagtaaaatggaccaggaattaattatttacttatttttaaagaaatgacaaagcacatcctccaaatgggtatgattgtagggaaataggaactcttttaacaaacactgctgatcaaa

SEQ ID NO: 313758 - DNA, 201 bp, Homo sapiens
aagttcactttgtattgtaccctgtaaaactgtgtgtttgtgtgctttcaaagatgttgggattttatttatctggggacagtgtgtatggtaagacatgmccttctattaataaaactacatttctcaaacttgatgaaaactgccttgttgctctagaagaaatttaccatgcattttctttctttcctttaaacatta

SEQ ID NO: 313759 - DNA, 201 bp, Homo sapiens
ttgtagatgaatggagaaaagaaatgggcctgtgctggaaagaagtggcatatcttggttggtatctttttattcacccatagtaaaatggaccaggaattaattatttacttatttttaaagaaatgacaaagcacatcctccaaatgggtatgattgtagggaaataggaactcttttaacaaacactgctgatcaaac

SEQ ID NO: 313760 - DNA, 201 bp, Homo sapiens
acatgaagatttaatggacataaatgctgcagaatgtttgttaaagacagatccaatttttattagaagaaaattttagtggaatgtataacaaattccarctatacttattatctttctttgggatgttaagcaagcttctgtataccttagttttctacttagaatataaacacaaaccaaattttataaagccattag

SEQ ID NO: 313761 - DNA, 201 bp, Homo sapiens
ttgttctgtattataataaagttttgatatatgtgaatgaatattaaaaacagtattcatgacatttatactacctttagggtggaaaaatggcatactaygaaatgcgagctgaacatagtgtggatatagatgtggatattgattggcctattgcagagcaaagagtattaaggtaaaaacaaataaacctttataacc

SEQ ID NO: 313762 - DNA, 201 bp, Homo sapiens
aattcatatataaaatttctaacatttgtaatatgcatggcaggtagcaattatgctccattcttcttctctagctcataagagtttatttttgattgctyagggaaaaccctggacctcaattatactgtaaaatatttttgttccatctaatctttagtattcttatatgcagtgcccctaggtcttactgaagttgcc

SEQ ID NO: 313763 - DNA, 201 bp, Homo sapiens
accaaaagtgagggggaatagattctgttggtcagaacccaacaaccaaccattacagcaggcattggggattttgctatgaaatgattggaaaatatgtrtatatattgaccaatgattttcccatttccacattttagcatttgtacaaaacttcttttaaaaaaagactctagtatcaaccttttctgtaccaagtag

SEQ ID NO: 313764 - DNA, 201 bp, Homo sapiens
gcatccagactgcagtaatatagtgaaatatcatttttgtgaaatgaactagagatcaaaatcatattcacagtaaatggagaacaaaactgttaataccrtttacaactcttaggttgtatatatcaggaaaccctgttcaaactggcataacaaaagagggaaaggcttattaaggtacagtcagattcaaggacaaaa

SEQ ID NO: 313765 - DNA, 201 bp, Homo sapiens
cctccccaaccgtcccctcctcccgggttgaccttacggggaaaagtaaaggaggccaccccggtgcaacatctgtgataatatgtgaacttctttggatrggggccatcgaagctcccctgttgctcagcctctgataactgcttggtgctgctcgattagggaggcatcaggttcatgaatggagttgagtgtcggggt

SEQ ID NO: 313766 - DNA, 201 bp, Homo sapiens
acctttatgtacttttctacttcctttattatcttataagacttgttttaacatttgaattccaaaccttaatattacttgcttgcaaggaactttttttytaaatatccttttcatttctcttgtctttttaagaggttgacattgtaggaaatattcaagctacttctccatgtttacatcctactgatcttcaaaaag

SEQ ID NO: 313767 - DNA, 201 bp, Homo sapiens
ggctcattttattttgctaaaagacatttgatagagatgggttacttgcaggtttgtaccttcattttgcataacccttttaagcgcttttgtaggcatastttgagttctagggaagaagtatggtacaatttctttatgataaagaaaagtatcaacctatagaggaaaggtaatagccaacaacatttgctatctgag

SEQ ID NO: 313768 - DNA, 201 bp, Homo sapiens
aatataaacacaaaccaaattttataaagccattagaaagaaaaacaaagataatataaaatgcttaacatagtgcctacagatagtaataagtgtatcayttatataggtaaaactctagaattatatgtgtcaaaatgtagtgattatctacaaatagtgataattaggatgattgtgacttttttgcttctatttttt

SEQ ID NO: 313769 - DNA, 201 bp, Homo sapiens
gagggagtgattagtactgcacttgtactcaaaggtctattttggtttcttttagatatggctattttggcaaagagaagcttaaggaaataaaacttttkgtttgcaatattgatggatgtctcaccaatggccacatttatgtatcaggagaccaaaaagaaataatatcttatgatgtaaaagatgctattgggataa

SEQ ID NO: 313770 - DNA, 201 bp, Homo sapiens; identical to SEQ ID NO: 65358

SEQ ID NO: 313771 - DNA, 201 bp, Homo sapiens
gcaaattagaacagaagttccaaaaaccttaatactgcttttggatgatgacaggagagacttcttgaaaaaaaggaggatatgattaagggatttccacraaatcccttgtggtcagaaacctggaggatgtaatatttctgcttttttcaatattaaaatagaaattttcttaaatagggaacttgaactgtttagata

SEQ ID NO: 313772 - DNA, 201 bp, Homo sapiens
aactatgctctatatgttattacatccctagtgtccagaatcgtgcctgggacagaataagcacttagtaaatggttcataaattaaggatgaatgaacgaaagaaggaaggaaggaagaaaagcaaacctcctccaaaattctgttttttttcttgctttttaaacattacttaaagaccactgaaccctctggtattga

SEQ ID NO: 313773 - DNA, 201 bp, Homo sapiens
actatgctctatatgttattacatccctagtgtccagaatcgtgcctgggacagaataagcacttagtaaatggttcataaattaaggatgaatgaacgaaagaaggaaggaaggaagaaaagcaaacctcctccaaaattctgttttttttcttgctttttaaacattacttaaagaccactgaaccctctggtattgaa

SEQ ID NO: 313774 - DNA, 201 bp, Homo sapiens
tatgctctatatgttattacatccctagtgtccagaatcgtgcctgggacagaataagcacttagtaaatggttcataaattaaggatgaatgaacgaaagaaggaaggaaggaagaaaagcaaacctcctccaaaattctgttttttttcttgctttttaaacattacttaaagaccactgaaccctctggtattgaatt

SEQ ID NO: 313775 - DNA, 201 bp, Homo sapiens; identical to SEQ ID NO: 65355

SEQ ID NO: 313776 - DNA, 201 bp, Homo sapiens
ctattgctttaaaaagacaaataatttcatagaggtgaaaagagttacaacctgggtgtcaggaaacccggaatctttttatatatatatatatatatatwtttttttttttttattatactttaagtcaactgcctcttactatgtaagcttgaatatgtatcattttatctgtcctgactctcattttcaaataacaga

SEQ ID NO: 313777 - DNA, 201 bp, Homo sapiens
cagtaaatatgcaaggaattctgctacaacgataaaaaaatgaatcaagtactgggtgtctacacatgtcctggtactcatattattccactcaaaactaygtaatccatgtttgtgttatagttatattgtggctgtagggttgaataacttctattgctttaaaaagacaaataatttcatagaggtgaaaagagttac

SEQ ID NO: 313778 - DNA, 201 bp, Homo sapiens
attgctttaaaaagacaaataatttcatagaggtgaaaagagttacaacctgggtgtcaggaaacccggaatctttttatatatatatatatatatatatwtttttttttttattatactttaagtcaactgcctcttactatgtaagcttgaatatgtatcattttatctgtcctgactctcattttcaaataacagatt

SEQ ID NO: 313779 - DNA, 201 bp, Homo sapiens
attatctacaaatagtgataattaggatgattgtgacttttttgcttctattttttaaaaaaatatttctaccacgaatacgtattacttatatgacattaaaaaaaaaacacacacacacacactttaaaaggagaggtaagaaaatggagaagagcatttacatttttatttaaaactcacagcaggccaggcatgatg

SEQ ID NO: 313780 - DNA, 201 bp, Homo sapiens
atagcatgccttttgctcctcacccctatcagtatactagcaccttgatttcaagtaaacatcttggattttcttcctccttgtcatgattacagtattgrtaaaatgttcattgcaggaaatctttaaaatacagaaaatgaaataagaaaataaaaatcactcacaattctaatacctagaaataaacacttcagtata

SEQ ID NO: 313781 - DNA, 201 bp, Homo sapiens
tgctgaaatgtgacttgaaatagattgttacaaaacaaggcttatgagaggttcagtgctcactgcaatattaattacttggctgttaaagcgaatagctyttagtgggaacgactgcctcacagatgtttcttattgacgacataaatggggaggaaaacactatcccattttcacttttggccagaaaacaaaagacaa

SEQ ID NO: 313782 - DNA, 201 bp, Homo sapiens
attccagattactgcagcatttgtgctgaaactcaccagggttaaattgatgagctttctgcgtgaaagaagggagtggtggtgatttccggagcttgtarccagggtgattagctcgcctgagtgttattagggtgttataaggagtgtttcttggttattcaacagtgtagttagtatcgtttcttttaagaaaaaaaa

SEQ ID NO: 313783 - DNA, 201 bp, Homo sapiens
acccttttttttgagacagagtctcgtgttgcacacaggctggagtgcagtggcacagtcagaactcactcactgcagccttgtcctcctgagctcaagcratcctcctatctcagcttcccaagtagctgggacccaagtaggtggcagagttgcatgccacctcactaggctaattttttatattgtttttagagaagg

SEQ ID NO: 313784 - DNA, 201 bp, Homo sapiens
atatatattatagccgtgtgtatatatatacatatctataacaggtgtgtgtatatacacacacatacatacaggcacacatgcaaagatgaattaacttmtcttcaaaagacttcagggaccagactggtaagtaaatgagagaatgaagtgagagcagttatgaccaattgagcacacataccatttaaagagcactta

SEQ ID NO: 313785 - DNA, 201 bp, Homo sapiens
ggagtggtggtgatttccggagcttgtagccagggtgattagctcgcctgagtgttattagggtgttataaggagtgtttcttggttattcaacagtgtarttagtatcgtttcttttaagaaaaaaaattgattttaacacttgaataaaagaaacactgctgatattgtttatcttgaaagctttcaaatcggactcct

SEQ ID NO: 313786 - DNA, 201 bp, Homo sapiens
tttataccatgaactaaatgtttggaagccacttactgtaaacaacataatatatttgaatgttaaggttcattcaatttctacctcagaatatcatgccrtttaacttaagtagagagatgtggtatcttagaataatttagcaagtccatgtatcattttagatataaatctgtggcatttaagtaacttataactcaa

SEQ ID NO: 313787 - DNA, 201 bp, Homo sapiens
aattcaggaattgttaactggcctatgtatcccttaactgggatacaaaattgtgcccacatgggcatttttctagggaggtcttttgattcctgaaaccyatctcttactattcaggttaagtgcctgggtagccactgagcatctgacttgatgaagccccaccaggtgattctggcagtcagccaggcataggaactg

SEQ ID NO: 313788 - DNA, 201 bp, Homo sapiens; identical to SEQ ID NO: 65379

SEQ ID NO: 313789 - DNA, 201 bp, Homo sapiens
aatattacctgtgacctattacagaaggggggcttttctttttttcttttcctttttaaaatgtttgtgggtacataataggtgtatatatttatggggtscatgagatgttttgacacaggcacacaatgtgagataagcacatcatagagaatggggtatccatccctttgagcatttatcctttgagtaataaacaat

SEQ ID NO: 313790 - DNA, 201 bp, Homo sapiens
ctctctgtcttgctctctctgtctctcgctcttttgctgtgtctctcgctctctctgtgtgtctctctctcactctcttgctctgtctctctcgctctttmgctctgtctcgctctctgtgtctctcgctctctctctgtctctctctctcgctctctctgtctctctcactctttagctctctctctctgttctttctcc

SEQ ID NO: 313791 - DNA, 201 bp, Homo sapiens
ctttcactctccctgtctgtctctcttgctctcactctgtctcactctgtctcactctgtctcactctctctgtcttgctctctctgtctctcgctctttygctgtgtctctcgctctctctgtgtgtctctctctcactctcttgctctgtctctctcgctctttcgctctgtctcgctctctgtgtctctcgctctctc

SEQ ID NO: 313792 - DNA, 201 bp, Homo sapiens
ttgcttgctctgtctcactcttttgctctgtctctttcactctccctgtctgtctctcttgctctcactctgtctcactctgtctcactctgtctcactctctctgtcttgctctctctgtctctcgctcttttgctgtgtctctcgctctctctgtgtgtctctctctcactctcttgctctgtctctctcgctctttcg

SEQ ID NO: 313793 - DNA, 201 bp, Homo sapiens
tctctttcactctccctgtctgtctctcttgctctcactctgtctcactctgtctcactctgtctcactctctctgtcttgctctctctgtctctcgctcytttgctgtgtctctcgctctctctgtgtgtctctctctcactctcttgctctgtctctctcgctctttcgctctgtctcgctctctgtgtctctcgctct

SEQ ID NO: 313794 - DNA, 201 bp, Homo sapiens
ctgtctcttgctctgtctcgctctctcgctctgtctctctcttgcttgctctctgtctcactctttccctctgtctctttcactcttcctgtctctctctygctctctgtctctctcgctctgtctcactctctctgtctcactctctcgctctgtctctctcttgcttgctctgtctcactcttttgctctgtctctttc

SEQ ID NO: 313795 - DNA, 201 bp, Homo sapiens
actctctctgtcttgctctctctgtctctcgctcttttgctgtgtctctcgctctctctgtgtgtctctctctcactctcttgctctgtctctctcgctcmttcgctctgtctcgctctctgtgtctctcgctctctctctgtctctctctctcgctctctctgtctctctcactctttagctctctctctctgttctttc

SEQ ID NO: 313796 - DNA, 201 bp, Homo sapiens
cagcctcccaagtagctgggattacagacatgctaagctacctgccaccacgcctagctaatttttttatacttttattagagacaggggtttcactatgktgaccagggtggtcttgaattcctgacctcaagtgatctgcttacctcagcctcctaaagtactgggattacaggcatgagccaccacgctcagcctaag

SEQ ID NO: 313797 - DNA, 201 bp, Homo sapiens
cactgcactccagcttgggtgacagagcaagactccgtctcaaaaaaaaaaaaatttcagtaggtctggggtggcatctgaggttctgatttttttttttkttttgttagatggagtctccctctgttgcccaggctggagtgcagtggcacaatcttggctcactgcagcctccgcctcccaaattcaagcgattctcct

SEQ ID NO: 313798 - DNA, 201 bp, Homo sapiens
aagaaatcttttaaacctctgaaggttaaaaataacacttatgcctgacttataagcaatcttacatttaaaaatctacgcttgactacttcacaaacagytattttaatacatcatttgtctagaattatagaggcaaaaggcatagccacatccattttcctgtttgttaaaagggcagagaaatgtggagagaggaag

SEQ ID NO: 313799 - DNA, 201 bp, Homo sapiens; identical to SEQ ID NO: 65373

SEQ ID NO: 313800 - DNA, 201 bp, Homo sapiens
taatgttaatttcaataaatgacattcatgcagcaattatattggtgtatgaaattcttacagtgaatattgtgctgttagtgctgcttgaaacatttcartaaaatattgaccaggagcagtggctcatgcctgtaatcccgggacttggggaggccaagacgggcggatcacgaggtcaagaaatcaagaccatcctgg

SEQ ID NO: 313801 - DNA, 201 bp, Homo sapiens
gaaagaaatcttttaaacctctgaaggttaaaaataacacttatgcctgacttataagcaatcttacatttaaaaatctacgcttgactacttcacaaacygctattttaatacatcatttgtctagaattatagaggcaaaaggcatagccacatccattttcctgtttgttaaaagggcagagaaatgtggagagagga

SEQ ID NO: 313802 - DNA, 201 bp, Homo sapiens
attcccatgacttaacacatgggagtgttgccattgaaagtctgcgtatttgaattaaagttctattttcaatcttggatttgcgtaattttatttcaggmcaagtgcatgctggtagaaattttaaaattaatactatcctgtagaaatcatagttttacatttggaatatagtaatcctgttccctgtttctagaatcc

SEQ ID NO: 313803 - DNA, 201 bp, Homo sapiens
aagaaaaaatgagtttctagattaactctgaaaattttttagtctccttcatgcaccacatattaagatgcagttagttctatgttagtaatacgggaaakaaatcttttaaacctctgaaggttaaaaataacacttatgcctgacttataagcaatcttacatttaaaaatctacgcttgactacttcacaaacagcta

SEQ ID NO: 313804 - DNA, 201 bp, Homo sapiens
ttcctagcctgaatgatgatacatctgagagtggggaaacaaacgcctgaaaataaaaacaaaatcgaatgttatctatcctctaattccttctatccagyctcaagtcgtgcttttagatacttgatcaacgaaattgccttgtataagctactgggatgttgtttaagagcaatagttaaaacatgtcctttgcaaata

SEQ ID NO: 313805 - DNA, 201 bp, Homo sapiens
gacctttaaagtttatgtgaggtcatacaggcggatccttatccagtctgactggcgtccttgtaagaaaagggagacatgccagagattaacgcccacgrtggaaaggccaggtgaggccacaatgagaggggccgtctgtgagccaaggagcaaagcctcaggagaaaccagtcctgctgacaccttgctcttggactt

SEQ ID NO: 313806 - DNA, 201 bp, Homo sapiens
ttgtataagctactgggatgttgtttaagagcaatagttaaaacatgtcctttgcaaatattcgaattctatggcccttaagtagaaggatgaagtttctrgaagtacttttgcaaactaaacaggacataagggaaccaggcatctaccatgattttgactttctagaggggcaaaagaacagaaaaatattagaaaatt

SEQ ID NO: 313807 - DNA, 201 bp, Homo sapiens
ccaacagttgaaatgattctccttttgcacatacatttttaaaaaacaaacctttttagtgaattagaaatatacacataaacattaggaatctcagcagwtagctaataaattgatacaaagtcaacccactcgtgtaaccatcactcatatccagaacattaccagagctgccatcagtaaccccaccttcttctccaa

SEQ ID NO: 313808 - DNA, 201 bp, Homo sapiens
atttaattatcatatggtattctagtctctagtttataccatgaactaaatgtttggaagccacttactgtaaacaacataatatatttgaatgttaaggrtcattcaatttctacctcagaatatcatgccatttaacttaagtagagagatgtggtatcttagaataatttagcaagtccatgtatcattttagatata

SEQ ID NO: 313809 - DNA, 201 bp, Homo sapiens
cttttacactgattcctagctttgaagccagaaaagttgataaggatcagccctgctcaacttgataatagtataaggatgaaagtaatccactgaactaytcttgattggtgaattagctaagtgatctcattcttaccttttaaaatagagaacataagggaaaaaataaaggcaatggaagaattcattttttcaata

SEQ ID NO: 313810 - DNA, 201 bp, Homo sapiens
cacagattcagagtgagactttgtgggtttgaatgcagattctaccactttctagctgagtgggcctcagcaagctacttactttctctaagcctgtttcyttatctgtaaatatgtaacaacatagacagtaagttaagcattgataaagggaaggtgctataattattgtggttgccaaaactaataacattgagtcca

SEQ ID NO: 313811 - DNA, 201 bp, Homo sapiens
tagagatggggtcccactatgttgcccaggttggtctcaaactcctgggctcatgacatcctcctgcctcagcctcccaaaatgctgggactacaggtgtragctgctgcacccagcctaatttctttcatattatagatttatttgttacctcttccatgtgcctgattaaataattataggcaagacaggcatgcaaat

SEQ ID NO: 313812 - DNA, 201 bp, Homo sapiens
tattttttcacttatataggattacatatttttattgaacctgagctgcttcaagtaacaatcatttgctctttaatagtcataagtttatacctcttaarttttaatattttccccctacccccaccatcttccaaactaaaaataggtttctgctatctttaaaaggttaataagaaattaaaaagaattggaacaata

SEQ ID NO: 313813 - DNA, 201 bp, Homo sapiens
ccgaaattcatcctttataaaattgttacgttactacagaatacttactatgtagatcaactatttttttccgagcatttaatttactttacaaaaaggcratataagttgactcttagtggaacaaggctccctgttctgttcttaagcaaccagtgagtgtagagctgactgttgcacctgttgtttccttaaattgtt

SEQ ID NO: 313814 - DNA, 201 bp, Homo sapiens
tttctttttttggtgccaccatcattgtctctttcttccttctaacttgagggaccaaataataatagtaaaagataatattacctgtgacctattacagraggggggcttttctttttttcttttcctttttaaaatgtttgtgggtacataataggtgtatatatttatggggtacatgagatgttttgacacaggcac

SEQ ID NO: 313815 - DNA, 201 bp, Homo sapiens
ccaaaatgattataccaatttcattcatgcccgcagttcataagagtttctgttgctccatacccttagcaaaacttgaaattttcagtcttttttatttyagctattccattggatacatagtggcaccctgttgagattttaagttgcatcttcctgatgactaatatggtagactgtgtttctgtatgtttattggcc

SEQ ID NO: 313816 - DNA, 201 bp, Homo sapiens
accttgatttcaagtaaacatcttggattttcttcctccttgtcatgattacagtattgataaaatgttcattgcaggaaatctttaaaatacagaaaatsaaataagaaaataaaaatcactcacaattctaatacctagaaataaacacttcagtatagaaccttccacttactaatgaatttcttcttaataaataat

SEQ ID NO: 313817 - DNA, 201 bp, Homo sapiens
aattacaaagaaaaaatgagtttctagattaactctgaaaattttttagtctccttcatgcaccacatattaagatgcagttagttctatgttagtaatamgggaaagaaatcttttaaacctctgaaggttaaaaataacacttatgcctgacttataagcaatcttacatttaaaaatctacgcttgactacttcacaa

SEQ ID NO: 313818 - DNA, 201 bp, Homo sapiens
gacatgagtaatgaaaaacaaatgtgataatcatcaccaattgaaatttttcttctacaggtggaaaggacagtgctattggggcctttcttacatggggrccaacatgcattcactacagctcaccatctctagaagaaacggcagtgaaacacacactggaaacaccggctctgaggcagcattctcccccagtttttc

SEQ ID NO: 313819 - DNA, 201 bp, Homo sapiens
ttaatttcaataaatgacattcatgcagcaattatattggtgtatgaaattcttacagtgaatattgtgctgttagtgctgcttgaaacatttcaataaartattgaccaggagcagtggctcatgcctgtaatcccgggacttggggaggccaagacgggcggatcacgaggtcaagaaatcaagaccatcctggccaac

SEQ ID NO: 313820 - DNA, 201 bp, Homo sapiens
acaaagaaaaaatgagtttctagattaactctgaaaattttttagtctccttcatgcaccacatattaagatgcagttagttctatgttagtaatacgggkaagaaatcttttaaacctctgaaggttaaaaataacacttatgcctgacttataagcaatcttacatttaaaaatctacgcttgactacttcacaaacag

SEQ ID NO: 313821 - DNA, 201 bp, Homo sapiens
tctctctgttctttctccactgaaactcttgaaatgtaatggcttatcgtgtggctttaccctaggggaaaagattaccttgaggttgtgttcaacagagraggaaacagcagagcttcttagcaaagtcctcaatggtaacaaggtggcatctgaagcattagccagggttgttcatcaggatgttgcctttactgaccc

SEQ ID NO: 313822 - DNA, 201 bp, Homo sapiens
tttgagacagagttgctctgttgcccaggctggagtgcagtggcacaatctcggttcactgcaacctccacctcctggattcaagccattctcctgcctcrtcctcctgagtggctgggattacaagcatgtgccaccacacctggctaatttttgtatttttagttagagatgggatttcaccatgttggccaggctggt

SEQ ID NO: 313823 - DNA, 201 bp, Homo sapiens
atcgtgtggctttaccctaggggaaaagattaccttgaggttgtgttcaacagaggaggaaacagcagagcttcttagcaaagtcctcaatggtaacaagrtggcatctgaagcattagccagggttgttcatcaggatgttgcctttactgacccaactctggattccacagagatcaatgttccacaggacattttggg

SEQ ID NO: 313824 - DNA, 201 bp, Homo sapiens
ttaaacccatctgtgcgctcttgggggaagtccatggaccttggctaaaagtacagaggtggccatggttctgaaatactgtgtgatcttgagcaaattamctcatcatttctctaagtctcagaacctctgtgaagtacttggattaactaaaagattccttttagtactaagttttttggtttgtttgtttgtttttga

SEQ ID NO: 313825 - DNA, 201 bp, Homo sapiens
tatacatatatattatagccgtgtgtatatatatacatatctataacaggtgtgtgtatatacacacacatacatacaggcacacatgcaaagatgaattmacttctcttcaaaagacttcagggaccagactggtaagtaaatgagagaatgaagtgagagcagttatgaccaattgagcacacataccatttaaagagc

SEQ ID NO: 313826 - DNA, 201 bp, Homo sapiens
catttaagtaacttataactcaagctttgggaaaattgcatggccctttgggaatctaatgtaagttattaatgccccaaagatgcccatctacaaaattrtgcagacaatttcagatcctaggtttaaacccatctgtgcgctcttgggggaagtccatggaccttggctaaaagtacagaggtggccatggttctgaaa

SEQ ID NO: 313827 - DNA, 201 bp, Homo sapiens
atgtgtatgtcatcatcatttgagatggaattgaagtttgaaggttagggaggaaagagagagaaatgttagggttaaataaaagattcacatataccatrtttaatatcttttctcacaaaaccaaattaaactcactattttgagtgatttaattaaattaatcttgtcacagataggtcacctctagatgaaagggga

SEQ ID NO: 313828 - DNA, 201 bp, Homo sapiens
aaagttgccctggaactgacagcataagtcctcatccatttcttctcccttcttcccacagggtgaaagaaagcactacttcaatattgctgctaagcatrtgatcattctaaggtcattacaagaatttgacttgcctttagcattgtgcttgtgtgtccatctgcctgtctctctagggatttagattttcattcaaag

SEQ ID NO: 313829 - DNA, 201 bp, Homo sapiens
ggcatttaagtaacttataactcaagctttgggaaaattgcatggccctttgggaatctaatgtaagttattaatgccccaaagatgcccatctacaaaartatgcagacaatttcagatcctaggtttaaacccatctgtgcgctcttgggggaagtccatggaccttggctaaaagtacagaggtggccatggttctga

SEQ ID NO: 313830 - DNA, 201 bp, Homo sapiens
attttagatataaatctgtggcatttaagtaacttataactcaagctttgggaaaattgcatggccctttgggaatctaatgtaagttattaatgccccaragatgcccatctacaaaattatgcagacaatttcagatcctaggtttaaacccatctgtgcgctcttgggggaagtccatggaccttggctaaaagtaca

SEQ ID NO: 313831 - DNA, 201 bp, Homo sapiens
gctgttcaccaggctgaccaggttgactgccaaatgggttgttagtagtgccagaggcaccctgacatcactctctgaactgctttctctttcacattctkgtatttttccagctgacggcccagagggtgggtgccaattccaccagcagctgcaactgaaaagcaaggttcagaaatgtcagatatcctccgggagctg

SEQ ID NO: 313832 - DNA, 201 bp, Homo sapiens
ctgccaaatgggttgttagtagtgccagaggcaccctgacatcactctctgaactgctttctctttcacattcttgtatttttccagctgacggcccagasggtgggtgccaattccaccagcagctgcaactgaaaagcaaggttcagaaatgtcagatatcctccgggagctgctctgtgtctctgagaaggctgctaa

SEQ ID NO: 313833 - DNA, 201 bp, Homo sapiens
cgtgtggctttaccctaggggaaaagattaccttgaggttgtgttcaacagaggaggaaacagcagagcttcttagcaaagtcctcaatggtaacaaggtrgcatctgaagcattagccagggttgttcatcaggatgttgcctttactgacccaactctggattccacagagatcaatgttccacaggacattttgggaa

SEQ ID NO: 313834 - DNA, 201 bp, Homo sapiens
atcattttagatataaatctgtggcatttaagtaacttataactcaagctttgggaaaattgcatggccctttgggaatctaatgtaagttattaatgccrcaaagatgcccatctacaaaattatgcagacaatttcagatcctaggtttaaacccatctgtgcgctcttgggggaagtccatggaccttggctaaaagt

SEQ ID NO: 313835 - DNA, 201 bp, Homo sapiens
atggggaggaaaacactatcccattttcacttttggccagaaaacaaaagacaaaggaatagattgtgtcagctaatagattgggtcgctaaggtaaccamggcctgtctttcaggagaggttttaggggctaaattatgttacttcaaaattcacatgttgaagccccaacccccagtacctcagaatgggactgtactt

SEQ ID NO: 313836 - DNA, 201 bp, Homo sapiens
agcataaacaattttaagttaaaagcaatatcatataaggaggtagaagcacttcggtgtgttgaaaaacctccattcttttcaataacatattcagacayggacagggtgacttaagtatataaaaagtcaaaagacaaattttaaaaagattaatgatcaggaattcaggaattgttaactggcctatgtatcccttaa

SEQ ID NO: 313837 - DNA, 201 bp, Homo sapiens
agaaagttgccctggaactgacagcataagtcctcatccatttcttctcccttcttcccacagggtgaaagaaagcactacttcaatattgctgctaagcmtatgatcattctaaggtcattacaagaatttgacttgcctttagcattgtgcttgtgtgtccatctgcctgtctctctagggatttagattttcattcaa

SEQ ID NO: 313838 - DNA, 201 bp, Homo sapiens
gtttaaacccatctgtgcgctcttgggggaagtccatggaccttggctaaaagtacagaggtggccatggttctgaaatactgtgtgatcttgagcaaathaactcatcatttctctaagtctcagaacctctgtgaagtacttggattaactaaaagattccttttagtactaagttttttggtttgtttgtttgttttt

SEQ ID NO: 313839 - DNA, 201 bp, Homo sapiens
taggtttaaacccatctgtgcgctcttgggggaagtccatggaccttggctaaaagtacagaggtggccatggttctgaaatactgtgtgatcttgagcayattaactcatcatttctctaagtctcagaacctctgtgaagtacttggattaactaaaagattccttttagtactaagttttttggtttgtttgtttgtt

SEQ ID NO: 313840 - DNA, 201 bp, Homo sapiens
atgtaatttattattataaaagcactgtatatttcctgtagagtatttgaaaattatagaaaagcataataaaaaatcatccataattccattactcagtyataactaccattaaaacatcacctactaatcttcctttcaagctctttctctctgtgtatgtgtataaacacaaatggataacatactctcaaattatat

SEQ ID NO: 313841 - DNA, 201 bp, Homo sapiens
caaacctgcacatgtaaccctgaacttagaataaaagttgaaaaaataaataaattaattaaaaaatcatctgaaagataatttccatgagttttaataaatgtattgataaaatggaagaataaattctgcattagatgtagccttcagtttctccatagacaaattatttcaagttgagccattcaaggttaggatgaa

SEQ ID NO: 313842 - DNA, 201 bp, Homo sapiens
gtttgtttggatttaatagtagaagaataaaatagtgaacattaaatactgatcatgtgacaaatacttatatatctagaaacacaattacaaagaaaaartgagtttctagattaactctgaaaattttttagtctccttcatgcaccacatattaagatgcagttagttctatgttagtaatacgggaaagaaatcttt

SEQ ID NO: 313843 - DNA, 201 bp, Homo sapiens
tctcatagtggttgacctataatcttaaggagagaacatattttttagcaaaattgtttaagatcaactattacaaattacatcttactcccattgcatcyatgtcttcagagttgtactaattctcagcctcccagagtccattaagggaatttttttttttttttttttttttttgagacagagtcttgctctgtcacc

SEQ ID NO: 313844 - DNA, 201 bp, Homo sapiens
agattaaggctaggtgtggtggctcacgcctgtaatcccagcactttgggaggccgaggtgggcagatcacctgagatcaggagtttgagaccagccttgycaacatggtgaaacccatctctactaaaaatacaaaaattagccaggtgtggtggcatgcacctgtagtcccagccacttgggaggttgaagcaggagaa

SEQ ID NO: 313845 - DNA, 201 bp, Homo sapiens
caaatacttatatatctagaaacacaattacaaagaaaaaatgagtttctagattaactctgaaaattttttagtctccttcatgcaccacatattaagaygcagttagttctatgttagtaatacgggaaagaaatcttttaaacctctgaaggttaaaaataacacttatgcctgacttataagcaatcttacatttaa

SEQ ID NO: 313846 - DNA, 201 bp, Homo sapiens
caggaggtcaaggctgcaatgagctgtgttcacaccactgcactccagcctgggtgacagagtgagaccctgtctcaaaaacaaaaacagcaaaaaaggtsctagctggtctggtacttagtactttagaaaagttgccctggataacacggtgaaaccctgtctctactaaaaatacaaaaaattagccaggcatggtgg

SEQ ID NO: 313847 - DNA, 201 bp, Homo sapiens
aagaaagaaaaaagaaagttgccctggaactgacagcataagtcctcatccatttcttctcccttcttcccacagggtgaaagaaagcactacttcaataytgctgctaagcatatgatcattctaaggtcattacaagaatttgacttgcctttagcattgtgcttgtgtgtccatctgcctgtctctctagggatttag

SEQ ID NO: 313848 - DNA, 201 bp, Homo sapiens
actattacaatgcaatgggtgaaaaaagggaggcacagagaggttaagtaacttgcctaaggttgcacatcaagtaaatggtagggccagtttttgaacayaggcagactggctccagagtctgtgttctttgcaatattatattgccttttatatgataatctaaccattacatttgggagaatagaactttatggcaga

SEQ ID NO: 313849 - DNA, 201 bp, Homo sapiens
gatttgtactgtcccacaaaataatatgaataataagtgttgtgggcattattaaagctattggtcatctgcaaatgaccgagttcaaatatttgaagcaygtccttgcttttgttccctgagaatatgtgtatcaaaatttaggacatattttgagaaaaattatctttattacagagaggatcagaagcaaaatgcatc

SEQ ID NO: 313850 - DNA, 201 bp, Homo sapiens
gtatcaaaatttaggacatattttgagaaaaattatctttattacagagaggatcagaagcaaaatgcatcagaaagcttcgtgatcatacagagatgacrgaagattcttacttgactccatttattcactctatatattgatacttaaattattggccaataaaatctttctcttttttcatatccccttcctagcctg

SEQ ID NO: 313851 - DNA, 201 bp, Homo sapiens
ataccatatttaatatcttttctcacaaaaccaaattaaactcactattttgagtgatttaattaaattaatcttgtcacagataggtcacctctagatgwaaggggataattttagattctgatttggtgctccaaaaatgtggttcagttgctagttattcagatacagccttggtttgttcttgtaaatgaatacaga

SEQ ID NO: 313852 - DNA, 201 bp, Homo sapiens
acttaaattattggccaataaaatctttctcttttttcatatccccttcctagcctgaatgatgatacatctgagagtggggaaacaaacgcctgaaaatraaaacaaaatcgaatgttatctatcctctaattccttctatccagtctcaagtcgtgcttttagatacttgatcaacgaaattgccttgtataagctact

SEQ ID NO: 313853 - DNA, 201 bp, Homo sapiens
aaactcaccagggttaaattgatgagctttctgcgtgaaagaagggagtggtggtgatttccggagcttgtagccagggtgattagctcgcctgagtgttmttagggtgttataaggagtgtttcttggttattcaacagtgtagttagtatcgtttcttttaagaaaaaaaattgattttaacacttgaataaaagaaac

SEQ ID NO: 313854 - DNA, 201 bp, Homo sapiens
catctgcctgtctctctagggatttagattttcattcaaagatttttctgtcactgagaatttaattcttggtatatttttgagagtgtaaattttttttyaagatttaaaacaataagcttcaaatgttagattgtatctagagtcttccacactgaggatgtgaatatgatatagactagctgttcaccaggctgacca

SEQ ID NO: 313855 - DNA, 201 bp, Homo sapiens
tcagtatgatcttcacttattgccacccacctttccccaccccatcctgcacatcccatctccttccctgttttgccctccatagtacccatggcctcctyatagaagttaaatttgtcttgttagtctctccctctagaatgttggcttcaaaaaggcagggattttcatatattatgtatctccattgcctaggcacat

SEQ ID NO: 313856 - DNA, 201 bp, Homo sapiens
tctctgttctttctccactgaaactcttgaaatgtaatggcttatcgtgtggctttaccctaggggaaaagattaccttgaggttgtgttcaacagaggargaaacagcagagcttcttagcaaagtcctcaatggtaacaaggtggcatctgaagcattagccagggttgttcatcaggatgttgcctttactgacccaa

SEQ ID NO: 313857 - DNA, 201 bp, Homo sapiens
cctgaattgattctgtttttgagctctttgagtcttttgccaggcacatccttagccgtgtgttgactccctagacgtcagcagtcagctgctggcatgtmcatctcttaaggggaaacctagtttctctgcctctgtttcataggagctccgttaatttctttttttggtgccaccatcattgtctctttcttccttcta

SEQ ID NO: 313858 - DNA, 201 bp, Homo sapiens
gcgtgacctccgccgtcctccccaaccctcgtcctctggccgcgcctgcggccgcacgcccagcgcccctcgcctaacctcgcgcccgggccgcgcctcckcctcctcctgctccccgccgcttccgtttctcgagggaaaggctgctgcctcctgctctgtcctcatccccggcttaggtaacacgttttcctccttacg

SEQ ID NO: 313859 - DNA, 201 bp, Homo sapiens; identical to SEQ ID NO: 65363

SEQ ID NO: 313860 - DNA, 201 bp, Homo sapiens
gtaacccttttttttgagacagagtctcgtgttgcacacaggctggagtgcagtggcacagtcagaactcactcactgcagccttgtcctcctgagctcargcaatcctcctatctcagcttcccaagtagctgggacccaagtaggtggcagagttgcatgccacctcactaggctaattttttatattgtttttagaga

SEQ ID NO: 313861 - DNA, 201 bp, Homo sapiens
ccaccctgaattgattctgtttttgagctctttgagtcttttgccaggcacatccttagccgtgtgttgactccctagacgtcagcagtcagctgctggcmtgtacatctcttaaggggaaacctagtttctctgcctctgtttcataggagctccgttaatttctttttttggtgccaccatcattgtctctttcttcct

SEQ ID NO: 313862 - DNA, 201 bp, Homo sapiens
ccgcgggtaggtgagtcgatggcgccgggagggttcctcgcctctgcgcgccggcctgcgaggtccctgccccggcagcgaggccgcccccggccgggccyggccaggcatgcccggcatcgccgctgcagccagcgcggaggggagctcgtgagtcccgcggcgcccttggccctgcccgagcggcccgatggggttggg

SEQ ID NO: 313863 - DNA, 201 bp, Homo sapiens
catgcaaagatgaattaacttctcttcaaaagacttcagggaccagactggtaagtaaatgagagaatgaagtgagagcagttatgaccaattgagcacarataccatttaaagagcacttagctttagcagattgttaccatatgggagtacaggccagctcttcagatttttaaagagaaaccaaaatccaaggttttc

SEQ ID NO: 313864 - DNA, 201 bp, Homo sapiens
ttgtcatgattacagtattgataaaatgttcattgcaggaaatctttaaaatacagaaaatgaaataagaaaataaaaatcactcacaattctaatacctrgaaataaacacttcagtatagaaccttccacttactaatgaatttcttcttaataaataatacatgttttctggaaaataagcaaaaataagaaccctct

SEQ ID NO: 313865 - DNA, 201 bp, Homo sapiens
tgggagtacaggccagctcttcagatttttaaagagaaaccaaaatccaaggttttcagcgatatatcccaatttctaaccgttagctactaattcagttsaagaaggaaacaatcaaaaaaacacagtacaggtcaagcaaaaagctgaatgtgacgcatgagcagtttgtgagccctgcatgagctctacatttttttt

SEQ ID NO: 313866 - DNA, 201 bp, Homo sapiens
ttgcccgggcgtgcagacagcaggaagccctcttccagctgctgatcgaagaaaagaaagagggagaaaagaacaagaagtttgcagttgacttcaagackctggctgatgtactggtacaggaagttataaaacagaatatggagaacaaggtaagaaaggtcatagccaaggtaactgcaaaatagttgcatctgtggc

SEQ ID NO: 313867 - DNA, 201 bp, Homo sapiens
tcattgcaggaaatctttaaaatacagaaaatgaaataagaaaataaaaatcactcacaattctaatacctagaaataaacacttcagtatagaaccttcyacttactaatgaatttcttcttaataaataatacatgttttctggaaaataagcaaaaataagaaccctcttagtcccaccactggagaaaaccacagct

SEQ ID NO: 313868 - DNA, 201 bp, Homo sapiens
cttccacttactaatgaatttcttcttaataaataatacatgttttctggaaaataagcaaaaataagaaccctcttagtcccaccactggagaaaaccasagctatgctttgataaatattataacattttccttctatgtgtatgtgtgtacatgacacatacaatgtattgcaacagaaataagagcacactgctttg

SEQ ID NO: 313869 - DNA, 201 bp, Homo sapiens
ggacataagggaaccaggcatctaccatgattttgactttctagaggggcaaaagaacagaaaaatattagaaaattaagcactgagccaagttgacttcrtttttttatacttggattggtttctagaattggaaattttggaatttcagttctgattgtgctatttaatttgaaatataaaattgaaatctgttcagaa

SEQ ID NO: 313870 - DNA, 201 bp, Homo sapiens
tatcatttattatctgccatgtgtaaagctctgtgctctgtgatatttttccagaaatatctcatttgatcttcacaacatcactgcaaggtaactattartctttatattaaaggtaaagagagagtctcagagagggtaagaaaatacctgatgccacacagctagttagtagcagagttatgttttgaacccaggcct

SEQ ID NO: 313871 - DNA, 201 bp, Homo sapiens
ttctagaggggcaaaagaacagaaaaatattagaaaattaagcactgagccaagttgacttcgtttttttatacttggattggtttctagaattggaaatkttggaatttcagttctgattgtgctatttaatttgaaatataaaattgaaatctgttcagaattgagcatatgtgtgggtttttgttttgtttttcgtca

SEQ ID NO: 313872 - DNA, 201 bp, Homo sapiens
aatgagtttactaatgactggggtaagtataagaatcttaatgtgtctttgtaatttaattatcatatggtattctagtctctagtttataccatgaactraatgtttggaagccacttactgtaaacaacataatatatttgaatgttaaggttcattcaatttctacctcagaatatcatgccatttaacttaagtaga

SEQ ID NO: 313873 - DNA, 201 bp, Homo sapiens
ttatacactgggaaaacaatttagttttcaatgagctaaaaggcagtattgcaaatctctagtaaggcttgtagtacagtttccctctggcctcacaggartctcaggggaggctaccattagcaagtgacacaacacagcgagccccccctccatatttagtgtgggcccacttccattcccctgtcccttctgcacaaa

SEQ ID NO: 313874 - DNA, 201 bp, Homo sapiens; identical to SEQ ID NO: 65364

SEQ ID NO: 313875 - DNA, 201 bp, Homo sapiens
gtttggatttaatagtagaagaataaaatagtgaacattaaatactgatcatgtgacaaatacttatatatctagaaacacaattacaaagaaaaaatgartttctagattaactctgaaaattttttagtctccttcatgcaccacatattaagatgcagttagttctatgttagtaatacgggaaagaaatcttttaaa

SEQ ID NO: 313876 - DNA, 201 bp, Homo sapiens
caaaacaccggtgtggttgctgtatgaaatcaacttaaatagcctagtgcccttctttaaacctaattttcctatcgctacccccacttgttttttaaaawtataagtcaacaaatatttattatgcccttattatgtagatgataaacatcaaaagcttttgaaatgtgcatttctttgaacctgtaattttttgttttt

SEQ ID NO: 313877 - DNA, 201 bp, Homo sapiens
aatatcaaatttaccattttaaccgttttcaaattacagctcagtggcattaagtacattcactttgttatgcaaccatcagcactgttcatgtccagaaytttttcatcatcccacacaaaaactatacccattaaacaatgactctaccctctcttcccagccctagtaaccaccatcctactttctgtctccacgaat

SEQ ID NO: 313878 - DNA, 201 bp, Homo sapiens
caggaattgttaactggcctatgtatcccttaactgggatacaaaattgtgcccacatgggcatttttctagggaggtcttttgattcctgaaacccatcycttactattcaggttaagtgcctgggtagccactgagcatctgacttgatgaagccccaccaggtgattctggcagtcagccaggcataggaactgctgg

SEQ ID NO: 313879 - DNA, 201 bp, Homo sapiens; identical to SEQ ID NO: 65372

SEQ ID NO: 313880 - DNA, 201 bp, Homo sapiens; identical to SEQ ID NO: 65371

SEQ ID NO: 313881 - DNA, 201 bp, Homo sapiens
tttaaaacaatgagagttgaggtgtatgtgtcatgtgttctgtatatatacatatatattatagccgtgtgtatatatatacatatctataacaggtgtgygtatatacacacacatacatacaggcacacatgcaaagatgaattaacttctcttcaaaagacttcagggaccagactggtaagtaaatgagagaatgaa

SEQ ID NO: 313882 - DNA, 201 bp, Homo sapiens; identical to SEQ ID NO: 65378

SEQ ID NO: 313883 - DNA, 201 bp, Homo sapiens
cacaattacaaagaaaaaatgagtttctagattaactctgaaaattttttagtctccttcatgcaccacatattaagatgcagttagttctatgttagtamtacgggaaagaaatcttttaaacctctgaaggttaaaaataacacttatgcctgacttataagcaatcttacatttaaaaatctacgcttgactacttca

SEQ ID NO: 313884 - DNA, 201 bp, Homo sapiens
gcccctgcttttcttttccttttttatgtttacaaaatggggaaaacaagtccttcagagcttacatcatgtggccgagtttatatacctgattggcaaarcagagcctaagaaccagctctcctgtatcccaagcaaggctctttctaccgcacaccctgcaggcccatccaggcccatccagacaataaacagtaagtg

SEQ ID NO: 313885 - DNA, 201 bp, Homo sapiens
agcgcggaggggagctcgtgagtcccgcggcgcccttggccctgcccgagcggcccgatggggttggggggcgggaagaaagggtggcaaacaacgatttwaaaaatccagtcattagtatttgtaggacgaagaagctgatctgacagttgtccagagcagtggcccagctgcaacaggtagatggcgcagctgtcagtg

SEQ ID NO: 313886 - DNA, 201 bp, Homo sapiens
gcattcattcctgaaataaaaggcatttaagtaggcaggtgcttttgtttgagttttcactagatcttttctatcacctgaaagctttttgcattattacygcagtctcattttatttagacatttgcctcgaggggctgagacattcttataccttcatacttaattccccaagacatttaaaaatgtaatttattatta

SEQ ID NO: 313887 - DNA, 201 bp, Homo sapiens
aagtgacatgagtaatgaaaaacaaatgtgataatcatcaccaattgaaatttttcttctacaggtggaaaggacagtgctattggggcctttcttacatrgggaccaacatgcattcactacagctcaccatctctagaagaaacggcagtgaaacacacactggaaacaccggctctgaggcagcattctcccccagtt

SEQ ID NO: 313888 - DNA, 201 bp, Homo sapiens
aacaaaatagtttatggcacagattcagagtgagactttgtgggtttgaatgcagattctaccactttctagctgagtgggcctcagcaagctacttactttctctaagcctgtttccttatctgtaaatatgtaacaacatagacagtaagttaagcattgataaagggaaggtgctataattattgtggttgccaaaac

SEQ ID NO: 313889 - DNA, 201 bp, Homo sapiens
ttcagcgatatatcccaatttctaaccgttagctactaattcagttaaagaaggaaacaatcaaaaaaacacagtacaggtcaagcaaaaagctgaatgtyacgcatgagcagtttgtgagccctgcatgagctctacattttttttggtcatgattgtgatagaaccataatgtataatccattgttttgaaaatgtaac

SEQ ID NO: 313890 - DNA, 201 bp, Homo sapiens
caacaaaatagtttatggcacagattcagagtgagactttgtgggtttgaatgcagattctaccactttctagctgagtgggcctcagcaagctacttactttctctaagcctgtttccttatctgtaaatatgtaacaacatagacagtaagttaagcattgataaagggaaggtgctataattattgtggttgccaaaa

SEQ ID NO: 313891 - DNA, 201 bp, Homo sapiens
tcaacaaaatagtttatggcacagattcagagtgagactttgtgggtttgaatgcagattctaccactttctagctgagtgggcctcagcaagctacttactttctctaagcctgtttccttatctgtaaatatgtaacaacatagacagtaagttaagcattgataaagggaaggtgctataattattgtggttgccaaa

SEQ ID NO: 313892 - DNA, 201 bp, Homo sapiens
gtcaacaaaatagtttatggcacagattcagagtgagactttgtgggtttgaatgcagattctaccactttctagctgagtgggcctcagcaagctacttactttctctaagcctgtttccttatctgtaaatatgtaacaacatagacagtaagttaagcattgataaagggaaggtgctataattattgtggttgccaa

SEQ ID NO: 313893 - DNA, 201 bp, Homo sapiens
aatttctttttttggtgccaccatcattgtctctttcttccttctaacttgagggaccaaataataatagtaaaagataatattacctgtgacctattacrgaaggggggcttttctttttttcttttcctttttaaaatgtttgtgggtacataataggtgtatatatttatggggtacatgagatgttttgacacaggc

SEQ ID NO: 313894 - DNA, 201 bp, Homo sapiens
gatccatggcctgtgctttggggttgactccagggcatggcaaagtccaggtggaacaagcagttcagctttttattgaaataggtcatattttttcacttatataggattacatatttttattgaacctgagctgcttcaagtaacaatcatttgctctttaatagtcataagtttatacctcttaagttttaatatttt

SEQ ID NO: 313895 - DNA, 201 bp, Homo sapiens
ttccacttaacattagtgcattgacatatttccatattattaaatattcttcaaaaacatgattttaccaactgtatagtattttgttttaccaatatttmagattattttcaacttgttgtaatattaatcctccttgtgcagaaatattttaactcaactctgattgccttaacacagattgagggaaaactggagtta

SEQ ID NO: 313896 - DNA, 201 bp, Homo sapiens
acaatgtgagataagcacatcatagagaatggggtatccatccctttgagcatttatcctttgagtaataaacaatctagttacactctttattttaaaaygtacagttaagttcttattgattatagttaccctattgtgctatcaaatagtaggtctttttttttcacccattggaaggaggcttttccatctcacatt

SEQ ID NO: 313897 - DNA, 201 bp, Homo sapiens
gattgagggaaaactggagttactgactaaaggcagtgacatctgcagggatcttgacacatttttgtcaaattgccctctggaaacctaacttgtttgcrtgcccattagcagagcatctgtttcaccacatctccaagagggaatgtaaactttaaaacatatacaatagtcaaagaggatgtctcgttgcttgtatgc

SEQ ID NO: 313898 - DNA, 201 bp, Homo sapiens
acacaatgtgagataagcacatcatagagaatggggtatccatccctttgagcatttatcctttgagtaataaacaatctagttacactctttattttaayacgtacagttaagttcttattgattatagttaccctattgtgctatcaaatagtaggtctttttttttcacccattggaaggaggcttttccatctcaca

SEQ ID NO: 313899 - DNA, 201 bp, Homo sapiens
atattacctgtgacctattacagaaggggggcttttctttttttcttttcctttttaaaatgtttgtgggtacataataggtgtatatatttatggggtasatgagatgttttgacacaggcacacaatgtgagataagcacatcatagagaatggggtatccatccctttgagcatttatcctttgagtaataaacaatc

SEQ ID NO: 313900 - DNA, 201 bp, Homo sapiens
ttgtagctggagacttaaagtctcctttattctagtagaaaaatactgttctttgttataaacacacaaagatgtttatatgttaatataacaatgattaygactctttctggagctgactagagaaaccgtattaataagtagaaataataatactagcagcacttataaatgctatgtgccagccactattctaaagtc

SEQ ID NO: 313901 - DNA, 201 bp, Homo sapiens
gattacgactctttctggagctgactagagaaaccgtattaataagtagaaataataatactagcagcacttataaatgctatgtgccagccactattctraagtcgtcgttaaatatattaacttatttagctcttataacaatttgatgaagaactactattacaatgcaatgggtgaaaaaagggaggcacagagagg

SEQ ID NO: 313902 - DNA, 201 bp, Homo sapiens
gttttcctccttacgacacccaccacagggtccccgcgccgctgcccctcctccttggatctggggcccgggctggtgagcggcgcgcgccgtcgcctctycgcgggtaggtgagtcgatggcgccgggagggttcctcgcctctgcgcgccggcctgcgaggtccctgccccggcagcgaggccgcccccggccgggccc

SEQ ID NO: 313903 - DNA, 201 bp, Homo sapiens
ttcctgatcattataaagggagcaggaggaaaggctttctgtgccgggggtgatatcagaggtaaagacttttccctttcacctgagtgctctttcccccyactagaactgatcaagtattgtcaaatttttgtaataatttataatttgctttactttttagaactttttattataaagttaatacattcttaggaaaaa

SEQ ID NO: 313904 - DNA, 201 bp, Homo sapiens
actgatacccaatatgctaatagcctaaataggtaagtgtagggaagaacaaagaagttgcttatgaaaggtttaaggaagcaataacatttttaaataaggaaggggaataggctgtgagctcgaacatgcccgtgagcatgtccaatagttacgtaggatagggcttaacaaagagttactagcacaaagcaaggaggc

SEQ ID NO: 313905 - DNA, 201 bp, Homo sapiens
ctgatacccaatatgctaatagcctaaataggtaagtgtagggaagaacaaagaagttgcttatgaaaggtttaaggaagcaataacatttttaaataaggaaggggaataggctgtgagctcgaacatgcccgtgagcatgtccaatagttacgtaggatagggcttaacaaagagttactagcacaaagcaaggaggca

SEQ ID NO: 313906 - DNA, 201 bp, Homo sapiens
gtcccaaaacctcacaagttaggaagctgacagtgcagcctccagtctgtggccaaaggcccaagagcctctggcaaaccactggtataagtccaagagtycaaaagctgaagaacttggaagctgatgtttgaaggcaggaagcatccagtgccggagaaagatgaaggctggaagactcagcaagtcaagtccttccaa

SEQ ID NO: 313907 - DNA, 201 bp, Homo sapiens
ctagaagtgcttgctcttggcttctgccagaggctgtgtttcccagcctgtgggatggtcagcctgcaggctgcagccctttaggagaagtaaagctctcttttccaaatttatgaatcttctgattcttcagttgacagttcatttgtcatagtctgcattccatattggaattccctgatatcctaggtaatttttttg

SEQ ID NO: 313908 - DNA, 201 bp, Homo sapiens
gtatggaatgtcatggtacttgatgttattgcatgcccattgctgcaaggcatcacacaagatatcctgagacaggcggtgtgcatattccaagatcacartattggtccctggaggttccttcacttcctctttgacattaactggagaagccatcctaggtagacatctctcttctggcataaagggttcttcactctc

SEQ ID NO: 313909 - DNA, 201 bp, Homo sapiens
tagaagtgcttgctcttggcttctgccagaggctgtgtttcccagcctgtgggatggtcagcctgcaggctgcagccctttaggagaagtaaagctctcttttccaaatttatgaatcttctgattcttcagttgacagttcatttgtcatagtctgcattccatattggaattccctgatatcctaggtaatttttttgc

SEQ ID NO: 313910 - DNA, 201 bp, Homo sapiens
acaacctacagaatgggagaacatgcaaactatgcatctgacaaaggtccaatatccagcatctataagaaacttaaatttataagaaaaaaacaaccccrttaaaaaatgggcaaagtacatgaaaaaacactttttagaagaagatagacatgcagccaaccacatattaaaaaaaaaaaagctcagtatcactgatca

SEQ ID NO: 313911 - DNA, 201 bp, Homo sapiens
tggtgaggatgtgcagaaaagggaacgtgtatacactgttgatgagcgtttaaattagttccaccattgtggaaagcggtgtcgcgatttaaagagctaaraacagaactgtcattcgacccagcagttccattactgggtgtatacctaagggaatataaattgtactaccataaagacacatgcacacgtatgttcact

SEQ ID NO: 313912 - DNA, 201 bp, Homo sapiens
aaaagtgtcagactgtttcaggttctgtaagtttatccttccccagtatgtttgtttacttatactcaagaatatatcagatatgtgtgtgtgtgtgtgtrtatcagactttgatcattgtcaatgtgattacaaaatatatcttactgttgctaaagtttttatttgaatttctcgttagagaaactgagaaattcaaat

SEQ ID NO: 313913 - DNA, 201 bp, Homo sapiens
caggatataggcgtgggcaaagacttcataactaaaacaccaaaagcaattgcaacaaaagccaaaattgacaaatgggatctaatcaaactaaagagctkctgcaccacaaaagaaactatcatcagagtgaacatgaacaggcagtctacagaatgggagaaaaattttgcaatctacccatctgacaaaggtctaata

SEQ ID NO: 313914 - DNA, 201 bp, Homo sapiens
cccatctgacaaaggtctaatatctagaatctccaaggaacttaaatttacaagaaaaaaaaaacccatcaaaaagtgggagaaggatatgaacagacttmtcaaaagacgacatgtatacggccaactaacatgaaaaaaagctcattattactggtcattagagaaatgcaaatcaaaacctcaatgagataccatctc

SEQ ID NO: 313915 - DNA, 201 bp, Homo sapiens
gcatcataaccacctggagggtttgttaaacacagatttctgggccccacagtttcttgttcagtaggtctggggtggggcagagaatttcagtttctagkcagtttccaggggatgttgatggtacttgtccaagaaccatactttgagaataactgttctaaaaagccaagttgacatcagttgaaggaaataagcctg

SEQ ID NO: 313916 - DNA, 201 bp, Homo sapiens
actacaattagatgtgatttcttctttcattgagtcagtgctttcagtctgtactctaaatttgatgtttgtactttattgttactttatatctcatcttyccaactgtattagatggtctggaaagggcaaggattatcctacctttttttttttttggccttctcgtaacaactaggaatatacagttatagagaaatt

SEQ ID NO: 313917 - DNA, 201 bp, Homo sapiens
actcaacctgtatagattgatagaacccctgttaagttttctgtctgtgggtaactaatttttcatttcgtccattgttctggactttcacattttcatcrgctcttgattctttcatcctacttatttattagctgtctttaccaatcccaaaggacttggattttttatattataagtggtttcactatgttacttacg

SEQ ID NO: 313918 - DNA, 201 bp, Homo sapiens
ctgggcgacagagagagactcaggctcaaaaaaaaaaaggagcggagaggtgcatgccctcttcctctccaccagatggcagttttggaaccaatagaaargaaagatcataaattcagaattacctggggacactgaattctcaattacattttgaggtataaaagctaatatcaaattttaagtgacagctgaatttga

SEQ ID NO: 313919 - DNA, 201 bp, Homo sapiens
aattcaaaatgctataaaattcaaaaactctttaagcatcaacatgatgccacaagtggaaaattccacacctggcctcatgattgctcgcagtcaaaatrcaagtgcacaacacactgtttattcagggtccctatgggaaaaattaattactttcaggctatgtgtataaggtggatatgaaacataaaggaattccca

SEQ ID NO: 313920 - DNA, 201 bp, Homo sapiens
aaaagtttctactgagattatgattagacttagaatgaattatgggttaatttggagggaattgacatctttgatattgaatgttcccaaccataatgtgrcatagctcttcctttttttaaaaaaaaaaaaaaaaaagatagggtcttggtctgttgcccaggctggagtgcagtggcatgatcacagctcactgcagcc

SEQ ID NO: 313921 - DNA, 201 bp, Homo sapiens
cagagtggaagaaattagaaatgttcatgttagaataacatctctattaatgtaattaatgtagtccggtattgcatgaaccttttggacaatcacgtctktccagctacatcttccttgtgcgttacatatttattctctagtacaggttgaacatccttaattcaaaatgctataaaattcaaaaactctttaagcatc

SEQ ID NO: 313922 - DNA, 201 bp, Homo sapiens
tttgatgagtctgtcttccattcttatgtttctgtttgagataccattataatatgtcccaaaatgtgatacatagaaataagccaaatgttgcaaatcaragttggaccagagtggaagaaattagaaatgttcatgttagaataacatctctattaatgtaattaatgtagtccggtattgcatgaaccttttggacaa

SEQ ID NO: 313923 - DNA, 201 bp, Homo sapiens
ttacctttccacagaagtgttgtttactaaattcgcagatgttaaatatagtaaatgccaaagccttggagtttacgaatccttaggatttgaattccccyatctcaagggaattaaagcctgacatcgaagagtaaaaaattcagggaaggatcattggactgcctttcctgtgctccctctggacgttccttcataaac

SEQ ID NO: 313924 - DNA, 201 bp, Homo sapiens
actgtcttatgaatttgttaagtaatttccttctgtgatataaggtgtgtcatttagttaacactgtagagacattttaaatatatttgggaaaatgggaktgtactgttactcctaacacctcacaacttaaaaacaattttaactttcaaatcccttcatacgtattgagtatttgatcctaaatgcttttcacaagtc

SEQ ID NO: 313925 - DNA, 201 bp, Homo sapiens
atgaaagttggagacccactgcttgataccaagatgaggaaaaggaagctaattccctgttaccacttacttcactgcatctctggtctcccgttctcttygtttagacagtcttatctacggatgagtacagaggttttgactccagagtctaggagacagtgtacagcagcagctgtctaatttgttttcaaaactggg

SEQ ID NO: 313926 - DNA, 201 bp, Homo sapiens
atcggggtgatactagtttcatagaacatcatagaatttgtaaaccaacttatcaaacttagcaggacagatcaatttactcatttgggaatgttttaatrctaaatttaaatatttattgctaaagtgaggtcaagactgtatctacataaaatgaatatttttaaataataaagataatttgacattgcatactagaaa

SEQ ID NO: 313927 - DNA, 201 bp, Homo sapiens
ggttaacatacaatacagcatatatttcagacataagtgtttcagaaatattgtacagaagatattgtactctattaaaatgtgattcagggacaagggartggtgcttggtgataaaagtatactgccatagttgctgaggaacggcagcaacagaaatcagacttctagttgatatggatctggcaggcatctctgtca

SEQ ID NO: 313928 - DNA, 201 bp, Homo sapiens
atgcaggaggttggctggttgccacggtgcctgcttttctccttgtgtcacctccgctgtctcctgaacaagacttgggtttgtctgtggcttctgcgggragccaagatgtccagagcaggccacataaatcaagtggggtgcgtctcccttctcggctggagtcttaactccatacaggcacagagatagccgtatggg

SEQ ID NO: 313929 - DNA, 201 bp, Homo sapiens
tgaatatgattggtttgtaaggtgtgtattgattttatttaagtgtaattgctgtttgcttagccaattggcataatttatgctaagcaaactacaaatakggatttattttattagtcacagctacagaatttattccacttgtggaatgatgttttgtttttgtagcagattagaaaagttttgtttggtgctttggca

SEQ ID NO: 313930 - DNA, 201 bp, Homo sapiens
atgcaaatcaaaacctcaatgagataccatctcacgcagtcagcatggcgattattaaaaagtcaggcaacaacagatgctggtgaggctgcggagaaataagaacgcttttacgctgttggtgggagtgtaaattcaaccattgtggaagacactgtggcgattcctcaaggatctagaaccagaaatactgtttgaccc

SEQ ID NO: 313931 - DNA, 201 bp, Homo sapiens
acaaaatagtgcatgggaaggtacaatgggtggttgagagccacagacttctggtgaaatcgtggtgtgaatcctggacctattagtttatagctgtgttwccttggagaaagtgcataagctctctaattctgtttcctcatatgcaaactggagataatgatacctggattcagggttggcaccttcagtgagtatttt

SEQ ID NO: 313932 - DNA, 201 bp, Homo sapiens
ctgtaaatgtgaattccctcattggtaaaatgaagaggattatttataagcagatatatatataaagtaaatgcacaaatggaagttattagtctgttacrtgtttaaaataatgagcattattaaagtaccattgtaaacataaagtggacaataatcacatagaatattgatttcatgaaacatctcatatttatattt

SEQ ID NO: 313933 - DNA, 201 bp, Homo sapiens
gcaaatcaaaacctcaatgagataccatctcacgcagtcagcatggcgattattaaaaagtcaggcaacaacagatgctggtgaggctgcggagaaataagaacgcttttacgctgttggtgggagtgtaaattcaaccattgtggaagacactgtggcgattcctcaaggatctagaaccagaaatactgtttgacccca

SEQ ID NO: 313934 - DNA, 201 bp, Homo sapiens
tgaaagacaccaacagcaattaagaaaaccttggggattcgttatttactaaacaagagtgcttactatgtcgtagacactgttagaggtacccaggtacrtaggttccaggtacataggtgtgctccaggggttgaggttgaaaaggcagaaaacagtttaaatcattatcttggggagtagggagtaggataacacctg

SEQ ID NO: 313935 - DNA, 201 bp, Homo sapiens
caaccattgtggaagacactgtggcgattcctcaaggatctagaaccagaaatactgtttgaccccacaatcccatttctgggtatatacccaaaggattrtaagtcattctactagaaaggcacatgtacacatatgtttattgcagcactatttacaatagcaaagacttggagccaaaccaggtgcccatcaataata

SEQ ID NO: 313936 - DNA, 201 bp, Homo sapiens
aaagacaccaacagcaattaagaaaaccttggggattcgttatttactaaacaagagtgcttactatgtcgtagacactgttagaggtacccaggtacatrggttccaggtacataggtgtgctccaggggttgaggttgaaaaggcagaaaacagtttaaatcattatcttggggagtagggagtaggataacacctgcc

SEQ ID NO: 313937 - DNA, 201 bp, Homo sapiens
tttttttttttttttgagacggaggagtctcactctgtcgcccaggctggagtgcagtggcaccatctcggctcactgcaagctccacctcccgggttcaygccattctcctgcttcagcctcctgagtagctgggactacaggtgcccgccaccacacccggctaattttttgtatttttagtagagacggggtttcacc

SEQ ID NO: 313938 - DNA, 201 bp, Homo sapiens
atggagaggtaggaggaccaggagagtgtagtgtcacaaaagaaagtgaggaatgtttcggggaggagggtgtaatggacagtgttgaacgctgtcaaagygtagacgaggttagaagtgtcatttgaccttggcgatgccgatgtcatgggtggttttggcaagccattttagaggagtgggggcagaagttagagtgta

SEQ ID NO: 313939 - DNA, 201 bp, Homo sapiens
gtgcatatgcatataactttaatgagtttgtgtttataatatgcttataccatcttctgttacatttgaatagaagtgggaacaagatcctgaaactttcstgatcattataaagggagcaggaggaaaggctttctgtgccgggggtgatatcagaggtaaagacttttccctttcacctgagtgctctttccccccact

SEQ ID NO: 313940 - DNA, 201 bp, Homo sapiens
agctgggactgtggaatcaaatgaagttccttttttattttgtaagatggaaggtactagaacatgtttaaaaatgattgggaatgatccaatagagaaamaagattatgttgatgatactaatggtagttaatatttactgaacacttagtgtcggacactgtgcttggatgtggattaaaataatcctaggatggatat

SEQ ID NO: 313941 - DNA, 201 bp, Homo sapiens
tgattagacttagaatgaattatgggttaatttggagggaattgacatctttgatattgaatgttcccaaccataatgtgacatagctcttcctttttttwaaaaaaaaaaaaaaaaagatagggtcttggtctgttgcccaggctggagtgcagtggcatgatcacagctcactgcagcctcaacctcctgtgcttaagt

SEQ ID NO: 313942 - DNA, 201 bp, Homo sapiens
gattagacttagaatgaattatgggttaatttggagggaattgacatctttgatattgaatgttcccaaccataatgtgacatagctcttcctttttttawaaaaaaaaaaaaaaaagatagggtcttggtctgttgcccaggctggagtgcagtggcatgatcacagctcactgcagcctcaacctcctgtgcttaagtg

SEQ ID NO: 313943 - DNA, 201 bp, Homo sapiens
gtgccaggattttgctaggattgtaaaaaaggaaaaaaggtttgagggagatgatgacattttgacaggaaagtgaccatattaaaggactggtgaaattsggctggatgaagagcaaagtgaagccagcacagatggggagaaagtcataggatctgtggacctcagtaagatcaatgatttgtagcagtggagatactt

SEQ ID NO: 313944 - DNA, 201 bp, Homo sapiens
gcaaagttgtgtatgtttttaaagaatatgttaccatctgggatatgaaaaggaagatcagtctttgaaactgataattgttttaaaaattcacataactyggccactgtttcctaatttatatataaggtaatcctgcccctacaatcatggactgcatctgataagtgcagcattgagcttgtaaactcatcctgctgc

SEQ ID NO: 313945 - DNA, 201 bp, Homo sapiens
attagacttagaatgaattatgggttaatttggagggaattgacatctttgatattgaatgttcccaaccataatgtgacatagctcttcctttttttaawaaaaaaaaaaaaaaagatagggtcttggtctgttgcccaggctggagtgcagtggcatgatcacagctcactgcagcctcaacctcctgtgcttaagtga

SEQ ID NO: 313946 - DNA, 201 bp, Homo sapiens
ttagacttagaatgaattatgggttaatttggagggaattgacatctttgatattgaatgttcccaaccataatgtgacatagctcttcctttttttaaawaaaaaaaaaaaaaagatagggtcttggtctgttgcccaggctggagtgcagtggcatgatcacagctcactgcagcctcaacctcctgtgcttaagtgat

SEQ ID NO: 313947 - DNA, 201 bp, Homo sapiens
atattggtaactgaagaaaaatgggtgccatctacagatttttaaagactggtgtgttagtctgtttgggttcctatagaagaatacctgaggctgggtawtttatttggctcacagttctgcagggtgtgcaagaaccatggcactagcatctgcttctggtgagggcttcaggtaacttccaattatagcagaagggga

SEQ ID NO: 313948 - DNA, 201 bp, Homo sapiens
agacttagaatgaattatgggttaatttggagggaattgacatctttgatattgaatgttcccaaccataatgtgacatagctcttcctttttttaaaaawaaaaaaaaaaaagatagggtcttggtctgttgcccaggctggagtgcagtggcatgatcacagctcactgcagcctcaacctcctgtgcttaagtgatca

SEQ ID NO: 313949 - DNA, 201 bp, Homo sapiens
aaactttgggcctttttccgctaaagctttggctaacttttcatgatagttctttggtgttccagaaagtcaaccagcaacctgccttgagcgtcccaaaraattgttgccaacctttgctcttgaccagtctgcttgtgctttgactggaccacttctctctcttggtagccattgtggttgtgctttatcttcaggatc

SEQ ID NO: 313950 - DNA, 201 bp, Homo sapiens
tcaacataagctccgtcaaatttaaggtacttcttttgtcagcagtgataccagtcatttagtccatccctaaataattgagggtcctgggaatttaactrtgcaaatgcagtgttttttatattggtaactgaagaaaaatgggtgccatctacagatttttaaagactggtgtgttagtctgtttgggttcctatagaa

SEQ ID NO: 313951 - DNA, 201 bp, Homo sapiens
caagaaattctagactgggctctatataataagtcagcttattcagttagctcagaaataaaaatttaggaggtgtgtatgatttgctttggaattgttcrtctacataatctaaataacttcagaaacttataaggtgtacctagttattctttcctttagttaccattaatatgcaagatttgcatttgatatgtatgt

SEQ ID NO: 313952 - DNA, 201 bp, Homo sapiens
caaatagtcattgcttatggcttagcatgtgctgtttcctttgcctggaattctcacctcccctttttcttgggatacatcaagccccaactcaagtatcrtctttgttttcaagttgaccatagctacaatagtcagaattatttgccctctcttattcatctttgctttctcagtatgtaacatagaacttgatataca

SEQ ID NO: 313953 - DNA, 201 bp, Homo sapiens
gagatggagtctcgctctgtcacccaggctggagtgcagtggtgtgatcttggctcactgcaacctccacctcctgggttcaagcagttctcctgcctcascctcccgagtagctaggattacaggcgcgtgccaccacacctggctaatttttgtatttttaatagagttgaggtttcaccatgttggtcaggctggtct

SEQ ID NO: 313954 - DNA, 201 bp, Homo sapiens
caatgaaatttgtccatgtgatgttgaccagtgctttccctctccagggcacttcagtaatcaatgttccctttcaccactcttcacgtgtagtgtttacytgtcaagagaaggtaggtttcattttgaagttacagaatgcaaaatagtgtatgattgagtggcatgtaaaaatcctttcatcactttggtcacatggaa

SEQ ID NO: 313955 - DNA, 201 bp, Homo sapiens
aaagaaaaatagaatacatataaaaattttgcaggaaaaaagtatgatagaaaaatgtgcctagtataagaatttctgtcaattcagtaagtaaaatctarcaatattagacaaaaataatggtattaacatttgtatcttctcttgacagttttaattgataaagaccagagtccaaaatggaaaccagctgatctaaaa

SEQ ID NO: 313956 - DNA, 201 bp, Homo sapiens
gacttagaatgaattatgggttaatttggagggaattgacatctttgatattgaatgttcccaaccataatgtgacatagctcttcctttttttaaaaaawaaaaaaaaaaagatagggtcttggtctgttgcccaggctggagtgcagtggcatgatcacagctcactgcagcctcaacctcctgtgcttaagtgatcaa

SEQ ID NO: 313957 - DNA, 201 bp, Homo sapiens
acccaggaggtggagcttgtagtgagctgagattgcaccactgcactccagcctgggtgacaaagtgagactgtctcaaaaacaaaaaaatatatgtatatacacacacacacacacacacacacacacacacacacacacacgttatatgctattttaactttttgaattagcaagtttttttaagcaatggaaactgat

SEQ ID NO: 313958 - DNA, 201 bp, Homo sapiens; identical to SEQ ID NO: 65404

SEQ ID NO: 313959 - DNA, 201 bp, Homo sapiens
cccaggaggtggagcttgtagtgagctgagattgcaccactgcactccagcctgggtgacaaagtgagactgtctcaaaaacaaaaaaatatatgtatatacacacacacacacacacacacacacacacacacacacacacgttatatgctattttaactttttgaattagcaagtttttttaagcaatggaaactgatt

SEQ ID NO: 313960 - DNA, 201 bp, Homo sapiens
gtggagcttgtagtgagctgagattgcaccactgcactccagcctgggtgacaaagtgagactgtctcaaaaacaaaaaaatatatgtatatacacacacacacacacacacacacacacacacacacacacacgttatatgctattttaactttttgaattagcaagtttttttaagcaatggaaactgattgtgttttt

SEQ ID NO: 313961 - DNA, 201 bp, Homo sapiens; identical to SEQ ID NO: 65407

SEQ ID NO: 313962 - DNA, 201 bp, Homo sapiens
aaaagacattaaagatcatgtcctgcacccttctcatagatgaggaaatggcagcccagaaggtattgctttatgttttctcagttcttaatctgttttaygtgaagcatttttctttcaaataattcagtaacagatctggaataaagatgccatgatatcggatacatttacatttatactcttaaaggtcctaaattg

SEQ ID NO: 313963 - DNA, 201 bp, Homo sapiens
tggagcttgtagtgagctgagattgcaccactgcactccagcctgggtgacaaagtgagactgtctcaaaaacaaaaaaatatatgtatatacacacacacacacacacacacacacacacacacacacacacgttatatgctattttaactttttgaattagcaagtttttttaagcaatggaaactgattgtgttttta

SEQ ID NO: 313964 - DNA, 201 bp, Homo sapiens
agaaaaatatttggaaaaaatataccacttcatagctaagtcttacagagaagaggatttgctaataaaacttaagttttgaaaattaagatgcaggtagwgcttctgaactaatgcccacagctccaaggaagacatgtcctatttagttattcaaatacaagttgagggcattgtgattaagcaaacaatatatttgtt

SEQ ID NO: 313965 - DNA, 201 bp, Homo sapiens
actgattgtgtttttatcttttaatatatagagccttttttctacttaaaaataaactgattcttttcagaagcttcagaagagaaactagaatgttgagttttttttttttttaaattcagtattagagatttggttgcctaaattgtacctgttactcaaaatttcaccttagtggaagtgtttggattctttttgaag

SEQ ID NO: 313966 - DNA, 201 bp, Homo sapiens
ccgttttgcaatacaactgtaaatcttcatgcattatctggtctattttaatggtgaccgccttactagtcaagaaaaaactggaaataaatgcccatatkccagccctctgtacctctgagatagtaaagcttaatacagaattaaaactgaaactttctaccttgcagactaagtttctgttatttttaagatttattg

SEQ ID NO: 313967 - DNA, 201 bp, Homo sapiens
actatttgttactgtttgtgtacctttaagtggatattatacatcaagagagtttaaaaaaaaaaaaagaaagaaaaaagaaagaaagcccgtgtggcttrctggaggggaagtgagaaagtggggaatggtagactataaaatcaggaaggtagaaggggaccagatcatatgggaccatatcagccatgataatatttt

SEQ ID NO: 313968 - DNA, 201 bp, Homo sapiens
agtctgtactctaaatttgatgtttgtactttattgttactttatatctcatcttcccaactgtattagatggtctggaaagggcaaggattatcctacctttttttttttttggccttctcgtaacaactaggaatatacagttatagagaaatttttaaacaattataccctaaataataaacatcttgtatagccttt

SEQ ID NO: 313969 - DNA, 201 bp, Homo sapiens
gactataaaatcaggaaggtagaaggggaccagatcatatgggaccatatcagccatgataatattttagtgtgaagggaagtcactggagacttctgggygggagaatgacgtgatatgttttacattttaataagcgtgctttgactggtatagagatgatagattgtggcaagaatagaagcaagatacaccagcctg

SEQ ID NO: 313970 - DNA, 201 bp, Homo sapiens
gtaaagcttaatacagaattaaaactgaaactttctaccttgcagactaagtttctgttatttttaagatttattggattgctctttgtaaaaggtacccmtacttgttttcttgtatagttatatcactgggcttaattcaatgcaataaacactaatgtcatggcttctataaactgttatctctaagatggctttagg

SEQ ID NO: 313971 - DNA, 201 bp, Homo sapiens
aagatattggagtaaagagcatccttgtaataaagtgacaaagaacctggctggatgtgtccatgtctgagggctttatggaattcaggaatttagagccrtgaattagaatgcctggaagaagatctatctaatccgcaaagcattcaggctgctgcatggctacttttaatagcttacataaagctgtgagagggaaaa

SEQ ID NO: 313972 - DNA, 201 bp, Homo sapiens
ggctgcttacaagtaacctataatagattctttgatgtaagatagaaaaattagttacgaatctgccattagggttttataccccattcgaaatggttcascgtattcctagtatcttcaagtgaagtggcttgactattctgaaccttcatctttattgaaaggctttaaaattggctcttaatgattcttatgtcagtg

SEQ ID NO: 313973 - DNA, 201 bp, Homo sapiens
atgggagaaagaccctcaaggcatttccgagacctttgagcctccctttctcatcacaggcccagagctctggcacaaatggttttgggtgatggacttgkgcctccccctataagcttaccgcccggggctgcttgggcctctgctcccagaattccagcacagtgctcctcagttgtccccgctatggctcaagtgccc

SEQ ID NO: 313974 - DNA, 201 bp, Homo sapiens
attctgaaccttcatctttattgaaaggctttaaaattggctcttaatgattcttatgtcagtggtctcttattctgatagtttttcattaataacttttwgctcaaatcttgatgtcttttctttaattcactattatcagccaatgctaaaataaaacatactctatgtaatataagataacaaatggaatcaatgaat

SEQ ID NO: 313975 - DNA, 201 bp, Homo sapiens
gaggcatttcccccttgctaagttgaacatttttagaggaaggttatataccagttaaactctgcaattttgcatctaaatgcacatgcttgggcccactygcccagctcctgagatcttaatgggaagcggctgatcacgagcttcaggtgttttctgtctactgggagactgcctttccctgctgccagctgcgaccag

SEQ ID NO: 313976 - DNA, 201 bp, Homo sapiens
ttctgaaccttcatctttattgaaaggctttaaaattggctcttaatgattcttatgtcagtggtctcttattctgatagtttttcattaataactttttrctcaaatcttgatgtcttttctttaattcactattatcagccaatgctaaaataaaacatactctatgtaatataagataacaaatggaatcaatgaatc

SEQ ID NO: 313977 - DNA, 201 bp, Homo sapiens
tctgaaccttcatctttattgaaaggctttaaaattggctcttaatgattcttatgtcagtggtctcttattctgatagtttttcattaataactttttgstcaaatcttgatgtcttttctttaattcactattatcagccaatgctaaaataaaacatactctatgtaatataagataacaaatggaatcaatgaatca

SEQ ID NO: 313978 - DNA, 201 bp, Homo sapiens
gcaggggtggctgcttcacttccatttccaacattcgtgtagatttctcttttgactaacttacagccattcagacagacatgtgtctgatctttgacaarcctgactaatggagcaatgacagaaggattccttattcaataaatggtgctgggataactggctagccagatgcagagaatggaaaccggaccccttgct

SEQ ID NO: 313979 - DNA, 201 bp, Homo sapiens
ctatatacctcttttggtaccagtaccatgctgttttggttactttaaatatctttataattatcagtctttgaaaattaatattgggctactctgggcaygctgcctatgggttagccctgctccacaaggagcagttaaaaaaaattgctttttgtctagaatagtaatatctggaaatatgggagcaagtgctgattc

SEQ ID NO: 313980 - DNA, 201 bp, Homo sapiens
aaataaggttggatagctaaggtgaagccttgtttctgttgcctcaaaagtcagtcagtttgaagggaatgttctagaccactgttgtttaatacagatasaatgtgagctgcacatgtaatttaactttttttttgagacgaagttttgctcttgttgcccaggctggagtgcaatggcgcaatctcggccactacaacc

SEQ ID NO: 313981 - DNA, 201 bp, Homo sapiens
tataaaaaacaaaatttatttctcatggttctggaggctggggagttcaagatcaaggggccagcggatttggtgtctggtgatggccagcttcctggttmatagacagccttgttggccatcttatctctctgtcctcttgtggtagaaggggtgaagaagctctccagggtttcttttataagggcgttaatctcattc

SEQ ID NO: 313982 - DNA, 201 bp, Homo sapiens
ttacctctcaaaggtcccactcttatgccatcaccttggaggttaggatttcaacatacaaattttggaaggatgcaagcattcagtctgtagtactatayaagctaatagttagcttcttaatatttcatgggtgctagcagaagacgtgacactcttggattagaaaaaatagaattttttatgagtggcacagcgagc

SEQ ID NO: 313983 - DNA, 201 bp, Homo sapiens
ggcctcagccaggccgccgcccccggctttcccgcgggaccgcggcgtggaaacgcgcgctgccgcctcggggctcccgggacgcgcgggccccccacgcytgcccgagccgggcgtccgcgacgtcacaagtggagcgcgatgattcagagggagggccaggaagggaagggctctggggtcagcttggccacggctgct

SEQ ID NO: 313984 - DNA, 201 bp, Homo sapiens
tcgttcttgccccgcccttccccgtcgcgtagcggaaacggtcgctctggcttcctggaggacttgtcatctgtgcccggcggcgcaggacggcggtgggyggggctcacgcgaggcgctggaacggtccgggagattctcgctctgctgctttagcttcggagtgtttggcgatggggcagcgcgagatgtggaggctca

SEQ ID NO: 313985 - DNA, 201 bp, Homo sapiens
gatttttcatagtgtctagtttttactgtgagggatggttaagggaattggacatggttaacctgaaaaaaattacttggagaactcaatgagtgtcagawaaataaaaggctgtgagtggaaccatcagtggaaccatcagaatattctgttttttaagaccttttgttttgcaaaagcagctttttcttaccctaacaa

SEQ ID NO: 313986 - DNA, 201 bp, Homo sapiens
gcaactctgatgcaacagaggttagggttactaaaacagctggaatttataagatagagttcaagattgggaagagaggcagaaatctgcatgagacttgkcaagggtactgggatgtgcatgtccaggataaggatctgcaaagtgttagcaaacgattacttcctctaggacttaagagttgaacagtgacaccagaag

SEQ ID NO: 313987 - DNA, 201 bp, Homo sapiens
gatgaaataattttattaagatttttggagaaacttctgagttcagcttcgtttggtatacttcttcccacccacctatgtaatttaaatctctttttttwaaaaaaaactggaagatatgaaaggagctttctttaagaatgaaatatcagtaacacagcaggagctgagagaggaaaaatagagggaaatttcccttgg

SEQ ID NO: 313988 - DNA, 201 bp, Homo sapiens
cctctaggacttaagagttgaacagtgacaccagaagttatacagtacttagaatccttggaattgcagcctgagtggagcaatctcattgaacactttcrtatttagttactactcaagaaatgcgacaccttaggaatcagtagtataccctaaacaaggtttggcaagtgttttcttaaagggctatgacttaggctt

SEQ ID NO: 313989 - DNA, 201 bp, Homo sapiens
atgaaataattttattaagatttttggagaaacttctgagttcagcttcgtttggtatacttcttcccacccacctatgtaatttaaatctcttttttttwaaaaaaactggaagatatgaaaggagctttctttaagaatgaaatatcagtaacacagcaggagctgagagaggaaaaatagagggaaatttcccttgga

SEQ ID NO: 313990 - DNA, 201 bp, Homo sapiens
cacaagacaccatatatgctcatgccttaaacttggacttcccagcctccagaaccatgagaaataaatctgtgtgactgattgataaacacccagtcttmtaaatactccatactagtctctggtattttgttataccatcctgaatggactaagacacatagggtctatgttacaactactcagctctgctattatagc

SEQ ID NO: 313991 - DNA, 201 bp, Homo sapiens
ccccattaaggtattgcattctgggaaatttttgacttgcaggagtatagatattcttggcaactttgacaaacttacagattctgagatctacagggagtttttttttttcccttggccatttcctttggccatattggtcaggttttgggttcctttcatttgtaatatgaaaccaccctaggttcaaggtcaagtagc

SEQ ID NO: 313992 - DNA, 201 bp, Homo sapiens
tgaactaataaatacagtaaagctgtaggatataaaatcaacacataaaaatcagcatttctatacactaacaacaaactatttgaaaaataagaaaacartttcatttacaaaagcatcaaaaagaataaaatacttagaaataaatttaaccaagtaggtaaaatctgtatggcgaaacgacatccctacaaaaataac

SEQ ID NO: 313993 - DNA, 201 bp, Homo sapiens
tatccttcacccactttttgatttttttttcttgtaaatttgtttcagttccttgtagattctggatattagacctttgtcagatggatagcttgcaaaarttttctctcattccataggttgcctgttcacgttgatgacagtttcttttgctgtgcagaagctctttagtttgattagatcccatttgtcaattttggc

SEQ ID NO: 313994 - DNA, 201 bp, Homo sapiens
tggaataaaaatgaatacgtagaccactggaaaagaatagcaagcccagagacaaatccatatatttgcagttaagtgattttcaagaaagatgccaagartacataatggtgaaaggacagtctcttcaataaatgatgtcagaaaaactggatatccatatgcagaaaaatgaaattagacccatacctcatattatat

SEQ ID NO: 313995 - DNA, 201 bp, Homo sapiens
tgggggttggggagggacaattagaaaaccaacatatgaaaaagccttccatgtgaaaaattacctgaaagaaaatggactaaaaataacaattgaaaggyagagatgatcagactagtttaaaaatccaaaccacacatacatagtcttttcaacgagtgctggaacaaacaaatcatccatatgccaaaaaaaaaaaaa

SEQ ID NO: 313996 - DNA, 201 bp, Homo sapiens
actaatcttggccaggtacagtggctcctgcctgtaatcccagcattttgggaggccgaggcatttgggtcacttgaggtcaggagtttgagaccagcctrgccaacatggtgaaaccccatctctactaaaaaaacaaaaactagcctggtgtggtggtgggcgcctgaagtctcagctgctcgggaggctgaggcagga

SEQ ID NO: 313997 - DNA, 201 bp, Homo sapiens
agtacttctaatatacaaaacattgtgtcatcaaatactttactgacttctatagaaatgagacatgaaggttttgaaaaatacccaagttagcacagttyatagcaagtcttttgtgatattgattgcagtgtatagtacttagtttaataatgtttgtaatgtatattcaagctccagagagaaatggtttgtgtgatc

SEQ ID NO: 313998 - DNA, 201 bp, Homo sapiens
ttggccaggtacagtggctcctgcctgtaatcccagcattttgggaggccgaggcatttgggtcacttgaggtcaggagtttgagaccagcctggccaacrtggtgaaaccccatctctactaaaaaaacaaaaactagcctggtgtggtggtgggcgcctgaagtctcagctgctcgggaggctgaggcaggaaaattgc

SEQ ID NO: 313999 - DNA, 201 bp, Homo sapiens
aattaaattagaaaatttatgttacatgcttagcccagtaactgacaaatagtaaacactcaaaatttaactattattaataattttaatgcagttttatrtttttagaggttgccggatttttcattgagagtctcttgtatgttacaaaggatggccctttttatcctcatatctgtaacattcttctgttttgggtaa

SEQ ID NO: 314000 - DNA, 201 bp, Homo sapiens
agctggacacagttcttaaacccttcacaaaattaatttgaaatggatcatagacctaaatataaaataggactcctagaagataacataggagacaatcyagataaccttgggtttggcgacaaccttttagattcagtgccaaaggcatgatgtgttaaagaaataattgataagttggacttcactaaaaaactgctc

SEQ ID NO: 314001 - DNA, 201 bp, Homo sapiens
atatgcttgcgaacgtactatttgttactgtttgtgtacctttaagtggatattatacatcaagagagtttaaaaaaaaaaaaagaaagaaaaaagaaagaaagcccgtgtggcttgctggaggggaagtgagaaagtggggaatggtagactataaaatcaggaaggtagaaggggaccagatcatatgggaccatatca

SEQ ID NO: 314002 - DNA, 201 bp, Homo sapiens
agcttcccaaagtactgagattatagccatgagcactgcacctggcccttccacaagtcttcttgtacaactgagagtagctatcttccagtagcctggcrgaagagtagatacttactccttagagaaaccaaatcaggcaggtctagctgacagtagagactgatgaagtactgtactgatgagaggtgagatatacta

SEQ ID NO: 314003 - DNA, 201 bp, Homo sapiens
aaagaacttttaaaagtcaacaatacaaatatgaacaagctaattgaaaaatgggcaaaagatctggacagacacctcacggaagtcttcttacatatagrtggcacataaacgtatggaaaagtgttcaacatcatgtcattcaggaattgtaaatttaaacagtgagataatggcaaaagcaacagaactctcattcac

SEQ ID NO: 314004 - DNA, 201 bp, Homo sapiens
tgaatctgtataaaattagctaatacaataaaacttgaagactttggagcctttttagtctagcaaagaagtatcagctaagattaatggttaaataaaatgtaaaatcaaatttcagaagttaagagggctgcttacaagtaacctataatagattctttgatgtaagatagaaaaattagttacgaatctgccattagg

SEQ ID NO: 314005 - DNA, 201 bp, Homo sapiens
atagacgttgaaattcatggaccccttaataacacatcttgcctgatcatcttataatgtaacacaattgagaatcccataacttgcaactgacattagaygcaaagcttcctaattttagtgctttgcatagaaaaacaaatattcctaggccaaaacaaacaacaaaggcactggaaggaaacagttaatgcaagaaga

SEQ ID NO: 314006 - DNA, 201 bp, Homo sapiens
gctttagatttgaattcgattctactttactggaattcctaaagagacaattatgtcattcacaagtaagagcagttttactttttcctttcctttttctratctggataccttttatttctttctcttgccctattgcgtagaatagaacttccaatacaatgttgaatagaagtggtgagagtggacattttttccttg

SEQ ID NO: 314007 - DNA, 201 bp, Homo sapiens
aacaacaaaggcactggaaggaaacagttaatgcaagaagaaggaaacttagacaaataccaatctataactgttaacttaagaggaaaatattttacctsttaaacaacaacagatgttataaaggtaattcaaagaataatataggcatgcctcagagaatctgaatttggttccacaccatggcaataaagctagtca

SEQ ID NO: 314008 - DNA, 201 bp, Homo sapiens
ttatcaaagagttctactaaatgtataggagttagtttgtagggaagtcatcttagacttattcagcatttttctcaagtgatttggtgaccactgatagygttttgatcaagttgatttagaactaagaaaaacaagttaaattaggaaaaagaatatggatgaaaaaacaacccttagagtttagagtgatctgctcaa

SEQ ID NO: 314009 - DNA, 201 bp, Homo sapiens
ctagttaaacatgattgaatacatgctgcctcctaaaacaccattcaaaattgtaataagtgaataagaaaaggcataaacccacaaagacaagtagaacrgaagaggagacagtggcagacatgagatgttagtattttggaagcttgaaatcagcaggatgagtgctgctaacttaaaccaaagaactctgaaagccaa

SEQ ID NO: 314010 - DNA, 201 bp, Homo sapiens
catggggaggggaagtgattaaaaaactggcagttggtgaatattatagtttgtaaatataaataaatgtactaaggatttatttactttaaagcgtggcrgaagaatcagtgcttcacagttgttagtatagccagctaataagatgacttctttcctgtgcagctgcatagctgtcttcccactgctggttaacttcag

SEQ ID NO: 314011 - DNA, 201 bp, Homo sapiens
aataatttgtggcaattttggttaaaattaattaaaaataaaataaaatttatatgtaggtctttggttccaagtactcaataggctgagaaacaaaagtytctatttctccttcttaatttcttccatctttatccattcctttgaaggctacatttgctgtgtgggaatacctgttcattcaacttaagtcaaaatttc

SEQ ID NO: 314012 - DNA, 201 bp, Homo sapiens
aagctgtaaataagtctgctgtctgtcccagaggaagacattaccttcttcttcatggtggctcacagcaaaaaccttcttcttcgtggagtctacagcaraagacctttttcttcatggtggctaccttgaaaatgacccaggcaaggagtggtcaggcccttgggttcatggcatacctattcataggacacccagcag

SEQ ID NO: 314013 - DNA, 201 bp, Homo sapiens
tatcatgcagacttgctaaactcacttattagttttagttgctttagatttgaattcgattctactttactggaattcctaaagagacaattatgtcattyacaagtaagagcagttttactttttcctttcctttttctaatctggataccttttatttctttctcttgccctattgcgtagaatagaacttccaataca

SEQ ID NO: 314014 - DNA, 201 bp, Homo sapiens
gggcccggccgggggcggcctcgctgccggggcagggacctcgcaggccggcgcgcagaggcgaggaaccctcccggcgccatcgactcacctacccgcgragaggcgacggcgcgcgccgctcaccagcccgggccccagatccaaggaggaggggcagcggcgcggggaccctgtggtgggtgtcgtaaggaggaaaac

SEQ ID NO: 314015 - DNA, 201 bp, Homo sapiens
gtgaaactgtcactgctgatgacatgctcttatatatatatggaaaactccaacagctccagtaaaaaactgtttgaactaataaatacagtaaagctgtrggatataaaatcaacacataaaaatcagcatttctatacactaacaacaaactatttgaaaaataagaaaacaatttcatttacaaaagcatcaaaaaga

SEQ ID NO: 314016 - DNA, 201 bp, Homo sapiens
aaactatttgaaaaataagaaaacaatttcatttacaaaagcatcaaaaagaataaaatacttagaaataaatttaaccaagtaggtaaaatctgtatggygaaacgacatccctacaaaaataacaaaagatagctggacatggtggcgtgtgcctgtggttccagctgctcaggaggtggagataaaaggatggcttga

SEQ ID NO: 314017 - DNA, 201 bp, Homo sapiens
tatcagccaatgctaaaataaaacatactctatgtaatataagataacaaatggaatcaatgaatcagttaccccgcatggatctgtagcttctatgtgargtaatatggggtttttaagtttctttttccatagagttcaggaggtggagagggccctctgtagagaatttggtctgttaggttgttcctttgtaaagga

SEQ ID NO: 314018 - DNA, 201 bp, Homo sapiens
gacttcttgcaggtggtctacattctgtgcatccatgcatcccgcagttggccttggccaaaggagtaactctgagacttccatgcttatgtccttggggkggggaccaatgagctcactgtgggtcagagaaccttgctctggcttggcaaggcacattggcgtcaaacacactcttcactcaaaagaccattttgtaaa

SEQ ID NO: 314019 - DNA, 201 bp, Homo sapiens
gtatatattcttatatataaaatatatatcagataaatagacacatttgttcatatataagaaatacatagggaaaaaaatcgtaggttacttaccaaatkgataatagctatgtgtctctgtggaggaagagaatgaccagacaagaatgggggtgtgatcagactttatgtgtaaatgtttaataaaggggaatatagt

SEQ ID NO: 314020 - DNA, 201 bp, Homo sapiens
tctctagggagttggtctctcagtccatgggcaatttcgagtggctacagaaaagtgtctttttgctatgccagaaactgcaataggtaaacaaccagaawtttttttataattacttttagcatcatcttcttttgatatgtttcagagtttactgttgttgaaggaattgatggactcttgtgtgagatgcaacaatga

SEQ ID NO: 314021 - DNA, 201 bp, Homo sapiens
ccagaaactgcaataggtaaacaaccagaattttttttataattacttttagcatcatcttcttttgatatgtttcagagtttactgttgttgaaggaatygatggactcttgtgtgagatgcaacaatgaaaggattttaaaaaagaaattaaataggaagatactttgaagtctatattagctcaatgattatatctga

SEQ ID NO: 314022 - DNA, 201 bp, Homo sapiens
tgcaaatcaaaacctcaatgagataccatctcacgcagtcagcatggcgattattaaaaagtcaggcaacaacagatgctggtgaggctgcggagaaataagaacgcttttacgctgttggtgggagtgtaaattcaaccattgtggaagacactgtggcgattcctcaaggatctagaaccagaaatactgtttgacccc

SEQ ID NO: 314023 - DNA, 201 bp, Homo sapiens
acctgagactgggtaatttatgaagaaaagaggtttaattggctcacagttccacaggctgtacaggaagcatgattggggaggtctccagaaatttacartcgtggccaaagatgaaggggaagcaagtgcatcttcacgtggctggcaggagagtgaagggagaagtactgcacactttaaaacaaccagatatcatga

SEQ ID NO: 314024 - DNA, 201 bp, Homo sapiens
gtgcatcttcacgtggctggcaggagagtgaagggagaagtactgcacactttaaaacaaccagatatcatgagaactcactcattattatgagaacagcwagggggaaatctgcccccatgacccaatcaccttccaccaggcccctcattcgacactggggattacaattcaacatgagatttgaatggggacacagag

SEQ ID NO: 314025 - DNA, 201 bp, Homo sapiens
ttatttttttaaatccccttttaatggttagtattttcctgcatctttagatagctggtaattttttattgaattgtacatattgtaaactttactttgtygggtgctggatatttttgtattcttttaagtatttttgagatttcttctgagatgaatttaaattcctgggaaacatcttaatattttcaagtgttgtaa

SEQ ID NO: 314026 - DNA, 201 bp, Homo sapiens
atagaggagagagaaaataacccagaataaggacacccagaaattatccccatttaatctcaattttctttcagagaggtcatgactttcatgaaggcgtwagagctggtaagtggcaaatgggaacttaccattttggggaaatgggatttgtgagcatatgctgttaattaaagaagatacagattatgcatcccaaat

SEQ ID NO: 314027 - DNA, 201 bp, Homo sapiens
tttgtattcttttaagtatttttgagatttcttctgagatgaatttaaattcctgggaaacatcttaatattttcaagtgttgtaagatttattattattrtttttttttttttttgcagaattggagcagtggtccaactagggctaattatttcccactactggggcaagatcttgctttgtgttctgcacagtgcccc

SEQ ID NO: 314028 - DNA, 201 bp, Homo sapiens
gtattcttttaagtatttttgagatttcttctgagatgaatttaaattcctgggaaacatcttaatattttcaagtgttgtaagatttattattattattwttttttttttttgcagaattggagcagtggtccaactagggctaattatttcccactactggggcaagatcttgctttgtgttctgcacagtgccccatg

SEQ ID NO: 314029 - DNA, 201 bp, Homo sapiens
aatgccatttgcaatagcatcaaaaacatgaacacttagggataaatttaacaaagcatatgaaggaaaactgcattttgtattgtgtacgttgtacgtgraaaatacaaaatgttactgagaaaaagtaaagaacctaaacaaacagacaaatgctgttcatgatctgaaagacaatattcttagtcctccccaaattaa

SEQ ID NO: 314030 - DNA, 201 bp, Homo sapiens
ggagataaaaggatggcttgagccctgaaagtagaggctgcagtgagctgagatcatgccactgcactgtagcctgggcaatagagccagaccatgtcagycagacagacacacacacacacacacacacacacacacacacacacacacacacacatctgtatactgaaaactacaaaactttgatgaaaaaaattgaag

SEQ ID NO: 314031 - DNA, 201 bp, Homo sapiens
tagatacatgaaaatttgtgttcacataaaaaaattgtatgctggctggggacggtggcgcatgcctgtaatcccagtattttgggaggccttggtgggtrgatcacctgaggtcaggagtttgagaccagcctggccaacatggtgaaactctgtctctactgaaaatacaagaaagttagcagggcatagtggtgcaca

SEQ ID NO: 314032 - DNA, 201 bp, Homo sapiens
ataaaaggatggcttgagccctgaaagtagaggctgcagtgagctgagatcatgccactgcactgtagcctgggcaatagagccagaccatgtcagtcagmcagacacacacacacacacacacacacacacacacacacacacacacacacatctgtatactgaaaactacaaaactttgatgaaaaaaattgaagaaga

SEQ ID NO: 314033 - DNA, 201 bp, Homo sapiens
ttaaagaattccttggctgtttcttaaaaagttaaccacacacttaccctgtgaaccagccatttcatttctagatatttatctaagacaaatggaaacayaggtattttaaaaatctgtataccaatatccatagcctctttattcacaatagtcaaagctggaaacaacccaaatgtccatcagtaggcaaatcaaatg

SEQ ID NO: 314034 - DNA, 201 bp, Homo sapiens
tttgccctagagcaattgaaggtaatattggaatcctttctgccctgagtgaacatagtgaagtccggtgacagggaagcctctctaagggggtattagtrctccattggtggtgacatagcccatgcattgtgttttcttttttcccaaatttaggtgagcttcagaaatcagttccactaaccctgacctaaatccaag

SEQ ID NO: 314035 - DNA, 201 bp, Homo sapiens
ttggaactatgagtcaattaaacctctttcctttataaattactcagtctcgggtagtgtgaaaactgactaatcatgtagtttcttgacacacacacacwctctctctctctctctctctccattcctaagctaagtacttaaaagagacaccctgcagatctccagagctttctctctgcagctctctccgctctggta

SEQ ID NO: 314036 - DNA, 201 bp, Homo sapiens
aagaaaccaggaaaaaatgaagacaaaaacaatgggcatacccaacagcatgtaaaaataaatgtgaccccattaaaacaggaaagaaatcccataaggakagagcaaactcagatgaaagggctacaagttgaaaaagggaaacaggaaacagggaggatgactgggaactaatacacagtagcaaagctgacattttat

SEQ ID NO: 314037 - DNA, 201 bp, Homo sapiens
tagtagagacggggtttcactgtgttggccaggctggtcttgaactcctgacctcaggtgatctgcctgtcttggcctcccaaagtgctgagattacaggygtgagccaccgcgcctagccttatatgctattttcagttgttacccgtagataatttttaaatactgatggttaagaaaagggtaaatgcaaatgatttt

SEQ ID NO: 314038 - DNA, 201 bp, Homo sapiens
taagggggtattagtgctccattggtggtgacatagcccatgcattgtgttttcttttttcccaaatttaggtgagcttcagaaatcagttccactaaccytgacctaaatccaagtgccgtgtctacctgctggtcgttgagggcaaagccaatctagttttatgtcctttgaatgtaacagaggactttagtaagcatg

SEQ ID NO: 314039 - DNA, 201 bp, Homo sapiens
gggaagggattctactagcaagggtgatctgtacctctgcttggcagaaactgagcgtgggttggttgtgctttaacctggggaaaaggaaagctctctgmaaaaagtactgcagagtaagaggaagggaaagaatctgaagcattgaaggaagagctgccctgtgaatgtgaaagaaaccaggaaaaaatgaagacaaaa

SEQ ID NO: 314040 - DNA, 201 bp, Homo sapiens
gtttcactgtgttggccaggctggtcttgaactcctgacctcaggtgatctgcctgtcttggcctcccaaagtgctgagattacaggtgtgagccaccgcrcctagccttatatgctattttcagttgttacccgtagataatttttaaatactgatggttaagaaaagggtaaatgcaaatgattttattaggtataaac

SEQ ID NO: 314041 - DNA, 201 bp, Homo sapiens
tggcagtttcttacaaagttaaacataaactcaccaagacccaacagccccactctgcgagatttatccaaaaaagtgtaaacacgagtccacacaaatgmttatatttacatgttcattggaactttgttcataatagccaaaatctagaaacagctgaatgcatattaattactgaataaacttattgtgatatattta

SEQ ID NO: 314042 - DNA, 201 bp, Homo sapiens
aaaacaatacaaagaaaatactcaaagaattgaaaggaggaagagcttacctgtaagaaaggactagaagcttttttatgaaggttgcagtacagccggcyttaaggtgagtattatcaggaaaaggtattgtcaggtaaaggaaacatttaatgaaatcacaggggcaagaaagcattagctatgctctgggaacagtaa

SEQ ID NO: 314043 - DNA, 201 bp, Homo sapiens
ttgagggtcgtgattaactcagtatcctaccactggaggctatatgagtaaacaacaaactgttctcataaatgcagaatgttggcaaactgacaaactgygtatgccacccataaggaatgctgagggcagtcatgtcccaagtgcaatgtttcttgagattcggtacatctgaagcctgttagtaataatatgaacctg

SEQ ID NO: 314044 - DNA, 201 bp, Homo sapiens
ttactgggtatatacccataggattataaatcattctactgtaaagacacacgcacatgtatgtttattgcagcactatttacaatagcaaagacttggartcaacccaaatgcctgacaatgagagactggataaagaaaatgtggcatatatacgccatggaataccatgcagctgtaaaaaaagaatgagttcatgtc

SEQ ID NO: 314045 - DNA, 201 bp, Homo sapiens
gccacccataaggaatgctgagggcagtcatgtcccaagtgcaatgtttcttgagattcggtacatctgaagcctgttagtaataatatgaacctgtgatyaattaagcagctgaccaatcattacctcttcctccttgctcttgttacccaataaatacgaagggctgtagaagctcaggcactgcctttgctcactaga

SEQ ID NO: 314046 - DNA, 201 bp, Homo sapiens
gattataaatcattctactgtaaagacacacgcacatgtatgtttattgcagcactatttacaatagcaaagacttggaatcaacccaaatgcctgacaakgagagactggataaagaaaatgtggcatatatacgccatggaataccatgcagctgtaaaaaaagaatgagttcatgtcctttgcagggacatggatgaa

SEQ ID NO: 314047 - DNA, 201 bp, Homo sapiens
acttgtgtgccctcctactcactacctcttctccagaatacataaccattatactggcttctcacaccatacgttttgtttgaggtttttttttttttagrgtcttgctctgtcacccaggctggagtgatcttggctcactgcagcctccacctcccaagttgaagcaattctcctgcctcagcctcccgagtaactggg

SEQ ID NO: 314048 - DNA, 201 bp, Homo sapiens
acaccatacgttttgtttgaggtttttttttttttagagtcttgctctgtcacccaggctggagtgatcttggctcactgcagcctccacctcccaagttsaagcaattctcctgcctcagcctcccgagtaactgggattacaggtgcccgccaccatacctgctaatttttatattttttagtagagatggggtttcac

SEQ ID NO: 314049 - DNA, 201 bp, Homo sapiens
aataggtaggacataggtaggtagggcccaggtaggtagagcctaggtaggtaggtagtatgaggccaaaaggtggaatttttgaaattccacctgttcartgttttaaggaacttaactatttggaatacaggaagttccccctttgttctagtagaaccaccctaaataaggaccgggaattgcttagatcttgcacat

SEQ ID NO: 314050 - DNA, 201 bp, Homo sapiens
atatatttatcgtccatgtgggtagtctttcttatgaagttcctgttaaatctttatgattaatttgtaggaatcctcctggatgtaaatcctttgtctgrtaatacatattgcatatattatcctctgtattcatctcttttcacactgctgataaagatgtaccccagaccaggcaatttacaaaagaaagagatttaa

SEQ ID NO: 314051 - DNA, 201 bp, Homo sapiens
aaattcattattttggacttttgctacctgtcaatttaactgttacgtttttacggacttgttaaaaaagtgattagatagactgttttagattttccttaaaaaaaaaaaatccagccatataagatgcttctaatagtagtgtctcttagtttagttttattttctgtgcactatttgcccttgtagaaaacattgttt

SEQ ID NO: 314052 - DNA, 201 bp, Homo sapiens
taatttgtaggaatcctcctggatgtaaatcctttgtctgataatacatattgcatatattatcctctgtattcatctcttttcacactgctgataaagaygtaccccagaccaggcaatttacaaaagaaagagatttaatggacttatatttcattgaggctggggaggcctcaaaattatggcagaaggcaaggagga

SEQ ID NO: 314053 - DNA, 201 bp, Homo sapiens
cattaatctggtcaataattttttggctttgacgccaaaagctcaggcaacaaaaacaaaaatatacgattgttgtcgtatatacacatgttgttgaatcyatccaacatccaggctacactgatgcaaggggtggctcccaaggtctgtgcatagacaaatagaattacattatgtaaaacgcttctagaatcacagcaa

SEQ ID NO: 314054 - DNA, 201 bp, Homo sapiens
gtaggagtttgactacattcacatgctttttccatttttgttcaaatgttatgcttgtccatattaacattgtttatagtagattgtattactatatgaakatgattgtttaataataacgcagttaaaaaacagtgaatgtcagagtgctcgggacaccataaatataaggcacagaagggttaagatagcataccacac

SEQ ID NO: 314055 - DNA, 201 bp, Homo sapiens
tccctccaaaatttgtatgttggagcctaataccaaatgtgatggtattaagaggtggggctttttgggaagtggtaagtcgtgagcaccccactgtcacrggattagtactcttataaaagaggttgaagggagtcaactaggcgtctttgcccttttccttccttgtgccatgtgtggacacacagaactcatgcaaaa

SEQ ID NO: 314056 - DNA, 201 bp, Homo sapiens
aacttaagaaattttgtcataaagttattctttgtttatacagagaatgtccaagcacacagatgcagcagaagaggtgctattggaaaaaaaaggttgcrcgggagtcataacactaaacagaccaaagttcctcaatgcactgactcttaatatgattcggcagatttatccacagctaaaggtttgtaattttcttat

SEQ ID NO: 314057 - DNA, 201 bp, Homo sapiens
ctgatattaagcagttctgttggtcttataacctgactatctggccatgttgacttgccattcttcaaatatgacatgctctcacatatttccataacttktcctatgcttcccactattcaagatcccaaagcaaccatcttctatgtacttatttatagcatttatcctgttgctatatatatatatatatatatatat

SEQ ID NO: 314058 - DNA, 201 bp, Homo sapiens
acaagcaggcattggctattgaagcaggggcctagtatcctgtttcttctgtagtttgctgacctatgccgattcaagacactttgtcccggaaatggacyactgtatgcgttattttctatactccatgaatatgattggtttgtaaggtgtgtattgattttatttaagtgtaattgctgtttgcttagccaattggca

SEQ ID NO: 314059 - DNA, 201 bp, Homo sapiens
tacacatttcttgcatagctaaagatccaagtcccaataatttatcaaattttctagaacagtctgtgttctctctctctctttttttttaattatacttkaagttctagggtacatgtgcacaacctgtagctttgttacttttgtatatgtgccatgttgctgtgctgcacccattaactcatcatttacattaggtat

SEQ ID NO: 314060 - DNA, 201 bp, Homo sapiens
ccaagtcccaataatttatcaaattttctagaacagtctgtgttctctctctctctttttttttaattatactttaagttctagggtacatgtgcacaacstgtagctttgttacttttgtatatgtgccatgttgctgtgctgcacccattaactcatcatttacattaggtatatctcctaatgctatccctcccccct

SEQ ID NO: 314061 - DNA, 201 bp, Homo sapiens
cctttattccttcttctccttttcttctcctctccctctctcccttccttcctccgtctcataccccctttatttctcccttctcaccagcttcctatacyggctagcactgccagcaaaatgttcagtagaggtgatgatagctatctttgtcttattcccagtcttaaggggaaagcttttaagaacattaaaaatgtt

SEQ ID NO: 314062 - DNA, 201 bp, Homo sapiens
tgctgtgctgcacccattaactcatcatttacattaggtatatctcctaatgctatccctcccccctccccccaccccacaacagtccctggtgtgtggtrttccccgctctgtgtccaaatgttctcattgttcaattcccacctatgagtgagaacatgtggtatttggttttctgtccttgcgataatttgctgagaa

SEQ ID NO: 314063 - DNA, 201 bp, Homo sapiens
cggtaattactgttttgaatgagagttggattttatcatgcttattttgctgcgtctattgagatgatcatatgatttttgccctttattaatgtaaattrcagtaatttttgatgatcaaatgtttttaattttgaggaagtctgatttatctttttctcttttatcagtattgatttctgtgtcctaagaaaacttcag

SEQ ID NO: 314064 - DNA, 201 bp, Homo sapiens
tgcgtctattgagatgatcatatgatttttgccctttattaatgtaaattacagtaatttttgatgatcaaatgtttttaattttgaggaagtctgatttrtctttttctcttttatcagtattgatttctgtgtcctaagaaaacttcagctacttgcagaatatcttcctgtgctttcttctggaagatttctagttac

SEQ ID NO: 314065 - DNA, 201 bp, Homo sapiens
tggttccaagtctttgctattgtgaatagtgccacaataaacatatgtgtgcatgtgtctttatggcagcatgatttatactcctttgggtacatactcgrtaatgggatggctgggtcaaatggtatttctagttctagatccttgaggaattgccacactgtcttccacaatggttgaactagtttacagtcccacaaa

SEQ ID NO: 314066 - DNA, 201 bp, Homo sapiens
tcatatgatttttgccctttattaatgtaaattacagtaatttttgatgatcaaatgtttttaattttgaggaagtctgatttatctttttctcttttatsagtattgatttctgtgtcctaagaaaacttcagctacttgcagaatatcttcctgtgctttcttctggaagatttctagttactgcttttttgtttaggt

SEQ ID NO: 314067 - DNA, 201 bp, Homo sapiens
gtataaggtgtaaggaagggatccagtttcagctttctacatatggctagccagttttcccagcaccatttattaaatagggaatcatttccccatttctyctttttgtcacgtttgtcaaggttgtagatgtgtggtattatttctgagggctctgttctgttccattggtctatatctctgttttggtaccagtaccat

SEQ ID NO: 314068 - DNA, 201 bp, Homo sapiens
ctttttctcttttatcagtattgatttctgtgtcctaagaaaacttcagctacttgcagaatatcttcctgtgctttcttctggaagatttctagttactrcttttttgtttaggtctagatctatctcacattaattttttgtgcgtagtgtaaaatatagaagtccaggttaattttttcccacattattatataattg

SEQ ID NO: 314069 - DNA, 201 bp, Homo sapiens
taggattgacttggcaatgtgggctcttttttggttccatatgaactttaaagtagttttttccaattctgtgaagaaagtcattggtagcttgatggggwtggcattgaatctataaattaccttgggcagtatggccattttcatgatattgattcttcccatccatgagcatggaatgttcttccatttgtttgtatc

SEQ ID NO: 314070 - DNA, 201 bp, Homo sapiens
cagctacttgcagaatatcttcctgtgctttcttctggaagatttctagttactgcttttttgtttaggtctagatctatctcacattaattttttgtgcrtagtgtaaaatatagaagtccaggttaattttttcccacattattatataattgttccagcacagtttgttgaaaagacttctttcttccccattggatt

SEQ ID NO: 314071 - DNA, 201 bp, Homo sapiens
ggcgtgagccaccgcacctggcctgacttcctctttttctaattgaatacctttatttctttctcctgcctgattgctctggccagaacttccaacactaygttgaataggagtggtgagagagggcatccctgtcttgtgccagtttacataagggaatgcttccagtttttgcccattcagtatgataatggctgtggg

SEQ ID NO: 314072 - DNA, 201 bp, Homo sapiens
tccccattggattgcattggtgtcttttgtcaaaaatcaaatgacattgtagatagatgggagtctgtttctgggacaatggcttttgaaagaactaattwtgtatttctggaagaagccttattttttcgtgatacgtgttttacatattgttggatttgatttgctagtatgtttaggatttttgcattatgtttatga

SEQ ID NO: 314073 - DNA, 201 bp, Homo sapiens
gtgccagtttacataagggaatgcttccagtttttgcccattcagtatgataatggctgtgggtttgtcataaatagctctgattattttgagatacgtcrcatcaatacctagtttatcgagagtttttagcatggagggctattgaattttgttgaagcccttttctgcatctatttagataatcatgtggtttttgtc

SEQ ID NO: 314074 - DNA, 201 bp, Homo sapiens
tgtggtacctgtaatgattccttttttactactactgttttttttctctctctcttccacccaccatccccatttactttatttttccatctttatatttycaggctctttattggtcagaattcttagttgtagaaaagagagttcacaccaggtactcttaagcagaaaatgttttattaaggggcacagacagcacag

SEQ ID NO: 314075 - DNA, 201 bp, Homo sapiens
agtattccatggtgtatatgtgccacattttcttaatccagtctgtcattgatggacatttggattggttccaagtctttgctattttgcatagtgctgcmataaacatacgtgtgcatgtgtctttctcgtagaatgatttataatcctttgggtatatacccagtaatgggattgctgggtcaaatggtatttctagtt

SEQ ID NO: 314076 - DNA, 201 bp, Homo sapiens
atctctgctaagctgaggtttgctctgctaaaccgaggggatcttccaagaatggcctcatttcctttttaaaattcctaacctcagtacttgttagaggygcattcacaaacccaactcctccctgtcccatagggacttctctaagagagtacttattagacgtctactgttcagaagaaatagggaaattctcaatgt

SEQ ID NO: 314077 - DNA, 201 bp, Homo sapiens
aatatcctgagttttccttttgttagaaatttcccatgtctagataaaacttgtcaaaagaagggttctttggggtgttacccaaagggcagtgattatarttctgataatgctctttaagtgcaagaatcacgtcctctttgttattgtctcccctgtagtgcattgtaggtgctcagcaatatttttgaattgaaatga

SEQ ID NO: 314078 - DNA, 201 bp, Homo sapiens
gttctacttgctgggaagcacagttctaggcatttctattatcctgtagccactctggactacttggttttcctactgttccttatgtagggcccttggartctgaaaggagagcagataggaaacacataattagacaaaagtaatttttgattaccaattctggtaagtgtcttaagggacaagtacagttatgagagc

SEQ ID NO: 314079 - DNA, 201 bp, Homo sapiens
tcttcctgtggattcaggtttcaacagtagtctcaaagttaatcactttttcctcttcccagtgtgaattgtttctgtacaagattgccaggttaatctckctaaggttttacttcagtgcctgccattcttctcagaagctcacagaggtgcccttctgcttatgcaattaaatacagttttaccagtctggatttcaca

SEQ ID NO: 314080 - DNA, 201 bp, Homo sapiens
ccagtggtgcgcacctgtaatcccagctacctgggaggctgatgcaggagaatcgcttgaaacccgggaggtagaggttgcagtgagctgagatcacgccmctgcactgtagcctggatgacagagcaagactccctctcaaaaaaaaaaaaaaaaaaaaaaaagtagtgtagagataatgggtagatagatttaagaggg

SEQ ID NO: 314081 - DNA, 201 bp, Homo sapiens
accttgaaaatgacccaggcaaggagtggtcaggcccttgggttcatggcatacctattcataggacacccagcagtaaggtacagagaaatttccagcgmttatgccagattgcatccctcagcggctaaattccatttcttgacctaggtagtggttacaagagttttgcattatagtaattgactaagttctatatta

SEQ ID NO: 314082 - DNA, 201 bp, Homo sapiens
gaagctattgcagggaatcgggtgagagatcatggtgattaaatataaggtagaggccagacacagtggctcacacctgtaatcccagcactttgggaggyggaggcagtggatcacctcaggttgggagtctcagaccagcctggccaacatggcgaaaccccgtctctactgaaaataacaaaaattagctgggcccag

SEQ ID NO: 314083 - DNA, 201 bp, Homo sapiens
attaagtgctttttagcaggggcaatgactagaacagatttgcattttagaaagaactctggtgggaagaattgactttaggagggtgggattggaagtawagtgattatttaggaagctattgcagggaatcgggtgagagatcatggtgattaaatataaggtagaggccagacacagtggctcacacctgtaatccca

SEQ ID NO: 314084 - DNA, 201 bp, Homo sapiens
aaacaaagtatctgtgcctgtgccccacctccagagtttgatttaattggtcttgggtgtgacctgggctttggaatttttagcagtctccaggtgattcytttttttttttttttttttttgtgagacagagtctcttgtcacccaggctggagtgcagtggcacaatctcggctcactgcaacctctgtgttagaaata

SEQ ID NO: 314085 - DNA, 201 bp, Homo sapiens
aatctctaccattccatccagataatgttagtagttttaaaactgctcggctgggcatggtgactcaagtctgtaatgccagcactttgggcggctgaggytggaggatcacagcccatgaatttgagaccagcctgggcaacatagactgtctctctacaaaaaatttaaaaatcagccaggtgtggtggtgtgcgcctg

SEQ ID NO: 314086 - DNA, 201 bp, Homo sapiens
ttgtaccattgcacttcagcctgggcgacagagcgagactccatcttaaaaaaaaaaagcagattctttccctgccccatctctagtttagtctggaattyggcccaagaatttgcatttctaacaagttctcaggtaatgatgattctagggggaggggagttcactttaggaacaatttttgtaaggtgttcagactac

SEQ ID NO: 314087 - DNA, 201 bp, Homo sapiens
aataatcaaaagaaaatgtagcttgttgcaatatattattattttttttaaggagacagggtgtcactcttctctccaggctagagtacagtggtgtgatsatggctcactgtagcctcaatatcctgggctcaaatgatcctcccggctcagcctcctgagcagctggaactacaggcatgtggcactgcagccagctaa

SEQ ID NO: 314088 - DNA, 201 bp, Homo sapiens
ttcagaggacccttaagaagcatcttattatttagactaatatatggactaaagggactatttggcttaatagccagaaaggagacattcctaatgactttaatgtaatagttattaagatgttcaatgtagttcatctagttagaaataactctgttagccatgtcttaaagtcactccttgagggatgtaaatggcagc

SEQ ID NO: 314089 - DNA, 201 bp, Homo sapiens
tcagaggacccttaagaagcatcttattatttagactaatatatggactaaagggactatttggcttaatagccagaaaggagacattcctaatgactttaatgtaatagttattaagatgttcaatgtagttcatctagttagaaataactctgttagccatgtcttaaagtcactccttgagggatgtaaatggcagct

SEQ ID NO: 314090 - DNA, 201 bp, Homo sapiens
gttctttggggtgttacccaaagggcagtgattataattctgataatgctctttaagtgcaagaatcacgtcctctttgttattgtctcccctgtagtgcrttgtaggtgctcagcaatatttttgaattgaaatgagaatatgaattgtttgataaaggagaaaagaagttgtctctttgacaataggagacaactgatt

SEQ ID NO: 314091 - DNA, 201 bp, Homo sapiens
cagaggacccttaagaagcatcttattatttagactaatatatggactaaagggactatttggcttaatagccagaaaggagacattcctaatgactttaatgtaatagttattaagatgttcaatgtagttcatctagttagaaataactctgttagccatgtcttaaagtcactccttgagggatgtaaatggcagctg

SEQ ID NO: 314092 - DNA, 201 bp, Homo sapiens
agaggacccttaagaagcatcttattatttagactaatatatggactaaagggactatttggcttaatagccagaaaggagacattcctaatgactttaatgtaatagttattaagatgttcaatgtagttcatctagttagaaataactctgttagccatgtcttaaagtcactccttgagggatgtaaatggcagctga

SEQ ID NO: 314093 - DNA, 201 bp, Homo sapiens
atttataatacaaacattttctataaaaggtcagatggcaaatactttgggctttgaaggccacatatgtctctgtggcttttcttttgtgtgtgtgtttaaaaaaaaaaaaaactgccccccctccccccacccttgttaggccattcttgcattactataaagaaatacctgaggctggttaatttatatgaaaagagg

SEQ ID NO: 314094 - DNA, 201 bp, Homo sapiens
gaggacccttaagaagcatcttattatttagactaatatatggactaaagggactatttggcttaatagccagaaaggagacattcctaatgactttaatgtaatagttattaagatgttcaatgtagttcatctagttagaaataactctgttagccatgtcttaaagtcactccttgagggatgtaaatggcagctgac

SEQ ID NO: 314095 - DNA, 201 bp, Homo sapiens
gtggatcccttgaggttaggagttcgagaccaaccagcctggccaacatggtgaaacccaatttctacaaaaaatacaaaaattagccaggtgtggtgttrtgtgcctgtagtcccagctacttgggaggctgaggtgggagaatctcttgaactcaggaggcagaggttgcagtgagccgaaattgtgccactgcactcc

SEQ ID NO: 314096 - DNA, 201 bp, Homo sapiens
atcgatttttcattgttgaattgtttctttacatggaaatataacagatgcaaaagaaaaaataaaatttagattttattttatgttagtgaaggtagackgcaaatgcttacccagggaagcaatgctctctttcttttcacgtcctgttaaagaggttagacaatttttcattattgaaacagaggtgggggaaagcct

SEQ ID NO: 314097 - DNA, 201 bp, Homo sapiens
agaaactagggttggagaaattactagtccgaggtcacatagttaatatgtagctatcaggatgtgaacctagacatttgaactcagctatattgcctacrtcgatgattctaggaaaataaaagtgaatgaccacatcaagcaaagtccatccttgagaaggcaagaggggatgtgaattggaatgcaagggaggactgg

SEQ ID NO: 314098 - DNA, 201 bp, Homo sapiens
acacctgtaatcctagcactttgggagatcgaggcggggagatcttttgagcccaggagttggaggccagcctgagtaacatggcaagactctatctcgcaaaaaaaaaaaaatacaaaaattagctgggtgtggtggcatgtgcctgtagtcccatctactcaggaggctgaggtgggaggattgcttcagcccagggag

SEQ ID NO: 314099 - DNA, 201 bp, Homo sapiens
ggaggccgaggcgggcatatcatctgaggtcaggagttcaagaccaggctggccaacatagtgaaaccccgtctctactaaaaatacaaaaaaattagctsggtgtggtggcagggccctgtaatcccagctgcttgggaggctgaggcaggataattgctggaacctgggagggggaggttgcagtgagccgagatcgca

SEQ ID NO: 314100 - DNA, 201 bp, Homo sapiens
ataaaatgagttgttccctctgcatgtattttgcatatctaatgttcctgtttttattaattattttactatagtgcagactctggatatcctttgttttttttattttattttattttttttggagacagggtctcacactgtcacccaggctggagtgcagtggtgcactttcggcttactgcaacctccacctcccag

SEQ ID NO: 314101 - DNA, 201 bp, Homo sapiens
ctcggtgtggtggcagggccctgtaatcccagctgcttgggaggctgaggcaggataattgctggaacctgggagggggaggttgcagtgagccgagatcrcaccactgcactacagcctgggcgacagggtgagactctgtctcaaaaaaaaaaaaaggaaaaaaggaaaagaaaaataaatttgcacgtaagtataacc

SEQ ID NO: 314102 - DNA, 201 bp, Homo sapiens
taaaatgagttgttccctctgcatgtattttgcatatctaatgttcctgtttttattaattattttactatagtgcagactctggatatcctttgttttttttattttattttattttttttggagacagggtctcacactgtcacccaggctggagtgcagtggtgcactttcggcttactgcaacctccacctcccagg

SEQ ID NO: 314103 - DNA, 201 bp, Homo sapiens
cacccctgggaaatagtggcccagggcacagaaggaacctgaaattaaaatatttagatacaaccaaaactcacttgtctgtccctatgtatactgaaaartttagtggggcatgctgctttacctggctttgtgttttcaccattgtacttattttatatacctaattgtacattttaagcagcaaatgaccttgcagca

SEQ ID NO: 314104 - DNA, 201 bp, Homo sapiens
tcggtgtggtggcagggccctgtaatcccagctgcttgggaggctgaggcaggataattgctggaacctgggagggggaggttgcagtgagccgagatcgyaccactgcactacagcctgggcgacagggtgagactctgtctcaaaaaaaaaaaaaggaaaaaaggaaaagaaaaataaatttgcacgtaagtataaccc

SEQ ID NO: 314105 - DNA, 201 bp, Homo sapiens
cacctagggcaaagaatgagttcccatgaagaaccagttttatcagtgcccttaatcatttttctttccttctcatcttttctcttcagcagcaccgtgaytgtaggtaggatactgattttccttgaacttttcctgtaccgaagtcatctgttcaaagctctggcaactgctgtgtaagatactgtcctatccatttac

SEQ ID NO: 314106 - DNA, 201 bp, Homo sapiens
aaaatgagttgttccctctgcatgtattttgcatatctaatgttcctgtttttattaattattttactatagtgcagactctggatatcctttgttttttttattttattttattttttttggagacagggtctcacactgtcacccaggctggagtgcagtggtgcactttcggcttactgcaacctccacctcccaggt

SEQ ID NO: 314107 - DNA, 201 bp, Homo sapiens
gcatctaattcattttttaatagtttgtaattaaggatgtccagaggaggtgatgtttgccaggtctaccaccatatattattctataaattctacccagyttctcataatactacatctgttcctacccctaataagagtgatatgagggtaagaaaggaaaggcagtcttctgcttttaattacctttagttctgtatg

SEQ ID NO: 314108 - DNA, 201 bp, Homo sapiens
cggtgtggtggcagggccctgtaatcccagctgcttgggaggctgaggcaggataattgctggaacctgggagggggaggttgcagtgagccgagatcgcrccactgcactacagcctgggcgacagggtgagactctgtctcaaaaaaaaaaaaaggaaaaaaggaaaagaaaaataaatttgcacgtaagtataaccct

SEQ ID NO: 314109 - DNA, 201 bp, Homo sapiens
gcagcaccgtgactgtaggtaggatactgattttccttgaacttttcctgtaccgaagtcatctgttcaaagctctggcaactgctgtgtaagatactgtyctatccatttactctgttccttgaatctggttgccagaattaaggatgctacagagaacacagaatcttgaagtagggaattcttgaactcaggtaaagt

SEQ ID NO: 314110 - DNA, 201 bp, Homo sapiens
aaatgagttgttccctctgcatgtattttgcatatctaatgttcctgtttttattaattattttactatagtgcagactctggatatcctttgttttttttattttattttattttttttggagacagggtctcacactgtcacccaggctggagtgcagtggtgcactttcggcttactgcaacctccacctcccaggtt

SEQ ID NO: 314111 - DNA, 201 bp, Homo sapiens
cagggccctgtaatcccagctgcttgggaggctgaggcaggataattgctggaacctgggagggggaggttgcagtgagccgagatcgcaccactgcactmcagcctgggcgacagggtgagactctgtctcaaaaaaaaaaaaaggaaaaaaggaaaagaaaaataaatttgcacgtaagtataacccttactctttgtc

SEQ ID NO: 314112 - DNA, 201 bp, Homo sapiens
atctggttgccagaattaaggatgctacagagaacacagaatcttgaagtagggaattcttgaactcaggtaaagtctaaacctttgaaatagttattcawcaataaacttgaaaagtatctgttgtgattataaaggaaagcacaggcatcagatgtacacagcatgtaatgacctcttgcagcagctgttgaagtcacg

SEQ ID NO: 314113 - DNA, 201 bp, Homo sapiens
caaacaaagtatctgtgcctgtgccccacctccagagtttgatttaattggtcttgggtgtgacctgggctttggaatttttagcagtctccaggtgattyttttttttttttttttttttttgtgagacagagtctcttgtcacccaggctggagtgcagtggcacaatctcggctcactgcaacctctgtgttagaaat

SEQ ID NO: 314114 - DNA, 201 bp, Homo sapiens
aactgatacccaatatgctaatagcctaaataggtaagtgtagggaagaacaaagaagttgcttatgaaaggtttaaggaagcaataacatttttaaataaggaaggggaataggctgtgagctcgaacatgcccgtgagcatgtccaatagttacgtaggatagggcttaacaaagagttactagcacaaagcaaggagg

SEQ ID NO: 314115 - DNA, 201 bp, Homo sapiens
ctctgtccttcaatctgtggggtaaagtcagctttcaaggaagcacatggtcatcagatgaatagctgatcagatcttaagggaagggtgttttaggatayggcaaggaaagctataaaaattaaattagaaaatttatgttacatgcttagcccagtaactgacaaatagtaaacactcaaaatttaactattattaata

SEQ ID NO: 314116 - DNA, 201 bp, Homo sapiens
tctttcctttttttctgcctcccctttagttggccatgttagaggaagatttgttagccttgaaatctccttcaaaagaaaatattgcatctgtcttagamaattaccatacagaggtaatcttgttaatattctaacctcaggttttaattcatggggaggggaagtgattaaaaaactggcagttggtgaatattatag

SEQ ID NO: 314117 - DNA, 201 bp, Homo sapiens
aatacattaaacaataccagccttaactgtgtgtatgtgcgaatagtgtagtgatgggggtagtgtagggaaagccttttggaggaagttatatttaagckgaggcttaaggaaggaggaattaaccagagaagaaaagctgagagtagtaaaagaatgcgatgtggttggtgcaattgtgtaagggttcgatgcagtgtt

SEQ ID NO: 314118 - DNA, 201 bp, Homo sapiens
ttggactaacagtagtaaattttttcctccaaaaggtaattaataaaatgtctccaacatctctaaagatcacactaaggcaactcatggaggggtcttcraagaccttgcaagaagtactaactatggagtatcggctaagtcaagcttgtatggtaagaatttaaaaaaaaaatgtcattttttagttctaaaagtaac

SEQ ID NO: 314119 - DNA, 201 bp, Homo sapiens
tagcttcctataccccatttccatctaccctttagcccagggatatctaagttggagagtactttcattttcttaccaagaacttgacctcactaccttcsgtctccctgcccccccattaaggtattgcattctgggaaatttttgacttgcaggagtatagatattcttggcaactttgacaaacttacagattctgag

SEQ ID NO: 314120 - DNA, 201 bp, Homo sapiens
agccaggccgccgcccccggctttcccgcgggaccgcggcgtggaaacgcgcgctgccgcctcggggctcccgggacgcgcgggccccccacgcctgcccragccgggcgtccgcgacgtcacaagtggagcgcgatgattcagagggagggccaggaagggaagggctctggggtcagcttggccacggctgctgtttcc

SEQ ID NO: 314121 - DNA, 201 bp, Homo sapiens
tatgaaaggattggtaagctgccctttggtgctataagtgggcagaacttccattttttttttacagaagcctgagaattatattgctctagcacatcatktctgaatgcactggccatgttcttcagttctggggcttgtataggttggtataatgtttgtatatattcctcatatgtaacaaccaagaatatttatttc

SEQ ID NO: 314122 - DNA, 201 bp, Homo sapiens
cacttactgtttattgtctggatgggcctggatgggcctgcagggtgtgcggtagaaagagccttgcttgggatacaggagagctggttcttaggctctgytttgccaatcaggtatataaactcggccacatgatgtaagctctgaaggacttgttttccccattttgtaaacataaaaaaggaaaagaaaagcaggggc

SEQ ID NO: 314123 - DNA, 201 bp, Homo sapiens
aatgagttgttccctctgcatgtattttgcatatctaatgttcctgtttttattaattattttactatagtgcagactctggatatcctttgttttttttattttattttattttttttggagacagggtctcacactgtcacccaggctggagtgcagtggtgcactttcggcttactgcaacctccacctcccaggttc

SEQ ID NO: 314124 - DNA, 201 bp, Homo sapiens
catgtaatgacctcttgcagcagctgttgaagtcacgatcatagatacatcttggaactagtgatagcacctttaatttcaaaaggagtggcatagcattrtagccaacaagtcagatctgtaattcttattttattaaatacttaaatgctgtaaacaagtgctgtacgtaatcttgaattgtcttctctctttccaagg

SEQ ID NO: 314125 - DNA, 201 bp, Homo sapiens
tccccatttgataaaaggccaatgatactgagtaggatatatgcgtatcatgctacttcattcagtgtgtctgtttttaatactaataaggcagtttgacraattatttctttgggactaaggtgattatcatttttttccccttcaaaattgtgctttaagtgctgataaccacaggcagattgcaaagaactgataagg

SEQ ID NO: 314126 - DNA, 201 bp, Homo sapiens
aacaaacaagacttactgttaatcactatgatttgagtgccattccctcgccaagaaattttagaaaagcccttttcatatctggactttttttgggtataaacaaacaaaaattgttattttaaaggataaacttcaaccattggaatttggggcagtttttattccttagcattttctttggtgatgccattacttagg

SEQ ID NO: 314127 - DNA, 201 bp, Homo sapiens
cctgagataattattcctaatgtatacctccagggttcctggtctagagtagctgggttgtttatggtaattaatataggattgcattttaaatttttacrgttaggtagcatggggcccttatattttattttttaacggttggttttcagaagaatgactcagctggccttgatatggtgtggtccaccagacctgatt

SEQ ID NO: 314128 - DNA, 201 bp, Homo sapiens
acaaacaagacttactgttaatcactatgatttgagtgccattccctcgccaagaaattttagaaaagcccttttcatatctggactttttttgggtataaacaaacaaaaattgttattttaaaggataaacttcaaccattggaatttggggcagtttttattccttagcattttctttggtgatgccattacttagga

SEQ ID NO: 314129 - DNA, 201 bp, Homo sapiens
tttctttcaggggttcttttaccagtctcttgacccgagtgtaatgtgctcaccccggttcagctgtttatgtggctgttttagtgattaggagcacttgwtacggactttcccagcttgggtggagcatgtcttctttccaggttttaattagcaccgagttgccagcctggaagtggtgaactgtgaactcaagaggca

SEQ ID NO: 314130 - DNA, 201 bp, Homo sapiens
caaacaagacttactgttaatcactatgatttgagtgccattccctcgccaagaaattttagaaaagcccttttcatatctggactttttttgggtataaacaaacaaaaattgttattttaaaggataaacttcaaccattggaatttggggcagtttttattccttagcattttctttggtgatgccattacttaggaa

SEQ ID NO: 314131 - DNA, 201 bp, Homo sapiens
gaaacatctgagtggaaattgattcctgttatgacagactaaatatactaaaggaaacagttgatcatcatagaacacaaatcttttatccttactgcaacagggcctggatatttgcagattttatatccgagctttgaactatttgcaaggtaattatagagtgatttacacatttcctgaaacagggatttaagttta

SEQ ID NO: 314132 - DNA, 201 bp, Homo sapiens
aaacaagacttactgttaatcactatgatttgagtgccattccctcgccaagaaattttagaaaagcccttttcatatctggactttttttgggtataaacaaacaaaaattgttattttaaaggataaacttcaaccattggaatttggggcagtttttattccttagcattttctttggtgatgccattacttaggaag

SEQ ID NO: 314133 - DNA, 201 bp, Homo sapiens
acaacaaaaccttaatggtcatttcatccatttacccttccataatctgaatcctttctgccgccttctgacagccatccataggcaacccactgctcctratcctaaactgtcctccacatccctttctcatttgcatcgcccggttcccaggctctgtcccgcctcagtggccacactgcaccctttgcttgcacctcc

SEQ ID NO: 314134 - DNA, 201 bp, Homo sapiens
taaaggccttgccctactgggtcctctggatttaatcctgaatattttcgcatttgatcactgagcctctgcagcaacacagagggagtctcctccttttwtgttgttgaatctcaaatgcttttgagacattttatgtcctaggagtggactttttaatccctttaattattagttcccttaggtcctgcatttgggccc

SEQ ID NO: 314135 - DNA, 201 bp, Homo sapiens
gggacttaaggataactaaaacaatacaagacagcttcattttaaagaggactgagtgtaagaagcacaggtaatctctatgaatgagattaatggtcccdgattgtatcttagttttgggactaaaaacatagctctaaaaattcataaaatctgtttctgaaaacaccttttttttttttttttttttttttgagacag

SEQ ID NO: 314136 - DNA, 201 bp, Homo sapiens
catctcagcctaagtataaaaattgggtcctaaaaattgatctagctgctaaaccgaggggatctctgctaagctgaggtttgctctgctaaaccgagggkatcttccaagaatggcctcatttcctttttaaaattcctaacctcagtacttgttagaggtgcattcacaaacccaactcctccctgtcccatagggact

SEQ ID NO: 314137 - DNA, 201 bp, Homo sapiens
gaaaggaagaacattgggggttggggagggacaattagaaaaccaacatatgaaaaagccttccatgtgaaaaattacctgaaagaaaatggactaaaaawaacaattgaaaggcagagatgatcagactagtttaaaaatccaaaccacacatacatagtcttttcaacgagtgctggaacaaacaaatcatccatatgc

SEQ ID NO: 314138 - DNA, 201 bp, Homo sapiens
acaattgaaaggcagagatgatcagactagtttaaaaatccaaaccacacatacatagtcttttcaacgagtgctggaacaaacaaatcatccatatgccaaaaaaaaaaaaaaaaaaaaagctggacacagttcttaaacccttcacaaaattaatttgaaatggatcatagacctaaatataaaataggactcctagaa

SEQ ID NO: 314139 - DNA, 201 bp, Homo sapiens
ctaattctttcctcaagtttggataaggatttaagggagcactgggtttagctccttcatgatccccagattcctctttcctcgaccttcctcttgccccygatctccctgtcctctaccttgtgagatgtttgggggaggggcaagcgtgttggggatcccagggcttttcactgggtgagggctctttactgtgctctt

SEQ ID NO: 314140 - DNA, 201 bp, Homo sapiens
tggttttgaacttgtgacctcaaatgatccaccctcctcagcttcccaaagtactgagattatagccatgagcactgcacctggcccttccacaagtcttyttgtacaactgagagtagctatcttccagtagcctggcagaagagtagatacttactccttagagaaaccaaatcaggcaggtctagctgacagtagaga

SEQ ID NO: 314141 - DNA, 201 bp, Homo sapiens
tccctcttggagagtttttatttctccctggataatcttctgtgtatacatgaggtatacatgttaataaactgtttttctcttgttggtctgtcttgttrgagcagtcccagctaagaactcagaaaggtaaagggaaaattcccccaccacacacaatgaataatagaaaattaagttttaaagtgtattttagaaaga

SEQ ID NO: 314142 - DNA, 201 bp, Homo sapiens
tgctcttaagatgctactagtgagagggttttttgattataggagaccacaatatgccaccctaaatatgccactttggcataatgattattttgagcagrttattttgagaaccagcagatacaggatcatctctgaaaacagcacaagttacctttttgtaagagaaatgtgtacctagaaaggaaatctctatttgta

SEQ ID NO: 314143 - DNA, 201 bp, Homo sapiens
gcctctagagggcaatctcctttcctgcgaatccgccctagtccgttctatcctccctcttcccgctccgcctcagctcgctctccgccttctccctggcycggtccccgatcccttcctctccctcaactatttcctccaggcgtcgttcttgccccgcccttccccgtcgcgtagcggaaacggtcgctctggcttcct

SEQ ID NO: 314144 - DNA, 201 bp, Homo sapiens
gggaggctgaggcgagtatcatttgagcccaggagttcaagaccagcctaggcaacatagcaagaccccgtctctacaaaaaaattaaatatgaaaaaaaytagccaggcatggtggtgcacacctacagttttaactactcaggaagccgaggtcgcttgggcccaggagttggaattgaaggttgtggtaagttaagat

SEQ ID NO: 314145 - DNA, 201 bp, Homo sapiens
gaaccctaaaataacgtggatttcaggtgattgcgatgtgtctagtgggagatgctgcgtgtgtgtgtgtgtgtgtgtgtgtgtgtgtgtgtgtgtgtgtatacacaggatacgtgggaacactacttcctgctccatttttctgttaacttaaaactgctctgaaaaacagtctattatttttttaaaaaatacacccac

SEQ ID NO: 314146 - DNA, 201 bp, Homo sapiens
tggtgaggacatgcaacgcatatattgctggaaggaatgtaaaatggtacaaccattttaaagaattccttggctgtttcttaaaaagttaaccacacacttaccctgtgaaccagccatttcatttctagatatttatctaagacaaatggaaacacaggtattttaaaaatctgtataccaatatccatagcctcttta

SEQ ID NO: 314147 - DNA, 201 bp, Homo sapiens
ggtgaggacatgcaacgcatatattgctggaaggaatgtaaaatggtacaaccattttaaagaattccttggctgtttcttaaaaagttaaccacacacttaccctgtgaaccagccatttcatttctagatatttatctaagacaaatggaaacacaggtattttaaaaatctgtataccaatatccatagcctctttat

SEQ ID NO: 314148 - DNA, 201 bp, Homo sapiens
ggcctgaaaccagcccaactcagtggtcataatcttctgggcctaccgaagagcaaaagcctacttctagttcttccagttgccagttcaagggctttatytgtcacttcctttgggaacaggtagagtgctttgatttagaatgatggcaataaatgagaaaccaatttgaaattggatgtgagagtcttttgtccttta

SEQ ID NO: 314149 - DNA, 201 bp, Homo sapiens
aggtagaggttgcagtgagctgagatcacgccactgcactgtagcctggatgacagagcaagactccctctcaaaaaaaaaaaaaaaaaaaaaaaagtagkgtagagataatgggtagatagatttaagagggagatagggagattttggagaagacttgatgggttttgatgatggattgtatgtgatggataaagtgga

SEQ ID NO: 314150 - DNA, 201 bp, Homo sapiens
acagagtaggagtttgactacattcacatgctttttccatttttgttcaaatgttatgcttgtccatattaacattgtttatagtagattgtattactatrtgaagatgattgtttaataataacgcagttaaaaaacagtgaatgtcagagtgctcgggacaccataaatataaggcacagaagggttaagatagcatac

SEQ ID NO: 314151 - DNA, 201 bp, Homo sapiens
accatgggaatgggtctgttttaaaagccagtttggcatgctcttgccccttcaccagatcagggctctgcagagagtccccaccagcaagaaggccctcracagatatggcccttcaaccttggctttcccaatctccagaagagctgtaagacatagattccttttctttataaattgcccagtctcagatactcagtt

SEQ ID NO: 314152 - DNA, 201 bp, Homo sapiens
tttttagaggaaggttatataccagttaaactctgcaattttgcatctaaatgcacatgcttgggcccacttgcccagctcctgagatcttaatgggaagyggctgatcacgagcttcaggtgttttctgtctactgggagactgcctttccctgctgccagctgcgaccagttattttagggagatagtttaacaaccac

SEQ ID NO: 314153 - DNA, 201 bp, Homo sapiens
gaagatattgtactctattaaaatgtgattcagggacaagggagtggtgcttggtgataaaagtatactgccatagttgctgaggaacggcagcaacagaratcagacttctagttgatatggatctggcaggcatctctgtcacacccctgggaaatagtggcccagggcacagaaggaacctgaaattaaaatatttag

SEQ ID NO: 314154 - DNA, 201 bp, Homo sapiens
aacactaaacagaccaaagttcctcaatgcactgactcttaatatgattcggcagatttatccacagctaaaggtttgtaattttcttattgcaattatayggattcttttcaaagtatatcataataggacatttctggtattttctcccatagaatcacataattctctgggatatgcatctaagtaagccccatcaat

SEQ ID NO: 314155 - DNA, 201 bp, Homo sapiens; identical to SEQ ID NO: 65399

SEQ ID NO: 314156 - DNA, 201 bp, Homo sapiens
tggccaggctgctctcgaactcctgaccctaggtgatccatctgccccggcctcccaaagtgctgggattacagacatgagccacgcacctggtgcggtgkaagtttaaagacaaaatagaaatgcagagcattgtatcatattttatacagcaaagtagacaaatagaggccgctgctttttaagctttccaattccttt

SEQ ID NO: 314157 - DNA, 201 bp, Homo sapiens
cctgttggccaggctgctctcgaactcctgaccctaggtgatccatctgccccggcctcccaaagtgctgggattacagacatgagccacgcacctggtgyggtggaagtttaaagacaaaatagaaatgcagagcattgtatcatattttatacagcaaagtagacaaatagaggccgctgctttttaagctttccaatt

SEQ ID NO: 314158 - DNA, 201 bp, Homo sapiens
gcttaggaagttagaaaatatccaccccagtcatcaaaagtatattgctgtccatccctggagatttaatttaaaagaaaaatagaatacatataaaaatwttgcaggaaaaaagtatgatagaaaaatgtgcctagtataagaatttctgtcaattcagtaagtaaaatctagcaatattagacaaaaataatggtatta

SEQ ID NO: 314159 - DNA, 201 bp, Homo sapiens
catttttccactccagctgagactgcctcactgagttgtcaacacttggtcttcttcagcagtgaggaaccaacaagacaggaggctgggtcaatactcarcttggcaaactccaggaaatggtgcttaaaacgtttggcttcttgaatggaattcatggtactgctcccagcctgcacctgggttctccaacttgagaca

SEQ ID NO: 314160 - DNA, 201 bp, Homo sapiens
ataaaatctgtttctgaaaacaccttttttttttttttttttttttttgagacagggtcttactctgttaactcagtctggagtaaaggatgcaatcacgrctcactgtagcctggacctcctgggttcaagtgatccttccacctcagcccactgagtagctggcctgcaggcacaagtcaccatgcctacctaagtttt

SEQ ID NO: 314161 - DNA, 201 bp, Homo sapiens
gatagtacatttaaattttaatgtcctgtgagtctgtatctattgtgcctttagttgtggtcttttctcatatgtctgattatttctgagttatttctaaytgagtatttaaaatgcagatatttttgagtcctaggatgatgttctctctccaaagaagatggacctttgtttctggtaggtgttcaggctaagggcact

SEQ ID NO: 314162 - DNA, 201 bp, Homo sapiens
atcgaaaaaggttgctttatgaggaagttaagtttaaaagtagaaggcaaagaattgaacatactgacattgactctttgaagagaaatttagaactcatrtctaacaaatcttaaatctaaaaatctgaaatcggaaatgttccaaaatctgaaatatttggagcaccaacatgatactcaaaggaaatgctcattggag

SEQ ID NO: 314163 - DNA, 201 bp, Homo sapiens
atgcccaaccacatgcatccttaaagactgaagttcttccctcttttttaatagccataaatattatggattgagcatctcttgtctgaaatgcttaggaygaggagtgttttggattttggaatatttacaatatgttataaataaagtttcagtgccgcaaaagaaatagcactcgaatgtaacattttgtttttaatt

SEQ ID NO: 314164 - DNA, 201 bp, Homo sapiens
cacttaaagttataactcaagactccttctgatatgaaaggattggtaagctgccctttggtgctataagtgggcagaacttccattttttttttacagamgcctgagaattatattgctctagcacatcatttctgaatgcactggccatgttcttcagttctggggcttgtataggttggtataatgtttgtatatatt

SEQ ID NO: 314165 - DNA, 201 bp, Homo sapiens
tgagattcttcttggcctctgtgtgtaacattcctttcctccaggtataggatggggcccttgtcacatgagggtttaatgactttcaagtccgggtgtcrtggctgatgcctgtaatcctagcactttgggaggctgaggtgggtaaatcgcttgaggctaggagttcgagaccagcttgggcaacatggcgaaacccca

SEQ ID NO: 314166 - DNA, 201 bp, Homo sapiens
gtcctatgcttcccactattcaagatcccaaagcaaccatcttctatgtacttatttatagcatttatcctgttgctatatatatatatatatatatatayacacaaaatatatattacaaaatatatattgtaagtatattttacgtgtttaaacatgctgagataaaaagagaaactctctttatttttcataattgtt

SEQ ID NO: 314167 - DNA, 201 bp, Homo sapiens
tttaagcaatggaaactgattgtgtttttatcttttaatatatagagccttttttctacttaaaaataaactgattcttttcagaagcttcagaagagaamctagaatgttgagttttttttttttttaaattcagtattagagatttggttgcctaaattgtacctgttactcaaaatttcaccttagtggaagtgtttg

SEQ ID NO: 314168 - DNA, 201 bp, Homo sapiens
ttgaacatccttaattcaaaatgctataaaattcaaaaactctttaagcatcaacatgatgccacaagtggaaaattccacacctggcctcatgattgctygcagtcaaaatacaagtgcacaacacactgtttattcagggtccctatgggaaaaattaattactttcaggctatgtgtataaggtggatatgaaacata

SEQ ID NO: 314169 - DNA, 201 bp, Homo sapiens
attttcatagtagaaaggttagtagtcctgcttaaatatggccttaacccaggaggtctttttccagtagtctgtttttttgttttaagacagaatctcgytctgtcgcccaggctggagtgcagtgtgtgatctcaactcactgcaacctccatctcctgggttcaagctattctcctgcctcagcctcccaagtagctg

SEQ ID NO: 314170 - DNA, 201 bp, Homo sapiens
ttcctttttaatttaggagtttgaggcaagagtttcaaaggagggtttctgaacctcgtaggtgaatatcagaaaacagaatatcaatttttactattttmtttttccttacctccttctttatctgccataggaaaagagaatatagtatttagaatagtagaaagcctcagccacttaaataccaggacaatataaatg

SEQ ID NO: 314171 - DNA, 201 bp, Homo sapiens
aagcaggggtggctgcttcacttccatttccaacattcgtgtagatttctcttttgactaacttacagccattcagacagacatgtgtctgatctttgacraacctgactaatggagcaatgacagaaggattccttattcaataaatggtgctgggataactggctagccagatgcagagaatggaaaccggaccccttg

SEQ ID NO: 314172 - DNA, 201 bp, Homo sapiens
ctggccaagatggaatgagagcttggacacaccttgtaatacctcctcccttattagccaccattagtctttcttccctaagagttaaacagaaaccagcygaaattttcccctgctgatttcaagcaactacctgactgttgttccttctttttgcagttttgacacagcaactgaccagcattccttcctaataaaaga

SEQ ID NO: 314173 - DNA, 201 bp, Homo sapiens
ctgagaaggaaaaaatcctgttccccccaatgactagactcccctctcagccaaggggaccccagagaaagcttaaaaatgagttcctggccaagatggartgagagcttggacacaccttgtaatacctcctcccttattagccaccattagtctttcttccctaagagttaaacagaaaccagctgaaattttcccctg

SEQ ID NO: 314174 - DNA, 201 bp, Homo sapiens
aattttacaaccttattttttccacattaatgccaggtttatactggttagaagataacaaagttatttgtatacaacatttccttcataattagtatatsaaatttgtaagccctcttaccatgtcccagcattaggtttttgaaagattcagacaaaatataagatacagttcctatcctcaaggaatgtacaatttga

SEQ ID NO: 314175 - DNA, 201 bp, Homo sapiens
cagcattaggtttttgaaagattcagacaaaatataagatacagttcctatcctcaaggaatgtacaatttgagagagaaaattagcattaaattacgacraaaaatcatgtaagaagtaagtcataagccaagtgcagtatgtgtgcctgtagtactggctactgggaagactgaagtggaaggatcacttgagcccagg

SEQ ID NO: 314176 - DNA, 201 bp, Homo sapiens
aaagaagaatggctttcctggtataaggaattgcatgggctgaggagcagtggcagaaaatcaacattatatactcagagacatccaggagagatgcatgkgacaggaataagaacaggtaaatggtaaataaggttggatagctaaggtgaagccttgtttctgttgcctcaaaagtcagtcagtttgaagggaatgttc

SEQ ID NO: 314177 - DNA, 201 bp, Homo sapiens
atatattttttctaacccaatacatccaaaatactgttactttaacatgtaatcaatataaaaattttaacactgctttagtttttaaatgtaaatttttwaaaattcagttcctcagttatactagccacattttaagtgcacagtagtcaactgtgtctagttttggaaaacatagctatagacaattgtgagattatt

SEQ ID NO: 314178 - DNA, 201 bp, Homo sapiens
tataaggtgtacctagttattctttcctttagttaccattaatatgcaagatttgcatttgatatgtatgttttgatgttggcttgtgataaaaacttaaraaattttgtcataaagttattctttgtttatacagagaatgtccaagcacacagatgcagcagaagaggtgctattggaaaaaaaaggttgcgcgggagt

SEQ ID NO: 314179 - DNA, 201 bp, Homo sapiens
aaatacaaaattagccagaagtggaggttgcagtgagcccagattgtgctattacactgcagcctggaaaacaagagcaaaactttgtctaaaaaaaaaamcaaaaaacaaaacaacaacaacaaaaaccccaatttaaaaatgggcaagaaaattaaaagaagataataagcatatgaaaaagtgctcaacatcattaga

SEQ ID NO: 314180 - DNA, 201 bp, Homo sapiens
tcctcaagacacagcagtgtctctgggccttgcctcttaaggagtgggcctcgggccacctggacaggaagcgcatcaagggtggggaacttatctctctscagcctttggtgctgtgatactcagtgtaccttaaggatggtttgggttgaacctaggtaggaatgggtgttggtgggcggggtgggggtggggggaata

SEQ ID NO: 314181 - DNA, 201 bp, Homo sapiens
cacaattcacccatataaagtatatgattcagccaactgtcagcactatccattttagaatattttcatttcagtgtagtccaaccatcaccactattcaytttagaatattttcattactctaccagaaaaccctgtgccgcttagctgtcactctccaattctcctgcctcctctccaaccttaggcaacctctcgtct

SEQ ID NO: 314182 - DNA, 201 bp, Homo sapiens
cgtaaggaggaaaacgtgttacctaagccggggatgaggacagagcaggaggcagcagcctttccctcgagaaacggaagcggcggggagcaggaggaggmggaggcgcggcccgggcgcgaggttaggcgaggggcgctgggcgtgcggccgcaggcgcggccagaggacgagggttggggaggacggcggaggtcacgc

SEQ ID NO: 314183 - DNA, 201 bp, Homo sapiens
gggaagggctctggggtcagcttggccacggctgctgtttccttgtcgccgcccacgaattcacttttaaatcttcctcctccattcatctgtactctcayaggggactgcgggtttgacagatgggttggcagctgtgaagatggacttcctgccagtggtatccgggtcccactgttctaatggaaatgtcaggtgtac

SEQ ID NO: 314184 - DNA, 201 bp, Homo sapiens
ggcttctttcatctagcacagtgttttccatgtttgctcatgttgtaccatgtatcgatacttcatttctgtttcttgccaaataatacttcattgtacakatatataacttttgtttttacctattcatcagttgatggacatttgagttatttctacttcttggcaattatgctgccataaacattatgtacaagtttt

SEQ ID NO: 314185 - DNA, 201 bp, Homo sapiens
gacagagcaggaggcagcagcctttccctcgagaaacggaagcggcggggagcaggaggaggaggaggcgcggcccgggcgcgaggttaggcgaggggcgytgggcgtgcggccgcaggcgcggccagaggacgagggttggggaggacggcggaggtcacgcgagcgaaggcgaagccccggcgacgcacggccccgctt

SEQ ID NO: 314186 - DNA, 201 bp, Homo sapiens
tactggcctacttttctaatgccactctccaccgcctctccttaccccagtgccagtttagctcttggacttttttttttttttggttcccaaatcatctstcttagggtaactcaaatttttgtctaacctgacttgccctgagctctaatgctggtcacaaccctctgaatgcctcagttgcacctcatatataaattt

SEQ ID NO: 314187 - DNA, 201 bp, Homo sapiens
cccaaccccatcgggccgctcgggcagggccaagggcgccgcgggactcacgagctcccctccgcgctggctgcagcggcgatgccgggcatgcctggccrggcccggccgggggcggcctcgctgccggggcagggacctcgcaggccggcgcgcagaggcgaggaaccctcccggcgccatcgactcacctacccgcgg

SEQ ID NO: 314188 - DNA, 201 bp, Homo sapiens
tgaaccctaaaataacgtggatttcaggtgattgcgatgtgtctagtgggagatgctgcgtgtgtgtgtgtgtgtgtgtgtgtgtgtgtgtgtgtgtgtgwatacacaggatacgtgggaacactacttcctgctccatttttctgttaacttaaaactgctctgaaaaacagtctattatttttttaaaaaatacaccca

SEQ ID NO: 314189 - DNA, 201 bp, Homo sapiens
aaaatcacaaatgcaaaggaaggaaaacgagtgggttgcagcacatttccaagaggcgtgaaaggggtagagggctgagtcttgagatttcctactcaccmcatgagtgaggaggcagggtagagttgactaggtaacgcagccagttagagttaggaaaaggcaggatctcagaagttcttccaggagtgggctattggg

SEQ ID NO: 314190 - DNA, 201 bp, Homo sapiens
cagcactatccattttagaatattttcatttcagtgtagtccaaccatcaccactattcactttagaatattttcattactctaccagaaaaccctgtgcygcttagctgtcactctccaattctcctgcctcctctccaaccttaggcaacctctcgtctactttctatctgtacacatttgcttattctagacactcat

SEQ ID NO: 314191 - DNA, 201 bp, Homo sapiens
ataatgaaatactactcagtaataaaatggaggaaactaccgatacacacgatatggacattttgctaagtgaaaaatgctatacaaaaaaagcgcacacygtatgattccattttatatgaattttcagaagatgcaaaactaattgatggtagagaaaaatcagactgggtgcagtatttaacacctgtaatcctagca

SEQ ID NO: 314192 - DNA, 201 bp, Homo sapiens
atgaaccctaaaataacgtggatttcaggtgattgcgatgtgtctagtgggagatgctgcgtgtgtgtgtgtgtgtgtgtgtgtgtgtgtgtgtgtgtgtktatacacaggatacgtgggaacactacttcctgctccatttttctgttaacttaaaactgctctgaaaaacagtctattatttttttaaaaaatacaccc

SEQ ID NO: 314193 - DNA, 201 bp, Homo sapiens
aatgaaccctaaaataacgtggatttcaggtgattgcgatgtgtctagtgggagatgctgcgtgtgtgtgtgtgtgtgtgtgtgtgtgtgtgtgtgtgtgwgtatacacaggatacgtgggaacactacttcctgctccatttttctgttaacttaaaactgctctgaaaaacagtctattatttttttaaaaaatacacc

SEQ ID NO: 314194 - DNA, 201 bp, Homo sapiens
cgcgtagcggaaacggtcgctctggcttcctggaggacttgtcatctgtgcccggcggcgcaggacggcggtgggcggggctcacgcgaggcgctggaacrgtccgggagattctcgctctgctgctttagcttcggagtgtttggcgatggggcagcgcgagatgtggaggctcatgtcgaggtgagtgagagagcgagg

SEQ ID NO: 314195 - DNA, 201 bp, Homo sapiens
gcccggcggcgcaggacggcggtgggcggggctcacgcgaggcgctggaacggtccgggagattctcgctctgctgctttagcttcggagtgtttggcgayggggcagcgcgagatgtggaggctcatgtcgaggtgagtgagagagcgaggggccaagggcaggctcttcagcggcactcgccacagtgggaaaagggcc

SEQ ID NO: 314196 - DNA, 201 bp, Homo sapiens
ccgctgcatcccaccccactcctaagcaatacattggaagaaaaaaaaacccatagacgttgaaattcatggaccccttaataacacatcttgcctgatcmtcttataatgtaacacaattgagaatcccataacttgcaactgacattagacgcaaagcttcctaattttagtgctttgcatagaaaaacaaatattcct

SEQ ID NO: 314197 - DNA, 201 bp, Homo sapiens
ccttccagcttgggaggctgaggtgggaggatcacttgagccacagagttcaagtttacagtgaactatgattgtgccactgccctctagcctgggcaacrtggaaaaacctagtctctaaaaatagaaataaccggaagagggtacttttaggttgttaataggcctcattgccttttccatctcctccatcttctgctg

SEQ ID NO: 314198 - DNA, 201 bp, Homo sapiens
cttgagccacagagttcaagtttacagtgaactatgattgtgccactgccctctagcctgggcaacgtggaaaaacctagtctctaaaaatagaaataacmggaagagggtacttttaggttgttaataggcctcattgccttttccatctcctccatcttctgctgaactgtattgttttggttcttgctctttgcctgt

SEQ ID NO: 314199 - DNA, 201 bp, Homo sapiens
gggcaacgtggaaaaacctagtctctaaaaatagaaataaccggaagagggtacttttaggttgttaataggcctcattgccttttccatctcctccatcytctgctgaactgtattgttttggttcttgctctttgcctgtcttctcttttacttctggttagttgtttcttagttgatcaaaggctcaatctttgttgc

SEQ ID NO: 314200 - DNA, 201 bp, Homo sapiens
aggttgttaataggcctcattgccttttccatctcctccatcttctgctgaactgtattgttttggttcttgctctttgcctgtcttctcttttacttctrgttagttgtttcttagttgatcaaaggctcaatctttgttgctctgttaggttgttttctgtgttaggaatcatgagcctgaatgcagaggctgagaagg

SEQ ID NO: 314201 - DNA, 201 bp, Homo sapiens
cattacttactaatttaaacctagtatatatgcaaagcagttgcagaattgttacctgctccttgctaccatgaaaagccatgttgatagagtacactgtygatgtacagttcctttatcatccatacagttttcagtcatttcactgatttccaaagttagttagcttccttatcaccacagtcacttcactgaggttat

SEQ ID NO: 314202 - DNA, 201 bp, Homo sapiens
actcataagtgggagttgaacagtgagaacatattgacacagggaggggaacatcacacactggggcccatcagggtagggggcaaagggagggggagagyattaggagaaatacctaatacatgaggggcttaaaacctagatgacgggttaatgggtgcagcaaaccaccatggcacgtgtatacctatgtaacaaacc

SEQ ID NO: 314203 - DNA, 201 bp, Homo sapiens
atctgtaactctactcctgacagtgagagccaggctccattacttactaatttaaacctagtatatatgcaaagcagttgcagaattgttacctgctcctygctaccatgaaaagccatgttgatagagtacactgttgatgtacagttcctttatcatccatacagttttcagtcatttcactgatttccaaagttagtt

SEQ ID NO: 314204 - DNA, 201 bp, Homo sapiens
caaattactgctatatgcaagaacataaaatctcacaaacataatgttgactgaaagaagtaagatagtaatatatattctgtgattctatttatatctarataaaccagaaaaaactctaatcctttgttagaggtcaagatagtagctacttgagggatggagggtgtagtgactgacagagtgcatagcacaatttct

SEQ ID NO: 314205 - DNA, 201 bp, Homo sapiens
tgtagggaaagccttttggaggaagttatatttaagcggaggcttaaggaaggaggaattaaccagagaagaaaagctgagagtagtaaaagaatgcgatrtggttggtgcaattgtgtaagggttcgatgcagtgttgaacgacagtgtgtgggtgagaagataatagcatatgtgaaaatgagataagagagaattcat

SEQ ID NO: 314206 - DNA, 201 bp, Homo sapiens
taatcactttttcctcttcccagtgtgaattgtttctgtacaagattgccaggttaatctcgctaaggttttacttcagtgcctgccattcttctcagaakctcacagaggtgcccttctgcttatgcaattaaatacagttttaccagtctggatttcacagatttggccccagtatattcatggatgaacaattaccta

SEQ ID NO: 314207 - DNA, 201 bp, Homo sapiens
cttctttttaatctctaccattccatccagataatgttagtagttttaaaactgctcggctgggcatggtgactcaagtctgtaatgccagcactttgggyggctgaggctggaggatcacagcccatgaatttgagaccagcctgggcaacatagactgtctctctacaaaaaatttaaaaatcagccaggtgtggtggt

SEQ ID NO: 314208 - DNA, 201 bp, Homo sapiens
caggcatgagtcaccatgcccagccgagtctccaggtgattctaatgtacagaccagtcttggaattactgggctacattttacttgtgagacaaattcaraaaatgctagttcaggaatgtgaattataactgacttaaacaaataggttgtttctctcttttgtatagtattattcaatttgaatgtaatataaaaaag

SEQ ID NO: 314209 - DNA, 201 bp, Homo sapiens
agtcatccaagttgttacaagtggtaactggtgatattgccttttgtgaaacctcaggctgttggtcttcatataatctcagagtattcttgaaaaattarcagattgtcagtttatcagttccattagttggtatatgtatctgcacatgtgcacagcccttatcaggctgctgcagctactgattctagctttgacctc

SEQ ID NO: 314210 - DNA, 201 bp, Homo sapiens
tcttaaatttagcttcttaaacaaaaagcatgcatcttagtatattctaactatagtgtttttatttgcacatctgtcattacgttgtgggtttctcgagkgcaagagctatgtcttttaggaaattttttaaaaagcccaaagcataatgatacaacttgatgaattttcacaaatgaaacatacctaaatcaccagcac

SEQ ID NO: 314211 - DNA, 201 bp, Homo sapiens
aaaagcatgcatcttagtatattctaactatagtgtttttatttgcacatctgtcattacgttgtgggtttctcgagggcaagagctatgtcttttaggamattttttaaaaagcccaaagcataatgatacaacttgatgaattttcacaaatgaaacatacctaaatcaccagcacctggatcgagaaacaagcattcc

SEQ ID NO: 314212 - DNA, 201 bp, Homo sapiens
acagggaggctaagtaacatgcccaaatgtcacacagctagtaattatgaggtgtgatttgaatcctggctatctgttttcatagatttactttgtacgcyctatagcctctgacagagtgggcactacgtaactattgcaactgtgcctctgttaagcctaagtggagatggggatacgaagcctggcatatcccttcct

SEQ ID NO: 314213 - DNA, 201 bp, Homo sapiens
aggctggagtgtagtgacattagcttactgtagcctcgaactcctaggctcaggtgatcctcctgccttagcctcccgagtagctaggactgcaggtatgraccccaaccccagctaatttttaaattttttgtagagatgaggtttctgtgttgcccagactggcctcgaacctctgggcacaaatgatcttcctgcctt

SEQ ID NO: 314214 - DNA, 201 bp, Homo sapiens
agtctacagcagaagacctttttcttcatggtggctaccttgaaaatgacccaggcaaggagtggtcaggcccttgggttcatggcatacctattcatagsacacccagcagtaaggtacagagaaatttccagcgcttatgccagattgcatccctcagcggctaaattccatttcttgacctaggtagtggttacaaga

SEQ ID NO: 314215 - DNA, 201 bp, Homo sapiens
ggaatgaaccctaaaataacgtggatttcaggtgattgcgatgtgtctagtgggagatgctgcgtgtgtgtgtgtgtgtgtgtgtgtgtgtgtgtgtgtgkgtgtatacacaggatacgtgggaacactacttcctgctccatttttctgttaacttaaaactgctctgaaaaacagtctattatttttttaaaaaataca

SEQ ID NO: 314216 - DNA, 201 bp, Homo sapiens
aggaatgaaccctaaaataacgtggatttcaggtgattgcgatgtgtctagtgggagatgctgcgtgtgtgtgtgtgtgtgtgtgtgtgtgtgtgtgtgtrtgtgtatacacaggatacgtgggaacactacttcctgctccatttttctgttaacttaaaactgctctgaaaaacagtctattatttttttaaaaaatac

SEQ ID NO: 314217 - DNA, 201 bp, Homo sapiens
caggaatgaaccctaaaataacgtggatttcaggtgattgcgatgtgtctagtgggagatgctgcgtgtgtgtgtgtgtgtgtgtgtgtgtgtgtgtgtgygtgtgtatacacaggatacgtgggaacactacttcctgctccatttttctgttaacttaaaactgctctgaaaaacagtctattatttttttaaaaaata

SEQ ID NO: 314218 - DNA, 201 bp, Homo sapiens
gctgaactgtattgttttggttcttgctctttgcctgtcttctcttttacttctggttagttgtttcttagttgatcaaaggctcaatctttgttgctctkttaggttgttttctgtgttaggaatcatgagcctgaatgcagaggctgagaaggaagcattgaaagatgctggctagatggcagcatgggggactggtga

SEQ ID NO: 314219 - DNA, 201 bp, Homo sapiens
ggaatttttagcagtctccaggtgattcttttttttttttttttttttttgtgagacagagtctcttgtcacccaggctggagtgcagtggcacaatctcrgctcactgcaacctctgtgttagaaataccaaaattgttagataagtggtgttgtgaagaaaagtcagcacggaggcaaaagatttatcagcaaggccat

SEQ ID NO: 314220 - DNA, 201 bp, Homo sapiens
ttaattcatggggaggggaagtgattaaaaaactggcagttggtgaatattatagtttgtaaatataaataaatgtactaaggatttatttactttaaagygtggcagaagaatcagtgcttcacagttgttagtatagccagctaataagatgacttctttcctgtgcagctgcatagctgtcttcccactgctggttaa

SEQ ID NO: 314221 - DNA, 201 bp, Homo sapiens
aaaaatagaagtgtgttgtgtttattgttttgtagcctgctctccttttgtgatttgtcactacttttccatgttagtatttttagtggttgtgtaatggytgtattaatagacacagtctttaaaataatgctctactcttagacatttactttgttttcagtttttccatcctgtaaataatgtgaacatatttatcaa

SEQ ID NO: 314222 - DNA, 201 bp, Homo sapiens
ccaggaatgaaccctaaaataacgtggatttcaggtgattgcgatgtgtctagtgggagatgctgcgtgtgtgtgtgtgtgtgtgtgtgtgtgtgtgtgtrtgtgtgtatacacaggatacgtgggaacactacttcctgctccatttttctgttaacttaaaactgctctgaaaaacagtctattatttttttaaaaaat

SEQ ID NO: 314223 - DNA, 201 bp, Homo sapiens
tggattgaagggtgtgatcattttaaaggctgtggatttgtatttccagactgtttaccggaaaggcagtaccaatttatacctctctctagtgtctgagratgctgtttgtattgcatctttaacaaaccttttttcttaagattaatgactttattttttagagtagttataagttgatggaaaaaatgacctgcaaat

SEQ ID NO: 314224 - DNA, 201 bp, Homo sapiens
taaagcatgtacccaccaccccaatacatgcagaggagttccattcccctaaaattttccatgcttcccctttgtagtcaggcactactccttcccccaaytccctctccctcctctggggattgagattgactgcctttttaaattttccttttcttttgtccccacttccttttcttcagctgttgttgacaaacacta

SEQ ID NO: 314225 - DNA, 201 bp, Homo sapiens
attttccatgcttcccctttgtagtcaggcactactccttcccccaactccctctccctcctctggggattgagattgactgcctttttaaattttccttytcttttgtccccacttccttttcttcagctgttgttgacaaacactaaggtccttaggctatggtcttgaagtgcttctcttttgagatgaagactttta

SEQ ID NO: 314226 - DNA, 201 bp, Homo sapiens
accctggaagacaacctaggcagtatcattcttgacataagaacgggcaaagatttcatgacgaagacgccaaaaacaattgcaacaaaaccaaaaattgrcaaatgagatctaattaaagtaaagagcttctggacagcaaaagaaactatcaacaaacatacaacctacagaatgggagaacatgcaaactatgcatct

SEQ ID NO: 314227 - DNA, 201 bp, Homo sapiens
ggttttccagtgctcataaaaacttttacactatactgtagtctattaagtgtgcaggagcatcatttctaagcacaagtacgtatcttattaatttatarttataaaataatttagctaaaaatactaatgatcatctgagctttcggtgagtcataattgttttgctgctggagggccttgcctagatgttgatggcta

SEQ ID NO: 314228 - DNA, 201 bp, Homo sapiens
tcatctggccttctgccctgaccatgttggtttggatgatttttggtctagaggtttctgtttcttattgaggcgtgaaagtatttcagagaagaaaagcrgaggagagctctttgcccataaaacgagctcattcccctaaggatatatggatatgtgagcttcgaaactaactagaggctcattatgactttagccatc

SEQ ID NO: 314229 - DNA, 201 bp, Homo sapiens
gtgctgctaacttaaaccaaagaactctgaaagccaataagaagtcagctgattgttgctgtagacccttctaaagggactaggtccctctgaagactagkgtgtagaatggggcagaaaaacaggaggatttattataagttttttttttgttttttttttttgttttgaagcagagtctcgctctgtcacctaggctgg

SEQ ID NO: 314230 - DNA, 201 bp, Homo sapiens
cattttcctcacaaacttttcacaactcaccagtgattttacttttcttctacacaagctttaccataaatttgatatttgttcttgcttcaattttagcrtaattcatattgctctgataggggccctttcagactgctgtcctatccctcttaggacctcaagctagatcctgttctggtatgttatgacaaattagta

SEQ ID NO: 314231 - DNA, 201 bp, Homo sapiens
gcagaaggggaaggagagctggcatatcacatagcgagagagggagtgagaaagagagaaggtgctacattcttttaaacagccagcttttgtatgaactratagagcgagaacttattcgttactgtggggatgtaccaagccattcatgagggatctgcccccatgaccacaccttccatttggccccaactctaatgt

SEQ ID NO: 314232 - DNA, 201 bp, Homo sapiens
gatttcagagttttggattcaggatgctcaacttacactacaattagatgtgatttcttctttcattgagtcagtgctttcagtctgtactctaaatttgrtgtttgtactttattgttactttatatctcatcttcccaactgtattagatggtctggaaagggcaaggattatcctacctttttttttttttggccttc

SEQ ID NO: 314233 - DNA, 201 bp, Homo sapiens
ttgcagccttcagaactgtgagacaataagtttgtgttgttcagactcaaagtcatctcggactcatcttgctcattctcatttccagtgaacttccaagytctgtcaaacgtttccttaaaaggattcccccctccttttctttctattcctactgttaatcctctgtacctaatcactctttaatctcttaactggttc

SEQ ID NO: 314234 - DNA, 201 bp, Homo sapiens
taactggttcctctacaacctcaaccaccgcattttgcctcacatactaatgctagcatattattttttaaatatattacaaaattacattgaaaaagttktagagactttgttttgccaatggaataaagattacacaagaccacacagagagacttaaggctagaacccaggattttttgtgcttcaattctaacactt

SEQ ID NO: 314235 - DNA, 201 bp, Homo sapiens
gcctccataactaaggaaaagaataaattcctttttttttttttttaacaaattacacagtttcaggtattctggtgtgagcaacagaaacttaactaagrcaatttgtatattactgttaactccagactttatttggatttcaccagttttttttcattaatattctgttccagaaatcaatgacactgcattcacttg

SEQ ID NO: 314236 - DNA, 201 bp, Homo sapiens
gtcatttagaattctgcgaggaagattatcttttctcctccatttattttttctgtgtggactcatggatatttattctttgggctatcatctaatatcamattattgattgcttcattgttccagttctggccattaggaattccttcattttggcttttgtatttctttcatatgaccccatccttttaattttttttt

SEQ ID NO: 314237 - DNA, 201 bp, Homo sapiens
ccattttccactttgctaccacacatctgcagggtttcttgcttgcttaaaagctttcattggctcccaatctctgataatatcaagagcaagttcctgarcaactcattcaagacccatcacccctcgcatctgtcaactctgccccttgaatattacacctcattttactacaccacatctagttccctgaatatgcaa

SEQ ID NO: 314238 - DNA, 201 bp, Homo sapiens
aaataaacaggtacctaaaaagagatctcagttatatattcctttagaaagactatgttaaaatgaatttgctaacattataattaccattttaattacaytgtgtttgatagtgcactgaattctgagatcagaaagtatagagctttccttcctttttttttttttttttttgagacagagtctcgctctatcccccag

SEQ ID NO: 314239 - DNA, 201 bp, Homo sapiens
accaggaatgaaccctaaaataacgtggatttcaggtgattgcgatgtgtctagtgggagatgctgcgtgtgtgtgtgtgtgtgtgtgtgtgtgtgtgtgygtgtgtgtatacacaggatacgtgggaacactacttcctgctccatttttctgttaacttaaaactgctctgaaaaacagtctattatttttttaaaaaa

SEQ ID NO: 314240 - DNA, 201 bp, Homo sapiens
tagacttagaatgaattatgggttaatttggagggaattgacatctttgatattgaatgttcccaaccataatgtgacatagctcttcctttttttaaaawaaaaaaaaaaaaagatagggtcttggtctgttgcccaggctggagtgcagtggcatgatcacagctcactgcagcctcaacctcctgtgcttaagtgatc

SEQ ID NO: 314241 - DNA, 201 bp, Homo sapiens
ccccacacgactttaattcttttggcctcagtttctttcctttcttaaaagttgggtgcagtctggggacacggacagatttagcttagcggaactgtgcsgcatgttttgtgcagccagcacacacaggtgctttgccagttgctgcacctctctctgcccgtggtgtgattttattcagctttcttgcatggctgcagc

SEQ ID NO: 314242 - DNA, 201 bp, Homo sapiens
acataatgctcttctgagcacttttatttaatagcagaatggttgatatcattatttagttaaggtttcctctattatcgaacatctgagttcccagtacwctagtctccccttatctgtggttttgcttccaaggtttcagttatgatcaaccaagatctgaaaatattaaatgaaaaattccagaaataaaacaattca

SEQ ID NO: 314243 - DNA, 201 bp, Homo sapiens
atatcagatatgtgtgtgtgtgtgtgtatatcagactttgatcattgtcaatgtgattacaaaatatatcttactgttgctaaagtttttatttgaatttytcgttagagaaactgagaaattcaaatgaaattgaaaagacacaactttttctgttgtttaagaattgttcctgtaactttaagtgaatataaattattt

SEQ ID NO: 314244 - DNA, 201 bp, Homo sapiens
tagagaaacaagattatgttgatgatactaatggtagttaatatttactgaacacttagtgtcggacactgtgcttggatgtggattaaaataatcctagratggatatataaattaccttttcatgtaaagaaactagggttggagaaattactagtccgaggtcacatagttaatatgtagctatcaggatgtgaacct

SEQ ID NO: 314245 - DNA, 201 bp, Homo sapiens
gatttttgctaataagtgtgctgtttagttttaattggcattctccagttaaaattttccaatttcaattttcaattttacattgcacacttttcccatgygaggttttaagtgttgcctttacataaaggaatgtgttgagaatggtggtgccatcttcaacaaacctgacaaaaacaagcaatggggaaagcatttcct

SEQ ID NO: 314246 - DNA, 201 bp, Homo sapiens
atgtatactgaaaagtttagtggggcatgctgctttacctggctttgtgttttcaccattgtacttattttatatacctaattgtacattttaagcagcaratgaccttgcagcaaaaatgtcttggtgtgagatgcaaaatgaatgaaaaacaaccacacctaggcttttgtcactcaacctaaactactcttcatgacc

SEQ ID NO: 314247 - DNA, 201 bp, Homo sapiens
attctccagttaaaattttccaatttcaattttcaattttacattgcacacttttcccatgcgaggttttaagtgttgcctttacataaaggaatgtgttragaatggtggtgccatcttcaacaaacctgacaaaaacaagcaatggggaaagcatttcctatttaataaatggtgccgggaaaactggctagccatatg

SEQ ID NO: 314248 - DNA, 201 bp, Homo sapiens
acatagaacttgatatacagtagtaaattaaaatatttaagggtatttcaaagtccaagaaattctagactgggctctatataataagtcagcttattcarttagctcagaaataaaaatttaggaggtgtgtatgatttgctttggaattgttcatctacataatctaaataacttcagaaacttataaggtgtacctag

SEQ ID NO: 314249 - DNA, 201 bp, Homo sapiens
cattttgaaggaagagatatcagaattctagagttaggaggcccgagccggcagatcacctgaggttgggagttcgagaccggcctggccaatatagtgamacccctctctactaaaaatacaaaaattagccaggcatggtggcacatgcctgtaatcccaactacttgggaggctgaggcaggagaatcacttcaacct

SEQ ID NO: 314250 - DNA, 201 bp, Homo sapiens
gttagtgtaagaattggtagacaacattttgtatgtaatactttcccataaaagaggaaacatatctatgaaatgtttagtttgtgttttaatagataaayctcataggacttaaagacaagaaaggcatatgagttgcagtatatagaagaggaaactttgatagcagtcttgagattgactggaggaggaatatggtag

SEQ ID NO: 314251 - DNA, 201 bp, Homo sapiens
gtcttgagattgactggaggaggaatatggtaggagatgtgaactctgggtaatagaagattgcaacagaagtgaaaccatttgatagtgttcactattcrgtagatatttactgagcatttgttttttaagccaggcagtggtatgctgtagcaatgtctttgagaatttacatttctatcgatgttaataaataagaat

SEQ ID NO: 314252 - DNA, 201 bp, Homo sapiens
gcgagactccgtctcaaaaataaatcaatatgaaaatatggatttctcatcatgtggtagctttcttgggggaaaaaacttgggttccagttttctctatraaatgaagtatagtatcatttcctaattcttaggaataaaaatttctttatattcaaggttctaggtttcattggaggtgaagcagtacttttatctagc

SEQ ID NO: 314253 - DNA, 201 bp, Homo sapiens
gttaaacatgattgaatacatgctgcctcctaaaacaccattcaaaattgtaataagtgaataagaaaaggcataaacccacaaagacaagtagaacggargaggagacagtggcagacatgagatgttagtattttggaagcttgaaatcagcaggatgagtgctgctaacttaaaccaaagaactctgaaagccaataa

SEQ ID NO: 314254 - DNA, 201 bp, Homo sapiens
gcatagctgtcttcccactgctggttaacttcagtgcatagccttgtgatcattctttgcaagggttttggcatttctgtaaacggtgttcaatgttaacrctatttgtggagatgcaaactcttgacatttatttatatttaataaagtttattgcagcatgtatttttaattccttacttatgttgtctgacttgaatt

SEQ ID NO: 314255 - DNA, 201 bp, Homo sapiens
tatttgtatgtgagaaggatatgagtttgggaggtcagggatggaatgctacggtttgaatatttgtccccaccgaaactcatgttgaaacttaatcctgratgtaacagtattaagaagtgaggccttcaagaggtgatggggtcatgagggtagagtagtttgatccattcatggattaataggttatcacaggaagaa

SEQ ID NO: 314256 - DNA, 201 bp, Homo sapiens
gtggcaaatgggaacttaccattttggggaaatgggatttgtgagcatatgctgttaattaaagaagatacagattatgcatcccaaatcctaaaatccamaatgtaccaaaatctgaaactatttgagcaccaacatgacactcaaatgttcattggaccataagtataatgcaaatattccaaaatctgaaaaaaaaaa

SEQ ID NO: 314257 - DNA, 201 bp, Homo sapiens
ccatgttttcatgtaacataaggccctcactagaagctgccagatgcagcctctcaatcttgaactttctggcttgtagaaccatcacctaaataaacccrtttttaaattttgttttataagttacctagtctgtgtatcctgttacagtagcacaaaatggactgagacagaaaattgatactgagaagtgttgctaat

SEQ ID NO: 314258 - DNA, 201 bp, Homo sapiens
cttttatattgttaaaaaattcaaagtacacactgtcagaaagcatttgcttcagttaaataagagctcacactagttaattgcaactggacttttattgkgcagttacaacaacaaatgttttcagaaaaatatttggaaaaaatataccacttcatagctaagtcttacagagaagaggatttgctaataaaacttaag

SEQ ID NO: 314259 - DNA, 201 bp, Homo sapiens
gccttctgccatgatcgtaagtttcctgaggcctccttagccatttggaactatgagtcaattaaacctctttcctttataaattactcagtctcgggtartgtgaaaactgactaatcatgtagtttcttgacacacacacacactctctctctctctctctctccattcctaagctaagtacttaaaagagacaccctg

SEQ ID NO: 314260 - DNA, 201 bp, Homo sapiens
ctttgatggatgaggctgatgagggaaggagcagtgtagttggaggtttgtgaatcagtagttctacttttgccatgttaaatgtgagatacttattatcyatgtggttctgtttaggtggcagatctaagagttcagtgttcacgggagaaggcatgagtgatttcgcagtgtattaaacttttagggctgcataacaaa

SEQ ID NO: 314261 - DNA, 201 bp, Homo sapiens
tttttctcacagttctggagattgaaaggctgagatcaaggtgtcagcagatggttctcttgagccctctctctgtggctaatagactgctgccttcttgytctgtcctcatgtggccttttctctgttcacatgcatccctgtgtttcttcctcctcttataaggacaccagtcctgttggattaggaccccacccttat

SEQ ID NO: 314262 - DNA, 201 bp, Homo sapiens
gggggagaaaagagagaatgtggtaccctggaagagaagaacgtgttgtcaggatggagggtttttccacttgggcagcatgctgctgaggctctggggcrggaatgagtgtagaatgttagggaactgaaagaagaccagagtggctggagtattgggagtgagtagtaagggatgtagtggaaaaagtggtaaggggcc

SEQ ID NO: 314263 - DNA, 201 bp, Homo sapiens
aagttagcacagttcatagcaagtcttttgtgatattgattgcagtgtatagtacttagtttaataatgtttgtaatgtatattcaagctccagagagaartggtttgtgtgatctacggcaaaaaggttatatttatctttttcatttgaatcaccattatctctttttgttacatttaattacaggactgttccctgat

SEQ ID NO: 314264 - DNA, 201 bp, Homo sapiens
ttatgttacatgcttagcccagtaactgacaaatagtaaacactcaaaatttaactattattaataattttaatgcagttttatatttttagaggttgccrgatttttcattgagagtctcttgtatgttacaaaggatggccctttttatcctcatatctgtaacattcttctgttttgggtaaggatgccagagattat

SEQ ID NO: 314265 - DNA, 201 bp, Homo sapiens
tgcagcaagacttagctgctgaagtgcaggcaggggtacgtgatagggtttagttggtgccaggattttgctaggattgtaaaaaaggaaaaaaggtttgrgggagatgatgacattttgacaggaaagtgaccatattaaaggactggtgaaattgggctggatgaagagcaaagtgaagccagcacagatggggagaaa

SEQ ID NO: 314266 - DNA, 201 bp, Homo sapiens
  misc_feature (1)...(201): n = A,T,C or G
aactgacaaatagtaaacactcaaaatttaactattattaataattttaatgcagttttatatttttagaggttgccggatttttcattgagagtctcttntatgttacaaaggatggccctttttatcctcatatctgtaacattcttctgttttgggtaaggatgccagagattatactgacagttagactatcatgtg

SEQ ID NO: 314267 - DNA, 201 bp, Homo sapiens
tgtaatgtggaggtttcactggcaattttatttcaagaagaaaaaaagaattctaatgtttaaaccactggattaattcagtaggctttattaaagctaaracatgaggcttaggaagttagaaaatatccaccccagtcatcaaaagtatattgctgtccatccctggagatttaatttaaaagaaaaatagaatacata

SEQ ID NO: 314268 - DNA, 201 bp, Homo sapiens
aaactgatacccaatatgctaatagcctaaataggtaagtgtagggaagaacaaagaagttgcttatgaaaggtttaaggaagcaataacatttttaaataaggaaggggaataggctgtgagctcgaacatgcccgtgagcatgtccaatagttacgtaggatagggcttaacaaagagttactagcacaaagcaaggag

SEQ ID NO: 314269 - DNA, 201 bp, Homo sapiens
cttctccggtagtttttgagaagtaatgctccattgcattttattgaagaaattatatatacagtacagtggtgtccacattttgatgttttcagtggaayctttaagaaaaagttcttacatgtaatctaacatacaaattagataaatgtcaaattgctctggttgaggcagcattggggaaaccttcttcctatcttt

SEQ ID NO: 314270 - DNA, 201 bp, Homo sapiens
ggtggtagttacacttctcatctacaaaaataaatatcttatcttattaaagacagggttcatttgtgtcaagaagtagagatccttgacaaacaaacaaracttactgttaatcactatgatttgagtgccattccctcgccaagaaattttagaaaagcccttttcatatctggactttttttgggtataaacaaacaa

SEQ ID NO: 314271 - DNA, 201 bp, Homo sapiens
ttttttgtagagacaaggtttcaccatgttggccagactggtctcgacctcctaggctcaagtgattcacccacctcagcttcccaaagtgctgggattayaggtgtgagccaccacacccggccttttactgtattcttaagggggaaatccaaagttaatttctcccatgggatcttatacagtattaaaattttgtta

SEQ ID NO: 314272 - DNA, 201 bp, Homo sapiens
tgtatcctaaaactttactaaagttgttgatcaagtctatgagtctttttggaggagtctttaggattttctaggtataagattatgtcatcaatgaacaragataatttgttggaatgtccttcatttatttctcttgcctgatagctctagctagtaattccagtactatgttgaatagcagtggtgagagcggacttc

SEQ ID NO: 314273 - DNA, 201 bp, Homo sapiens
cctttttttttttttggccttctcgtaacaactaggaatatacagttatagagaaatttttaaacaattataccctaaataataaacatcttgtatagcckttgaaagagtaaacaacaggctggaagtgaacagtctcttttttttcagtagtggggttttgtatttatcttggtttggaaggccacacttttcatgtct

SEQ ID NO: 314274 - DNA, 201 bp, Homo sapiens
gctgcccttataattattcccctctcttccccagtaaacacaatattcatgattgacatcatctcagcctaagtataaaaattgggtcctaaaaattgatmtagctgctaaaccgaggggatctctgctaagctgaggtttgctctgctaaaccgaggggatcttccaagaatggcctcatttcctttttaaaattcctaa

SEQ ID NO: 314275 - DNA, 201 bp, Homo sapiens
caatatccatagcctctttattcacaatagtcaaagctggaaacaacccaaatgtccatcagtaggcaaatcaaatggataaacaaattagggatatcctyaaaatggaatataacttgacaattaaaaaaggatgaactattggtatgtcaaaccacatggatgaatctcagacatgttgagccagataaaaaagatgga

SEQ ID NO: 314276 - DNA, 201 bp, Homo sapiens
aagccatcccttgaatgtaataaattagctcctatttctgtcctgtgcttctcgaatggtactagttatgtaccatccttgggagaattgagaatataatyacatcatttgcagtgatctgtggttcagatgaggaacccctgagaaagtttgttttatactatattttatcagctcccttaaaaatattgtgtcttttct

SEQ ID NO: 314277 - DNA, 201 bp, Homo sapiens
ggattggtaagctgccctttggtgctataagtgggcagaacttccattttttttttacagaagcctgagaattatattgctctagcacatcatttctgaakgcactggccatgttcttcagttctggggcttgtataggttggtataatgtttgtatatattcctcatatgtaacaaccaagaatatttatttcaaaagaa

SEQ ID NO: 314278 - DNA, 201 bp, Homo sapiens
atttgtgagcatatgctgttaattaaagaagatacagattatgcatcccaaatcctaaaatccaaaatgtaccaaaatctgaaactatttgagcaccaacrtgacactcaaatgttcattggaccataagtataatgcaaatattccaaaatctgaaaaaaaaaaaaaaaatcaaacctgaaacacttctgatcccaagca

SEQ ID NO: 314279 - DNA, 201 bp, Homo sapiens
gacattttaattagaagggctgggtcactggagattagtcaccttatgatacattgcaattgggacattgatctataaattctacttaatatggtctttcyaaacaggaggtttaattaaaaagtgatcttttttaaacaagcaagagactctatctcttgccatagctgagtcttatgtagtgtttctgtgttaggtaca

SEQ ID NO: 314280 - DNA, 201 bp, Homo sapiens
tgtgtctttctcgtagaatgatttataatcctttgggtatatacccagtaatgggattgctgggtcaaatggtatttctagttctagatccttgaagaatyaccacactgtcttccacaatggttgaactagtttacagtcccaccaacagtgtaaaagcgttcctatttttccacagcctctccaggatctgttttttcc

SEQ ID NO: 314281 - DNA, 201 bp, Homo sapiens
tacgttatatacagatttcttcagatttctctgttacacaatgtgacagaagtcaatgggttgagaagttgtgaagtagttaggatccaagagttttctcyccaactaagtcgttatttagtataaatataaaataaaaatattatcagaaatggtaaatatattgctgacatattactgagaatatttcagtaactattt

SEQ ID NO: 314282 - DNA, 201 bp, Homo sapiens
ttaatactgcaaaatacataagcagtgagacctggtgattaagttatattgtgcaaggctttaagtcagtatacaggaaacttcttcacaattattaagtmtgtcatattataatctggctgcaaactacttattctgcctaccctctcaccactcgtttcctcagccagcctttgttccactaatgttttaacatcttaa

SEQ ID NO: 314283 - DNA, 201 bp, Homo sapiens
ctgattattgggtgtcacaggacctctgttcagcccttcagatgactaaaatctaagactaaacagaaattgctgttaacatagaagtacttaaaatgcakttcatcctagttgttcttataatagtgacattatcgtagacacatttttaaatccagatagttatttgtactttttcacaccagtttttgcttttgtcac

SEQ ID NO: 314284 - DNA, 201 bp, Homo sapiens
gtaggactgattacataatttgcaggcctagtgtaaaatgaaaatttgtgtttccttgttcaaaaattattaatagcacagcattaaaacaagcacagggmccttctaacgatgaggccttgtgagactcaggtttcacacacatgaagctagggcggcaaggaagatttgaatctcagtctgactaacaggaaagcccat

SEQ ID NO: 314285 - DNA, 201 bp, Homo sapiens
ccttacagaagaatatgtactgtcacaaacacatatgtatatgaatatatgattgaatatatgtgcatatgcatataactttaatgagtttgtgtttatartatgcttataccatcttctgttacatttgaatagaagtgggaacaagatcctgaaactttcctgatcattataaagggagcaggaggaaaggctttctgt

SEQ ID NO: 314286 - DNA, 201 bp, Homo sapiens
acagaaaacttaagacaccagcatttcttaatataagatgttttatgaactctagcttctgaaaatgtaatcctctagatcattggcgctcaaccttgttkgcactttagaattatttgggagtctttttaaaattccagtgcctaggcttaccttatctcccataatcattaaattggatagtggacagtggagtgagac

SEQ ID NO: 314287 - DNA, 201 bp, Homo sapiens
cccagtgtgcacaggattcagacatggaatggagattactctctagctttaagagttaatgtcttctttctcagggttttaaagacttaattgaggcctgwtactcctttcttttggcctatttctgccttttagaatgggaatgttagaaatccttgttcccaggtgccgcaaagaaatagcacttgaacataaatttaa

SEQ ID NO: 314288 - DNA, 201 bp, Homo sapiens
atagagaaatttttaaacaattataccctaaataataaacatcttgtatagcctttgaaagagtaaacaacaggctggaagtgaacagtctcttttttttyagtagtggggttttgtatttatcttggtttggaaggccacacttttcatgtctgatttacaaacttctgtgatttgagtatgggttgtccccaccaaaac

SEQ ID NO: 314289 - DNA, 201 bp, Homo sapiens
tttaccattttaatatcactgattattgactgtactcaactgcagaaagatactttataaatacttgtctaaaagcctcggtttataactaaatatgaagytgaattacttaatgagttccatagtgaacaatatggcactagcactaaaatggagaaaccataggaacaaacctttgcctatctgaaataactctactgg

SEQ ID NO: 314290 - DNA, 201 bp, Homo sapiens
ttaaatatccaatgacgtacgttttatggcaaaaacctttatttgaggtaggacataccataattgtagaatggttagatagtacatttaaattttaatgycctgtgagtctgtatctattgtgcctttagttgtggtcttttctcatatgtctgattatttctgagttatttctaattgagtatttaaaatgcagatatt

SEQ ID NO: 314291 - DNA, 201 bp, Homo sapiens
gccgttgatacttttaagagctagtctagagttctacatgctgtctgaattttgatcatacagcggtagttatttatgagacagttagatgtaatttgacygaaagtgacaagtgacaatctttcacaaagtgtatcattaaatatgaatttttaaggattaaaaaattgtgttcaaatttattaaaagatttttcttttc

SEQ ID NO: 314292 - DNA, 201 bp, Homo sapiens
cagcagatctggatgcaatggttttggcactcatcggatggaaagtttgctcagctttaatttttcagtcagaattgtgtaaactgaaccaattataaaasaattgtggcattggctattgttcatgccattaactctcaatcatcttcaattagggcatgaacaagataaattttttcctcacaaattgatgtggatggt

SEQ ID NO: 314293 - DNA, 201 bp, Homo sapiens; identical to SEQ ID NO: 65447

SEQ ID NO: 314294 - DNA, 201 bp, Homo sapiens
ctaaagattaatgcagcagtttgattttcttcaaattaggcttccgaagatgagtcaacagttatatatatatgtatgtatatatatatatatatatatatatatatatattataaatgttttagaaagcaatagttattaacatgtgctttagagttttaaacaggtctaagtatgacaaaccattaccactttctacct

SEQ ID NO: 314295 - DNA, 201 bp, Homo sapiens
tctaaagattaatgcagcagtttgattttcttcaaattaggcttccgaagatgagtcaacagttatatatatatgtatgtatatatatatatatatatatatatatatatattataaatgttttagaaagcaatagttattaacatgtgctttagagttttaaacaggtctaagtatgacaaaccattaccactttctacc

SEQ ID NO: 314296 - DNA, 201 bp, Homo sapiens; identical to SEQ ID NO: 65449

SEQ ID NO: 314297 - DNA, 201 bp, Homo sapiens
gttcaagtgagcgcgcagacgctattggtaagactcgcgggaaaagaaagggtgagcgcggctggaagcgcgcatgcgctgtggctaatgccgtaggctcyttcagggctgagccatcccgcgtgtcttgcgctcggtggaaatgcccagccgagggacgcgaccagaggacagctctgtgctgatccccaccgacaattc

SEQ ID NO: 314298 - DNA, 201 bp, Homo sapiens
gttgggtgttttcctccctagtctttttaaacttttggaaataccgcccaccccaaatctgttccatcaaagatattctccatccagttaaccatgccagyaacccggggtccatccttgacccccatcatggaagcctatcagttctacctttgaagctcatttcaaatatgtccctttatcaccgtgaacactcttacc

SEQ ID NO: 314299 - DNA, 201 bp, Homo sapiens
cgctattggtaagactcgcgggaaaagaaagggtgagcgcggctggaagcgcgcatgcgctgtggctaatgccgtaggctccttcagggctgagccatccygcgtgtcttgcgctcggtggaaatgcccagccgagggacgcgaccagaggacagctctgtgctgatccccaccgacaattcgaccccacacaaggaggat

SEQ ID NO: 314300 - DNA, 201 bp, Homo sapiens
ggttgggtgttttcctccctagtctttttaaacttttggaaataccgcccaccccaaatctgttccatcaaagatattctccatccagttaaccatgccarcaacccggggtccatccttgacccccatcatggaagcctatcagttctacctttgaagctcatttcaaatatgtccctttatcaccgtgaacactcttac

SEQ ID NO: 314301 - DNA, 201 bp, Homo sapiens
tggttccatatccctaaagtgtcatttctttagacctgataaagatcagacacagattgaatagttagttaagatcatgctcgtaggctaggtgcggtggytcactcctgtattcccagcactttgggaggccaaagcaggtgggtcacttgagttcaggagtccgagaccagcctgggcaatgtggcgaaatctcatctc

SEQ ID NO: 314302 - DNA, 201 bp, Homo sapiens; identical to SEQ ID NO: 65452

SEQ ID NO: 314303 - DNA, 201 bp, Homo sapiens
ggaactgggtcgaatttcttctagaaatcttggtcgtgatgacagagttattggtgatcatggaaaagaagcaaggtaattctaatcatttgagtgttctwacggtatttttataaaaacagcagagtgtaaatggagactttaaagtttgttttctctttggagactgttcacatgaataagagcagcaataatagcttg

SEQ ID NO: 314304 - DNA, 201 bp, Homo sapiens; identical to SEQ ID NO: 65456

SEQ ID NO: 314305 - DNA, 201 bp, Homo sapiens; identical to SEQ ID NO: 65448

SEQ ID NO: 314306 - DNA, 201 bp, Homo sapiens
cacagagactcctgttgaaaatgatctgtatattcacaaactgcccgtttggaaaaccagtacatcatagccccttatcccatctctaattttaaaacaamcccttaagggattttcattgagcatactttgaaaacatctgacttaaggagtttttctttatttcaatagattaaagaacaaaaaattgtggtggatgaa

SEQ ID NO: 314307 - DNA, 201 bp, Homo sapiens
cacatacaaaaattagccaggcgtgtgcctgtaatcccagctactcaggaggccgaggcacaagaatcgcttgaacctgggaggcagaggttgcagtgagytgagcacaccactgcactccagcctaggctacagagcaggactccttctcaaaaaaaaaaaaaagaagttgaggcagaattaatacagactttctctaga

SEQ ID NO: 314308 - DNA, 201 bp, Homo sapiens
tgcctttgcaacaaatgatactagttgtattttggtatcttggagctataatcactaatgatgttttatacctgaatttgatgttttcttttgatataaaygaactttatattgagatgagaagaaacttttcttttaaatgaatgtggataattattgaacaaaaaaggatacattgcttcccctccctccaaaaaattt

SEQ ID NO: 314309 - DNA, 201 bp, Homo sapiens
ggaaataatgatggaactgggtcgaatttcttctagaaatcttggtcgtgatgacagagttattggtgatcatggaaaagaagcaaggtaattctaatcayttgagtgttcttacggtatttttataaaaacagcagagtgtaaatggagactttaaagtttgttttctctttggagactgttcacatgaataagagcagc

SEQ ID NO: 314310 - DNA, 201 bp, Homo sapiens; identical to SEQ ID NO: 65453

SEQ ID NO: 314311 - DNA, 201 bp, Homo sapiens; identical to SEQ ID NO: 65455

SEQ ID NO: 314312 - DNA, 201 bp, Homo sapiens; identical to SEQ ID NO: 65454

SEQ ID NO: 314313 - DNA, 201 bp, Homo sapiens; identical to SEQ ID NO: 65457

SEQ ID NO: 314314 - DNA, 201 bp, Homo sapiens
gaagaatagggtgagttattataggaattctgaataatatgtgggaggtttatttatgttaactatatattaaagttataagaagtatatataagatttartcatactttaataaaatgtatagtatttcagcatcttttaaaattgcaagtgtctagattctttttttaaatggatagatctcatagctgaagatgtctt

SEQ ID NO: 314315 - DNA, 201 bp, Homo sapiens; identical to SEQ ID NO: 65458

SEQ ID NO: 314316 - DNA, 201 bp, Homo sapiens
tggaactcttgttaatcagataataaaaatcacagattgatcttctctatttcttaacatttttttcatttttcctatttttgccttttcccctactccamggctttctcctaagttgttttaattttgctaatcacaattttagtttccattgattatttcataattccctgattgcttcctccccatagcagtctattg

SEQ ID NO: 314317 - DNA, 201 bp, Homo sapiens
aagagtaaggaagaagcattatttttccttttaacttatatttacacttcttggttaggataatctcaatccaaataagtgagtcaatcatttatgcaggtttttttttcttttcttttgagacagagtttcactctgtcacccgggctggagtgcaatggcgctatctcggctcactgcaacttccaccgcctgggttca

SEQ ID NO: 314318 - DNA, 201 bp, Homo sapiens
ttattaattctttttggaagtatatcccttttctttgctgatagactctttcggagcagaaaccttcttctaaatcatttgtatccctggtacctagtcawatggtttatgttgtagactttcagtaaaagtttcttgaggtgaagctaacagttttgaattcaaagcgtgcctgtataaatgaatagattatcaacactt

SEQ ID NO: 314319 - DNA, 201 bp, Homo sapiens
taattaattctctcagtttttgtttatctaggaatgtcttattctgcctctatttttgaaagggttttgctgaatatgaaattcttagttgacatatgtattttttttcctttcagcatgttcaatgttattcttctgccttgtggcctccattgtttctgatgagaagtcatcattcattctatttttgtatttcccttt

SEQ ID NO: 314320 - DNA, 201 bp, Homo sapiens
agatttagtcttagggctatagtttgtgacctgtgttctagacaactagtctgttgtcttgtggtgattagtattgtaggtgaggtctgatgtcattcatkttttcctttgtaagaaacttgttttttcattgcttgacttcttttaggaatttttgttatttttgatttccaaatttaatattcattaattttgtgaatt

SEQ ID NO: 314321 - DNA, 201 bp, Homo sapiens
agacggggtttcaccatgttggccagggtggtctcgaactcgacctcgtgatcttcccgcctctgcctcccaaagtgctgggattacaggcgtgagccacygtgcctggctcgaactttaatattttctattctatttcatttaaaaattgtagcccactattgatttcatgactaaccaatggatcatcactggaaacat

SEQ ID NO: 314322 - DNA, 201 bp, Homo sapiens
agaaatcagagaaagaattgatgtcattacaaaacaaaaaacacatcctgaaatgatctttcagaaacaattaatcctcttaaatttgttcctcttttccrcagggggacttgatctcatcttcatgccaggccttgggtttgacaaacatggcaaccgactggggaggggcaagggctactatgatgcctatctgaagcg

SEQ ID NO: 314323 - DNA, 201 bp, Homo sapiens
tggaaatgaaatttgctgtgagttgaaagttggcagatggcaacacagctagggagcaataattttgttgtggggaggatttggtcatctccagaaacccrggagtcacgtggctctcttactcacactccatgtccatcctgtcaccaggtcttgttgattttgcctctgaaatgcctcttaaatctattctctcctttc

SEQ ID NO: 314324 - DNA, 201 bp, Homo sapiens
ggggtctctgtgcctttgaccccaaatctccatgcctgtacctggtgaactctacactcatgtcttctgctactcctcaggttgatccttctgtccaagcragtaaactgctccccactccctactccctcactcagctcttgccacctttcttttggtttctgaaagatacttagacccaactctgacacatcttaaaaa

SEQ ID NO: 314325 - DNA, 201 bp, Homo sapiens
actaacacagaatgtgaagcaagtgcacacaggattaaaatcagagcaggttggctcttgcacattgcactgtcagtggacgctattaatgagtctttggygatttgaaaacagagcaatgccagaggcatatgcagaactgtgcacggactaaggtttttcttctgtctcccctattgaattctgaccttgtggtgtgtg

SEQ ID NO: 314326 - DNA, 201 bp, Homo sapiens; identical to SEQ ID NO: 65483

SEQ ID NO: 314327 - DNA, 201 bp, Homo sapiens
tctctattctcttattctcagtactctaatggattttctttttttgtgcttctttaccatcatataaatgggatttgaggaaggaagataaatatgcatgyacagtctcacattgagtgttaactgatgtttattactgcttattcaactctcgatcttctatattctgctgtaaagagagcaaaaaggatacttaacttt

SEQ ID NO: 314328 - DNA, 201 bp, Homo sapiens
agtaacttatctctgtgttatctgtagttccttgggcagggccttccataaagtgagtcattagtaatgactattgatttgaatccattaaattttgattsaaacttttttctgctcttttcctgtaaagctgttttagaaggttttagagaggattatgttttttttttttttttttttgagatggagtctcgctctgtc

SEQ ID NO: 314329 - DNA, 201 bp, Homo sapiens
gcctggaccctgcttatgagtcaagtttcttacactatattgaagtaagcaccagaaagcgtgtacaggtctatgaaagctcagtttctggacatttactytcaaggactttttttttttttttttttttttttttttttttgttgagatggagtctcactttgttgcccaagctggagtgcagtggcgcaatctaggctt

SEQ ID NO: 314330 - DNA, 201 bp, Homo sapiens
tgggctttgctagatgttaggcaccaaaaatacattcagatctacctccttcatgtcctgcatcaataggccagatgaatgtcagcattttaaaactcttwcatattttcaaggggaaagattgcaagcattttaaggcaatgagataataagggaatacagagtatcttggagagcagcctaggtttatcgagaagaaaa

SEQ ID NO: 314331 - DNA, 201 bp, Homo sapiens
aggcttaatggtggaacccaggatactgtcccaattccagttgactctgttaacagctccttcaatgcttgtatcatctctataatgtgcctgctaattgraattttacttggtttcctccagtaactaattcctctagaggcagctcattccttttagaacagctgtgctccttctagaacatcttctttgggttgagct

SEQ ID NO: 314332 - DNA, 201 bp, Homo sapiens
aaatcaggagctgagcccagtgatcaattatgtccactctgcctttttcttttcctttctaaagtgttgtatttgttcactcacttgtgtaacaaatattytgagagtcctactgtgtgtgacactgtgccaagcaagggggtactaacttgtcataagcctggaccctgcttatgagtcaagtttcttacactatattga

SEQ ID NO: 314333 - DNA, 201 bp, Homo sapiens
atttatgcaggtttttttttcttttcttttgagacagagtttcactctgtcacccgggctggagtgcaatggcgctatctcggctcactgcaacttccacygcctgggttcaagtgattctcctgcctcagtagctagaattacaggcgtgcgccaccgtggctggctaattttgtatttttaatagagatggggtttcac

SEQ ID NO: 314334 - DNA, 201 bp, Homo sapiens
gtcggattctttcccaagtttatcctcaaggtaagggctgcttgggcaattagattagagcaggaatttttccaatgcaagtatatagtctgattcaacckggcttaagcaaaaatgagattttattggcccagagactgaaaagttcacagaagggctggctggatcagtggcattaggagccagtctatctctgccttt

SEQ ID NO: 314335 - DNA, 201 bp, Homo sapiens
agacctaccttacatatctgttatggagtttaaatgagaaaatgtctgactagtgtttggcacatagtaggtgctcagtaaaaatgccattgttgctgctrtggctgctgttgtttttgctgatgttgagtggtcaagcatagggtaatgttatgtgctttgctgtgaaagtgattttgtttataccattttccagtctag

SEQ ID NO: 314336 - DNA, 201 bp, Homo sapiens
tggctaattgttgtatatttagtagagatggggttttaccatgttggtcaggctggcctcgaactcctgacctcagatgatctacccgcctccacctcccwaagtgctgggtttacaggtgtgagccaagtatatcttctttgattatttattttcctttgtgcctttttggaactcttgttaatcagataataaaaatca

SEQ ID NO: 314337 - DNA, 201 bp, Homo sapiens
ggcgtgagccaccgcgcctagccagtttttcattttttgagacaaagtatcgctttgttgcccaggctggagtgcagtggcgcaatcttggctcactgcarccttcgcctcccgggttcaaggagttctgtgcctcagcctcccaagtagctgggattacaggcgcctgccgccacgcctgactaatttttgtattttttg

SEQ ID NO: 314338 - DNA, 201 bp, Homo sapiens
gcagcctcagctgtttgttatctcctaacatcacactctgtactgtggatttttacttgcatcagcaacttaaaatgtgacaacttcagtgcttaagcatwcatctagctttacagtgtttgggacaagctgatcagagctcaggctgtcgttggtgtagcttttgttgtctgtttatctttcttgtttgctcacattatc

SEQ ID NO: 314339 - DNA, 201 bp, Homo sapiens
ctcctgtgttttcgccctgtattttgacacctcagcataccttttgtcattggatttgctttattatatcctatatatgtagtttaaaagttttttgtttgttttttttttttgctttactacttgcagggattaggagtccactatttaatagagaaccccatttcatttaccccactttataaaaggttagaaaagtac

SEQ ID NO: 314340 - DNA, 201 bp, Homo sapiens
tttcaagtctaccatgaagctggggagagggggatgggaatggggcaagttgaaaaggcacaaagctcactgttcttacagagaataaacatttagattgktgtaagcctttgactaatttctagagttttgaaaagttgattttgaccatttttcccaatgttcttgctggttttattaaggagcagatttttagttttc

SEQ ID NO: 314341 - DNA, 201 bp, Homo sapiens
tttttttttgagagggagtctcgctctgttgcccaggctgttatgcagtggcgtgatctcggcttactgcaagctctgcttcccgggttcatgccattctyctgtctcagcttcacaagtagctgggactacaggcgcccgccaccacgcccgactaattttttgtatttttagtagagatggggtttcaccgtgttagcc

SEQ ID NO: 314342 - DNA, 201 bp, Homo sapiens
tcctgtgttttcgccctgtattttgacacctcagcataccttttgtcattggatttgctttattatatcctatatatgtagtttaaaagttttttgtttgttttttttttttgctttactacttgcagggattaggagtccactatttaatagagaaccccatttcatttaccccactttataaaaggttagaaaagtact

SEQ ID NO: 314343 - DNA, 201 bp, Homo sapiens
gagctgagatcatgccactgcactccagcctgggcgacagagcgagactccgtcttaaaaagaaaaaaaagaacaaaagcagaataaactaatttactgtkggatgaagtaggcagcaaatcatgagatggaaattgaacagaaacaaaaaatatcttcctaactgcccatgtcattactttgggttaaagcagtcaaatc

SEQ ID NO: 314344 - DNA, 201 bp, Homo sapiens
tctttaagtacactgccttttttcttccatcatctcaaacccattgttgaatccatgtagtgcattttttatttcagtagttgtacttttctttttttttwaaaaaaggagtttcactgttgtcgcccaggctggagtgcaatggtgcaatctcagctcactgcaacctctggtccctgggttcaagtgattctcctgcct

SEQ ID NO: 314345 - DNA, 201 bp, Homo sapiens
ctttaagtacactgccttttttcttccatcatctcaaacccattgttgaatccatgtagtgcattttttatttcagtagttgtacttttcttttttttttwaaaaaggagtttcactgttgtcgcccaggctggagtgcaatggtgcaatctcagctcactgcaacctctggtccctgggttcaagtgattctcctgcctc

SEQ ID NO: 314346 - DNA, 201 bp, Homo sapiens
atacttattgaaagtttcagtttcttcattgatattctttatttgttgagtcattggtgtcatatattcatttaattctaggaacatttgtttcctttacttttttttttttttttttgggatggagtctcacactgtcacctaggctggagtgcagtggcatgatcttggctcactgcaagctctgccttctgggtttac

SEQ ID NO: 314347 - DNA, 201 bp, Homo sapiens
aatcttacttcttcattttttttcgaggcctactacctaggcttttttcctggtcaacgaagattctgcagctcagcatctgtccccatctctccacttayattatccttgccccggtgattccctagttgccaaatctaatagatatttttgtgtccttaccttacttgtccattctgccacatttgacactgcgtctac

SEQ ID NO: 314348 - DNA, 201 bp, Homo sapiens
tacttattgaaagtttcagtttcttcattgatattctttatttgttgagtcattggtgtcatatattcatttaattctaggaacatttgtttcctttacttttttttttttttttttgggatggagtctcacactgtcacctaggctggagtgcagtggcatgatcttggctcactgcaagctctgccttctgggtttaca

SEQ ID NO: 314349 - DNA, 201 bp, Homo sapiens
gcttttttcctggtcaacgaagattctgcagctcagcatctgtccccatctctccacttatattatccttgccccggtgattccctagttgccaaatctartagatatttttgtgtccttaccttacttgtccattctgccacatttgacactgcgtctacttctctctccctgaaactctctttccttatgttctatgat

SEQ ID NO: 314350 - DNA, 201 bp, Homo sapiens
gtggtgtgtgaaggtgtctctggtgtctacctctattagtgggaccagtgtgtgtgagggaagcttgttgagcctctgcatgatttttaagccccactgasctgtcacctttgaggaggaaaaacatccagcatagtgttcccaaagtgtgaggagccccaggggtgtgtgtggggtgggtgatgcatgtggggatggtgg

SEQ ID NO: 314351 - DNA, 201 bp, Homo sapiens
gcatttatagaatcttacttcttcattttttttcgaggcctactacctaggcttttttcctggtcaacgaagattctgcagctcagcatctgtccccatcwctccacttatattatccttgccccggtgattccctagttgccaaatctaatagatatttttgtgtccttaccttacttgtccattctgccacatttgaca

SEQ ID NO: 314352 - DNA, 201 bp, Homo sapiens
taatcttctacgttgtctttctccgtagaagattagaattcataaactatagatggaaatagtgtacatagatacagagtcactgacagcaatagaatgaygactgagagctggcattaaaggaggagagagaaaaattaaaaagcagacccatgaccctcagtaataaatacattttactctgtacaaacaaatatacac

SEQ ID NO: 314353 - DNA, 201 bp, Homo sapiens
ggaggggcatggggaaaataaagatgaattcagtttctaatcttctacgttgtctttctccgtagaagattagaattcataaactatagatggaaatagtktacatagatacagagtcactgacagcaatagaatgacgactgagagctggcattaaaggaggagagagaaaaattaaaaagcagacccatgaccctcagt

SEQ ID NO: 314354 - DNA, 201 bp, Homo sapiens
cagagcctaatacttctgtctcaggaagtagaggcatttatagaatcttacttcttcattttttttcgaggcctactacctaggcttttttcctggtcaaygaagattctgcagctcagcatctgtccccatctctccacttatattatccttgccccggtgattccctagttgccaaatctaatagatatttttgtgtcc

SEQ ID NO: 314355 - DNA, 201 bp, Homo sapiens
ttttactttgttcccatttggagcatatttctaatttctgtatttttccaggagcttctgattgcctttatttttccttttttgacaaatcaagaatatgygtttatcttatcaatagattctttttcatcgtctgttaaaataaatccactctctttttgaaaacactccagccccttgcttcttctggtctggttgcct

SEQ ID NO: 314356 - DNA, 201 bp, Homo sapiens
acatcttaggaggtgtcaggggcccaggctacctcgctgccagaattaataagaatgttttgtacggtgaactgaatcctcagagcctaatacttctgtcycaggaagtagaggcatttatagaatcttacttcttcattttttttcgaggcctactacctaggcttttttcctggtcaacgaagattctgcagctcagca

SEQ ID NO: 314357 - DNA, 201 bp, Homo sapiens
atcacaattttagtttccattgattatttcataattccctgattgcttcctccccatagcagtctattgttattttagaaatgcagttatcttcttgagtktgtctgagaaaactaattagaatttcaaaaaattatctgtcctgtttgtccattttttctccccttcttatttttttccccatccttctattttgtattt

SEQ ID NO: 314358 - DNA, 201 bp, Homo sapiens
ggcatcttggctgacacatcgtaggcgctttacaaatgttagtttctgtgctctccttctcttctagaagcaggactttggttaagagttaggtatctcayaggataatctgaacaagtcactccttggatatagtcaggaagctaaaataaatacagcaaggggactactcattatatcccttatatccttcactgtcat

SEQ ID NO: 314359 - DNA, 201 bp, Homo sapiens
tttgatgatgtttcatagctaataagtggtagtgctggattcagacccaggcagcctgtctagaatcctacacacttaacccctctcctgtactacctctragatgcttggccttgttgtgtttcctccatacctttacttaatctcatttgtatcttttggtaataggaaccatgtatattatccatctggaacagcaag

SEQ ID NO: 314360 - DNA, 201 bp, Homo sapiens
ccctgcccaactttattgccttcataatagttttcatgactggacatcccattgcatatttatttgcttatctgtttattgtctgtgtctgccatgagaaygtgagcttagtgaggacacggatcctgtatgctttgttcaccactgtgtttccagtactttaactgatactggcatgtggccaatgctcagtgaatattt

SEQ ID NO: 314361 - DNA, 201 bp, Homo sapiens
aacgattgccaacacatacttctacttttaaataaacaactttgatgatgtaacttgaccttccagagttacagaaattttgtccctatttaatgaataarttgtatgtatttttctctatatgccatttttgtcttcagttttggagtctggctggaaattcagccaaagggtaaaagctcaacacaggatccaggcaat

SEQ ID NO: 314362 - DNA, 201 bp, Homo sapiens
atggaagaaagaggggaacagcagacactgaggcctccttgaggatggggagtgggagaagggaaaggatcagaaaaagtacctattgggtactatacttwgtacctgggtgatgaaataatctgtacaccaaacccctgtgacatgagtttacttgtataacaaacctgcacatgtacccctgaacctaaaatgaaagtt

SEQ ID NO: 314363 - DNA, 201 bp, Homo sapiens
tactgatgtggtagccaaccaacacattaccttttctgtgtttagatacacaagtatcacggtgcttacaattgcctacagtattcggtacaaaatacgcygtacaggtgtgtagcataggtgtgtagtaactttgtgtaactacactctgatgtttgcacaagaaggaaatcggggcatctgtcagacctatccctgtag

SEQ ID NO: 314364 - DNA, 201 bp, Homo sapiens
tttctttagcttaacaaaaatcgttctcactaattgtatttgaacttttgaaataagttatgactaaaagtaaatgaaagcaattgtaattttggaatgtkcttttgcacatcgcacatgccattgtaggcattttgggtgacctccctctctggacaattgagaacattgcctcctgagttaggcactgtgggagggaga

SEQ ID NO: 314365 - DNA, 201 bp, Homo sapiens
acagctgagaattgtatattgagtgaatgactgatagtattgcaaagaaatgcagatataatagcacatgatccatcaatgtttatcttttatgttaatcrtcatctacaaaaccagattgtattgattattatccataaataaacaagcagaggccgggcgcagtggctcacacctgtaatcccagcacttcaggaggct

SEQ ID NO: 314366 - DNA, 201 bp, Homo sapiens
ctctgtcaccaggctgaagtgcagtgacatgatcttggctcactgcagcctctgcctcccgggttcaagcaattctcctgcctcagcctcccaagtagctrggactacaggtgtgcactgctacgcttggctaatttttttgtatttttagtagagatggggtttcaccatgtgggctaggatggtcttgatttcctgacc

SEQ ID NO: 314367 - DNA, 201 bp, Homo sapiens
caaaactaaactcaccaatgctgtcaatcatttctgaaattctgcagaatataataggctctttgcagtcatagctttgtcagtgctgatttttaacttaygatcttcttggaggctttttgggaattaatatctatgtgtagttacctgagccataacttaatgatcacaacgaagactttctagtcctcaaataaaaca

SEQ ID NO: 314368 - DNA, 201 bp, Homo sapiens
gataatgggttgaggaaggaagaaagaaaaaaaatatggagaccagtaaggggctgttgtgccaattcaagtgaaagatgaaaaatatgcaaaccagagcrtgggcagtgaagatgaggggaaaggaggcaaatgggagactgttaagtgagaaacagcaggacttggcaactgattggaagaggttagagaatactggaa

SEQ ID NO: 314369 - DNA, 201 bp, Homo sapiens
tgttattttcactgccttctggcctccaggttgccattgacaattcagctgttaatcttatgaggatctgaggatctctagtgatttttttttttttttgkcgcttttgttgcgggaagtcagggaccctgaacggagggaccggctgaagccatggcagaagaacataaattgtgaagatttcatggacatttattagtt

SEQ ID NO: 314370 - DNA, 201 bp, Homo sapiens
accatgttggccaggatggtttcaatctcccgacctcgtgatccatgcctcggcctcccaaagtgctgagattacaggcattagccaccgtgcccggcctrtgtaaaaaattttaattttaatagcatttgaagtcagcatttaattttcttcttttctttttgtttaagcatttcaaattgtcacttcaaacattataca

SEQ ID NO: 314371 - DNA, 201 bp, Homo sapiens
gttaggctgttcagtctgtcctctttttttgggaataatgcatgtgtctggccttctttctgttacctttgtcatcatgtttttgggagacaatttttttygtcatttccttttctttgtgtccttttttccctctagtacttcataattatgcattcatttctactattggttacattaaaatatttttagcctcaaatt

SEQ ID NO: 314372 - DNA, 201 bp, Homo sapiens
gctacagggcagactactgggtttgacatgtaatgtggctcttatgctgacactggtaccccatgtttcttgccagaggctggagtaccattccctcatgraggttcttcacctagtgaccttcattgccatcttcatgggaatccccacacacccttactgcagttgggtttttatagcctccaggaccctgcctcccac

SEQ ID NO: 314373 - DNA, 201 bp, Homo sapiens
atagggtgtgttagttagttttttgggggtgggaaggaggcatatttatgtgcaagctgccaaatatttgagataaggacatagtctttgaatgaaaaacagggatatgagaggattgattcagttagccgtcttggccaacccaagttaactgtacttcatcttagtctatgttggtgttagaaacaacaaaaaggaaaa

SEQ ID NO: 314374 - DNA, 201 bp, Homo sapiens
tagggtgtgttagttagttttttgggggtgggaaggaggcatatttatgtgcaagctgccaaatatttgagataaggacatagtctttgaatgaaaaacagggatatgagaggattgattcagttagccgtcttggccaacccaagttaactgtacttcatcttagtctatgttggtgttagaaacaacaaaaaggaaaaa

SEQ ID NO: 314375 - DNA, 201 bp, Homo sapiens
ttcttcagcctctggtaaccaccattctactttctgattctatgggtttgactgctttcaagacttcatttaattaggatcatataatgtttgtttttttktgtgtgtgactgacttaatttatttcttgattgaatcacacagataaacaaggtattgtccttaaattctcagagtcactaagctttgattctaaagaga

SEQ ID NO: 314376 - DNA, 201 bp, Homo sapiens
catttatattaagctactgctgatgtggatcctattttctgcagagcatttttacatatctgcagtaaagagagtttaaattatatttttttccagtaagwtttatttttgtcagtatctgctaagataggataagctgatgtatagatttttttttgttaaaaaccttatggcagaagctgtaaagtagggattggcagg

SEQ ID NO: 314377 - DNA, 201 bp, Homo sapiens
tatattaagctactgctgatgtggatcctattttctgcagagcatttttacatatctgcagtaaagagagtttaaattatatttttttccagtaagttttrtttttgtcagtatctgctaagataggataagctgatgtatagatttttttttgttaaaaaccttatggcagaagctgtaaagtagggattggcagggtgc

SEQ ID NO: 314378 - DNA, 201 bp, Homo sapiens
cctgccccattattctactttgaaaaatttagctgactattctaaatttattttttaagattaactgtaaaagaattttgttagtttcttttccaaaatcyccttgagagcttgattggaattgtgttgaatttgtagattaatttgggggaaatggatttctgtgcaatattcagtcttcttcaggaatatggtgtgcct

SEQ ID NO: 314379 - DNA, 201 bp, Homo sapiens
acttgccagagtatggtcttggggtgtgccctgatattacaaacagggatcttagtggctaggtgatgaggccatggcaaatgtagatggaccaagatcartttgcctttctagatgaggttttctaggtgaaatgtttttgaaactattttgtagcctagtataatttataaaagtagagagaaactataaatataaatt

SEQ ID NO: 314380 - DNA, 201 bp, Homo sapiens
gccactgtatgaaggatttattttctccatggttggtttttgtcagcatagcccagtatttgcaggggcagaagatccaaacatggagcctttgttaggaktcatggccatacccacattttgcctagcacactgctgagggtaagcagggatgagggctgaggtggtcttcctcgttaaatcagctttgcactaggtgtc

SEQ ID NO: 314381 - DNA, 201 bp, Homo sapiens
tttgataacatgttttcaaaacaaagtattcaagactaggtttttaaaggctatttatgagatggattgaatagttttcttaatttccagcagatgtcagygttttacaaatttattgttagtccacagagacagatttgtcttcagtctcccaatttctgtatcctttagttatttaattggcacataggggattatctg

SEQ ID NO: 314382 - DNA, 201 bp, Homo sapiens
gaagaaagaagggaatagtttaaatttgctacattttgttttgcttgagaaagatgcagtaaactgaggggagaagggaataagcgattattgtaggcacytgccggagggagctttgccactgtatgaaggatttattttctccatggttggtttttgtcagcatagcccagtatttgcaggggcagaagatccaaacat

SEQ ID NO: 314383 - DNA, 201 bp, Homo sapiens
gtcatttttagattcctgatagaaactttctctaaaacattatcttagtacattaattagaaatttatgtcccacatatactagctctagtaatttactgktgactaaggcattgttaagaaatgtgtttggaaaacttctgttggttttttttttttatgaccatcattacatttttttctattttttcatttatctacg

SEQ ID NO: 314384 - DNA, 201 bp, Homo sapiens
gttttttcatttttcatgaaaaggtttacattaaaaaaaaatgcacctagtgtatagtcagagttctcagaaccaataagttttatgtttgtgtgtgtgcrtgtacatctatatttacatctatatctatacttttaggagctttattataatgaatttgctcatgtgattgtggaggcctagaagtctcaaagtctgctg

SEQ ID NO: 314385 - DNA, 201 bp, Homo sapiens
tcacagtaccccaaagtactgtatgtattatcaaataagctaccaacactcaccgttttttcatttttcatgaaaaggtttacattaaaaaaaaatgcacytagtgtatagtcagagttctcagaaccaataagttttatgtttgtgtgtgtgcgtgtacatctatatttacatctatatctatacttttaggagctttat

SEQ ID NO: 314386 - DNA, 201 bp, Homo sapiens
caaggtgcctatgggttaaagcagtaaagcatatatgctcatttcacccctctcttcatctatgtaggtgtgtatgagggaatctatacagatgttaattmgttcgttcaaacagaattattttagctattatgaggaagcattgctgggtgttttagtagatgtaaaggatatagactcttgtccttactatctagttgt

SEQ ID NO: 314387 - DNA, 201 bp, Homo sapiens
tagaaatttatcagagaagtaatttaaatggtaaagaaattcaggtttatgtcatatcttgattccctaagatgaggaaattagtgcccctttactcactrtgttttctactccctctgtcagtttctgacatttatattgttatatttatgttgtcaagttttgtaatttttctttttctttttcctttttttttttttt

SEQ ID NO: 314388 - DNA, 201 bp, Homo sapiens
attttttcggtagagatggggtttcaccatgttggccaggatggtttcaatctcccgacctcgtgatccatgcctcggcctcccaaagtgctgagattacrggcattagccaccgtgcccggcctatgtaaaaaattttaattttaatagcatttgaagtcagcatttaattttcttcttttctttttgtttaagcatttc

SEQ ID NO: 314389 - DNA, 201 bp, Homo sapiens
tatctccctatgatatgtgtctatagatatctctgctcaatttttgtgtgcttatttattttttggcctggcttcctaggtgctgctcctatgtccatatmgcttagtggtgagccaatgattgtttcttcaaatattcaaatcttttgcccaattttaattacattgcctttttactgttgtgttatctaagttttttat

SEQ ID NO: 314390 - DNA, 201 bp, Homo sapiens
ggtttcaccatgttggccaggatggtttcaatctcccgacctcgtgatccatgcctcggcctcccaaagtgctgagattacaggcattagccaccgtgccyggcctatgtaaaaaattttaattttaatagcatttgaagtcagcatttaattttcttcttttctttttgtttaagcatttcaaattgtcacttcaaacat

SEQ ID NO: 314391 - DNA, 201 bp, Homo sapiens
ggcctggcttcctaggtgctgctcctatgtccatatagcttagtggtgagccaatgattgtttcttcaaatattcaaatcttttgcccaattttaattacrttgcctttttactgttgtgttatctaagttttttatgtgttctggataataagttccttgtcagatatgtgatttgcaaatatttctcccattgtgtttt

SEQ ID NO: 314392 - DNA, 201 bp, Homo sapiens
ttttgatggagtcctatgtaataattttttgctacttgtgcttttggtatcatagctaagaaaccattgcctaatccaaggtcatgaagatttatgcctcygtttttttctaagagttttattgttttagctcttacatttaggtctttgatgtattttgagtgaattgttgtaaatggtataagttggggccaacttatt

SEQ ID NO: 314393 - DNA, 201 bp, Homo sapiens
gtctttattttaatctcttaatcccatcatctttgtaagctggggatgtgtgtcgcctcaggaccctgtgatgattgcgttaactgcacaaattgttcgtraagcatgtgtgtttaaacaatatgaaatctgggcaccttgaaaaaagaacaggataacagcgatgttcagggaacaagggagataaccatcaggtctgac

SEQ ID NO: 314394 - DNA, 201 bp, Homo sapiens
caaggaacagccctgagatagccttctagattccctggaatatgtcggagcttttcaaaggctcctcaggacatcttcttccccagtttttccttttaagttttttggtcagcctcttgttagcactaactggattcctgccccagacagctgtgatattaaacaattgccattgatttttaaaataaatgtcctagggct

SEQ ID NO: 314395 - DNA, 201 bp, Homo sapiens
gttattttcactgccttctggcctccaggttgccattgacaattcagctgttaatcttatgaggatctgaggatctctagtgatttttttttttttttgtygcttttgttgcgggaagtcagggaccctgaacggagggaccggctgaagccatggcagaagaacataaattgtgaagatttcatggacatttattagttc

SEQ ID NO: 314396 - DNA, 201 bp, Homo sapiens
ctttaatattttctattctatttcatttaaaaattgtagcccactattgatttcatgactaaccaatggatcatcactggaaacatcagtgtactgtgtartgttttgccatagtgaatgctcaataaaggtgttaaatgatgtctttcatttagaaaagcgtatttattcttattggcactgtacctttttataacttag

SEQ ID NO: 314397 - DNA, 201 bp, Homo sapiens
gacaaatcaagaatatgcgtttatcttatcaatagattctttttcatcgtctgttaaaataaatccactctctttttgaaaacactccagccccttgcttyttctggtctggttgcctctggcccattgcactgccattgccctggggttcctccttactccacttctgagttagggctgctttttgagtctaatatcttt

SEQ ID NO: 314398 - DNA, 201 bp, Homo sapiens
tccttactccacttctgagttagggctgctttttgagtctaatatctttgtctttcttggattcttttcccttcatcttattagagtatattttcagatarttttttttgagaaagtatctttgggggtggtaaacttttaaatatacattaggaaatgttttaccttcatacttgattgatagtttgaatttcaaattta

SEQ ID NO: 314399 - DNA, 201 bp, Homo sapiens
attgatagtttgaatttcaaatttaaaattattttccttgttctgctcagcacccatggcccccattcaatatggagactcgtgtttttctttttctttcyctttttttttttttttttttgagatggagtttcattcttgttgcccaggcttgagtgcaatggcatgatcttggctcatcctctgcctcctgggttcaag

SEQ ID NO: 314400 - DNA, 201 bp, Homo sapiens
ttaattttaatagcatttgaagtcagcatttaattttcttcttttctttttgtttaagcatttcaaattgtcacttcaaacattatacagagtttccttgrtagtacttaaaagtactatttttctagtaatcacctttaagtttggcattaattttttttgtctgagaatatttgtataatttttttattcagcaaaact

SEQ ID NO: 314401 - DNA, 201 bp, Homo sapiens
aagggataaaaggagcaggtaagtgctgggtcccaaactaaaagtcaggcttcatgatgcaacactgtctgacccactatatcactctggtcccccccccyttttttttctttttaatatttaaagaaattggagaaggctgagagagaaaggaggaattgttaagaggagttgctaaatatagtcttggaaaatataatt

SEQ ID NO: 314402 - DNA, 201 bp, Homo sapiens
aggaagggataaaaggagcaggtaagtgctgggtcccaaactaaaagtcaggcttcatgatgcaacactgtctgacccactatatcactctggtccccccmcctttttttttctttttaatatttaaagaaattggagaaggctgagagagaaaggaggaattgttaagaggagttgctaaatatagtcttggaaaatata

SEQ ID NO: 314403 - DNA, 201 bp, Homo sapiens
gtgaccgatttccaaacttgagatttcagtaaattgtatttacagtaaacagtatttacaaaaatatgtaaagcactgaatacataccttgtatttatttytttaatttttttttagatggagtctcgctctgttgccaggctggagtgcagtggcccaatctcggctcactgcaacctccgcctcccgggttcaagcgat

SEQ ID NO: 314404 - DNA, 201 bp, Homo sapiens
gcattagccaccgtgcccggcctatgtaaaaaattttaattttaatagcatttgaagtcagcatttaattttcttcttttctttttgtttaagcatttcarattgtcacttcaaacattatacagagtttccttgatagtacttaaaagtactatttttctagtaatcacctttaagtttggcattaattttttttgtctg

SEQ ID NO: 314405 - DNA, 201 bp, Homo sapiens
tgcagtggcccaatctcggctcactgcaacctccgcctcccgggttcaagcgattctcctggctcagcctcccgagtagctgggactacaggtgcgcgccrctatgcccagctagtttttgtatttttagtagagatggggtttcaccacgttggccaggatggtctcgacctcttgacctcatgatccacccaccttggc

SEQ ID NO: 314406 - DNA, 201 bp, Homo sapiens
ttaaccatggcgaacacagatacctactttaaaaaatctttgtgatagtttcaaattttttggctgacttattggtaaaacttaatgttttttcctggctsatgaacagcttgcaccaggaacagaagtatcaactagtgttgtcatttttgcttgcattacaggctgaatatctcctctctgaaatcttgggaccagaag

SEQ ID NO: 314407 - DNA, 201 bp, Homo sapiens
tcacttgtaagaagtcctgtgattaattaaaaaacaagaaagagctaggaaagaaattttgattttagtcagagttttgtgtgtatatatgtgtgcatgtrtgtgtgtatatgcatgtgctgtgtataaaatgggtcatgatgtttttcttactgagtttctaaaatgtttgaaagccactgatttaggcctctgcttctc

SEQ ID NO: 314408 - DNA, 201 bp, Homo sapiens
gaaagaaggatggggactgaaaggtgaagggtcctgaagccctgagcttcctcttttgctgttctcactctgtttcctggaggttttactgagtgccctgyggtgttgactgcgtcctacttgcaagccctgtggtctccctaatggtcagctaggctgggcctctaaggtctttcagaagtgcacagccctatggtgaaa

SEQ ID NO: 314409 - DNA, 201 bp, Homo sapiens
aagagactgtgtgtcctccagaggaccttacagagcaccttgccatactgtaaagaggcaggaatccttagaaaggtttgcgcattgtgtgttctaggtakagaagacagaactgaacttcaagcctgatggtgctctggcaacagaaagaggacacgagggagtaaagtccaaattcacagtccactgtcaatcccaaga

SEQ ID NO: 314410 - DNA, 201 bp, Homo sapiens
aatttctttacttcccaaaacatcctggaatatccctcagcctggtgagggtgatgttcgggaggaggccttgtccacaggtgagtattatggtgttaggrtgttgttagattatgaccagttgttagatctcagatccacgggttatgtgtgggtcagtgggagttgcttttcctgtaagggattaatttgtattttgcc

SEQ ID NO: 314411 - DNA, 201 bp, Homo sapiens
gatagtttgaatttcaaatttaaaattattttccttgttctgctcagcacccatggcccccattcaatatggagactcgtgtttttctttttctttccctttttttttttttttttttgagatggagtttcattcttgttgcccaggcttgagtgcaatggcatgatcttggctcatcctctgcctcctgggttcaagtga

SEQ ID NO: 314412 - DNA, 201 bp, Homo sapiens
cccaggctggagtgcaatggtgcaatcacgtctcattgaagccttgaactcctgggctcaagcaatcctgtctcagcctcctgagtagctgggactagggrcatgtgctactgcgcccagctaatttttaaaaatatttttgcacaaacggggtctctctatgttgcccaagctggtctcgaattcctggcctcaagcaat

SEQ ID NO: 314413 - DNA, 201 bp, Homo sapiens
aaagacagccttttaaagcaccaaactttgttttttgagacagggtctcactgtcacccaggctggagtgcaatggtgcaatcacgtctcattgaagcctygaactcctgggctcaagcaatcctgtctcagcctcctgagtagctgggactaggggcatgtgctactgcgcccagctaatttttaaaaatatttttgcac

SEQ ID NO: 314414 - DNA, 201 bp, Homo sapiens
ggttgcccggctactatgtttcttaggacggcccccgcgggacttggcagctctcctggagccctgctcggtctgaatcaccggcctcgtccagacctgcscctctccccacacccacccccatggtgtgccctgggtggggacgtcagcagatccaccctggtggacttcagggttctggggtagccctcaggagaggtc

SEQ ID NO: 314415 - DNA, 201 bp, Homo sapiens; identical to SEQ ID NO: 65499

SEQ ID NO: 314416 - DNA, 201 bp, Homo sapiens
ctgctgctgcttggtgtgcttgctgtgtgtgttatctgtgtgtgcgcctgcacgtctctatgcatatctgtgtgcatctctggctctgtgtgtgtgtgtgkctacgcctatccatgtggctttgtgtgtgtgtgtctttgtgttactttgtatgtgtttgtatgtgtgtctctggtgtgtgtatctctgtgcatgtgtgtg

SEQ ID NO: 314417 - DNA, 201 bp, Homo sapiens
actgcgagggccgggaaaggagacggggcacgcatgcaccaaaaagtggggaggcagagctgcagggtgtgcaggataacggagtgaattttaggagtctscctaataaggggccgcccccaatagttttccctcgacttaggtaatgaattgcagatcgaaatgggtctagttttattcattcttctactcggggcgata

SEQ ID NO: 314418 - DNA, 201 bp, Homo sapiens
gtgtgctgctgctgctgctgctgctgctgcttggtgtgcttgctgtgtgtgttatctgtgtgtgcgcctgcacgtctctatgcatatctgtgtgcatctcdggctctgtgtgtgtgtgtgtctacgcctatccatgtggctttgtgtgtgtgtgtctttgtgttactttgtatgtgtttgtatgtgtgtctctggtgtgtg

SEQ ID NO: 314419 - DNA, 201 bp, Homo sapiens
cggggtgtgctgccgcatgggccgttctggctgtagggcggttgcagggtctatagggtgggtggggagctgtgtgctgctgctgctgctgctgctgctgbttggtgtgcttgctgtgtgtgttatctgtgtgtgcgcctgcacgtctctatgcatatctgtgtgcatctctggctctgtgtgtgtgtgtgtctacgccta

SEQ ID NO: 314420 - DNA, 201 bp, Homo sapiens
cttagagacagggtctccctttgtctcccaggctggagtgcagtggcatgatcatagctcactgcaggttcaaacttctgggctcaagtaatcctaccgcctcagcctcatgagtagctgggactacaggtgtgggtgtccacgcccagctaattttttttttctttagtagagatgaggtcttgctatgttgcccaggct

SEQ ID NO: 314421 - DNA, 201 bp, Homo sapiens
gtgacacggtcttggctcactgcaacctctgcctcccaggttcaagcgattctcctgcctcagcctcccgaatagctgggattacaggtgtgcgccaccaygcccagctaattttttttgtatttttagaggagacgggggtttcactgtgttggccaggctggtctcaaactcctgacctcaagtgatctgcttgccttg

SEQ ID NO: 314422 - DNA, 201 bp, Homo sapiens
cccaacccaccatgttcagaaatctctttctgatgaaatctcaaagcagcttggtagagccaggcatttgtgaacttagatttttttttttaaattgtggyaaaatatacataatgtaaaatttaccatcttaatcatttttattatttatttatttatttatttatttatttattgaaacggactctccttctgttgccc

SEQ ID NO: 314423 - DNA, 201 bp, Homo sapiens
gtcatttgccccaacccaccatgttcagaaatctctttctgatgaaatctcaaagcagcttggtagagccaggcatttgtgaacttagatttttttttttwaattgtggcaaaatatacataatgtaaaatttaccatcttaatcatttttattatttatttatttatttatttatttatttattgaaacggactctcctt

SEQ ID NO: 314424 - DNA, 201 bp, Homo sapiens
aggtgagctgagcgtcttgtgttgtgctagagggctcgggagagaggaaaaggcctcaggaagcggcctgagtcctgcttggtccttcccctcctgctgccatgttccttagtcctgctcggtccctcccctcctgctgcccacgttttgtggccttaaatttgggcctttgtgtggtagggctcttgggggccgtggggc

SEQ ID NO: 314425 - DNA, 201 bp, Homo sapiens
tgccaggccccaccccagaccagttagtgcaactctgtgggtggctctgggcagccatttcttagcagctccccaggagtggttcccgcgtgcagcccggkgcgagcaccgcctcccgagggttcctgaggccacccgtgtggggccccaggttggaagcctctgggcctgaggggtgctggccagcctgcccagcgctaa

SEQ ID NO: 314426 - DNA, 201 bp, Homo sapiens
tggaggagctgcgggcatctggaatcagtggtccccctccaccacctctcagtttgccagtgctctgagcaagttcgtggaggagcagaacctgaaggacytgcgcgtgtggaccagccagctgaagagcaccatccagacggccgaggcgctgcggctgccctacgagcagtggaaggcgctcaatgagatcgacgcggt

SEQ ID NO: 314427 - DNA, 201 bp, Homo sapiens
cgtcctgcgctgcctgcttgcctacttcctggataagagtgcaggtacctcgggcaggtcgtggccccgggatggagggaggaggggactggcactcggcrgggggtcagccgcagacctgccgtggcctgccctgtgttggctgctgtgccatggggtgttaggagaagggcacaggtgtcggctcccggctgcttcagg

SEQ ID NO: 314428 - DNA, 201 bp, Homo sapiens
ccgtaaaggtctttccatgcctcccccaccctcatgtctcatttcttttttttgagacaaagttttgctcttcttgcgcaggctgcagtgcaatgcatgcrctcactgcaacctccacctcccaggttcaagcgattctcctgcctcagcctcctgagtagctgggattatacgcatgtgctaccacaccctggctaattt

SEQ ID NO: 314429 - DNA, 201 bp, Homo sapiens
acacatatgtatatatatacacacacacatatatatatacacacacacatatatatacacacacacacatatatatatatatagagagagagagagagagaatctcactttgtcacccaggctggagtgcagtggtgccatcaggacttgctgttgtctagaattcctgggctcaagcgatcctcccacctcagcctcccg

SEQ ID NO: 314430 - DNA, 201 bp, Homo sapiens
cacacatatgtatatatatacacacacacatatatatatacacacacacatatatatacacacacacacatatatatatatatagagagagagagagagagaatctcactttgtcacccaggctggagtgcagtggtgccatcaggacttgctgttgtctagaattcctgggctcaagcgatcctcccacctcagcctccc

SEQ ID NO: 314431 - DNA, 201 bp, Homo sapiens
acacacatatgtatatatatacacacacacatatatatatacacacacacatatatatacacacacacacatatatatatatatagagagagagagagagagaatctcactttgtcacccaggctggagtgcagtggtgccatcaggacttgctgttgtctagaattcctgggctcaagcgatcctcccacctcagcctcc

SEQ ID NO: 314432 - DNA, 201 bp, Homo sapiens; identical to SEQ ID NO: 65511

SEQ ID NO: 314433 - DNA, 201 bp, Homo sapiens
tacacacatatgtatatatatacacacacacatatatatatacacacacacatatatatacacacacacacatatatatatatatagagagagagagagagagaatctcactttgtcacccaggctggagtgcagtggtgccatcaggacttgctgttgtctagaattcctgggctcaagcgatcctcccacctcagcctc

SEQ ID NO: 314434 - DNA, 201 bp, Homo sapiens
cacatatgtatatatatacacacatatgtatatatatacacacacacatatatatatacacacacacatatatatacacacacacacatatatatatatakagagagagagagagagagaatctcactttgtcacccaggctggagtgcagtggtgccatcaggacttgctgttgtctagaattcctgggctcaagcgatc

SEQ ID NO: 314435 - DNA, 201 bp, Homo sapiens; identical to SEQ ID NO: 65512

SEQ ID NO: 314436 - DNA, 201 bp, Homo sapiens
taaaaaattattttatttcattttgtcatgtccttgagtcatagatatatacacacatatgtatatatatacacacatatgtatatatatacacacacacatatatatatacacacacacatatatatacacacacacacatatatatatatatagagagagagagagagagaatctcactttgtcacccaggctggagtg

SEQ ID NO: 314437 - DNA, 201 bp, Homo sapiens
ttaaaaaattattttatttcattttgtcatgtccttgagtcatagatatatacacacatatgtatatatatacacacatatgtatatatatacacacacacatatatatatacacacacacatatatatacacacacacacatatatatatatatagagagagagagagagagaatctcactttgtcacccaggctggagt

SEQ ID NO: 314438 - DNA, 201 bp, Homo sapiens
gtgcgctcagtagagagccttatgcggcaaagtattaaatagccaagctgctaatgtattgtttgcatatgaagattttgctttatgacagcgtattttastgcattattagatcacacaggacaaaacatttgcaaactgccaaccaaggtaagctttggttttttggttattatcattgtttaatctgaagagaccttg

SEQ ID NO: 314439 - DNA, 201 bp, Homo sapiens
gacccgggagagaagtgggagctgcagaagtgtggggaggggggcctcgatttgactttcaaatcagagttgtgtgactcctgcgccgtctgtttgggttrggaggggttgagttctggtgatgattgtcactcaacacccgagactcccccactgcgacctgggcacactaaggacgttgaggactgggggtgtgtgtgg

SEQ ID NO: 314440 - DNA, 201 bp, Homo sapiens
tctatccatccatccatttacctacctacatatatatatatatctgcctcataaagaggaagagaaaatatatttatatggatatatatgtgtacgtgtgygtgtgtgtgtgtctgaatacagagagaaatatatgtcgtgcccagcccctatttttttttctgaaccatttgagagttagacgcagacatgatgcccttt

SEQ ID NO: 314441 - DNA, 201 bp, Homo sapiens
accgcgggcctctcaaggttcccagtctttgggctaggggaggggagcaaggctcagttcaagtccaggtttctaagggattcaggaaagtggacaaggaygaggtgaggtgggaggatcagggaagcctcctccccgcgggtcgcccgggtcgtggcgggggatgggctcacgggtattatcagggagcagcctggccca

SEQ ID NO: 314442 - DNA, 201 bp, Homo sapiens
tgcagctgggtccccttcacactgtgtctacaccctttttcttctgttggggttttctcctcactggccattctctttcccactcctctaagtcctgccccgactcagatttcacctccttcaaagccatctccagccacctcagtcctttacattcctgtcgcactcagtcctagctaacattcctctgctgatagccct

SEQ ID NO: 314443 - DNA, 201 bp, Homo sapiens
tgtgtgaaaaagaagttaaaatattgaacatttacataaaatgaaatgagacacaaatactctttggaaaatcttgtgttaaactcaataattttttttttgtttttttgagacagagttttgctctgtttcccaggctggagtgcattggtacaatctcggctcactgcaacctctgcctcccaggttcaagcgattctc

SEQ ID NO: 314444 - DNA, 201 bp, Homo sapiens
ccatgatcagtggagcaaaggagggggtattagtactggtcaggccagtgcaggtttgtaagcaacaggtaaaagacagccttttaaagcaccaaactttsttttttgagacagggtctcactgtcacccaggctggagtgcaatggtgcaatcacgtctcattgaagccttgaactcctgggctcaagcaatcctgtctc

SEQ ID NO: 314445 - DNA, 201 bp, Homo sapiens; identical to SEQ ID NO: 65484

SEQ ID NO: 314446 - DNA, 201 bp, Homo sapiens
cttgttggggggaccgtaaaggtctttccatgcctcccccaccctcatgtctcatttcttttttttgagacaaagttttgctcttcttgcgcaggctgcartgcaatgcatgcactcactgcaacctccacctcccaggttcaagcgattctcctgcctcagcctcctgagtagctgggattatacgcatgtgctaccaca

SEQ ID NO: 314447 - DNA, 201 bp, Homo sapiens
atggtgtccaggtggctcggacaccctggtcgccgttctctgggggtagatgagtttatgaagaccaaattggatatgagcaaaagcactcttggtaaaaytgtattcaatcaatccctagatgagtatttttttaactatccaggcccaccccagatgtctgaatagatttcttctgatcttggctactctgtgatttgg

SEQ ID NO: 314448 - DNA, 201 bp, Homo sapiens; identical to SEQ ID NO: 65486

SEQ ID NO: 314449 - DNA, 201 bp, Homo sapiens
acagtagcttcttgtggccgtgggctgtaagcggtgctgtccctttaacagcagcttcctctgcccccatcccacgccctccaggctgccgtgtggaatcyatctacctgaacgtggagtccgtctgcacacaccgggagaggtcagaggtgagtggaggccccaagcctcatcctggccatcatcacacgatagccctag

SEQ ID NO: 314450 - DNA, 201 bp, Homo sapiens
gaggtagagctgggatgggggctcgggccccccctagaatcacaggatccttacgtccagggctagtcagaagccagcgagtttgagtcgcagctgttggrgaagtccctctggaatggtttcgacaggtaggatctggctgctgcatttgccgtccctctggcccaccgctgtccactgtacagagaaggcatctctttc

SEQ ID NO: 314451 - DNA, 201 bp, Homo sapiens
ggggtttcaccatgttgggcaggctggtcttgaactcctgacctcagatggttcacctgccttggcctcccaaagtgctggaattacaggtgtgagccacrgcgcctgacctcatttggcctcttctttctgttgctcaaacactcaagacttacgactcagggcctctgcaagttccccctgcctggagcagtgataggg

SEQ ID NO: 314452 - DNA, 201 bp, Homo sapiens
tgtcaccccgctagccagccccgaacccaccaaaaagcctcgcatcaacagctttgaggagcatgtggcctccacctcggccgccctgcccagctgcctgmccccggaggtgcccacgcagctgcctggacaagtcagtgcactcccctttccttcctgcctgggggacgcatgccgggcgtgatgccacagatctgggat

SEQ ID NO: 314453 - DNA, 201 bp, Homo sapiens; identical to SEQ ID NO: 65491

SEQ ID NO: 314454 - DNA, 201 bp, Homo sapiens; identical to SEQ ID NO: 65493

SEQ ID NO: 314455 - DNA, 201 bp, Homo sapiens; identical to SEQ ID NO: 65495

SEQ ID NO: 314456 - DNA, 201 bp, Homo sapiens
taggcaggcggatcacctgaggtcaggagttcaagaccagcctggtcgacatggtgaaaccccatctctactaaaaatacaaaaagtcagccaggcatgayggcatacacctgtagtcccagctactccagagactgaggcaagagaatcgcttgaacctaagaggcggaggctgcagtgagctgaaatcgcagcgccact

SEQ ID NO: 314457 - DNA, 201 bp, Homo sapiens
cctctttagtgatcaggaaaatgcagattgagaccaaaatgaagacacgtttcactctgtgtgcccggtagaaatgaggaagcctgatggctttcagtgtygacagaatgtggaccacaaaagcccctcacacattgctggtgggccgataagtggtacaaatgccttggaggcagtttggtcttttctttggtgtaaagt

SEQ ID NO: 314458 - DNA, 201 bp, Homo sapiens
ggagggcagtggtacaatctcggctcactgtaatctccgcctcctgggttcaagcgattctcatgcctcagcctcctgagtagctgggattacagacgtgygccaccatgcccagctaatttttgtatttttagaagagacagggtttcaccatgttggccaggctggtctcaaactcccgacctcaggtgatccacctgc

SEQ ID NO: 314459 - DNA, 201 bp, Homo sapiens
agtgggagctgcagaagtgtggggaggggggcctcgatttgactttcaaatcagagttgtgtgactcctgcgccgtctgtttgggttgggaggggttgagytctggtgatgattgtcactcaacacccgagactcccccactgcgacctgggcacactaaggacgttgaggactgggggtgtgtgtggggggagcctggcc

SEQ ID NO: 314460 - DNA, 201 bp, Homo sapiens
gcactttgggaggctgaggcggggggatcacctgagatggggagtttgagaccagctgtcaagaaacccgtctctactaaaaatacaaaaaaattagctgsgtgtggtggtgcatgcctgtaatcccagttacccgggaggctgagacaggagaatcgcttgaacccgggaggaggaggttgcggtgagccgagattacac

SEQ ID NO: 314461 - DNA, 201 bp, Homo sapiens
atttgactcctctatcattctctccctctccatttctatctatctatctatctatctatctatccatccatccatttacctacctacatatatatatatawctgcctcataaagaggaagagaaaatatatttatatggatatatatgtgtacgtgtgtgtgtgtgtgtgtctgaatacagagagaaatatatgtcgtgcc

SEQ ID NO: 314462 - DNA, 201 bp, Homo sapiens
caccatgcctggctattgtttttttttttaatagagacgaggtcttgccatcttgcccaggctggtcttgaactcctagactcaagcaatcctcccgcctsagcctctcaaagtgctgagattacaggcatgagctaccatgcccggcctacgatactttttaaaataaaattaaaacaactaaaactaaacaatgctttt

SEQ ID NO: 314463 - DNA, 201 bp, Homo sapiens
ttccatagcactctcacctagattctgcaagtgttaccatttgactcctctatcattctctccctctccatttctatctatctatctatctatctatctahccatccatccatttacctacctacatatatatatatatctgcctcataaagaggaagagaaaatatatttatatggatatatatgtgtacgtgtgtgtgt

SEQ ID NO: 314464 - DNA, 201 bp, Homo sapiens
ccatgcccagctactttttgtatttttagtagagacggggtttcaccatgttgggcaggctggtcttgaactcctgacctcagatggttcacctgccttgkcctcccaaagtgctggaattacaggtgtgagccacagcgcctgacctcatttggcctcttctttctgttgctcaaacactcaagacttacgactcagggc

SEQ ID NO: 314465 - DNA, 201 bp, Homo sapiens
cccttctttgtaactgtcgcctttctctcttttgtctttgtcttgcttaggatgcaaagaagggacctaacccgctcatgagacgcaatagtgtcaccccrctagccagccccgaacccaccaaaaagcctcgcatcaacagctttgaggagcatgtggcctccacctcggccgccctgcccagctgcctgcccccggagg

SEQ ID NO: 314466 - DNA, 201 bp, Homo sapiens; identical to SEQ ID NO: 65504

SEQ ID NO: 314467 - DNA, 201 bp, Homo sapiens
tctgctttagaattcagccagctacaaatcctaactccctccccacctctcttttctcctgaaaacagaacatgaaaggctcccggagcagcgctgactcytccaggaaacactgaggcagacgtgtcggttccattccatttccatttctgcagcttagcttgtgtcctgccctccgcccgaggcaaaacgtatcctgag

SEQ ID NO: 314468 - DNA, 201 bp, Homo sapiens; identical to SEQ ID NO: 65505

SEQ ID NO: 314469 - DNA, 201 bp, Homo sapiens; identical to SEQ ID NO: 65506

SEQ ID NO: 314470 - DNA, 201 bp, Homo sapiens; identical to SEQ ID NO: 65507

SEQ ID NO: 314471 - DNA, 201 bp, Homo sapiens; identical to SEQ ID NO: 65508

SEQ ID NO: 314472 - DNA, 201 bp, Homo sapiens; identical to SEQ ID NO: 65515

SEQ ID NO: 314473 - DNA, 201 bp, Homo sapiens; identical to SEQ ID NO: 65553

SEQ ID NO: 314474 - DNA, 201 bp, Homo sapiens; identical to SEQ ID NO: 65554

SEQ ID NO: 314475 - DNA, 201 bp, Homo sapiens
gtaaccatgacaacactttgagctcgagtcccccagattcaattcgggtgtttagtctgttacccagggtctttacacagttgttccttcccctgtaaccyggtgacatctgtgttcccccaggcatgtttcagttgacctctaaagtccacatctaaacacatttaagtttcacaactttcaaaaactttaggtgtgtga

SEQ ID NO: 314476 - DNA, 201 bp, Homo sapiens
agcattttgggaggccaaggcgggcagatcactgaaggttgggagttcaagactagcctggccaacatggtgaatccctgtttctactaaaaaaaaaaaaattagctggacatggtggtgggtgcctgtaatcccagctacttgggaggctgaggcaggaggattgcttgaaccagggaggtgggggttgcagtgagctga

SEQ ID NO: 314477 - DNA, 201 bp, Homo sapiens
gctctatttttagaatgttttccactgggagaaggaagaaatatgaggggaacagagcagggagaggtgccagctgtggcttgccagcctagggttgctcygtggcatgtgtttacactgcagtcatgggccggccttgcctggcccctgcgggtcacccgggcatgcttcccatacccagcagaacgtgatctgggttcc

SEQ ID NO: 314478 - DNA, 201 bp, Homo sapiens
atcctggacattgacttcagtttggagccctgctgggggctccggcttacagaggggcttctttcctgagctgcggcccgtctgaggggtggtggctcccrcagcataagcctgctcagctcggacatcagggcctctgtccagtctgacatctgcctggttctgtgtgcggctttcagaggttttcctgcaggccatgtg

SEQ ID NO: 314479 - DNA, 201 bp, Homo sapiens
ttcctcagtagcagaatcccaggcagttgcccagctcagaggctatgttgcctccctgcatttgcggggaggtgtgccgccacgactgaagctggccagggagaccaatgtggaagtgcagtgtgggcttctgaaaagttgtctcgaaagtgaaaaggcagccgggcgcagcgactcatacctgtaatcccagcattttgg

SEQ ID NO: 314480 - DNA, 201 bp, Homo sapiens
ccggggcaagacctacatctccaagaagctgactcgctacctcaactggattggcgtccccacaaaaggtgagactgggtctcgaggccggacccctgctbgtgcaaaaacttgaccttccatctcagttgctggtttcacaggcaggaccacccctgggcgcctctgtcccctggtcggggagtctgatcctgcctccca

SEQ ID NO: 314481 - DNA, 201 bp, Homo sapiens
cccctccaccccatgtgcctagacaaggccagcatgggactcacacaggaagagctgaggactggaggagtgagtaacttttacctgagtacgtttcagcyctccaggtggtaccaggtacagtcctctgagaagtcgggaggaaaacgcctgtgcgggtctcattcagctctgcggtcctcagtgtctgtctgatactga

SEQ ID NO: 314482 - DNA, 201 bp, Homo sapiens
cgaactcctgacctcaggtgatccacctgcctcggactcccaaagtgctggaattacaggtgtgagtcaccgcgcctggccttttttttttttttttttttaagagagcgtgtttagctgtgttgcccaggctggtcccaaactcctgggctcaagtgatcctcccatctcggcctcccaaagtgttggggctacaggcgt

SEQ ID NO: 314483 - DNA, 201 bp, Homo sapiens
actaccatgcttgtcacctcactctctctggggcagcgggtaggtcctagcttggtttgaacgttttaacctggctatggctggcacaggatcacggaaaygcggttgcttgtgtttgttgttacagcagcatttggaagcactggtaggagttagatgacattggctggcacagaagtgtgggaacaaaggtgatcctgg

SEQ ID NO: 314484 - DNA, 201 bp, Homo sapiens
tcccctgctagaacctccaaacaagctctcaaaatgcactgtgtgaccttactataatatcctccagttccatcccaaggatttcactcttttttatggcygagtagtattccatgttgtatatgtacattttctgtatccattcatctgttgttggacacctaggttgattccatgtcttggccgttgtgaatagcgctg

SEQ ID NO: 314485 - DNA, 201 bp, Homo sapiens
ttttgtatttttcatagagacggggtttcaccatgttagccaggatggtctcgatctcctgacctcgtgatccgcccgtctcagcctcccaaagtgctggsattacaggcgtgagccaccgcgcctggccgagttttttcactttcccagggtttccgtgtaaatactacacaattaccaaccaaatgtctgtccttcctc

SEQ ID NO: 314486 - DNA, 201 bp, Homo sapiens
atcctcctgcctcagcctccagggcagctgggattacaggtgcatgctaccgcgtccagctaatttttttgtatttttagtagagacggaatttcaccacrttggtcaggctggtcttgaactcctgagttcaagtgatttgcccgcctcggccttccaaagtgctgggatcataggcgcgagccaccgcgcctggtgggc

SEQ ID NO: 314487 - DNA, 201 bp, Homo sapiens
agggaagcctcctccccgcgggtcgcccgggtcgtggcgggggatgggctcacgggtattatcagggagcagcctggcccatgtccttacctggactgcgyctgccccacagcgcgtgttaggaatgcagagtattggggctccatggccctaaaggagctgcattggtaggatgcactttaagcagcttcccaagggatt

SEQ ID NO: 314488 - DNA, 201 bp, Homo sapiens
ggtggtgtacacacttgtagtcccagctattggggaggctaaggccggaggattgtttaagtctagaggtttgaggctgcagtaatcatggtggccaccgygctcccgcctgggcaacagagtgagaccctgtctcaaaaacatttttggtgaaattcttcagtgttattgttgggtgtggcctctgctcctcttctccgg

SEQ ID NO: 314489 - DNA, 201 bp, Homo sapiens
agtctagaggtttgaggctgcagtaatcatggtggccaccgtgctcccgcctgggcaacagagtgagaccctgtctcaaaaacatttttggtgaaattctkcagtgttattgttgggtgtggcctctgctcctcttctccggtcacttggttgatgacacacccttcttgcttgtttttccagcctgtgggccaaagctga

SEQ ID NO: 314490 - DNA, 201 bp, Homo sapiens; identical to SEQ ID NO: 65494

SEQ ID NO: 314491 - DNA, 201 bp, Homo sapiens
atggtgggcctccccgcccggggcaagacctacatctccaagaagctgactcgctacctcaactggattggcgtccccacaaaaggtgagactgggtctcraggccggacccctgctcgtgcaaaaacttgaccttccatctcagttgctggtttcacaggcaggaccacccctgggcgcctctgtcccctggtcggggag

SEQ ID NO: 314492 - DNA, 201 bp, Homo sapiens
cgaaagtgaaaaggcagccgggcgcagcgactcatacctgtaatcccagcattttgggaggccaaggcgggcagatcactgaaggttgggagttcaagacyagcctggccaacatggtgaatccctgtttctactaaaaaaaaaaaaattagctggacatggtggtgggtgcctgtaatcccagctacttgggaggctgag

SEQ ID NO: 314493 - DNA, 201 bp, Homo sapiens
caggcagttgcccagctcagaggctatgttgcctccctgcatttgcggggaggtgtgccgccacgactgaagctggccagggagaccaatgtggaagtgcrgtgtgggcttctgaaaagttgtctcgaaagtgaaaaggcagccgggcgcagcgactcatacctgtaatcccagcattttgggaggccaaggcgggcagat

SEQ ID NO: 314494 - DNA, 201 bp, Homo sapiens
ggcccgccccgaggctgacgtacgcgtctgcggccagcccggactctttaaaagccggcggtgcgcggggcatcccagccaagccggagaggaggcgagcrgcagggcctggtggcgagagcgcggctgtcactgcgcccgagcatcccagagctttccgagcggacgagccggccgtgccgggcatccccagcctcgcta

SEQ ID NO: 314495 - DNA, 201 bp, Homo sapiens
gtgtggtggctcatgcctgtaatcccagcactttgggaggctgaggcaggtgaatcacctgaggtcaggagttcgagaccagcctggtcaaaaaaaaaaawatatatatatatatgtatataaataatatataaataattacatgtatagttttgaaagcaggaattttttttttaatttttttttttgagacagagtctc

SEQ ID NO: 314496 - DNA, 201 bp, Homo sapiens
tctgcctggctcccggttttatgtttccctaacattgttatgtcttggatgtgtatttccttaaacctttcccaggttccttttggttctgggtctaggayactgagaagattgaaacattgggagtgcactggccttgctctctggaaaggctttacttttcctcttgcctatttgcagttcccttaaattagtcacatt

SEQ ID NO: 314497 - DNA, 201 bp, Homo sapiens
aatcatgaatcctttcacagttacatgcatgtgcgtgcacacacacacgaatggtctgagagcccatgccccagcaggtggggtttctcttgtcctgtccytctcagctgtggtgcccacccaggcgccccctcctcctcactcttcttggagaccagagcttcctattcactaccctggggcggttaaagcagcccctct

SEQ ID NO: 314498 - DNA, 201 bp, Homo sapiens
caagtccaggtttctaagggattcaggaaagtggacaaggacgaggtgaggtgggaggatcagggaagcctcctccccgcgggtcgcccgggtcgtggcgrgggatgggctcacgggtattatcagggagcagcctggcccatgtccttacctggactgcgcctgccccacagcgcgtgttaggaatgcagagtattgggg

SEQ ID NO: 314499 - DNA, 201 bp, Homo sapiens
gggccccaggttggaagcctctgggcctgaggggtgctggccagcctgcccagcgctaagcagtgtagaatggaaccaccagttactctgcttgtcggggygcgtcgggagttgcttgggctgccccagcggatgcaccagcgctgacattcgggcaatgtcttgtgcattccaggcaatgtgccttagctgccttgagag

SEQ ID NO: 314500 - DNA, 201 bp, Homo sapiens
ccccaggttggaagcctctgggcctgaggggtgctggccagcctgcccagcgctaagcagtgtagaatggaaccaccagttactctgcttgtcggggcgcrtcgggagttgcttgggctgccccagcggatgcaccagcgctgacattcgggcaatgtcttgtgcattccaggcaatgtgccttagctgccttgagagatg

SEQ ID NO: 314501 - DNA, 201 bp, Homo sapiens
ttggaagcctctgggcctgaggggtgctggccagcctgcccagcgctaagcagtgtagaatggaaccaccagttactctgcttgtcggggcgcgtcgggarttgcttgggctgccccagcggatgcaccagcgctgacattcgggcaatgtcttgtgcattccaggcaatgtgccttagctgccttgagagatgtcaaaag

SEQ ID NO: 314502 - DNA, 201 bp, Homo sapiens
gctctcatacatattcccttgcaggtctcagatctgagggtttttatgaaaagccagcagaactgaaatggtgtccctgtggcatccgttctgatggaaaygtgcagttgtatttggaagttcagaggccgctgctttgatgcttggggggaccaggctggggaagggggttgatatcctgagctgcacagacctccgtcg

SEQ ID NO: 314503 - DNA, 201 bp, Homo sapiens
tggacaagtcagtgcactcccctttccttcctgcctgggggacgcatgccgggcgtgatgccacagatctgggattgcgtgcgtgtgtgtttgcaagaatrcgtgcgtgggtgcgtgtgggtgcgcgtgcgtatgttgtaggtgtctgtgcacgtgtgttgtgggggcatgtgcacacactcacgtgttgagggagaacat

SEQ ID NO: 314504 - DNA, 201 bp, Homo sapiens
ttgcttcctcagtagcagaatcccaggcagttgcccagctcagaggctatgttgcctccctgcatttgcggggaggtgtgccgccacgactgaagctggcmagggagaccaatgtggaagtgcagtgtgggcttctgaaaagttgtctcgaaagtgaaaaggcagccgggcgcagcgactcatacctgtaatcccagcatt

SEQ ID NO: 314505 - DNA, 201 bp, Homo sapiens
taataaaaggctatgttttagaaggtgcttgttgaaaaagtatgttttaggaagaagatactgtggctgagactgctagcatcccccaataccccttctcyttgcttcctcagtagcagaatcccaggcagttgcccagctcagaggctatgttgcctccctgcatttgcggggaggtgtgccgccacgactgaagctggc

SEQ ID NO: 314506 - DNA, 201 bp, Homo sapiens
tttaagcagcttcccaagggattcggctgcggggtccacggtctacactgggcaggactgcgtctctgctctcctcccggccagcacagttgaggtgaggsgccggaattagtcggggaagctgtgccagacgtcccgaggggacaacgggacgaggggataacagcagccaggacccttcagcagggctgggcgcgctcc

SEQ ID NO: 314507 - DNA, 201 bp, Homo sapiens
aaggctcagttcaagtccaggtttctaagggattcaggaaagtggacaaggacgaggtgaggtgggaggatcagggaagcctcctccccgcgggtcgcccrggtcgtggcgggggatgggctcacgggtattatcagggagcagcctggcccatgtccttacctggactgcgcctgccccacagcgcgtgttaggaatgca

SEQ ID NO: 314508 - DNA, 201 bp, Homo sapiens
attttccccggggccagggtgggcatctcggcctcgagttgatctgaaaggatttactgctgtcagagccaccccatcgtgtgcagcacggactggggggratttgaaggcagagggcctggggtgtgtccagccccacctgcccctcggccccaatctgcttctggagagtggcctggctgagccgggacgcagcgcact

SEQ ID NO: 314509 - DNA, 201 bp, Homo sapiens
ctcctcgtacccagcaccgcgggcctctcaaggttcccagtctttgggctaggggaggggagcaaggctcagttcaagtccaggtttctaagggattcagsaaagtggacaaggacgaggtgaggtgggaggatcagggaagcctcctccccgcgggtcgcccgggtcgtggcgggggatgggctcacgggtattatcagg

SEQ ID NO: 314510 - DNA, 201 bp, Homo sapiens
agtgggaacggctctggacactcacgtcggggatgtggcagaggccttggggtgggctctggactctcacatcggagatgtggcagaggcctcgggtgggygtgcacaggaaaggcattggcctcaagtactccgtggacctggctggccctgcccgccgcactccttcacacaggttctttattgccattgtccccgccc

SEQ ID NO: 314511 - DNA, 201 bp, Homo sapiens
ccacgggtccctcctgccctccctcggtgcctgccctgggccgtggagatgactggggagcagctgggcgttattttccccggggccagggtgggcatctyggcctcgagttgatctgaaaggatttactgctgtcagagccaccccatcgtgtgcagcacggactgggggggatttgaaggcagagggcctggggtgtgt

SEQ ID NO: 314512 - DNA, 201 bp, Homo sapiens
cgcccctgctgtgggccaggctggttccagggtccatcagcaacagaaacaaaaatgccctgtcctcttggggagacacaaccagcaacaagagaacagcraaggaggcgtaggacatgcggctgatacgggcttaggggaaacgcaggcaggagagggggctgcaagctcaggcgggagctttggggccaggaaggcctg

SEQ ID NO: 314513 - DNA, 201 bp, Homo sapiens
cagcctgcccagcgctaagcagtgtagaatggaaccaccagttactctgcttgtcggggcgcgtcgggagttgcttgggctgccccagcggatgcaccagygctgacattcgggcaatgtcttgtgcattccaggcaatgtgccttagctgccttgagagatgtcaaaagctacctggcgaaagaagggggacaaattgcg

SEQ ID NO: 314514 - DNA, 201 bp, Homo sapiens
attctataaagaaaagcagttctgaaaacttaacactgggacgctgtggtgctggcatctttgcacctttagaggggatgctaagcatgtgttagccccgktatcttccccaaggtggtggaagtatttctagatatctttaggaaatgaattcctgtttcaggaagggctatttgaattgtgaaaagtcagtttagattt

SEQ ID NO: 314515 - DNA, 201 bp, Homo sapiens
gaagggctatttgaattgtgaaaagtcagtttagatttgtccagtgggagcaggaggctcagagtatgagggtttgccacctttctttggctgggcactcsttgttccccttggtagacagcagggtgcagctgtgaagtcatttttcccagtgagtggtcaccaatgtgcttagcaaggagtttagcatttgtctggttg

SEQ ID NO: 314516 - DNA, 201 bp, Homo sapiens
aaaaaaattagctgtgcatggtggtgggtgtctgtaatcccagctactcgggaggctaaggcaggagaattgcttgaactggaaggcattgagccaagatsatgccactgcactccagcctgggagacacagcgagactctgtctcagaaaaaaaaaaagaaagaaagaaagaaataagaacagagaaaagcaagaaatgt

SEQ ID NO: 314517 - DNA, 201 bp, Homo sapiens
gtcctgcggcaagttctaggtggtccaagtgaggcagaagccttgctggaggctttacccgtccacactgctgtggagcctctgagcctccatggaggctycccaagccaggcagcaggggaggaagcgtctggtaggagggtggaaggcatcacgataactagccacctgcaagggctaaatctctctgggacgtttgca

SEQ ID NO: 314518 - DNA, 201 bp, Homo sapiens
tcccctcaactggatcatcatgggctgtgttgcactggtaaaccaaggtgccaaggctgcggcagctcagatgggaaggggaccctgttttctgagcatgcagacgccaggattataggacattctgccaggcacagaaaccacgagagcccaccttccccaaaggctgctggctccaaagtggggagggagtggttgttc

SEQ ID NO: 314519 - DNA, 201 bp, Homo sapiens
ggctgtggttaggttggtgccatggtgctggctagaatggagccagagggacttagacctcatattgcacctgtccaacatggaccgcagtggtatggcaygtggcaggcaggaaccatatcaagtgggtggtggctgcatctgggccatgtcccctatgctcagcgtgaggctggagcagcagctgacagtggcagtcct

SEQ ID NO: 314520 - DNA, 201 bp, Homo sapiens
gctcaggatttagacaccatgggaaattgagtctgaagaaaggttgatgtggcactcaaatacggatagaaagactttcatctcagtagcgagttacgcckgctgctggtgttctagcttaaggaagctgggtgggtgatgtcctagagaaatccctgccttatccctgggtagcccctacagtttatttactggggatgc

SEQ ID NO: 314521 - DNA, 201 bp, Homo sapiens
gagccgcatcgtgtactacctgatgaacatccacgtgcagccgcgtaccatctacctgtgccggcacggcgagaacgagcacaacctccagggccgcatcrggggcgactcaggcctgtccagccggggcaagaaggtgcggggtgtgctgccgcatgggccgttctggctgtagggcggttgcagggtctatagggtggg

SEQ ID NO: 314522 - DNA, 201 bp, Homo sapiens
tacctgtgccggcacggcgagaacgagcacaacctccagggccgcatcgggggcgactcaggcctgtccagccggggcaagaaggtgcggggtgtgctgcygcatgggccgttctggctgtagggcggttgcagggtctatagggtgggtggggagctgtgtgctgctgctgctgctgctgctgctgcttggtgtgcttgc

SEQ ID NO: 314523 - DNA, 201 bp, Homo sapiens
gtgctgggattacaggtgtgagccactgcacctagcctttattcgttctttttataataaaaggctatgttttagaaggtgcttgttgaaaaagtatgttwtaggaagaagatactgtggctgagactgctagcatcccccaataccccttctctttgcttcctcagtagcagaatcccaggcagttgcccagctcagagg

SEQ ID NO: 314524 - DNA, 201 bp, Homo sapiens
aagatgagtggttgtgtaccacggcattcattcattctctagattgggcacttgctatgcaccagcacacgctaggtaccagctgaacagcaagacatggygtctcctccctggagcccacctcctgtgctctccagcaagtgccagggaggggagtcagaagtccaaatgtagagcagttctcagtaggaagccccacct

SEQ ID NO: 314525 - DNA, 201 bp, Homo sapiens
tctcaaactcctggtctcaagccatcctcccacctcagcctcccaaagtgctgggattacaggtgtgagccactgcacctagcctttattcgttctttttrtaataaaaggctatgttttagaaggtgcttgttgaaaaagtatgttttaggaagaagatactgtggctgagactgctagcatcccccaataccccttctc

SEQ ID NO: 314526 - DNA, 201 bp, Homo sapiens
ggaagcttggccttcggattttggcatgaagggatgaggtgtccgccccagtcgctggcagttgcctggctggtgggctgacctgagagaggctggggtcycttggccgccttggtccctgtcaccccctccacttcggaatgtgggtcaccggatgctgtcctgcctttagccatatgacaacagccctggtcagggagc

SEQ ID NO: 314527 - DNA, 201 bp, Homo sapiens
ggaaatgaaaagactttgccgccctgctcccaaaaccaagagaagccatccggagaaggcgtccatcctctgcgggctggaagctgagcagggacaactgyggattccctccccaggctgtgcttctgcctcttgacaagcttcagactttgggatcagctccgtcaggggcccagcgggtaccaggcaagtcgaggagtt

SEQ ID NO: 314528 - DNA, 201 bp, Homo sapiens
atcaggggaaactgaatttgtcacagatcatttcaagaatggcactgtgtatgtggattggagattaaatgtataaacatcatggtcttgtctggctgcamagtgtagtatcttttctcgctcttaaacaatttctcattttttgtagagatggggtcttgctatgctgcccaggctggtctcaaactcctggtctcaagc

SEQ ID NO: 314529 - DNA, 201 bp, Homo sapiens
tccgccgcggtgtaggtttcagcgagcgccgccttccctccaatcacagcccagcctcagcgctaagtgtgcacctctctgcaaggcggcgcagcgctccygtactgaggcttcgtttgcaaaagttacatccgtcccggcgcgggcggcggttccccaccaaaagcaacccagatcttccccgcacgcctctgacctgac

SEQ ID NO: 314530 - DNA, 201 bp, Homo sapiens
caggatgtgggtggcagtgcctgacttcccgctcctgcctgctgtgggagacgagcttcttgcactggggcctgatttcccaggctggcctctcagatccygtggcttcaagttctcctggtcatgcagtgtcctggttcagcactgaattgttccctaatggtttcctgtgtggcagattccttagctctacagtgaact

SEQ ID NO: 314531 - DNA, 201 bp, Homo sapiens
acagatagaaagttcaagaccctgcagatcgtctgtatccgatgtcaagacatgggttcccttgaggtggtgatgggagggggcacgggggtttctgtagygacctggttgatgggtgggggttgcataggcatgctttcctgtgaggatcgtcgagctgtgcattctgaatgtattctatacttctcatttacctgttta

SEQ ID NO: 314532 - DNA, 201 bp, Homo sapiens
cttggtgtagacgcatgcactcaaggtgcacagaagaatgttcactgcggcaccccaacgggtgagagcccccaaacggaaagaatgcaacgttccatcartgtggagaagtcaagtgtggtgttcgtgcagtggaatactacagaaggatgaagaagaaacagctattgcaggaagggacacggtggaagaatcttatgg

SEQ ID NO: 314533 - DNA, 201 bp, Homo sapiens
tcctacaacttcttccgccccgacaatgaggaagccatgaaagtccggaagtaaggctgggccgcgggcgtagggctgggctgtgggaataaggctgggcygcgggcataaggctgggctgcaggagtaaggctgggccgcgggcgtagggctgggctgtgggaataaggctgggctgcggggctgcgggtgtaaggctgg

SEQ ID NO: 314534 - DNA, 201 bp, Homo sapiens
aggaagcttggccttcggattttggcatgaagggatgaggtgtccgccccagtcgctggcagttgcctggctggtgggctgacctgagagaggctggggtyccttggccgccttggtccctgtcaccccctccacttcggaatgtgggtcaccggatgctgtcctgcctttagccatatgacaacagccctggtcagggag

SEQ ID NO: 314535 - DNA, 201 bp, Homo sapiens
caactctcatatcagagtagaaatccatacaatcatcttggcagcatttaccagagccaagcatctgcacacagaaggatccaggaagcccccgccttggygtagacgcatgcactcaaggtgcacagaagaatgttcactgcggcaccccaacgggtgagagcccccaaacggaaagaatgcaacgttccatcagtgtgg

SEQ ID NO: 314536 - DNA, 201 bp, Homo sapiens
ctcaggtggacgcgtgttgtgaaagtgagtttgaattcaccgtgtacaggctgccaaaagtacaacactgtgctagtactagtcagacctttctcttagamcgagcgtgactttctgtcatggcgttcccgaaacaggtgactgtctagtcccaggaagcttggccttcggattttggcatgaagggatgaggtgtccgcc

SEQ ID NO: 314537 - DNA, 201 bp, Homo sapiens
aacaaaacaaaatccaaaccaagtaagccaaaaaaagcttagcctggggacccagttctacatttggtggtggtcataaaagaggctacccaaatggcccrtaagcatagaaagcacttcaacctccctaattattcaagagatgcaaattaaagccacggtgagatactactccacacctgttttagttagagtggctaa

SEQ ID NO: 314538 - DNA, 201 bp, Homo sapiens
ggagccctcaccctgggcatttccacagcagaaactgtcccaccacagccgttgctggtggtcatgtttgtgtttgccagcagcccacaagaggtcgaggygcaacctgtagtcctcagctgctggggccgggcagtggtgtgctttcagcctggagggggcgctcaggaagaggttgtccacttgtgtgcagcttttatg

SEQ ID NO: 314539 - DNA, 201 bp, Homo sapiens
ctttggagatggcgttcagatgcagattcttgttccatagatctggctggagcccaaagttctgcagctggcgggctgattcagaaaacatgagttggtgyttttcctctttttgccgccgtactccattgagagtcttagtcatggagggaaacccgaaaaccaccggtgtccgggacagatactctgacgcattctccc

SEQ ID NO: 314540 - DNA, 201 bp, Homo sapiens
gcaatagcacatgtatattagatatagataaacaggttgttgggggtagaaaagtttggatatcagatcagaaaagtttggatatctcagctcagagccaygatgagagtggggagggagcccgcgcttctcaagctcaaatgcctaggagtcctttggagatggcgttcagatgcagattcttgttccatagatctggct

SEQ ID NO: 314541 - DNA, 201 bp, Homo sapiens
cgtttccctagcgagccccccgggaatgaacagaagggtttctctcctatggtgggatgttgctgtccatgggggtcgtcgaaggacgggtgtggaggcccaggaggactgcaggcaagaggggagaaaaggaagaacccgtctcccctcaactggatcatcatgggctgtgttgcactggtaaaccaaggtgccaaggct

SEQ ID NO: 314542 - DNA, 201 bp, Homo sapiens
tataatatcctccagttccatcccaaggatttcactcttttttatggccgagtagtattccatgttgtatatgtacattttctgtatccattcatctgttkttggacacctaggttgattccatgtcttggccgttgtgaatagcgctgcaataaacatggggtttggatgtctcttcacgccttttaagttcatgccttt

SEQ ID NO: 314543 - DNA, 201 bp, Homo sapiens; identical to SEQ ID NO: 65500

SEQ ID NO: 314544 - DNA, 201 bp, Homo sapiens
attgggaaatgaaaagactttgccgccctgctcccaaaaccaagagaagccatccggagaaggcgtccatcctctgcgggctggaagctgagcagggacarctgcggattccctccccaggctgtgcttctgcctcttgacaagcttcagactttgggatcagctccgtcaggggcccagcgggtaccaggcaagtcgagg

SEQ ID NO: 314545 - DNA, 201 bp, Homo sapiens
aggaaaatgttatccttgcatttggcagatgctacttcctggaggtcccagagtgtaagaaactgttgcttggcataagtgctgtctgcgtttcccggtcrccctggtgtgagccagggcacaggctcttggaggctttatcgaggcagagcttccccagttgcaggtgggacctctcacttagaagtaagcacagcaagt

SEQ ID NO: 314546 - DNA, 201 bp, Homo sapiens
tgtctccattaatccaggtatgattcggccaccttgactctgtgggttctctggaggctctcagagtgtccctccccccctactcattaactgcaggggayaatcatttatctctgacttcatcgcttctgcccacttttgtcgatgtaggctctggttgggaaactcctaaaagggacagacttctgtttacttgtgcgc

SEQ ID NO: 314547 - DNA, 201 bp, Homo sapiens
ggggagcaaggctcagttcaagtccaggtttctaagggattcaggaaagtggacaaggacgaggtgaggtgggaggatcagggaagcctcctccccgcggstcgcccgggtcgtggcgggggatgggctcacgggtattatcagggagcagcctggcccatgtccttacctggactgcgcctgccccacagcgcgtgttag

SEQ ID NO: 314548 - DNA, 201 bp, Homo sapiens
gccccggctcccatgggctggacagggagccgcctggtgcggttttgcccaggtcaggtcgtagcctgagtagtgaccgtgggatccaggtgcaaactctygaggtggcttcgggtcatccgaaggcgcctgagcgcaggcggctggcaggcagggttgcccggctactatgtttcttaggacggcccccgcgggacttgg

SEQ ID NO: 314549 - DNA, 201 bp, Homo sapiens; identical to SEQ ID NO: 65509

SEQ ID NO: 314550 - DNA, 201 bp, Homo sapiens; identical to SEQ ID NO: 65510

SEQ ID NO: 314551 - DNA, 201 bp, Homo sapiens
gccagagcggctgagtgcaggaggaacctgcgggccagcaccgcttctgcagggtgagagggtggaagccaggtggacgcaggcttaggaagggagtggcrgctcagcacgtcctcatctcccatggtagggccttgtttggcctctcagctggagacaggaaggcctgggagggttttggtggaggtgtgggctgaatta

SEQ ID NO: 314552 - DNA, 201 bp, Homo sapiens; identical to SEQ ID NO: 65546

SEQ ID NO: 314553 - DNA, 201 bp, Homo sapiens; identical to SEQ ID NO: 65547

SEQ ID NO: 314554 - DNA, 201 bp, Homo sapiens; identical to SEQ ID NO: 65514

SEQ ID NO: 314555 - DNA, 201 bp, Homo sapiens
tccacagtgttcaacgtcggggagtatcgccgggaggctgtgaagcagtacagctcctacaacttcttccgccccgacaatgaggaagccatgaaagtccrgaagtaaggctgggccgcgggcgtagggctgggctgtgggaataaggctgggccgcgggcataaggctgggctgcaggagtaaggctgggccgcgggcgt

SEQ ID NO: 314556 - DNA, 201 bp, Homo sapiens
cggtgtggttggcctggtggctcttcctttggtcgatcctatggtcccggtgtgagctggccccttcctcctgctcgatcatccagactgttctctttccygtccacagtgttcaacgtcggggagtatcgccgggaggctgtgaagcagtacagctcctacaacttcttccgccccgacaatgaggaagccatgaaagtc

SEQ ID NO: 314557 - DNA, 201 bp, Homo sapiens
aggtcagcgccgccatgtgcctgtgattaggctcagaaccaccaagaacacggtgttgagagacgggaggcgtggagagcagaggcctggggggtggcggktggggaggcgcttcaggagacctcgaggcctggccgtgcagctgctgtctaccttggggggaggcctgacatttggaggtgggccaggctgcctctgact

SEQ ID NO: 314558 - DNA, 201 bp, Homo sapiens
ccgtgccccatcctaagccagggtgccctttgtgtagtagagatggctcttcagatcctgcctcgggtcagcggaagggagtcagcacagttgccttcccctccccagcctgtgagcctcaggcccagcctctccctcctagatgcccctcctcagctctcaagagaggctggaagcaaagctcttttctccgacctcacg

SEQ ID NO: 314559 - DNA, 201 bp, Homo sapiens
tgtctggtcctggccgcagaacctgcttcctgctgcacattttctgcgcctttggtctccaggcttgttttgcagcctccgtgccccatcctaagccagggtgccctttgtgtagtagagatggctcttcagatcctgcctcgggtcagcggaagggagtcagcacagttgccttcccctccccagcctgtgagcctcagg

SEQ ID NO: 314560 - DNA, 201 bp, Homo sapiens
aaagtctttcttctctattttattattattatttttttatgagacggagtttcgctcttgttgcccaggctggagtgcagtggtgcaatggtgcaatggcstgttcttggctcaccgcaacctccgtctcccgggtgcaagtgattctcctgccccagcctcccgagtagctgggattacaggcatgcaccaccatgccac

SEQ ID NO: 314561 - DNA, 201 bp, Homo sapiens
ctcctttatgttttctttcttgttcctctaagaaatgaaatatagaagacgaaaatataaactggactacagcagggtgcagtggtgcatgcctgtaatcscagcactttgggaaggaggattgcctgaggccaggagtttgagactggcctgggccacatagacctccttcctacaaaaaatttaaaaagtatatttaaa

SEQ ID NO: 314562 - DNA, 201 bp, Homo sapiens
aggctgcactagagtttgtgtgattgcaccactgcactgcagtctgggcaacagagccagaccctgtctcaaaaaaacaaaacaaaacaaaacaaaaaagkattgtgtatccattagttgaatcgctgcaaaggtaaacattcattcattcattaagcaagcatagattgaacaccttctccatgtcggacactgtggtag

SEQ ID NO: 314563 - DNA, 201 bp, Homo sapiens
ctctagaggcttacaaacatgtggaatctaaaagtcactcagaatttggaactctctaaatgtttatgtcccagggtgaaatcccagccctgagctctatmtatgggagtggccaggagggtctgagcaccgaggaaggactggcttctgcctggctcccggttttatgtttccctaacattgttatgtcttggatgtgta

SEQ ID NO: 314564 - DNA, 201 bp, Homo sapiens
aagcgcagctgagcccttaggatgagcagcccccagctgactgttgattgggaggtcagacctacagagcggtttttaacccagaggcctgtcctgtgagrgactagctccatccagggcagtgggcaggcttggatgggacgtaggaaataattcagggagataggattagtttctgttggtggcaggagcctgacagct

SEQ ID NO: 314565 - DNA, 201 bp, Homo sapiens
gaattcggtgatgtatcctgggctctctagaggcttacaaacatgtggaatctaaaagtcactcagaatttggaactctctaaatgtttatgtcccagggygaaatcccagccctgagctctatatatgggagtggccaggagggtctgagcaccgaggaaggactggcttctgcctggctcccggttttatgtttcccta

SEQ ID NO: 314566 - DNA, 201 bp, Homo sapiens
cagttcttgttgcctttcctttctggcagctaaaaccagtgctttcagtttccagagttactgtttcaaacaggatcagcaggtcagcgccgccatgtgcytgtgattaggctcagaaccaccaagaacacggtgttgagagacgggaggcgtggagagcagaggcctggggggtggcgggtggggaggcgcttcaggaga

SEQ ID NO: 314567 - DNA, 201 bp, Homo sapiens
gaccacaagggcatttgcagtctgaggaagtgggggaccgggtccagctcggaagcgcagctgagcccttaggatgagcagcccccagctgactgttgatygggaggtcagacctacagagcggtttttaacccagaggcctgtcctgtgagggactagctccatccagggcagtgggcaggcttggatgggacgtaggaa

SEQ ID NO: 314568 - DNA, 201 bp, Homo sapiens
ctgggataagatgggtatgaacttgctgcgctgatggtgaaggcgggtggctgaggaacaggaagagtgcgtccagtactgcttaagaattcggtgatgtmtcctgggctctctagaggcttacaaacatgtggaatctaaaagtcactcagaatttggaactctctaaatgtttatgtcccagggtgaaatcccagccct

SEQ ID NO: 314569 - DNA, 201 bp, Homo sapiens
ctcagtctgttccccaggctggagtgcgttggcgcagtcacggctcactgcagcctcaacctcctgggttcaagtgatcctcccgcctcagcctcccgcgyagctgagactacaggtgcgcaccaccatgcccagctaattttaatttattcatttttttagataatggggtctcactgtgttgcccaggctggtcttgga

SEQ ID NO: 314570 - DNA, 201 bp, Homo sapiens
tgtctgttccccaggccctgagggttctcctgggataagatgggtatgaacttgctgcgctgatggtgaaggcgggtggctgaggaacaggaagagtgcgkccagtactgcttaagaattcggtgatgtatcctgggctctctagaggcttacaaacatgtggaatctaaaagtcactcagaatttggaactctctaaatg

SEQ ID NO: 314571 - DNA, 201 bp, Homo sapiens
aacctccccctggttcaagcaattatcttgcctcagcctcccaagtagctggggctacaggcatgtgccaccacgcccggcaaattttttgtatttttagwagagacggggtcttgccatgttggccaggatggtctcgaactcttgacctcaagtgatccccccgcctcagcctcccaaagtgctgggattacaggcgtg

SEQ ID NO: 314572 - DNA, 201 bp, Homo sapiens
gcatgagtttaacgggccagaaaatgggatggggtggtctgcacagcagctgcccactcgcaggtgccgagtgtatttgcaggtctgtttgagcccttacrttcaggcctggggatggatgtgggtgaatgtgcgcgacaggagcgaggcagccccagtggtctgacttacattcaaagcacttcacggaatccatctgcc

SEQ ID NO: 314573 - DNA, 201 bp, Homo sapiens
gaggactggaggagtgagtaacttttacctgagtacgtttcagccctccaggtggtaccaggtacagtcctctgagaagtcgggaggaaaacgcctgtgcsggtctcattcagctctgcggtcctcagtgtctgtctgatactgagtctgtagtgaggatgcataacggggtaaccctttctgagctcctggattcatttg

SEQ ID NO: 314574 - DNA, 201 bp, Homo sapiens
ctctggaggctctcagagtgtccctccccccctactcattaactgcaggggacaatcatttatctctgacttcatcgcttctgcccacttttgtcgatgtrggctctggttgggaaactcctaaaagggacagacttctgtttacttgtgcgctcagtagagagccttatgcggcaaagtattaaatagccaagctgctaa

SEQ ID NO: 314575 - DNA, 201 bp, Homo sapiens
agttctggtgatgattgtcactcaacacccgagactcccccactgcgacctgggcacactaaggacgttgaggactgggggtgtgtgtggggggagcctgscctcccctggcactgggcctgtgctgtgccgtctctcccttcccgcacccacccatctgcctctcttctctcataactcagaggcacggccagcgtgatg

SEQ ID NO: 314576 - DNA, 201 bp, Homo sapiens
gggggcacggagaggggcagcgcggcgcgggaggtgggcagctctggcctgagtcccacctttgcccctcccgccctctgacccccgggcagtcatttcakcccccagccccagttgcctcctgggcaaaaccgacagatggctagggacggccgcgtgaggatgggagccgtccccagaaaagcaaactcaggcccgctg

SEQ ID NO: 314577 - DNA, 201 bp, Homo sapiens
ttccatgttgtatatgtacattttctgtatccattcatctgttgttggacacctaggttgattccatgtcttggccgttgtgaatagcgctgcaataaacwtggggtttggatgtctcttcacgccttttaagttcatgccttttctgtcaccttttccattgattctatgcacatagcacctcttgcaggcatatcttgt

SEQ ID NO: 314578 - DNA, 201 bp, Homo sapiens
ggcagcgtagaccacaagggcatttgcagtctgaggaagtgggggaccgggtccagctcggaagcgcagctgagcccttaggatgagcagcccccagctgrctgttgattgggaggtcagacctacagagcggtttttaacccagaggcctgtcctgtgagggactagctccatccagggcagtgggcaggcttggatggg

SEQ ID NO: 314579 - DNA, 201 bp, Homo sapiens
ttggatgggacgtaggaaataattcagggagataggattagtttctgttggtggcaggagcctgacagctagtggtgatggagctgctggggcagagggcmgctcactgcccctaatgggacaggtggcagcaagtggatcacttgctgtgacagctccaggaggtaagaatgcttgggcattggcaaaagtccatagggc

SEQ ID NO: 314580 - DNA, 201 bp, Homo sapiens
tttttttatttgagacagggtctcagtctgttccccaggctggagtgcgttggcgcagtcacggctcactgcagcctcaacctcctgggttcaagtgatcytcccgcctcagcctcccgcgcagctgagactacaggtgcgcaccaccatgcccagctaattttaatttattcatttttttagataatggggtctcactgt

SEQ ID NO: 314581 - DNA, 201 bp, Homo sapiens
tttttctgagcctcttcctccttccactcaatgcatctattttagtggaatgggttcctttgtgaacaatgatgttgcagttattcatgaagtaataaagygtttgtgtattgattgatttctttggactggagggtttgcccagccctgttgagctttgtcattgtctacctcaggggaagagggagattgtcgctggtc

SEQ ID NO: 314582 - DNA, 201 bp, Homo sapiens
gtgcgccgcgcggccccagcctgctctgcggcgactgtccggctcgtgagctccgcgtggatccggcgctgggccccctacgctctggggacctggggttstgtttccggcaaaggatgttttccgagaaggcctgggagcggctgtaaataatacccgagaggaaataggcccggcaggtgtttttgcgcgtcccggcgt

SEQ ID NO: 314583 - DNA, 201 bp, Homo sapiens
gcgtgcttccgccttgtccgggtgatgacatcgcagtgatggcaaggttgatccttcgtggtgtttgttttctaacatccccacctcacttccaccaggcrtttttcatcgagtcggtgtgcgacgaccctacagttgtggcctccaatatcatggtaagacagccgggagccccgtgcttctgcggcagcgtagaccaca

SEQ ID NO: 314584 - DNA, 201 bp, Homo sapiens
ctgcaacttccgcctcctgggttcaagcgattctcctgcttcagcctccccagtagctgggattacaggtgccccgccaccacgcccagctaatttttgtratttttagtagagataggctttctccatgttggccaggctggcctcgaacacctgagctcaggtgatccgcccgcctcggtctcccagagtgctgggatt

SEQ ID NO: 314585 - DNA, 201 bp, Homo sapiens
ttctgctgagctcgagatatgaatattagtgaggaagatacattctctctttttttttatttgagacagggtctcagtctgttccccaggctggagtgcgktggcgcagtcacggctcactgcagcctcaacctcctgggttcaagtgatcctcccgcctcagcctcccgcgcagctgagactacaggtgcgcaccaccat

SEQ ID NO: 314586 - DNA, 201 bp, Homo sapiens
atgttccttagtcctgctcggtccctcccctcctgctgcccacgttttgtggccttaaatttgggcctttgtgtggtagggctcttgggggccgtggggcrttccagaggctgcagtgaggaggtgggctttcctgtgtttgggagttggtgggtggcgtgcttccgccttgtccgggtgatgacatcgcagtgatggcaa

SEQ ID NO: 314587 - DNA, 201 bp, Homo sapiens
cctctttgtgaggtagcccaggactgggggatgtgggtgtgttgcccagcccagtcagatgcgcttgaactggggtggcccatggttctcttgtctttgtktaaaacctgtaagtggagtggaatgcagctcttaaatccccagggaggtttggccaaggccaaatgcagaaacaacttttgcataaagcaagtattatct

SEQ ID NO: 314588 - DNA, 201 bp, Homo sapiens
ctgacctcaggtgatccacctgcctcggcctcccaaagtgctgggattacaggcgtgagccaccacgcctggccgtgtctcatttctaactgtgggtgtayaatttcaatttcagaggagatgccctacctgaaatgccctcttcacaccgtcctgaaactgacgcctgtcgcttatggtgagtagcaacccctgccaagc

SEQ ID NO: 314589 - DNA, 201 bp, Homo sapiens
attcttgagtgaaacacttatcagagtgtccgtaaaatggctatttaccatttttgtcattctttccacatttattagttggcattcttttgtaaagaagstctttcctgcccatcctcccttttactagctttaatttcatcatcattattaatagtagtaatagtaccaatgtggactccgggatttttaaaattatga

SEQ ID NO: 314590 - DNA, 201 bp, Homo sapiens
acggaattgcttagtgatgcatttctcagaacatatccccatcattagccaacacatgactgtatttcttttcttcttcttttgcttgaccaataaattargacatcttaaaacttttgagaaatacacaaaaagctcaagccatcctccacatcttttattttttttttaaggaagataaaacatattcattattcctta

SEQ ID NO: 314591 - DNA, 201 bp, Homo sapiens
gggctcctacaccctccaccttggaactgagtccccccaaactgaaccttctaacagcctggggtgaagtgcattttcccataagcagaagtgagatgtgyttccctagggacatagaactatatgggagaggaggaaggtggtgtgtgaaggtccactgggcagggtggtgggcaggctggcaggaggggtggctctata

SEQ ID NO: 314592 - DNA, 201 bp, Homo sapiens
ggctctgctgggggaagctctggggtccctgtgtgtgtaaaaactctgggcctgaggaatagcttctactttgtttctttctttaatttttttttttttttaatacggagtctcactctcatgtaggctggagtacagtggcacgatctcggctcactgcaacctccacctcccaggttcaaggggttctcctgccttagc

SEQ ID NO: 314593 - DNA, 201 bp, Homo sapiens
gcatgggtcagaatttccatctttttggaggcggagtaatgttctgtgtgtttagtcacattttgtgtatccattcatctgttgatggacacatggattastctaccttctggctgttgtcaataatgctgctgcgaacatgggtctacaaacatctctttgaaaccttgctttcaattctttggggtgtgtatatacaag

SEQ ID NO: 314594 - DNA, 201 bp, Homo sapiens
gccatctaggtttgtgtaagttcactctgtgatgtttgcacaatgacggaattgcttagtgatgcatttctcagaacatatccccatcattagccaacacrtgactgtatttcttttcttcttcttttgcttgaccaataaattaggacatcttaaaacttttgagaaatacacaaaaagctcaagccatcctccacatct

SEQ ID NO: 314595 - DNA, 201 bp, Homo sapiens
atcacaagatgaactcactctttagtgaattgcacagacttttgaaaactatgtttccgctgcgctaaagtctaggagcgggctccttagcctgaaggatkcctgtttcaatgggacgtgacagctgctttcaaacatttaagggcgagcacctgttgttggagggggatgcaggcttaacccatgtgcagcaacagaaag

SEQ ID NO: 314596 - DNA, 201 bp, Homo sapiens
tttttaagtatacagctcagtggtgttaaatatattcagtgttgtacaaccatcaccaccaaccatctctagaactttttcatcctgcaagactgaaactytgcacccattaaacaataactctcattcttcacaatccccagctcctggcagccaccattctttctgtctctgaatctgactattctagggaactcatgt

SEQ ID NO: 314597 - DNA, 201 bp, Homo sapiens
atgtatatatatacacacacacatatatatatacacacacacatatatatacacacacacacatatatatatatatagagagagagagagagagaatctcrctttgtcacccaggctggagtgcagtggtgccatcaggacttgctgttgtctagaattcctgggctcaagcgatcctcccacctcagcctcccgagtggg

SEQ ID NO: 314598 - DNA, 201 bp, Homo sapiens
atctatctatctatctatccatccatccatttacctacctacatatatatatatatctgcctcataaagaggaagagaaaatatatttatatggatatatrtgtgtacgtgtgtgtgtgtgtgtgtctgaatacagagagaaatatatgtcgtgcccagcccctatttttttttctgaaccatttgagagttagacgcaga

SEQ ID NO: 314599 - DNA, 201 bp, Homo sapiens
acttcctggataagagtgcaggtacctcgggcaggtcgtggccccgggatggagggaggaggggactggcactcggcggggggtcagccgcagacctgccrtggcctgccctgtgttggctgctgtgccatggggtgttaggagaagggcacaggtgtcggctcccggctgcttcaggtcctctctgtccagcgcttcctt

SEQ ID NO: 314600 - DNA, 201 bp, Homo sapiens
gacccgcgctacctcctccagacccgcgcgtcccctctggcgactccggccgccaccacgtgcccgagccgggggcggcacttgcagcgaattcccgcttsccgctgcgctccagccccgggccgcagatataccagggctccggacccggagagacccggagggcggcggggcccggggtcctgagggcgggattggtgg

SEQ ID NO: 314601 - DNA, 201 bp, Homo sapiens
tggcgtggttccgacagaaatattctgcgtatgtgcacagctgagagtatgtgtgtgcgtctgtctctgcatatctgggtgctcttaggagcagcggtgcrgtggggacacctggtaagaccaggagggacccttggcctaggggaagggtcagtggatgggtattgtttccaaggagttgctgctactttcctgatatgg

SEQ ID NO: 314602 - DNA, 201 bp, Homo sapiens
tcaggatggggagatgaaatgaaaatttcgatgaatgctgggtgtggtagctatgcctgtaatcccagcactctgggaggattgtttgagaccaggacttygagaccagcctgggcaacacagcgagaccccatctctacaaagataaaaaattagccagggatggtggtgtacacacttgtagtcccagctattggggag

SEQ ID NO: 314603 - DNA, 201 bp, Homo sapiens
cttttcctctttttgccgccgtactccattgagagtcttagtcatggagggaaacccgaaaaccaccggtgtccgggacagatactctgacgcattctccyggaacaccctggggactgcgagaaagcccctgctggctcactcgtttgctgggatcagttcccatcaggcatgcggctgtgcttcttggtatcgatttgc

SEQ ID NO: 314604 - DNA, 201 bp, Homo sapiens
tgctgccatgttccttagtcctgctcggtccctcccctcctgctgcccacgttttgtggccttaaatttgggcctttgtgtggtagggctcttgggggccrtggggcgttccagaggctgcagtgaggaggtgggctttcctgtgtttgggagttggtgggtggcgtgcttccgccttgtccgggtgatgacatcgcagtg

SEQ ID NO: 314605 - DNA, 201 bp, Homo sapiens
agagggggctgcaagctcaggcgggagctttggggccaggaaggcctggctcagaggggactcgggtcagggtcacaacaggggggtgaagccactgaccyggagctgctggagagcttctggggatggacagagtccgccccacgggtccctcctgccctccctcggtgcctgccctgggccgtggagatgactggggag

SEQ ID NO: 314606 - DNA, 201 bp, Homo sapiens
aagaaagtggctactttctcacataaataacatggttatcccagcaggtagtaaaaaacctaacaaacaaggccaggcgcggtggctcacgcctgtaatcmcagcgctttgggaggccgaggtgggcggatcacctgaggacaagagttccagaccagcctggccaacatggcgaaaccctgtctttactaaaaatacaga

SEQ ID NO: 314607 - DNA, 201 bp, Homo sapiens
ccgccgcacgaccgctggcttctcccctaccctctcagggctgcaggtcgtggtttgtaatggccgtggtttagggctcggcataaatccacatttccttrtcagaatcagatcttggtggcgagctgcatctgtgccaggtgccattagccttaaagccccctcctgccccaggagtgtcctttgttttggaaggaaaac

SEQ ID NO: 314608 - DNA, 201 bp, Homo sapiens
gttccccctgcctggagcagtgatagggtgactctttaccagcaatatgaggatcccatttgtttggatcatttgtaaaggtaacttttcccatttgtaaytaaaaagttatctgtggagggatcctttgcagtcactcacaaagtgtgaataaaatatcctgttcccaataatctttataaaaaatttaaaaaattattt

SEQ ID NO: 314609 - DNA, 201 bp, Homo sapiens
tatccatgtggctttgtgtgtgtgtgtctttgtgttactttgtatgtgtttgtatgtgtgtctctggtgtgtgtatctctgtgcatgtgtgtgatgtgtgsgcggttgtgcactaggaagggaaggggcaggaagagctgagcctggtctctgggtagggtgtgtgcggctgtggctgtcccagtggcctggggcccccac

SEQ ID NO: 314610 - DNA, 201 bp, Homo sapiens
ttttgctcagaagtgtgcaccttccgaaactgaggatcatccttttgaggtgaatgtgcagaattattagcatttatacttctcatgaactttaacatttytgagttttagctgttttgaaataattccagacttaatagaaaagttgcagaaatagtgcaaagtgttccatagcactctcacctagattctgcaagtgtt

SEQ ID NO: 314611 - DNA, 201 bp, Homo sapiens
ggctggcaggcagggttgcccggctactatgtttcttaggacggcccccgcgggacttggcagctctcctggagccctgctcggtctgaatcaccggcctsgtccagacctgcccctctccccacacccacccccatggtgtgccctgggtggggacgtcagcagatccaccctggtggacttcagggttctggggtagcc

SEQ ID NO: 314612 - DNA, 201 bp, Homo sapiens
tagacaactgctctaggctgcgtctctacaaattactcatttcacgttgggcaggtctttcgttgtcagcaaatggaaagtcaaattaaatgtatttgtcrttatctttcagcattggtgtttgaaatattagtgatgtcttgattcattgtttattcaaaatagaatttttagctgccatgggtttaaaaaaggtaagaa

SEQ ID NO: 314613 - DNA, 201 bp, Homo sapiens
tagtgaccgtgggatccaggtgcaaactctcgaggtggcttcgggtcatccgaaggcgcctgagcgcaggcggctggcaggcagggttgcccggctactaygtttcttaggacggcccccgcgggacttggcagctctcctggagccctgctcggtctgaatcaccggcctcgtccagacctgcccctctccccacaccca

SEQ ID NO: 314614 - DNA, 201 bp, Homo sapiens
gcattttgggaggccaaggcgggcagatcactgaaggttgggagttcaagactagcctggccaacatggtgaatccctgtttctactaaaaaaaaaaaaawtagctggacatggtggtgggtgcctgtaatcccagctacttgggaggctgaggcaggaggattgcttgaaccagggaggtgggggttgcagtgagctgag

SEQ ID NO: 314615 - DNA, 201 bp, Homo sapiens
gagccacctggagccacgcctgtgtccccggctttggggagggtcggtgggttggtgagtgcacggttggcgctgctccacgcgccccgggcgcacgcacyccccggtgctcggaattggctggcagtaccctgccccgccccgccggtcgccgcccccgccaccagcgatcgcttgggagagggttacctcgagctccac

SEQ ID NO: 314616 - DNA, 201 bp, Homo sapiens
ctactctaatctcaactccctttacttcttcccataaagcaagtggggttgactaggtagtcttgaagtttccttctatctttcatagtttctaggaccaygacctaggagaaatcatcaatctgcgctagccttggtgttattgtagctgtaaaagaatcatcgtattagaggaacatttacgttattgggagcgttttc

SEQ ID NO: 314617 - DNA, 201 bp, Homo sapiens
ttcttttcttttttctttttttttttttgagactgagtcttgctctatcacccaggctggaatgcagtggcgcaatctcggctcactgcaacctccgcctyccaggttcgagctattctcctgccttggcctcccgagtagctgggattacaggcacctcttaccatacctggctaatttttgtatttttatagagatggg

SEQ ID NO: 314618 - DNA, 201 bp, Homo sapiens
gtgcagcaacagaaagagacaagggggcatttccaggaagatcaactcagcttagtgtaagcaatgtctttctagccagtagcgccatctgataatggagyaaacagcttggagccaaagagccagaggtctaagctgaggatcccaggactcttcaacaggggtttgtggattcagtgggaagctggcccaagagctttc

SEQ ID NO: 314619 - DNA, 201 bp, Homo sapiens
tttgaaaactatgtttccgctgcgctaaagtctaggagcgggctccttagcctgaaggatgcctgtttcaatgggacgtgacagctgctttcaaacatttragggcgagcacctgttgttggagggggatgcaggcttaacccatgtgcagcaacagaaagagacaagggggcatttccaggaagatcaactcagcttagt

SEQ ID NO: 314620 - DNA, 201 bp, Homo sapiens
ggttgagtctctaaacctagatatgcagaggttccctggaattgcttcttgagtccctgattaattcagctcttgacatcacaagatgaactcactctttrgtgaattgcacagacttttgaaaactatgtttccgctgcgctaaagtctaggagcgggctccttagcctgaaggatgcctgtttcaatgggacgtgacag

SEQ ID NO: 314621 - DNA, 201 bp, Homo sapiens
tgcagattcttgttccatagatctggctggagcccaaagttctgcagctggcgggctgattcagaaaacatgagttggtgcttttcctctttttgccgccrtactccattgagagtcttagtcatggagggaaacccgaaaaccaccggtgtccgggacagatactctgacgcattctcccggaacaccctggggactgcg

SEQ ID NO: 314622 - DNA, 201 bp, Homo sapiens
ccaccatctctccgtgtgcccctggggacacaagaaagcccctgggtgcttggtgctttgtgcttgtttgttccactcatgtgctcaggatgcccggctcmccctgggcagtgaaaagcatctgttttcgaggaactgtttgttctaggtcactggacatcaagagcatggcagcccagggcttttagcgtctcctcatct

SEQ ID NO: 314623 - DNA, 201 bp, Homo sapiens
cgttgcccagatgtgagtgcagctgcgcggagccgggttgcagggcgggctgcgccgggccgggccattgtgtggggcggctttgtgccgacgcccctctrcggggggcgcgcccgtgcgggtcgcgccggcggggcggggcggaggcgcgggctgcgcgtccttggccgggcggcgggggcgctgtggcccttgtcccgg

SEQ ID NO: 314624 - DNA, 201 bp, Homo sapiens
ctacttgggaggctcaggcaggaggattgcttgagcccagtaggtcgaggctgcagtgagctgtgattgtgccactgcactccagcctgggccacagaacragacttcatctcagaaaaaaaaaaaaaagttcacccaaggcagacaacttgtccagggagggcagagctagatgttcctgtgactgcagtgctggggcgc

SEQ ID NO: 314625 - DNA, 201 bp, Homo sapiens
acacacacacacacacacacagctttctgaggaggagtacacagaagggaacacgatccagtctcaacactggcgatgacagaccgtcccattctctcatwtgaaccctacacattgatccagcccagcctggaggtttcctaacatctcgtcagcagctagcatcgctgtccaaaacctgcccgttttttttttctttct

SEQ ID NO: 314626 - DNA, 201 bp, Homo sapiens
taagaagttagaaattgaaacagaactatttctacttagggtgtgaaccccatatcacactctgaatccccaccagcagggaccgctcaagacccgttgcrtgccaagggtcttgacaaaggaatgtcccacccaatctagggctcctagcccctggactacccaacttggtcaaatgtatgcctcactgttccatcagcg

SEQ ID NO: 314627 - DNA, 201 bp, Homo sapiens
cctgtggatggaatggaaaataactttttctgaaactgggagtctctgtctccctccattagccaatcaaggttcattcagctgagcagtgtggagtggtygcaggtataccagtgaacagtgcccccacataaagtgaaattcaccttcacctttcttttactattactacatgctatttagttatcaggggaaactgaa

SEQ ID NO: 314628 - DNA, 201 bp, Homo sapiens
attctaattagaaagtttgtattagcattttaatgatattcataatatacttcatagttagggatgcttttggctgtaagtaactggatactggaccagcrgtggcttaactccatggaactaatcacacgaccacatcctgtggcatcctcagcaaaggggtagatgggcccagtgatgactcattcctgtggatggaat

SEQ ID NO: 314629 - DNA, 201 bp, Homo sapiens
tagaaaataaggtcacttattttttagaattttttagaatatttagaacttgggtccatctgttgcttcttcctaattagctttaggttctgtgtgtttgkcagggatgctcgagtagtagtgatgtgcctgtcacagaccagactgctgatggtgaggttcacttttttttttttttttttgggagacagtctcgctctg

SEQ ID NO: 314630 - DNA, 201 bp, Homo sapiens
gagatagagcaaggccagaataggaaggtgattggtggtgttttcggtggtatatgatggagaaatgattagaaataaaactattttgttttttattttawtattaatattctaattagaaagtttgtattagcattttaatgatattcataatatacttcatagttagggatgcttttggctgtaagtaactggatactg

SEQ ID NO: 314631 - DNA, 201 bp, Homo sapiens
aattaattttattttagattcgggtacatgtgcatgtttgttacctgagtatattgcatattgattggggattgggcttctagtgaacctgttacccagayagtgaacattgtacccaactggttattttttaacccttgctcatctcccaccctcccctcttttgaaaggatggtttttatgtttaccatccccgctgtg

SEQ ID NO: 314632 - DNA, 201 bp, Homo sapiens
aatgtgagatttcggctcactgcaacctctgcctcctgggttcaagcgattttcctgcctcagcctcccgagtagctgggattacaggcacccaccaccaygcccagctaatttttgtatttttagttgagacagggtttcgccatgttggccaggctggtcttgaactcctgacctcaggtgatccacctgcctcagcct

SEQ ID NO: 314633 - DNA, 201 bp, Homo sapiens
gatgtattcacgccattgtgcaatagatctctagaaccttttcatcttataaaactgaaactctgcacccaataaacaacaattcctaatttcccccacckcctgcccctgacgtcccccgttctgctttctgtttctgtgaatctcttgtagtgaccttgtgtaagtggaatcatacggtgtttttctttctatatctgg

SEQ ID NO: 314634 - DNA, 201 bp, Homo sapiens
ccaggccccaccccagaccagttagtgcaactctgtgggtggctctgggcagccatttcttagcagctccccaggagtggttcccgcgtgcagcccggtgygagcaccgcctcccgagggttcctgaggccacccgtgtggggccccaggttggaagcctctgggcctgaggggtgctggccagcctgcccagcgctaagc

SEQ ID NO: 314635 - DNA, 201 bp, Homo sapiens
ccaaactcctgggctcaagtgatcctcccatctcggcctcccaaagtgttggggctacaggcgtgagccagcctgccggccttcctcatggctcttacgtrccacaggtattgaaagccactgatctccaccatggtcagacttagccatcagcttcgcacgttcactctttttctctccccagattatttaacaagttag

SEQ ID NO: 314636 - DNA, 201 bp, Homo sapiens
cgtgcccagcccctatttttttttctgaaccatttgagagttagacgcagacatgatgcccttttgtccctaagtacttcagggtgtatttcctcaaaacragcacagtatcatgattgaaatcaggatatcaacactgatacagttctgttatctaatatgcaaacttcaagtctcaccaattttcccactactgctctt

SEQ ID NO: 314637 - DNA, 201 bp, Homo sapiens
gctacctggcgaaagaagggggacaaattgcggtaagtccaggcaatgtagccggctcggtgtccagtcccacccatgagggtgtcctcaccggcctgggktgtaccgagacctgtgcctctggccctgagggtggaggaaagcaggtggccagggcagcccaatggctcaggaaggcggatgtggggcggactcagggac

SEQ ID NO: 314638 - DNA, 201 bp, Homo sapiens
tacctacctacatatatatatatatctgcctcataaagaggaagagaaaatatatttatatggatatatatgtgtacgtgtgtgtgtgtgtgtgtctgaakacagagagaaatatatgtcgtgcccagcccctatttttttttctgaaccatttgagagttagacgcagacatgatgcccttttgtccctaagtacttcag

SEQ ID NO: 314639 - DNA, 201 bp, Homo sapiens
tccgaggctcagtccctcaggactgccctgagttcagacgccagcctcctgactccagcccagggtacccacacttctgtccaacttggctacaaagttgsgggtttcctacattccccccaccctccctcccagtttcacattcagtaatttgctagaacagctcacagaactcaggaaggcactttactggtactggtt

SEQ ID NO: 314640 - DNA, 201 bp, Homo sapiens
ttctgagacagcatgggagccgtcagcctacgaactggagagaactccaggaaggagcccttttcttcctgcaatgagggcaaccggaagctgtggccacrgcacctgctgtccccggagcctgggcaccgacgtaagggaggaaggcggcgcctcccttttcccctgccctggccacaggagcctcaggattgacagctc

SEQ ID NO: 314641 - DNA, 201 bp, Homo sapiens
tggtgtttgaaatattagtgatgtcttgattcattgtttattcaaaatagaatttttagctgccatgggtttaaaaaaggtaagaattttgctcagaagtrtgcaccttccgaaactgaggatcatccttttgaggtgaatgtgcagaattattagcatttatacttctcatgaactttaacatttttgagttttagctgt

SEQ ID NO: 314642 - DNA, 201 bp, Homo sapiens
taaagttgtcataatgagactatagatacagcacttagcacaatatctggcccctaggaagtgcgtgggggatgacggctgctgttgttatcagggaggawcttggtgccctgggcctgtggagacttctgggcttgctggcattgggtcagcctttggataccctcctgtaacctgagggatttcttctctggggcagca

SEQ ID NO: 314643 - DNA, 201 bp, Homo sapiens
ccgaaaggttctgaggggtttactccgggcactgagcatgctctcttccaagctgggagaaaagcacttacgagtttttttctttttttttttttttttttgagacggagtcccgctctgtcgcccaggctggagggcagtggcgcgatctcggctcactgcaagctccgcctcccgggttcatgccattctcctgcctca

SEQ ID NO: 314644 - DNA, 201 bp, Homo sapiens
gttggaccctcgtgtacccccacagccacccccttgcagctgcttcccacagccaggctttgcttacctaaggtgggcctgcccttaacttccagcttctyggggcgcaccctccatcctcagggccagtgtctgtgatgcgcggggccagcgtgcagtgcttcaggatctgggcttctccttgtgtgaaactttttggac

SEQ ID NO: 314645 - DNA, 201 bp, Homo sapiens
tgcttcctcagtagcagaatcccaggcagttgcccagctcagaggctatgttgcctccctgcatttgcggggaggtgtgccgccacgactgaagctggccrgggagaccaatgtggaagtgcagtgtgggcttctgaaaagttgtctcgaaagtgaaaaggcagccgggcgcagcgactcatacctgtaatcccagcattt

SEQ ID NO: 314646 - DNA, 201 bp, Homo sapiens
tccgaaaggttctgaggggtttactccgggcactgagcatgctctcttccaagctgggagaaaagcacttacgagtttttttctttttttttttttttttttgagacggagtcccgctctgtcgcccaggctggagggcagtggcgcgatctcggctcactgcaagctccgcctcccgggttcatgccattctcctgcctc

SEQ ID NO: 314647 - DNA, 201 bp, Homo sapiens
cactcatccgcttactcacagtggcaggagggttagccactaagctgtttatcagtcattgataacttcacatgaggcttacattcttttctgaaaacacrttttcacaaggatggagagaacacaccatagaaacaggccactgcgggggcgaggagacggcagagggacgccagggtctcccatcggctcacctctggt

SEQ ID NO: 314648 - DNA, 201 bp, Homo sapiens
ttccgaaaggttctgaggggtttactccgggcactgagcatgctctcttccaagctgggagaaaagcacttacgagtttttttctttttttttttttttttttgagacggagtcccgctctgtcgcccaggctggagggcagtggcgcgatctcggctcactgcaagctccgcctcccgggttcatgccattctcctgcct

SEQ ID NO: 314649 - DNA, 201 bp, Homo sapiens
tatcaatccaggacaggggttcttagaagagtcctctctggtaaacaataaacaagtgctgttccgtctgcctcgcggtgcccccacacctgcctggccaygtcacactggcagatgggacgcgggcatcagctcaagttctgtggagcgagagattccgtggcccgggctgacctgggcttggaggcctggagctgcctg

SEQ ID NO: 314650 - DNA, 201 bp, Homo sapiens
gtgcctggctaatttttgtattttcagtagagacgggggttttaccacgttggccaggctggtttcgaactcctgacctcaggtgatccacctgcctcggmctcccaaagtgctggaattacaggtgtgagtcaccgcgcctggccttttttttttttttttttttaagagagcgtgtttagctgtgttgcccaggctggt

SEQ ID NO: 314651 - DNA, 201 bp, Homo sapiens
acgcccggttaatttttgtatttttagtagagacggggtttcgccgtgttgtccagcctggtctcgagcttctgacctcaggtgatctgcctgcctcagcyccacaaagtgctaggattacaggtgtgagctaccacacccagcctggagaagctttttaaacattgcacccccaaaagccccatcctggcaattctggtt

SEQ ID NO: 314652 - DNA, 201 bp, Homo sapiens
ccacagacccacctgtcgccacaggttgagaacatggatggggcggtgcccagcacggtccctggctccaggacacagtgcacagccacagcccatacacrccccagccccaaacctaggagacttggtccttctgtgtcacacctctgttctccctggagttgcaggggattttctctggaaactacctagtagtttagg

SEQ ID NO: 314653 - DNA, 201 bp, Homo sapiens
agtgatccttgtgcgtcagcctcccgagtagctggggttgtaggtgcccaccaccacgcccggttaatttttgtatttttagtagagacggggtttcgccrtgttgtccagcctggtctcgagcttctgacctcaggtgatctgcctgcctcagccccacaaagtgctaggattacaggtgtgagctaccacacccagcct

SEQ ID NO: 314654 - DNA, 201 bp, Homo sapiens
gtggtgccatctcggctcactgcaatctccgccttctgggttcaagtgatccttgtgcgtcagcctcccgagtagctggggttgtaggtgcccaccaccamgcccggttaatttttgtatttttagtagagacggggtttcgccgtgttgtccagcctggtctcgagcttctgacctcaggtgatctgcctgcctcagccc

SEQ ID NO: 314655 - DNA, 201 bp, Homo sapiens
atgagaagaccgttgagcccccagagtgacacccaagcatgtaactaactcgagaccaggagcatccactgacaaacgcccggtgaggtcgatcctggtgrcaggatccaggtgctagtcgggtcctgagtcgagttgctggactcgcagcatttaaccattcaaaataaccagctttaaaaatgtgtgtgggccaggctc

SEQ ID NO: 314656 - DNA, 201 bp, Homo sapiens
gttgcccagactggagtgcagtggtgccatctcggctcactgcaatctccgccttctgggttcaagtgatccttgtgcgtcagcctcccgagtagctgggrttgtaggtgcccaccaccacgcccggttaatttttgtatttttagtagagacggggtttcgccgtgttgtccagcctggtctcgagcttctgacctcagg

SEQ ID NO: 314657 - DNA, 201 bp, Homo sapiens
ctcccctcaactggatcatcatgggctgtgttgcactggtaaaccaaggtgccaaggctgcggcagctcagatgggaaggggaccctgttttctgagcatscagacgccaggattataggacattctgccaggcacagaaaccacgagagcccaccttccccaaaggctgctggctccaaagtggggagggagtggttgtt

SEQ ID NO: 314658 - DNA, 201 bp, Homo sapiens
tctcccctcaactggatcatcatgggctgtgttgcactggtaaaccaaggtgccaaggctgcggcagctcagatgggaaggggaccctgttttctgagcakgcagacgccaggattataggacattctgccaggcacagaaaccacgagagcccaccttccccaaaggctgctggctccaaagtggggagggagtggttgt

SEQ ID NO: 314659 - DNA, 201 bp, Homo sapiens
cagtaccctgccccgccccgccggtcgccgcccccgccaccagcgatcgcttgggagagggttacctcgagctccacctcagctgcggagcgccgccgcgkaaaagggcgggtgggcagcgcagaggggcgacgctgcctctccaggtaatgcgccccggctcccatgggctggacagggagccgcctggtgcggttttgc

SEQ ID NO: 314660 - DNA, 201 bp, Homo sapiens; identical to SEQ ID NO: 65490

SEQ ID NO: 314661 - DNA, 201 bp, Homo sapiens; identical to SEQ ID NO: 65492

SEQ ID NO: 314662 - DNA, 201 bp, Homo sapiens
caaattgcggtaagtccaggcaatgtagccggctcggtgtccagtcccacccatgagggtgtcctcaccggcctggggtgtaccgagacctgtgcctctgsccctgagggtggaggaaagcaggtggccagggcagcccaatggctcaggaaggcggatgtggggcggactcagggacccaccccctctgtggccagtccc

SEQ ID NO: 314663 - DNA, 201 bp, Homo sapiens
gagggtgtcctcaccggcctggggtgtaccgagacctgtgcctctggccctgagggtggaggaaagcaggtggccagggcagcccaatggctcaggaaggmggatgtggggcggactcagggacccaccccctctgtggccagtcccacacctccagggcgggcaggactcgagttacccacaggaccactggcccttcct

SEQ ID NO: 314664 - DNA, 201 bp, Homo sapiens
ggcctccaatatcatggtaagacagccgggagccccgtgcttctgcggcagcgtagaccacaagggcatttgcagtctgaggaagtgggggaccgggtccrgctcggaagcgcagctgagcccttaggatgagcagcccccagctgactgttgattgggaggtcagacctacagagcggtttttaacccagaggcctgtcc

SEQ ID NO: 314665 - DNA, 201 bp, Homo sapiens
gctgtgacagctccaggaggtaagaatgcttgggcattggcaaaagtccatagggctcagcagcctcctgagtttgggaggtaagactctcctcctgctgmtgcatctcgtgaacctgccacaaaccctcctgtctgtgctgtgcaggggagcttgcccagataaattgagggcacttggcatcataacttgatgaatttc

SEQ ID NO: 314666 - DNA, 201 bp, Homo sapiens
ggcaaaagtccatagggctcagcagcctcctgagtttgggaggtaagactctcctcctgctgatgcatctcgtgaacctgccacaaaccctcctgtctgtrctgtgcaggggagcttgcccagataaattgagggcacttggcatcataacttgatgaatttctccagtgttaccacttgatagcaatatatataaacagg

SEQ ID NO: 314667 - DNA, 201 bp, Homo sapiens
atatcccctgggcagcgtctgtgcttccccgtgcacggtgcccgggtggctgtggctgaggacgctgttgcctcctctgccgatgggatcctcctgggccyggtgtgtcctccctgcccgtgccctgctgagcagtgtcgtgcctcaggcccctgcaggcccactgtcctctggcctcagactgagccttacacaccgggg

SEQ ID NO: 314668 - DNA, 201 bp, Homo sapiens
attccgaaaggttctgaggggtttactccgggcactgagcatgctctcttccaagctgggagaaaagcacttacgagtttttttctttttttttttttttttttgagacggagtcccgctctgtcgcccaggctggagggcagtggcgcgatctcggctcactgcaagctccgcctcccgggttcatgccattctcctgcc

SEQ ID NO: 314669 - DNA, 201 bp, Homo sapiens
ttctttttttctccattttctttcttttttctcccccttttctgggaggcaggccagcctcacagccagacaccagctgtgggagttgtcttacgcatatrctctgccccttagaaggattcagtctgtgccctggaggggcctacggtcccgccttgctgttctctggggatcacatcttcggagacgggccaggtgcat

SEQ ID NO: 314670 - DNA, 201 bp, Homo sapiens
ggaggtcatggtgacctccatgagcagctctgtttctgtctgtggttcaaaaggatgggacccagtaagcagccttccagaaaagtccactgtgccccagstcagtcatcagacagagccatttcaagaagaaaatgacttggacaatgggggctgatgcttactgccactggcaaagaattccgaaaggttctgaggggt

SEQ ID NO: 314671 - DNA, 201 bp, Homo sapiens
caggcccctttctttttttctccattttctttcttttttctcccccttttctgggaggcaggccagcctcacagccagacaccagctgtgggagttgtctyacgcatatgctctgccccttagaaggattcagtctgtgccctggaggggcctacggtcccgccttgctgttctctggggatcacatcttcggagacgggc

SEQ ID NO: 314672 - DNA, 201 bp, Homo sapiens
ttgaacctggcagtctggcttccctctggggaagagcagtggatgagggcgaagccgacaagagcccaaactcatctgcgctgcgctgcttttgagccacrcaaatccaaataagggatcatccaaatcctttattttctctcgaagttttgtgatcattaatcagttaacagcttgttcccttctgtgctggacaacccc

SEQ ID NO: 314673 - DNA, 201 bp, Homo sapiens
actgggtctcgaggccggacccctgctcgtgcaaaaacttgaccttccatctcagttgctggtttcacaggcaggaccacccctgggcgcctctgtccccyggtcggggagtctgatcctgcctcccatgcagctgggtccccttcacactgtgtctacaccctttttcttctgttggggttttctcctcactggccattc

SEQ ID NO: 314674 - DNA, 201 bp, Homo sapiens
ccctttgtctcccaggctggagtgcagtggcatgatcatagctcactgcaggttcaaacttctgggctcaagtaatcctaccgcctcagcctcatgagtarctgggactacaggtgtgggtgtccacgcccagctaattttttttttctttagtagagatgaggtcttgctatgttgcccaggctggtcttgaacttctag

SEQ ID NO: 314675 - DNA, 201 bp, Homo sapiens
ggggaaacgcaggcaggagagggggctgcaagctcaggcgggagctttggggccaggaaggcctggctcagaggggactcgggtcagggtcacaacagggrggtgaagccactgacccggagctgctggagagcttctggggatggacagagtccgccccacgggtccctcctgccctccctcggtgcctgccctgggccg

SEQ ID NO: 314676 - DNA, 201 bp, Homo sapiens
cactggggtaattttagcattctgcctccctgacctactttcatttgataaactcttttcttctaattattttttaatttatttgtttgtagaggcagggycttgctatgttgcccaggctggtctcaaactcatggtctcaagtgatcctcttgcctcggcctcccaaagggctgggatcacaggcatgaaccaccgcgc

SEQ ID NO: 314677 - DNA, 201 bp, Homo sapiens
cctgctcgtgcaaaaacttgaccttccatctcagttgctggtttcacaggcaggaccacccctgggcgcctctgtcccctggtcggggagtctgatcctgmctcccatgcagctgggtccccttcacactgtgtctacaccctttttcttctgttggggttttctcctcactggccattctctttcccactcctctaagtc

SEQ ID NO: 314678 - DNA, 201 bp, Homo sapiens
catgcggctgatacgggcttaggggaaacgcaggcaggagagggggctgcaagctcaggcgggagctttggggccaggaaggcctggctcagaggggactygggtcagggtcacaacaggggggtgaagccactgacccggagctgctggagagcttctggggatggacagagtccgccccacgggtccctcctgccctcc

SEQ ID NO: 314679 - DNA, 201 bp, Homo sapiens
tgcaggcggtcatggtggctgcactactgttgggtgtgttccgacaccgccgcacgaccgctggcttctcccctaccctctcagggctgcaggtcgtggtktgtaatggccgtggtttagggctcggcataaatccacatttccttgtcagaatcagatcttggtggcgagctgcatctgtgccaggtgccattagcctta

SEQ ID NO: 314680 - DNA, 201 bp, Homo sapiens
gatcctgcctcccatgcagctgggtccccttcacactgtgtctacaccctttttcttctgttggggttttctcctcactggccattctctttcccactccyctaagtcctgccccgactcagatttcacctccttcaaagccatctccagccacctcagtcctttacattcctgtcgcactcagtcctagctaacattcct

SEQ ID NO: 314681 - DNA, 201 bp, Homo sapiens
agggtccatcagcaacagaaacaaaaatgccctgtcctcttggggagacacaaccagcaacaagagaacagcgaaggaggcgtaggacatgcggctgataygggcttaggggaaacgcaggcaggagagggggctgcaagctcaggcgggagctttggggccaggaaggcctggctcagaggggactcgggtcagggtcac

SEQ ID NO: 314682 - DNA, 201 bp, Homo sapiens
aatggcttggatgagatcgtggttttcagatctgtcctagccacagaaccctctcttcaaacaagcccttacctgcaatctgaacataaaatgctacctgrtgggactcacgagtgagttccggacaggacaggagacggctgtcactgggctccaggatgtgggtggcagtgcctgacttcccgctcctgcctgctgtgg

SEQ ID NO: 314683 - DNA, 201 bp, Homo sapiens
ccaggctctgtaggaggcagagaaagccggcctgcgggtgggtcctgctggtggcttcagggctgtgcagtgtgggaacaaggttgctgctctcatctgtyccctgagggtctcgctgagctgaccctcactgggacagagccgcagaagcaccctcactgagaattagcaagtcctgttcatcgggagtgtctgtttatg

SEQ ID NO: 314684 - DNA, 201 bp, Homo sapiens
ggtgagagcccccaaacggaaagaatgcaacgttccatcagtgtggagaagtcaagtgtggtgttcgtgcagtggaatactacagaaggatgaagaagaamcagctattgcaggaagggacacggtggaagaatcttatggggaaaatgctgagggaaggaaaccaggccaagtaaaacagatagaaagttcaagaccctg

SEQ ID NO: 314685 - DNA, 201 bp, Homo sapiens
agaattagcaagtcctgttcatcgggagtgtctgtttatgtttggaaaggatttcttgttaagtgcgagttgattgtgaaaccctagtgcaagggtgttcrgccccggctgtatgctggagtctcctgggggatgctaaaatccctgatgccaggccccaccccagaccagttagtgcaactctgtgggtggctctgggca

SEQ ID NO: 314686 - DNA, 201 bp, Homo sapiens
tagtggcagtcgggagccagtgattgtttctgagcaggggaagaaaaccaaagtactgtcttaggaagatgagtccctgtcagcggaatgcgcagtggacrcaaacgggaggcggggaggaagagatggggagtgagggcctgtggtccaggtgcggcatttagaatttaatccgcacagatagtaggcacggaaagaaca

SEQ ID NO: 314687 - DNA, 201 bp, Homo sapiens
gccaggccccaccccagaccagttagtgcaactctgtgggtggctctgggcagccatttcttagcagctccccaggagtggttcccgcgtgcagcccggtkcgagcaccgcctcccgagggttcctgaggccacccgtgtggggccccaggttggaagcctctgggcctgaggggtgctggccagcctgcccagcgctaag

SEQ ID NO: 314688 - DNA, 201 bp, Homo sapiens
gaaactgtcccaccacagccgttgctggtggtcatgtttgtgtttgccagcagcccacaagaggtcgaggcgcaacctgtagtcctcagctgctggggccrggcagtggtgtgctttcagcctggagggggcgctcaggaagaggttgtccacttgtgtgcagcttttatgtgtcctgtgcatatggttacagcaccgctt

SEQ ID NO: 314689 - DNA, 201 bp, Homo sapiens
gccccaggttggaagcctctgggcctgaggggtgctggccagcctgcccagcgctaagcagtgtagaatggaaccaccagttactctgcttgtcggggcgygtcgggagttgcttgggctgccccagcggatgcaccagcgctgacattcgggcaatgtcttgtgcattccaggcaatgtgccttagctgccttgagagat

SEQ ID NO: 314690 - DNA, 201 bp, Homo sapiens
caggaagccctccctgactttctaggcagagttggagccctcaccctgggcatttccacagcagaaactgtcccaccacagccgttgctggtggtcatgtytgtgtttgccagcagcccacaagaggtcgaggcgcaacctgtagtcctcagctgctggggccgggcagtggtgtgctttcagcctggagggggcgctcag

SEQ ID NO: 314691 - DNA, 201 bp, Homo sapiens
tgaggggtgctggccagcctgcccagcgctaagcagtgtagaatggaaccaccagttactctgcttgtcggggcgcgtcgggagttgcttgggctgccccrgcggatgcaccagcgctgacattcgggcaatgtcttgtgcattccaggcaatgtgccttagctgccttgagagatgtcaaaagctacctggcgaaagaag

SEQ ID NO: 314692 - DNA, 201 bp, Homo sapiens
ctgtgttcccttcatggtttggcctgcatgtccttcaacctgggacgtccactctctctcagttctgtcctcattgtgccctacttgtctacttcgggaamtctccttcaccactcacctcacacccttcctccaggaagccctccctgactttctaggcagagttggagccctcaccctgggcatttccacagcagaaac

SEQ ID NO: 314693 - DNA, 201 bp, Homo sapiens
gccagcctgcccagcgctaagcagtgtagaatggaaccaccagttactctgcttgtcggggcgcgtcgggagttgcttgggctgccccagcggatgcaccrgcgctgacattcgggcaatgtcttgtgcattccaggcaatgtgccttagctgccttgagagatgtcaaaagctacctggcgaaagaagggggacaaattg

SEQ ID NO: 314694 - DNA, 201 bp, Homo sapiens
gctttcccgccccctcctcgtacccagcaccgcgggcctctcaaggttcccagtctttgggctaggggaggggagcaaggctcagttcaagtccaggtttytaagggattcaggaaagtggacaaggacgaggtgaggtgggaggatcagggaagcctcctccccgcgggtcgcccgggtcgtggcgggggatgggctcac

SEQ ID NO: 314695 - DNA, 201 bp, Homo sapiens
ttttttctttcctttctttccatttatttatttatttatttacttacttacttgcttgcctgcttgcttagagacagggtctccctttgtctcccaggctrgagtgcagtggcatgatcatagctcactgcaggttcaaacttctgggctcaagtaatcctaccgcctcagcctcatgagtagctgggactacaggtgtgg

SEQ ID NO: 314696 - DNA, 201 bp, Homo sapiens
aggcaggagaattgcttgaactggaaggcattgagccaagatcatgccactgcactccagcctgggagacacagcgagactctgtctcagaaaaaaaaaaagaaagaaagaaagaaataagaacagagaaaagcaagaaatgtaattgaaaggccgatgggctgccctgtcctgcgggtgcctaccctcatttgtgatgca

SEQ ID NO: 314697 - DNA, 201 bp, Homo sapiens
aaggcaggagaattgcttgaactggaaggcattgagccaagatcatgccactgcactccagcctgggagacacagcgagactctgtctcagaaaaaaaaaaagaaagaaagaaagaaataagaacagagaaaagcaagaaatgtaattgaaaggccgatgggctgccctgtcctgcgggtgcctaccctcatttgtgatgc

SEQ ID NO: 314698 - DNA, 201 bp, Homo sapiens
taaggcaggagaattgcttgaactggaaggcattgagccaagatcatgccactgcactccagcctgggagacacagcgagactctgtctcagaaaaaaaaaaagaaagaaagaaagaaataagaacagagaaaagcaagaaatgtaattgaaaggccgatgggctgccctgtcctgcgggtgcctaccctcatttgtgatg

SEQ ID NO: 314699 - DNA, 201 bp, Homo sapiens
ctaaggcaggagaattgcttgaactggaaggcattgagccaagatcatgccactgcactccagcctgggagacacagcgagactctgtctcagaaaaaaaraaagaaagaaagaaagaaataagaacagagaaaagcaagaaatgtaattgaaaggccgatgggctgccctgtcctgcgggtgcctaccctcatttgtgat

SEQ ID NO: 314700 - DNA, 201 bp, Homo sapiens
gctaaggcaggagaattgcttgaactggaaggcattgagccaagatcatgccactgcactccagcctgggagacacagcgagactctgtctcagaaaaaaaaaaagaaagaaagaaagaaataagaacagagaaaagcaagaaatgtaattgaaaggccgatgggctgccctgtcctgcgggtgcctaccctcatttgtga

SEQ ID NO: 314701 - DNA, 201 bp, Homo sapiens
cgctggatacctttatcaactctctttgaaaatatcttttaaaaacaatccttgatgacaaatcatattcagtgggaatattttgaacactgtgtagaagyacaggaagtcaacatagagttgagcctgattttgctactgtccctccgatagttcctttcttttttctttcctttctttccatttatttatttatttatt

SEQ ID NO: 314702 - DNA, 201 bp, Homo sapiens
atctcagaaaaaaaaaaaaaagttcacccaaggcagacaacttgtccagggagggcagagctagatgttcctgtgactgcagtgctggggcgcatctgtcstctgtcctgaaagcaggccgctccatgctcatctcccacaccttcacctcctgttaggccagcgtccactgcagtggcccagctcttcccagcatcccct

SEQ ID NO: 314703 - DNA, 201 bp, Homo sapiens
caccggcctggggtgtaccgagacctgtgcctctggccctgagggtggaggaaagcaggtggccagggcagcccaatggctcaggaaggcggatgtggggyggactcagggacccaccccctctgtggccagtcccacacctccagggcgggcaggactcgagttacccacaggaccactggcccttccttgtacactgtc

SEQ ID NO: 314704 - DNA, 201 bp, Homo sapiens
atcagttgctatgaagccagctaccagcccctcgaccccgacaaatgcgacaggtgattcccgtggctggccgtctctgcaagacccacatgagggttctyactgaattcttgatgttcccacaaaggatttgctcctggatacctttaaaaaaatttttttaagacagttttttttgtagagatgaggtctcgctatgtt

SEQ ID NO: 314705 - DNA, 201 bp, Homo sapiens
ctgtggccagtcccacacctccagggcgggcaggactcgagttacccacaggaccactggcccttccttgtacactgtcccattgcacattactgttttgsttgtttgcttttggggtatttcccccacgctaccacccctgagtgctgttggtagttgcgggaggcctgcctcctaagcactccctggagaggactgtgg

SEQ ID NO: 314706 - DNA, 201 bp, Homo sapiens
aactcctgacctcaagtgatctgcttgccttggcctcccaaagtgctgggattacaggcgtgagccactgcatccggccattttagctattttttaagtgkgcagtacagcagcaaattatattcccattgttgggcaaccgccacactctatccgcaggactttctcatcttccccggctgaaactgtgccaggacacag

SEQ ID NO: 314707 - DNA, 201 bp, Homo sapiens
gctctctggaaaggctttacttttcctcttgcctatttgcagttcccttaaattagtcacattttgggaccctcttttgcattgaatttctgggacttctstttgtggttattttgaagtgggggtgggaggacatgcctgggcccaccccgtggttctttaatgaagacgatggttttccttttaagcaaaagaaccttg

SEQ ID NO: 314708 - DNA, 201 bp, Homo sapiens
tactagagagaggagacacatgatccttcattttgccaaagaaaatgactttaaggtgagctgagcgtcttgtgttgtgctagagggctcgggagagaggmaaaggcctcaggaagcggcctgagtcctgcttggtccttcccctcctgctgccatgttccttagtcctgctcggtccctcccctcctgctgcccacgttt

SEQ ID NO: 314709 - DNA, 201 bp, Homo sapiens
gagaggagacacatgatccttcattttgccaaagaaaatgactttaaggtgagctgagcgtcttgtgttgtgctagagggctcgggagagaggaaaaggcytcaggaagcggcctgagtcctgcttggtccttcccctcctgctgccatgttccttagtcctgctcggtccctcccctcctgctgcccacgttttgtggcc

SEQ ID NO: 314710 - DNA, 201 bp, Homo sapiens
cggtggggtctctctgcagggacttgtcgctgatcaaggtgattgacgtgggccggaggttcctggtgaaccgggtgcaggaccacatccagagccgcatygtgtactacctgatgaacatccacgtgcagccgcgtaccatctacctgtgccggcacggcgagaacgagcacaacctccagggccgcatcgggggcgact

SEQ ID NO: 314711 - DNA, 201 bp, Homo sapiens
tgtgggtgaatgtgcgcgacaggagcgaggcagccccagtggtctgacttacattcaaagcacttcacggaatccatctgcccagacaacctcctaaagtrgtccttcgttgaatgcctctcccgtctgccccccgaaaagttatctaaaagtccccactccttatgctttctctttttgagccagagtctcgctctgtca

SEQ ID NO: 314712 - DNA, 201 bp, Homo sapiens
cctgagctcacgtgggcccggccctctgtgctcagtcctaccaggacctggtccagcgcttggagccagtgatcatggagctggagcggcaggagaatgtrctggtcatctgccaccaggccgtcctgcgctgcctgcttgcctacttcctggataagagtgcaggtacctcgggcaggtcgtggccccgggatggaggga

SEQ ID NO: 314713 - DNA, 201 bp, Homo sapiens
gtggtctgcacagcagctgcccactcgcaggtgccgagtgtatttgcaggtctgtttgagcccttacattcaggcctggggatggatgtgggtgaatgtgygcgacaggagcgaggcagccccagtggtctgacttacattcaaagcacttcacggaatccatctgcccagacaacctcctaaagtggtccttcgttgaat

SEQ ID NO: 314714 - DNA, 201 bp, Homo sapiens
tgcttcctaagtgggccttattattcctgtcttaaaggaactttctgcccagcaatgacaacttggccattgctacgaccattatgcatgagtttaacggrccagaaaatgggatggggtggtctgcacagcagctgcccactcgcaggtgccgagtgtatttgcaggtctgtttgagcccttacattcaggcctggggat

SEQ ID NO: 314715 - DNA, 201 bp, Homo sapiens
catcagctgtcctagaatgtcctgcctcaggctggaggctgaggatgccagtgagcgaggcagaacggtggcttcagtcagccttcctgggttctgatgcyacctccaccactgagtagctgtgtgaccttggagaatttcccaaacatctctgtgcttcagttccctgatgtgtcagccttatgcagttgtgaggattaa

SEQ ID NO: 314716 - DNA, 201 bp, Homo sapiens
tgctgagcgagggccctggccacccacactgaccatgcttgtattcatcagctgtcctagaatgtcctgcctcaggctggaggctgaggatgccagtgagygaggcagaacggtggcttcagtcagccttcctgggttctgatgccacctccaccactgagtagctgtgtgaccttggagaatttcccaaacatctctgtg

SEQ ID NO: 314717 - DNA, 201 bp, Homo sapiens
tagagaaggttaaattttgtttctctttgcctgtttctggtcctttgtcccttgctaagtccctaggtcgttcctgcttttttctaggtcacatcctcagmttcttcatctgcgtcatctctaaatgacagatagtagctcagtttgcattttaactgatagctgagatctttaactccagagatgctatctaaccattta

SEQ ID NO: 314718 - DNA, 201 bp, Homo sapiens
gatgaacagctgtccctgtttctaagttgcctgtagtccagtgattactctcaggtttctgtctcaggtgtccgtgtggagagactgccaaacaggctttrtgtgagcaacaaggctgttgatttcacctgggtgcaggcgggctgagtccaaaaaaggagtcagcaaagggtggtgggattatcattggttcttataggt

SEQ ID NO: 314719 - DNA, 201 bp, Homo sapiens
tcatgactttgagtttaacaaatgtggtcacagtattccactgcagtccacctttcccacttctcctagcccttcttcttcttttttttttttttttttttatttgagacagagtttggctcttgttgcctaggctagagtgcaatggtgcgatctcagctcaccgaaacctctgcctcccagtttaaagcaattctcctg

SEQ ID NO: 314720 - DNA, 201 bp, Homo sapiens
tggacttgctagaagaataatcatgactttgagtttaacaaatgtggtcacagtattccactgcagtccacctttcccacttctcctagcccttcttcttcttttttttttttttttttttatttgagacagagtttggctcttgttgcctaggctagagtgcaatggtgcgatctcagctcaccgaaacctctgcctccc

SEQ ID NO: 314721 - DNA, 201 bp, Homo sapiens
gcctgtctggggccatgggcctgctggctgccttcctcagcacctctttgttcctgcctgtctgttctgtggcttctggggccttctcattttctttcttyctgtgtcctcttcctcccatttctgctgagctcgagatatgaatattagtgaggaagatacattctctctttttttttatttgagacagggtctcagtct

SEQ ID NO: 314722 - DNA, 201 bp, Homo sapiens
gagatagccagcccagccctaagcgacactgtagagaaggttaaattttgtttctctttgcctgtttctggtcctttgtcccttgctaagtccctaggtcsttcctgcttttttctaggtcacatcctcagcttcttcatctgcgtcatctctaaatgacagatagtagctcagtttgcattttaactgatagctgagatc

SEQ ID NO: 314723 - DNA, 201 bp, Homo sapiens
gggcctgcggtgaatttggggagagtgagtgagcgggtgaagggtcaggaaataagtcacaggaggcatggttgaagaattggggatgtttaacccagacrtggcaggactgggcacacttgacccctgtctggaagtatttgaaagacttctgaagggggccagcccctccacacctgtgggtgtttctcgtcaggtggg

SEQ ID NO: 314724 - DNA, 201 bp, Homo sapiens
tgcggcgactgtccggctcgtgagctccgcgtggatccggcgctgggccccctacgctctggggacctggggttgtgtttccggcaaaggatgttttccgwgaaggcctgggagcggctgtaaataatacccgagaggaaataggcccggcaggtgtttttgcgcgtcccggcgttgggtgtggctgcggcgggcgtgcag

SEQ ID NO: 314725 - DNA, 201 bp, Homo sapiens
gctgtcgcgcgccctcccggcgtgcgccgcgcggccccagcctgctctgcggcgactgtccggctcgtgagctccgcgtggatccggcgctgggccccctrcgctctggggacctggggttgtgtttccggcaaaggatgttttccgagaaggcctgggagcggctgtaaataatacccgagaggaaataggcccggcagg

SEQ ID NO: 314726 - DNA, 201 bp, Homo sapiens
ggccatgggcctgctggctgccttcctcagcacctctttgttcctgcctgtctgttctgtggcttctggggccttctcattttctttcttcctgtgtcctsttcctcccatttctgctgagctcgagatatgaatattagtgaggaagatacattctctctttttttttatttgagacagggtctcagtctgttccccagg

SEQ ID NO: 314727 - DNA, 201 bp, Homo sapiens
agcgcgcaccccgcccttcccgggccgtgcggcacgccgcgttcacgtgctgtcgcgcgccctcccggcgtgcgccgcgcggccccagcctgctctgcggsgactgtccggctcgtgagctccgcgtggatccggcgctgggccccctacgctctggggacctggggttgtgtttccggcaaaggatgttttccgagaagg

SEQ ID NO: 314728 - DNA, 201 bp, Homo sapiens
ggggcggggcctgggggtggtccgcgcggattggctgctgcctgcggcgcacgagccggtcagcgcgcaccccgcccttcccgggccgtgcggcacgccgygttcacgtgctgtcgcgcgccctcccggcgtgcgccgcgcggccccagcctgctctgcggcgactgtccggctcgtgagctccgcgtggatccggcgctg

SEQ ID NO: 314729 - DNA, 201 bp, Homo sapiens
gcggtaagacagggcgggtaggtggggacccagctgggaggtaggggggccagacgggacatcagctcccgggagccccgctctgggcacggtgcgcgccyccaccctccattgcaccccgcgcctgcttcctcccaggtgcacctcgggcgcctaagccagctgggtcccgggccccgggagcagctgcgggcccgacgg

SEQ ID NO: 314730 - DNA, 201 bp, Homo sapiens; identical to SEQ ID NO: 65513

SEQ ID NO: 314731 - DNA, 201 bp, Homo sapiens
gctcatccacgttgtagcatgggtcagaatttccatctttttggaggcggagtaatgttctgtgtgtttagtcacattttgtgtatccattcatctgttgwtggacacatggattactctaccttctggctgttgtcaataatgctgctgcgaacatgggtctacaaacatctctttgaaaccttgctttcaattctttgg

SEQ ID NO: 314732 - DNA, 201 bp, Homo sapiens
tctgaagttacaccccttggaataatgagaagtggaatttttggcttgaaaaattggaataaaagacatacacaattttaaggctcttgcagcatagcgtrtcatccatagaaatctctgttgtcacttatccttagtgacagataggttagaaaacatagtgaaggaaaaccttgcccaagctatggaaaactaacatag

SEQ ID NO: 314733 - DNA, 201 bp, Homo sapiens
ttataggattttatttttgcagaaatgggctcctggttcaggcttaggcattttcagccatgtaataggctgagtggactttgggcagggcatgctggccytctctctgggggaccctcagcctaccccagaatcaagaaacagaacctcatgaggcttctcggccaccacagtacgcagtctgccctcaagctgcttgtc

SEQ ID NO: 314734 - DNA, 201 bp, Homo sapiens
cctgacctggtgatccagctgcctcagcctcccaaagtgctaggattacagccatgagccaccacatccgactggatatatcttaagatcaatttatcatrgtttttttttttttttttttgatgtctcagtctgtcactcaggctggagcgcaatggcacaatcatggctcactgcagtctccacctcctctgctcaggt

SEQ ID NO: 314735 - DNA, 201 bp, Homo sapiens
agtttattaggtttacataatgttcgggagtcagcttttctccttataaattaggcttaagagcccaacaactgatgtcctattgggaaacggacctctcrtctttcattgctatagtagtttcagtaatttcattaaccatactacaatctctggccaatctgagaacataattttttatttcttggtaaataaactaac

SEQ ID NO: 314736 - DNA, 201 bp, Homo sapiens
ggcacccaagaagtggaccagaggcttcgtccaacgcctgaagggaaaacagggtaggtttcccacaagatgtgcagaagccagcccactctctttggttmctttttcaggagtgtctgtccagcttctctgattggaggtcacaggctttcctcagtctctccgttcttattgttcccatgagcacatggtatgccatgg

SEQ ID NO: 314737 - DNA, 201 bp, Homo sapiens
ggcaagctgcagcagcagcctggctgcactgctgaggagaccctggaggtgagcccggccctttggttcagggtcgccacttgccgtgcacagtggctacrgtggtgctctctggggttgtgctgagccatgaatagaggtagcaaaggagtgggcaagtcaaggcattggcgtctgtcctgttggggcccagggctcact

SEQ ID NO: 314738 - DNA, 201 bp, Homo sapiens
gagagcaagaacaaaggctcccacgcactttgtgggctctgtagatagtgccatgagagcagttggaggagaaggtcttagagacacattaaccaatggartgtgtgtctggggtatggacagtgtggtgtgttccttggaaaaccactttgtagtagaagcagtatccagattgggtcctttatactatatatggagcta

SEQ ID NO: 314739 - DNA, 201 bp, Homo sapiens
tctgcatgcacttcaattagtgttattttggtaaatgaatgttacatttctggtccatgtccccaggttccttcattaacatatcacagatgattgcctgygtgggacagcaggccatcagtggctctcgagtgccagacggctttgaaaacaggtccttgcctcattttgaaaaacactcaaaggtaagcagtagcagat

SEQ ID NO: 314740 - DNA, 201 bp, Homo sapiens
tgtgacacggtattatgataagtggtcttgttgtccctcttcccagtgtctggaaggaccctagggctggctgtgtcttactcatctgtggatccccagcrcccagcatggcagctagcctaggaagttcagtaaatgtgtttagatggggagattaacctggcttcttaaactggcatgcatgggtaataggcaacagtt

SEQ ID NO: 314741 - DNA, 201 bp, Homo sapiens
tgccagacggctttgaaaacaggtccttgcctcattttgaaaaacactcaaaggtaagcagtagcagatcaggtagaactgtgaagatctcttaatctacmctttcctccaaggaacacagacctattcagatcaaagaccgttggccaatttcatgtggagttttatatatgtattttttgccattttattaagatacac

SEQ ID NO: 314742 - DNA, 201 bp, Homo sapiens
agatcaagaaaaccagagataaatatggcatcaatgataacggcacaacagaggtaatatccctccaagacgcgttagaaccccgagctgtttgtagttgmcgctggccctaactctgtgcttggcttgtattctcccagccccgtgtgctgtaccagctggaccgcatcacccccacccaagtagaaaagtttctggaga

SEQ ID NO: 314743 - DNA, 201 bp, Homo sapiens
ctgagaagatcaagaaaaccagagataaatatggcatcaatgataacggcacaacagaggtaatatccctccaagacgcgttagaaccccgagctgtttgyagttgccgctggccctaactctgtgcttggcttgtattctcccagccccgtgtgctgtaccagctggaccgcatcacccccacccaagtagaaaagtttc

SEQ ID NO: 314744 - DNA, 201 bp, Homo sapiens
cctccatgaacatcaccctgggcgtgccccggattaaagagatcatcaacgcttccaaggccatcaggtgcctgctttcatttccttcttgttccacacakgcctgtcctgtttcctgagaaacaatgatccccgtgtcacatgcatatgtgtgatatcctcataggactgtgtcttaaactctgggtggcatgcttgctg

SEQ ID NO: 314745 - DNA, 201 bp, Homo sapiens; identical to SEQ ID NO: 65581

SEQ ID NO: 314746 - DNA, 201 bp, Homo sapiens; identical to SEQ ID NO: 65582

SEQ ID NO: 314747 - DNA, 201 bp, Homo sapiens
ctcttctggcttcatttcattcattacgtcttccatcactgataccctttcttccagttgatcgcattggctactgagtcttctgctttttttttttttttaagtaatgtttttaactacttaaaacaccagataaagtcaacactacaagttgctgggccatgaacttgctgtggctttgtgtcttctctctccctacta

SEQ ID NO: 314748 - DNA, 201 bp, Homo sapiens
tagcattaggtatatctcctaatgctatccctccccgctccccctaccccacaacagtccccggtgtgtgatgttccccttcctgtgtccatgtgttctcrttgttcaatttccacctatgagtgagaacatgcggcatttggttttttgtctttgggatagtttgctgagaatgatggtttccagtttcatccatgtccc

SEQ ID NO: 314749 - DNA, 201 bp, Homo sapiens
gcctatctcctcactctcaaggacactttctttgatcgagccaaggcttgccaaatcattgcttcaatactggttggcaaggatgagaaaattaaagttckcctcccaccgcctacaatcctaaaggtgtgtgtgggagttgtgtgttggtgcacaggtgtgtgtatgtgtctgtgggggtagactggtgaaatgagtgga

SEQ ID NO: 314750 - DNA, 201 bp, Homo sapiens
tgacctcatgatctgcccaccttggcctcccaaagtactgggattacaggtgtaagccactacgcccagccagtttttttgttgttgttttgttttaagawggagtctcactttgtcgcccaggctggagtgcagtggtgcaatctcatctcactgcaacctctacctcctgggtgcaagcaattatccctgcctcaacat

SEQ ID NO: 314751 - DNA, 201 bp, Homo sapiens
ggattacaggcacatgccaccatgaccagctaatttttgtatttttagtagagacagggtttcaccatgttggccagcacggtctcgatctcctgacctcrtgatctgcccaccttggcctcccaaagtactgggattacaggtgtaagccactacgcccagccagtttttttgttgttgttttgttttaagatggagtct

SEQ ID NO: 314752 - DNA, 201 bp, Homo sapiens
catgtaagaatttttctagcccttgactttgtagtcagccacactgatcctgacccctgtgtgtgacaccagggctgacaggagcaggtactggctgggcrctgggcagagcagagtgtcctactgtccttgggaggtggccatcaatgcctgctgagcccctgtgccaggcatcatatgtgtcaagtatctctacccacc

SEQ ID NO: 314753 - DNA, 201 bp, Homo sapiens
aaagtagagatcatgtagacacatgacgcagtggttagaatgttctctccaaatgtgttttgtcttaagtgactagtttttctcacttagtagtttgtctktattttgtcatctttttggcggcggggggggcaataaacaaggattttactatttaaggcatttaattttttttttttttttttttttttttgagactaa

SEQ ID NO: 314754 - DNA, 201 bp, Homo sapiens
atggctcggatacgcggcagataactgcacgggcccagggagactcaccatgatggcgatctatcttcagacagccaaggaggaaaagagaaccacgattygccggccaatcatatcaacgcgcacggaaggaccccgggaagagccggcgtgggggcgtgggcgcgccacgaggctgaccgcgccgatgcctgatttagg

SEQ ID NO: 314755 - DNA, 201 bp, Homo sapiens
cagggtttcaccacattcgtcaggctggtcttgaactcccgacctcaggtgatccgcccgattcggcctccccagatgctgggattacaggtgtgagccaytgcacctggccttagatttattttctataatgagcatatattatttttgtaacaaaaagtaatgtttagaatgctgcttgaaataatagctatcagcttg

SEQ ID NO: 314756 - DNA, 201 bp, Homo sapiens
aggatgagaaaattaaagttcgcctcccaccgcctacaatcctaaaggtgtgtgtgggagttgtgtgttggtgcacaggtgtgtgtatgtgtctgtgggggtagactggtgaaatgagtggaaccgtgttggtgctaggcttgagtgcagtccctaggccgcctggcttcgtctactgaagggggattgagaccaggctca

SEQ ID NO: 314757 - DNA, 201 bp, Homo sapiens
atagggctctaatttggatgtgggcccaaattacccaggagaccttttcaaaatacactaatctcagccccttgcactctgcttctatccgtagactaccygtatcccacctcagagagagtctctaaaccaggagtaagagcagtcaggtggtgtgcaatgaagaggcacatctggctaaatagctgtctcccactctgg

SEQ ID NO: 314758 - DNA, 201 bp, Homo sapiens
ggaggctgagctgggaggatcacttgagccccatgaggttgaggctgcagtgagccatatttgcaccactgcactctaacctgggctataagcaagactctgtctcaaaaacaaacaacaataaaatcttcttacatgggtagagtttttcatagaattctgaaacaacttcacttgatatttcattttggtgttggtagg

SEQ ID NO: 314759 - DNA, 201 bp, Homo sapiens
acctcagcccccaaagtagctgggaccacggacatgtgccaccaaatctggctaatttggggtttttttgttttttgtttttggtttttggttgagacggrggtctcactatattgcccaagctagtctggaactcttgggctcaagcgatcctccttcagcctcccaaagttctgggattataggcgtgagtagccccta

SEQ ID NO: 314760 - DNA, 201 bp, Homo sapiens
gggaggctgagctgggaggatcacttgagccccatgaggttgaggctgcagtgagccatatttgcaccactgcactctaacctgggctataagcaagactctgtctcaaaaacaaacaacaataaaatcttcttacatgggtagagtttttcatagaattctgaaacaacttcacttgatatttcattttggtgttggtag

SEQ ID NO: 314761 - DNA, 201 bp, Homo sapiens
gcagtagctccctacggtcttctagacagggttagattataaaccatccttgatgggctgcttccaaggtccctgtggaagcactagaacacttggggctrtccatgattcagttctccaagattactcaatatttgcctactatgctttcactgttctattttgtttgtttgtttgtttgctcatgctttgagtgggcca

SEQ ID NO: 314762 - DNA, 201 bp, Homo sapiens
attgtggctaggatcaatggtggcacctagttccatcaaagttggagaatacttttttgtgtgtgtgacacagggtcttgctctgttgcccaggctggagygcagtgatgtgattatggctcattgcaacctccacctcccaagtagctgggactactggcatgtgccaccatgcccggctaattttttaaggtttttgta

SEQ ID NO: 314763 - DNA, 201 bp, Homo sapiens
agattaattatctaattatcttcttttccatttgccatttctttattctagattcactttatcttttaatacttctgttgatttttaaaattttatcactrtcatgtatttaatttccaatactatttttcaatatacttattcacaggtagtgtttttgtttcttttttttttttttttttttttttttgagacagagtc

SEQ ID NO: 314764 - DNA, 201 bp, Homo sapiens
aatagactctggggcacagggctaaactagaggcttctcagcatttgtgcttctcaaactttaccacaaaagtaccctaatggcagaggagtgaaaaataygtcttcttgtgttcttccataagaccacaggcaaaagatgtcttttcaatccctgtactctccactcaataatttaactgtatttttttaattttattat

SEQ ID NO: 314765 - DNA, 201 bp, Homo sapiens
ctctgacagaaacggccagagaagagcaaccgggcttcgcgtgcctatagctcaagtactgggacccagggaccacggatggctcggatacgcggcagatractgcacgggcccagggagactcaccatgatggcgatctatcttcagacagccaaggaggaaaagagaaccacgattcgccggccaatcatatcaacgcg

SEQ ID NO: 314766 - DNA, 201 bp, Homo sapiens
tgtatagctctgagataatagactctggggcacagggctaaactagaggcttctcagcatttgtgcttctcaaactttaccacaaaagtaccctaatggcwgaggagtgaaaaatacgtcttcttgtgttcttccataagaccacaggcaaaagatgtcttttcaatccctgtactctccactcaataatttaactgtatt

SEQ ID NO: 314767 - DNA, 201 bp, Homo sapiens
atttctttttattcttttttctctaaacttctcttctggcttcatttcattcattacgtcttccatcactgataccctttcttccagttgatcgcattggytactgagtcttctgctttttttttttttttaagtaatgtttttaactacttaaaacaccagataaagtcaacactacaagttgctgggccatgaacttgc

SEQ ID NO: 314768 - DNA, 201 bp, Homo sapiens
atcacagcactttgggaggccaaggcaggaggatcacttgaggccaggagtttaagactagcctgggcagcaaagtgagaccccgtctctataaaaaaaaraaaaaagttttgctttttttttttactttccaatatttaaaggaaaaaggccaagtgcagtggcttacacctagaatcctagcaatttgggaggccaagg

SEQ ID NO: 314769 - DNA, 201 bp, Homo sapiens
cataacttttttttttttttgagacaggctcttgctctgtcacccaggttggagtgcagtgacacaatcacagctcactgcaacctggacctcccaggccyaagcaagcctcccacctcagcccccaaagtagctgggaccacggacatgtgccaccaaatctggctaatttggggtttttttgttttttgtttttggttt

SEQ ID NO: 314770 - DNA, 201 bp, Homo sapiens
cgagtatattgaagaagtgtttcttcctgatgactgctttattctcgtcaagctctccctggaacggattaggcttctgagactggaagtgagtcacatarttaaatgtagagaggaagtcatcctgttagtcccaagataggtactgataaactagggcaagagctaagcaagacagaggaagcattgcagaaccttctg

SEQ ID NO: 314771 - DNA, 201 bp, Homo sapiens
taacctgggctataagcaagactctgtctcaaaaacaaacaacaataaaatcttcttacatgggtagagtttttcatagaattctgaaacaacttcacttratatttcattttggtgttggtaggaccctcctaggtcaatcttgctggtatttttttctctccccttgacagataaaggaactgggagttagtgacaaag

SEQ ID NO: 314772 - DNA, 201 bp, Homo sapiens
cgtagaaatttgccatgactgttcagtgctaaacagtggacttctaaaattaaaattgcctgttatctcaagttttcataacttttttttttttttgagayaggctcttgctctgtcacccaggttggagtgcagtgacacaatcacagctcactgcaacctggacctcccaggcccaagcaagcctcccacctcagcccc

SEQ ID NO: 314773 - DNA, 201 bp, Homo sapiens
cccggattaaagagatcatcaacgcttccaaggccatcaggtgcctgctttcatttccttcttgttccacacatgcctgtcctgtttcctgagaaacaatsatccccgtgtcacatgcatatgtgtgatatcctcataggactgtgtcttaaactctgggtggcatgcttgctgtgttaatcctattttggtttttaaaaa

SEQ ID NO: 314774 - DNA, 201 bp, Homo sapiens
ggattaaagagatcatcaacgcttccaaggccatcaggtgcctgctttcatttccttcttgttccacacatgcctgtcctgtttcctgagaaacaatgatycccgtgtcacatgcatatgtgtgatatcctcataggactgtgtcttaaactctgggtggcatgcttgctgtgttaatcctattttggtttttaaaaaagc

SEQ ID NO: 314775 - DNA, 201 bp, Homo sapiens
tgctttattctcgtcaagctctccctggaacggattaggcttctgagactggaagtgagtcacataattaaatgtagagaggaagtcatcctgttagtccyaagataggtactgataaactagggcaagagctaagcaagacagaggaagcattgcagaaccttctgtgtggtttctggtttttgtgattctgttgtcccc

SEQ ID NO: 314776 - DNA, 201 bp, Homo sapiens
ccaggagtccaacctggacttgctgaagcctccttgaagactcacctgtcacttccccagcctttcctccaacccacacatgctcctggctcctctcgccrtcgttccgcctttcttgggttcctgacagctccttgttgtcttgattgtatttctgtcttctactgttccaggaccatgacctcattgagcataagggcc

SEQ ID NO: 314777 - DNA, 201 bp, Homo sapiens
tcatggtgcgggtggggggtgcttagaacaaacctgactaaaaggacttcttagaggggcaacaatgaaataaacgaagaacaacactggaatcagtaacrcctacacctggccatgttgcaggtgaacgctgagacagtgagatattccatctgcacatccaagctccgtgtgaagcccggtgatgtggctgttcatggt

SEQ ID NO: 314778 - DNA, 201 bp, Homo sapiens
gccactggcaccagcaccagccctggctgggccctcattctccttgtccctggtataaagtatttctccataaggaaagggcaaagaaagcctgccatttmgtgagaatatactggccaggtatttatagtctcaaggtggggcattttctgatttgagtggatttcagaatcgtgggccttgaactttttttgtttgatt

SEQ ID NO: 314779 - DNA, 201 bp, Homo sapiens
cattgtgggatatgtcattcaacctcactaagcctcgctttactaacacgtgacaatgagggttattgcaaggcctctgcctctctctttgcaactatttrtgtaactcattattaatatcattctaattaactctaatgacctattccagtgcttgctgcggggcttggatgcttagaaggaaagcatttcctcagagag

SEQ ID NO: 314780 - DNA, 201 bp, Homo sapiens
tcaatactggttggcaaggatgagaaaattaaagttcgcctcccaccgcctacaatcctaaaggtgtgtgtgggagttgtgtgttggtgcacaggtgtgtrtatgtgtctgtgggggtagactggtgaaatgagtggaaccgtgttggtgctaggcttgagtgcagtccctaggccgcctggcttcgtctactgaaggggg

SEQ ID NO: 314781 - DNA, 201 bp, Homo sapiens
tgcttagattttctgcatccattacatgctgaccacaagcagccatgcagaattgagttgcactgctgccccctctctgacctttactttcccctgtctgyacctatttctggtctatgccaggctttttctctgtcacagacataccctttccgaccctaatagcatctatattctctgttgaaaggtgataaccagaag

SEQ ID NO: 314782 - DNA, 201 bp, Homo sapiens
cctgttttggtttaggcttttagtattgcatgcatcattttggggttttaagttgtctatacgtttagattttttttctttttctttttctttttttttttgtttgtttgtttgagacggagttttactcttgttgcccaggctggagtgcaatgatgtgatctcagcccactgcaacctctacctcccaggttcaagtga

SEQ ID NO: 314783 - DNA, 201 bp, Homo sapiens
ggtgtgacacccagggctgggacctaagggctttgtcacttagtccgatttcttaatttcttcttggccttatccccaaggagttagtctgttagattcckctctgttctatcaaaaaactgatgttaggatgaggtgcagtcccctgaacaacttctgttctcccttatccctaaaactagctctagtgtgttaacagat

SEQ ID NO: 314784 - DNA, 201 bp, Homo sapiens
tttgatttaactttgcatattaactaagcaactaaaatgcttaaaagattttttctttgcagtaatcctccaactaagaccttaaaccatatttttttggkgatttagttttgcaacagcagcagttcctttttctggagatttaaaatggaaatgaaatacagctttaatttgttcaatattcatagattctcctatctg

SEQ ID NO: 314785 - DNA, 201 bp, Homo sapiens
ttgtgagtaagaacctgtacagccaggacaaccaacatgcccccttgctatatggggtgctcgaccataggatggtaaggccccctcacccctcctggtamctgtgtcttgccctgctgataaaactggtgacttaccagattgaaaggagcaggggcttccttccatctcctcaattcccccctgcacatattagactag

SEQ ID NO: 314786 - DNA, 201 bp, Homo sapiens
tgatgtgattatggctcattgcaacctccacctcccaagtagctgggactactggcatgtgccaccatgcccggctaattttttaaggtttttgtagagaygaggctgatcacaaacatctgggatcaagcgagcctcctgcctcagccttccaaagtgctgggattataggcgtgagccactgcacccagccctcaggcc

SEQ ID NO: 314787 - DNA, 201 bp, Homo sapiens
ttatggccctttcttcctgctctaccaactcaacagctaaccgtggtttctcaattgggatcggtgatgtcacacctggccaaggactgctgaaggccaastatgagttgctgaatgccggctacaagaaatgtgatgagtacatcgaagccctgaacacgggcaagctgcagcagcagcctggctgcactgctgaggaga

SEQ ID NO: 314788 - DNA, 201 bp, Homo sapiens
atgagtgtgtctgtacaccctataatgctgactttgatggtgatgaaatgaaccttcatcttcctcaaacagaagaagctaaagcagaggcccttgttctkatgggggtatgtagggtggcacagcccagcttttgcataacagctccttgaaaggaggcaaaggaaacttacatgaaaacaccaccacaactaacaacgc

SEQ ID NO: 314789 - DNA, 201 bp, Homo sapiens
gccatgaacttgctgtggctttgtgtcttctctctccctactatggaagcatggccctttgcaagctggaaaaccagggtagataaaccagagatgtgaaygagtgggccagaacaaacactgtgattagtgtgacagtggacacctatttccaagtcagtagacgcctatttccatcatctctcctgtagctcgtgtatc

SEQ ID NO: 314790 - DNA, 201 bp, Homo sapiens
gtctctataaaaaaaagaaaaaagttttgctttttttttttactttccaatatttaaaggaaaaaggccaagtgcagtggcttacacctagaatcctagcratttgggaggccaaggcaggagaatcacttgaggcgagaagtttgaggtcagcctgggcaacagaggaaaaactctatctctaaaaaaatattttttaaa

SEQ ID NO: 314791 - DNA, 201 bp, Homo sapiens
ccatgtcactcagtgagcaaacagctgagttgacactggaagctggaagcttgtttgccagtctgttgttcacattatactcaagaccataggcagcaggytgcccaggatgcctctctttctcctagaatctgaacaaggaaagtaaagattaagacgcatttcagtatcatttgttagtttctagttacctgggagtaa

SEQ ID NO: 314792 - DNA, 201 bp, Homo sapiens; identical to SEQ ID NO: 65578

SEQ ID NO: 314793 - DNA, 201 bp, Homo sapiens
gaggagaatgcccgtgctcataggcctgctgtggagcatgagacactaacttctggttaatcgtgtgatgaattgcctgccaatagccatgttgtgagttygttccctctagtatgcatgggttgactcagtgtgaatttttagcagattgtttcagttttcatttccaaaaagtgagctgtttttctttttttattttta

SEQ ID NO: 314794 - DNA, 201 bp, Homo sapiens
cgggaaatgtgtccattggggtgaaagctgagctatgtcattcccagtgcctaagccggcagattgttttaggtgtgttaattttactccctatgtgtgcrcagtcccttgcagatgaaaaccttctgggtctaaggcttggccttaggttctgctcctgtttttcctgtgccaacaggtaaggcagcttttaacaactgg

SEQ ID NO: 314795 - DNA, 201 bp, Homo sapiens
catatttatggtattaatttcatggtgcgggtggggggtgcttagaacaaacctgactaaaaggacttcttagaggggcaacaatgaaataaacgaagaamaacactggaatcagtaacacctacacctggccatgttgcaggtgaacgctgagacagtgagatattccatctgcacatccaagctccgtgtgaagcccgg

SEQ ID NO: 314796 - DNA, 201 bp, Homo sapiens
atgacctattccagtgcttgctgcggggcttggatgcttagaaggaaagcatttcctcagagagtgtatagctctgagataatagactctggggcacaggkctaaactagaggcttctcagcatttgtgcttctcaaactttaccacaaaagtaccctaatggcagaggagtgaaaaatacgtcttcttgtgttcttccat

SEQ ID NO: 314797 - DNA, 201 bp, Homo sapiens
ggtgaggctgtggtgtgtgtcacccccagagagaacagcaagagctccatgtactacgtgctgcagttcctgaaagaggatctccccaaggtgaaacagamgtcgcttctcatggagacccagcatctccctgtggtgtgacacccagggctgggacctaagggctttgtcacttagtccgatttcttaatttcttcttgg

SEQ ID NO: 314798 - DNA, 201 bp, Homo sapiens
accagaggcttcgtccaacgcctgaagggaaaacagggtaggtttcccacaagatgtgcagaagccagcccactctctttggttcctttttcaggagtgtytgtccagcttctctgattggaggtcacaggctttcctcagtctctccgttcttattgttcccatgagcacatggtatgccatggggacctatgacatgtt

SEQ ID NO: 314799 - DNA, 201 bp, Homo sapiens
ttacatacttcgtcttcttagaggatgcagtattatacataatgataataactcttaccaccactttatttgacaaatgcataaggagtgcccagtagatrctgcaggagatcggtgatagtgaggcacgtgcctgctcttaaggagcttacagttgagctttaactgttggcacaggctggcgctgtggctcaggcctgt

SEQ ID NO: 314800 - DNA, 201 bp, Homo sapiens
agatttctgactggaacacagtgttcctcgttcatagtgattcatgtgatgacttgaaaagctatttaatagcctgtgtttaatttggttttttgtttacyaagtttgatcatgaacctccccgtgggtttttttttttctttttttttttaattggttggttattcattaattcagcaagtctttaatgagctcctctca

SEQ ID NO: 314801 - DNA, 201 bp, Homo sapiens
tgcccaggatgcctctctttctcctagaatctgaacaaggaaagtaaagattaagacgcatttcagtatcatttgttagtttctagttacctgggagtaayttattgtggtttttttgtactgcaggtaaacaaagcaaacatcaatttcttgaggaaactggttcaaaacggccctgaggttcacccaggagcaaacttc

SEQ ID NO: 314802 - DNA, 201 bp, Homo sapiens
ctggggtatggacagtgtggtgtgttccttggaaaaccactttgtagtagaagcagtatccagattgggtcctttatactatatatggagctaacactaaratatgatggacttgtcatatacaactgaggtttatgaaatgaattatgtcatctgcatgactgtgaaacttacaaatgatgtttgctgtgtaatctttca

SEQ ID NO: 314803 - DNA, 201 bp, Homo sapiens
ttagaatctgtcccttttgcctggggatacagcagtgaacaaaacaaagtcacgttcctgtggaggtagatcctagttggaggagaaagccagtaagcagytgtttgtttcaattcacgctgttggtcatggttcaaatttattttaaaattgaaaccttgcagtattctcacaatttcattccttttctttgttttgtgt

SEQ ID NO: 314804 - DNA, 201 bp, Homo sapiens
cctggggatacagcagtgaacaaaacaaagtcacgttcctgtggaggtagatcctagttggaggagaaagccagtaagcagctgtttgtttcaattcacgmtgttggtcatggttcaaatttattttaaaattgaaaccttgcagtattctcacaatttcattccttttctttgttttgtgttggttcctaatgcttaggt

SEQ ID NO: 314805 - DNA, 201 bp, Homo sapiens
atccaagttgtgagtaagaacctgtacagccaggacaaccaacatgcccccttgctatatggggtgctcgaccataggatggtaaggccccctcacccctyctggtaactgtgtcttgccctgctgataaaactggtgacttaccagattgaaaggagcaggggcttccttccatctcctcaattcccccctgcacatatt

SEQ ID NO: 314806 - DNA, 201 bp, Homo sapiens
cttctttgttctgatggcgtctggatgcgagtgtgaagtttcatgttgccgacgattgaccacctcaatgggacacagagggcggacccatagctcctcarggcctttcacacctgacgttgggtcttggaggatttttgttgattgtattgaaggtgcaccgtgctttggtttcgagcttttgccattggtgtgagtacc

SEQ ID NO: 314807 - DNA, 201 bp, Homo sapiens
tcactctcaaggacactttctttgatcgagccaaggcttgccaaatcattgcttcaatactggttggcaaggatgagaaaattaaagttcgcctcccaccrcctacaatcctaaaggtgtgtgtgggagttgtgtgttggtgcacaggtgtgtgtatgtgtctgtgggggtagactggtgaaatgagtggaaccgtgttgg

SEQ ID NO: 314808 - DNA, 201 bp, Homo sapiens
cttgctctgcaccatgcctcatccccgccactcgacaaaacatggctttatggggctgtgctggcctgggggagagggagcacgaggggaactctccccartgtctggcttccctgcctcttccgtgagaccagcactgactgctgagctttgctcgagcctttctgattccgcaggaagaccctgcaggcttggggtgag

SEQ ID NO: 314809 - DNA, 201 bp, Homo sapiens
atttccttcagtcttttgaaacagccattgaacataataaagaagtggagcctctgctgggaagggcacaggtgagcctgagaatgcacgcctgccttccrcctgcctcccgcctgcctcttccgcacgtcacatgcacactctctcccccaactccgccccacccctagacacccactttcttccaaaatgagaggtcca

SEQ ID NO: 314810 - DNA, 201 bp, Homo sapiens
cactgcactccagcctgggtgacagagcaagactctgtctcagggaaaaaaaaaaatcctctagcagctttccattgtgtgggccatcacgcctagcaaaktttttgtatttttagtagagacagggtttcaccatgttagccaggatggtctcaatctccttgcctcgtgatccacccaccttggcctcccaaagtgctg

SEQ ID NO: 314811 - DNA, 201 bp, Homo sapiens
cctttactatttacaaatagaccatggctaggcttccaagggaatgaaaaaaactgagtggcagagcgtttattttttcaagaataatgtcaatagacacraattggaactgctggatcttttatctccaaatcctgactgtagcatcctgcatccccgtttacatctgttggatgacttccctctgtcagcacagatggt

SEQ ID NO: 314812 - DNA, 201 bp, Homo sapiens
atctgttggatgacttccctctgtcagcacagatggtttttggtccacgaagcaaagagcaaccctgggcatgtaagaatttttctagcccttgactttgwagtcagccacactgatcctgacccctgtgtgtgacaccagggctgacaggagcaggtactggctgggcgctgggcagagcagagtgtcctactgtccttg

SEQ ID NO: 314813 - DNA, 201 bp, Homo sapiens
cctttcacacctgacgttgggtcttggaggatttttgttgattgtattgaaggtgcaccgtgctttggtttcgagcttttgccattggtgtgagtaccacygtgactctttctcccttgacgcagggtgaagtcctgggcatcactaggtttggcctggccaagatgaaggagagtgtgctgatgctggcctcctttgaga

SEQ ID NO: 314814 - DNA, 201 bp, Homo sapiens; identical to SEQ ID NO: 65583

SEQ ID NO: 314815 - DNA, 201 bp, Homo sapiens; identical to SEQ ID NO: 65587

SEQ ID NO: 314816 - DNA, 201 bp, Homo sapiens; identical to SEQ ID NO: 65589

SEQ ID NO: 314817 - DNA, 201 bp, Homo sapiens; identical to SEQ ID NO: 65576

SEQ ID NO: 314818 - DNA, 201 bp, Homo sapiens
tctttctgttcttaaaccgaccactaactgcctatatatctctctttttattggtttcttttgagcctttgaagaatctcttagaaattatagtatatacmtgagagttagggtctgtaacagatgcgttgaggggattttctggcctataaatgtgggttctgggagaaaatgtatacatgagggccagttatgacaagg

SEQ ID NO: 314819 - DNA, 201 bp, Homo sapiens
tcccaccgcctacaatcctaaaggtgtgtgtgggagttgtgtgttggtgcacaggtgtgtgtatgtgtctgtgggggtagactggtgaaatgagtggaacmgtgttggtgctaggcttgagtgcagtccctaggccgcctggcttcgtctactgaagggggattgagaccaggctcagcccactgactctcaggcttcctc

SEQ ID NO: 314820 - DNA, 201 bp, Homo sapiens
cctttaaccccccctccctccccccaaaaaaaagctttgaggagaatttctgtttgttctgctttaagtgtcagtatgggaacatattttctcaactgtckcaaattcattttggaataaggcaaagtaataaataattgttgtctaaatatataatcattcttccagatgttacaatccagaacagtgagttgatgagtg

SEQ ID NO: 314821 - DNA, 201 bp, Homo sapiens
acatttgtaatccacagagacaatgaggacaacccaccaaggatctccttttctcccactaggcactgatcctgaaggagctgtctgtgatccgtgaccaygctggcagtgcctgcctccgggagctggacaagagcaacagccccctcaccatggctctgtgcggctccaaaggtctgcatgcccctctctcacctgctg

SEQ ID NO: 314822 - DNA, 201 bp, Homo sapiens
ttttttgagacaggctcttgctctgtcacccaggttggagtgcagtgacacaatcacagctcactgcaacctggacctcccaggcccaagcaagcctcccmcctcagcccccaaagtagctgggaccacggacatgtgccaccaaatctggctaatttggggtttttttgttttttgtttttggtttttggttgagacggg

SEQ ID NO: 314823 - DNA, 201 bp, Homo sapiens
ttcaacctcactaagcctcgctttactaacacgtgacaatgagggttattgcaaggcctctgcctctctctttgcaactatttatgtaactcattattaayatcattctaattaactctaatgacctattccagtgcttgctgcggggcttggatgcttagaaggaaagcatttcctcagagagtgtatagctctgagata

SEQ ID NO: 314824 - DNA, 201 bp, Homo sapiens
aaagttcagttgatgtggagtggcgctgggactcacatcctaattttctgacacttaagccaatagtctttcttcgtgaaaatgtaccttgtgtttagagrctctctgatgttcattctggttggtttcaggggtgtctgagtgcatcatcatgggaatcccaatgaacattggaaccgggctcttcaagctgcttcacaa

SEQ ID NO: 314825 - DNA, 201 bp, Homo sapiens
ttgctaagttgtgttctcaaaggcagggccctcccagggtgcctttggctcaggtgggagaggagaactggaggagctgactctgtctccaacaagctcckgggctgtgagcaagccctgcccttccctgaaagtgcagaatccccctgtctgcactccacagccaccctttttagatgggaaggaaagggatttgccaaa

SEQ ID NO: 314826 - DNA, 201 bp, Homo sapiens
tcgccgtcgttccgcctttcttgggttcctgacagctccttgttgtcttgattgtatttctgtcttctactgttccaggaccatgacctcattgagcatargggcctattcctgttttacccttccaatctgcatgcacttcaattagtgttattttggtaaatgaatgttacatttctggtccatgtccccaggttcctt

SEQ ID NO: 314827 - DNA, 201 bp, Homo sapiens
gccacatcatgctgtcccaagaggagaagaagcagtttctggactatctaaagaggcccggcctgacctaccttcagaagcgaggactgaaaaagaaaatytctgacaagtgccggaagaaaaacatctgccatcactgtggcgcttttaatggtgagtggaatgcacagaaggctaagcaatagcccttttcactcactg

SEQ ID NO: 314828 - DNA, 201 bp, Homo sapiens
cgatggagatgtggtgctgttcaatcggcagccctcgctgcacaaattgagcattatggctcatctggtgagtagcactgctttttaaattttccatcacktagaaatttgccatgactgttcagtgctaaacagtggacttctaaaattaaaattgcctgttatctcaagttttcataacttttttttttttttgagaca

SEQ ID NO: 314829 - DNA, 201 bp, Homo sapiens
cacaaagaaaaagataaaggtaacaaagtctgcctactggctgtgagtactgctaatctagtgaacacaggcttcctctctgcatatccatagtatagagmcatttgcagatctgtgtatatggtcacgtggttaagggtacaaaacagggcgatggcatttttaaaagaaaataatttttcattctcacttatgctttta

SEQ ID NO: 314830 - DNA, 201 bp, Homo sapiens
tgatttgaagtctggcaccaatgaagatgatctgacaatgaaactgacagaaatcattttcctaaacgatgttattaaaaaggtcagtgcctcccatttcsttgtaagtttcatagtatatctatccaaaaacttctggtcaagaaaatgtgagaaaaatcaaactgaccaggtttgtttctgtttgggctgtgctggttt

SEQ ID NO: 314831 - DNA, 201 bp, Homo sapiens
tctatcttcagacagccaaggaggaaaagagaaccacgattcgccggccaatcatatcaacgcgcacggaaggaccccgggaagagccggcgtgggggcgygggcgcgccacgaggctgaccgcgccgatgcctgatttaggctgcctacggccccgcctcacagacttttggccacacccctggaactctagactgacca

SEQ ID NO: 314832 - DNA, 201 bp, Homo sapiens
tgaaaaatctgctttgatatgaagtttcagtgcagtaggtgctgagaggtcttaagtcttttcagagcccagaggttgttaaggttctgctagtgacaaayttctgtggtgcatttgaagagatgtttactaaagaggatcagggagagggaatgggtaatggcaccaaggatgccaactttctagtggaattagcatgta

SEQ ID NO: 314833 - DNA, 201 bp, Homo sapiens
gggggccatcgaatgtagggaataagagaaagagaaaagtctaaggtggctttcatgtctccatggttggacgaattgatgctccttagaagaggagcagytttgatgaaaaggtggatgcatgaagttgagtttggaattttttttttcatttttcttatttatttattcatgaatgagatggaatgtcgctctgtcacc

SEQ ID NO: 314834 - DNA, 201 bp, Homo sapiens
caggctacaaggagaactctattaattcttgagcctgggtactgaatgtggacagttgaaatgcactgggaatcactagttgcctaaccccctatggtaaytaatagcttgacttttaccttaacgtataatacagcagttgagtaggaaggtagttaagacccaggtgtttgatgggtgtgaaatagtagctcactgttg

SEQ ID NO: 314835 - DNA, 201 bp, Homo sapiens
acctgagtataaacagatattttcttaatggtgtcttttgaagattagttaggaagtccagtttattttttttaatggtttgtgcttttttgttctatctrgggaatctttgcctaaggtctcagggtctcaaaagattttattctgttttattccagatctagttcaaaaatttgagttaatatttgtatgtggtatagg

SEQ ID NO: 314836 - DNA, 201 bp, Homo sapiens
ttgaggtatcctctcccccatgtttgtttatttttaagttgattgagattgaatttatatacagtaaaattcatcattttaggttcagttgtataagtttrtacagtggacacagttgtatgacccccagcccaagaaagttatggaatgttttcattgccacagattcatttatgggcaatcccctattcctttttcagc

SEQ ID NO: 314837 - DNA, 201 bp, Homo sapiens
cattgtttctttgaggtatcctctcccccatgtttgtttatttttaagttgattgagattgaatttatatacagtaaaattcatcattttaggttcagttktataagtttatacagtggacacagttgtatgacccccagcccaagaaagttatggaatgttttcattgccacagattcatttatgggcaatcccctattc

SEQ ID NO: 314838 - DNA, 201 bp, Homo sapiens
gtatagtctgtctcataatatataattatgacccacagagtggaagctcatcagcagactagaagctgctttttacctattgccccctcttccctggttcyccaagcattctggttgtgtcaggaacccaattcagattttcttaagcagaaaaggggactaataggattcctcgttgggtcactgaagccaaggaagagt

SEQ ID NO: 314839 - DNA, 201 bp, Homo sapiens
ctcttttgatattttataagtttttgtgatctggggcattaaaaagtatcttttcaaatagtatagtctgtctcataatatataattatgacccacagagkggaagctcatcagcagactagaagctgctttttacctattgccccctcttccctggttccccaagcattctggttgtgtcaggaacccaattcagatttt

SEQ ID NO: 314840 - DNA, 201 bp, Homo sapiens
aaagcaagtcaggtttttccacttataagcacttcagaaacagtcaagtataaataaggcattgttaaagatactcgtgaggttaaattatcaggacaagkaaggaccgtaagaatagggattgcctttgaagagttggggaagagatgggatttgagagggaactttaaaaatcatgttcttattgttaaaccaggtggt

SEQ ID NO: 314841 - DNA, 201 bp, Homo sapiens
tgacctctataaagctgtacttgtttgtagttatttatctagcaatcttttctccactattagattgttagatcctagaggacagagatcatcttttataratcctgggtctcctttcacaatgtcaggctatagaaaaaatgatattacctataataatagctcagttaatatggccattggaaatggcctgaatgctct

SEQ ID NO: 314842 - DNA, 201 bp, Homo sapiens
tctatgacttcacattaaagggttggttttttattccagtcttctctatatgtcttgtctttctagagtatgtttgcttagaagttctttgcagttgactrtaattttcatttatcctagatcactgcctcctttttggcactgcatggtgccttaagtctaggttttccttggctcttgcaaatactcagagcactgcct

SEQ ID NO: 314843 - DNA, 201 bp, Homo sapiens
tgtgactgccccatgcattgcagggtatgtagcatctctggctccagatagtaagtgctagtggcaccccatagccattgtgacaaccacaaaattttaawaatgaaaaacctcttaagtttattggaaaatgacagtatattaattaggcagtatttttagaaacctatttattatagctaaaacaaatagggatttatt

SEQ ID NO: 314844 - DNA, 201 bp, Homo sapiens
gggaggcggaggttgcagtgagccgaggtcgcgacactgcactccagcctggacaaaagagcgagactctctaaaaaaaaaaaaagaataaagtcctttgsggggaaaaaaaaaaaaacctgtcaatccccacccccatactcccactaactaaattcagatacgaaattactatcaaaaagagtaagtaagccatcatgt

SEQ ID NO: 314845 - DNA, 201 bp, Homo sapiens
gaatttatagattaattttgggaataaccctggattcattttttcatctattcattagttagttatttttttggatccttcaataaagctccccagttttyttcacctcttgcacctgttgggttttcatagctattttgaatgtttttttttttttttttttttttttctgtgagatggagtctcgctctgttgcccagg

SEQ ID NO: 314846 - DNA, 201 bp, Homo sapiens
agaattacttgaatctgggaggcggaggttgcagtgagccgaggtcgcgacactgcactccagcctggacaaaagagcgagactctctaaaaaaaaaaaaagaataaagtcctttggggggaaaaaaaaaaaaacctgtcaatccccacccccatactcccactaactaaattcagatacgaaattactatcaaaaagagt

SEQ ID NO: 314847 - DNA, 201 bp, Homo sapiens; identical to SEQ ID NO: 65597

SEQ ID NO: 314848 - DNA, 201 bp, Homo sapiens; identical to SEQ ID NO: 65599

SEQ ID NO: 314849 - DNA, 201 bp, Homo sapiens
tcaagtgtaccctactggaccccagtgcctttctccctccctcatacctctttatcgacctacatatctacctacttctctctctctctctctctctctctgtttctccatccatccacctacctaccttttctccgttgtcttttaaataatgtatattaccaaaaaaaacaccttttctgcagaggaacttaatcacca

SEQ ID NO: 314850 - DNA, 201 bp, Homo sapiens
gtcaagtgtaccctactggaccccagtgcctttctccctccctcatacctctttatcgacctacatatctacctacttctctctctctctctctctctctctgtttctccatccatccacctacctaccttttctccgttgtcttttaaataatgtatattaccaaaaaaaacaccttttctgcagaggaacttaatcacc

SEQ ID NO: 314851 - DNA, 201 bp, Homo sapiens
taagctttgcgggaactcccggaatgtttgagaggttctcttgttctggtctttcctgagactgaagccactggcagcaatgtgcacgctgagccgcagcrctctggctgctggattgtgtccatgactgctcaggacgttgccaggatgttgtgttttccaataataagcattactctataaatgcaaattaccattgta

SEQ ID NO: 314852 - DNA, 201 bp, Homo sapiens
ggaggccactgggataagctttgcgggaactcccggaatgtttgagaggttctcttgttctggtctttcctgagactgaagccactggcagcaatgtgcaygctgagccgcagcgctctggctgctggattgtgtccatgactgctcaggacgttgccaggatgttgtgttttccaataataagcattactctataaatgc

SEQ ID NO: 314853 - DNA, 201 bp, Homo sapiens
ccggctaatttttgtacttttagtagagacagggtttctccatgttggccaggctggtcttgaactcctgacctcaggtgatctgcccacctcggcctcccaaagtgctgggattacaggcatgagccactgcacccagcctggcctgatattttcatatcctcttatgccttggccataagatgcactactgtttaggtt

SEQ ID NO: 314854 - DNA, 201 bp, Homo sapiens
ggaaaacaggattggagagtttataatttatatcaaaagtataaggaaataattattttttgtgaatatatgagataaatactcatctttatcacaatatraacttttttttttttctttaagagacagggccttgctctgtcacttaagttgaagtgcagtggcacaattatagcttactgcagccttgaactcttgggc

SEQ ID NO: 314855 - DNA, 201 bp, Homo sapiens
ttatacttacatttaactattctgcaggcatttttttcaaataggattttagagaccgtaaaaccacatttgaaattcagatgttgcaccagcaatcagastgctttgccagtgatcaaaagaggcagcttttcatatgaaataacacaaaatataaatgtatgtatatagtttatctggtgagaacttttgttccatgac

SEQ ID NO: 314856 - DNA, 201 bp, Homo sapiens
tgttgcctgagtcctctgaggagtgctgtgatgacagcatcctacccacaaggttccaagccacaaggctctgtgcctgctgtcagcagccagagttgtayctggaacagggttctccaccagagtctaggcttcctgggggtgctgctcaccttccaagttatggggattctgtcctgatgtcgaatagttaaatactca

SEQ ID NO: 314857 - DNA, 201 bp, Homo sapiens
tgactgccccatgcattgcagggtatgtagcatctctggctccagatagtaagtgctagtggcaccccatagccattgtgacaaccacaaaattttaaaawtgaaaaacctcttaagtttattggaaaatgacagtatattaattaggcagtatttttagaaacctatttattatagctaaaacaaatagggatttatttt

SEQ ID NO: 314858 - DNA, 201 bp, Homo sapiens
gggtgtccagggaaagtgatgaggctgcagccccagctcacctacccttcctgggcttcatgtccacctcagaaaggcccagccttaagttcatcagcaayagttgcatggcttgaaagcacacagcctgggccaacttgcacactgggcattggggaagggacattggctctgtgatcccaattctcccatctccagccc

SEQ ID NO: 314859 - DNA, 201 bp, Homo sapiens
cttgcagagggtcccaggtcctgcagagtcacgaaaaccagtctgtgacatgacatgtccctttgctcaagggagggctgcttggagctgcacacttgctragttaaagagcaagggtgtccagggaaagtgatgaggctgcagccccagctcacctacccttcctgggcttcatgtccacctcagaaaggcccagcctta

SEQ ID NO: 314860 - DNA, 201 bp, Homo sapiens
tttgggaggccaaggcgagaggatagcttgagcccaggagtttaagatcagcctaggcaacatagtaagaccctacctcttgaaaaaaaaaaaaaaaaaaagtagctgggtgcagtggcatcatgcacctgtattcccagctccttgggaagctgtagtggatcatttgagcccagaaggttgaggctgcagtgagtagtg

SEQ ID NO: 314861 - DNA, 201 bp, Homo sapiens
catttgggttttgataaaaaatatattgaatttatagattaattttgggaataaccctggattcattttttcatctattcattagttagttatttttttgkatccttcaataaagctccccagtttttttcacctcttgcacctgttgggttttcatagctattttgaatgtttttttttttttttttttttttttctgtg

SEQ ID NO: 314862 - DNA, 201 bp, Homo sapiens
ctgaaatttaacatgaatttattgttagaaaatacttagcaaactattatacagtggaagtttactaatccaagaaaggatggcttaaaaaaaaaaaaaaagcctttgcaagcagaaatcatgttaatggagaaatgttggaagcattttttaaaaagatgtggaagaagatgttaatgccctcaatcaccagttagtatt

SEQ ID NO: 314863 - DNA, 201 bp, Homo sapiens
ttataaaaatgactcaagtacatgctctctataagaaactctcctcaaatattatagtataggtaggttaaaaagaaaaactatggaaaaaaaaaaaaaaactgcacattgaagaccccaactgaaacaaaactactatgttaatatcaaagtagacttcagaacaaagaaaactaccagggttaaaaagggatattacat

SEQ ID NO: 314864 - DNA, 201 bp, Homo sapiens
tgagccaggatcacacccctgcactccggcctgggtgacagagcaagactctgtttcaaaattaattaataagttaatggattaattaattaattaatccmttccccaaagcctcatttgggttttgataaaaaatatattgaatttatagattaattttgggaataaccctggattcattttttcatctattcattagtt

SEQ ID NO: 314865 - DNA, 201 bp, Homo sapiens
tacatattctgtgtcttctctctgttgaggtctggatttaatgctttctttgtattgctgatccttaagcatgattagagaaagaattgagtctaacagagttacttagcgaaacataggagcattcctatccttggttaagtctgagcacaaaggcattctcctaattctgcatataataaaatagaggcagctgtagtc

SEQ ID NO: 314866 - DNA, 201 bp, Homo sapiens
ttgcatagcatgcaaaaatctggccacccccccgaatcttttgttatgcaggtgggttctctgcatctggtgccatgttgcctgcttccttactgtacacrtggtgacaaacaaaagggaaaatggtgcctctatgttgaacatacctggcttccaggtagcccttttctattggcacaactgcagcattcactcctgcat

SEQ ID NO: 314867 - DNA, 201 bp, Homo sapiens
ttacatattctgtgtcttctctctgttgaggtctggatttaatgctttctttgtattgctgatccttaagcatgattagagaaagaattgagtctaacagagttacttagcgaaacataggagcattcctatccttggttaagtctgagcacaaaggcattctcctaattctgcatataataaaatagaggcagctgtagt

SEQ ID NO: 314868 - DNA, 201 bp, Homo sapiens
gtgtgaaagcaacaaagatgtcaaacaaagatgccaagaaaatttgtggaagagcaaattttgtgagttacccgaccacagaatcatgcatttttttttttaattttgttcataaacaagacagtatagctttcaaagacatatgggacttggggattagattgctttagttctgaagaaacgttttaaactaatattttt

SEQ ID NO: 314869 - DNA, 201 bp, Homo sapiens
atcacctgaaaacattcatcaggaggaagtacctaattttaagaatataaatgacatctttgaaataattttaatctaaatatatcactttaaataggtgytatttattaaacacataacattaaccaagacttaaatgaaaaggtaccaaggatcccaccactagagcaaactgcttttattgttctatcacccttctag

SEQ ID NO: 314870 - DNA, 201 bp, Homo sapiens
ggaacttgctctgggtgagtaagtgagtgctgagtgaatgtgaaggcctaagacattactgtatacactactgtagactttatcaacactgtacacttagsctcttctaaatgtattttgcagattaagtaattacgctagtatgttgatggtggctacagtgacactaggccataggtatttttcagttccattataatg

SEQ ID NO: 314871 - DNA, 201 bp, Homo sapiens
gaaagagcccaccaactttttgggacaatagatgaaaatagactgtactccaagacattgtgactttcagaacactgaggatttcaacccccaggggggaraaaagaccttttacaggtttcttaagaggcgaaagaaggtcacaatcaaaaggttattaatcagaatgccttcagacttctcagcaactctagaaacaaa

SEQ ID NO: 314872 - DNA, 201 bp, Homo sapiens
tgggagacaaaggttgcagtgagccaagattgcaccactgcactctagtttgggtgacagagcgagactctgtcttaaaaaaaaaaatcaaaaaaaaaaaattaaactctcatgtatccatcatctggcttcaagagttgtcaactcatggctagttttgtggcatggatacctctttctctttgtctccctcagacctgt

SEQ ID NO: 314873 - DNA, 201 bp, Homo sapiens
ctactgaaaatacaaaaattagccagatatggtggcgcgtgtctgtaataccagctactggagaggctgagacaggacaattcgcttgaatctgggagacmaaggttgcagtgagccaagattgcaccactgcactctagtttgggtgacagagcgagactctgtcttaaaaaaaaaaatcaaaaaaaaaaaattaaactc

SEQ ID NO: 314874 - DNA, 201 bp, Homo sapiens
gaatgagttaataagtgaattaatacattgattatagttctgtttgagaaatagagcaaatagaatataaaattaataaaataatctaggctcttttatttgtattggaggataacacttgtcttttttaagtcttttagttttcttggcagaaactctagctgttaattaaataaatagatttgtcgaaggttctcatat

SEQ ID NO: 314875 - DNA, 201 bp, Homo sapiens
gcagagagaggggtcttggagaaatgagttgctggttccatgatgcaatgcagcaagttttatagatgagcttgaggaggtggtgtctgatttacataggkcatgaaagattggtcagaccaggtgttctatttgcatagcatgcaaaaatctggccacccccccgaatcttttgttatgcaggtgggttctctgcatctg

SEQ ID NO: 314876 - DNA, 201 bp, Homo sapiens
ctgacatgcacagaggtgaaacaagccagtgctcacaccgaccacacattttaaaagccagcccagcactgaggcttaccaccacccccagggggggaagkgccagcctaggcagggctcctgtggctgggggcagcctggctttgcccacccagccccagcagtcagcaggacatgggcagatccaggaagacctgcagg

SEQ ID NO: 314877 - DNA, 201 bp, Homo sapiens
gtgtgtgcattttgttcacccttgtattccctgcatttgacacattccctacatttactgtttgggtgactgaatgagttaataagtgaattaatacattkattatagttctgtttgagaaatagagcaaatagaatataaaattaataaaataatctaggctcttttatttgtattggaggataacacttgtctttttta

SEQ ID NO: 314878 - DNA, 201 bp, Homo sapiens
cccaagtcacaagactgttgctatgaggtgtcccagagcagggttggggcaacaggactagatgtctaaaacagtcatctttccagccagaggagctacckgtgtaaaggtagccccttctgtaccagaaaaggcccagtccttggagcaacaggcctggttcaaatcctcatctccctgctcactgcaccgtggtctggg

SEQ ID NO: 314879 - DNA, 201 bp, Homo sapiens
aattaaaagatagagattgacagaatgaattttataaaaatgactcaagtacatgctctctataagaaactctcctcaaatattatagtataggtaggttwaaaagaaaaactatggaaaaaaaaaaaaaaactgcacattgaagaccccaactgaaacaaaactactatgttaatatcaaagtagacttcagaacaaaga

SEQ ID NO: 314880 - DNA, 201 bp, Homo sapiens
atatcaagcatcttagcaggatattggctcaggatctttcatgaggttgtactcaagatgtcagctggagctgccgtcatctgaaggcttgcctggggctgctttcaagggggtctcactttcatgcctggcagcataatgttggttgtaagcaggaggcttcagtttcttactatgtggacctctgcataggaatgctta

SEQ ID NO: 314881 - DNA, 201 bp, Homo sapiens
tcataggttacgatgtggacgtctttgaggggtcattattctgccccccacattgcctgctttaatataagtaaacacacttggtggatgtcagctttgaygtcaatactactgctactaataagaataacaaggaattattatcataaaaactccaagaagcagttattatttccatcaccttcctttgcaaggaaaatt

SEQ ID NO: 314882 - DNA, 201 bp, Homo sapiens
cctaagaactcactcactatcccgagaacagcaagggggaaatctgcccccatgatccttttacctcccaccaggtcccttccccaatactggggattacmattcaacatgagatttgggtggggacaccgagccaaactatatcaagcatcttagcaggatattggctcaggatctttcatgaggttgtactcaagatgt

SEQ ID NO: 314883 - DNA, 201 bp, Homo sapiens
caggtcacaccattctcctgcctcagcctccttcccaagtagctgagactacaggcgcccgccaccatgcccggctaattttttgtatttttagtagagayggggtttcaccgtgttagccaggatggtctcgatctcctgacctcctgatccgcccgtggcctcccaaagtgctgggattataggcgtgagctgccgcac

SEQ ID NO: 314884 - DNA, 201 bp, Homo sapiens
cgaataaggcttctcagtgctaaatttcgatcagtaaccacttgacagctcaaaaactgtggcagaagtattggcctgaacactttataggaagctgggartataaattgaagcctacgagactggagccgtactcactttggctactaggggtaagccagaatagctgctacttggttttgacaattttggcttcagtta

SEQ ID NO: 314885 - DNA, 201 bp, Homo sapiens
aggttttcattattatatctgttgtggtgatttttgattagtgatctttgttgttattattgtaatcattttgaggtaccacaaacttgtgcccatacaaracggcaagtttaatcaataaatgtcttttctgactgctccgccgaccagccgtttccctgtctctctccctctcctcgggtatccctgttccccaagata

SEQ ID NO: 314886 - DNA, 201 bp, Homo sapiens
gagatacacctaatataagtgatgagttaataggtgcagcacaccaacatggcatgtgtatacatatgtaacaaacctgcacattgtgcatgtgtaccctmgaacctaaaagtattataataaaaaaaattatgttgattggactttatgcctcatatacaagcaagagaatggcttgtactaaaatcccagtttagtaat

SEQ ID NO: 314887 - DNA, 201 bp, Homo sapiens
aaactggatcccttccttataccttatacaaaacttaattcaagatggattaaagacttaaatgtcagacctaaaaccagaaaaaccctagaagaaaaccwaggcaataccattcaggacataggcatgggcaaggacttcatgtctaaaacaccaaaagcaatggcaacaaaagacaaaattgacaaatgggatctcatt

SEQ ID NO: 314888 - DNA, 201 bp, Homo sapiens
atgaaataaaagaggatacaaacaaatggaagaacattccatgctcatggataggaagaagcaatattgtgaaaatggccatactgcccaaagtaatttakagattcaatgccatccccatcaagctaccaatgactttcttcacagaattggaaaaaactactttaaagttcatatggagccaaaaaagagcccacattg

SEQ ID NO: 314889 - DNA, 201 bp, Homo sapiens
tctctgaatagatcaataacaggctctgaaattgaggcagtaattaatagcttaccacccaaaaaaagtccagaaccggcagattcacagccacattctaycagaggtacaaggaggagctggtaccattccttatgaaactattccaatcaatagaaaaagagggaatcctccctaactcattttatgaggccagcatca

SEQ ID NO: 314890 - DNA, 201 bp, Homo sapiens
atatatatatattctatgtggttattatgttcttacttttttattaaaaaaaaataggagttagttaaacttccaataaggaaagtaccttcatgttaacrtttaacttctcttgcttccttcctccttcttaccacgtaagtctaaactatattctttttttcccattcctcctccctgaaagttgatttccactgagtt

SEQ ID NO: 314891 - DNA, 201 bp, Homo sapiens
aaaagccaaacccctatttaattgaaaagaaaaatactatgggaaaactaaggtgaacatttcctgattactcagctacatgttacatggtcatctctgcygttttcagatttggcagtgtggaggaactttggaaattgttacatgctcacatgttggacatgtgtttcggaaagctacaccttacacgtttccaggagg

SEQ ID NO: 314892 - DNA, 201 bp, Homo sapiens
tctccttttatgagctctgtagcacaccttatcaccatgattgtttacaaagggacttcaccattaccttccatgttggttttctatggctgctataacasgttaccaaaagcttcgtggcttaaaacaacacaaacgtattatcctgcagttcttgaggctaggagtccgacatgggctaaaagtaagagggctctgttc

SEQ ID NO: 314893 - DNA, 201 bp, Homo sapiens
tgtctggaaccatgactctccctttttacttaacattgttaagtattttaatgttcccaaggttgggacatatcttagagttgctgtgtacatataatgcrgagtctccttttatgagctctgtagcacaccttatcaccatgattgtttacaaagggacttcaccattaccttccatgttggttttctatggctgctata

SEQ ID NO: 314894 - DNA, 201 bp, Homo sapiens
cttttagccattcttttaggatacttctgaaggcaacaaattatcttagtttttctgcatctgagaatgtattgacttacccagcattcctaaaggatatrttcacagaattctgggttgacagttctttacttttagcatttgaaaaatgttttgccactttctctggcctctgtggttctcagtaagaaattccctgtc

SEQ ID NO: 314895 - DNA, 201 bp, Homo sapiens
ctttttgatgttccaagattccttgttttttttttttttttttttgtgacagctttataattcatataacatacaatttgcccacagtgtacaattcagtrgttttttttagtatagtcacagagttttacaaccattatcacaatccattttagaacattttaatcactgcaaaaagaaactccacgccctttagctatc

SEQ ID NO: 314896 - DNA, 201 bp, Homo sapiens
tacttaatgtttataatattaaattaattttataattcacttttgatgttctgaatttttaagttaatcttttttcctttctttctctatagggtatgaaygtgatttctgatgaaactggattggaataattttcatgatctttgtatatttatatatatatatttttaaattttgcatttgacttaaagtgccatgaga

SEQ ID NO: 314897 - DNA, 201 bp, Homo sapiens
ttaaaagcaaaaatttttaacaccattttaaaaagtttcaaagtatgtagctgtaatacatgagacaattacaacaaaaagaggaggaaggtaaggagatmcatatggtggtaagattctgatattccacttgaaatggtgaaatatcgattctaaatagactacaaaaagtcaaatatgtatattgtaatccttagaaca

SEQ ID NO: 314898 - DNA, 201 bp, Homo sapiens
aggtagtgtgatgcctacagctttattctttttgcctgggattgctatggctatttggggtcttttgtggttccaatttaggatcgtcttttctatttctktgaagaatgtccttggtattttgatagggatgccctgaatctgtagatcacattaggtaggatggacattttcacaatattagttattccaattcatgag

SEQ ID NO: 314899 - DNA, 201 bp, Homo sapiens
aaatcaatgaatccaggagctggttttttgaaaagatcaacaaaattgatagaccgctagcaagactaataaagaagaaaagagagaagaatcaaatagaygcaataaaaaatgatgaaggggatatcaccactgatcccacagaaatacaaactaccatcagagaatactataaacacctctacacaaataaactagaaa

SEQ ID NO: 314900 - DNA, 201 bp, Homo sapiens
gaaaagaattttcaacccagaatttcatatccagccaaactaagcttcacagtgaaggagaaataaaatactttacagacaagcaaatgctgagagatttkgtcaccaccaggcctgccctacgagagctcctaaaggaaacactaaacatggaaaggaagaaccggtaccagccactgcaaaaacatgccaaattgtaaa

SEQ ID NO: 314901 - DNA, 201 bp, Homo sapiens
aatggaaccaagttggaaaacactctgcaggatattatccaggagaacttccccaaccaagcaaggcaggccaacattcagattcaggaaatacagagaaygccacaaagatactcctccagaagagcaactccaagacacataattgtcagattcaccaaagtcaaaatgaaggaaaaaatattaagggcagccagagag

SEQ ID NO: 314902 - DNA, 201 bp, Homo sapiens
gctaactagaataaccaatgcagagaagtccttaaaggacctgatggagctgaaaaccacagcacgagaactacatgacgaatgcgcaagcttcagtagcygattcgatcaactggaagaaagggtatcagtgatggaagatcaaatgaatgaaatgaagtgagaagagaagtttggagaaaaaagaataaaaagaaatga

SEQ ID NO: 314903 - DNA, 201 bp, Homo sapiens
aacggaacaaagctggacagagaatgactttgacgagttgagtgaagaaggctgcagacgatcaaacttctccgagctaaaggaggaagttcgaacccaaygcaaagaagttaaaaaccttgaaaaaagattagacgaatggctaactagaataaccaatgcagagaagtccttaaaggacctgatggagctgaaaaccac

SEQ ID NO: 314904 - DNA, 201 bp, Homo sapiens
cactcgggaagcacaaggggtcagggaattccctttcctagccaagggaaggagggacaaacggcacctggaacatcgggtcactcccaccctaatactgygcttttctgatggtcttagcaaacggcacaccaggagattatatcccgtgcctggctcggagggtcctacgcccacggagcctcgctcattgctagcata

SEQ ID NO: 314905 - DNA, 201 bp, Homo sapiens
atgcatagaaaagataaaggtggagctgttttggttaaagtgcatatgtggtgggaatacggattcgggagcaggggaaggtccctggagccatgctttcmctttttttctcattttttggctgagctactaaattggccaagggattgatacctctaaggcaggaatactgtgtgagagaaagtgaggcagttgaacata

SEQ ID NO: 314906 - DNA, 201 bp, Homo sapiens
tgccaggtcagactcttggatgtttcaagtggggtttgggattccagatcagatctctttgttgatgttttgtgtgtgtgtgtgtgtgtgtgtgtgtgtgtgtgtgtgtgtgtttggaggctgggatttatagattgtgaccatccactgtgagagacatagtcatagcactggccatatttatatcacattccagaggaa

SEQ ID NO: 314907 - DNA, 201 bp, Homo sapiens
aaatgccaggtcagactcttggatgtttcaagtggggtttgggattccagatcagatctctttgttgatgttttgtgtgtgtgtgtgtgtgtgtgtgtgtgtgtgtgtgtgtgtgtttggaggctgggatttatagattgtgaccatccactgtgagagacatagtcatagcactggccatatttatatcacattccagag

SEQ ID NO: 314908 - DNA, 201 bp, Homo sapiens
taaaatgccaggtcagactcttggatgtttcaagtggggtttgggattccagatcagatctctttgttgatgttttgtgtgtgtgtgtgtgtgtgtgtgtgtgtgtgtgtgtgtgtgtttggaggctgggatttatagattgtgaccatccactgtgagagacatagtcatagcactggccatatttatatcacattccag

SEQ ID NO: 314909 - DNA, 201 bp, Homo sapiens
tcagaaaatagcaacttttgcttcaaccttcaaacataacctagcaaactcaagagcaaaaggaaaatctactgtatttacttgaaatttttaccctttckgggttttttcttccttttttttttttttttgagacaaagtctcactctgttgcctaggatggagtgcagtgatgcaatcacagctcgctgcagacttgac

SEQ ID NO: 314910 - DNA, 201 bp, Homo sapiens
acaaatgtctctgtgtcctgggtttcatcccttttgaaatttcaatgcctaggaaaataatattataacattgtctaggtgcctatcctggatggtaactstttgactcttggggagataagagaaggcctgttggatggaagctattagctccgtcattagggcaacaaatgactgcagacttaatcctaatgatatgtg

SEQ ID NO: 314911 - DNA, 201 bp, Homo sapiens
agtccagtttacaaatgtctctgtgtcctgggtttcatcccttttgaaatttcaatgcctaggaaaataatattataacattgtctaggtgcctatcctgkatggtaactgtttgactcttggggagataagagaaggcctgttggatggaagctattagctccgtcattagggcaacaaatgactgcagacttaatccta

SEQ ID NO: 314912 - DNA, 201 bp, Homo sapiens
aggtggcctagcagagaatggtcacttgaattcagttggaggtcaaatgcaatgaaaaatgtcaaggttggataaggaacaaacagtgtctcccacagtgstgtgtaggtgtctttggccttcccacctggaaagttaagatcctcacagtttcctaagagggagagagataattttgtatttccactgagcttggcattg

SEQ ID NO: 314913 - DNA, 201 bp, Homo sapiens
aattgtttggtgatctctgaccttcctgtatctgtgtatttatatctttctctaggtttggaaaattttctgttatttatttgaataagctttctatcccygtctttctcaactcccagttgaacaccagtgattcttagatcttctgtttgaagttattctgtatatcttgtaggtgttctttgttcgtttttattcttt

SEQ ID NO: 314914 - DNA, 201 bp, Homo sapiens
agggatctagctttattcttctgtgtatggtcatatagttttcccagctggatttattgaagagactgtcctttccccagtgattattcttcttgcctttktcaaaaatgagttggctgtaaatgcgtggatttctatctgggttctgtattctgttccattgatctttgtgtctgtttttatgttagtatcatgctgttt

SEQ ID NO: 314915 - DNA, 201 bp, Homo sapiens
gaaatcacacacagtatagaaagtgcttggcagaatgcctagaataatatataattaacagtaataaattatccaggtcagtgttgctagcccaggttttrcagatgttctattttttttaaaacctaactgcaacatttagtatttattcctgtgaagtttcatcttgttaaattttcagccatttttctagcttatatg

SEQ ID NO: 314916 - DNA, 201 bp, Homo sapiens
caccatttttccaacagcatctgctcactttgtgtctttatgtcacattttggtaattcttagagtatttcagaggttttcattattatatctgttgtggkgatttttgattagtgatctttgttgttattattgtaatcattttgaggtaccacaaacttgtgcccatacaagacggcaagtttaatcaataaatgtctt

SEQ ID NO: 314917 - DNA, 201 bp, Homo sapiens
aggcaccatttttccaacagcatctgctcactttgtgtctttatgtcacattttggtaattcttagagtatttcagaggttttcattattatatctgttgkggtgatttttgattagtgatctttgttgttattattgtaatcattttgaggtaccacaaacttgtgcccatacaagacggcaagtttaatcaataaatgt

SEQ ID NO: 314918 - DNA, 201 bp, Homo sapiens
tgctcaaggtgttttagtattaatacataacaccacagtctatgttcagttcaagtgtcctattaggtttttaacgttcattttaaaaaattgtgttgtgmgtatacacgtaaggtttttggattggaatcagttttcttattatttatattatagaaaataatgagcatatacttctgtgtccccaggacaatgtgatga

SEQ ID NO: 314919 - DNA, 201 bp, Homo sapiens
cttttgtatcatcttttttaagcagttgctcaaggtgttttagtattaatacataacaccacagtctatgttcagttcaagtgtcctattaggtttttaaygttcattttaaaaaattgtgttgtgagtatacacgtaaggtttttggattggaatcagttttcttattatttatattatagaaaataatgagcatatact

SEQ ID NO: 314920 - DNA, 201 bp, Homo sapiens
ggcatttttgaatgtatcttttgtatcatcttttttaagcagttgctcaaggtgttttagtattaatacataacaccacagtctatgttcagttcaagtgycctattaggtttttaacgttcattttaaaaaattgtgttgtgagtatacacgtaaggtttttggattggaatcagttttcttattatttatattatagaa

SEQ ID NO: 314921 - DNA, 201 bp, Homo sapiens
tagtcaggaatgaagcaccatctgcatgtccccacaatctaaactctcacccctacagacactttgaaagtgtggatattcacacactgtaagtcagacaytgctgtgattcaagtagaaaagtttgtttctaacagctcctcaccctttatgatactctcagtttgtacatcgtttctagattgttttggcttgattcag

SEQ ID NO: 314922 - DNA, 201 bp, Homo sapiens
ctgcatcttccagctctcttatttcttcaagacacgggaaataactaagcactagccatcataggggcactgtaagtccaaatgcaggtgttctttcttamaagagttttccagttcttccttattagtgaacagagtaaaagctttctctaaacaaatccctgaacctaccacagtaaagagcaatcacatatgtataat

SEQ ID NO: 314923 - DNA, 201 bp, Homo sapiens
catatactactagaatgacagaaaagaaggactagttttctgcatcttccagctctcttatttcttcaagacacgggaaataactaagcactagccatcayaggggcactgtaagtccaaatgcaggtgttctttcttacaagagttttccagttcttccttattagtgaacagagtaaaagctttctctaaacaaatccc

SEQ ID NO: 314924 - DNA, 201 bp, Homo sapiens
acatatactactagaatgacagaaaagaaggactagttttctgcatcttccagctctcttatttcttcaagacacgggaaataactaagcactagccatcrtaggggcactgtaagtccaaatgcaggtgttctttcttacaagagttttccagttcttccttattagtgaacagagtaaaagctttctctaaacaaatcc

SEQ ID NO: 314925 - DNA, 201 bp, Homo sapiens
aaaccttagtgtctattatgtactctaggtgtggtactaggcattgtagacacaaaagaaagacacgaaaatgaaatatgtgatcttttccctcaaggagytcacagtttggcagaggcaactgaataagtaaaaataatatagtatgataaatgcagtaataaagatcaacattcaaggtataaagtatacatatactac

SEQ ID NO: 314926 - DNA, 201 bp, Homo sapiens
taatgcctaatttgtacctaggtttctgctgtactgattgtttcagccaaactaaacaaagattcactttgtttcttcatttaataaaccttagtgtctaytatgtactctaggtgtggtactaggcattgtagacacaaaagaaagacacgaaaatgaaatatgtgatcttttccctcaaggagctcacagtttggcaga

SEQ ID NO: 314927 - DNA, 201 bp, Homo sapiens
tgtgcatatcttttgagtgtgtttggtatttctgattattgcatgctcaggcataaatagtctttagtgaacgagatacatgttgatatttaattatggcrgtggccccatcaagagttggaacagcagggcatgggctgtggagtcttcagtcaggttctgttgcctcctcgctatccctgccctgtttctcatctgtga

SEQ ID NO: 314928 - DNA, 201 bp, Homo sapiens
tgggttgagaagtgttcccttctcttctattttctggaaaaaatgtataaacttagtatagaattcttcaagtgtttggtagaattatccaggtaaaccayctggaggtggacatttcttttacgtatttttaaactaaaaatttctctaaattgttacaggacagtttaagtgatctatttcagatttagtgagtttggt

SEQ ID NO: 314929 - DNA, 201 bp, Homo sapiens
tccagcctgagcgacagagcgagactccgtctcaaaaaaaaaaaaaaaaaaaaaaaaaaaagctcgttttcataactgaggataaaagtctcacttgggcragtgtggaagaaagctgcttcctgaacatggcctgtggcctttctgctcatcctcagctctgtgttctatgaacccatccccctacccacttcaaacccc

SEQ ID NO: 314930 - DNA, 201 bp, Homo sapiens
agctcctgcctcataggctgtaaagaacttttcactttctgtcctcagtttcagcttttgccagatttcagaacagcaggccaacattgcactgtagctcytatacaggggtaaagggagggagtgggacatggtctcaattcataattatgccatttaaatgaccaaagttaaggggtcagttgtgagaggagactggca

SEQ ID NO: 314931 - DNA, 201 bp, Homo sapiens
tcacaccgctcaaggactcagaatgccaaactccctgcccttgtggatctaacatggcagggggaagaaaataaataaacagcaagttaacaatgaagaakgtgccatgaagaaaaataaaccaactgacagagtgacagagcagacagggccattctagagcaggtggacagcctacatgaagaggggatgtttgaccta

SEQ ID NO: 314932 - DNA, 201 bp, Homo sapiens
atttttgattaatagttttgagtcttgcttgtattacatattacataaaatttacaataaggcactgggctcttttgctttgactacttgtatctgtcctwtctggaataaaatgcagattttagacctagttacatctagaaattaggagtaggagcttggcaaattattttttctaggatgcaggtagactttactaaa

SEQ ID NO: 314933 - DNA, 201 bp, Homo sapiens
tgcattgcagggtatgtagcatctctggctccagatagtaagtgctagtggcaccccatagccattgtgacaaccacaaaattttaaaaatgaaaaacctyttaagtttattggaaaatgacagtatattaattaggcagtatttttagaaacctatttattatagctaaaacaaatagggatttatttttcttacataag

SEQ ID NO: 314934 - DNA, 201 bp, Homo sapiens
atttatttttcttacataagtctagaggtaagtaaattcagtggcatagtgatgtcagggataacgttgttgtaatattcttagcttttccttgtggccayaaggtggttgctgcagctttatcgcatcccaactccaggcagaaagaaaagggaaagaggaatggtacactaccacatgtgttgctctttattagcaaag

SEQ ID NO: 314935 - DNA, 201 bp, Homo sapiens
ggtatgtgccactgccattttgggtgtgactgccccatgcattgcagggtatgtagcatctctggctccagatagtaagtgctagtggcaccccatagccrttgtgacaaccacaaaattttaaaaatgaaaaacctcttaagtttattggaaaatgacagtatattaattaggcagtatttttagaaacctatttattat

SEQ ID NO: 314936 - DNA, 201 bp, Homo sapiens
ctttactgtgtcatacaccaaccatggtctactttaatcatcaatatgctgttctctgaacataccttatactttcctagttcacatctaagataatatgsttccctctgcctgacacaccttacccattcttaagaacccagctttgacatcacttccatgaatcctaacctgaaattaactctgtcaatcttaattaca

SEQ ID NO: 314937 - DNA, 201 bp, Homo sapiens; identical to SEQ ID NO: 65592

SEQ ID NO: 314938 - DNA, 201 bp, Homo sapiens
ctttagaaccaaaaatgaggagttttttgtttttgttttgttttttttgagctgacccaattttggacaatgcctaggcattgttagctgggccagagttygggcgtgtgacaaagaaacacttgtctgctccatggtagatgactgccaaggcaagcttgcgtcttacctgcctcttgccagctggcttctgggcaagtc

SEQ ID NO: 314939 - DNA, 201 bp, Homo sapiens
cgtaatattacaaaaactaattcgtttaatacatcccattaatgtatttttaaaactgtgattacaaacttattaaacacctctgatcactcccatagatwatgaaaaagggttcactgaaatttaacatgaatttattgttagaaaatacttagcaaactattatacagtggaagtttactaatccaagaaaggatggct

SEQ ID NO: 314940 - DNA, 201 bp, Homo sapiens
tactcattctcatgaaaggtcacaatcaggttgacgctgtttctgcttttacttatttatttatgtaatacatctgtcatgcttatgtaacatacaacttyggtacttttttttcagtaacagatttcttggatacagttcctaattggttgagatgcagaagagtgttataccattgcagttatataccaagttttattt

SEQ ID NO: 314941 - DNA, 201 bp, Homo sapiens
tgccagcctgaccctcgcggcgccacgggggaggggaagacacgccggcagcgggggagggggcttcccggcccgctgcccccgaggaggacccggacctraattagcaaatgtttgtggttgggaagtagcgggctttaggtaatgtagtagcttttccgcttttcctggaagaatgaatgaatgagatgtcatttactc

SEQ ID NO: 314942 - DNA, 201 bp, Homo sapiens
ctcttttctctcacctgatgttaacatgtttttgcataaaaaatactcttggcagagtgggacaataagataattttttttacattattaaatagtggcartttttttttcttaagagaaaaaataacatgtttacatagtaaaatatcctgacggtatcaaaaagtacacagtgaaaactaactgttctattctagtaat

SEQ ID NO: 314943 - DNA, 201 bp, Homo sapiens
acatatgattgattttgattctgtaaagatgtctaagtattggcttccagtatgttaatcttttgattgacagccttgagtataggacaaacttctatgggaaccaggaggtgatttgaagacagttctttaggtttaagcatcatggaagttatgacttctcattgaaaaaagaatatttttaaagtatcagttcatttg

SEQ ID NO: 314944 - DNA, 201 bp, Homo sapiens
acttggtgaggggatcatctctctcccaaccctgtctgccccacgacagagcactgctgccaatgcattgaaatacactgagaggcacatggctcagctasagtctatctacaagcccttactgtttttgttcttcttcttattattataccttttaagttccagggtacatgtgcacaacgtgcaggtttgttacatatg

SEQ ID NO: 314945 - DNA, 201 bp, Homo sapiens
ctgcagctctaaccagggtttgaattatttgtctgtttaatagataccttcccccagtagactgtatactttgtcaggtctatttgctcaccattatctcytcagttcccacagtgcctgttatataacaacagtctagaattatataatgaatgggtgaaagaataatgtacactggtatatttaatcttcacatttact

SEQ ID NO: 314946 - DNA, 201 bp, Homo sapiens
tttagagaggcctttcttgacctctccagacctgtcacatccctctgaaaacatctcataacactctactcctctgcagctctaaccagggtttgaattayttgtctgtttaatagataccttcccccagtagactgtatactttgtcaggtctatttgctcaccattatctcctcagttcccacagtgcctgttatataa

SEQ ID NO: 314947 - DNA, 201 bp, Homo sapiens
aattgtttgggggcatcacagactacacccgtatgagaggatgaacttaaatgataaattgtgtgtgtgtgcatgcatgtgtgcgtgcatgtggactgttacactcattggtccttctgctgtctctctccctctcctcagccctctttattccctgggacacagaaatttttaaataaggccaattaataatcctacatt

SEQ ID NO: 314948 - DNA, 201 bp, Homo sapiens
ttgtcatctttttacccttcgcttttccttttcttccaactgccaactggcagccctagggtagagtgttcgataagaagttacttcaacagcttcagaasaggagtcttgcttgtgttttcttcatttcctccccatccttcccttttcccactcccactgacaggcgattacagttgagactggggagtggaaagtttg

SEQ ID NO: 314949 - DNA, 201 bp, Homo sapiens
atggctggactttttttttcttttaaatgacagcctaccatttatttatttaattttttgcttctctcgtgctcatgttcataggcagcctaccattgaakggactctcactctgtatatacacacatatatatttttgagagacagggtcttgctctgttgcccagactggagtgcagtggcacagtcacagctgactgc

SEQ ID NO: 314950 - DNA, 201 bp, Homo sapiens
tagtcccagctgctcaggaggctgaggcagaaggataacttgagctcaggagttcgagattgcagtgagccatgattacaccacactgcactccagcctcrgtgacagtgtgagactctgcctcaaaaaaaaagaaaaaaaatattcagtaaggttgaaggttttaaggtctatattaaaaagaaaaatacgttacatttc

SEQ ID NO: 314951 - DNA, 201 bp, Homo sapiens
tctacaagagaataaaactttagattttaaaataagtaatgcataaaatatattttcatcccatttttgacctcacctcattctttagccatcccttatakatgagaagtttaacatagcaccttccaaatttaatatatcccagaacctgtttttcttggacatttattaacgtctcaaaaacataaggaagaaagtttg

SEQ ID NO: 314952 - DNA, 201 bp, Homo sapiens
gttttatggcccaggatatatctatcttgataaatattccacggacacttgaaaagagtgtgtaatctactgttgttgggtaaagtgttctataaatgtcmattagattctgttggttgatgatgatgttgaattctcctatatccttgctaattttctgtctaattcttctatgaattgtaaattctctaaatatatttg

SEQ ID NO: 314953 - DNA, 201 bp, Homo sapiens
tccctcatacctctttatcgacctacatatctacctacttctctctctctctctctctctctctgtttctccatccatccacctacctaccttttctccgktgtcttttaaataatgtatattaccaaaaaaaacaccttttctgcagaggaacttaatcaccaaaactgatgcttgaggtgttttgttttcttccactct

SEQ ID NO: 314954 - DNA, 201 bp, Homo sapiens
aaaccaaatgcagcagcatattaaaaggattatacaccatgatgaagtggtatttatcctatggatgcaaagttgttttaacatttgaaaatcaatccatrtgatacaccatgttaatagaataaagaacaaaagccacatgatcatcttaataaagaacaggaaatccaacatgcttttacggttaaaacaaacaaaacc

SEQ ID NO: 314955 - DNA, 201 bp, Homo sapiens
gcggaggttgcagtgagccgaggtcgcgacactgcactccagcctggacaaaagagcgagactctctaaaaaaaaaaaaagaataaagtcctttggggggraaaaaaaaaaaacctgtcaatccccacccccatactcccactaactaaattcagatacgaaattactatcaaaaagagtaagtaagccatcatgtgtgaa

SEQ ID NO: 314956 - DNA, 201 bp, Homo sapiens
aatagacagagattactttcaggaaattggaacatatgatgctggaatggatatttggggaggagaaaacctagaaatttcctttagggtaagttcccttmaaaaaatttaatcttttatttaacttcaagtatagatgtgcattgattattcatgtatctctacataaaaaataaaaattgaatttaatacaagtttaat

SEQ ID NO: 314957 - DNA, 201 bp, Homo sapiens
tgggaggcggaggttgcagtgagccgaggtcgcgacactgcactccagcctggacaaaagagcgagactctctaaaaaaaaaaaaagaataaagtcctttkgggggaaaaaaaaaaaaacctgtcaatccccacccccatactcccactaactaaattcagatacgaaattactatcaaaaagagtaagtaagccatcatg

SEQ ID NO: 314958 - DNA, 201 bp, Homo sapiens
ctgggagtgctacgggagaccggggcttatttcatcccttatctacaaccgtaaaagacagacgttcccaaagcggccatttcagagaccccttgggaaascattctctttctcagggatggtccttgctgagagaaagaattcagcaatatttctcctatttgcttttgaaagagagaaatatggctctgttccgcccgg

SEQ ID NO: 314959 - DNA, 201 bp, Homo sapiens
tgcatttcatccaaactcgtttgccaagaaaattagtttaatagtccatttaattctgtaggatattgtattttcttattaataattagagtattgtggtrcattctctaaatcattcagtagacatgtaacttttgattaatgataattttaaatgtggctctgaaatttcatatgtaacagtaggttagagtacataat

SEQ ID NO: 314960 - DNA, 201 bp, Homo sapiens
attgtgtagtaagatcagaaaatagtttgggagaaatgattttagccttttattagtatatttaccccaaaaagaagtcatataactttataccgctttaktctactttcctgagagaaacacacataagaaatttgaaaaatatccttaaagtgtattcaaaggcatgccagtggtttgtgtatgttaatcttatttggg

SEQ ID NO: 314961 - DNA, 201 bp, Homo sapiens
aggtaagaacatgacagtagcatccttgttttcatcttgcagtcagggagtattggtttgatgaaaggaggaatataggcaagagatcaaagcccctagasagatgagcataaataataactttacatttataagtatcacttagtgttttctcaggttgctctctagcaaccttgtgaagtaggcaagaactgctgtata

SEQ ID NO: 314962 - DNA, 201 bp, Homo sapiens
agacccagttactcccctgactgcctattgacacctcgacatgaggcccctcacattcagtgtgaactaactgaactgatgatttagtccgtatttccttkcattgttgcattaccatcatctgtctagctagttaccttggccttaaatctgggaatcattttttgcctctcctttatcttcctttctccccatactcca

SEQ ID NO: 314963 - DNA, 201 bp, Homo sapiens
cctggcctctttcttcctttttgatgttccaagattccttgttttttttttttttttttttgtgacagctttataattcatataacatacaatttgcccasagtgtacaattcagtggttttttttagtatagtcacagagttttacaaccattatcacaatccattttagaacattttaatcactgcaaaaagaaactcc

SEQ ID NO: 314964 - DNA, 201 bp, Homo sapiens
tggtattcagtaaattgcataagatattcaacactttattgtaaaataagctttgtgttagatgattttgcacaactatatgctaatgcaagtgttctgascacatttaaggtaggctaggctaagctataatgttctgttggttagttgtattaaaggcattttcgactttcgacttaagatgttttcaacttatgatgg

SEQ ID NO: 314965 - DNA, 201 bp, Homo sapiens
ggagggagggagggagagaggattggatcagaagtttactgatatgcaaatgggccctgacttaagattttttgactttgtgagagtgtaaaaccatcacmatttatgtgtaagtatggtattcagtaaattgcataagatattcaacactttattgtaaaataagctttgtgttagatgattttgcacaactatatgcta

SEQ ID NO: 314966 - DNA, 201 bp, Homo sapiens
taacatttttaagtgcttaaaaaaaataatattttgtaatttatagtgtgaaaattatatgaaattcaaattttggtgtccaaaaataagcttggaatatkgtcacattcatttatgtacctcttacagatgctttcatggtacaacactagagttaagttgttgcaacagacattgcatgactcaaaaagcctgaaatct

SEQ ID NO: 314967 - DNA, 201 bp, Homo sapiens
tgcagattggtgtatcaggatgcttttcactgtagtagcagaatacccagttaaatcagtgagggctttatcatcttgcataacaagaagttcagacattkggaggtctggtcttagggttggtctggctccatgaaatcatgagggtcctgcgtgctctccatgttttcaatttgttatcctcagcatgtcattgatggc

SEQ ID NO: 314968 - DNA, 201 bp, Homo sapiens
cctaactcataccaattctctagtcattctccccaccagtttctcttttttgtgcgctatagcccgtcacaactctcggcatcttttgcaaagacttaaaytgtgaaatgacatgcaaactcactttgttgtctctccttctatattgcaagctcgttgaggatagggactgaacatttttcatgtttgtgtgcatcagac

SEQ ID NO: 314969 - DNA, 201 bp, Homo sapiens
ccataaacaattcctatgaagaggaccattaacccactgatctttccccttgaaataacttagatctcctaggatttacactgtttcagaaagtacaaacyaaacttgggcactttccacgtgactttcatagggtggccaatggtgtgagaacttgggtttattagcatgttgtgcaacttttcccatcgttggcaagta

SEQ ID NO: 314970 - DNA, 201 bp, Homo sapiens
cttcctgtgggagatatgaggatcatattgatagttctccaatgggttcatccagcagttaaaagcatgaaagtatcatatatagaattgctgaattcgayttttgtgttcaatatttagtgtagttaatttcctgtaagttactttatgttactaaataatgtgggtatctcatagttgggatatcaaaattgtacagaa

SEQ ID NO: 314971 - DNA, 201 bp, Homo sapiens
tttaaggagatcagtgtggcagtagtttttgagttgggagccaacaccatgcagtgactcaggtgagtggggcaaggtgacgaagtcttgagtcaggacastggtgtggaggtagaggacaagacagccccttgaaagggttaacagcctaggagagggtgggctcagaaagggttctggttgttgagggcacagttcaaa

SEQ ID NO: 314972 - DNA, 201 bp, Homo sapiens; identical to SEQ ID NO: 65591

SEQ ID NO: 314973 - DNA, 201 bp, Homo sapiens
aataaatatccagagagcatgaaatgagttgtgactcaaaaatacaggcatgtccatgttattgtactttgttttattgtacttcacagatactactttgktttttttttttttttttttttttcaacaaatggaaagtttgtggcaaccctacactgaaaaagtccataggcaccatttttccaacagcatctgctcact

SEQ ID NO: 314974 - DNA, 201 bp, Homo sapiens
tgtatccatcatctggcttcaagagttgtcaactcatggctagttttgtggcatggatacctctttctctttgtctccctcagacctgttttgtttgttgytgaagaagaaattgaggtatttctcttttccagtttcctgcagtctggatttgcatccctttaatggtgcatgccatgtccctttgtcccgtatatttcc

SEQ ID NO: 314975 - DNA, 201 bp, Homo sapiens
caccaaagttagtgaactacatcaatatggatgagtcttaaaaacgtaatgttggatttaaaaggtagcagaagaatacattataatatgatttaatttawgtaaattgcagaggtagacaaggtaaaggatacaggtttgtgggtttcatcatagttgctgggacctgactaattttgaattctggccttgacatgtata

SEQ ID NO: 314976 - DNA, 201 bp, Homo sapiens
accggtctgatcaaaatttactaggcgggaatttcctcgtcctaataagcctgggagtgctacgggagaccggggcttatttcatcccttatctacaaccrtaaaagacagacgttcccaaagcggccatttcagagaccccttgggaaagcattctctttctcagggatggtccttgctgagagaaagaattcagcaata

SEQ ID NO: 314977 - DNA, 201 bp, Homo sapiens
gtaatctaattgtatgtgccaaatgcaggaggaattctcatggtcttgagagtggagggaatggcagctggccagaggctgcctagagcttggaccctgtkttaggcagcaccaccaccagctaatggtaatacgttgttgtggtaaatgcagtgtttgactgccttgggaaacattcttaactcagtctgttttgtttct

SEQ ID NO: 314978 - DNA, 201 bp, Homo sapiens
tgtggaactgatagaaatccaagatggtttaatcacctcaggaaacagtttgccggttgcttataaagataaacataatgcctaccctgtgacttagtgaytccacttctaaagatctacccaagataaatgagggtatgtttttacaataagacttgtacaagaatagcaattttatttataatattcccaatctgaaaa

SEQ ID NO: 314979 - DNA, 201 bp, Homo sapiens; identical to SEQ ID NO: 65593

SEQ ID NO: 314980 - DNA, 201 bp, Homo sapiens; identical to SEQ ID NO: 65595

SEQ ID NO: 314981 - DNA, 201 bp, Homo sapiens
tcaattatttctttcaacaggtgttacaaaggtagattatggagatatatcgtcaagagttggtctaagacacaaactacaatgcaaacctttttcctggkacctagagaatatatatcctgattctcaaattccacgtcactatttctcattgggagaggtaagaaatatatatatatatattctatgtggttattatgt

SEQ ID NO: 314982 - DNA, 201 bp, Homo sapiens
aagcctcatttgggttttgataaaaaatatattgaatttatagattaattttgggaataaccctggattcattttttcatctattcattagttagttattyttttggatccttcaataaagctccccagtttttttcacctcttgcacctgttgggttttcatagctattttgaatgtttttttttttttttttttttttt

SEQ ID NO: 314983 - DNA, 201 bp, Homo sapiens
aaggagaaaaaactcagaggaacaagggagtgtgaggtaaaagtgaggtggaaggaactccggtctgatgaggtgggatttctctgtagagaggcaaggaytatgttggctggtctgaggatgtgcacaagggaaggtagagggtgagagagggggtccaggagaggagctgtaaagaatagtaaggcttggtctggctag

SEQ ID NO: 314984 - DNA, 201 bp, Homo sapiens
aattaattaattaatcccttccccaaagcctcatttgggttttgataaaaaatatattgaatttatagattaattttgggaataaccctggattcattttytcatctattcattagttagttatttttttggatccttcaataaagctccccagtttttttcacctcttgcacctgttgggttttcatagctattttgaat

SEQ ID NO: 314985 - DNA, 201 bp, Homo sapiens
aggctggggatcaggctctggtgtttgtctcagcaagctcttctggccttcaccttagtacctttgtttttctttatcatcatatgtatcatgttaccccyctctgtttatccttgccccttttagactgtgaatcccttatgtagggataaggaccttctcttactggtctgcctaccacctgaaaagtgatcagtaaat

SEQ ID NO: 314986 - DNA, 201 bp, Homo sapiens
tgattccaggatatggaatcaatctttgccgctttatttattgctagttgaaacctgctttatgttatacagaaacaacaaagtggatggtgacagtcccmtgcttaaaaatgggacattctgagttaacatagttaaatagattcccatatttttccttattgcagaactttacagaccctttagtaggataatatgcaa

SEQ ID NO: 314987 - DNA, 201 bp, Homo sapiens
ctggaggaagttcctgctggatcctttacttcccagaaactgctcccctggtaggcggtgtattttcctgtgtctgagttcatagtgggcagaaagatgcrtattttgctgaaactccaacgcagtgttctgttgtaatgatctggcattaatcttcgtgtgattaaaaattaaagtatgagaagaaattagtaacttacc

SEQ ID NO: 314988 - DNA, 201 bp, Homo sapiens
agatgatgtagtaataacattaagccacataaagttcctgtcattttggagcttacaagataattaataaattaattaagatacattatgatgtaaattastacttggtgctacagtggaaagtaatgcattaggaaaagataaagaataacattgggggtggagatgctgtcttgtagattagtttctgctctcttcaga

SEQ ID NO: 314989 - DNA, 201 bp, Homo sapiens
atatagtagtctattgtatagttcatgtgtacatttaggttgttactttttttttttttggtcattataaacaatcctgcaatcatgtctctttatactcwtgtgtaagagtttctccagggactgtacctagaagtgaaattagtgagtgatagggtagtgctttcttcagctttatgagatacttattgccagattgct

SEQ ID NO: 314990 - DNA, 201 bp, Homo sapiens
tcactcttgagtgtagcctcacccctcaggccctggttacagcatggccggcaactcctttgcctactatagtggattctgacccagtctttctgccaccygccccttctccctccactccacacacaacccctgtcagctagaccaggaacactgggatgtagggtctgtgcaggcaacaagctaacaacatggggaaag

SEQ ID NO: 314991 - DNA, 201 bp, Homo sapiens
tttcctggtacctagagaatatatatcctgattctcaaattccacgtcactatttctcattgggagaggtaagaaatatatatatatatattctatgtggktattatgttcttacttttttattaaaaaaaaataggagttagttaaacttccaataaggaaagtaccttcatgttaacatttaacttctcttgcttcctt

SEQ ID NO: 314992 - DNA, 201 bp, Homo sapiens
gataatgatgcacataattctagtttattcgtttttcctgctatatagtagtctattgtatagttcatgtgtacatttaggttgttacttttttttttttkggtcattataaacaatcctgcaatcatgtctctttatactcatgtgtaagagtttctccagggactgtacctagaagtgaaattagtgagtgatagggta

SEQ ID NO: 314993 - DNA, 201 bp, Homo sapiens
gcaccccctaggccctcatcacatgtgctaatagcgttggaaatagtaacttgaagccccagctctgtcctggctcaagaggcactcagttcccttcctcycaccagtgtgatggtacctctgagttgccagaggaagactgggcagcctggctcgctgcagcctgcaggaggtgggcaaatgtcagaaggtcctgttttg

SEQ ID NO: 314994 - DNA, 201 bp, Homo sapiens
gttggacattgtcaagtataccactgcactactccatggcagaggttggcagacttttctgtaaagggccagatagtaagtattttagcctttgcaggccrtacagtctctgtaaaggccaacaactttgacgttgtagtgcaaaagcagctgtaaaccatatataaatgaatgagagtggctgcattcccataaaatttt

SEQ ID NO: 314995 - DNA, 201 bp, Homo sapiens
gtggggcaagggttgaaaaactagttattgggtactgtgctcactacctggctgatgggatcaatcataccccaaacctcagcatcatgcaatatacccaygtaacaaacccgcacatgtacctgctgaatcaaaagaaaataaaagttgatactgtttttaaaaagagttttatagttttacctcttaaacgtaggtctt

SEQ ID NO: 314996 - DNA, 201 bp, Homo sapiens
tgtgggctaatgttttcactttcttcatggtatcctttgaagtacaaaagttttatattttgatgaaatacaatttatctatttttttctttggttgctgkgcttttggtgtcatatttaagagaccattgccaaacccaaggtcacaaggatttacttatctgtgtttttttctaagagttttagtcaacaaaaataagc

SEQ ID NO: 314997 - DNA, 201 bp, Homo sapiens
atttcagatggattaaagactagattgtgaaaggcaaaacttaagcctccagaataaaatattagagagtattttagacctcaggctttggaagccaaaarcacaattgttgaaggaaaaggtttattaatttggctgtactaaaattaagatctcttgggttttgtgtgcatggaaaggagagtgtaaagactagtcaca

SEQ ID NO: 314998 - DNA, 201 bp, Homo sapiens
taatgttacaaatcaaggaaatggaatacgttttaaatggttgggattcttagccacattttaaaaaatggtttttactaacactgtattaaaaaaagcartttcagatggattaaagactagattgtgaaaggcaaaacttaagcctccagaataaaatattagagagtattttagacctcaggctttggaagccaaaag

SEQ ID NO: 314999 - DNA, 201 bp, Homo sapiens
ctactctgctcctacagaagtgctttgaatgcattgatctttgtttagtttactgatacgtactgagtgcctagaatatatttgttaattcaatgaattgyttttcctttggcttctagaagtggatgtacatttcttttggggaaaaatactcagcagactattcaaaactttaagaggcttctgtttctggcagcgtgg

SEQ ID NO: 315000 - DNA, 201 bp, Homo sapiens
tcgcagctcctctccaccaggcactcatggtcctccctacctgactactcaatttttctttctttccattgcaataccttctgtgctataatctagtttasttatgtttattatttcctgtctcctactctgctcctacagaagtgctttgaatgcattgatctttgtttagtttactgatacgtactgagtgcctagaat

SEQ ID NO: 315001 - DNA, 201 bp, Homo sapiens
attttaacaatatcaaatcatctagtagctatttcttagatccctctctagttagttagatattttaaaatttttctcagtaatattttttgtttttcaawgaagttgtcttactgctaagtttattcctaaaattttgtgggttttctgctattataaaaggatgttttaacttacatttctaattgtttgctactaatc

SEQ ID NO: 315002 - DNA, 201 bp, Homo sapiens
ttatgtaatcgaatgttatctaactcaggtttttaaaagacaatttgctctctttatacatctgagagtatgtaaaataaaattcaatcaaggtccaataygtaatcagacaaaagtaaggatgtggaggaagtttaatattgggaattggtaatctaattgtatgtgccaaatgcaggaggaattctcatggtcttgaga

SEQ ID NO: 315003 - DNA, 201 bp, Homo sapiens
cttagttgttctaactttcgtatttgctgactcgggctggtcttcatcctcatggtctcaaatgaaacttcaactatcatattggcattccacgcagtagratggaggaagggtgaaagaacggtcatgctacagtcctttttagacacctatgtgaagttacactcaaggcttcctgtcatatatcaactagaacctcca

SEQ ID NO: 315004 - DNA, 201 bp, Homo sapiens
gcatttttaaaatagcagtctgtgtttattgacctagcttgccactggtggtgtgttttactttaaatcttatccctctttacttttcttctgcctttgtctttagaaagttggtctttgattgatattagtggtactgtagaggatagctatgctaagctttgattgaaatggaattttaatacaaaaaaaattcaggtc

SEQ ID NO: 315005 - DNA, 201 bp, Homo sapiens
aataattcatattacttaatgtttataatattaaattaattttataattcacttttgatgttctgaatttttaagttaatcttttttcctttctttctctrtagggtatgaacgtgatttctgatgaaactggattggaataattttcatgatctttgtatatttatatatatatatttttaaattttgcatttgacttaa

SEQ ID NO: 315006 - DNA, 201 bp, Homo sapiens
ataatgatgcacataattctagtttattcgtttttcctgctatatagtagtctattgtatagttcatgtgtacatttaggttgttactttttttttttttkgtcattataaacaatcctgcaatcatgtctctttatactcatgtgtaagagtttctccagggactgtacctagaagtgaaattagtgagtgatagggtag

SEQ ID NO: 315007 - DNA, 201 bp, Homo sapiens
aagttgatagttgggagtgaatgactttagggctctacttctcttacattggggtttgatcttacagctagcttcttaggttttaaaaattatgttgattkggggggcggttccaagatggccgaataggagcagctccagtctacagctcccagtgtgagcgacacagaagacgggtgatttttgcatttccaactgagg

SEQ ID NO: 315008 - DNA, 201 bp, Homo sapiens
gtaaacaaagtggctgggaagctcgaactgggtggaacccaccgcagctcaaggaggcctgctgcctctgtagtctccacctctgggggcagggcatagcygaacaaaaggcagcagaaacctctgcggacttaaatgtccctgtctgacagcttggaagagagtagtgtttctcccagcatggagtttgagatctgagaa

SEQ ID NO: 315009 - DNA, 201 bp, Homo sapiens; identical to SEQ ID NO: 65598

SEQ ID NO: 315010 - DNA, 201 bp, Homo sapiens
agagattactttcaggaaattggaacatatgatgctggaatggatatttggggaggagaaaacctagaaatttcctttagggtaagttcccttaaaaaaawttaatcttttatttaacttcaagtatagatgtgcattgattattcatgtatctctacataaaaaataaaaattgaatttaatacaagtttaatgtaactt

SEQ ID NO: 315011 - DNA, 201 bp, Homo sapiens
accccaatctgtgtacatctgtgagaggaaactggtgtgagcagatgtctacctcactgctccacctgaggcttagtctctaggcagggtcctggagtgcygctccagagtccctgctcaggggtctgattctcctttatcttcctgccttggaagcctcaaatatccgggttaccatttccggtatctgggagacagtag

SEQ ID NO: 315012 - DNA, 201 bp, Homo sapiens
catggttttctgggatcttagttgttctaactttcgtatttgctgactcgggctggtcttcatcctcatggtctcaaatgaaacttcaactatcatattgkcattccacgcagtagaatggaggaagggtgaaagaacggtcatgctacagtcctttttagacacctatgtgaagttacactcaaggcttcctgtcatata

SEQ ID NO: 315013 - DNA, 201 bp, Homo sapiens
acctttggattatttctactttttgacccctataaataaagctattgtgacattcttgttcatgtcttttggaggacttaagtgcccattaccgtatgctrtgtactagagaaaggaataggttatgcatttatatagcattagcatgtgctaccaaatattttcccaaaatgtttataccaatttacactcctatcagca

SEQ ID NO: 315014 - DNA, 201 bp, Homo sapiens
ccatggttttctgggatcttagttgttctaactttcgtatttgctgactcgggctggtcttcatcctcatggtctcaaatgaaacttcaactatcatattsgcattccacgcagtagaatggaggaagggtgaaagaacggtcatgctacagtcctttttagacacctatgtgaagttacactcaaggcttcctgtcatat

SEQ ID NO: 315015 - DNA, 201 bp, Homo sapiens
ctcaaagaaatctacagattcaatgctattcctgtcagactaccaataacatttttcacaaatttagaaaatctattctaaaattcatatggaagcagaawagagcccgaatagccaaagcaatcctaagcaaaaataacacagctggaagcatcacattatctgacttcaaactatactacaagcctactgtaacctaaa

SEQ ID NO: 315016 - DNA, 201 bp, Homo sapiens
gtaagtggagaataaggaataactttacaataatggtggcaataaaggtagcaattctttcattaaatacattgtactagctttcattaaacaaattgaartaataattatttaattacatatgaaaactagaatcttacctgcaatgggtcgtgcaaattaacaatcttttaaacaactctttagaaagaaaaattatct

SEQ ID NO: 315017 - DNA, 201 bp, Homo sapiens
aaagagaagaggctcttggagtgttgtcctcatggagtccttgagagacactaatccttctgctggggtccttggtggggccttgtgttctgccagagccrttgtgtttctgcttccttctgtgatgccttactctatggttgtttctgccctgtttggcttgggattcctgggttccttgcatgcatgctgtagcatagg

SEQ ID NO: 315018 - DNA, 201 bp, Homo sapiens
gcctttactattcactgcctgtaatgcttattttccctcaaaccatgtctttcttagggaagcctttttgacaaagtcaaatctattatagatgtgtgtaragctgtgtaccttctttcaaagcagttatcacaattggaatttcacatttatatgattattaacgtctgcttccctggagccaactctgaacttcataaa

SEQ ID NO: 315019 - DNA, 201 bp, Homo sapiens
gaaacaattatgaatatttaggcattcatatttgtacatatcaaggtaggataagttatactgtgctaacagtctatcccaaaacctcagtggcttaaaayaacaaaacttgttggtcttgtgactgattgactggggccttggttctgcctcaccctccctctggaaccaagctgaaagagcagttactgtcttgattgt

SEQ ID NO: 315020 - DNA, 201 bp, Homo sapiens
gctttctatccccgtctttctcaactcccagttgaacaccagtgattcttagatcttctgtttgaagttattctgtatatcttgtaggtgttctttgttcrtttttattcttttttttcctcttctgactgtattttccaatatcctgtcttcgagctcatattgttcggcttgatccattctcctgttgagaccctctaa

SEQ ID NO: 315021 - DNA, 201 bp, Homo sapiens
cagccccttgaaagggttaacagcctaggagagggtgggctcagaaagggttctggttgttgagggcacagttcaaacacaaatgttattaaatagaatcrtgaatcaatcaattgctatgaaattaatgttagttaagtttcttcctattcttagttctagagccagtacaaaagcctcatgaaggtcctggagaaatgg

SEQ ID NO: 315022 - DNA, 201 bp, Homo sapiens
tcaatcatagctactacattctttttttgccttattaaaacctaccctttaagatcaggaataaaacaaggatgcctgttgttaccttcctttttcaataygttattaatactagaaatcttcgcaaggtagctgaatttaaaatcaacaaataaaaatacaggtgcatttttgtaaatcagcaataaaataccatttcag

SEQ ID NO: 315023 - DNA, 201 bp, Homo sapiens
ctccagctgaaatgatccaacaggatttggtcagtctgtggcctggccagctgggggccacaccctgacggaggcccatagctcctgatgagtgggagagkatgggggacgcttggaaagaacctagggttcccacagtgaggatcagcatggctttgtatagcccatctctgaatgcctcagaacccactaggaataagc

SEQ ID NO: 315024 - DNA, 201 bp, Homo sapiens
tcttcgcaaggtagctgaatttaaaatcaacaaataaaaatacaggtgcatttttgtaaatcagcaataaaataccatttcaggtaggaaaaaattaaaghaacaagtattttctaacaaaattgtgttaaacctttaaaagaaaattataaaattttattggaagatgttaggaaaggtctaaataaatggagagagaat

SEQ ID NO: 315025 - DNA, 201 bp, Homo sapiens
gggcttgttagacatcatgttcttgggctccaccccagactcaatgcatcagaaactctggggttgcttaagtttgtgttaaaggatacttttcaacaaaragtaaaattatgattctaaggcagttataaaatcaatattgttaaagactttattcaactcattattagtgaggaaagtgaggatagcaaagtcacctgg

SEQ ID NO: 315026 - DNA, 201 bp, Homo sapiens
ctcagatgacacagagtcctcaaagcctgagccatgggcttgttagacatcatgttcttgggctccaccccagactcaatgcatcagaaactctggggttrcttaagtttgtgttaaaggatacttttcaacaaaaagtaaaattatgattctaaggcagttataaaatcaatattgttaaagactttattcaactcatta

SEQ ID NO: 315027 - DNA, 201 bp, Homo sapiens
cccccccgaatcttttgttatgcaggtgggttctctgcatctggtgccatgttgcctgcttccttactgtacacgtggtgacaaacaaaagggaaaatggygcctctatgttgaacatacctggcttccaggtagcccttttctattggcacaactgcagcattcactcctgcatggttatctatgtctgcagctcaattt

SEQ ID NO: 315028 - DNA, 201 bp, Homo sapiens
attgcagctggtggatattctcttaagtctcttttagtctgtaggttccttctctgttttttttccttacagtttattatttgaagaatccaggtagaatrccttacatcttttctcagcctacattttgctgactgcatcactgtggtgtcatttgaacatgttcttcagttccctgtcctgtgaattggtagttagacc

SEQ ID NO: 315029 - DNA, 201 bp, Homo sapiens
aacccttttaccttgtcatctttttacccttcgcttttccttttcttccaactgccaactggcagccctagggtagagtgttcgataagaagttacttcarcagcttcagaagaggagtcttgcttgtgttttcttcatttcctccccatccttcccttttcccactcccactgacaggcgattacagttgagactgggga

SEQ ID NO: 315030 - DNA, 201 bp, Homo sapiens
ttttccttcctttaaagagaaaataataaagacttttaggtgaaggaagctttcaatccagtgatttttttttttaatgaaacatttgtgaaaggcccatkgtgagaactatgtttacattgctgagcacaaaatttattttgccctttttattcaaacagatgacaacccttgacaatacattcagtgtatacagagagc

SEQ ID NO: 315031 - DNA, 201 bp, Homo sapiens
ttttttttttttttttttttgcgtaacttgacaagctgattctaaaatctatacggaaaatcaatgtacacagaagagtcaaaacaattttgaaaaaaaaraacaacattggagtactcacaccctaagatttacggtcttactacaaagctacaataatagagaaagccaacattgcactgtagttcctatagaggggtg

SEQ ID NO: 315032 - DNA, 201 bp, Homo sapiens
gtgggatgggggaggggggagggatagcaattaggagatacacctaatataagtgatgagttaataggtgcagcacaccaacatggcatgtgtatacataygtaacaaacctgcacattgtgcatgtgtaccctcgaacctaaaagtattataataaaaaaaattatgttgattggactttatgcctcatatacaagcaag

SEQ ID NO: 315033 - DNA, 201 bp, Homo sapiens
gctgcctccttcctggtccttaagctagagggagtgatatggtttggctgtgtctccacccaaatctcatcttgatttgtagttcccataatccccacatrttgggggagggacccggtgggagataattgaatcatgagcgtggtttcccccatgctattcgcaggatgatgagtaagttctcacgagatctgatggttt

SEQ ID NO: 315034 - DNA, 201 bp, Homo sapiens
tggctgtggtgtggataattttctattaggactaagagtggcaactggggtccagtaaggagtatgttttaagaacccagtgagtgacaagaattgggagrtagtaacagcatggggttgtggattttgaatataaaaccaacagacttgaggatgcgtgggatgtaggatgtgagagaaacaaaggagtcaaggacagtg

SEQ ID NO: 315035 - DNA, 201 bp, Homo sapiens
aaaataaaccaactgacagagtgacagagcagacagggccattctagagcaggtggacagcctacatgaagaggggatgtttgacctaaaggcacaaaagmgcaagccatggagcaagtagaggcagtgttccaggtgggagaacagtgagggtcaaagccctgagaccagcagatcatcatgcaggacgactaacaaggc

SEQ ID NO: 315036 - DNA, 201 bp, Homo sapiens
cttatagacctatgaagagacttagccacataataatagtgggaaacccaaaacctcactgacagcattagacagatcattgaggcagaaaactaataaakatattctggaattaaactcaatacttgaccagttggacctaatagacatctggagaatactccatccaacaactacagaatatacattctcctcatctgc

SEQ ID NO: 315037 - DNA, 201 bp, Homo sapiens
gatcaaatcttcacatatctatattaacctttaatgtaaacagactaaatgccccagttaaaaggcatagagtggcaagttggataaaagaaaaagacccmagtgtctgctgtctttaagagacccatctcacatgtaacaacagccataggctcaaattaaaagaatggagaaagatctatcatgcaaacagaaaccaaa

SEQ ID NO: 315038 - DNA, 201 bp, Homo sapiens
gatgaagtggtatttatcctatggatgcaaagttgttttaacatttgaaaatcaatccatatgatacaccatgttaatagaataaagaacaaaagccacawgatcatcttaataaagaacaggaaatccaacatgcttttacggttaaaacaaacaaaaccgggactaaaagggaatgtcctcgatttgataatgggcccc

SEQ ID NO: 315039 - DNA, 201 bp, Homo sapiens
atgatgaagtggtatttatcctatggatgcaaagttgttttaacatttgaaaatcaatccatatgatacaccatgttaatagaataaagaacaaaagccamatgatcatcttaataaagaacaggaaatccaacatgcttttacggttaaaacaaacaaaaccgggactaaaagggaatgtcctcgatttgataatgggcc

SEQ ID NO: 315040 - DNA, 201 bp, Homo sapiens
tgtgtccacaggtaagaaagacatgtttagtcctacccactaatacgtcagaatgtgacattatttggaagtcgggtctttacagaggtaagcaaattaaratgagatcattacggtgaaccctagcccagtatgactgatggccttattaaaaggggaaatgacacagacacatagagaaggaagatgatgtgcagatac

SEQ ID NO: 315041 - DNA, 201 bp, Homo sapiens
cttctctgcctcctcttataaggacactagttacattgaatttatagcccactttaatccattatgaccttatcttaactggatctgcatagactccgcartgagtcgaattgtgtccacaggtaagaaagacatgtttagtcctacccactaatacgtcagaatgtgacattatttggaagtcgggtctttacagaggta

SEQ ID NO: 315042 - DNA, 201 bp, Homo sapiens
tcaataaaaatgcgaaagaattctaaaatgactctaaattaatttaacccagtctacatataaagtctttgcatttcatgttcactagaatcaacatatcrtttaaatggcattgcatatttttgcaaataaccaactttagacacatagcttattatagtggaaatcacactgacgtgtactgtaatctgaaccagcgag

SEQ ID NO: 315043 - DNA, 201 bp, Homo sapiens
tagggaattgagcacttttctacatgtttattggctatttaggtttccattctacaaagtacctgtttatgtcctttacctattttcctattggattgttstatattgatttgtaggaattatttatatagtcctgatactctttatatattttataagcatttttccaagtctgattttcaaacatagtcttcatagtga

SEQ ID NO: 315044 - DNA, 201 bp, Homo sapiens
ctgttgcctcctcgctatccctgccctgtttctcatctgtgaaatgtggctccaagcatccgtcttatagaatgactaggaagagtaagagcctggtacaygataggtactcactaaatatttctcttcttttgtggaaggtatatttttgtttagattattaaactacgtaaactccagtggttctaattctttgtctaa

SEQ ID NO: 315045 - DNA, 201 bp, Homo sapiens
caaggtgagtggatcacttgtggccagggtttgagaccagcctggctaacatggcgaaatcccatctctactaaaatacaaaaattatccagtgtggtggygcccacctgtagtcctatctacttggggggctgaggcatgagaattacttgaatctgggaggcggaggttgcagtgagccgaggtcgcgacactgcactc

SEQ ID NO: 315046 - DNA, 201 bp, Homo sapiens; identical to SEQ ID NO: 65594

SEQ ID NO: 315047 - DNA, 201 bp, Homo sapiens
tgtctagataacatggctagaaaagagaatgaaaaagttggaatttttaattgccatggtatggggggtaatcaggtgagtatcttagaaaactcttaaamgggataattttcagattgtttttactttgccttttttttataccatgacatcattcaggaaatattttccttcctttaaagagaaaataataaagacttt

SEQ ID NO: 315048 - DNA, 201 bp, Homo sapiens
cctggatacattgtcttacatagcatcagcacagaactgacattagcatagaactgacattacccccccagttcctgatctcaaaaggtttaggtaacttktatttaaacctgagtcttctatgtcagaaccctggtttttattcctggctgcttgggaatattggaataatatgcagactgtatatgtgtttatagaagt

SEQ ID NO: 315049 - DNA, 201 bp, Homo sapiens
gatggatgtgactagtgataaagtgacagtgcagattattactgtctctgagcctgttcatgctggactctgaattaggtgcctggatacattgtcttacrtagcatcagcacagaactgacattagcatagaactgacattacccccccagttcctgatctcaaaaggtttaggtaacttgtatttaaacctgagtcttc

SEQ ID NO: 315050 - DNA, 201 bp, Homo sapiens
aattctgttttgaacgaaccgagtttgagattttggtggaatagcaagatggatgtgactagtgataaagtgacagtgcagattattactgtctctgagcytgttcatgctggactctgaattaggtgcctggatacattgtcttacatagcatcagcacagaactgacattagcatagaactgacattacccccccagtt

SEQ ID NO: 315051 - DNA, 201 bp, Homo sapiens
tgaagatgattaagtgttcatattagaaaattgagaaattctgttttgaacgaaccgagtttgagattttggtggaatagcaagatggatgtgactagtgrtaaagtgacagtgcagattattactgtctctgagcctgttcatgctggactctgaattaggtgcctggatacattgtcttacatagcatcagcacagaac

SEQ ID NO: 315052 - DNA, 201 bp, Homo sapiens
agtacatacgagtgaaattgttgggtcacatcgcagctctacgtttaacattttaaagaactgttaaacagttttttgaagcagctatatcattttacattcccaccaccactgtataaggattctaattgctttacatccttgccaacacttgttattatctgtctatttccataatagccatccttgtgggtgtggaac

SEQ ID NO: 315053 - DNA, 201 bp, Homo sapiens
tctgataatagagctgcagctacttcatttcaattaatgtttgcatggtacaacttttcccattcttttactttcaatatacatatgttatcatattaaaagtgaattgcttgtacctggatatagttggaacatttaaaaaattcagcctgccagtcttcatcttttaattggtatatttagatcattcacttttaatgt

SEQ ID NO: 315054 - DNA, 201 bp, Homo sapiens
ataaatagttctatcacaaagacacatacgtgcatatgcaacactattcacaataacaaagacatggaatcaacaatccacctaaatgccaatcaatggtwgactgaataaagaaaatgttgtacatttacatatacatatacaccatggaaaactatgcagccagaaaaaaggatgagacaatgtcctttgcaggaacac

SEQ ID NO: 315055 - DNA, 201 bp, Homo sapiens
gaacccagtgagtgacaagaattgggagatagtaacagcatggggttgtggattttgaatataaaaccaacagacttgaggatgcgtgggatgtaggatgygagagaaacaaaggagtcaaggacagtgtttcaccttttggcctgaggaacaggtagtgatcattgcagtcagagaaccatggtggaggaggccgtaagg

SEQ ID NO: 315056 - DNA, 201 bp, Homo sapiens
cattttattaaaagaacaatttacttcaggttgggattatctcaaaatgtagctaaggttcaatagaaaatctatgaatgtactgaaccaacggatgtggrataaaacattagtaacttgttgcaaaagcatatgtttaacatacatcttaaaaaattattgcgctataattttacttcaaacgaacagctaaaactatgt

SEQ ID NO: 315057 - DNA, 201 bp, Homo sapiens
taccttggagcttgctgatttcccatagaattgttattttgaattcttgatctgagagctcgcacattgctgtctgcttagggttggtctctggcttctcrctttgtccttctggggaagccataattccctgtttgctgtttcttgtggatgtatgtctatgacttcacattaaagggttggttttttattccagtcttc

SEQ ID NO: 315058 - DNA, 201 bp, Homo sapiens
tgctttatgcaaattggtattttaccataaaatcttttatacaacctaacacaacctatttatgagggaataggtttcacaattaatggataaaaaatgaygatgtaaattatgtggtaaaagaactcttggaaacatataatgtattggaccctgagaaaaaaacattttgaaatttctagcttgaataattggacaagt

SEQ ID NO: 315059 - DNA, 201 bp, Homo sapiens
agccatcatcgtctggtattaattgatcacctaccaggatgaaggaaggtgtgctttatgcaaattggtattttaccataaaatcttttatacaacctaayacaacctatttatgagggaataggtttcacaattaatggataaaaaatgatgatgtaaattatgtggtaaaagaactcttggaaacatataatgtattgg

SEQ ID NO: 315060 - DNA, 201 bp, Homo sapiens
agaaaggcgaagtgctggggagaaggaggtagattttgaggtcaaatatgtttgggcaatactattttacatcttacatccatctgtaccaccattccccrgtcctaccaatagtcatgatatattaaaaggctttgagaagtccttcaacaaagaaacctatttaaatttatttaactagtatttcccaaacatatctga

SEQ ID NO: 315061 - DNA, 201 bp, Homo sapiens
attaaagcacaacactataggattgtgctgttatttccacttcacagataagtaaactgagacacaaataaatggtttaaaaaacacggctaaactcacarccatctggtttgagagcctgtgctgttaacccctaatgtccgtattctttctcaaatctaaccagtatttcccttgcagcagagagtagaaaagtgaatc

SEQ ID NO: 315062 - DNA, 201 bp, Homo sapiens
agtcagttttaggggctgaccaattgcttttccaggcagatctaataatcctaacatttactgagcatgtactttatgtcaagcacaaatctgaatgcttkatgaatattaaagcacaacactataggattgtgctgttatttccacttcacagataagtaaactgagacacaaataaatggtttaaaaaacacggctaaa

SEQ ID NO: 315063 - DNA, 201 bp, Homo sapiens
catgcttcaagggtccagggaaacctgaaatcataggatttttcagcagaaagggaaatcagaaaatgtaaatatgactagggtaatagatataatttagrgcatctggcttcagctaacgctgacgttcgtagttcctgtaggacctgaacaaatgtgtttcattgtggtatctgatagttgttaactcaggagctgagt

SEQ ID NO: 315064 - DNA, 201 bp, Homo sapiens
atgtatccaaaggaaatgaacgcagggtctgaagagttacttttacttacatgtttataacagcactattcacaatagccaagaagtagaagcactccacrtgtccgttcattctggcccagctagcaatgcttaggcattgtccaaaattgggtcagttcaaagtaaaaaactcctccttcttggttctaaagacaagct

SEQ ID NO: 315065 - DNA, 201 bp, Homo sapiens
ttaaaaatagtatggaggtttctcaaaaaatgctcaaaaaagagaactacgatattatccagcaattccacctcagggtatgtatccaaaggaaatgaackcagggtctgaagagttacttttacttacatgtttataacagcactattcacaatagccaagaagtagaagcactccacgtgtccgttcattctggcccag

SEQ ID NO: 315066 - DNA, 201 bp, Homo sapiens
gttcatacctgtaatgctgacactttgggaggatgagatggaaagatcacttgaggccaggaatttgagaccagcctgggcaacatagcaagacccccatytctacaaatttttctttttttaatagctgggtgtggtggtgcgtacctgtagcccagctacttgagaggttgaggtgggtggattgcttgagcccagggg

SEQ ID NO: 315067 - DNA, 201 bp, Homo sapiens
tgaccaaagcacagccatgttctttacactccccagatctgaaaatttagtacaatccctatcaaaatctcaagtgtctttttttttttttttttttttttgcgtaacttgacaagctgattctaaaatctatacggaaaatcaatgtacacagaagagtcaaaacaattttgaaaaaaaagaacaacattggagtactca

SEQ ID NO: 315068 - DNA, 201 bp, Homo sapiens
atgaccaaagcacagccatgttctttacactccccagatctgaaaatttagtacaatccctatcaaaatctcaagtgtctttttttttttttttttttttttgcgtaacttgacaagctgattctaaaatctatacggaaaatcaatgtacacagaagagtcaaaacaattttgaaaaaaaagaacaacattggagtactc

SEQ ID NO: 315069 - DNA, 201 bp, Homo sapiens
tgagttgggagccaacaccatgcagtgactcaggtgagtggggcaaggtgacgaagtcttgagtcaggacactggtgtggaggtagaggacaagacagccmcttgaaagggttaacagcctaggagagggtgggctcagaaagggttctggttgttgagggcacagttcaaacacaaatgttattaaatagaatcatgaat

SEQ ID NO: 315070 - DNA, 201 bp, Homo sapiens
catgaccaaagcacagccatgttctttacactccccagatctgaaaatttagtacaatccctatcaaaatctcaagtgtctttttttttttttttttttttttgcgtaacttgacaagctgattctaaaatctatacggaaaatcaatgtacacagaagagtcaaaacaattttgaaaaaaaagaacaacattggagtact

SEQ ID NO: 315071 - DNA, 201 bp, Homo sapiens
tgggcggatcatgaggtcaggagatcaagaccatcctagctaacatggtgaaaccctgtctctactaaaactacaaaaaattagccaggcgtggtggcacrcacctgtagtcccagctactcaggaggctgaggcagaagaatggcatgagccggggaggcggagcttgtagtgagcccagatcacaccactgcactccag

SEQ ID NO: 315072 - DNA, 201 bp, Homo sapiens
ccatgaccaaagcacagccatgttctttacactccccagatctgaaaatttagtacaatccctatcaaaatctcaagtgtctttttttttttttttttttttttgcgtaacttgacaagctgattctaaaatctatacggaaaatcaatgtacacagaagagtcaaaacaattttgaaaaaaaagaacaacattggagtac

SEQ ID NO: 315073 - DNA, 201 bp, Homo sapiens
ctctctgggacctgtgagtaataaatttcttctgtttcacaaactttggtttcactttctcattgtgtctcacctgacagacacacttgaacctaattatycccccagtcagggctctcttagagggtggctatcttagcttatagccactgtcaagaaagagaccccaagaccaaattagaaaaaataaaacaaaacata

SEQ ID NO: 315074 - DNA, 201 bp, Homo sapiens
ctagcagaagaaaagaaataactaaaatcagagcagaactgaaagaaatttagatgcaaaaatccatacaaaagatcaagcaaaccaaaagttgtttttttgaaagaataaacaagatagaccactagctagattagcaaagaaaaaagaagatccaaataagcacaattggaaatgacaaaggtgacattacaactgacc

SEQ ID NO: 315075 - DNA, 201 bp, Homo sapiens
acacctagaggaactagataaacaagacaaaaccaacaccaaaactagcagaagaaaagaaataactaaaatcagagcagaactgaaagaaatttagatgsaaaaatccatacaaaagatcaagcaaaccaaaagttgtttttttgaaagaataaacaagatagaccactagctagattagcaaagaaaaaagaagatcca

SEQ ID NO: 315076 - DNA, 201 bp, Homo sapiens
agattgaaatggctgaaatgacagacatagaattcagaatctagatagcaaggaagctaaaaaaaaaaaaagagagaaagttgaagctaaaaaaaaaaaaagaaataaaaaagaaaaaaacaggagaaagttgaaacccaatccaaggagaacagtaaaataatacaagagttgaaagatggtataacctttttaagaaag

SEQ ID NO: 315077 - DNA, 201 bp, Homo sapiens
acctcagcctcccaaagtgttgggattacaggagtgagtcaccgtgcccagcctataatacaaatcttgatttttcaagtgcaatgtcctgattttggcarttaaatcagtttttaaatcttttctttgggcggggggcgggggcaggagtaggggacaaaacccttgtctctggcataactttgcctgaaagttaccttg

SEQ ID NO: 315078 - DNA, 201 bp, Homo sapiens
ttaggagtgactacttactgtttgttcatttattcaattaatatttattgactcagcagtcccagtctctctggcaccagggaccagttttgtggaagacrgtttttccgtggaccaggttgggggccaggggaatggtttcgggatgaaaccgttacacctcagatcatcaggcattagattctcataagtcttgtgcaa

SEQ ID NO: 315079 - DNA, 201 bp, Homo sapiens
ttccactagaaaaggatcacattgtatgctatgtggagaaaaactatatggaaacaggagtagagctggtgtattgttgaagagagtaaaggattatgtcwggtttctatcaagcttgagacactgactgtaaagttgccattactgagatgggaaaacctacaggaagagcagatgctcaagggaatcaacagtagtttg

SEQ ID NO: 315080 - DNA, 201 bp, Homo sapiens
cagagatctgaagaaagtgaatgagcaggtcatacgagtttttagggaaagagtattctgggcacagggaagaacaagtataaaggtttctaagatgacartgtacttagcgcgttccagaaacagcagggagaccagttgtctggaatagagtgaacaaggtggagagtagtagaagataaggtcaaagacaaagtgagg

SEQ ID NO: 315081 - DNA, 201 bp, Homo sapiens
gttttatgtaaggaagttgaaagagtacggaagttgaaagagtcctgtcaaggtgattttgagcagagatctgaagaaagtgaatgagcaggtcatacgartttttagggaaagagtattctgggcacagggaagaacaagtataaaggtttctaagatgacaatgtacttagcgcgttccagaaacagcagggagaccag

SEQ ID NO: 315082 - DNA, 201 bp, Homo sapiens
ggcttcagcttttctgtttttgggcctcctgcgtctgccttcccttgaattcaagttcagttctggcaacactgaagagattttccactgactgtgtgctkttttccttagcctgagttcttagtagtagtagtgcaagggacttttcttctctttagctgttagtgcaattcactatctaaatcaggggttcctaaacat

SEQ ID NO: 315083 - DNA, 201 bp, Homo sapiens
gaatggagagaagcacattgtgtcctgaaatgcttaattttgtatggaaagcaccataatcttagataatacaggaagaacagtggtgtaatgaacacctrtggttatagtttttcatgttacacatttttcaaagaactccctatttctggcttagttcttgtgcatcaggagagaacctgacttcagtctgctagacct

SEQ ID NO: 315084 - DNA, 201 bp, Homo sapiens
gtttattaactcactaattcatgtaatagacattaacggaacacattttgtgccacgtactgtgctcagtattggggaagaagctgaataaggcatgatcytggcactcaggtggtagctgcctacagttaagtggaacagggtggctgactaaggggggagaatagagttattctaaaataaactgattttaggacattc

SEQ ID NO: 315085 - DNA, 201 bp, Homo sapiens
taggtgctataattattcctgttttattgatgaggaaaatgaggcttagcatggtagaggagtatccaaaccctgtataaatccagagcctgacctcttarttgctgtgtacctcacttctgattgcttctggtgcaactttactgttacaggatctgtaataaagtcagaatttggacgaatccctagtttatgtcagaa

SEQ ID NO: 315086 - DNA, 201 bp, Homo sapiens
gaccagttctgtacatacttgaacacttggtttaggacaacggtggcactatgtggcagtaggagaaggatgatcttctaaaaaatgaacaaatgaatgaygctgggtcaacttgatataattcaagacaaaactgaaactgcatctttacctcacatcatacagaaaaatcaattttatatgtattacctgaaataaatg

SEQ ID NO: 315087 - DNA, 201 bp, Homo sapiens
attgcttttggtgttttagacatgaagtccttgcccatgcctatgtcctgaatggtattgcctaggttttcttctagggtttttatggttttaggtctaayatttaagtatttaatccttcttgaattaacttttgtataaggtgtaaagaagggatccagtttcagctttctacatatggctagccagttttcccagcac

SEQ ID NO: 315088 - DNA, 201 bp, Homo sapiens
agccagagttgtatctggaacagggttctccaccagagtctaggcttcctgggggtgctgctcaccttccaagttatggggattctgtcctgatgtcgaayagttaaatactcagcacagagcaataacctatgtgtttgtgatgggtttattttaatgaatctagatgagtgaaatgcacatttttagaaactaggttaa

SEQ ID NO: 315089 - DNA, 201 bp, Homo sapiens
aaggacatgaactcatccttttttatggctgcatattattccatggtgtatatgtgccacgttttcttaatccagtctatcattgttggacatttgggttrgttccaagtctttgctattgtgaatagtgccacaataaacatacgtgtgcatgtgtctttatagcagcatgatttatgatcctttaggtatatacccagt

SEQ ID NO: 315090 - DNA, 201 bp, Homo sapiens
ccggtccctttgtggccggcgctgcctggggccggggcgcgggcacgctcggcgcgggttcgggtctgggaccccggtgccgttggacacgcggcgtctcyggttggcagctttggcgagcagcgagtttccgtcctagtttgacattgagttagaaccgtttttctttagaagacggaagtttgttttattgacaaaaat

SEQ ID NO: 315091 - DNA, 201 bp, Homo sapiens
ccatgtccctacaaaggacatgaactcatccttttttatggctgcatattattccatggtgtatatgtgccacgttttcttaatccagtctatcattgttsgacatttgggttggttccaagtctttgctattgtgaatagtgccacaataaacatacgtgtgcatgtgtctttatagcagcatgatttatgatcctttag

SEQ ID NO: 315092 - DNA, 201 bp, Homo sapiens
atccatgtccctacaaaggacatgaactcatccttttttatggctgcatattattccatggtgtatatgtgccacgttttcttaatccagtctatcattgwtggacatttgggttggttccaagtctttgctattgtgaatagtgccacaataaacatacgtgtgcatgtgtctttatagcagcatgatttatgatccttt

SEQ ID NO: 315093 - DNA, 201 bp, Homo sapiens
caagtgttctcattgttcaattcccacctatgaatgagaacactcagtgtttgattttctgtccttgcgatagtttgctcagaatgatggtttctagcttyatccatgtccctacaaaggacatgaactcatccttttttatggctgcatattattccatggtgtatatgtgccacgttttcttaatccagtctatcattg

SEQ ID NO: 315094 - DNA, 201 bp, Homo sapiens
tagctgcaggagaccctataaccccatggacatatgagttggcagggagaactacctggagagtcagcagagatagagtttgagcctctgtggaacccagkgggggttgcatggggacagctgtaacaaaacacggccataggtgctcatcccgggctctacatatttctctatgaggctgtaacctttgttgactactga

SEQ ID NO: 315095 - DNA, 201 bp, Homo sapiens
acttattcctggccctgaacaactcctaagaaagggatggatgaagtaactgcagaccagcccattctcattacagatctccaagatcctagctgcaggaraccctataaccccatggacatatgagttggcagggagaactacctggagagtcagcagagatagagtttgagcctctgtggaacccagtgggggttgcat

SEQ ID NO: 315096 - DNA, 201 bp, Homo sapiens
tgggtgactttgagggatccaaaacttcagtagaggaaatacctgcagatgtagaaatagcaagagaactagaattatcctgaagatgtgtctgaatactkcaatctcatcataaaacttgaattgatgaagagttgcttcttatggatgagcaaagaaaatgttttcttgagatgaaatcctcgtggtgaaaatgctgtg

SEQ ID NO: 315097 - DNA, 201 bp, Homo sapiens
gacacacacaagaaaggatcagtgaacttgagcacaggtcaataaaaaatgtccaaactgaaccacagagaaaaaagataaagggattaaaaaaaaaaaaacagccttgatgatcaaatacatgcattgacctggaaggagagaagatagagagtggaggctctgaaggagactcttattttctccattctgtggttgctg

SEQ ID NO: 315098 - DNA, 201 bp, Homo sapiens
tgtggtattttggttcctattttaattcacttaggataatggcctctatttgcattcatgttgttgcaaaggacgtgattttgttcttttaaatggctgcrtggtactccatggtgtatatgtaccacattttctttatccagtcaactgctgatgatgggcatctagattgatttcatgtctttgctattgtgagtagtg

SEQ ID NO: 315099 - DNA, 201 bp, Homo sapiens
ttgcagtgagccgaggtcgcgacactgcactccagcctggacaaaagagcgagactctctaaaaaaaaaaaaagaataaagtcctttggggggaaaaaaawaaaaacctgtcaatccccacccccatactcccactaactaaattcagatacgaaattactatcaaaaagagtaagtaagccatcatgtgtgaatattaaa

SEQ ID NO: 315100 - DNA, 201 bp, Homo sapiens
atgattattttttaagatgacccctttgattgtatttcacaggattattgaacatggggaaggaagaggcctcacttgaggaagtgttagtctatctcaaycaaatctactgtgggcagatttctattgaaacctcccaacttcagagccaggatgagaaagactggtttgccaagcggtttgaggaactgcaaaaggaga

SEQ ID NO: 315101 - DNA, 201 bp, Homo sapiens
ggggggacatccttctccatcataacacaccaaaatcaggaaatgaacacagacatgactaccatgtatttctcaaaacaagatcaacaatttttttttcttttttttttttaggcagagtctcactctgttgcccaggctggagtgcagtggcacaatctcggctcaatgcaacctccacctcccaggttcaagcaatcc

SEQ ID NO: 315102 - DNA, 201 bp, Homo sapiens
ttgaggttgagtcttgctctgtcgcccaggctggagtgcagtggcacgatcttggctcactgcaagctccgcctcccgggttcacgccattctcctgcctyagcctcccgagtagctgggactacaggtgcccgccagtacgcccggctaattttttgtatttttagtagagacagggtttcaccgtgttagccaggatgg

SEQ ID NO: 315103 - DNA, 201 bp, Homo sapiens
tgcccaatccctcgcacctggaggccgtcaaccccgtggccgtgggcaaaactcgcggcaggcagcagtctcgccaagacggcgattactctccagacaaytcagcccagccgggggacagggtcatttgcttacaggtacttggagcttctgaaattgaggccagaggtggggaaaactgggaagaatgtgtgggttggg

SEQ ID NO: 315104 - DNA, 201 bp, Homo sapiens
ctgtccctcaggctggtgtgcagtggcatgatctcaggacactgcaacctctatctcccggggtcaagtgattctcccacctcagcctcccgagtagctgsgactacagacatgtgccactacagctggctaatttttgtatttttagtagagacggggtttcaccatgttggccaggctggtctcgaacacctgacctca

SEQ ID NO: 315105 - DNA, 201 bp, Homo sapiens
tgtgcaccaccatgcctggctaccaatatttagagttgggcaaagagaagtccctcaaaagtgactgaggttgagtagctctggagttagaaagaaaaccrggttcctgcaatgctgtagagcccagggaagaatatgttcttaaaaggagagagtaggagctgggtgcggtggctcatgcctgtaatcccagcactttgg

SEQ ID NO: 315106 - DNA, 201 bp, Homo sapiens
gaggtgggcggatcacgaggtcaggagatcaagaccatcctggctaacacagtgaaaccccgtctctactgaaaatacaaaaaaattagccgggcgtggtrgcgggcgcctgtagtcccagctacttgggaggctgaggcaggagaatggcgtgaacccgggaggcggagcttgcagtgagccgagattgcgctactgcac

SEQ ID NO: 315107 - DNA, 201 bp, Homo sapiens
caggtcaggagttcaaaactagcctggccaacatggtgaaacctcgtctctagcaaaaatacaaaaattagctgggtgtggtgcagacgtggggccaggcrcagtgactcacgcctgtaatccccgcactttgggaggccgagacagacagatcacttgagacagggtcttgccatgttgcccaggctggtctcgaactcc

SEQ ID NO: 315108 - DNA, 201 bp, Homo sapiens
gattgcgccatgcactccagcctgggtgacagagcgagactctgtctccagaaaaaagaatgtggtccaatacaaattcataaactttcttaaaacattayttgtgattttttttttttaccttattagccattgttagtgttagtgtattttatgtgtggcacaagacaattcttcttcttccggtgtggctcaggtaag

SEQ ID NO: 315109 - DNA, 201 bp, Homo sapiens
cctcccaagtagctgggattacaggtgcccgccaccacaccctgctaatttttttatttttagtagagatggggtttcaccatgttggccaggctggtctygaactcctgacctcaggttatccacccacctcagcctctgaaagtgctgggattgcaggcgtgagccaccatgcctggcctcctctatcctaagtccttt

SEQ ID NO: 315110 - DNA, 201 bp, Homo sapiens
ttttggggaagagaacatttaaaatctatcctcttagtaattttcaggtatataatacgttaactacagttaccatcctgtacagtagatctccagaactyattcaagggaggaaagttggcctagcatggtggctcacacctgtaatcccagcactttgggaggccaaggtgggtggatatcttgctcaggagtttgaga

SEQ ID NO: 315111 - DNA, 201 bp, Homo sapiens
gcctcccaagtagttgggactacaggtgtacaccaccacacctgtctaatttttgtatttttagtagagacggggtttcaccatgttggcaggctggtctygaactcctgacctctggtgatctgcctgcttaggcctcccaaagtgctgggattaaaggcgtgagccaccatgcccagcctatcagtgtgatttttaaat

SEQ ID NO: 315112 - DNA, 201 bp, Homo sapiens
ttaactacagttaccatcctgtacagtagatctccagaacttattcaagggaggaaagttggcctagcatggtggctcacacctgtaatcccagcactttkggaggccaaggtgggtggatatcttgctcaggagtttgagaccagcctgggcaacatggtgagaccccatttctgctaaaaataaaactaaaaaaattag

SEQ ID NO: 315113 - DNA, 201 bp, Homo sapiens
cgcccaggctggagtgcagtgctgcgatctcggctcactgcaagctccgcctcccgggttcaggccattctcctgcctcagcctcctgagtagttgggacyacaggcgcctgccaccacgacctgctaattttttgtatttttagtggagacagggtttcactgtgttagccaggatggtctcgatctcctgacctcgtga

SEQ ID NO: 315114 - DNA, 201 bp, Homo sapiens
gcacagaaggcaatctttttactttttttttttcttgagatggagtttcctgttacccaggctatagtgcaatggtgtgatctcagcccactgcaacctcyggctcccaggttcaagcaattcttgtgtctcactctccccagtagctgggattacaggcatgcaccaccacgcccagctaacttttataattttagtaga

SEQ ID NO: 315115 - DNA, 201 bp, Homo sapiens
cgcccagtctttttcttttctttttttttttttgagacaaggtctggctctgtcacccaggctggagtgcagtggcatgatcatggctcattgcaacttcygcctcccaagctcaaacttctagcctcccacctcatcctcctgagtagctgggactacaggcatgcgctaccacacctggccaatttttgtatttttttg

SEQ ID NO: 315116 - DNA, 201 bp, Homo sapiens
ctcaacctcccgagtagctgggattacaggcgtgtgccaccgtgcctggctagttttcatactttttagtagagatggagttttgccatgttggccaggcygatgtcaaactcctgacctcaggtgatctgcctgcctcgccctcccaaagtgctgggattacaggcatgagccaccatgcccaggcaggacatgaaactt

SEQ ID NO: 315117 - DNA, 201 bp, Homo sapiens
tttttatatttttgtagagatgggatttcaccatgttggccaggctggtctcaaactcctgacctcaggtgatccgcccaccttggcctcccaaagtgctrggattacaggcatgagccacggcaccttttttttttttttttttttttttaatagaggcagggcaccagtggggatggtggagtagggggtgcaaaggga

SEQ ID NO: 315118 - DNA, 201 bp, Homo sapiens; identical to SEQ ID NO: 65632

SEQ ID NO: 315119 - DNA, 201 bp, Homo sapiens
agaagggatatcttctttccttccccttacggtcatgacccagaagttgcatacattgctgctacgttcccattgtccaaaacttagtcacatggccaccwggttatggggaaggctgggaggtggctctttgttctgggtggccatatactgggctctctattactatcaaagagagggttcagaatggaagttaggaat

SEQ ID NO: 315120 - DNA, 201 bp, Homo sapiens
caccttgttcatgaggactttaaatctgcactgtctcccgtttcttctgacataattctcttttttttttttttttgaggttgagtcttgctctgtcgccyaggctggagtgcagtggcacgatcttggctcactgcaagctccgcctcccgggttcacgccattctcctgccttagcctcccgagtagctgggactacag

SEQ ID NO: 315121 - DNA, 201 bp, Homo sapiens
agagagggttcagaatggaagttaggaatcgtagcagtctctgccacagaggtatagtaatctgagatgagcaatccacctttatctttttcacctcatawttcacatcaaatctttttagtttttattttttaaattttatttattaggccgggcgcggtggctcatgcctgtaatccctgcactttgggaggccgaggt

SEQ ID NO: 315122 - DNA, 201 bp, Homo sapiens
agttacctcagattttctcttcttttctttttcctccatgtatttatttatttatgcatgttcatacattacatgtacctggaatacatgcacactataaraaatacagagatacaagaatgtctgtttttatttttccaaccagtgagtagaaaacactttgtttcaggtggcttaaataaaagaaacaaaagtcaacac

SEQ ID NO: 315123 - DNA, 201 bp, Homo sapiens
ttgacacattcatctctggaggttggtgtcagcgtatagggtgggtacaggtgggggtccctgcgtggccccagcctcgtggggacaaatgaatgaaaagkggccactgctgccttgagactcccgtgtgcggcggcgcctccagggagttggggtcaccctgttatgacgggagtgtggccactgtcaggttaatgtgtt

SEQ ID NO: 315124 - DNA, 201 bp, Homo sapiens
ctgaaaagcttttatcatgaagcatgactcttgatctcaggacttcattcaaataataacaaatatttcttgagcgtctaccatgtgttagtcttctgagmcagaagcatgcctctgatattctcctttatttttaagaggagtgcaggcgtgtatctgctgttgttttctctattctctctggcttcgttacggacttaa

SEQ ID NO: 315125 - DNA, 201 bp, Homo sapiens
cagtgagtagaaaacactttgtttcaggtggcttaaataaaagaaacaaaagtcaacacacataccccaaggtagccccctaaacatgctcatgttttacrtattgtcttaggatcactataggatgacaaaccaccctggtgggcctgggacttaggggttttctggaatgtgggactttaagtgctaaaacaaggaaag

SEQ ID NO: 315126 - DNA, 201 bp, Homo sapiens
aacaaaagtcaacacacataccccaaggtagccccctaaacatgctcatgttttacgtattgtcttaggatcactataggatgacaaaccaccctggtggrcctgggacttaggggttttctggaatgtgggactttaagtgctaaaacaaggaaagcaaagagttaaatgtctttttctttcttaagcttggatgaagga

SEQ ID NO: 315127 - DNA, 201 bp, Homo sapiens
ttctttcttaagcttggatgaaggaactttgccctctaaattattttattttatgttatttttggatggaatctcactctgtcacccaggctggtgtgcartggcgtgatttcggctcactgcaacctccacctcccaggttcaaacgattctcctgcctcagcctcctgagtagctgggattacaggcatgtgccaccat

SEQ ID NO: 315128 - DNA, 201 bp, Homo sapiens
gttcatgaggactttaaatctgcactgtctcccgtttcttctgacataattctcttttttttttttttttgaggttgagtcttgctctgtcgcccaggctrgagtgcagtggcacgatcttggctcactgcaagctccgcctcccgggttcacgccattctcctgccttagcctcccgagtagctgggactacaggtgccc

SEQ ID NO: 315129 - DNA, 201 bp, Homo sapiens
acgtattgtcttaggatcactataggatgacaaaccaccctggtgggcctgggacttaggggttttctggaatgtgggactttaagtgctaaaacaaggaragcaaagagttaaatgtctttttctttcttaagcttggatgaaggaactttgccctctaaattattttattttatgttatttttggatggaatctcactc

SEQ ID NO: 315130 - DNA, 201 bp, Homo sapiens
ttgtttttcatgaaacagagtgccagaggtctcggtggaaggaggtggagacagagagggaaggggttggagatagggttggtggaagaagaaacctgccygaagaaatggtagtctgagggagcatgtgttgccagggtgaatggaggacgtgcctgacatgagagaggacttcctctttctgctggtgccaaactgcta

SEQ ID NO: 315131 - DNA, 201 bp, Homo sapiens
cacaatggccatccagtaataggaagtattttatgaataattctattgctgtgctctcattcttttaaattttatttttatttatttttctatccttccasggaaaaagaattaaatcttttaatttcattctttattataaaggtaatacagttgaagtacgttttatctagagcatttgaaattggaacttgatcagtt

SEQ ID NO: 315132 - DNA, 201 bp, Homo sapiens
ctcccgagtagctgggactacaggtgcccgccagtacgcccggctaattttttgtatttttagtagagacagggtttcaccgtgttagccaggatggtctygatttcctgacctcgtgatccgcccgccttggcctcccaaagtgctgagattacaggcgtgagctactgcacctggcctcttctgacgtaattcttactt

SEQ ID NO: 315133 - DNA, 201 bp, Homo sapiens
cttagcctcccgagtagctgggactacaggtgcccgccagtacgcccggctaattttttgtatttttagtagagacagggtttcaccgtgttagccaggayggtcttgatttcctgacctcgtgatccgcccgccttggcctcccaaagtgctgagattacaggcgtgagctactgcacctggcctcttctgacgtaattc

SEQ ID NO: 315134 - DNA, 201 bp, Homo sapiens
ctgccttagcctcccgagtagctgggactacaggtgcccgccagtacgcccggctaattttttgtatttttagtagagacagggtttcaccgtgttagccrggatggtcttgatttcctgacctcgtgatccgcccgccttggcctcccaaagtgctgagattacaggcgtgagctactgcacctggcctcttctgacgta

SEQ ID NO: 315135 - DNA, 201 bp, Homo sapiens
aggactttattttttaactttcctcactttgtttcatgataatttttttcttttttgagacaggatctcactgtgtcacgcaggctggagtgcagtggtgygattatagctcactgtagtttcaacctcctgggctcaagtgatcctcccacctcagcctcccaagtagttgggactacaggcatgtgccaccatgcccag

SEQ ID NO: 315136 - DNA, 201 bp, Homo sapiens
tggcacgatcttggctcactgcaagctccgcctcccgggttcacgccattctcctgccttagcctcccgagtagctgggactacaggtgcccgccagtacrcccggctaattttttgtatttttagtagagacagggtttcaccgtgttagccaggatggtcttgatttcctgacctcgtgatccgcccgccttggcctcc

SEQ ID NO: 315137 - DNA, 201 bp, Homo sapiens
gtcatcccccgtccatcctctgtaactgaggatctttgaggtccacgcttgggtggtcttcccatcttgctggtccggacctggtttcggaagggcttttytttcctttgttggaaacgtgtgagaaactctttttttctttctctttttggttccctttttttttttttttttttttgagacggagtctcgctctgtggc

SEQ ID NO: 315138 - DNA, 201 bp, Homo sapiens
tccaaaaaagtaagatatgtatctctgttttcatattctgtggcagaattttaattaatgggaaaagtagttcacattaagagatcacaggtgatgcagawatttatttatttatttatttatttatttatttatttatttatttttgagactgagtctggctctattgcccaggctggagggcagtggtgcaatctcagc

SEQ ID NO: 315139 - DNA, 201 bp, Homo sapiens
atgaagtctgtagaggtgccaagagagctgcagatgcacagtcacctgctgaagacacatgttcaggtgggcagcctccaaatggctggttattgcttctscttcctgctcagcaaaggagctgacgttggtctggtgttttcagttgtctgattcatttgacaaatatttattgtgtgtcgttaggttctagaaactgat

SEQ ID NO: 315140 - DNA, 201 bp, Homo sapiens
gtcatctcctaaactgtttgcatttttaaattttcccctgatttagttgatcatggccttgccaggttggtgacagtatattgtgagcatggtcataaagstgccaaaatcaaccccctcttcaccggacaagccctgctggagaatgtgcctgaaatccaagccctggtgcagacactgcagggacccttccacacggca

SEQ ID NO: 315141 - DNA, 201 bp, Homo sapiens
gattgcaggcgtgagccaccatgcctggcctcctctatcctaagtcctttaagtcagtggagtatgagttaagtgtgggtgggaaagtggactttgtaggygcatgttgctgaagaagggtccccaggaatagcctgtgactgaactcggctgcagagacccccaccaccttgttcatgaggactttaaatctgcactgtc

SEQ ID NO: 315142 - DNA, 201 bp, Homo sapiens
ggcataagccaccactcctggctttaaattttcttttttgttgtatgatttcaactcagcacttcttccctagactccattgtgatgaatgccattttttwccttttgaatgtatccacaatagctgatgttccgtaaaatgcgaggcttaagtgaatttccagagaatttctcagccactggagacgtcctgtctcacct

SEQ ID NO: 315143 - DNA, 201 bp, Homo sapiens
ttcttttctccccacccgctccccttgcctcatgatttaggtccatggtgatgcttctttctgtggtcaagggattgttcctgaaacattcacgctgtccratctcccacatttcagaattggtgggagtgtgcatttgattgttaataaccagctgggttacaccactccagctgaaagaggaaggtcttctttatactg

SEQ ID NO: 315144 - DNA, 201 bp, Homo sapiens
attgtaatgtctttttaaccttctcagagataaaatttgtattctgctttttttaatgttaacatatcatgatggttcttttgatttaccatgcaaatacratgttagaataatgattttaaccaaaggtaggactttattttttaactttcctcactttgtttcatgataatttttttcttttttgagacaggatctcac

SEQ ID NO: 315145 - DNA, 201 bp, Homo sapiens
ggtgggcagatcacacggtcaagagatcaagaccatcctggccaaaatggtgaaaccccatctctactaaaaatagaaaaattagctgggtgtggtggcaygcatctgtagtcccagctactcaggaggttgaggcagaagaatcgcttgaacccaggaggcggaggttgcagtgagccgagaacacaccactgcactcca

SEQ ID NO: 315146 - DNA, 201 bp, Homo sapiens
gggacgcagaagcctcccctggccgatttgcggtggggtgtcggggtcggggaaccggctgccggcctgaacgcgcggccggtggggaggagggggaggtkaggggagcagagggtaggtgtgggtgctcagtgttggggtcatcccccgtccatcctctgtaactgaggatctttgaggtccacgcttgggtggtcttcc

SEQ ID NO: 315147 - DNA, 201 bp, Homo sapiens
ggtcaggattctaaagtaagaccattggtgtgattttgtgttgtctccagctactttctctgcagacatggaacaggcagaaagtggggattaactaggtwtatgggttggagtgaagggtcatgggaatcaagggtgtatgcaaaaagaagatgatcatgattgaggccaggcatggtggctcatgcctgtaatcccagc

SEQ ID NO: 315148 - DNA, 201 bp, Homo sapiens
gctgagtcgtgtcaggccactttgtccccgcttcgtagagctcttactccccacgtggtacttttccaggagaggccaagtggctcctacaaagcggcatygtcatcctccttccacatggctacgatggggctgggccagaccactcatcctgtcgaatagagcgtttcctgcaggtaagggtaacgtcttccggagtca

SEQ ID NO: 315149 - DNA, 201 bp, Homo sapiens
aagcttgtgggctgtgccatcatccatgtcaatggagacagcccagaggaagtggtccgtgccacacgactggcttttgaataccaacgccagttccgcarggatgtgattattgatctgttgtgctacaggcagtggggccacaatgagctggatgagccattctacaccaaccccatcatgtacaaaatcatcaggtac

SEQ ID NO: 315150 - DNA, 201 bp, Homo sapiens
aagatagtctcgatctcctgaccttgtgatcctcctgcctccgcctcccaaagtgctaggattacagacgtgagccaccaagcccagccagccagaccctrtttctgataaaaaaaaaaaaaaaaaaaaaaaagggaagaaaaaagaacaagtcggcaatttctacataggattatcacttaaatttttgatcagtttctt

SEQ ID NO: 315151 - DNA, 201 bp, Homo sapiens
cgccttctgggtgcaagtgattatcctgcctcagcctccaagtagctggggttgcaggtgcttctcgccatgcccggctaatttctgtggggttttttttsgttttggttttgtttttctgagatggagtcttgcttatgattttttttgtatttttagtagagatggggtttcagcgtgttagccaggatggtctcgatc

SEQ ID NO: 315152 - DNA, 201 bp, Homo sapiens
cttgtgatccgtccgcctcggtctaccaaagtgctgggattacaggcatgagccactgcgcccatccaatttttgtattttttgtagagacagggtctcactctgttgcccaggctggtctcaaacccttgacctcaagaggtcctcctgccccagcctcccaaagtgattacaggtgtgagccacaatggccatccagta

SEQ ID NO: 315153 - DNA, 201 bp, Homo sapiens
ggaggccgaggcaggtggatcacaaggtcaggagatcgagaccatcctggccaacatagtgaaaccccatctctactaaaatacaaaaaataagctgggtrtggtggcatgcacctgtagtcccagctactcaggaggctgaggcaggggaatcacttgaacccgggaggcagagattgcagtgagccgagattgcaccac

SEQ ID NO: 315154 - DNA, 201 bp, Homo sapiens
caaaactcgcggcaggcagcagtctcgccaagacggcgattactctccagacaactcagcccagccgggggacagggtcatttgcttacaggtacttggascttctgaaattgaggccagaggtggggaaaactgggaagaatgtgtgggttgggagggctgaaagcacatggcagacattcatgatgaaactgagatgac

SEQ ID NO: 315155 - DNA, 201 bp, Homo sapiens
aaaaaattagctgggcgtggtggcgggtgcctgtgggcgcctgtaggcgcctgtagtcccagctactcaggaggctgaagaaggagaatggcatgaacccrggaggtggagcttgcagtgagccaggatcacgccactgcactccaggctgggcaacagagcaagactccgtctcaaaaaaaaaaaaaaaaaaagttgtgc

SEQ ID NO: 315156 - DNA, 201 bp, Homo sapiens
aggccatcctgcctaacatggtgaaaccccgtctctactaaaaatacaaaaaaattagccaggctacttgggaggctgaggcaggagaatggcgtgaaccygggaggcagagcttgcagtgagccgagattgtgccactgcactccagcctgggcgacagagcaagactccatctcaaaaaaaaaaaaaaaaaaaaagtga

SEQ ID NO: 315157 - DNA, 201 bp, Homo sapiens
ggcgtgaaatttatcattttatcatttaacacatacgtaggtttacctatttatctgttaagtgtacattgtttttcaaatcacaaaaatatgctagtttycaaatagaaatgttcaaaataataaatactactaagcatatatttatcccatctgctatacttttttcaggttcatatgagttttaattagaattagtat

SEQ ID NO: 315158 - DNA, 201 bp, Homo sapiens
agcatgcctctgatattctcctttatttttaagaggagtgcaggcgtgtatctgctgttgttttctctattctctctggcttcgttacggacttaaacatsaaatctaattcctgtgaccttttgcagatattatgaacagtaaactgtttgggcggtattacgcctaacgtaaaggtattcatttttctcttacagtaat

SEQ ID NO: 315159 - DNA, 201 bp, Homo sapiens
ccgcaccgttcataaattcacctgctgatatttttctgtaatgttgggcaatagcttttctgctataatcaagaacacctgtgtttccctttggccagccyattgtcactacgactgaaatagatgatctgaacattcttctcctttcttgccacttctctcccagatgtgtgacagtgcggaagagggggtggacggaga

SEQ ID NO: 315160 - DNA, 201 bp, Homo sapiens
cccgggttcacgccattctcctgccttagcctcccgagtagctgggactacaggtgcccgccagtacgcccggctaattttttgtatttttagtagagacrgggtttcaccgtgttagccaggatggtcttgatttcctgacctcgtgatccgcccgccttggcctcccaaagtgctgagattacaggcgtgagctactgc

SEQ ID NO: 315161 - DNA, 201 bp, Homo sapiens
agaaagttttgctttttgttttgttttgttttgttttgttttctttgagacactctgtgtcgcccagactgagtgcagtggcacaattacagcttaccatrgcctcaaactcctgggctcaagtgatcctgccacctcagtctcctcagtagctgagatcacaggcacgtgccaccacatccagctaatttttgtattttt

SEQ ID NO: 315162 - DNA, 201 bp, Homo sapiens
agtaaagaggtgtgctttggctgggtgaggtggctcacgcctgtaatcccggcactttgggaggccgaggtgggtggatcatggcatcaggagatcgagascatcctggctaacatggtgaaaccctgtgtctactaaaaatagaaaaaattagctgggcgtggtggcgggtgcctgtgggcgcctgtaggcgcctgtagt

SEQ ID NO: 315163 - DNA, 201 bp, Homo sapiens
aatgccgtgtaataaactaccccaagacgtaatggcatttaaaccctcaatgatcattttagtgtctcttagggttcggggggttacctgggctttgcaargtggtagttttctctcttttttctttttttttttttgagacgggcctccaaaggcccttttcttgagcctctgcagaaagatttgatttctcagcacctc

SEQ ID NO: 315164 - DNA, 201 bp, Homo sapiens
gaaacaccttctcaaaaaaaaaggagcatttaatagcaagggcataggtcagcctcactgcctataaagatatatagcctggctgacatagagaaaccccrtctctactaaaaatacaaaaattagccaggggtgatggtgcacacctgtaatcccagctaatcaggaggctgaggcatgggaatccttggaacctgggag

SEQ ID NO: 315165 - DNA, 201 bp, Homo sapiens
tcagtagtcttaccaatagcagccattcatttttagttcacttatagtggtctaccggttctttctcacccagtgtttcgcaaacaaccttatatatttckaggtgacctcataagcctggaagcatcaccaaacatttaggaagagttaatgcaatgcctttagcaccatttttctgatggggctcttttttttcttttt

SEQ ID NO: 315166 - DNA, 201 bp, Homo sapiens
gtcttggaaataattgtcagaatttaccaaatcatagaaaaactctgttaattatttctatttggatgcagacaaaaacttataaatttgttttctctcasttgcctggaaaagaggttgttactatgagtgccttcatttattaaattaatttattatatttaacattgtttatttattttgtttctgttttataaactt

SEQ ID NO: 315167 - DNA, 201 bp, Homo sapiens
agtgctgggattgcaggcgtgagccaccatgcctggcctcctctatcctaagtcctttaagtcagtggagtatgagttaagtgtgggtgggaaagtggacyttgtaggcgcatgttgctgaagaagggtccccaggaatagcctgtgactgaactcggctgcagagacccccaccaccttgttcatgaggactttaaatct

SEQ ID NO: 315168 - DNA, 201 bp, Homo sapiens
aactgtttgcatttttaaattttcccctgatttagttgatcatggccttgccaggttggtgacagtatattgtgagcatggtcataaagctgccaaaatcaaccccctcttcaccggacaagccctgctggagaatgtgcctgaaatccaagccctggtgcagacactgcagggacccttccacacggcaggtatggcttc

SEQ ID NO: 315169 - DNA, 201 bp, Homo sapiens
ttgtagatggagaaacaaagaggacttatatgactcatagctgctcagtggcagaggtggggtgaaatccagggctacttccattccaaagctgatacccscctcattctgttttctttcccagcctgggaacttagaaaaagttgggcctgcatcatcagtcatgatttcagggtcctacctcatgttactttttgaagt

SEQ ID NO: 315170 - DNA, 201 bp, Homo sapiens
tcgggctcccgccttagcatgctggccgggacatctggtgaacatggcctctgctactgcggcagcagcacgacggggcctcggccgggctctccctctcytctggcgtggctaccagaccgagcggggcgtttacggctaccggccgaggaagcccgagagccgcgagccccagggcgccctggagcgccccccaggtcg

SEQ ID NO: 315171 - DNA, 201 bp, Homo sapiens
agctgccaaaatcaaccccctcttcaccggacaagccctgctggagaatgtgcctgaaatccaagccctggtgcagacactgcagggacccttccacacgkcaggtatggcttctgcacagcaggcgggagctcggagctgcataccaggccaggctcctgcctctgttcttgaagaagcagcatccccactggagctgag

SEQ ID NO: 315172 - DNA, 201 bp, Homo sapiens
ccaagctctctctcagcaggagcactggtgccacccagcacctgtgcccaggggtcagtagggccatgaaaacccgctccagtgtctgaaagcttccgaarcagtacctgctcaccgtaaaaattagaagtaattgaagtaaacgtctaagtcttctccccagaccctgaatcccattttccagggatgcccactcttggg

SEQ ID NO: 315173 - DNA, 201 bp, Homo sapiens
gttatgacgggagtgtggccactgtcaggttaatgtgttactgggacaaaaacccaagctctctctcagcaggagcactggtgccacccagcacctgtgcycaggggtcagtagggccatgaaaacccgctccagtgtctgaaagcttccgaaacagtacctgctcaccgtaaaaattagaagtaattgaagtaaacgtct

SEQ ID NO: 315174 - DNA, 201 bp, Homo sapiens
ttgtgatccgtccgcctcggtctaccaaagtgctgggattacaggcatgagccactgcgcccatccaatttttgtattttttgtagagacagggtctcactctgttgcccaggctggtctcaaacccttgacctcaagaggtcctcctgccccagcctcccaaagtgattacaggtgtgagccacaatggccatccagtaa

SEQ ID NO: 315175 - DNA, 201 bp, Homo sapiens
agcccagtgctctgccgtggccctcacatgcagcgtttccttctcttctctgggattaggtcagcaacagccccctgtcagaagaggccgtcctgggattygaatatgggatgagcattgagagcccaaagttactgcccctgtgggaggcacagtttggcgatttcttcaatggtgcccagatcatctttgacacattca

SEQ ID NO: 315176 - DNA, 201 bp, Homo sapiens
taacaaaacaatgccttcaattaaagggggaaagtgagtttttaaacattggggttaatttagaagaaaatacagtatataataatctcaacatcatgttwaggaacatgattattttttaagatgacccctttgattgtatttcacaggattattgaacatggggaaggaagaggcctcacttgaggaagtgttagtcta

SEQ ID NO: 315177 - DNA, 201 bp, Homo sapiens
aaaattgcagggcacatgatacctctccattcttatgcaatctcatcttaactatagacttttgaatattggacagcatatattaataactatctgttatyctaaggaaaattctcaggattaagccagtatataagaatttacagtcaccacaccttattattaggttatttatgggaatctgactttttttttcttgct

SEQ ID NO: 315178 - DNA, 201 bp, Homo sapiens
cctcgtaggcagccgtgtcaactcttcaagaaatggcaccaggaacaacatttaacccggtcattggtgattcatctgtggatccaaaaaagtaagatatstatctctgttttcatattctgtggcagaattttaattaatgggaaaagtagttcacattaagagatcacaggtgatgcagatatttatttatttatttat

SEQ ID NO: 315179 - DNA, 201 bp, Homo sapiens
agctacttgggaggctgaggcaggggaatggtgtgaacctgggaggcggagcttgcagtgagctgagattgcgccatgcactccagcctgggtgacagagygagactctgtctccagaaaaaagaatgtggtccaatacaaattcataaactttcttaaaacattacttgtgattttttttttttaccttattagccattg

SEQ ID NO: 315180 - DNA, 201 bp, Homo sapiens
gagacagggtttcaccgtgttagccaggatggtcttgatttcctgacctcgtgatccgcccgccttggcctcccaaagtgctgagattacaggcgtgagcyactgcacctggcctcttctgacgtaattcttactttaaaaaatttctcccccaccctattgttccttttctgtccaacagggttaagaccctcgtgttct

SEQ ID NO: 315181 - DNA, 201 bp, Homo sapiens
tcagcctcactgcctataaagatatatagcctggctgacatagagaaaccccatctctactaaaaatacaaaaattagccaggggtgatggtgcacacctrtaatcccagctaatcaggaggctgaggcatgggaatccttggaacctgggaggtggaggctgcagtgagctgagatcgcgccaccgcactccagcctggg

SEQ ID NO: 315182 - DNA, 201 bp, Homo sapiens
tgatggtgcacacctgtaatcccagctaatcaggaggctgaggcatgggaatccttggaacctgggaggtggaggctgcagtgagctgagatcgcgccacygcactccagcctgggtgacagagcgagactctgtctcaaaaaaaaaagatatataactactgaagagagggaattgagccattaactctgagcttaaatc

SEQ ID NO: 315183 - DNA, 201 bp, Homo sapiens
gagtgcagtggcacgatcttggctcactgcaagctccgcctcccgggttcacgccattctcctgccttagcctcccgagtagctgggactacaggtgcccrccagtacgcccggctaattttttgtatttttagtagagacagggtttcaccgtgttagccaggatggtcttgatttcctgacctcgtgatccgcccgcct

SEQ ID NO: 315184 - DNA, 201 bp, Homo sapiens
atagctgatgttccgtaaaatgcgaggcttaagtgaatttccagagaatttctcagccactggagacgtcctgtctcacctgacctcctctgtggacctgkactttggggcgcaccatcccctccatgtgacaatgttgcccaatccctcgcacctggaggccgtcaaccccgtggccgtgggcaaaactcgcggcaggca

SEQ ID NO: 315185 - DNA, 201 bp, Homo sapiens
ggctggagtgcagtggcacgatcttggctcactgcaagctccgcctcccgggttcacgccattctcctgccttagcctcccgagtagctgggactacaggygcccgccagtacgcccggctaattttttgtatttttagtagagacagggtttcaccgtgttagccaggatggtcttgatttcctgacctcgtgatccgcc

SEQ ID NO: 315186 - DNA, 201 bp, Homo sapiens
ctgcctaacatggtgaaaccccgtctctactaaaaatacaaaaaaattagccaggctacttgggaggctgaggcaggagaatggcgtgaacctgggaggcrgagcttgcagtgagccgagattgtgccactgcactccagcctgggcgacagagcaagactccatctcaaaaaaaaaaaaaaaaaaaaagtgatggttcta

SEQ ID NO: 315187 - DNA, 201 bp, Homo sapiens
ggtagtgttttgtgttttgtgtgcatgttgtttttcttttctttctttctttcttttttttttttgagacagagtctcactctgttgcccaggctggagtrcagtggcgcaatctcagctcactgcaagctccgccccccgggttcacgccattctcctgcctcagcctcccaagtagctgggactacaggcgcccgccac

SEQ ID NO: 315188 - DNA, 201 bp, Homo sapiens
tgaggcaggagaatggcgtgaacctgggaggcagagcttgcagtgagccgagattgtgccactgcactccagcctgggcgacagagcaagactccatctcaaaaaaaaaaaaaaaaaaaaagtgatggttctactgcactccagcctgggcaatagagcaagaccctgtctctaaaataaataaataaataaaaagtaagg

SEQ ID NO: 315189 - DNA, 201 bp, Homo sapiens
ttgtttgtgcattcactcatcgaacctttgcaacatcactaagaggtaggagccccattcccgatttatagataagtaggttgagatttgtagctttaccraggtcacacaataagtcccagagttggaacttgccagctggtctccaaagctggggttgttaaccaaaccaatatctacctgtgaggattgggctgtctt

SEQ ID NO: 315190 - DNA, 201 bp, Homo sapiens
tatcttctgtaacctcagaaacatagttttaccctgaagtatacagaactgatattttttggcaaggcattgcgtctattaggacatgggtctccttgcartgctaggctagaactttggtactcgtgtttgatagcggcccttgtaagtgacagcatcacctctttctgttgcttgctgggtgtgtggcctcttctccct

SEQ ID NO: 315191 - DNA, 201 bp, Homo sapiens
ggccaggctcctgcctctgttcttgaagaagcagcatccccactggagctgaggctcccgcaggtgtgaggagacccgaggggcatgttgaagtacggtcmgggaggagcattcttgggattctagaagttctgaggaggcctgttttctcaaggttcaaaaacatttaattggctgggcacaatggctgacacccataat

SEQ ID NO: 315192 - DNA, 201 bp, Homo sapiens
cagcactttgggagcccgaggtgggagagtcatttgagcccaggagtttgagaccaacctgggcaacatagtgagactgtctctacaaaaaaaaaaaaaawaaataactgggcatggtggtgcacgcctatagttccaggcactctggaggtagagatgggaggattgcttgaacctgggaggtcaaggctgcagtgagcc

SEQ ID NO: 315193 - DNA, 201 bp, Homo sapiens
gcctggattccagtccagaagaacacacattctaagggggtttccttggggtgagttattctgccgctcaggttattctcctcagcccctcctactgtccsggatcctaggaaaaccatcccgctgtgtccgtgttatgtctctctccgggatatgtagtaaagtggcattgctgtggccacttggggagtgtggggccat

SEQ ID NO: 315194 - DNA, 201 bp, Homo sapiens
agacgtaatggcatttaaaccctcaatgatcattttagtgtctcttagggttcggggggttacctgggctttgcaaggtggtagttttctctcttttttctttttttttttttgagacgggcctccaaaggcccttttcttgagcctctgcagaaagatttgatttctcagcacctcataaaagcaaacacgttaatgtgg

SEQ ID NO: 315195 - DNA, 201 bp, Homo sapiens
ttagattgttacaggtcagactgatttttgtttcttctctttcttgggcagagctcgaaagagcattccagacacatatgcagagcacctcattgctggcrgactcatgacgcaggaggaggtgtctgaaataaaatcctcctactatgccaagttgaatgatcacttaaataacatggcccactacaggccccctgccct

SEQ ID NO: 315196 - DNA, 201 bp, Homo sapiens
cctggctaatttttgtatttttagtagagatggggttttactgtgttggacaggtggtctggaactcctggcctcatgtgatccacctgccttggcctccygaagtgctgggattacaggcatgagccaccgtgcccggccgggagtattacagtttttacatttatttggatatgactgctgaggtgaaataagacgttt

SEQ ID NO: 315197 - DNA, 201 bp, Homo sapiens
tgaaaccccgtctctactaaaaaaaataacaaaaaaattagctgagtgtggtagcaggcacctgtagtcccagctactcgggaggctgaggcaaaaaaaargagcatctaatagcaaggcgtgaagccgggaagcggagcttgcagtgagccaagatcgtgccactgcactccagcctgggcgacagagcgagactccgtc

SEQ ID NO: 315198 - DNA, 201 bp, Homo sapiens
agaatgtgcctgaaatccaagccctggtgcagacactgcagggacccttccacacggcaggtatggcttctgcacagcaggcgggagctcggagctgcatmccaggccaggctcctgcctctgttcttgaagaagcagcatccccactggagctgaggctcccgcaggtgtgaggagacccgaggggcatgttgaagtacg

SEQ ID NO: 315199 - DNA, 201 bp, Homo sapiens
tggagtgcagtggcgaaatctcagctcactgcaacctctgcctcctgggttcaagtgattctcctgcctcagcctcccgagtagctgggactacaggcacrtgccaccacgcccagctaatttttgtatttttagtagagacagggtttcaccatgttggccagcctggtctcaaactcctgacctcaagtgatcctccca

SEQ ID NO: 315200 - DNA, 201 bp, Homo sapiens
gactccatctcaaaaaaaaaaaaaaaaaaaaagtgatggttctactgcactccagcctgggcaatagagcaagaccctgtctctaaaataaataaataaawaaaaagtaaggtgtctagggctgtaagagcttctttgaaaatctgatttttgtgatttgtagtcatctcctaaactgtttgcatttttaaattttcccct

SEQ ID NO: 315201 - DNA, 201 bp, Homo sapiens
attatgatatggccggccctccctcccttccttccttccttccttttttccttccttccttccttttttccttccttccttcctttttccttccttccttycttccttccttccttccttccttccttccttccttcttctttctctctctttctttcaagatgggttctcaatcttttgtccaggcaggagtgcaatggt

SEQ ID NO: 315202 - DNA, 201 bp, Homo sapiens
cttactccccacgtggtacttttccaggagaggccaagtggctcctacaaagcggcattgtcatcctccttccacatggctacgatggggctgggccagamcactcatcctgtcgaatagagcgtttcctgcaggtaagggtaacgtcttccggagtcaatgaatcattttcctgcttcctagagcttttctacctcctgc

SEQ ID NO: 315203 - DNA, 201 bp, Homo sapiens
tgaggcaggagaatggcgtgaacccgggaggcggagcttgcagtgagccgagatcgcaccactgcactccagcctgggtggcatagcgagactccgtctcaaaaaaaaaaaaaaaaaaaaaaaaaaaagaaaagaaaagaaaaagaaaaattagctggcgttgtggcgcgtgcctgtagtcccagctactcgggaggctga

SEQ ID NO: 315204 - DNA, 201 bp, Homo sapiens
agtctattcacagagttgtgtaatcatcaccactatctaattttagaacattttcattaccctagaaagcaagcccatgcccgttagcagtcactgcccaytccttcctccctccagcccctggacaccactcatcgactgtttgtttctattgatctgcctattttggatgtttcatgtgactagaacggtataacatgt

SEQ ID NO: 315205 - DNA, 201 bp, Homo sapiens
gcctgggtgacagagcgagactctgtctcaaaaaaaaaagatatataactactgaagagagggaattgagccattaactctgagcttaaatccctcattacttcaacacaacagatcatataacacacaccattttattattttatttttcctcagagatccttgttctgagcatatcactttattctaagtagcaaaatg

SEQ ID NO: 315206 - DNA, 201 bp, Homo sapiens
ctgagcatatcactttattctaagtagcaaaatgttggttgccaaaatattgacctattggctctcctcagagtcaaaatacttctcgtgtatgtgtctamtcactctataaaagaccttacttaagacttacttaagaccttacttctgactgggcacagtggctcgcgcctgtcatcccagccctttgggaggcttagg

SEQ ID NO: 315207 - DNA, 201 bp, Homo sapiens
acctcaggtgatccgcccaccttggcctcccaaagtgctaggattacaggcatgagccacggcaccttttttttttttttttttttttttaatagaggcarggcaccagtggggatggtggagtagggggtgcaaagggagtctcgctatgttgcccaggcgggtcttgaactggcctccagcgatcctcctgccttggcc

SEQ ID NO: 315208 - DNA, 201 bp, Homo sapiens
accacctcccttcgataagttcgcaggagcccagtgctctgccgtggccctcacatgcagcgtttccttctcttctctgggattaggtcagcaacagcccmctgtcagaagaggccgtcctgggattcgaatatgggatgagcattgagagcccaaagttactgcccctgtgggaggcacagtttggcgatttcttcaatg

SEQ ID NO: 315209 - DNA, 201 bp, Homo sapiens
gcgtggtggctcactcctgtaatcccagcactttgggaggccgaggcgggcggatcatgaggtcaggagatgaagaccatcctggctaacacggtgaaacyctgtgtctactaaaaatacaaaaaattagccgggcacggtggcaggcacctgtagtcccagctacttgggaggctgaggcaggggaatggtgtgaacctg

SEQ ID NO: 315210 - DNA, 201 bp, Homo sapiens
gatcatctcagcctcccaaagtgctgagattacaggtgtgagccaccacactctgcccgtccttcctttttattccaaaataatattctataaagatgtarcttaaacatatatttttttaaaatttgaaagaaacaaaattaccaaaatgttgtgtacagtaaggaactttttctcatctttattttttcttttgagaca

SEQ ID NO: 315211 - DNA, 201 bp, Homo sapiens
tagacataggacagttatgcctgggaaacaaagggctagtgctggatgtactggaaagatagttttctctaaaaattgcagggcacatgatacctctccaytcttatgcaatctcatcttaactatagacttttgaatattggacagcatatattaataactatctgttatcctaaggaaaattctcaggattaagccagt

SEQ ID NO: 315212 - DNA, 201 bp, Homo sapiens
ttttgtgttttgtgtgcatgttgtttttcttttctttctttctttcttttttttttttgagacagagtctcactctgttgcccaggctggagtgcagtggygcaatctcagctcactgcaagctccgccccccgggttcacgccattctcctgcctcagcctcccaagtagctgggactacaggcgcccgccaccacaccc

SEQ ID NO: 315213 - DNA, 201 bp, Homo sapiens
gcctcccaagtagctgggactacaggcgcccgccaccacacccagctaaattttttttgtatttttagtagagacggggtttcaccatgttagccaggatrgtctcaatctcctgacctcgtgatccgcccacctcggcctcccaaagcgctgggattacaggcattgaggcacggagccctgtccctctaatctcttctg

SEQ ID NO: 315214 - DNA, 201 bp, Homo sapiens
tcaaaaaattaaataaataaataaataattaataaatagagatatcaatacatgtcaccccaagtacttcagcatgcatatcgttaatgattttggcatgygtgcagctaaaatgtataaacagatgatagcttaatagataggtagacagaacaacagatagatggatagttacattaatgatgacatcgagaattttat

SEQ ID NO: 315215 - DNA, 201 bp, Homo sapiens
atgggaatctgactttttttttcttgcttgcttaaggttttaatgttcgtctaagtggccaagatgttggtcgtggaactttcagtcagaggcatgcaatsgtggtttgccaggagacggatgacacctacatccccctgaaccatatggacccaaatcagaaggggtttctagaggtgagatgtttctatagctgttgta

SEQ ID NO: 315216 - DNA, 201 bp, Homo sapiens
caaaaaattaaataaataaataaataattaataaatagagatatcaatacatgtcaccccaagtacttcagcatgcatatcgttaatgattttggcatgtrtgcagctaaaatgtataaacagatgatagcttaatagataggtagacagaacaacagatagatggatagttacattaatgatgacatcgagaattttatt

SEQ ID NO: 315217 - DNA, 201 bp, Homo sapiens
tttttgtatttttagtagagacagggtttcaccgtgttagccaggatggtcttgatttcctgacctcgtgatccgcccgccttggcctcccaaagtgctgrgattacaggcgtgagctactgcacctggcctcttctgacgtaattcttactttaaaaaatttctcccccaccctattgttccttttctgtccaacagggt

SEQ ID NO: 315218 - DNA, 201 bp, Homo sapiens
ccagtacgcccggctaattttttgtatttttagtagagacagggtttcaccgtgttagccaggatggtcttgatttcctgacctcgtgatccgcccgcctyggcctcccaaagtgctgagattacaggcgtgagctactgcacctggcctcttctgacgtaattcttactttaaaaaatttctcccccaccctattgttcc

SEQ ID NO: 315219 - DNA, 201 bp, Homo sapiens
aggtgcccgccagtacgcccggctaattttttgtatttttagtagagacagggtttcaccgtgttagccaggatggtcttgatttcctgacctcgtgatcygcccgccttggcctcccaaagtgctgagattacaggcgtgagctactgcacctggcctcttctgacgtaattcttactttaaaaaatttctcccccaccc

SEQ ID NO: 315220 - DNA, 201 bp, Homo sapiens
aagggagtctcgctatgttgcccaggcgggtcttgaactggcctccagcgatcctcctgccttggcctcccaaagtgttaagattccaaaaggctatcttmtgtaacctcagaaacatagttttaccctgaagtatacagaactgatattttttggcaaggcattgcgtctattaggacatgggtctccttgcagtgctag

SEQ ID NO: 315221 - DNA, 201 bp, Homo sapiens
gctaggctagaactttggtactcgtgtttgatagcggcccttgtaagtgacagcatcacctctttctgttgcttgctgggtgtgtggcctcttctccctcrtaggcagccgtgtcaactcttcaagaaatggcaccaggaacaacatttaacccggtcattggtgattcatctgtggatccaaaaaagtaagatatgtatc

SEQ ID NO: 315222 - DNA, 201 bp, Homo sapiens
ggacatgggtctccttgcagtgctaggctagaactttggtactcgtgtttgatagcggcccttgtaagtgacagcatcacctctttctgttgcttgctggrtgtgtggcctcttctccctcgtaggcagccgtgtcaactcttcaagaaatggcaccaggaacaacatttaacccggtcattggtgattcatctgtggatc

SEQ ID NO: 315223 - DNA, 201 bp, Homo sapiens
ttatttatttatttatttatttatttatttatttttgagactgagtctggctctattgcccaggctggagggcagtggtgcaatctcagctctatgcaacstccgcctcccggattcaagtgattcttgtgcttcagcctcccaagtagctgggattacaggtgcccgccaccacaccctgctaatttttttatttttagt

SEQ ID NO: 315224 - DNA, 201 bp, Homo sapiens
ttcacaaagtggtgcaaccatcacttctgtcaagttccaaaacatttttcctgaatgcctttttattttatttttatttatttttaattttatttatttgktttttgagacggagtttcacttttgttgcctaggctggagtgcagtggtgccatctcggctcactgcaacctctaccacttaggttcaagcaattctcct

SEQ ID NO: 315225 - DNA, 201 bp, Homo sapiens
gagaatgtgcctgaaatccaagccctggtgcagacactgcagggacccttccacacggcaggtatggcttctgcacagcaggcgggagctcggagctgcayaccaggccaggctcctgcctctgttcttgaagaagcagcatccccactggagctgaggctcccgcaggtgtgaggagacccgaggggcatgttgaagtac

SEQ ID NO: 315226 - DNA, 201 bp, Homo sapiens
ggaaagttggcctagcatggtggctcacacctgtaatcccagcactttgggaggccaaggtgggtggatatcttgctcaggagtttgagaccagcctgggyaacatggtgagaccccatttctgctaaaaataaaactaaaaaaattagctgggtgggtggtggtgcgtgcccataatcctcactacttgggaggctgagg

SEQ ID NO: 315227 - DNA, 201 bp, Homo sapiens
ccccccaactttcatcagtgtttggtatgatcattaccattgggcaagccattgtgtatgtcatgacggggatgtatggggaccctgcagaaatgggtgcyggaatctgtctcctgatcatcattcaggtaagaaatcctatattttcctatgcagataacaaaacagtttgattcctttttccttttctaacagttcttt

SEQ ID NO: 315228 - DNA, 201 bp, Homo sapiens
tcaaaattttagcctctgcttatttaaaatttcagtggttgcaaacagattttcaaaatttcttttgttaaccttgcttaaggcattgctgcagaagtcayttatttgactgatttcagcatccgtagggggataaaaaggtagtggattttagatttttcaaatgaaaagactgttgttcattgaatccacctggagcac

SEQ ID NO: 315229 - DNA, 201 bp, Homo sapiens
acactggcagaggtacatcgcacagcgactgcaactgcacgcgttttgctggatgtgtgctgggaacaaacccatcgtgtcgcagtacatgcctagagccrttctggtttgctctcctaggggataaggaatgcgaattcttcaaaacttaatgagcagagatttgtggagtaagcaatactacctcagagagaatagtat

SEQ ID NO: 315230 - DNA, 201 bp, Homo sapiens
attatgcagttgttagctggagccaaaatcattgaagttggagatacaccgaaagatagagctttattcaatggagcccagaaacgtgagcattaatgcarttaaagagcattctccaaatttgagagtgctcgtggtaaagatgttttctctagtcttttcttgtctttggtggtaagcgtgctctcctttccccccaac

SEQ ID NO: 315231 - DNA, 201 bp, Homo sapiens
acatatttgtgttctagttttttattctgtacacattttatagagtatacatatatataatatatataatgcttttttcaaaggatcaacacagcccttaracttatcctttgatggcagtgtacatttccatcttgctattataccagaattcatctgactttttacttccttggaggtatttgggatgttttcagtttc

SEQ ID NO: 315232 - DNA, 201 bp, Homo sapiens
atatcataaagcaaacattggcgaattcttttgacccatattttctgctgtatactggactttcacggttagttgtttgagctttgggacagctttggacratgagtccacaggtcgtgtctgtcttgattttacaggtactgagtttgagggtgcagtcatagctctgttccatttgttggccaccaggacggacaaagt

SEQ ID NO: 315233 - DNA, 201 bp, Homo sapiens
acattcaatctttgtcactatgtgtatagaatgcatttttacattgctgctcgagtacgtatttgagtacatatttgtgttctagttttttattctgtacrcattttatagagtatacatatatataatatatataatgcttttttcaaaggatcaacacagcccttagacttatcctttgatggcagtgtacatttccat

SEQ ID NO: 315234 - DNA, 201 bp, Homo sapiens
aagggcggagtctgcgcggggttgggcggagcctgcgcggggccggtaggatcgcgtcgggagccggtaccgaggcccgagccgcgggagtcgagcgaagrcagcgccgaggccgcggtttccccctgggcctccccagcagcagccatgggcagtgagtagcggcggctggagcggggactctggctgggaacgcaggcc

SEQ ID NO: 315235 - DNA, 201 bp, Homo sapiens
gagggtgggcggcttgagagctgggaggaatggaagtgacttcctcacttctgccggagggtgtctttaaagtggggacatgtgtgaggttgggggcatgraagcatattttcttcctgtcttgattaggttatttgagtgcagggaaggggtcatatgactgaggaggtcacttgaagggctagggactgtttttaatta

SEQ ID NO: 315236 - DNA, 201 bp, Homo sapiens
ggcttttattcccttaattatagaaaccgtttctcatttctgtataatttcttcctccctttggaaaaacccaagtttaattttcacaggacatatgtgamccactctgtagtccgatggtcactgttctgaacagggggtgtggagaattagagttgtttcagagctgctgtgggactctggagaggtcatttctcaagg

SEQ ID NO: 315237 - DNA, 201 bp, Homo sapiens
attggatcagtgtgtttcacccagaaacataggttttgaaaactgtttgcatgccgttgtggaaggtatttctcaccttatttgtttatgtttcattcacrtggttagtgtttttcagctagtgagtttagaaatctacatagcaggtcttgactaaaaattttaaaaaactattagagaatatcagtgtgcatggcacat

SEQ ID NO: 315238 - DNA, 201 bp, Homo sapiens
cgtgatccgcctgcctcggcctcccaaagtgctgggattacaggcgtgagccactgtgcccggccaggtatttttttctgtctgttcaaaagatcaagatsaagctgagaaaaatattttttaataatctcaaataccagtttattaatatatacatagaaggaaatctgactgtctcagactggcatggttgagcattct

SEQ ID NO: 315239 - DNA, 201 bp, Homo sapiens
gatcaattgtattttattgattcttaagatacacatttgtcacattttgatgtctctagaatcaggatgtttttgtacagtaaacagtgccttccacttgyggtctgccaggaggcagtcatggtggtgtcactgcctgtgcgtgtgtcagcctgttcaggtcatgctgaccttagttggctgagtgtgatcttcacagaa

SEQ ID NO: 315240 - DNA, 201 bp, Homo sapiens
gactcctgagtagctgggattacaggtgcctgccaccacacctggctaatttttgcatttttagtagagacggggtttctccatgttgtcccgttggtctygaacttctgacctcaggtgatccacacacctcggcctcccaaagtgtggggactgcaggcgtgagccactgtgccaagcctatagtactttttattcagg

SEQ ID NO: 315241 - DNA, 201 bp, Homo sapiens
cttaaaaactagccgggcacagtgttacgtgcctgtagtcctagctacttgggaggctgagtggggaggattgcttgagcccaggagtttgaaggtacagygagctgtgatcataccactgcatgccagcctggttgacagagtgagaccgtgtctcaaaaataatagaattttaaaagactaatgtcctttattctttgc

SEQ ID NO: 315242 - DNA, 201 bp, Homo sapiens
gtgtctggttcctcagccaaagatgtaagtgtttggtttattttaaaataaaactcttggcaatgcatggtggcgcacatctgtaatcgtagcactttggsaggctgaggccgctggatcgcttcacctcaggagttttgagaccagcctgggcaacatagcgagaccccgtcatgactaaaaaaatacaaataaaaatcg

SEQ ID NO: 315243 - DNA, 201 bp, Homo sapiens
tcgtcttgaacttctgatctaatcatccacccgccttggcctcccaaagtgttgggattacaggcatgagccaccatgcctggtgggatccagattccttyttttgcttgggggcatcctgttgtcccagcatcatttgttgaaaaggcactagtatttttccttaaactttttatttatttagaacacagactgcagagt

SEQ ID NO: 315244 - DNA, 201 bp, Homo sapiens; identical to SEQ ID NO: 65640

SEQ ID NO: 315245 - DNA, 201 bp, Homo sapiens; identical to SEQ ID NO: 65641

SEQ ID NO: 315246 - DNA, 201 bp, Homo sapiens
ggagtgcagtggcgcaatctcggcttactgcaacctctgccttccaggttcaagcgattctcctgcctcagactcctgagtagctgggattacaggtgccygccaccacacctggctaatttttgcatttttagtagagacggggtttctccatgttgtcccgttggtcttgaacttctgacctcaggtgatccacacacc

SEQ ID NO: 315247 - DNA, 201 bp, Homo sapiens
tttttggtctataaggatcttaaagaataaagactataaaggcaagattacattcctagcatgagacaagaacatcagggataatgattttttttttttttggtgagacagtctcgctctgttgcccaagctagagggcaatggcgtgatctcggctcactgcaacctctgcctcctgggtttaagcgattctcctgcctc

SEQ ID NO: 315248 - DNA, 201 bp, Homo sapiens
tggctcactgcaacctgcgcctcccgggttcaagcgattctcctgccccagcctcctgagtagctgggactaccggcatgtaccaccatgcctggctaatktttgtatttttagtagagatggggttttactatgttggccaggctggtctggagctcctgacctcaagtgatcagcctacctcggcctcccaaagtgctg

SEQ ID NO: 315249 - DNA, 201 bp, Homo sapiens
ccacgcctggccaataaatctatctaatgtcttaaacactaaaacatgtttttattttttactattgaggaagtatctgagacgacatcaaaaatcccccktaaggtggactattttctcatatgaaggccaccttttcagcatttatgaaaacaggattgaagggagtgatgtgacagagtggcccaggaagtcttggca

SEQ ID NO: 315250 - DNA, 201 bp, Homo sapiens
ccaaaggttgaattactgaaatggatcctcaaaatcttatgacataaatttgttcatacctactcttcattccacaagagggaacgaaaggttactcattwaaaaatcttaaacattttaatatttaaatctgtccaggaatctcatgtcctgtaagattacatattgtctttcttggctgttgactggttcctggaaatt

SEQ ID NO: 315251 - DNA, 201 bp, Homo sapiens
ccgttaaggaaggacaaaacatcttattcaatcagtgtttgcgcagcaggtactactatatgtcacttcctatgctagatgctggtgataacgttttttttggtctataaggatcttaaagaataaagactataaaggcaagattacattcctagcatgagacaagaacatcagggataatgattttttttttttttggtg

SEQ ID NO: 315252 - DNA, 201 bp, Homo sapiens
tacaggcgtgagccaccacgcctggccaataaatctatctaatgtcttaaacactaaaacatgtttttattttttactattgaggaagtatctgagacgamatcaaaaatcccccgtaaggtggactattttctcatatgaaggccaccttttcagcatttatgaaaacaggattgaagggagtgatgtgacagagtggcc

SEQ ID NO: 315253 - DNA, 201 bp, Homo sapiens
ccaaagcacaaccttttcatgtttataaaaaatagaaatggcatttagggatacattctaggatttggctctgacttctaagttgcactcttaggaagaaggagaggataagcttaggtcagctgcagaggtcattcccatggggagtggctggggaggaactgggctatgtggaaagactgggctgcgcccgtctacgga

SEQ ID NO: 315254 - DNA, 201 bp, Homo sapiens
attacaggcgtgagccaccacgcctggccaataaatctatctaatgtcttaaacactaaaacatgtttttattttttactattgaggaagtatctgagacsacatcaaaaatcccccgtaaggtggactattttctcatatgaaggccaccttttcagcatttatgaaaacaggattgaagggagtgatgtgacagagtgg

SEQ ID NO: 315255 - DNA, 201 bp, Homo sapiens
tccaaagcacaaccttttcatgtttataaaaaatagaaatggcatttagggatacattctaggatttggctctgacttctaagttgcactcttaggaagaaggagaggataagcttaggtcagctgcagaggtcattcccatggggagtggctggggaggaactgggctatgtggaaagactgggctgcgcccgtctacgg

SEQ ID NO: 315256 - DNA, 201 bp, Homo sapiens
agcttcagttagagttccagggttgcacagtacaggtttggatgctgggggcctactcctgtgctgcattttcctgagaaagcttcagcaggagcagacayatcatgtatctgctgtttcctttttaaattgtttttttccttttttttttgttttattttttttgagacggagtctcgctctgtcacccaggctggagtg

SEQ ID NO: 315257 - DNA, 201 bp, Homo sapiens
ggcttggagaccgttggatggagcacattttaaggaagatgggaaacttctgcaggccactaggttcctttcttgtcatatattacgtttttttccccccrattttatatcattataaagaatgctacaatgaaggctatcacaccgttctgtaactttttgatagaatgaatttctagaagttcaactgttgggtcacaa

SEQ ID NO: 315258 - DNA, 201 bp, Homo sapiens
cggggcgacacaaccagaccctgtctcaaaaaaaaaaggaacattgaggaggtgagtgtggggtggaagaaatgaaagaagagggaggagtgatgggaccygatgttgcagatgtatctaagtcagatcatgaagggcttggagaccgttggatggagcacattttaaggaagatgggaaacttctgcaggccactaggtt

SEQ ID NO: 315259 - DNA, 201 bp, Homo sapiens
acttctaacagatactgtcctaagtggttaatacctaaactctgatcccagccttaagaaaactgtaatgatgattaatgttcttggtgcggtaaacttcraggcaggctcgatagagtgacatctgtctcttattctgacatctctgctctgcttcgctgctgtttatttttcctaaaaacactctctcccttccctgaa

SEQ ID NO: 315260 - DNA, 201 bp, Homo sapiens
cttattaccacaggctttcattaaaatttgtttcactcagatggaggttgccagatgtaaaatcagcctcttgttttcctagccgcttgtttgggaacaarcctggggacatttgcaggcaggaagcatgtcctactcacctgggcacagcaggtgcttggtaactggcagatgctactctttgtagcaaactgatctttt

SEQ ID NO: 315261 - DNA, 201 bp, Homo sapiens
gggcaatggcgtgatctcggctcactgcaacctctgcctcctgggtttaagcgattctcctgcctcagcctccccagtagctgggactataggcgcacgcyaccacgcccagctaatttttgtatttttagtagagacggggtttttgccatgttggccaggatggtttcgatctcctgacctcgtgatccacccgcctca

SEQ ID NO: 315262 - DNA, 201 bp, Homo sapiens
ggctatgtggaaagactgggctgcgcccgtctacggatgccttctctcttgatttcaatgattgatagcatgtggctttcagacctaaggaagagttagarctttggagaatcacaatgcctgtgattgaaatcaggatttaaaaaagggttagaggcataggggaaggctaccattacaggaagtagttggatcttaatt

SEQ ID NO: 315263 - DNA, 201 bp, Homo sapiens
aaacaataataataaaataaaaatatttaaggtaaaaattttgaagtaaaagagaaactgaaaaatctagatttgaaaattctttcctcagtaaaagtagmtttaaaaaaatataagcttaattttttagaacatatttctctttttaaatttgtataaatataagtagcacaaatgcagttttgttacatgaatgtatta

SEQ ID NO: 315264 - DNA, 201 bp, Homo sapiens
ctgagcgtaaagaacacccaaataatcaatcccttcccagacggaggaatccatcacttggtgaattttcaagcaataccaacctggagaacattcggcartgtcccctttgtagccagtttcttcttcaagctcccggagagcagctgcttctggggtttcaccatcatctatgagacctgcaagtccaaatcattggtg

SEQ ID NO: 315265 - DNA, 201 bp, Homo sapiens
atgggtgagtccttagaagtacagctgttgggttttatagtaaatgtatgctcaacttataagaaattgtcagctcttttccaagtggttgccccattttktttgtttgtttgtttgtttgtttgagacgtagtctcgctctgttgcccaggctggagtgcagtggcacgatttcggctcaccgcaagctccgcctcccgg

SEQ ID NO: 315266 - DNA, 201 bp, Homo sapiens
ccaaataatcgcagggcaaggcagataaaggcaggcaggatagtgacagtggctcggtgagcatccgccaagggcctcagaccactgttaccataaaaacwtccacccagtgttatgacgtccgatttttttttcccttaagaaggtggaaatatggcttttaatacataggaaaccttcagtttttaaatgcagggcaaa

SEQ ID NO: 315267 - DNA, 201 bp, Homo sapiens
agtttcttaggtgtggtatgtcttacgtagcttatgcttacaaagccaaataatcgcagggcaaggcagataaaggcaggcaggatagtgacagtggctcrgtgagcatccgccaagggcctcagaccactgttaccataaaaacatccacccagtgttatgacgtccgatttttttttcccttaagaaggtggaaatatg

SEQ ID NO: 315268 - DNA, 201 bp, Homo sapiens
ttataactgaaaagtaagatgtcctgtatatactattctgctactttgtttacttaatatcttacatgagctattaatggccatgttattattccattatraggatacgctgtgatttatttgatcattcattcaacaaatacttactgagttcatattgtgtgtcagcctttgtgcaaggtgccgagattagagcagtga

SEQ ID NO: 315269 - DNA, 201 bp, Homo sapiens
gttttctaagatcatttgtataggttcagtgtattcataagaagtccaccctgagatgcctgtaaaagtcaaatgtaattacacttcaaactttaatcctraattattgacagatagatagatagtgaccaacttaagggtaatcatatatgtgactaacatttgggaggaaacaggaaaacagtggtctcaaaacaacaa

SEQ ID NO: 315270 - DNA, 201 bp, Homo sapiens
acatccccatcatcctccagtcggccctggtgtccaacctgtatgttatttcccagatgctgtctgttcgatttagtggcaactttttagtaaatttactrggacagtgggccgtgagtattatgtttatttacattatttatagtttattataatttgcatttcatggttgtatttttaatggaatgaggtcgacattgg

SEQ ID NO: 315271 - DNA, 201 bp, Homo sapiens
taggatgattccttgccccaggggtctgtcctgtgtatttcaggatgttcagcagcactctggcctctactagccatcaccccctgttctgtgaaagggcyatatatgcaaaatgacccgcaaacactgaaggagctgcgaaaccaatgaatgagggagacaaatccagtttgtcagtagagggtgattttacagacagaa

SEQ ID NO: 315272 - DNA, 201 bp, Homo sapiens
cccggccggcattgtcttttcatcccccgcactgttctttgttttccctctctggtctctgttcttttcttaatgtgtctggctcccccacttactctccrtttccttttttagggatttcgcgttgatctgcccattaagtcggcccgttaccgaggacagtacagcagctaccccatcaaactcttctacacctccaac

SEQ ID NO: 315273 - DNA, 201 bp, Homo sapiens
aggcacgagccgccactccctgctaatttttgtatttttagtagagatggggtttcaccatgtcggccaggctggtcttgaactcctagcctcaagtgatrtgcccacgttggactcccaagatactggtgttacaggcctgagccatcgtgcctggccctcacctctcactttaaatgaagagtgtctacagctgccagg

SEQ ID NO: 315274 - DNA, 201 bp, Homo sapiens
agtttggaactctgcaactgtgacagattcatagaaaataagctcctattgttgcccacctgttgttgtacatgatcctctagctatggaatttactaagygaaataaaattagaaaccaattttaataatcctactggttgcaggaaaggagggtataccattaattatgggaggttggcttgctgtttcccacagagcg

SEQ ID NO: 315275 - DNA, 201 bp, Homo sapiens
ttctgatgttgaagttatcacagtttattcattcattcgcttgttagacatttgggttgtatccagattttggctacaacacatcaatttgctatgaacaytcatgtataagtctttctgtggatatttttcatgggtgagtccttagaagtacagctgttgggttttatagtaaatgtatgctcaacttataagaaattg

SEQ ID NO: 315276 - DNA, 201 bp, Homo sapiens
ctacgcgggaggctgaggcaggagaatcgcttgaccctgttaggcggaggttgcagtgagctgaaatcgtgccactgcactctagcttgggcaacaaaagygaaactgcatctcaaaaaataaataaataaaataaaataaaataatgaaaaactcaggctgggtgtggtggctcacgcctgtaatcccaacactttggga

SEQ ID NO: 315277 - DNA, 201 bp, Homo sapiens
ctacaacctctgtggatatagaacacttctgtcatccccgaagttcactgtaacctttctcagtgaatctccacaggcccaggctaccactcatctgcatmctgtgactgtactttgatttgttttttctagagcttcatgtaaatggaatcatacagtagtatattctttagtgtctaacttcataatctttttgagatt

SEQ ID NO: 315278 - DNA, 201 bp, Homo sapiens
aaaaaaaagtcaaccttgtggaggtataatatatatacagtaaagtacacctgtttttaggcatacattttgaagagttttgacaaatttgtacacccacrtgactacaacctctgtggatatagaacacttctgtcatccccgaagttcactgtaacctttctcagtgaatctccacaggcccaggctaccactcatctg

SEQ ID NO: 315279 - DNA, 201 bp, Homo sapiens
ggtaggactgcaggtgtgccccaccatgtctggctaatttttcaattcttttgcagggaaagggtcaagctaaaaccaaatttttgcaatcttgggttgtrctgtgtttaaaaattactaaaatttgatgatagtgtttttttggtttttgttttttggtttttttttgagacagggtctcactctgtcacccaggctgca

SEQ ID NO: 315280 - DNA, 201 bp, Homo sapiens
ttccaaagcacaaccttttcatgtttataaaaaatagaaatggcatttagggatacattctaggatttggctctgacttctaagttgcactcttaggaagaaggagaggataagcttaggtcagctgcagaggtcattcccatggggagtggctggggaggaactgggctatgtggaaagactgggctgcgcccgtctacg

SEQ ID NO: 315281 - DNA, 201 bp, Homo sapiens
taaatagagacggggtctatgttgcccaggctggtctccagctcctaggctcaggtgatgctcctgcctcagcctccctagtaggtaggactgcaggtgtrccccaccatgtctggctaatttttcaattcttttgcagggaaagggtcaagctaaaaccaaatttttgcaatcttgggttgtactgtgtttaaaaattac

SEQ ID NO: 315282 - DNA, 201 bp, Homo sapiens
ggctcaagcgatcctccccgcctcaacctccagagtagcttgggaccacaggtgtgtgccaccacggccagctagctttttttttttttttttttttttttatctgagatggggcctcactttgtcacccaggctggagtgcagtggcaccgtcttggctcactgcaacctcgacctcctgggatcaagcgattctcctgt

SEQ ID NO: 315283 - DNA, 201 bp, Homo sapiens
gggctcaagcgatcctccccgcctcaacctccagagtagcttgggaccacaggtgtgtgccaccacggccagctagctttttttttttttttttttttttttatctgagatggggcctcactttgtcacccaggctggagtgcagtggcaccgtcttggctcactgcaacctcgacctcctgggatcaagcgattctcctg

SEQ ID NO: 315284 - DNA, 201 bp, Homo sapiens
atggatgcgaagtggggcacaatcacagctcaccgcagcctcttgggctcaagcgatcctccccgcctcaacctccagagtagcttgggaccacaggtgtrtgccaccacggccagctagctttttttttttttttttttttttttatctgagatggggcctcactttgtcacccaggctggagtgcagtggcaccgtctt

SEQ ID NO: 315285 - DNA, 201 bp, Homo sapiens
gattttaagtataatcagaggttgattgtaaatgtaatcatattcctattttcagtaatggaagattttgtaatatattacaatttttaaaaatgactcaatattttcacagtgtcttgcatgtaataggtgttcatcgtataactttgaaggagtgaaggtagtagacacaaaagtacattctgaaactacatagaatga

SEQ ID NO: 315286 - DNA, 201 bp, Homo sapiens
agattttaagtataatcagaggttgattgtaaatgtaatcatattcctattttcagtaatggaagattttgtaatatattacaatttttaaaaatgactcaatattttcacagtgtcttgcatgtaataggtgttcatcgtataactttgaaggagtgaaggtagtagacacaaaagtacattctgaaactacatagaatg

SEQ ID NO: 315287 - DNA, 201 bp, Homo sapiens
ctcttcccgagttcaagtgattctcctgcctcagcttcctgagtagctgagatgacaggcacgtgccaccacgcccggctaatttttttttttttttttttgagatggagtcttgctctgtcgccaggctggagtgcaatggcgcaatcccggctaactgcaacctccgcctcctgggttcaagcgattctcctgcctcag

SEQ ID NO: 315288 - DNA, 201 bp, Homo sapiens
tgcccaggctggagtgcagtggcgcgatcttagctcactctaacctcctcttcccgagttcaagtgattctcctgcctcagcttcctgagtagctgagatkacaggcacgtgccaccacgcccggctaatttttttttttttttttttgagatggagtcttgctctgtcgccaggctggagtgcaatggcgcaatcccggc

SEQ ID NO: 315289 - DNA, 201 bp, Homo sapiens
ccttttgccacgtggaagttttgtagttgtatctaatcatatcttccatcttttcctttgtggcttctagattttttgccatgcttagaaagactttcttscccaagatgataagctactcacccatatttccttctagtatttttgtcatttatcctttatgtttaaattttctatacatggaggctgggcacagtggct

SEQ ID NO: 315290 - DNA, 201 bp, Homo sapiens
tcaagcagtaaaggattagcatgatctctcttagaagtttggagaatcgtaccctttctcctgcccattgaaactcagactaaaagcctgtaaatagacargttaggctctgtccaactactgaaatggcagttaaggagaaaaacaacactgtgtaaggtaagcatgcctaaaatggtctcatgtggttactttggtcgc

SEQ ID NO: 315291 - DNA, 201 bp, Homo sapiens
gtttgtgcattggcgccctgtcagtgctggctgacttcctgggggccattggatctggcactggaattctgctagcagtcactattatttaccagtatttygaaatatttgttaaagaacaggccgaagttggtgggatgggtgctttgtttttctaaatgttcaaatatttcattttgtgcgtgtgaaagggaaaacact

SEQ ID NO: 315292 - DNA, 201 bp, Homo sapiens
ggagttcagggaggctttagacccagctatggctgctgcgcctctacctgtcttcgtctctagctgccgtgctgttcctggtctctgctgccgcctaactwggggttctgtctcctaggtacatccccaccgcagctgcgtttggcggtttgtgcattggcgccctgtcagtgctggctgacttcctgggggccattggat

SEQ ID NO: 315293 - DNA, 201 bp, Homo sapiens
ctacttgggaagttgagacggagcagtaacgcttgagtccgggaggtggaggttgcagtgagccaagattgcaccactgcactccagcctgggtgacagascgagatcctgtctcaaaaaaataaaaaaggccaggcgcagtggttcacgcctgtaatcccagcacttcgggaggccgaggtgggcagatcccatgggtag

SEQ ID NO: 315294 - DNA, 201 bp, Homo sapiens
tccataagcgatgtatttactagtgaatgcaccaagtgatgatttgttgtttttatttttattttcactttctggttcttttaattattttttttattaamccttatctatgtgatggaatgtttttctttttattttctttttaataaacagctttaccttgaagatatgcttgtttttgttgaagaacataagaatagt

SEQ ID NO: 315295 - DNA, 201 bp, Homo sapiens
agcgagaccccgtcatgactaaaaaaatacaaataaaaatcggccgggcacggtggtgcaagcccgtggtcccagctacttgggaagttgagacggagcaktaacgcttgagtccgggaggtggaggttgcagtgagccaagattgcaccactgcactccagcctgggtgacagagcgagatcctgtctcaaaaaaataaa

SEQ ID NO: 315296 - DNA, 201 bp, Homo sapiens
cacctcaggagttttgagaccagcctgggcaacatagcgagaccccgtcatgactaaaaaaatacaaataaaaatcggccgggcacggtggtgcaagcccrtggtcccagctacttgggaagttgagacggagcagtaacgcttgagtccgggaggtggaggttgcagtgagccaagattgcaccactgcactccagcctg

SEQ ID NO: 315297 - DNA, 201 bp, Homo sapiens
tgaggcaggagaatcccttgaacccgggaggtggaggttgcagtgaatggagatcatgccactgcacttcagcctgggcgatagagcgaaactccgtctcraaataaacaaacatatatcggtgactgcccatcatttgtagaggcttttttaaaaaagataatatagtcaactttaggcaactacagaaacgtaatcact

SEQ ID NO: 315298 - DNA, 201 bp, Homo sapiens
gaaggtagtagacacaaaagtacattctgaaactacatagaatgactagctgtagatgccttgaacttaaaacactgtcatttctgagaagtttgaagtgwcatgcaaatgtattcctgactaattaggttgaccacttgttctttgtactcctgttctgtaggatgtcagtgggggaggacccgcacgttcttacccagt

SEQ ID NO: 315299 - DNA, 201 bp, Homo sapiens
atttctgtaagatttaagtatatagataaaaatccaattattatatttattaaaagattgctccttataacatagaaaccacataaagtctaggcagcaasttaaagtcttatgtcagtattttagttgattgcattaatattttcatatggaaggatcattcatagggatcttaatgtactgactggatactctcatagc

SEQ ID NO: 315300 - DNA, 201 bp, Homo sapiens
tgtaatcatcgcaactaaaaattggtttctcaccccctatctgtataccccaaaactttatttaatatgagcaaataatgctgttcctatttctgtaagayttaagtatatagataaaaatccaattattatatttattaaaagattgctccttataacatagaaaccacataaagtctaggcagcaagttaaagtcttat

SEQ ID NO: 315301 - DNA, 201 bp, Homo sapiens
gctctctaggaagcactttcacatctcatttgaatgaccttttaagctaaaattgtggttgatttcataaaagtaatttcctattttgtcatcttattccrgtattgtctacaataatgctttctaaaagatgctatttgctggctgggtgcggtggctcactcctgtaatcccaggactttgggaggctgaggtgggtgg

SEQ ID NO: 315302 - DNA, 201 bp, Homo sapiens
aattttttttgttaaaataaagaatacattgagctcaatatattgagcattattatcctttttattttttattattaatttttttttgagatggagtctcrctctgttgcccaagctggatgcaggggcatgatctcggctcaccgcaacctctgcctcctgggttcaagtgattcttcttccttggcctcccaagtagct

SEQ ID NO: 315303 - DNA, 201 bp, Homo sapiens
ccaacctgtatgttatttcccagatgctgtctgttcgatttagtggcaactttttagtaaatttactaggacagtgggccgtgagtattatgtttatttayattatttatagtttattataatttgcatttcatggttgtatttttaatggaatgaggtcgacattggagcatttgctgtattttcagattcacttaccta

SEQ ID NO: 315304 - DNA, 201 bp, Homo sapiens
ttgactttccacttctgagttgtttcacttaagataacctcctccagttcgttccatccaggttgctgcaagggacatggtttcattcttttcatggctcrgaagtatttcattatttatatacagcatatcttctttatccagtcatcaagaagcatctgtgcatgtgtgtctgtatatatgtgtgcgtgtgtgtatatg

SEQ ID NO: 315305 - DNA, 201 bp, Homo sapiens
gaaggcctggtggtctcgtttacaaaaatggccagtgtcatatttgggcttaaaatttcaagaagggcacttcaaatggctttgcatttgcatgtttcagygctagagcgtaggaatagaccctggcgtccactgtgagatgttcttcagctaccagagctgtggaaagcaaagaaaacaacttagatcatgccgttaagg

SEQ ID NO: 315306 - DNA, 201 bp, Homo sapiens
atgtgattgatacttgtttcgcgttagcaatgaatgctttcataattcagatttactttccagaaaatccaaaatattaggttgctgcaaaagtaattgcrgttttcaattacttctcaaaaaccgcagttacttttgcaccaacctaatagtacttgggtaacaaacatctgcccatgacaattagttaatccttctgtc

SEQ ID NO: 315307 - DNA, 201 bp, Homo sapiens
ccccacctcatttttatttgtcccttctcaaagcagccacttagcccacatgggcgaaatcaagtctccagttatttctgccacaactgcttctaaggcckcctccttctcctcctcctcttcctcttcctccttttccttctcctcctcctctcttcccagtgacagcatcatcgtgctgtttgcctgtattggctatgc

SEQ ID NO: 315308 - DNA, 201 bp, Homo sapiens
ctcctgttcccatgccgtgccctgcacacccctccacactgcagcctgttccctctggagttcagggaggctttagacccagctatggctgctgcgcctckacctgtcttcgtctctagctgccgtgctgttcctggtctctgctgccgcctaacttggggttctgtctcctaggtacatccccaccgcagctgcgtttgg

SEQ ID NO: 315309 - DNA, 201 bp, Homo sapiens
gatacactgaagagctatgattggatcagtgtgtttcacccagaaacataggttttgaaaactgtttgcatgccgttgtggaaggtatttctcaccttatytgtttatgtttcattcacgtggttagtgtttttcagctagtgagtttagaaatctacatagcaggtcttgactaaaaattttaaaaaactattagagaat

SEQ ID NO: 315310 - DNA, 201 bp, Homo sapiens
gtggggtttcaccatgttagccaggatggtcttgatctcctgaccttgtgatccgcccgcctcagcctcccaaagtgctgggattacaggtgtgagccacygcgcccagccagtttgttcactttttaattgatttgtaagagctctttgcacatgagagataagaactttttgtcatttgtgtttaatttttttttattc

SEQ ID NO: 315311 - DNA, 201 bp, Homo sapiens
gtgcgatcttggctcactgcaacctccacttctcaggttcaagcgattttcctgcctcagcctcctgaatagctgggattacaggcacaagccaccatgcrccactaatttttttatttttagtagagatggggtttcaccatattggccaggctggtgaattcctgacctcaggtgatccacccaccttggcctcccaaa

SEQ ID NO: 315312 - DNA, 201 bp, Homo sapiens
ggggagcaaggccagcccttaggcctcagcagcagggattggtgaacattttccattctctgtgcgattcagctccacactcccagatttattttattttrttttatttttttaaaccaaatttcgctcttgttgcccaggctggagtgcaatggtgcgatcttggctcactgcaacctccacttctcaggttcaagcgat

SEQ ID NO: 315313 - DNA, 201 bp, Homo sapiens
ggttatttgcatacccagcttagaattttatattgggggttgagagtggaaatgacctaattgagaactcaggtctatttctctatacaaatacccctgtstaccagactggactagaaaagtaactgagctgtagttaactgctgttgagctttaaaaaaattggagtaaacatacttgcatttatattctttgttaatt

SEQ ID NO: 315314 - DNA, 201 bp, Homo sapiens
ctgtgtaaggtaagcatgcctaaaatggtctcatgtggttactttggtcgctcttccagcaggtgatattggataaagtgagtacaaaatgagggtgggcrgcttgagagctgggaggaatggaagtgacttcctcacttctgccggagggtgtctttaaagtggggacatgtgtgaggttgggggcatggaagcatattt

SEQ ID NO: 315315 - DNA, 201 bp, Homo sapiens
tgagctaccgcacccagccagggatgattttatgtgttaaaacagcaaagttggaagtgtatagagccaatcgctatacctcatttatagctggggtaggrctttgcttttctgaaaccagatggtgatgattatgtaggatcttagggattccatcttttctgctgctaggggatacatatgttcccccggcaagttaaa

SEQ ID NO: 315316 - DNA, 201 bp, Homo sapiens
tttcgatctcctgacctcgtgatccacccgcctcagcctcccaaagtgctgggattacaggcgtgagctaccgcacccagccagggatgattttatgtgtkaaaacagcaaagttggaagtgtatagagccaatcgctatacctcatttatagctggggtagggctttgcttttctgaaaccagatggtgatgattatgta

SEQ ID NO: 315317 - DNA, 201 bp, Homo sapiens
caggtgcatatcaccacacccagctaattttttgtattttagtagagatgagatttcaccacgttggccaggatggtctcgatctcctgacctcgtgatcygcccgcctcggcctcccaaagtgttgggattacaggcctgagcccctgtgcccggccggcattgtcttttcatcccccgcactgttctttgttttccctc

SEQ ID NO: 315318 - DNA, 201 bp, Homo sapiens
cattggcgaattcttttgacccatattttctgctgtatactggactttcacggttagttgtttgagctttgggacagctttggacgatgagtccacaggtygtgtctgtcttgattttacaggtactgagtttgagggtgcagtcatagctctgttccatttgttggccaccaggacggacaaagtccgagctttacggga

SEQ ID NO: 315319 - DNA, 201 bp, Homo sapiens
tctgggcaacatagcgagaccccatctctacaaaaaaacttaaaaactagccgggcacagtgttacgtgcctgtagtcctagctacttgggaggctgagtkgggaggattgcttgagcccaggagtttgaaggtacagcgagctgtgatcataccactgcatgccagcctggttgacagagtgagaccgtgtctcaaaaat

SEQ ID NO: 315320 - DNA, 201 bp, Homo sapiens
aggatgattccttgccccaggggtctgtcctgtgtatttcaggatgttcagcagcactctggcctctactagccatcaccccctgttctgtgaaagggccrtatatgcaaaatgacccgcaaacactgaaggagctgcgaaaccaatgaatgagggagacaaatccagtttgtcagtagagggtgattttacagacagaag

SEQ ID NO: 315321 - DNA, 201 bp, Homo sapiens
cctcctccagtgcatgcgatgattcaagatccgcttgttaaaagtgcctttcatatcaggacgttctgcccagagtgcctctggctagatgggccaggatrttccctctaatggcagggagggaagagccgaccgcctgcctgttcctctgtagcttctgacgccaggcgtcaatttgtgaaatcactgcatttccatcat

SEQ ID NO: 315322 - DNA, 201 bp, Homo sapiens
ctgggttggagagtggactctgcagtttagaacactcacagtgtgggagccaaacagctaacaggacacatgaacagattccgcggcgcacgatggcctcrggggctggaatctttttatacaattttgcctgagaccttagcactaagattaagcatacgtcaccgatgggatggcagctttttatatttgctacaagaa

SEQ ID NO: 315323 - DNA, 201 bp, Homo sapiens
caattggttacagatgacaagtactgcatgatagttaattatatacaaaccaggagtagggcaaattaaggatgagtagaatgagaatgagaagaacttgrctctggaagagtgaaaatgacctgccatggcgctcaggttagagacttcttccttgtctctctacttatatcctgttgaagtttggagacggaaactcta

SEQ ID NO: 315324 - DNA, 201 bp, Homo sapiens
gatggggtttcaccctgttggccaggctggcctcaaactcctgacctcaagtagtccgtccccctcggcctcccaaaatgctgggattacaggcgtgagcygccgcacctggcccattcagtaaatatttcttaagactctactttgtgtataacaaattgattgtcagagcttattcataaactatcttataatggtgca

SEQ ID NO: 315325 - DNA, 201 bp, Homo sapiens
tattaatgctgggccactcagagccatgactcaggaacatggcttggggtcaacactgaaaagcagaaatcacagtactgataatgggaattttgtaggargaaacaggcttttggaacttaatgcctttgttaggtttctggatttgcagatctcattgtgtgggcctgctttaggaggaaaagctgggattcataacaa

SEQ ID NO: 315326 - DNA, 201 bp, Homo sapiens
tggctgtgctggagactggggcagaaactatgcaatcaagcctgtctgttcaaatcagaccaagcctggacatgaataatattccccatttgtaaagagcktctctccttgggcatgatctaaataatgcatctttctggcaccctataaaacaccctgcctggcgcagctgctccgttcccaggcagagctggccttgct

SEQ ID NO: 315327 - DNA, 201 bp, Homo sapiens
ctggttcctctgggttggagagtggactctgcagtttagaacactcacagtgtgggagccaaacagctaacaggacacatgaacagattccgcggcgcacratggcctcaggggctggaatctttttatacaattttgcctgagaccttagcactaagattaagcatacgtcaccgatgggatggcagctttttatatttg

SEQ ID NO: 315328 - DNA, 201 bp, Homo sapiens
aagccagcattagagatcatggaccatctgcagttggcctagttgtgttaaaaaataggtgttgcattcactgggtgcctactgagtgcccaggactgttrttatacgagccttgcacctgctatctctaatccttgcaatactgcaggaggtgctcatttttgttttccagatgaaacaaactccaaggcgttagttgaa

SEQ ID NO: 315329 - DNA, 201 bp, Homo sapiens
atttttgttttccagatgaaacaaactccaaggcgttagttgaaggtcttgtggttagtaagtggcagagctggggttggaactcaggtacatctggctcrgccaggtcccttgagctcaaaccaggtccctgagcttttcttctgcaagcaaaatcttcatagtgacctccctgatttatgtctggctcagatggacaat

SEQ ID NO: 315330 - DNA, 201 bp, Homo sapiens
ccagggcttcagacacgctttggcatgaagtgctcttcctggtcaactaaaaatggtctgccctggaacccccatagctgtcacgttcctgcttcctccarcgtaaaatcagtacagttccaaaacagaggtggtgatttagtccatgcctttaactttacagaggagaaaaggaggccctgcatcacccgtccctggctg

SEQ ID NO: 315331 - DNA, 201 bp, Homo sapiens
actctggctggaacttttcaagcaaactggaattattcttctcaaaattaggccattaacttgctctaagtgaaagtttgctgaagttattcagtagacarggaagggaactaactgcccaactctgggtgtttacatctttttgttttcttttctcaattggaaacatttgcagctgaggggcctgtgttttcttctggg

SEQ ID NO: 315332 - DNA, 201 bp, Homo sapiens
ggcatgacttaaaggagctgacagaggagcaaggccgtgattaccatgccgaagtatttcagacctgttccaaggtaagccaagacgacagtcgacagtgyaaacctgcaaatgatcattacattaaatgttgagttcgccttcgaccttacagataagattttatccatgagacccaaacacccagagcaactggaaact

SEQ ID NO: 315333 - DNA, 201 bp, Homo sapiens
actcaatacactcaggccagagcgagtccgcaaataaaggctctgtataaaataccttcgccttggtaactgaatcttctccttatgtaattgtgtatttstatcattttccatgaagaaattttaggacacggaggcacctaaaaaatgcctcgccttgcatttttcatcacaaaactctggctggaacttttcaagcaa

SEQ ID NO: 315334 - DNA, 201 bp, Homo sapiens
cttgaactcgggaggaagaggttgcagtgagccaggatcttgccactgcactccatcctgggcaacagagtgagactctgtcaaaaaaaaaaaaaaaaaaagcaataggcgttaatgtcgtgcctccctctgggtggaaatgaagtaggtgtgtttgtcccgcaggtcatgatgcacatccggaaccaccccgtccccgtc

SEQ ID NO: 315335 - DNA, 201 bp, Homo sapiens
gtcagggctggcggatgacgtggtatttgaggaagcaggtcattgagccgaggcgggactcaggtggcgggggcgggtcacaggagagcacctcagtgacmtcccgtgtctccccgtaggtggccttggagatgctctttactggtgagcccatttctgcccaggaggccctgctccacgggctgcttagcaaggtggtgc

SEQ ID NO: 315336 - DNA, 201 bp, Homo sapiens
ctgtgttgcccaggctggtctcaaactcctggcctcaagtgagcctcccgcctgacactcctgaagcactgggattacaggtgtgagccatcatgcgtgtyctcttcttgaattatcgaaatgtaactgaaccttctctttgtgttgcaggattaaaattattgtgagatgcaggtcatgtagctaagatgctgtattagt

SEQ ID NO: 315337 - DNA, 201 bp, Homo sapiens
ttttccattttaagtttgactttagaggagccaggcttggtagcgtgcaacagaattggttggtgcagcacgcagtggttgtgaagcagaggacacggtgrggagggagggagctgggctcccccgctcttcaccagccctggaacctcaggggagggtagtaggaggggagagggcatcctttccttgccacatcttacc

SEQ ID NO: 315338 - DNA, 201 bp, Homo sapiens
ccctgaggtgacggtgcatgggcgtatttgaggaacatcagggatgccaccaggattgtgagagcctgagtgacgggtggggaagggaagggcccctgcckgtgtgtccttgtgcacctggggacccctcttttccattttaagtttgactttagaggagccaggcttggtagcgtgcaacagaattggttggtgcagcac

SEQ ID NO: 315339 - DNA, 201 bp, Homo sapiens
gaaccgtgtcttcatcctgagttatttctgcagtgttccatcaggcatctgcgggtctttaaaggaaatgtgaaaaggtagcaaagacacatctgtgcagyagagacatgtggcacaggaaagaagtgcagaaatcaaagccagggagaagcctgctagccacctagaaatcaaattgtgtcagggagaaagcctgcgtgg

SEQ ID NO: 315340 - DNA, 201 bp, Homo sapiens
gtgaagagatttttttaggaggtattattaacaggctttgatgccagttgaatcaggaagggatagaaaactagaatgactttttctctcattcaggcaaytgagtggcactgctcagataagaaagagaggagaggggcaggtttgagaatggggggatgcccaaagacacctagatggagaaggccagtagacatcggc

SEQ ID NO: 315341 - DNA, 201 bp, Homo sapiens
taggtctcaccagggttcagagaggtccctctgccccaaagtggtttctactctgtttctactcaccacttggtttgaaaagagatggcgaaaaaatgggrtgtgatgtcattccactgcattcggtggaattggctgtgaaaaaatagaaatgctattttttgtcattaggtcaacagatattgagtgtcttctctgtgt

SEQ ID NO: 315342 - DNA, 201 bp, Homo sapiens
agccgaggcgggactcaggtggcgggggcgggtcacaggagagcacctcagtgacatcccgtgtctccccgtaggtggccttggagatgctctttactggygagcccatttctgcccaggaggccctgctccacgggctgcttagcaaggtggtgccagaggcggagctgcaggaggagaccatgcggatcgctaggaaga

SEQ ID NO: 315343 - DNA, 201 bp, Homo sapiens
gcccaggccagggtctttcttgcccattgctaagtttctgcttctgtaaatctggtcacatctggttggaagcctgacttctgggcatggcggccagatgrcaaaaaggaggccggtcgagttctccagaattaaatatgaatcagcaaaggtggtgactgaaacactctcacatgaatgctagggtttgtttagtaggaa

SEQ ID NO: 315344 - DNA, 201 bp, Homo sapiens
agagaagaaatctgtctccagaaggagggagtgatcgagatggccagtggatttggatctggaaattaggagatggttggtgagaagagcttgggtggggygggaggagctgagcctggttcctctgggttggagagtggactctgcagtttagaacactcacagtgtgggagccaaacagctaacaggacacatgaacag

SEQ ID NO: 315345 - DNA, 201 bp, Homo sapiens
agagggctagtagcccacgaaagaagtcaagaaggaccgaccagagaagtacaaaacaaccaggagagaagaaatctgtctccagaaggagggagtgatcragatggccagtggatttggatctggaaattaggagatggttggtgagaagagcttgggtggggcgggaggagctgagcctggttcctctgggttggagag

SEQ ID NO: 315346 - DNA, 201 bp, Homo sapiens
tctctctgctccagaaggttggcagcctcagctggggattcatctgaaggctgcttgctcacgtgtctggctgtgaatgctacctctcagctgggcccccrcaagggtggttggcggcacactgcacccggcctctccgtgtggcttgggcttcctcacagcatggaggccaggtcccaagagcaagagccagagccagct

SEQ ID NO: 315347 - DNA, 201 bp, Homo sapiens
ctccagaaggttggcagcctcagctggggattcatctgaaggctgcttgctcacgtgtctggctgtgaatgctacctctcagctgggcccccgcaagggtrgttggcggcacactgcacccggcctctccgtgtggcttgggcttcctcacagcatggaggccaggtcccaagagcaagagccagagccagctgcaagctg

SEQ ID NO: 315348 - DNA, 201 bp, Homo sapiens
gtgtggcttgggcttcctcacagcatggaggccaggtcccaagagcaagagccagagccagctgcaagctgtatcacctccttgcccttgtctcaaaggarccaacctgccacttgtgctgtactctattttcctgcctgcctgcctgtcttcctccctctctccttccttccctcataaatatttgataagttgcttgct

SEQ ID NO: 315349 - DNA, 201 bp, Homo sapiens
gaggccaggtcccaagagcaagagccagagccagctgcaagctgtatcacctccttgcccttgtctcaaaggagccaacctgccacttgtgctgtactctrttttcctgcctgcctgcctgtcttcctccctctctccttccttccctcataaatatttgataagttgcttgctatgtgcaggacagtcttccagtgctgg

SEQ ID NO: 315350 - DNA, 201 bp, Homo sapiens
ttcataaactatcttataatggtgcaaatcaactcacaaggcctttgtctaataaaagacagctgtgctgacagctgcttgtcctcttcaacacctgatgygctggaaggttccacagtaaagcacttgaaaccttgaagtcagccctactgtctggataagaacccattctctcttaaacttttgaaatcaaggcttatt

SEQ ID NO: 315351 - DNA, 201 bp, Homo sapiens
actgaagacgtcagggctggcggatgacgtggtatttgaggaagcaggtcattgagccgaggcgggactcaggtggcgggggcgggtcacaggagagcacytcagtgacatcccgtgtctccccgtaggtggccttggagatgctctttactggtgagcccatttctgcccaggaggccctgctccacgggctgcttagca

SEQ ID NO: 315352 - DNA, 201 bp, Homo sapiens; identical to SEQ ID NO: 65662

SEQ ID NO: 315353 - DNA, 201 bp, Homo sapiens; identical to SEQ ID NO: 65651

SEQ ID NO: 315354 - DNA, 201 bp, Homo sapiens
atcatctcgggtatgtatctgatatctgtccttagtattctgcagtgcccagaagagctttctgagtctttagtaaactggggcatccctttatttaactsgagaattgttttgaagctcctttacaagaacattaattatggaaaacacctgtgtagttggtggtttggtcctaacgctattaactgcagaatttataac

SEQ ID NO: 315355 - DNA, 201 bp, Homo sapiens
ttctgcagtgttccatcaggcatctgcgggtctttaaaggaaatgtgaaaaggtagcaaagacacatctgtgcagcagagacatgtggcacaggaaagaastgcagaaatcaaagccagggagaagcctgctagccacctagaaatcaaattgtgtcagggagaaagcctgcgtggaaaatagattagaaaggcactgaac

SEQ ID NO: 315356 - DNA, 201 bp, Homo sapiens; identical to SEQ ID NO: 65654

SEQ ID NO: 315357 - DNA, 201 bp, Homo sapiens
agcttggactccaaaggactcaaccccaaaacatctggggcatttggaattccgtgcagttctgcagctacacactgccggcccaggctgcaagccccccrcctgggatgaatacttgcccatctgctgagccggccaggaaggaacacttactactttggatttactctttcctccttccagctctgactccattcttaa

SEQ ID NO: 315358 - DNA, 201 bp, Homo sapiens
tcaagtgtaaaccaacagtgttcttgttgcggaaaaagtgcatccttgttcttaattggaaatctataaaaaagggggcagaatcttagaccacaccaagyaaagaagctaaattgctttctaatgtatgtgatctgctttagcatcagctgtgaaaatcagcaattgctcacatgcctaagacgcaaaagaaataagatc

SEQ ID NO: 315359 - DNA, 201 bp, Homo sapiens
ggcggaggttgcagtgagccgaggtcgtgccattgctctccagcctgggcaacaacagcaaaactccatctcttaaaaaaaaaaaaaaaaaaaaaaaaaaacacgcagtcccagagagctgccttaccccctttttctccatgtgaggacacagctagaaggccccgtttacgaatcaggaagcaggtcctcaccagtcgc

SEQ ID NO: 315360 - DNA, 201 bp, Homo sapiens
tcaatacactcaggccagagcgagtccgcaaataaaggctctgtataaaataccttcgccttggtaactgaatcttctccttatgtaattgtgtatttctwtcattttccatgaagaaattttaggacacggaggcacctaaaaaatgcctcgccttgcatttttcatcacaaaactctggctggaacttttcaagcaaac

SEQ ID NO: 315361 - DNA, 201 bp, Homo sapiens
cacttgaaccctggaggcggaggttgcagtgagccgaggtcgtgccattgctctccagcctgggcaacaacagcaaaactccatctcttaaaaaaaaaaamaaaaaaaaaaaaaaacacgcagtcccagagagctgccttaccccctttttctccatgtgaggacacagctagaaggccccgtttacgaatcaggaagcag

SEQ ID NO: 315362 - DNA, 201 bp, Homo sapiens
aaaaaaagcaataggcgttaatgtcgtgcctccctctgggtggaaatgaagtaggtgtgtttgtcccgcaggtcatgatgcacatccggaaccaccccgtycccgtcattgccatggtcaatggcctggccacggctgccggctgtcaactggttgccagctgcgacattgccgtggcgagcgacaagtcctcttttgcca

SEQ ID NO: 315363 - DNA, 201 bp, Homo sapiens
ccctctgggtggaaatgaagtaggtgtgtttgtcccgcaggtcatgatgcacatccggaaccaccccgtccccgtcattgccatggtcaatggcctggccrcggctgccggctgtcaactggttgccagctgcgacattgccgtggcgagcgacaagtcctcttttgccactcctggggtgaacgtcgggctcttctgttc

SEQ ID NO: 315364 - DNA, 201 bp, Homo sapiens
gtaatggccgcagggtttggaaaggggatggttcccttccctgtggaccccttgctcatcaactacaggagcacaggccagagcagggcccaggccagggyctttcttgcccattgctaagtttctgcttctgtaaatctggtcacatctggttggaagcctgacttctgggcatggcggccagatgacaaaaaggaggcc

SEQ ID NO: 315365 - DNA, 201 bp, Homo sapiens
ccacacggccagtaggtctcaccagggttcagagaggtccctctgccccaaagtggtttctactctgtttctactcaccacttggtttgaaaagagatggygaaaaaatgggatgtgatgtcattccactgcattcggtggaattggctgtgaaaaaatagaaatgctattttttgtcattaggtcaacagatattgagtg

SEQ ID NO: 315366 - DNA, 201 bp, Homo sapiens; identical to SEQ ID NO: 65652

SEQ ID NO: 315367 - DNA, 201 bp, Homo sapiens
aatgggaacgcaggcctaggacttcagatgagaggggaccctccatccacagcgccatccttcatctgacctccagccccgtcctgactctgtaactactrggcctggtgccaacagggctggtgaaattggtgggaactgcgataatgatacctgcctggacaaccccgaatgttgaaagagacggcataggtacaggaa

SEQ ID NO: 315368 - DNA, 201 bp, Homo sapiens
atgagatagaatagcgtactgacataatgccagtatcaagagcctaggatagtagtgtcgctggctcactcttcatcaacagtctgtcttgttccagaacrgatttagaataggtgatttctggagtgtgttgggtttacaacggttgcatttcaggaacatgaatctcctgtgcgtggtatgttgaatctgcccaagaag

SEQ ID NO: 315369 - DNA, 201 bp, Homo sapiens
ttgactggtgtgtgaccctgtgattgtaaaatgttcttcacaggaacatcgtcttgagcaatcccaagaagaggaacacgttgtcacttgcaatgctgaartctctccaaagtgacattcttcatgacgctgacagcaacgatctgaaagtcattatcatctcgggtatgtatctgatatctgtccttagtattctgcagt

SEQ ID NO: 315370 - DNA, 201 bp, Homo sapiens
cacttggtttgaaaagagatggcgaaaaaatgggatgtgatgtcattccactgcattcggtggaattggctgtgaaaaaatagaaatgctattttttgtcmttaggtcaacagatattgagtgtcttctctgtgtgagaacatgacagtccctcacttcagggaccttctcgtggtttacaataatgatcttcagacagct

SEQ ID NO: 315371 - DNA, 201 bp, Homo sapiens
tggagtgcagtggcgcaatctctgcttactgcaccctctgcctcccaggttcaagtaattctcctgcctcagccttccaagtagctgagattacaggcacktgcccccatgcccagctaatttttgtatttttagtagaggcggggtttcaccatgttggccaggctggtctcgaactcctgacctcaggtgatccaccca

SEQ ID NO: 315372 - DNA, 201 bp, Homo sapiens
ggcatccctttatttaactggagaattgttttgaagctcctttacaagaacattaattatggaaaacacctgtgtagttggtggtttggtcctaacgctawtaactgcagaatttataacaaagatgactgttcagtgaaactatgtcttttcctttttgtcagatactaaaacatttctgtacttggctatactggtctt

SEQ ID NO: 315373 - DNA, 201 bp, Homo sapiens
aagtaggtgtgtttgtcccgcaggtcatgatgcacatccggaaccaccccgtccccgtcattgccatggtcaatggcctggccacggctgccggctgtcarctggttgccagctgcgacattgccgtggcgagcgacaagtcctcttttgccactcctggggtgaacgtcgggctcttctgttctacccctggggttgcct

SEQ ID NO: 315374 - DNA, 201 bp, Homo sapiens
ctaatggcagggagggaagagccgaccgcctgcctgttcctctgtagcttctgacgccaggcgtcaatttgtgaaatcactgcatttccatcatgcgtacyctcagtaccactgggtaggtttgccgattagttttgtttgtcttcctaatggcccatattttgtaatcttatttgaaatgcaattgagactcagttttgt

SEQ ID NO: 315375 - DNA, 201 bp, Homo sapiens
acaagtcctcttttgccactcctggggtgaacgtcgggctcttctgttctacccctggggttgccttggcaagagcagtgcctagaaaggtaatttaactscccccacccacctctgcctcccagccttctccggagttcctcctccagtgcatgcgatgattcaagatccgcttgttaaaagtgcctttcatatcaggac

SEQ ID NO: 315376 - DNA, 201 bp, Homo sapiens
ttaagaaaactgccttcaaggcccttttccacctcaatttttcaaggaagcaccaaataccagcttcagacctttaacccaagagcttcacacaagcacartgaggacagaactgtctgtgaagggtttgatttgttccccagagagaaaaatccacactcttcttcagcacatttgccaggaaggcaggcgggggtctgt

SEQ ID NO: 315377 - DNA, 201 bp, Homo sapiens
cccgcaggtcatgatgcacatccggaaccaccccgtccccgtcattgccatggtcaatggcctggccacggctgccggctgtcaactggttgccagctgcracattgccgtggcgagcgacaagtcctcttttgccactcctggggtgaacgtcgggctcttctgttctacccctggggttgccttggcaagagcagtgcc

SEQ ID NO: 315378 - DNA, 201 bp, Homo sapiens
atctgtgcagcagagacatgtggcacaggaaagaagtgcagaaatcaaagccagggagaagcctgctagccacctagaaatcaaattgtgtcagggagaargcctgcgtggaaaatagattagaaaggcactgaacaagagagaagaaagaaaggcagcccctgcaaaagttaatgagaagcagaggaggccgggagaagc

SEQ ID NO: 315379 - DNA, 201 bp, Homo sapiens
agctgagcctggttcctctgggttggagagtggactctgcagtttagaacactcacagtgtgggagccaaacagctaacaggacacatgaacagattccgyggcgcacgatggcctcaggggctggaatctttttatacaattttgcctgagaccttagcactaagattaagcatacgtcaccgatgggatggcagctttt

SEQ ID NO: 315380 - DNA, 201 bp, Homo sapiens
tctccttatgtaattgtgtatttctatcattttccatgaagaaattttaggacacggaggcacctaaaaaatgcctcgccttgcatttttcatcacaaaaytctggctggaacttttcaagcaaactggaattattcttctcaaaattaggccattaacttgctctaagtgaaagtttgctgaagttattcagtagacaag

SEQ ID NO: 315381 - DNA, 201 bp, Homo sapiens
ccaaaaataagacatttctgtgtataagcagcaagatgacaatacaggttattttattcagcatgtgggctgcctcaaaagagccaacaggccctttggaygccagctttttgtgagaggatatgtccagaagagccctcttgctgtgtggcttgtacttttttccttcatgtatcagcccacttgcagacagcatgaatt

SEQ ID NO: 315382 - DNA, 201 bp, Homo sapiens
ctggccactacttgtagatgaaatgacatggacactgcctttggcatgggggattttgatgagcttgtgtgactcaatacactcaggccagagcgagtccscaaataaaggctctgtataaaataccttcgccttggtaactgaatcttctccttatgtaattgtgtatttctatcattttccatgaagaaattttaggac

SEQ ID NO: 315383 - DNA, 201 bp, Homo sapiens
tggcatgattatagctcattgcagcctcaaacttctgggctcaagtgatctcccacctcagtctcctgagtagctgggactataggtgtgtgccactacactcagctaattttttattttttgtggagatggtgtcttgctatgttgcccaggctggtctcgaactcctagcctcaagcaacattgccaccactgtgcctg

SEQ ID NO: 315384 - DNA, 201 bp, Homo sapiens
ctggggcatccctttatttaactggagaattgttttgaagctcctttacaagaacattaattatggaaaacacctgtgtagttggtggtttggtcctaacrctattaactgcagaatttataacaaagatgactgttcagtgaaactatgtcttttcctttttgtcagatactaaaacatttctgtacttggctatactgg

SEQ ID NO: 315385 - DNA, 201 bp, Homo sapiens
agaccagaaggcttccgaggtctcttcctaccctcaccttcccagttcagccatgacggctggccactacttgtagatgaaatgacatggacactgccttyggcatgggggattttgatgagcttgtgtgactcaatacactcaggccagagcgagtccgcaaataaaggctctgtataaaataccttcgccttggtaact

SEQ ID NO: 315386 - DNA, 201 bp, Homo sapiens
gtagctgggactataggtgtgtgccactacactcagctaattttttattttttgtggagatggtgtcttgctatgttgcccaggctggtctcgaactcctrgcctcaagcaacattgccaccactgtgcctggctaatttttcaggttttattttgcagagacagggtctcactatagcttcttaactacataattacctc

SEQ ID NO: 315387 - DNA, 201 bp, Homo sapiens
tttaatggtgctggaaaagatgacatattctgctaatttgtttgcttgctccaaaaggaatttttacagaattattttttcttgtgatgatgggactggtmtaaataatagtaatattagcattttaaagcatacacaaaaaaatatgatgatgatgctttgtgatgctatgtttgtttggcaaatcaagcatcagtgttt

SEQ ID NO: 315388 - DNA, 201 bp, Homo sapiens
gatgatggacaggacaggtagactgttcaactctaatcccagtcaattggcttttcattagtaacttcagttccttgggtggtgcaacaacactcagaackaaaacaaaatcttttctttctttgcagcaagactttagaagttcttgggatttcttccccttgttattcattccagttcactggtaatgagcactctcac

SEQ ID NO: 315389 - DNA, 201 bp, Homo sapiens
atcaatcaagataactacaacagccaggcatggttgctcatgtctgtaatcccagtactttgggaggccaaggcgggcagatcacttgaggccaagagttygagaccagcctggccaacgtggcaaaaccccatctctactaaaaatacaaaaattagctgggcgtgggggcaggcatctgtaatcccagctacttaggag

SEQ ID NO: 315390 - DNA, 201 bp, Homo sapiens
tcaactctaatcccagtcaattggcttttcattagtaacttcagttccttgggtggtgcaacaacactcagaacgaaaacaaaatcttttctttctttgcmgcaagactttagaagttcttgggatttcttccccttgttattcattccagttcactggtaatgagcactctcactagcccatccccagtctcgccttaca

SEQ ID NO: 315391 - DNA, 201 bp, Homo sapiens
aatcgcagcggtcctcacttgttttgactggtgtgtgaccctgtgattgtaaaatgttcttcacaggaacatcgtcttgagcaatcccaagaagaggaacrcgttgtcacttgcaatgctgaaatctctccaaagtgacattcttcatgacgctgacagcaacgatctgaaagtcattatcatctcgggtatgtatctgat

SEQ ID NO: 315392 - DNA, 201 bp, Homo sapiens
tttacaagaacattaattatggaaaacacctgtgtagttggtggtttggtcctaacgctattaactgcagaatttataacaaagatgactgttcagtgaarctatgtcttttcctttttgtcagatactaaaacatttctgtacttggctatactggtcttcccctcaaaatcagagaactgatttcttcatggaccttat

SEQ ID NO: 315393 - DNA, 201 bp, Homo sapiens
ggccagcctggccaacatggtaaaaccccatctttactaaaaataccaaaaaaaatttagctgggcgtggtagcccgtgcctgtagtcccagctactcagraggctgaggcaggaggatggcttgaactcgggaggaagaggttgcagtgagccaggatcttgccactgcactccatcctgggcaacagagtgagactctg

SEQ ID NO: 315394 - DNA, 201 bp, Homo sapiens
tttcttatctgttaaaaatacctcctaaattagacaggaatcgcagcggtcctcacttgttttgactggtgtgtgaccctgtgattgtaaaatgttcttcmcaggaacatcgtcttgagcaatcccaagaagaggaacacgttgtcacttgcaatgctgaaatctctccaaagtgacattcttcatgacgctgacagcaac

SEQ ID NO: 315395 - DNA, 201 bp, Homo sapiens
ctcctaaattagacaggaatcgcagcggtcctcacttgttttgactggtgtgtgaccctgtgattgtaaaatgttcttcacaggaacatcgtcttgagcartcccaagaagaggaacacgttgtcacttgcaatgctgaaatctctccaaagtgacattcttcatgacgctgacagcaacgatctgaaagtcattatcatc

SEQ ID NO: 315396 - DNA, 201 bp, Homo sapiens
gacacggaggcacctaaaaaatgcctcgccttgcatttttcatcacaaaactctggctggaacttttcaagcaaactggaattattcttctcaaaattagrccattaacttgctctaagtgaaagtttgctgaagttattcagtagacaaggaagggaactaactgcccaactctgggtgtttacatctttttgttttctt

SEQ ID NO: 315397 - DNA, 201 bp, Homo sapiens
aagtcagccctactgtctggataagaacccattctctcttaaacttttgaaatcaaggcttattaaatttgattcctagaaacttaacgctagaccatatktatcaagttttaaattgataaaatttaaagtttttgagaagaaaagggggaaaatatgacaaaaacaggccttaagttccaaggaagcccagtcttcaga

SEQ ID NO: 315398 - DNA, 201 bp, Homo sapiens
ccaaagtgacattcttcatgacgctgacagcaacgatctgaaagtcattatcatctcgggtatgtatctgatatctgtccttagtattctgcagtgcccasaagagctttctgagtctttagtaaactggggcatccctttatttaactggagaattgttttgaagctcctttacaagaacattaattatggaaaacacct

SEQ ID NO: 315399 - DNA, 201 bp, Homo sapiens
gatcatttgaggtcaggaattccaggccagcctggccaacatggtaaaaccccatctttactaaaaataccaaaaaaaatttagctgggcgtggtagcccrtgcctgtagtcccagctactcaggaggctgaggcaggaggatggcttgaactcgggaggaagaggttgcagtgagccaggatcttgccactgcactccat

SEQ ID NO: 315400 - DNA, 201 bp, Homo sapiens
cgttggctgggcgtggtggctcacgcctgtaatctgagcattttgggaggccaaggtgggtggatcatttgaggtcaggaattccaggccagcctggccarcatggtaaaaccccatctttactaaaaataccaaaaaaaatttagctgggcgtggtagcccgtgcctgtagtcccagctactcaggaggctgaggcagga

SEQ ID NO: 315401 - DNA, 201 bp, Homo sapiens
ctgaaaagcagaaatcacagtactgataatgggaattttgtaggaggaaacaggcttttggaacttaatgcctttgttaggtttctggatttgcagatctmattgtgtgggcctgctttaggaggaaaagctgggattcataacaatctaataaacctgacccaaaccacctgcccgttgtctttgctgattgtgcgcatg

SEQ ID NO: 315402 - DNA, 201 bp, Homo sapiens
ctgagtggcactgctcagataagaaagagaggagaggggcaggtttgagaatggggggatgcccaaagacacctagatggagaaggccagtagacatcggsatgaacgcgtgcacctggagctcagctcagaggcagctgttgacatcaaagtcatcggtgaagttgcctgggaagagtgtggaggacagaattcaggatg

SEQ ID NO: 315403 - DNA, 201 bp, Homo sapiens
gcatttcaggtcgcctttttcttgttttgacttggctgtaactccagagagttgacagaccctctaaattggcactaagccccagcagttctcctttcttrtctgttaaaaatacctcctaaattagacaggaatcgcagcggtcctcacttgttttgactggtgtgtgaccctgtgattgtaaaatgttcttcacaggaa

SEQ ID NO: 315404 - DNA, 201 bp, Homo sapiens
aagggatagaaaactagaatgactttttctctcattcaggcaactgagtggcactgctcagataagaaagagaggagaggggcaggtttgagaatgggggratgcccaaagacacctagatggagaaggccagtagacatcggcatgaacgcgtgcacctggagctcagctcagaggcagctgttgacatcaaagtcatcg

SEQ ID NO: 315405 - DNA, 201 bp, Homo sapiens
tgatgccagttgaatcaggaagggatagaaaactagaatgactttttctctcattcaggcaactgagtggcactgctcagataagaaagagaggagagggscaggtttgagaatggggggatgcccaaagacacctagatggagaaggccagtagacatcggcatgaacgcgtgcacctggagctcagctcagaggcagct

SEQ ID NO: 315406 - DNA, 201 bp, Homo sapiens
gggcttattaatgctgggccactcagagccatgactcaggaacatggcttggggtcaacactgaaaagcagaaatcacagtactgataatgggaattttgyaggaggaaacaggcttttggaacttaatgcctttgttaggtttctggatttgcagatctcattgtgtgggcctgctttaggaggaaaagctgggattcat

SEQ ID NO: 315407 - DNA, 201 bp, Homo sapiens
atacgagccttgcacctgctatctctaatccttgcaatactgcaggaggtgctcatttttgttttccagatgaaacaaactccaaggcgttagttgaaggycttgtggttagtaagtggcagagctggggttggaactcaggtacatctggctcagccaggtcccttgagctcaaaccaggtccctgagcttttcttctgc

SEQ ID NO: 315408 - DNA, 201 bp, Homo sapiens; identical to SEQ ID NO: 65658

SEQ ID NO: 315409 - DNA, 201 bp, Homo sapiens
tgttgatgacagcagtgatagcagccacatcttatgatccctcatctgtaaaatgaagaccagaaggcttccgaggtctcttcctaccctcaccttcccasttcagccatgacggctggccactacttgtagatgaaatgacatggacactgcctttggcatgggggattttgatgagcttgtgtgactcaatacactcag

SEQ ID NO: 315410 - DNA, 201 bp, Homo sapiens
actccagagagttgacagaccctctaaattggcactaagccccagcagttctcctttcttatctgttaaaaatacctcctaaattagacaggaatcgcagsggtcctcacttgttttgactggtgtgtgaccctgtgattgtaaaatgttcttcacaggaacatcgtcttgagcaatcccaagaagaggaacacgttgtca

SEQ ID NO: 315411 - DNA, 201 bp, Homo sapiens
aaccccatctctactaaaaatatgaaattagccaagtgtggtggcgggcacctgtagtcccagctactcgggaggctgaagcaggagaattgcttgaaccsgggaggtggaggttgcagtgagccgagatctatagagggagttattttcattctgggctcgttttctaacttttttctaaggaacaatggaaagaaagca

SEQ ID NO: 315412 - DNA, 201 bp, Homo sapiens
ggggttgccttggcaagagcagtgcctagaaaggtaatttaactgcccccacccacctctgcctcccagccttctccggagttcctcctccagtgcatgcratgattcaagatccgcttgttaaaagtgcctttcatatcaggacgttctgcccagagtgcctctggctagatgggccaggatgttccctctaatggcagg

SEQ ID NO: 315413 - DNA, 201 bp, Homo sapiens
tggcccattcagtaaatatttcttaagactctactttgtgtataacaaattgattgtcagagcttattcataaactatcttataatggtgcaaatcaactyacaaggcctttgtctaataaaagacagctgtgctgacagctgcttgtcctcttcaacacctgatgtgctggaaggttccacagtaaagcacttgaaacct

SEQ ID NO: 315414 - DNA, 201 bp, Homo sapiens
gttcaattctgagacctcctagtttcaaaaaatacattaaacaattcccaagagtgttaagagtgtctgggtgcttagaaattcttgctttgattcatgtrttctgatttttttttttttttgagacggagtttcgctcttgttgcccaggctggagtgcagtggctcgatctcagctcaccgcaacctctgcctcccagg

SEQ ID NO: 315415 - DNA, 201 bp, Homo sapiens
gtcaggattacaggcatgagccaccatgcctggcctggccttttatgttttaagttgcttccactgattctcttgggctttgctcccctccagaactggcyatggtttaggatgctgtccacctgctgctgcttgtccatgaaaacgagccataaacccttttcttttgaaagacttaattgtttatcactatggagaaag

SEQ ID NO: 315416 - DNA, 201 bp, Homo sapiens
gtccagatggggagaggagaccagaaagcatgtgaaaatggactagaaccatgggacagctatatagtctctcgcagctgtcttttgtgttctctgcttcsaccaaattggttgatttatttagaatgctgacctcttgcattgcctaagtccttgatgtttttggtttctcctctgaactctcaaaggtactcacttcat

SEQ ID NO: 315417 - DNA, 201 bp, Homo sapiens
tgaaccagataagtttaaattatattcagaatgtctgcttgtgaaacagaatccccgcttcatgaagcttggggttagaaaaaaatgctcttgtcataccraaaagtaccagtagagggtagcaaaaactgacatttctccatatcttggtgactcaatatgataacaacttctgataactcaatataataacaacttctt

SEQ ID NO: 315418 - DNA, 201 bp, Homo sapiens
aatccttagttatttacctatgaaacttgaattaaaattaaagtttggtgagcacagttgcattgcaagtgagtgattctttcattttgttaatgtcaccrtgcttgcacataaaaagttttctggttgtccacactggagtgtgaccatacaatctcggctcactacaacctgtgcctcctcggctcaagtgatccttct

SEQ ID NO: 315419 - DNA, 201 bp, Homo sapiens
aaggctttgagtttgtttcactattcttaagattacacgtaattgtttttttgtaagagattatatatattcaagttgaggatggctttgagttagacttyccttaatttggaatcacacagcagatgatacatttatttccatctgataagttacttgatgatgtaaaaagacatttgagttaaagatttttgggaaaaa

SEQ ID NO: 315420 - DNA, 201 bp, Homo sapiens
ctcagcctccagaatagctgggactacatatgtgtgccaccacgctgggctaatttttgtatttttagtagagatggggtttctccatgttggccaggctrgtcttgaactcctgacctcaagagatccacccgcctcagcctcccagagtgctgggattacagatatgagccaccgtgcccagcccacaatgtttaaaaa

SEQ ID NO: 315421 - DNA, 201 bp, Homo sapiens
gcctcctggtttcaagagattcttctgcctcagcttcctgagtagctgggattacaggtgcccaccaccacacccagctaattttttttttttttttttgkatttttagtagagactcggtttcatcatgttggccagactggtctcaaactcctcacctcagttgatccacccaccttggcctcccaaagtgctgggatt

SEQ ID NO: 315422 - DNA, 201 bp, Homo sapiens
gaactcctggcctcaggtggtccgcccacttcggcctcccaaagtgctgggattacaggcttgagccactgcacccagccaatatcatataatttcatatraatagttctttgtgtatctttagataaggacttaaaagaaggcataatcgtaacaccattattaatacctaaaagaagtgagcaataaataattcatttg

SEQ ID NO: 315423 - DNA, 201 bp, Homo sapiens
agcatacaatttactatcttaaccatttaagcctgcagttcagtggcattaaatacattcacgttactgtgcaattatcaccaccatctgtttgcagaaayttttcatctcctccatttgaaactctgtatacattaaacatgaactctcccttctccccttcctccagccctggcagccaccgttctacatttttatctt

SEQ ID NO: 315424 - DNA, 201 bp, Homo sapiens
gatattggatttcatcctaaagtcttcaaaataaaactcttgagctcatcatctcagacttcttcatgtacccacagaccagggattttgtttgctttttwaaacatttttttattttgtgttttattatttttaaattttaatttaattttatggagacagggtctcgctctgttgcccaggctggagtgcagtggtgtg

SEQ ID NO: 315425 - DNA, 201 bp, Homo sapiens
tgggaggatcgcttgagaccaagaggcagaggttgcagtgagctaagttcatgccactgcactccagcctgggtgacagagcgagacctcgtctgaaaaattttttttttttttactaatatgacaaacatcttttcatttcaaatatatttctataccatttttaatatctcattgcctttagaatgaccttgtattcat

SEQ ID NO: 315426 - DNA, 201 bp, Homo sapiens
gggttttgcgtgttggccagatggtctccaactcctggcctcaggcgatctgcctgcctcagcctcccaaagtgctgggattacaggcgtgagccactgcrcctggccagagaatgaattcttaataagtttcttatgacttcagattgactggcagttgtgctaaatattttttgcctttatttgaattagaaaattcgt

SEQ ID NO: 315427 - DNA, 201 bp, Homo sapiens
ttttgaggaactgccaaattattttttaaagtggctgtgacattttatattctaccagcagtgaatgaaatttccaatttctccacatacttgacagcacttttttttttttttttttttgaggtgaagtcttgctttattgcccaggctggagtgcagtagcatgatcttggctcactgcaacctccacctcccgggttc

SEQ ID NO: 315428 - DNA, 201 bp, Homo sapiens
aacaagcatggtagcagcagcgttaaagaaatggcagtatggcccctgtaagggaaggctccagaagatgagccgcactcagcctctaggtcacagctacyttaggagtttgcagttgttcctggggaagtcagtagacaaagctatctctcaggcctgggcaagatagggattttttttttttctttgagatggagtctc

SEQ ID NO: 315429 - DNA, 201 bp, Homo sapiens
taaaaactatgtaacaagcatggtagcagcagcgttaaagaaatggcagtatggcccctgtaagggaaggctccagaagatgagccgcactcagcctctargtcacagctaccttaggagtttgcagttgttcctggggaagtcagtagacaaagctatctctcaggcctgggcaagatagggattttttttttttctttg

SEQ ID NO: 315430 - DNA, 201 bp, Homo sapiens
aagccatcgtgggcctctggccgtgggttggatgagcttgttctaaatgctagacccttatcagatggatggtttgtagatatttatcgcatgctgtgggttttttttttttactttcttttaggtttttttttttcttaaataattaaactgattaaaagctttaatcttttcattttcttgataatgtcttttaaagca

SEQ ID NO: 315431 - DNA, 201 bp, Homo sapiens
cagtcctcatggcccaataatctttatgtctgtatagatttgcctattctgcatattttatataaatggaatcatgtcttttgtgtctggcttcttttacytagcatagtattttcaaggttcatccatgttgcagcatgtttcaatactttgttcctttttatgtccattgtatggatatgccacatttcgttaatgaca

SEQ ID NO: 315432 - DNA, 201 bp, Homo sapiens
cacaggtaccacacctccatattaaaccaacaatggattgaaaatattcagaaaaaactataaaaataacaatgtaccaataaaaacaatacaaattattktaaaaatacagtataacaactatttaggtagcatttacatcatacttggtattataggtattataagtaatctaaagatgatgtaaagtacatgggagga

SEQ ID NO: 315433 - DNA, 201 bp, Homo sapiens
agactggagtatgcatagttcttggtaaacaaggggattcctgaaaccaatcccctgagtatatggagggttgactatatattttaatagaatttattacttttttttttttttttagcagttttaggtttatggaaaaattgagcaggagtacatagtttctctatctccctcacatttccccattactagcatcttgaa

SEQ ID NO: 315434 - DNA, 201 bp, Homo sapiens
cctacatatttgtcgctttgtttctggcttttttttcttcttgtgatgctttgttttaattatgttcctggctttcatcatctagcaggctgattccaagktttgtccatgtggtagcttgtatcactttaatgtttttagagatagttaatattacattgtttatatataccacattttgttttttcattcaaccttgat

SEQ ID NO: 315435 - DNA, 201 bp, Homo sapiens
tttgtttctccatttatccatcactggacatttgggttgcttttacctatcggctgtcttgaatcatgttgctatagctgtacaagtatctatttgagttyctgctatcaattctttaagtatatgcccagaagtggaattgctggatcatatggtaattccgtgtctggttttttttttgaggaagtgccatgctgtttt

SEQ ID NO: 315436 - DNA, 201 bp, Homo sapiens
gactggagtatgcatagttcttggtaaacaaggggattcctgaaaccaatcccctgagtatatggagggttgactatatattttaatagaatttattacttttttttttttttttagcagttttaggtttatggaaaaattgagcaggagtacatagtttctctatctccctcacatttccccattactagcatcttgaaa

SEQ ID NO: 315437 - DNA, 201 bp, Homo sapiens
gagattttactactctaggtacctcacataagtgaaatcaaccagtatttatccttttgtgaccagcttatttcattagcttaatgtcctcaaggttcatmcatgttgtagcatatgtcaacatgactttccttttaaggttgaataatattccattgtatgtatatgtcacaatttgtttctccatttatccatcactgg

SEQ ID NO: 315438 - DNA, 201 bp, Homo sapiens
caagtgattctcctgcctcagtctcctgagtagctagaattacaggcatgcaccaccatgcctggctaatttttgtatttttagtagagatggggtttcaytatgtgggccaggctggtcttgaacttctgatctcaggtgatccacctgtcttgtcctcccaatgtgctgggattacaggcgtgagtcactgtgcctggc

SEQ ID NO: 315439 - DNA, 201 bp, Homo sapiens
ctggggtgcagtggtgtgatcttggctcactgcaacctctggctcagcctcttggagtacctgggactataggcacacaacatcatatccagctattgtatttttttttttttttttttttatagagacagagtttcaccatgttgtccaggctggtcttgaactcctgagctcaagcaactcacctgcctcggccttcca

SEQ ID NO: 315440 - DNA, 201 bp, Homo sapiens
tgtttgagaacactctgcttttctgcaatactgatgtctttgtggtcgttttctgtttctgcagcatggatcagcaaggctctttcgttcttccagcaaakgcttccaaggtacaactcaaacaagccatggttccttgatgacaaacaaacaacatcaaggcaaatccaataatcagtattaccatggcaaaaagaggaa

SEQ ID NO: 315441 - DNA, 201 bp, Homo sapiens
cccaaatgtttaaatttagtccagagagtactttaaccaaaattgtttttctttctgaatattgagtatctaaattactaatatgtcacattataactcaygtgacttgtgttaggattccgatgcaacaccatgcaaaaccccgaaacagctgctttgccgtccgtccactgggaaccgagtagggtcgcaagatgtatc

SEQ ID NO: 315442 - DNA, 201 bp, Homo sapiens
ttcttttactgaagtgaaagttgatatcagctttaatgtacagaatggcgtgagagcagctgacctcatcaaagattttaccaaggtcagagaatttagcrtttatacaacaaaactattagaaacgtaattttaagattctgttgtggtggtgttctaatatttttatatgcatgttgctgtctctctctctctctctct

SEQ ID NO: 315443 - DNA, 201 bp, Homo sapiens
actacacagttgattccatctgtttttaaccttcaggagttcagattaagaacctttcctttaacccatttcccatatgccccaagaatactgtgcgggcrgtgagctgcactttttttttttcttttttcgaggcagagtctctctctgtcacccgggctggagtgcagtggcacgatcttggttcactgccacctccgc

SEQ ID NO: 315444 - DNA, 201 bp, Homo sapiens
cagcaagtgttttgcacaggaaatttctcattatttaattattttgggttttttgattaaattctgtacattcccattttagcttatcttgagttataacwttaaaattaaggtagtcatcagctgaattataagacttaattagataagattatttaagatagtgatttctcattagattggccctgttcatattaactt

SEQ ID NO: 315445 - DNA, 201 bp, Homo sapiens
tcttgttctctctttataatcaattgaaagtagtagtaaggctgggtggcaaaagaaagaggcctggggagaatcgcgtggttttcattatctcttttcayagcagcaaagtgggaagggaccaagaggaaatcaactgaaaaaccatccttctgaaacattggcctaaaaaactgtagtccagaaattgagtgcaactgg

SEQ ID NO: 315446 - DNA, 201 bp, Homo sapiens
tagcatttccaagtctacgcgtaaacctgtggtttagtgacaagcaaattgatgttgagggtttctggtagtttcatttcacaggagtaagctccagttargtaatcactgtcaacgaaaaccttgaagttccttaattgcattttactgaagcctctttgcatgtgtctagcaaaagatataagtccaagatgcttattt

SEQ ID NO: 315447 - DNA, 201 bp, Homo sapiens
tcactgatttttctctattaattttgttttcaatttaattgatttctgctctaattggttttcttctgctcactttggatttaattttttttagtttttcyagaaaactaagtttttaagtgaaaactgagattattgatttttagatcttttttctaatgtttacagttaacactgtacaatttcctgtaagcactgctt

SEQ ID NO: 315448 - DNA, 201 bp, Homo sapiens
ggctgctaaagctgaaggtcaagtggggacttcccggccactgggcttagcaccccacagagctgtggagtgggcattaatgtcccttttttatagatgcrgagactgagaatgaggactgttggtaacttttgaaagggcactcagctagaaaagtctgagccaggatttcaagtcccatggctttacctctgtgttcct

SEQ ID NO: 315449 - DNA, 201 bp, Homo sapiens
atgcagagactgagaatgaggactgttggtaacttttgaaagggcactcagctagaaaagtctgagccaggatttcaagtcccatggctttacctctgtgktcctaatatttggtgtgttcaagtgagatctgtttttttcctatttcattttgattattgattttcataaatttttttctcttttgagatagtatcttct

SEQ ID NO: 315450 - DNA, 201 bp, Homo sapiens
ctgttgttcagtttcagtcttctcaaatgagacctcttgtgacgcacagccttggaggctctcttttgggaaatgataatgtttctccaaagggtgaatasttgctctctaagaattgaaattgtttgaacattccatcatggttattattattattaccttaaattttaatctctccagaataaagtcagcatcatgttt

SEQ ID NO: 315451 - DNA, 201 bp, Homo sapiens
aatagaggagagagagggctttttgtctttctactttggaactggagagcttcctatttaggcatggcctttttcaagtgaccttgtattgttatcagtaytgtagaaggtaggcacgttgtgtaaactttaaaattgaaagccattaggcattccacttgtaaaccttggctttttaaagaaaattacatgttcattgtg

SEQ ID NO: 315452 - DNA, 201 bp, Homo sapiens
ggagcccccaggaggctctgaagtcattctgcctctgggaattttacagaggagctaatatttgagctgagtgagaaggtgattcttgaaaaagcaaggcrtgccctggtccagttctgtggggctgtcgtagaagagggctcggaagctcttgggagtgaggctagaaaggtaggcagtgttaccataaggaggttggaa

SEQ ID NO: 315453 - DNA, 201 bp, Homo sapiens
ggccttgagagtagatgcagtcacatttaggagatttttcccccccattggttaaaatgcagtttttctatggatctgctttagaactacaaataaactcygatcactcacagcagactacgcaatgagataagaagcagtccatttgttctgtcgtttattcatggccctcatctttgccagccaacctgtgcagaagag

SEQ ID NO: 315454 - DNA, 201 bp, Homo sapiens
tccataggtcttaaagatcttatactgtattcaggaataaagataacttcagtgggaggcctttacagggctaatgagtaagcattattttgataaagttctgtgttgtctacaatagatatagtagaaatactcttggaatggtaatcatcccaggccctgctttggagcggaagaaatagtcaatgtagaactttacag

SEQ ID NO: 315455 - DNA, 201 bp, Homo sapiens
caggcagagcttgttctgctccccaccctcccttttcccatagtaaccatttataggacatctcactgttgtctactctgtgttgcctctgcttccctgcstggtagatctaggaatcttaggatttcttagttttagctggtgatccgtatctttttcttaattccattgtaacttcagcttttcttattgcttgtagga

SEQ ID NO: 315456 - DNA, 201 bp, Homo sapiens
ttgcctaggctgggctcaagcaatccttctgcctcagcctccggagtagctgggattataggtgtgcagcaccacacccggctttcttgtatttttttttwatttttatttatttatttatttttgagatggagtttcactcttgtcacccaggctggagtgcaatggcccaatctcgactcaccgcaacctctgcctccc

SEQ ID NO: 315457 - DNA, 201 bp, Homo sapiens
ggaggttgcagtgagccgagattgtgccactgcactccagcctgggcgacagagcgagactccatcgtgcggggtggggggtaaaagtcaaacttgagtcttttgcctgtggatatccagttttcccatcactatttgttgaaaagactatcctttctcaactgtgaatggtcttggtaccctagctgaagttatttttat

SEQ ID NO: 315458 - DNA, 201 bp, Homo sapiens; identical to SEQ ID NO: 65677

SEQ ID NO: 315459 - DNA, 201 bp, Homo sapiens
ataaatttttttctcttttgagatagtatcttctctctcttttcttttttctgttctttctttctcttttctttcttttttttttttttctctgagacggrgtcttgctctgtcgcccaggctggagtgcaatggtgcaatctcagttcactgcaacctctgcctctcgggttcaagcgattctcccatctcagcctcctg

SEQ ID NO: 315460 - DNA, 201 bp, Homo sapiens
acccctccacccccacccgctcctttcccccacagtagctggaactacaggcgctagccaccgtgcttggctaatttttttttttttttttttttgagacrgagtctcgctctgtcacccaggctggagtgcagtggcgcgatctcggctcactgcaagctctgcctcccaggttcacatcattctcctgcctcagcctcc

SEQ ID NO: 315461 - DNA, 201 bp, Homo sapiens
tttgtagagatggggcctccatttgttgcctaggctggtcttcaaccggcctcaagcagtcctcccaccttggcctcacagagtgctgggattataggcaygagccaccattctcgccagtatccttatttcttaactttagaaagtttttctatttttaatataggtatttaaaaaaatctgaattcagagtgcacctcg

SEQ ID NO: 315462 - DNA, 201 bp, Homo sapiens
ccttccttgtagagacagaagagatggaattctactacacagttgattccatctgtttttaaccttcaggagttcagattaagaacctttcctttaacccrtttcccatatgccccaagaatactgtgcgggcagtgagctgcactttttttttttcttttttcgaggcagagtctctctctgtcacccgggctggagtgc

SEQ ID NO: 315463 - DNA, 201 bp, Homo sapiens
agtctcgctctgtcacccaggctggagtgcagtggcgcgatctcggctcactgcaagctctgcctcccaggttcacatcattctcctgcctcagcctcccragtagctgggactacaggcgcccgccaccatgcccggctaattttttgtattttttagtagagacggggtttcaccgtgttagccaggatggtctcgatc

SEQ ID NO: 315464 - DNA, 201 bp, Homo sapiens
cccgccaccatgcccggctaattttttgtattttttagtagagacggggtttcaccgtgttagccaggatggtctcgatctcctgaccttgtgatccgccygcctcggcctcccaaagtgctgggattacaggcatgagccactgcacccggcctggctaatttttaaatttttttttgtagactgcccaggcttgtttaa

SEQ ID NO: 315465 - DNA, 201 bp, Homo sapiens
cctcagtcagcatcccacagctgggaccacaggcgcatgccaccatgcctggctaatttttttttttttttttttttgtattttagtatagacagagtctyaccttattgcccaggctggtctcaaactcctgagctgaagcaatccgcccatctcagcttcccaaagtgctggaattagaggcatgagccactgtgcctg

SEQ ID NO: 315466 - DNA, 201 bp, Homo sapiens
tgaggcagggggattgcttgagcccaggaagtaaaggctgcagtgagctatggttgtgccactgcattccagtgtgggtaacagaacgaaaccctgtctcaaaaaaaaaaaaatagtacaactttaagcaggatgtgggcacatgcctgtagtctcagctacttgggaggctaagtcaggagagtcacttgagcccaggag

SEQ ID NO: 315467 - DNA, 201 bp, Homo sapiens
cgcacctgtaatttcagctgctggggaggctgagacatgagaatcacttggaccctggaggcagaggttggagtgagccactgtattccagcctgggtgamagagggatactctatttaaaaaaaaaaaaaaaaaaagcgggctggatacagtggtgcacacctgtaaccctagcactttgggaggctgaggtgctcagat

SEQ ID NO: 315468 - DNA, 201 bp, Homo sapiens
ctgtcaccttacttaaagggtgtgcccttatctcgtcctgggggaggggcacaggtacttgtagggctcagccaggattttagtggtggggatcctcaacragagtggcgcgccagggcccactaggtctgggggctctggagatgcaaggatctgacccacagcctgtcccgcaggagctggagcggcagcatgcccaca

SEQ ID NO: 315469 - DNA, 201 bp, Homo sapiens
tggcaaggctagcagcctccactcacctggtagctcaggaggactgtggaatgcccagcctcacccagaagctgcttttcacaggatctgaggtgaatcaygtgcacattaaacttttacgttttgtttgtttgtttttgtgagatggagtctcattctgtcatgaaggctggagtgcagtggtgccatcactgctcactg

SEQ ID NO: 315470 - DNA, 201 bp, Homo sapiens
aaggacgggggtgaatgggctcaggcctggcaggctcctggggctccagacagtcctgcgtgctcctgctgctgctgtctaggagcctggctctgacactycctcccaccctgccccatccccagcatcctctatgcggacatcgtgggcttcacgcagctggccagcgactgttctcccaaggagctggtggtggtgctg

SEQ ID NO: 315471 - DNA, 201 bp, Homo sapiens
ctagctgttcctggaaggacctgaagaccatgaccaatttctacctggtcctgttctacatcaccctgcttacactctccagacaggtaaggaggctggcmccccccccccccccaagctctgcccacttttcctcacctccatctggagatggggtggggtggggtgggctcaggtggagtagcagaaaagactagagtc

SEQ ID NO: 315472 - DNA, 201 bp, Homo sapiens
cctaagtggaagtgtgcgtcactgtcggtgtcgtgaggctctcgtctgccttgtcctgccttgggtgggagattggacctccctgggggagcctgggtggygcaggcaggcagggctgagctgagcagcctccctgtcacctacatccctcggactaatcattttctttctgttcctcagtttccttatctgtaaaatggg

SEQ ID NO: 315473 - DNA, 201 bp, Homo sapiens
ttgctggtccctctgctggtctgcccacccacacccaggagaacctgctgctgtcagtgcttccggcccacatctccatgggcatgaagctggccatcatygaacggctcaaggagcatggtgaccgtcgctgcatgcctgacaacaacttccacagcctctacgtcaagaggcaccagaatgtcaggtgggcggtgagac

SEQ ID NO: 315474 - DNA, 201 bp, Homo sapiens
ctgagcccctgctctggtcaaggttgggtgcccatctctcctgcctcggggacaatttcctgagtgccctggaggcttctcccgaggatacccctccccargctgccagcgaccagccctccttgcccaggctgttggctctgggtgacttgaccctgttaccccacagaggtgctgcccagctcgggggacgctctgcac

SEQ ID NO: 315475 - DNA, 201 bp, Homo sapiens
acctccagatttgggacgcctacaatgtggccttaaaagctgcctctggttgtcctctcccccgagctcagcaggtggatgtggggggttcccctttgtasactcagggctcctcacctttgggttctcaaatgcggactttgggggcccagagagcttgtgtggccagctccaggaggatgtgatgccttgagccaccac

SEQ ID NO: 315476 - DNA, 201 bp, Homo sapiens
aaagctgagaatggaaacaggcgaaacttaccaagtgtaacatcacctggaactgaaggagggtgggaaggttttaattattttaaaaatagagatggggwctcactatgttgcccaggctggtctcaaactactgggctcaagtgaacctccttcctcggctcccaaagtgctgggattacaagcgtgagccactgtccc

SEQ ID NO: 315477 - DNA, 201 bp, Homo sapiens
gtgctgggattacaggtgtgagccactgcgcctggccagaatttgtaagagccccgcaggtgtctctgtgggcagagaatcaatggtctagaacttgatgsgaggcaagttatgacttcacactgggaagaatttttcatgatcagagctactcaatcccaggagggactggaagtgggctccctgttgcagggggtaacc

SEQ ID NO: 315478 - DNA, 201 bp, Homo sapiens
caggatgcttgctactgtgtgccagcccccagatcaggcctctgcccccacggacctcccggatgctgtgcccgtcctgtcccacctctgtgccattgccycagctcctcccctgtgggatgacttttcctggtatccctcaccagcctctgctcactcactgagggccaggcgcagtgtcctctttgggcggctttacaa

SEQ ID NO: 315479 - DNA, 201 bp, Homo sapiens
caccagatgaaactcatgcagcccgcccccctccccactccccgaaagctgggctgggcagttcagcagtgccatctgctcctgaggccttgccactcttcctgtcccctcaagaggtgaagtggtgtaaggtccggtttcttcccatccaggactggtaccatcagtcctatgactgcgtctgtgtcatgtttgcctccg

SEQ ID NO: 315480 - DNA, 201 bp, Homo sapiens
gcagtggtgtgatctctgctcactgcaagctccgcctcccgggttcacaccattctgcctcaccctcctgagtagctgggactacaggcgcctgccaccaygcctggctaattttttgtatttttagtagagacggggtttcaccatgttagccaggatggtcttgatttcctgaccttgtgatccgcctgcctcgacctc

SEQ ID NO: 315481 - DNA, 201 bp, Homo sapiens
tctatggctgggcgcgactctcccatccctatggaggctgaggaaggacgggggtgaatgggctcaggcctggcaggctcctggggctccagacagtcctscgtgctcctgctgctgctgtctaggagcctggctctgacactccctcccaccctgccccatccccagcatcctctatgcggacatcgtgggcttcacgca

SEQ ID NO: 315482 - DNA, 201 bp, Homo sapiens
tgtaggctctgaattttgctcccttctgctttaacgtgaagcccctggaactttaatctgtctctatggctgggcgcgactctcccatccctatggaggcygaggaaggacgggggtgaatgggctcaggcctggcaggctcctggggctccagacagtcctgcgtgctcctgctgctgctgtctaggagcctggctctga

SEQ ID NO: 315483 - DNA, 201 bp, Homo sapiens
tggtccatgagcttaaggactttggagcagggagaactggtgcagatgccagctcttggcttcccagcaagtctcaatgtcctggagcctcagtttgtgcrtctgtagaacgggagttcggcaagggctgtgtgaggactcgatgcctgtaaagtgctgggtgtggaggttggcttgagggagcatggagctgcctctcac

SEQ ID NO: 315484 - DNA, 201 bp, Homo sapiens
tgtgggtcccaggagaccccctgggtcctctgcctgcagcgccagcattacatccaaggctggcccgctgccttttctctgggctgtggatggtccatgarcttaaggactttggagcagggagaactggtgcagatgccagctcttggcttcccagcaagtctcaatgtcctggagcctcagtttgtgcatctgtagaac

SEQ ID NO: 315485 - DNA, 201 bp, Homo sapiens
gcacaggacccccagaatgaggtaaagccccccggccttggtgcccaagagtgccccggttctgacacctgtctttggctgatttgcagggaaccacaaarttttacttgaatgcactgacctgagtttgtcaagtgtcgatgtgggtgctgggtgccgttgagtgtagatgtgggtcccaggagaccccctgggtcctct

SEQ ID NO: 315486 - DNA, 201 bp, Homo sapiens
gttttgtccccgcatcctgtgctggggtatggattctctggcctcctctaagggcagaagcttgaggctttgcctgcacgcttgggtaactgtaaacatcrtcttcaggcataaaccatgggcctgtgattgctggagtgattggggcccgaaaacctcagtatgacatctggggaaacactgtcaatgtggccagccgaa

SEQ ID NO: 315487 - DNA, 201 bp, Homo sapiens
tctgggaagcaacccagccttcactctagttgttttgtccccgcatcctgtgctggggtatggattctctggcctcctctaagggcagaagcttgaggctytgcctgcacgcttgggtaactgtaaacatcatcttcaggcataaaccatgggcctgtgattgctggagtgattggggcccgaaaacctcagtatgacatc

SEQ ID NO: 315488 - DNA, 201 bp, Homo sapiens
aaagagctggccggggaatgccctcctcataccccaagcccgactgcaacgcagtgactctgggaagcaacccagccttcactctagttgttttgtccccrcatcctgtgctggggtatggattctctggcctcctctaagggcagaagcttgaggctttgcctgcacgcttgggtaactgtaaacatcatcttcaggcat

SEQ ID NO: 315489 - DNA, 201 bp, Homo sapiens
cctccaccgctccatatggtaggtgccgttcacctccagtttacagaggagacagggcccagaggggctgtctatcctgaatcacccagcagatcggtccycaggcatccagttgtgcccaccacagtgtggtctgctgccacatttgagcctggagtcagggccagcacactgtgtctttggcgagatcagatggggcaa

SEQ ID NO: 315490 - DNA, 201 bp, Homo sapiens
gcacagggttggatgtatatggttagcacacagtaaatgcctcttgtggaatacagactgattagtttagatttagaggttgtaaactagtgggctgcaawtattgaaaaatttgaaatcagctgccaacatttaaaaatcatcatttcacgtagaaatcagatttgtagcctgtctgagcactttgggcactttgacagc

SEQ ID NO: 315491 - DNA, 201 bp, Homo sapiens
gacttggaccattaggtcaagttcctgtctgcttcgtctccgcagagctgaggaactgcgtgtggagtcagcccagtctggatgcacaggaggatgctggyggcacagtgagtgaggcctggtgccagagctgtgcggaccccttgttggccatggagcagcaggcccagaggccctctccccagccctgcttgcctgcct

SEQ ID NO: 315492 - DNA, 201 bp, Homo sapiens
cagatggtgtccagcgctcagagccgaggaattcactggcaggttctttaggaagtccctagtctgacagaggccaccgggtcatcctgtttccaggccaktctagtggtggggagggaaggaggctgcagctctagctctgtgcctctcaaggccacatcctgggtctcgagttctggaaggagcagttgcttccatctc

SEQ ID NO: 315493 - DNA, 201 bp, Homo sapiens
tcaccatgtccggctaatttttgtatttttagtggaggggggttttaccacgtgggccaggctggtctcgaactcctgacctcaggtgatctgcctgcctygacctctcaaagtgctgggattacaggcatgagccaccatgcctggctggctgttgagtatttgaaatgtggctagtgtgactgagggactgaatttcta

SEQ ID NO: 315494 - DNA, 201 bp, Homo sapiens
tcaagactagcctgggcaacatggcaaaaccccatctctacaaaaaatacatggcctactgcagcctaagtctccccaggctcaggtaattctcccacctyagcctcctgcatagctgaggtcccagctacgcaggagtctgaggtgggaggattgcctgagccctgggaggttgaggctgcagcgggctatgatcacacc

SEQ ID NO: 315495 - DNA, 201 bp, Homo sapiens
gggtcagctcacagtgttgtcacaaaggggccactgtgtccctctctgagactcagctcccttttctgtgaagcacggcttgcagacatctgaaatttgtrtcagtgggctatttaaaaaaataaacaagatttttgctgggtacagtgcctgaaagcttaacacttcggaggctgaggagggtagattgcttgagcttag

SEQ ID NO: 315496 - DNA, 201 bp, Homo sapiens
tgcctgacaacaacttccacagcctctacgtcaagaggcaccagaatgtcaggtgggcggtgagacgtgtgattagcatatcccggggactgggcccaccrttccaccggcccccaggcggcctccccgccctatctggaggctcagacccctgcccatatagggattgggagagggccccatggttccaggtcaatctgg

SEQ ID NO: 315497 - DNA, 201 bp, Homo sapiens
agggttgcccccttcatgcaaggttcctgctgggaatatggcagctgtccccaagtccccattgctgtgtgagggattgcacaattttggtaattttcctwcctttggagactgatggggatccctggggagagagagcccagactagcacacaggagatataagggctggcaggcgtaggtgtgattcacaagccttttt

SEQ ID NO: 315498 - DNA, 201 bp, Homo sapiens
gctgcatgcctgacaacaacttccacagcctctacgtcaagaggcaccagaatgtcaggtgggcggtgagacgtgtgattagcatatcccggggactgggyccaccgttccaccggcccccaggcggcctccccgccctatctggaggctcagacccctgcccatatagggattgggagagggccccatggttccaggtca

SEQ ID NO: 315499 - DNA, 201 bp, Homo sapiens
gccacagttttcacaggtcccctttgctgtgggcagaataccaggtagggtggggacaggtggctgtgagccagaggattggtgggggcggtggtcctggrcagaaggccctaggcagaactgaggttcttccctcctctccaggacggcggcactgggtgtgtccttcgggctggtggcctgtgtactggggctggtgct

SEQ ID NO: 315500 - DNA, 201 bp, Homo sapiens
agtgatatggtcttgacctcaatcttcataatctagctgggccctgtgtattgcccatggggcagctgggccacagttttcacaggtcccctttgctgtgrgcagaataccaggtagggtggggacaggtggctgtgagccagaggattggtgggggcggtggtcctgggcagaaggccctaggcagaactgaggttcttc

SEQ ID NO: 315501 - DNA, 201 bp, Homo sapiens
tggggctggtgctgggcctgtgctttgccaccaagttctcggtaagtggggagctctggccccgcgggccctccctccctgcctcaggacacctgcctagragccctccctggtgagcttggctgggctgagcccctgctctggtcaaggttgggtgcccatctctcctgcctcggggacaatttcctgagtgccctggag

SEQ ID NO: 315502 - DNA, 201 bp, Homo sapiens
cctcccatctctgccctcctcaaggatataacctaggaaagacagaccagcaaccagtggtcacagcacagaggtgctgtgatggaggaaggtgcaggggytagaagaccagaagaggggtgtctgaccctggatgtgggaggtggaggaggtacaccattgctttgaggagctcgtaatcccaggatgccagtcacatgc

SEQ ID NO: 315503 - DNA, 201 bp, Homo sapiens
ttgacccattccccacctcctccaccgctccatatggtaggtgccgttcacctccagtttacagaggagacagggcccagaggggctgtctatcctgaatmacccagcagatcggtccccaggcatccagttgtgcccaccacagtgtggtctgctgccacatttgagcctggagtcagggccagcacactgtgtctttgg

SEQ ID NO: 315504 - DNA, 201 bp, Homo sapiens
gtcctgtcttgctgctatgagctttttgtactgataacgaccatttctttactgagcgccttctgggttctggcagcatcctcggcacccacattatatamtttaaccgtcacaacggccagcccaggggtgctgctataccacttcacagagaggaaactggctctcagaggcttcagagcctgtccccagcttcaggtg

SEQ ID NO: 315505 - DNA, 201 bp, Homo sapiens
ggccgagaggggaggaggtggcacaggcccatgtccatgtctgcccgcagagccagcagccacccccgcccagccaacacctccccaggcccaagggggaygcggccctgaagatgcgggcgtcagtgcgcatgacccggtacctcgagtcctggggggcggcacggccctttgcacatctcaaccaccgtgagagcgtga

SEQ ID NO: 315506 - DNA, 201 bp, Homo sapiens
ggagcatggtgaccgtcgctgcatgcctgacaacaacttccacagcctctacgtcaagaggcaccagaatgtcaggtgggcggtgagacgtgtgattagcrtatcccggggactgggcccaccgttccaccggcccccaggcggcctccccgccctatctggaggctcagacccctgcccatatagggattgggagagggc

SEQ ID NO: 315507 - DNA, 201 bp, Homo sapiens
gggagtgacagggaggcagggcttgccttgagctaagggaggactcagggccagaaaaagtgcccagtgatggaggagactgccctgagaggtggtgagcmcccccgtcatggaggtgtgcaagctaacagcagggtcattcaatccgggagccctggattggatgtgtctcagacatggcagaaggattcctttatccag

SEQ ID NO: 315508 - DNA, 201 bp, Homo sapiens
cactcttacctctgtgctgactgagacccttccagttgactctgaacccactgaggggccacgggtgcttgttagacgcaacaaactgggtccagaagccygatgtggactttgagactcttggttgcgagtgacagaagctcaaactggctgaagctgaaaggggcattgcttgtcccatgtggttaaatatctagaggt

SEQ ID NO: 315509 - DNA, 201 bp, Homo sapiens
agctcctttctggaggactggctgtgtctgcaggggcacactcttacctctgtgctgactgagacccttccagttgactctgaacccactgaggggccacrggtgcttgttagacgcaacaaactgggtccagaagcccgatgtggactttgagactcttggttgcgagtgacagaagctcaaactggctgaagctgaaag

SEQ ID NO: 315510 - DNA, 201 bp, Homo sapiens
ctttctaagtttttgattcggacatttagtgctatgaatttccctcttaacactaccctagctgtgtcccaaagaatcaaagaacaactttctacccatcmctagaagtagctctctggggccaggtgagaacatcagccttttccctcagtttttctccagttgcctatccttttcattaactgattcagcctccacccc

SEQ ID NO: 315511 - DNA, 201 bp, Homo sapiens
gcgtaggtgtgattcacaagcctttttggaatcaatgaatatgctaaggaatgaatggtgctggggaaagaaggaacccatatgggctgagcatggcaagygtggggtcagctcacagtgttgtcacaaaggggccactgtgtccctctctgagactcagctcccttttctgtgaagcacggcttgcagacatctgaaatt

SEQ ID NO: 315512 - DNA, 201 bp, Homo sapiens
taatagaaatggggtttcaccatgttgctcaggctggtctcgaactcctggcctcatgtgatctgcctgactcagcctacctaagtgccaagattacaggygtgagccaccatgcctggcccttccaaatgtttaacagtcatttagattgccttttctatgaactttctcttcctagtcttctcccatttttctattggg

SEQ ID NO: 315513 - DNA, 201 bp, Homo sapiens
tgactgctctgagctgtcccgtgtctcacagcctccctgccctctgcctctggccctgtcctggttccaatctgaggcaggcctggaggacactgggggcstggactcttggtccagggttgcccccttcatgcaaggttcctgctgggaatatggcagctgtccccaagtccccattgctgtgtgagggattgcacaatt

SEQ ID NO: 315514 - DNA, 201 bp, Homo sapiens
tttgtgtttcattacgagtgtggttagcttccttccaaatgctgtgggttggttgtgggttgcttttttttttgagacagagcttcactctgtcaccgagkctggtttacaggcatgatcttggctcactgcaatctctgcctcctgagttcaagcgattctcgtgccccagcctcccaagtagctgggattataagcatg

SEQ ID NO: 315515 - DNA, 201 bp, Homo sapiens
tgcctcagcctcccaagtttgctggctctacaggcatgtaccactgtgcctggcttagttttaaaatttttttagagatagcatctcactacgttgcccargctgatcttgaacttttggtcttaagcagtcctcctgcctcggcctcctgaatagctgacatcacaggcatgagccaatgtacctggctaggtcatgcaa

SEQ ID NO: 315516 - DNA, 201 bp, Homo sapiens
cccgcatcctgggctagggcctctccctcacctctctgccccggaccctgggtttttggaatgtgttcctgtgaccacctccctcagggtcacctggggargctgaaaatgttggtcccggcccctccccctggctgctgccgctctgggggtgtctgcaccctcatctcctagcccctctgccctctgaacctgacggct

SEQ ID NO: 315517 - DNA, 201 bp, Homo sapiens
tatatagggaaattggggcacagaggattaatgatttatccaaaactcactgagattcatgcttctggctctagggccctgctggtggggtatagggatgrgggtgaagtcagagggaagggggatctaaggtcagctacttggtgctttctagaagagcagttaggccgaagcatcgaccaggattgtggttttggctat

SEQ ID NO: 315518 - DNA, 201 bp, Homo sapiens
aggcaagcccccagccaggagagagccgggtgcaccctggagggtggggggaggcggctgtcgtgagaggtcccagccccacatcttccagtgaccaggcycttccctcaccctgcaggccaacgagtgcatgcgaatcaagatcctcggcgactgctactactgtgtatcgggcctgcccgtgtcgctgcctacccacgc

SEQ ID NO: 315519 - DNA, 201 bp, Homo sapiens
acacagagtgcgatgtcaacaaagaagggctggagtgcctacgcctgctcaatgagatcattgccgacttcgacgaggtacagcctctagcccagccttgygcagcagcccccacccatgctggagagggaagggcggtggcacctgccatcctaaaacccaatttaaaaatgtgacacagagctgggcaaggtggtctat

SEQ ID NO: 315520 - DNA, 201 bp, Homo sapiens
tggagaacgtgaaccgccttcttctggagaacgtcctgccagcccacgtggctgcccactttatcggtgacaagttaaacgaggtgtgctgagaaggggckggggcgggggcagggaggcggacggtccaggcgcagtccgtagggtgaaggtgtggagctggagtgcatgctgagcttggcttcctcaggtcctggcctc

SEQ ID NO: 315521 - DNA, 201 bp, Homo sapiens; identical to SEQ ID NO: 65690

SEQ ID NO: 315522 - DNA, 201 bp, Homo sapiens; identical to SEQ ID NO: 65692

SEQ ID NO: 315523 - DNA, 201 bp, Homo sapiens; identical to SEQ ID NO: 65693

SEQ ID NO: 315524 - DNA, 201 bp, Homo sapiens
agcctgcacaggaacagatccctgcacatccctgagcccacagctgagaagagatgtgggcagaggcctggaggaggtgggtggatgcactggaatgttcyccgcctcccagcgtgaaagatgcatctgggaggagggggagtgtctccatcgagctgtgctgcctctgcgagtccctctccctggggagctcacctcagt

SEQ ID NO: 315525 - DNA, 201 bp, Homo sapiens
atatagttagcatatagttaccattgagagttttaataatacgtaactacagaaaatggagaaccaaaattattgtctgtaaacaggtgaccttaaaatayagagaaggaagcaaagttactaaacctaaatagttgcgggcctgcgctcaaagccaggcctttgttaatacttttaacaaagtattctttgttaaaagag

SEQ ID NO: 315526 - DNA, 201 bp, Homo sapiens
ctcattttttattttgacagggtctggctctgttgcccaggctggggtacagtggcctggtcatagctcacagcagcctcgacctcctgggctcaagagakcctcccaccttcacctcccaaagtgctggggttacaggcatgagccaccacacccagcctgtcctctttgatgggccaatttcacaggcattttctgagc

SEQ ID NO: 315527 - DNA, 201 bp, Homo sapiens
taccaggtagggtggggacaggtggctgtgagccagaggattggtgggggcggtggtcctgggcagaaggccctaggcagaactgaggttcttccctcctstccaggacggcggcactgggtgtgtccttcgggctggtggcctgtgtactggggctggtgctgggcctgtgctttgccaccaagttctcggtaagtgggg

SEQ ID NO: 315528 - DNA, 201 bp, Homo sapiens
gagaggggcaggcctgggttcgaatcctagctccactgtttcctagcaggtgggctttgggcttggaggttaaggtcccagagtcagttgccctggctagraatggagcgagagcacccccacccaccacccttgggtagcccagcccattcatggttctctgcaggttctcagaggagacagccagccaggtggtttttg

SEQ ID NO: 315529 - DNA, 201 bp, Homo sapiens
gaagctctagaggcgttttttggccaaggggtgagcagagatcgggcttggtgttttggggggtcctgggtaggtgtgggaggcctcgtttcgggggccayggggctcctgtggcgtgagactccatcacagtgacctcctgtgcccaatagctccgtaagggcagggtttgtggaaggaaggagtgagtgaccgggaatg

SEQ ID NO: 315530 - DNA, 201 bp, Homo sapiens
gcctcttttgatatacccagactccctggagacactgctccatcccctgggggcagggaccagcacttctgtatccctttgtcaggctcagctctcctggkcatgggtacaagagcagagctgccctttgggggcaggcaggaagtgaggctgagaccctggtactgaagtgtgtccccagtgcctgtttatgtcacgatt

SEQ ID NO: 315531 - DNA, 201 bp, Homo sapiens
ctgctgttcttgggagtctgggtctccctcctcctgggcatctccttgctggagcaggggtccagggtgctggtgtaggctgggatgagacctccttctgygtgtgtgcgcatctggctcctgggcccccaggcctgtctccggtaccccctctggctgggaggaggagcccttttaagctgtctgaaggagctattttaa

SEQ ID NO: 315532 - DNA, 201 bp, Homo sapiens
ccttcctgcccctgtaactggccagctttcctcatgctggcctctgaaacaacctagtcacactgcctcgggcgcagctgactgagatcattgcttcctgkagtcaccgactggctgggcagggagaagcctagcaccctgggatgcagctgctctgcacagatggggaaactgaggccctgggagctctgcagccttggg

SEQ ID NO: 315533 - DNA, 201 bp, Homo sapiens
tgctgatgcagttgtgggtatctgattccagaagcatgtcccccaaggggcggtcggaggatgactcgtacgatgacgagatgctgtcagccattgagggrctcagctccacgaggtgaggtctgagacctctgtccacccccctctcctctccccctcggataggggtcccctatatgggcaggcccatctcatacccca

SEQ ID NO: 315534 - DNA, 201 bp, Homo sapiens
caccctccgttccctgctctcccctggaagcctggaagcctttctagaagggaccagtgttggggtggagaagggttgggtggtgagtctgggaccagagytccgttcctctttggtggcctttttccttggaatacctaggaccgtgctttcctgccgccaccagctctctcattttttattttgacagggtctggctct

SEQ ID NO: 315535 - DNA, 201 bp, Homo sapiens
gcagacctgcttggccgaagcaccctccgttccctgctctcccctggaagcctggaagcctttctagaagggaccagtgttggggtggagaagggttgggyggtgagtctgggaccagagttccgttcctctttggtggcctttttccttggaatacctaggaccgtgctttcctgccgccaccagctctctcatttttta

SEQ ID NO: 315536 - DNA, 201 bp, Homo sapiens
cacaaatgttcccctaatctgtcacgtgtcttttgattgtgcttttggtaatttttaccatgtatattttgttttttcatgtaactgaacttatcagtctyttctttatggcttttgggttttgtgtcaggataaaaaggccatattcactacagcatcatatgagaattctcccatagtttcttgctctctttggaaata

SEQ ID NO: 315537 - DNA, 201 bp, Homo sapiens
gagtgcagtagtgaccctcttgggtcactgtaacctttgcctcctgggcttaagccgtcctcctccctcagcctcctgagtagctgggactacagttaccrcaccactacacctggctaatttttgtatttttagtaaagtaaagacggggtttcaccatggtggccaggctggtctcaaactcctgacctcaaatgatcc

SEQ ID NO: 315538 - DNA, 201 bp, Homo sapiens
ccaggggacggggctggacagtgggtgggaagcagctcacccggcagcctggcctgggagtgcactgggcagggtctgggctgggggagtaggaggctccrtgagcctactgggcagatggctgggagaggcggcccttcaacaggggaccagaggcgacttgtcactggcttttcccagcctgacaagaaagtgcggttg

SEQ ID NO: 315539 - DNA, 201 bp, Homo sapiens; identical to SEQ ID NO: 65694

SEQ ID NO: 315540 - DNA, 201 bp, Homo sapiens
ccttgttggtggacacgtggtgccgcttgtcatggggactcaggctctgttcctgtcttgggcgtcccctgtgccccaaggaagctctcccgtggggctcygctcctgtgctcagtggtgctaacaactcccagggcccctgcttcccagggattgggggggcatagaaggtgcccatggtctgggcccctgtgttccttg

SEQ ID NO: 315541 - DNA, 201 bp, Homo sapiens
ctgcctgcaggagtgcccttcggctgtctgcagtgatagggcctggggtggggccgagggctcctgtaggctctgaattttgctcccttctgctttaacgkgaagcccctggaactttaatctgtctctatggctgggcgcgactctcccatccctatggaggctgaggaaggacgggggtgaatgggctcaggcctggca

SEQ ID NO: 315542 - DNA, 201 bp, Homo sapiens
ggctgggctgagcccctgctctggtcaaggttgggtgcccatctctcctgcctcggggacaatttcctgagtgccctggaggcttctcccgaggatacccytccccaggctgccagcgaccagccctccttgcccaggctgttggctctgggtgacttgaccctgttaccccacagaggtgctgcccagctcgggggacgc

SEQ ID NO: 315543 - DNA, 201 bp, Homo sapiens
ttgaccctgttaccccacagaggtgctgcccagctcgggggacgctctgcactatctctgagagggtggagacacagcccctgctgaggctgaccctggcygtcctgaccatcggcagcctgctcactgtggccatcatcaacctggtgggtcccgtggtggggaggcaggcctccggggtagagggagacctccagattt

SEQ ID NO: 315544 - DNA, 201 bp, Homo sapiens
aacgtgaaccgccttcttctggagaacgtcctgccagcccacgtggctgcccactttatcggtgacaagttaaacgaggtgtgctgagaaggggctggggygggggcagggaggcggacggtccaggcgcagtccgtagggtgaaggtgtggagctggagtgcatgctgagcttggcttcctcaggtcctggcctcaccgg

SEQ ID NO: 315545 - DNA, 201 bp, Homo sapiens
ccatccctaaatgcagaatcaagtgggcctggtgagtgcccgaccacgggcagcacacattccctgcccttgccccgcccacctctccctcttcctgttcrtaccccatacccagaagagccctggggctttgctcctgacccccacctcttggagcccccttcttgatgggcacaaaggaatgttgctgatggagagggg

SEQ ID NO: 315546 - DNA, 201 bp, Homo sapiens
cttgccccgcccacctctccctcttcctgttcgtaccccatacccagaagagccctggggctttgctcctgacccccacctcttggagcccccttcttgawgggcacaaaggaatgttgctgatggagaggggcctatgtcccctcctccccatccctgctgaatccagcaaggggtggcctgtgtctgggcaggaggcag

SEQ ID NO: 315547 - DNA, 201 bp, Homo sapiens
gaatcctagctccactgtttcctagcaggtgggctttgggcttggaggttaaggtcccagagtcagttgccctggctagaaatggagcgagagcacccccrcccaccacccttgggtagcccagcccattcatggttctctgcaggttctcagaggagacagccagccaggtggtttttggcccagtttgtctcccggctg

SEQ ID NO: 315548 - DNA, 201 bp, Homo sapiens
tgttggccaggctggtctcgaactcctggcctcaagctatccacctgccttggcctcccaaagtgctgggattacaggtgtgagccaccgtgccaggtctrtggagctcttcttgtacctcccagccccattcatgtcttgctgtcactgctggacccactgtcagggtggggccctaggcaatgtgggaagtcagccagc

SEQ ID NO: 315549 - DNA, 201 bp, Homo sapiens
gtaggcactcaaacattacctgggcaaatgaaaccaaggcagacccctccccgaggcccttaggaacactcgtgttcacctctggtgcttgcctgggggtycctcctggggaggcccccatgtcgctaagccttttgccaggcccagaagtggctcctggtgactggaccccaggaggcaagcccccagccaggagagagc

SEQ ID NO: 315550 - DNA, 201 bp, Homo sapiens
gagggtcttagcgccttggtttggggctgggcactttgcgagctggtgtcatggaggccaaactgggggcctccgggccaggtggtggcttcaggcttgcygttgggacaggaggccaggctaggcagtgacgcctcactgagctccatgggtggcacgctgagctctgggtgggagaggcctctcccactgacctctctg

SEQ ID NO: 315551 - DNA, 201 bp, Homo sapiens
tatctggaggctcagacccctgcccatatagggattgggagagggccccatggttccaggtcaatctggggccctccctgggtctcagaacccccacttgygggcaggatcagatcagggctcttaaattagagaatttagattggtattgaaagatctagcacacccccaaaactgtaaaactgtgtgagcaaacatagc

SEQ ID NO: 315552 - DNA, 201 bp, Homo sapiens
agcccgacgcccagccttctagtgctgttttcatgaaagaagcagctgtttactagcagctgttttccgggtgatgagggtgaaggtggtattgcagaacmtctttgccaggagtaggtctgggaggtttgcttgagggcatggaggttggtgtagggagagctcaggaagtagaaattgggctggagtgtggcctctgga

SEQ ID NO: 315553 - DNA, 201 bp, Homo sapiens
acgtgaaccgccttcttctggagaacgtcctgccagcccacgtggctgcccactttatcggtgacaagttaaacgaggtgtgctgagaaggggctggggckggggcagggaggcggacggtccaggcgcagtccgtagggtgaaggtgtggagctggagtgcatgctgagcttggcttcctcaggtcctggcctcaccggg

SEQ ID NO: 315554 - DNA, 201 bp, Homo sapiens
ccgtccccgtccccatccccatggtggcctgttcatctggtgcctgcctgctcgcaccaaggggcttctgtgttcatggggagtgggcaccttgcagggcrgggctggcagatggtgtccagcgctcagagccgaggaattcactggcaggttctttaggaagtccctagtctgacagaggccaccgggtcatcctgtttc

SEQ ID NO: 315555 - DNA, 201 bp, Homo sapiens
ctgggttcccaaggtttacctgcagctcctggtgcagagtgtgggggaggggaggctctcagattgttccagattctgtggccctcagaagggcaggtgtragctttgtggaggtagcgtctccggtggtattttctttctttcttatttttatttattattattttttgagatggagtctctgtctgttgcccaggctgg

SEQ ID NO: 315556 - DNA, 201 bp, Homo sapiens
ggggctagaagaccagaagaggggtgtctgaccctggatgtgggaggtggaggaggtacaccattgctttgaggagctcgtaatcccaggatgccagtcayatgctcagaagggctccctgaggaccaggtgctgctgtggccagcgggctggaggcctccccctctgttttgggagtctccactctctcctcttagcctc

SEQ ID NO: 315557 - DNA, 201 bp, Homo sapiens
ggtgctggggtttgattcccagcctcatggtgcccagggatgttgggggctctccagggactctgattttggaataggagccccaaggatgggcctgcccytgccctgctcccagcatgggagcgtaggtgagatggagaggcagtgggctgggctggaagatctttgacctctcctgggcccctctcagaggtggacggg

SEQ ID NO: 315558 - DNA, 201 bp, Homo sapiens
gtgccttggttttctccttagcccccatcacagctgggcacactgttttgtttttgtctttctagtttagtgcccacccctcctgcctacgtgcaagctcygtggctgcagagatttgcatctattttgttcactgctgtgtccccttgcctggcctggggccgggtactcagtaggcactcaaacattacctgggcaaat

SEQ ID NO: 315559 - DNA, 201 bp, Homo sapiens
gttcttcccgcctctgaagacaacaggtctctcttccttttcaggttaccgaggagacctgcaccatcctccagggcctcgggtactcttgtgaatgccgyggcctgatcaacgtcaaaggcaaaggcgagctgaggacttactttgtctgtacggacactgccaagtttcaggggctggggctgaactgagggctcctgc

SEQ ID NO: 315560 - DNA, 201 bp, Homo sapiens
ctcctcccagcctaggaacttgcatgaaagggaactatgtccaagtcagttttgtgtccctagcaccagggaagaggatgggggttgctgagagggacagraaaggattggggttgtgctgtgtgccctggcgcctctaccaagcagaaaccagccttccctgtctgctactgtgaaagcccaaggttgcccttctttggg

SEQ ID NO: 315561 - DNA, 201 bp, Homo sapiens
ctttccgacccaggggtcgactccaaggctccatctgcttcctgctccccagtgaagatcctggagtcaggcttggtcctgaggctgcggggagacccccmgctcccctctaggtcccctgtggctctgagcagctggggtctgtgggaggaatttgccgagagggctgtatggggagagggccaggcaggcccagccagg

SEQ ID NO: 315562 - DNA, 201 bp, Homo sapiens
ccactgggtgctggggctttccttcccccagtaagggctcgacatctaggtttgtgtggcagggccaagctgtttgctcagcactcagtgttatttgtccsttggctgactgacagcttgactgtctgcttcgttttggctgcagtttgagtctctcctactgactgtttcatggcctcatcttgagcccccattgttgcc

SEQ ID NO: 315563 - DNA, 201 bp, Homo sapiens
tttagtatgggcaacgtgtgtcccatctcctgttgccatgatcctgaggggcaggccttgtttctccactttacagatgacacagttgaagcccagagagrtgaagtggcttgctcaggacaccgcagaggccagggccgtgggaggaggactgcagaagtgcttaaagtttattttgaattaatcatcaacatttgaaaa

SEQ ID NO: 315564 - DNA, 201 bp, Homo sapiens
catttggagaatactccgggatggccaggaacatccctgtcctccttgatgcctggaccacgctcagctatagtcaggatgtctgtggcttggacgacccygacaccttgtcctgtgtatcaagtgccggaggggctgaacctggcccagcagtggccttcagggcccagtgttctggggaatgactgtatcctttcctcc

SEQ ID NO: 315565 - DNA, 201 bp, Homo sapiens
gggctcgggtctgccctctgcctctggcttggctgctggccagctgggccatgctgggccatgctgggtcctcactcgccctctctgggcctcagtgggayccacccattccttcaccatcccacctgaggttctgggaccccactggtgtctacgtccacaccctcctctgggagagttggaggtggtcgctgtgctgat

SEQ ID NO: 315566 - DNA, 201 bp, Homo sapiens
tctctgagagggtggagacacagcccctgctgaggctgaccctggccgtcctgaccatcggcagcctgctcactgtggccatcatcaacctggtgggtccygtggtggggaggcaggcctccggggtagagggagacctccagatttgggacgcctacaatgtggccttaaaagctgcctctggttgtcctctcccccgag

SEQ ID NO: 315567 - DNA, 201 bp, Homo sapiens
gttgccaactgagtcgagggctggtggaagaactggtgattggacaggaggccttgaaaacttcccgggcagggggtgcctctgggtctggctttggcggkgtggctcctagggaggagctggcctggggacatgccactggtggtgggttcctgggccccctctggagatgtgatcagtgagttcattccccccaggcct

SEQ ID NO: 315568 - DNA, 201 bp, Homo sapiens
gcacaggcccatgtccatgtctgcccgcagagccagcagccacccccgcccagccaacacctccccaggcccaagggggacgcggccctgaagatgcgggygtcagtgcgcatgacccggtacctcgagtcctggggggcggcacggccctttgcacatctcaaccaccgtgagagcgtgagcagtggtgagacccacgtc

SEQ ID NO: 315569 - DNA, 201 bp, Homo sapiens
ccaaggggcggtcggaggatgactcgtacgatgacgagatgctgtcagccattgaggggctcagctccacgaggtgaggtctgagacctctgtccaccccyctctcctctccccctcggataggggtcccctatatgggcaggcccatctcataccccatgcctggtggcccagccttgttccttccccctgcctgctgcc

SEQ ID NO: 315570 - DNA, 201 bp, Homo sapiens
gcagtgatagggcctggggtggggccgagggctcctgtaggctctgaattttgctcccttctgctttaacgtgaagcccctggaactttaatctgtctctrtggctgggcgcgactctcccatccctatggaggctgaggaaggacgggggtgaatgggctcaggcctggcaggctcctggggctccagacagtcctgcgt

SEQ ID NO: 315571 - DNA, 201 bp, Homo sapiens
gatgcctcaggctgatggcaccggccttgcaatgagacgagaacccaaagctcagttatcagtgtcctgtcttgctgctatgagctttttgtactgataaygaccatttctttactgagcgccttctgggttctggcagcatcctcggcacccacattatataatttaaccgtcacaacggccagcccaggggtgctgcta

SEQ ID NO: 315572 - DNA, 201 bp, Homo sapiens
ggccccgctctccctgatgctagccctcccctgacttggaccattaggtcaagttcctgtctgcttcgtctccgcagagctgaggaactgcgtgtggagtyagcccagtctggatgcacaggaggatgctggcggcacagtgagtgaggcctggtgccagagctgtgcggaccccttgttggccatggagcagcaggccca

SEQ ID NO: 315573 - DNA, 201 bp, Homo sapiens
tgtgtgcggtggctcatgcctgtcatctcagctctttgggaggctaaggtgggagaattgcttgaggctaggagttcaaaacgcatgggcaacatagcacyccatctgtacaaaacaaaacaaatgcaaaagaccaccaccaacaaaaaaatccaattgaactcagaagcagcaagtggaagggtggttaccagaggctgt

SEQ ID NO: 315574 - DNA, 201 bp, Homo sapiens
cagcagcccagcctttgacacaggaggtgccctgcgcgattttctctgtcccctgttgcagacatttcggttgtttccagcattttcgcagttagagagcygcactaaacagcccgtagctaagtccttgcatgtagtgggactgtttctttagggtaaattaaaacgagtccatttctttttcttttctttcttttttct

SEQ ID NO: 315575 - DNA, 201 bp, Homo sapiens
ccagcccatgtgtgcacaggagggtgctccttcaattaatgaccacctgctgagtgaggtgccttgagcagctgtttgcagagggagcccctgttcagttaacaacaaaggtctttctttggaagctcttgggcctggaggacaagagcagcacaagctctaaagagagtcccctgggcttgagtcccagctcaatgtttg

SEQ ID NO: 315576 - DNA, 201 bp, Homo sapiens
cagcccatgtgtgcacaggagggtgctccttcaattaatgaccacctgctgagtgaggtgccttgagcagctgtttgcagagggagcccctgttcagttaacaacaaaggtctttctttggaagctcttgggcctggaggacaagagcagcacaagctctaaagagagtcccctgggcttgagtcccagctcaatgtttgg

SEQ ID NO: 315577 - DNA, 201 bp, Homo sapiens
agcccatgtgtgcacaggagggtgctccttcaattaatgaccacctgctgagtgaggtgccttgagcagctgtttgcagagggagcccctgttcagttaacaacaaaggtctttctttggaagctcttgggcctggaggacaagagcagcacaagctctaaagagagtcccctgggcttgagtcccagctcaatgtttggt

SEQ ID NO: 315578 - DNA, 201 bp, Homo sapiens
cagcctggcttcggggccagcaggaatgggttgagcaaaggctggcaataggcatgacccagggtgtggggtggaggcagccactgggcaggcattgtttrtgtgcctgggcaggcattgtttgtgtgcctgggtaggcattgtttgtgtgcctgggtaggcattgtttgtgtgccttcgtagctgtgccttaaggtcatc

SEQ ID NO: 315579 - DNA, 201 bp, Homo sapiens
aaacaaaacaaatgcaaaagaccaccaccaacaaaaaaatccaattgaactcagaagcagcaagtggaagggtggttaccagaggctgtgtgtaggtaagsggggcaggggtgggatggggagagatagagagaggtcagtcaaaggatacaaagtttcagtggaggaataagttttttgagacctattgcacagcatggt

SEQ ID NO: 315580 - DNA, 201 bp, Homo sapiens
tccctttacctgtaggagagcttcctataatgtgtagcatgctccttgtcccctgaatcctataaattcatagttgtatccagaggcttgatctaattcarttttgatttttttcacacaacagcacattggagatgctattggaaatttctgggaggcacatgtggtctggtgaatttccttttgtaatactggcagtca

SEQ ID NO: 315581 - DNA, 201 bp, Homo sapiens
gcctcccaagtagctgggactataggtgcatcccattgtgcctggctaccatggtaggttttttttttttttttttttgaggcggagtcttgctctgtcacccaggctggagtgcagtggcacaatttcagctcactgcaagctctgcctcccagtttcacgccattatcctgcctcagcctcctgagtagctgggactac

SEQ ID NO: 315582 - DNA, 201 bp, Homo sapiens
agttaagactcaaatgcacatctttcctgtccccttcaggacagtggttactctgggttgcatctgtccatgggcccgtgaaatggatctctctctctctytcttttttttttttttggcagagcctcactctgttgcccaggctggagtacagtggtgcaatcccatctcactgcaacctctgcctcccgagttcaagtg

SEQ ID NO: 315583 - DNA, 201 bp, Homo sapiens
tgcttacactctccagacaggtaaggaggctggccccccccccccccccaagctctgcccacttttcctcacctccatctggagatggggtggggtggggygggctcaggtggagtagcagaaaagactagagtcctgccaggaaagcactggtcccctggccagaggctccaaggacgccagggacagacagacctggct

SEQ ID NO: 315584 - DNA, 201 bp, Homo sapiens
caggtcctggcctcaccgggatgcccaggcgacaatgtatggcatcagctgtgagagcatgggcctggggtcagggacctgggctcaagtgtggtcgtgarcaaggcaccttgctttcccaggccttggtcttcacctctgtaaaatgggctgacagcccttccccacaggcttgtggcgaggatgaaatgtgtgttcagg

SEQ ID NO: 315585 - DNA, 201 bp, Homo sapiens
gtggcctgaggctgggttccaggcccaccgcggggggcaacgccctcccacaccaagatctctcccctctagggtgagccggggtagcaggctccaggatyccaccataggttcccagtagatcagcgtttctgctacctgtttgtcatagatttcctccgtgcttgttaaactacagactctctggccctttctatgaag

SEQ ID NO: 315586 - DNA, 201 bp, Homo sapiens
cgtgaagcccctggaactttaatctgtctctatggctgggcgcgactctcccatccctatggaggctgaggaaggacgggggtgaatgggctcaggcctgscaggctcctggggctccagacagtcctgcgtgctcctgctgctgctgtctaggagcctggctctgacactccctcccaccctgccccatccccagcatcc

SEQ ID NO: 315587 - DNA, 201 bp, Homo sapiens
tccacaagcaccaaatgcaggatgcgtcccgggacctcttcacctacactgtgaagtgcatccagatccgccggaagctgcgcatcgagaagcgccagcargtgggacccggcccccactcctcaccctgtacacccctgtcctcttcctctttctgttggacatgagacactcatgctgccatgtgcatgaggtgcatgg

SEQ ID NO: 315588 - DNA, 201 bp, Homo sapiens
acacgcgtgccaagggtggaggatgccagccaaggggcgctacttcctcaacgagggcgaggagggccctgaccaagatgcgctctacgagaagtaccagytcaccagccagcatgggccgctgctgctcacgctcctgctggtggccgccactgcctgcgtggccctcatcatcattgccttcagccagggggtgagtga

SEQ ID NO: 315589 - DNA, 201 bp, Homo sapiens
cacagggttggatgtatatggttagcacacagtaaatgcctcttgtggaatacagactgattagtttagatttagaggttgtaaactagtgggctgcaaayattgaaaaatttgaaatcagctgccaacatttaaaaatcatcatttcacgtagaaatcagatttgtagcctgtctgagcactttgggcactttgacagct

SEQ ID NO: 315590 - DNA, 201 bp, Homo sapiens
gtggaagctcggcagggtggcgcctcacccagagctcgggcctccagtgtgccccagtccccacctagccagccagccttgcctgtcattgtccccgcctsgcctccgggggctcccagttcactgtcctaggaagtgatcgcagggtgctgggccacaaagcttgggttctccccttccccggcctgctcccccacgcag

SEQ ID NO: 315591 - DNA, 201 bp, Homo sapiens
ctctctgtcttccatgtggtgtttttgttgaagctgggtccctttacctgtaggagagcttcctataatgtgtagcatgctccttgtcccctgaatcctayaaattcatagttgtatccagaggcttgatctaattcagttttgatttttttcacacaacagcacattggagatgctattggaaatttctgggaggcacat

SEQ ID NO: 315592 - DNA, 201 bp, Homo sapiens
ttgtgaagtcaggtagatctgagcttgaatcctggctctgccttttcatagctgtgtgtgcttgggccagcaatgtggtgtctctgagccttggtgccttmttctacagagggatgatagcagggccttcctcagtggggctgccagggagtgccatgaggctgtgtgtgtaaagtcctgggtgatgcctgtgtggatccc

SEQ ID NO: 315593 - DNA, 201 bp, Homo sapiens
ttagtaacattcctgtagtcatttctaattgtgtttatctggatcttttctcttttcttctttattagtttagctagtggcctattttattaattttttcaaaaaaaaaaaaaacaactcctggattcgttgatcttttgaatggttttttgtgtcttgattttcttcagttcagctctgatttttgtcatttcttgtctt

SEQ ID NO: 315594 - DNA, 201 bp, Homo sapiens
ttcaagcaattctcctgcctcagcctctcaagtagcttggactacaagtgtatgccaccaagcctggctaattaaaaaaaaaataaacaactttttatagmgatggggtctcattatattgcccaggctggtcttaaactcctgaactcctggctggggctgggctgtggagcctggaaagtgtgatggagggatgagcgg

SEQ ID NO: 315595 - DNA, 201 bp, Homo sapiens
cagcacagggttggatgtatatggttagcacacagtaaatgcctcttgtggaatacagactgattagtttagatttagaggttgtaaactagtgggctgcaaatattgaaaaatttgaaatcagctgccaacatttaaaaatcatcatttcacgtagaaatcagatttgtagcctgtctgagcactttgggcactttgaca

SEQ ID NO: 315596 - DNA, 201 bp, Homo sapiens
gaggtgggaggattgcctgagccctgggaggttgaggctgcagcgggctatgatcacaccacttcactccagcctgggtgacagagtgagaccccatctcaaaaaaaaaaaaaaaaagagagaaagaaaatgcagttttatgtggagcttactgtaacacagatgcagggggctaccctggctgaagcaggcatgggggcc

SEQ ID NO: 315597 - DNA, 201 bp, Homo sapiens
gaggtgggagaatcacttgagcccgggagtttgaggctgcagtgagctatgatcgtgccactgcactccagcctgggcaacagagtgaggccctgtcttgaaaaaaaaaaaaaaaagcagccacatgtggctagtggctactatcttggacagtgcagtcctagaagacacaggggactagctttacgacaacaggacata

SEQ ID NO: 315598 - DNA, 201 bp, Homo sapiens
tcactgccctcacttcctgtacccatgcagacatcattaatcaatccctacattccacactgagcctgtctacattctcagaatcctccttttgttttttktttgtttgtttgtttttgtagagacatggcctcgctatgttgcccaggctggtcttgaactcctggcctcaagtaatcctcctgccttggcctcccaaag

SEQ ID NO: 315599 - DNA, 201 bp, Homo sapiens
cctcgaaggccctgtcctggcggggcttgggggagtaccccagggcactgccttgtgtctttgtgttgaatgagtgaatcttctgttcataattattgggkgtttagagaagtgttttccctctgaccaggcctggtgtcctctccaggcagaggctggccctccacacagccagctgggcgctgtgccctctgggactgc

SEQ ID NO: 315600 - DNA, 201 bp, Homo sapiens
tattgggtgtttagagaagtgttttccctctgaccaggcctggtgtcctctccaggcagaggctggccctccacacagccagctgggcgctgtgccctctrggactgcccttagcacgcatgcccctcgggccctgggctctgtgaggtggtctcttctgcctccctgggtgtcctggtcttgcagtcctagtgactcact

SEQ ID NO: 315601 - DNA, 201 bp, Homo sapiens
taggcactcaaacattacctgggcaaatgaaaccaaggcagacccctccccgaggcccttaggaacactcgtgttcacctctggtgcttgcctgggggttcctcctggggaggcccccatgtcgctaagccttttgccaggcccagaagtggctcctggtgactggaccccaggaggcaagcccccagccaggagagagcc

SEQ ID NO: 315602 - DNA, 201 bp, Homo sapiens
gacgtgtccctggccaaccggatggaggcagccggagtacccgggtgaggctgggctgggtagccgcagggacagaggcctggggctggctgtggatggagggttctgcggttgggggtgggggtcaggtgtggagggagagatgaatgtagaaaagctggcctggggcccaggcctgcctgctgtgcatccctgggtgga

SEQ ID NO: 315603 - DNA, 201 bp, Homo sapiens
tgaaatgctttattccattttctcatgaaaacactgttttgagatgagattcctggtcattctgccatctgccagccacaacggcatgagtgaaaaggcaracgtttaccgctccttaattaaaaccacagactggggaaggcggccgggtggggaccggcgtggcgtcccgcggaccgcgtggagtttggggtgtctgac

SEQ ID NO: 315604 - DNA, 201 bp, Homo sapiens
taactatttctgcccattaacttccttgaagtgaaaactactcaaccactccacttctgtctaaaaataagtgatgcttgagcacagcactgtgcagtttyttacgtgtagctgttcccgacctgactctacagggtctttaccagagcccatgccttccactaacacgcgtgcgtgctcaccgagctggctgactcctag

SEQ ID NO: 315605 - DNA, 201 bp, Homo sapiens
gcggttatgtaatttcagtgcaatattaaatatgaccagggaagcatattgtttaacagcaactcgatgagaggcggcattgaggcaaagcagctgtcccyaggtttgtgaacatcctcgtaggggatggagaaggctgcccgttggaagcagccaggcctcacggttcccgcttgtccacctcatcccgtctggcacagc

SEQ ID NO: 315606 - DNA, 201 bp, Homo sapiens
agggaagcatattgtttaacagcaactcgatgagaggcggcattgaggcaaagcagctgtccccaggtttgtgaacatcctcgtaggggatggagaaggcygcccgttggaagcagccaggcctcacggttcccgcttgtccacctcatcccgtctggcacagcacagtgagtgcacagaccgggacagtggccacaagtc

SEQ ID NO: 315607 - DNA, 201 bp, Homo sapiens
  misc_feature (1)...(201): n = A,T,C or G
actgtctgtttttgtaacacttaagttattttatcagcactttatgcacgtattattgacattaatacctaatcggcgagtgcccatctgccccaccagcnccagtgcgtgctgtctgtggagtgtgtctcatgctttcagatgtgcatatgagcagaattaattaaacatttgcctacaactccaacagtcctctgtttt

SEQ ID NO: 315608 - DNA, 201 bp, Homo sapiens
cggctgctcatcggatgatccaggatgggtccttggcaattttcgggttctcgggtccgaggatggccaggccgtgtgtgctcttcccagtgccgaggtayctgagaggaaggcaggcgtggtcagcaaggactggcttctgcgtgagcgctgttagagtcagcacgagggcttccagtcccagacgctgtctcccccgct

SEQ ID NO: 315609 - DNA, 201 bp, Homo sapiens
agcagctgtccccaggtttgtgaacatcctcgtaggggatggagaaggctgcccgttggaagcagccaggcctcacggttcccgcttgtccacctcatccygtctggcacagcacagtgagtgcacagaccgggacagtggccacaagtccgggcccaagcttgcccctggcccttcagtggttccgattccctttatgca

SEQ ID NO: 315610 - DNA, 201 bp, Homo sapiens
gcaccgacatgaccatcggcacggactccgccctgcacaggatcatcgaggtcgtcgacgccatcatgaccacggcccagaggtaaagcgctcagaggaascggcgggaggccagtggggcccgacgtgtgcccagctcagacgttaccacgggctctagaacattctgcagattgggtgtcctggtgctggtctcgtaac

SEQ ID NO: 315611 - DNA, 201 bp, Homo sapiens
ctccgccctgcacaggatcatcgaggtcgtcgacgccatcatgaccacggcccagaggtaaagcgctcagaggaaccggcgggaggccagtggggcccgaygtgtgcccagctcagacgttaccacgggctctagaacattctgcagattgggtgtcctggtgctggtctcgtaacttgacttttaggagctattgccaga

SEQ ID NO: 315612 - DNA, 201 bp, Homo sapiens
cctcccgggttcaagcgattctcctgcctcagcctcctgagtagctgggattacaggcacccaccaccacgcctggctaaatttttttatttttagtagasatggggtttcaccatgttggccaggctggtctcaaactcctgacctcaggtgatcctgccctcctgggcctcccaaagtgccgggattacaagcatgaac

SEQ ID NO: 315613 - DNA, 201 bp, Homo sapiens
cacagcactgtgcagtttcttacgtgtagctgttcccgacctgactctacagggtctttaccagagcccatgccttccactaacacgcgtgcgtgctcacygagctggctgactcctagaagaccagttgaggtggcctggttctgctctgcactccctgcctatcgttggaacattgtccaacaaaattgacacatccag

SEQ ID NO: 315614 - DNA, 201 bp, Homo sapiens
cccattgccacaaatgatggggttttctcctttatgggtgaacggtgttgtgttgtgggcgtgcaccacgttttctttgtccatttatctgctgacgggcsctgattccacactgggctgttgtgatggggagtgaatgtaggagtgcggaggtctctttctgccgattccctttctcggggtatatgcccagcagtgggg

SEQ ID NO: 315615 - DNA, 201 bp, Homo sapiens
ctgctgacgggcgctgattccacactgggctgttgtgatggggagtgaatgtaggagtgcggaggtctctttctgccgattccctttctcggggtatatgyccagcagtggggctgctggcttgtgggggagttctatgcatgtcatagtctcatacaagcatgcaatgcatcatgataaaatcagggtaagtagcatatc

SEQ ID NO: 315616 - DNA, 201 bp, Homo sapiens
aagtgaaaactactcaaccactccacttctgtctaaaaataagtgatgcttgagcacagcactgtgcagtttcttacgtgtagctgttcccgacctgactytacagggtctttaccagagcccatgccttccactaacacgcgtgcgtgctcaccgagctggctgactcctagaagaccagttgaggtggcctggttctgc

SEQ ID NO: 315617 - DNA, 201 bp, Homo sapiens
tttagtccttaccctaatcccagaggagtgtgtgtacccatttctcatattaggaaatgaggcattgagaggttaggaaacggacccatggtcatgggtarttagtggcagagccagaattaccccgggctcttcagtgactcttgctcctgtttccactgcaggtatgaacgctgccgtccgtgccgtggtgcgcatggg

SEQ ID NO: 315618 - DNA, 201 bp, Homo sapiens
ccagaatgtttgctccaggagcgtccctcgtggtccgttcaggtgcccagagttgcgggccttgcacgccttgtacgccttgttccctggcgcctcctccytccatgtgggtgtgcagcatcccgctccagggccttcagcctctgcgcccctcatctgctgatgcaggtgatggcatttagggcccacctgggtactcct

SEQ ID NO: 315619 - DNA, 201 bp, Homo sapiens
acacctggggctggaaaataatactcactctcccacagctctggagcgcaggagccatgggctgaggccagaatgtttgctccaggagcgtccctcgtggyccgttcaggtgcccagagttgcgggccttgcacgccttgtacgccttgttccctggcgcctcctccttccatgtgggtgtgcagcatcccgctccagggc

SEQ ID NO: 315620 - DNA, 201 bp, Homo sapiens
cccaggctggagtgcagtggtacaagcttggctcactgcaacctccaccttccaggttcaagtgattctcctgcatcagcctcccgaggagatggcagtayaggcacccaccaccacgcccagctaatttttgtatttttagtagagatggggtttcaccacgttggccaggctggtctcaaactcctgacctcaggtgat

SEQ ID NO: 315621 - DNA, 201 bp, Homo sapiens
cccagcacggggccggggagtgtgagtgtgtcctggcacaggcaggcagaaggtgtccaacgtgcaactggagagcgcagaggtggctcaagtccccttcstcgcaggagtctggaaggctactgcatagcgtttgccttagtagaaaatggaccatttttgaagcctaggtccctgcaggcctcctggctaactcggctg

SEQ ID NO: 315622 - DNA, 201 bp, Homo sapiens
cttcctcgcaggagtctggaaggctactgcatagcgtttgccttagtagaaaatggaccatttttgaagcctaggtccctgcaggcctcctggctaactcrgctgtcaaagccccttttctctgctttctgagctgtttccaggactgagtgggtgctccctctgtttctctgctttctgagctgtgtccggggctccctc

SEQ ID NO: 315623 - DNA, 201 bp, Homo sapiens
agaaagaggccagttcagtttgagacagacttctgtggttttgttgcatttgttgctaagaacaggattaggaatttgagagctttaattttctgtctccrcagaaccgtgcccggaaaaaaaggctgaatattattattgtggctgaaggagcaattgatacccaaaataaacccatcacctctgagaaaatcaaagagg

SEQ ID NO: 315624 - DNA, 201 bp, Homo sapiens
tataagtggtcatccataaagtccaggcaaagattttatttcccgcttaactgtaattaaattataggacaatggaccgagaaggaaccaaggaatttacrtagcccagccccactgtccttacagaggaataagctgagttccagagacagtcagtggcctctccagatcaccgggccggtgtgcccatgggctggggcg

SEQ ID NO: 315625 - DNA, 201 bp, Homo sapiens
aaaaagaaaaaagtcttttatcttaattttttgtttgttttaaagtttggttctgctctagacagctgtttgtaaacaatatcagagctgtctttgtcatrgtccacaccctaaagaaaggctaggaataattctgatcattttatcgctagttttttccatgattaaaaataacacattcaaaaggtgtcagataagtga

SEQ ID NO: 315626 - DNA, 201 bp, Homo sapiens
cgaaaaaccttttccagtgcccagtacctccttccagatctgggctgctgtgtccgcatcacagttccgcatcctaacgagatgtttccttgcagcttgtygtcacgcagctgggctatgacacacgtgtgaccatcctcgggcacgtgcagagaggagggaccccttcggcattcgacaggatcttggtgagttgggaag

SEQ ID NO: 315627 - DNA, 201 bp, Homo sapiens
cggtgcacgatgcattacacggcctttctgagaaggaggtgagctgcccgtggggagggagaaggcttgtgttctctcccacacctgcagagcctgcgccrtcttcgctctttggttttctaagttaccatccatctgtgtggcacatagtcgtaacctcccctgagtgggggtctagagcatcgggatcctcaacagtcg

SEQ ID NO: 315628 - DNA, 201 bp, Homo sapiens
tcggtggattcgaggtacgttaccgtttctctcttgccggtcttgcaggtgtgagccgcgccctgtgttggctaaacattaagttacttgttggctactgsccacgatccgagatgataggttcccagacccagcggccactggagaattgtagaacagcaggatagcaggtggtaagacgtggcctacgagtggcccagt

SEQ ID NO: 315629 - DNA, 201 bp, Homo sapiens
aagtcttctgagtcctggcctgcctctcagacctgggttttgggtgagccatcgtgggcctgcaggacgtactgcagtgactgtggatgcataaatcaacstttcgtttctgtgtgctcatctgtgcagtagaaatggtgtttgccctcctgtctccctggtagaaaggacttggaaaagtctgagactaacggggcagag

SEQ ID NO: 315630 - DNA, 201 bp, Homo sapiens
ctcatacaagcatgcaatgcatcatgataaaatcagggtaagtagcatatccatcacctcaagaacaatcatctctttgtgttaggaacactccaattttmctcttttagttattttgaaatattattttgaatatatattatgtatatattattatacattatgtataatatgaattatatatgtattatacatatcgta

SEQ ID NO: 315631 - DNA, 201 bp, Homo sapiens
ctgtattcagaagagggcaaaggcgtgtttgactgcaggaagaacgtgctgggtcacatgcagcaggtaggcccgagactgcatgaggggccacaaagccmctgtcatgtgacttttaaaagattagtgtcttattttagccattgtggggaaaaatgtataagtaaattccaagatgataaaaaacatctgaactttttg

SEQ ID NO: 315632 - DNA, 201 bp, Homo sapiens
gcactttcatccccattgccacaaatgatggggttttctcctttatgggtgaacggtgttgtgttgtgggcgtgcaccacgttttctttgtccatttatcygctgacgggcgctgattccacactgggctgttgtgatggggagtgaatgtaggagtgcggaggtctctttctgccgattccctttctcggggtatatgcc

SEQ ID NO: 315633 - DNA, 201 bp, Homo sapiens
atgtgccatgttggtttgctgcacccattaactcgtcatttacattaggtatatctcctaatgctatccctcccccctccccccaccccacaacaggcccsggtgtgtgatgttccccttcctgtgtccatgtgttctcattgttcaattcccacctatgagtgagaacatgtggtgtttggttttttgtccttgcgatag

SEQ ID NO: 315634 - DNA, 201 bp, Homo sapiens
atagccttttacaaataccctgaatgagagcttctcgttctttttttcccccagaaaagtatgttttaagactctgaaaatttttgatctcactcccagaragttttaccacctcttcttctgtgtggccaccagggggacgtagtgtggccgagactccaggggtgcccgtgagcacccgaggcgctgaggagggctggg

SEQ ID NO: 315635 - DNA, 201 bp, Homo sapiens
ctaagccatgtttccctttggtgaaatggttgctactattattctttgctcatttatctgtgtatccatttgtttatcatttgctggaaagaggtttttttgttcgtgttattgttgtttgcttttattcaattaaactggttacgtggttattgtttgtatttatgcgatttgggcaattttaacggagggtctagctgt

SEQ ID NO: 315636 - DNA, 201 bp, Homo sapiens
tgtgatactccatttttcatctccttctcaaatcacacacacacagaatttggctagctgcaaataaacccctattctgtacttcgttttgcagttgaatrgagtggcctacaaattcgtaccaagtccaggcagtgatgttttgaacagaaagtagcctgggcatgggggtaccttgcgttacgttggctgtttctttta

SEQ ID NO: 315637 - DNA, 201 bp, Homo sapiens
ccactgcgcggctgttctcagtctcactgggcttccaggccgggttcagcatggttctgaggaatctcagttctcatctcgccccgtgattctgctccccvacctgcccatgttgacagggtgttattaatcttttttaaaatcttttataggaaaaaaatttaccaccgatgattccatttgtgtgctgggaataagcaa

SEQ ID NO: 315638 - DNA, 201 bp, Homo sapiens; identical to SEQ ID NO: 65721

SEQ ID NO: 315639 - DNA, 201 bp, Homo sapiens
gcacatgaccgtctgttaccagtgagtccttgtgtggacagagcatccgcagcaggacagaacataaacggtgcctcccagggtgccctgtgcagaggcgrggtctgcatccgacctcacacttgctcaccctcgccctccgggggacggctacactgggctcatctgcactgcaagggaaatctgttttcagagcaaggg

SEQ ID NO: 315640 - DNA, 201 bp, Homo sapiens; identical to SEQ ID NO: 65722

SEQ ID NO: 315641 - DNA, 201 bp, Homo sapiens
aaattaaagaatgagtcatttcctagcaacttagctcacgcatgcactagacagggagcattggaggtggcactcagaaagccctccctttctatttttttaatggctttctttgccacatgcatctatgcaacacaaaataatgaaattactttcagagaacattttacttttcaaaatgttgtggtttgcagagcagtt

SEQ ID NO: 315642 - DNA, 201 bp, Homo sapiens
atgtgtggaaggggctggccgtggaaactagttggcaagacaaagagcaggtgacagcattggccctgacttctgggactgtgtctgatttttttttttttaaatctctgtctcacccctcccatccctgactgtcacccccaccttcccccaacagtgttgaaagaccaagcaaggttgtccacatcccgttcagtcaca

SEQ ID NO: 315643 - DNA, 201 bp, Homo sapiens
gaccgtggtaggtgtcacttgccctgaccttgaaaccacccttgtgtggctttgtttttaaagctgagggaccactactgtgcacctgctgtttgtcaggygtcttcctgagggtctgacatgcttgaataaccttagagatagctggaagtaggagtatttttctcatcttacagatgaggaaattgaagttcagagcga

SEQ ID NO: 315644 - DNA, 201 bp, Homo sapiens
ggttgtttaggagctaatgagattaaggcacaaggtgacttgtggccctttaacaacaaaccaaaacaaaaaaaggagtctccttctgttgcctaggctaragtgcagtggtgccatctcagctccctgcaatctctgcctcccatgttcaagcaattctcatgcctcagcctcccaagtagctgcgactaccagctcgta

SEQ ID NO: 315645 - DNA, 201 bp, Homo sapiens
gtggctacttagagactaaggtagttatacctagaattttgtttaaaatcacatattggactgtagaccctaatattttttctattcatgaagattagtcycatggtaacctttccatttacttttagaaaaagtaaaaactggccgggcgcggtggctcacgcctgtaatcccagcactttgggaggccgaggcgggcag

SEQ ID NO: 315646 - DNA, 201 bp, Homo sapiens
tctttttatgcctggcttatttcttatttctttttccatacagagttttgctctgttgcccaggctggaatgcaatggcccagtcttcgctcactgcaacytctgcctcccgggttcaagcgattctcctgcctcagcctcctgagtagctgggattacaggcacccaccaccacgcctggctaaatttttttatttttag

SEQ ID NO: 315647 - DNA, 201 bp, Homo sapiens
cccacgtatgagtgagaacaggcaatgtttctctttttatgcctggcttatttcttatttctttttccatacagagttttgctctgttgcccaggctggartgcaatggcccagtcttcgctcactgcaacttctgcctcccgggttcaagcgattctcctgcctcagcctcctgagtagctgggattacaggcacccacc

SEQ ID NO: 315648 - DNA, 201 bp, Homo sapiens
actgcgcggctgttctcagtctcactgggcttccaggccgggttcagcatggttctgaggaatctcagttctcatctcgccccgtgattctgctcccccayctgcccatgttgacagggtgttattaatcttttttaaaatcttttataggaaaaaaatttaccaccgatgattccatttgtgtgctgggaataagcaaaa

SEQ ID NO: 315649 - DNA, 201 bp, Homo sapiens
ccttcctccagtgtagcccaggcacctacctctgggcgtcttgggaacataaattctcatggaccctcagaccgccaggactttgtatgagtggtgggttmtataaccagctgtagcaataaatgttgaatccatttatggtatcatcattttgctgttacagatataaaaatcctgtatctttcattctttttttttttt

SEQ ID NO: 315650 - DNA, 201 bp, Homo sapiens
taatttggtcattacaggttctgtgcatgcaacagatactcacatgtaccccacaaatatgtaaaattatatgtgtcaataaaattgaaaaaatatgggggaaaaaaacctttcccttcctgatagaaacccttcattcttcattagccataggaaatatttcttttgggttaaaatgaagctcctgcttttacaattttt

SEQ ID NO: 315651 - DNA, 201 bp, Homo sapiens
atggccgcaggtgctgtctggacgaggtctggacaaccttgtctggcggggacagcgcctcttcctgcccctgccctcggtggggaaggaggggttctgaytctgagatctcatttcctttagggaaattcaaggaatttctgcaattcttctgctgagatgtggccaaaataaatccttgtgtgcaaatggtgttttggg

SEQ ID NO: 315652 - DNA, 201 bp, Homo sapiens
agagaaggggtctcaccatgttggccaggctggtctgagtcctgtcctcaagctatccacccgccttggcctcccaaagttttggtattacaggtgtgagmcactgtgcccagccacaaaaggccatgttgatatcaacttcctggtgttgatttataggattagaaatcaaccaatgatctctaattggttgtattggtt

SEQ ID NO: 315653 - DNA, 201 bp, Homo sapiens
ggaacttggaaaacagcaacgtcatctgtgaggctgtgggttgagattctcactgttatactcaaaatacctttgtctgaaggagcgacaggagcatctayggttgagaagacagaaagtttggcttcgtcgatgtcttgctgtgtgaattttccagacttagcccagtcgacagccttcccaaaagactggagcgtctct

SEQ ID NO: 315654 - DNA, 201 bp, Homo sapiens
acagcatcagcatccagcctctggtcttcccagatgtgctgccatggagcctgtgccacctgacccccgccaccggcccccaagcttagctcaggtgcccragggtctccatctccccatggcccccggtcagcagccctgtccctgcacccagactggccaacccttctgagcttgaaatatcagcatgtgatcttagct

SEQ ID NO: 315655 - DNA, 201 bp, Homo sapiens
aactgctgacctcaagtgattcacctgccttggcctcccaaagtgctgggattacaggtgtgaggcacctcacctggctcagaggccctgggctttcttgrgaggtaaaacccatatgttctctctgtctcagctgggagggctggggctctgaggcccatccatgtgactccatggccgcaggtgctgtctggacgaggt

SEQ ID NO: 315656 - DNA, 201 bp, Homo sapiens
gcatttggtttcattcatgaatttcatatcctgttgttgaatattcttctgcagatttcagaaattgttcatattattatagctcttcaaatatgactcayttaagattcttgccgagcaccgtggctcatacttgtagtcccagtactttgggaggctgaggcggatggatcctttgaggtcaggagttaaagaccagcg

SEQ ID NO: 315657 - DNA, 201 bp, Homo sapiens
catttacctctaaaatatgtatccccaaggtttttcagccaaatagatactctcattcagaattgtcaactttcagaggcaatggtgactccagcatcgcygacctggcccaatgtaattgaagatttttctaagcatcttctgagccggtcaccgtccaagtgcacatagcctgcctctgtcacagatgcccctgcagga

SEQ ID NO: 315658 - DNA, 201 bp, Homo sapiens
agctggggcgagtcagttggttaatccagggctgccactgtggctgcaggaaacagtcggctccttgcatttggtttcattcatgaatttcatatcctgtkgttgaatattcttctgcagatttcagaaattgttcatattattatagctcttcaaatatgactcacttaagattcttgccgagcaccgtggctcatactt

SEQ ID NO: 315659 - DNA, 201 bp, Homo sapiens
agatgctttgacccaaaggccatgcccagggtaaactaccctggctctggtgggtccaaaccaagctggggcgagtcagttggttaatccagggctgccastgtggctgcaggaaacagtcggctccttgcatttggtttcattcatgaatttcatatcctgttgttgaatattcttctgcagatttcagaaattgttcat

SEQ ID NO: 315660 - DNA, 201 bp, Homo sapiens
ggctgtgggttgagattctcactgttatactcaaaatacctttgtctgaaggagcgacaggagcatctacggttgagaagacagaaagtttggcttcgtcsatgtcttgctgtgtgaattttccagacttagcccagtcgacagccttcccaaaagactggagcgtctctattgtatttgggtccctaggaaacccagaga

SEQ ID NO: 315661 - DNA, 201 bp, Homo sapiens
acaaatggctttagcttcttggagatgatgatactaagtatatcagatgctttgacccaaaggccatgcccagggtaaactaccctggctctggtgggtcmaaaccaagctggggcgagtcagttggttaatccagggctgccactgtggctgcaggaaacagtcggctccttgcatttggtttcattcatgaatttcata

SEQ ID NO: 315662 - DNA, 201 bp, Homo sapiens
tctcgggctcctgtgcagtcgagcgccacggctgctcatcggatgatccaggatgggtccttggcaattttcgggttctcgggtccgaggatggccaggcygtgtgtgctcttcccagtgccgaggtatctgagaggaaggcaggcgtggtcagcaaggactggcttctgcgtgagcgctgttagagtcagcacgagggct

SEQ ID NO: 315663 - DNA, 201 bp, Homo sapiens
ctcctgcccatgcatgccgggaacttggaaaacagcaacgtcatctgtgaggctgtgggttgagattctcactgttatactcaaaatacctttgtctgaargagcgacaggagcatctacggttgagaagacagaaagtttggcttcgtcgatgtcttgctgtgtgaattttccagacttagcccagtcgacagccttccc

SEQ ID NO: 315664 - DNA, 201 bp, Homo sapiens
ggagaacgcagcccctctgctgctcttcatgagttgttaaccttggacttctgcttctcaccttgattcatccgggcatcgtgataaatgctgtctcataygcctctcaaatctttaccggaatgcagcttgttgaaaagtacagaaagctatttttagcactttgcaacttgcctttcattgttcactttagctgtttcg

SEQ ID NO: 315665 - DNA, 201 bp, Homo sapiens
tcctggaaaggcgtccctaagggaggggtgcaggcagttaccggtcctccctccagtggaactgcccgtgttccagggagctggggatgtgtcccagggcrtaagagagaagaggaggtaacttgtgaatgccttcctctaattcatatttccattcatttgaaaagccagctggcgagcctaaagcctccacttggaggt

SEQ ID NO: 315666 - DNA, 201 bp, Homo sapiens
atacctaatcggcgagtgcccatctgccccaccagccccagtgcgtgctgtctgtggagtgtgtctcatgctttcagatgtgcatatgagcagaattaattaaacatttgcctacaactccaacagtcctctgttttagttttttaagtaggagattagtacctcaatctatgggtggctactaaaggttttctcagtttt

SEQ ID NO: 315667 - DNA, 201 bp, Homo sapiens
gcgtccctaagggaggggtgcaggcagttaccggtcctccctccagtggaactgcccgtgttccagggagctggggatgtgtcccagggcgtaagagagawgaggaggtaacttgtgaatgccttcctctaattcatatttccattcatttgaaaagccagctggcgagcctaaagcctccacttggaggtcataaagatg

SEQ ID NO: 315668 - DNA, 201 bp, Homo sapiens
ctaagggaggggtgcaggcagttaccggtcctccctccagtggaactgcccgtgttccagggagctggggatgtgtcccagggcgtaagagagaagaggakgtaacttgtgaatgccttcctctaattcatatttccattcatttgaaaagccagctggcgagcctaaagcctccacttggaggtcataaagatgagtggt

SEQ ID NO: 315669 - DNA, 201 bp, Homo sapiens
ccctgagcagctgtgactcgaggctcagatttccacagccgaggaaaggacccaaggaattctagtctaaaaatctctttttcagacctacagtaagcctsgcgtccctgcatccctggggacaatgggatttcctaatgtagatgaagcctgagtaattctcacctttgatcatgtcagaggtgcgaatattaatctctg

SEQ ID NO: 315670 - DNA, 201 bp, Homo sapiens
cagcctcccgagtacctgggaccacaggcatgtgccaccattcccggctaaaagaaatatacacctattcccatgtttgtgtgtcacgcttggtaattgaygtgggagtttgaagatccgtacctaacacagaaagcatttcatttttttaaaatttgatgtctaaaagtttgtagtaattctcaagttttaatttttctt

SEQ ID NO: 315671 - DNA, 201 bp, Homo sapiens
aaaagaaatatacacctattcccatgtttgtgtgtcacgcttggtaattgatgtgggagtttgaagatccgtacctaacacagaaagcatttcattttttwaaaatttgatgtctaaaagtttgtagtaattctcaagttttaatttttcttgtgagacttggttctcatgaatatttttcaaagatattttttcttgtaa

SEQ ID NO: 315672 - DNA, 201 bp, Homo sapiens
gtttgaagatccgtacctaacacagaaagcatttcatttttttaaaatttgatgtctaaaagtttgtagtaattctcaagttttaatttttcttgtgagayttggttctcatgaatatttttcaaagatattttttcttgtaaaaccttggcatgaaacttatttctagcactggtaaataaaaaaacaagcttttaacat

SEQ ID NO: 315673 - DNA, 201 bp, Homo sapiens
ttgtgttataagctaggtttgaatataaagtaaataagactatgtaatatatatatacacacatacatatacatacatgttagatacatagtaaacatgcrtttacctctaaaatatgtatccccaaggtttttcagccaaatagatactctcattcagaattgtcaactttcagaggcaatggtgactccagcatcgctg

SEQ ID NO: 315674 - DNA, 201 bp, Homo sapiens
gctgtgggtctgcagtcagcaagggacgtcctactgggccccaccgagtgctgccagtccctgagctcaaggaggacacatgaataaaagccctttgcaaygcagggctccatcctaccaatgcataaattaatagaagtcctttcaggacctagaattgtgtctctttaaaagtgtggtgcccccatcacctggaaattg

SEQ ID NO: 315675 - DNA, 201 bp, Homo sapiens
ggtcatttctttgccgctagagtgcactacacacactgagcaggtgcagaagacagctgtggtgcattgctctaaaggcttgcctgcatttagacaactaatatttttgctttatagtctcttattctttgatatcttgcaatcatttccctaattagcacctgatgtttatgaagaaagaaggaaatacagtcatccctc

SEQ ID NO: 315676 - DNA, 201 bp, Homo sapiens
tagcacttacggccatccatccatgggcatcatgcatttgttcactgtgtttcttgctttcgggtctctcctgatcggaacaagctcttccagggccagargcttcccatcttgtcactgatgcatccacacagagcccagcagaggtggcacttggggcacccgagctggacagtgggttggtggttgagtgaagagccc

SEQ ID NO: 315677 - DNA, 201 bp, Homo sapiens
ttctccaaacgtcactctcaggcaggtctgcaggctctccgattgtcaatggcagcccctccctgtcctccacaccctcaacaccccccaccccgcttgtkatttttctccttagcacttacggccatccatccatgggcatcatgcatttgttcactgtgtttcttgctttcgggtctctcctgatcggaacaagctctt

SEQ ID NO: 315678 - DNA, 201 bp, Homo sapiens
tggtcatttctttgccgctagagtgcactacacacactgagcaggtgcagaagacagctgtggtgcattgctctaaaggcttgcctgcatttagacaactaatatttttgctttatagtctcttattctttgatatcttgcaatcatttccctaattagcacctgatgtttatgaagaaagaaggaaatacagtcatccct

SEQ ID NO: 315679 - DNA, 201 bp, Homo sapiens
ccagccacgcagaggaccctggaatgcagcatgctgccgccgcgcccccgccccagcccctctgctacctgagctctttcccagatgtccatttggctaamctccctcaacttcttccctttccttctttctccaaacgtcactctcaggcaggtctgcaggctctccgattgtcaatggcagcccctccctgtcctccac

SEQ ID NO: 315680 - DNA, 201 bp, Homo sapiens
gtgaggcttgcatgtgggtggcctgtgttatatatgcaattttaaatgatctagttgccgcattaaagaaaggcggggcagggggccgggagtgggggacwctgggtgccaagactcaacatctgtaatcccagcccttcaggagcccaaggcaggtggatcacttgagcccaggagtttgaggccagcctgggcaacatg

SEQ ID NO: 315681 - DNA, 201 bp, Homo sapiens
gtggtcatttctttgccgctagagtgcactacacacactgagcaggtgcagaagacagctgtggtgcattgctctaaaggcttgcctgcatttagacaactaatatttttgctttatagtctcttattctttgatatcttgcaatcatttccctaattagcacctgatgtttatgaagaaagaaggaaatacagtcatccc

SEQ ID NO: 315682 - DNA, 201 bp, Homo sapiens
gagaccgtaacccagcggcgctagaggaattaaagacacacacacacaaatagaggtgtgaagtgggaaatccgtggtctcacagccttcagagccgagascccagaacagagatttacccacgtgtttattaacagcaagccagtcatcagcattgtttctacagatatcaaattaactaaaagtatcccttatgggaaa

SEQ ID NO: 315683 - DNA, 201 bp, Homo sapiens
agtggtcatttctttgccgctagagtgcactacacacactgagcaggtgcagaagacagctgtggtgcattgctctaaaggcttgcctgcatttagacaactaatatttttgctttatagtctcttattctttgatatcttgcaatcatttccctaattagcacctgatgtttatgaagaaagaaggaaatacagtcatcc

SEQ ID NO: 315684 - DNA, 201 bp, Homo sapiens
tggctaaacattaagttacttgttggctactggccacgatccgagatgataggttcccagacccagcggccactggagaattgtagaacagcaggatagcrggtggtaagacgtggcctacgagtggcccagttccagtaaagcaacttaaccgagaagcaaaagcttgactccttaacccgggcctcatctattcagtga

SEQ ID NO: 315685 - DNA, 201 bp, Homo sapiens
tggttgaggacaccttctagtctcatgtgtgaaacacaagcgtttgtttgacatagtctgttgtgtagttaatgttgtctcacttatgtcatcaatgattygagaacctccgctgacagtcaccacccacgtctgcgacaggctctgaaggttgctgcagcttcttttaaatcctgaggcccctgatgctgcgtctgcctc

SEQ ID NO: 315686 - DNA, 201 bp, Homo sapiens
gggtgtgcctggttgaggacaccttctagtctcatgtgtgaaacacaagcgtttgtttgacatagtctgttgtgtagttaatgttgtctcacttatgtcaycaatgattcgagaacctccgctgacagtcaccacccacgtctgcgacaggctctgaaggttgctgcagcttcttttaaatcctgaggcccctgatgctgc

SEQ ID NO: 315687 - DNA, 201 bp, Homo sapiens
acacccatggagcaaagtgtggtgatgtttgaactgtagcctggggctctcgctcccatgggactcctcggggaatttcccagcagcaggatcgcctctgygtccttgcagggggtggcgtctgctgggggcacatcccatcgtgcagggggaacggctgaggtcacaggctttgcctgacaagtgccactcacagctgct

SEQ ID NO: 315688 - DNA, 201 bp, Homo sapiens
acggcgggtgtgcctggttgaggacaccttctagtctcatgtgtgaaacacaagcgtttgtttgacatagtctgttgtgtagttaatgttgtctcacttaygtcatcaatgattcgagaacctccgctgacagtcaccacccacgtctgcgacaggctctgaaggttgctgcagcttcttttaaatcctgaggcccctgat

SEQ ID NO: 315689 - DNA, 201 bp, Homo sapiens
accaccaatttatatttcttaacacccatggagcaaagtgtggtgatgtttgaactgtagcctggggctctcgctcccatgggactcctcggggaatttcycagcagcaggatcgcctctgtgtccttgcagggggtggcgtctgctgggggcacatcccatcgtgcagggggaacggctgaggtcacaggctttgcctga

SEQ ID NO: 315690 - DNA, 201 bp, Homo sapiens
ttctttgtgggcagcctgaggaggttggcttttatgttatgtgagattcgaaggtcctgagcagggactggcccacaccaagagctttctaaagggaccckctgctgttcactgaggcaggaggcagggctcccagccggggctttgcagtcacctagcaagagatggtgggtccagactggctactgtgcagatggcgag

SEQ ID NO: 315691 - DNA, 201 bp, Homo sapiens
aaacaaagtgactccttctcgctcgtttcagaaatgagagctgcagtgaaaactacaccaccgacttcatttaccagctgtattcagaagagggcaaaggygtgtttgactgcaggaagaacgtgctgggtcacatgcagcaggtaggcccgagactgcatgaggggccacaaagccactgtcatgtgacttttaaaagat

SEQ ID NO: 315692 - DNA, 201 bp, Homo sapiens
tgctcacagctcaccttgtggtcacccagcactgaccctgctcacagctcgccttgtggtcacccagcactgacccacccgccccaccctcctatccaccrtgctgtgaactcacctgccacgggtctacacccactgtccgaagccctcggcccacacgggctccaggccttgggatgctttgcgttgcaccagggctgc

SEQ ID NO: 315693 - DNA, 201 bp, Homo sapiens
ggggaaggtgctcccaggctgctggtggctcatggggccctcaggggacactcatcccaggtggagggaaaggatgctctggagctgatgctcacaggggmgggggctccgagcccgcacagggcagtgaggatgggaactgcaggggcagggccggcttctttgtgggcagcctgaggaggttggcttttatgttatgtg

SEQ ID NO: 315694 - DNA, 201 bp, Homo sapiens
agcagagatgtggcgtggggctgagtgtggcccaccggtaatccagctgcatgcccccttccctgcctgcacctgggcgccgcctctgcacgatgaaggcrggcatttggtgtggtccttacagccgtgtgccccatcccactgatccttgcctgcctgcagaaagctacaggattggctttgcctttaagtgtcctgact

SEQ ID NO: 315695 - DNA, 201 bp, Homo sapiens
gaggacagtggctgaggatcctcctgctctctggatggtgagcagtgctcagaggcatgccgaggagggcctgctggagatcccccagacagcaatgctgrggaaggtgctcccaggctgctggtggctcatggggccctcaggggacactcatcccaggtggagggaaaggatgctctggagctgatgctcacaggggag

SEQ ID NO: 315696 - DNA, 201 bp, Homo sapiens
aacctgctccgttgcctgcctcacacccaccccgctgtgctgcctgcaggcaccccctttcatgaggacctgggctgtgcccaggcggccccctgtgttgytggggcctgtgctgctctcgcacggcctccagagcctccctcggccccttgacccgcatgaaccggcttcccctggtgactcagtcccctcccgtccctt

SEQ ID NO: 315697 - DNA, 201 bp, Homo sapiens
cccaaagtgctgggattacaggcatgacccaccgtgcccagcctcctactttgtggaattcttatgctgaggaattaaatgagtgagcaaagcagacacarctctctggttccgtggagactgcgtttatagatggggagagaggacagtggctgaggatcctcctgctctctggatggtgagcagtgctcagaggcatgc

SEQ ID NO: 315698 - DNA, 201 bp, Homo sapiens
cctctgtgtccttgcagggggtggcgtctgctgggggcacatcccatcgtgcagggggaacggctgaggtcacaggctttgcctgacaagtgccactcacrgctgctgtccacgtgccagccctgggacacagccctctgccatccttccacccactcggaggccagggaggcacctccgtgccacactgcaggcaggcag

SEQ ID NO: 315699 - DNA, 201 bp, Homo sapiens
ggggtcctgaggccccacccgtgcctgggattctctaagacaaaggacaagtcttaaagccttacagcatcttaagtcttagatcacatttagagagaccyggtacaggtggaacagtgcaaccctcagaattctgcactggcccttcaagaaggcagttgtgggctctttggacccttgacggggatctgtcctctgtcc

SEQ ID NO: 315700 - DNA, 201 bp, Homo sapiens
ttcacctttatcaccgcatgagggagcattcccaggttctagggattagggataggactgggattcctttggggactgctctcccgcccaccactgtgccrgaatgtgatgcacacagcggccagcatatccaaaggccccaggaggacctggggtggctggaacaggacctggtgccgggagcaggcggggccggggatt

SEQ ID NO: 315701 - DNA, 201 bp, Homo sapiens
gaagagggcgttgcagccggactgatgtatgggtgggaaggcggccgatgcatttctttgccatttttctccccgccgagcttgggtcctcatggagggcrgatggcagacatttcactctgggacccgatgcctgtgcatctggaagacttccccaggtgcctgggtctaagaaccaccatctgcctttgagtagagttt

SEQ ID NO: 315702 - DNA, 201 bp, Homo sapiens
atggccaggcccccaaaacgggacatcgaggtcacctccaggtggctgccatggtggggttgcgggggaccacgttcacacccactccgagggcacatccyggctgctgcacacccttcacctctgcgggatgctgggaccgcatgtttgggcgcggtgggggggccttgctgcactcactcttgggggagctctgggatg

SEQ ID NO: 315703 - DNA, 201 bp, Homo sapiens
gcacccagccttatttctgtgtttctgtaatcattgtgcatgttaacagactgccttgggtgagtcaggacaggattttggcaaaagaaccaggccctttmtgcctggagctgtcactcctgtggtgaggtgcgggtacgacgtgcctgtagcctgacctgagaggaaaagctcctgtcttatgaaagggcccaggggaac

SEQ ID NO: 315704 - DNA, 201 bp, Homo sapiens
cagtccttcatatcttttcagctgtgtcttactacgattaagattttatttctgtgtgtgtgtgtgttttttttgtttgtttgtttgtttgtttttgagaygggatcttgccctcttgcccagcctggagtgcagtggcttgatgtcggctcactgcaacctccgcctcctgagttcaagcgattttcctgtcccagcctc

SEQ ID NO: 315705 - DNA, 201 bp, Homo sapiens
aattagggctctaccaatctgatgggccatcagaagcaattaaaattagaaaggtgaagatacggtaacgtagtcaggacaaacatcaggataccagattrcacgttcacaatggcatttcggctaagaaagtgcgggtgaatatagaacagagggccgtatgtcagtaattgggttccgttttgtgtttcttttccacaa

SEQ ID NO: 315706 - DNA, 201 bp, Homo sapiens
aaaagcttttgatacaggactccaaccttttatcagggagaattaggctctttaaataattagggctctaccaatctgatgggccatcagaagcaattaarattagaaaggtgaagatacggtaacgtagtcaggacaaacatcaggataccagattgcacgttcacaatggcatttcggctaagaaagtgcgggtgaata

SEQ ID NO: 315707 - DNA, 201 bp, Homo sapiens
atgctggcttcggagcccagtagggtggaaggggaaactgagaacagcgccattttgcctcccacggctctgggcccgttaccttcctgtgtacatacatyatttgatgggatcttttcagtgtaaagtgcagtaattaattttgcaaaaattactgggtctgggaggcagtgtgttggaatgatggtgtcaccatgtggc

SEQ ID NO: 315708 - DNA, 201 bp, Homo sapiens
tctgaagcaatgctggcttcggagcccagtagggtggaaggggaaactgagaacagcgccattttgcctcccacggctctgggcccgttaccttcctgtgyacatacatcatttgatgggatcttttcagtgtaaagtgcagtaattaattttgcaaaaattactgggtctgggaggcagtgtgttggaatgatggtgtca

SEQ ID NO: 315709 - DNA, 201 bp, Homo sapiens
ctgcaggggcagggccggcttctttgtgggcagcctgaggaggttggcttttatgttatgtgagattcgaaggtcctgagcagggactggcccacaccaaragctttctaaagggaccctctgctgttcactgaggcaggaggcagggctcccagccggggctttgcagtcacctagcaagagatggtgggtccagactgg

SEQ ID NO: 315710 - DNA, 201 bp, Homo sapiens
gtcctttagaggaattcaaccctctctaattaaaagtatccaatatcctcaggtcaatatgtgtaaactgttaagacttcaagattagaaccttaaaaccraagtcagaagtgtgaggtttccattggctggacgtgcattaggtcaatgacacacatatttattggacaccaggcttgagccccacatgggcacctttgg

SEQ ID NO: 315711 - DNA, 201 bp, Homo sapiens
gtgagcagtgctcagaggcatgccgaggagggcctgctggagatcccccagacagcaatgctggggaaggtgctcccaggctgctggtggctcatggggcmctcaggggacactcatcccaggtggagggaaaggatgctctggagctgatgctcacaggggagggggctccgagcccgcacagggcagtgaggatgggaa

SEQ ID NO: 315712 - DNA, 201 bp, Homo sapiens
acagagctccgtggtggggccgggccctgtggctgcagcagggatgttcagggctgcgcgtacctgcgtcttcactggtgtctttcccgcgcccagcaccrtgcctggcgcttcgcaggaatgcaagtgtttgctgcctgcctcctgcctggaatctccactgaggagcaggaaaccaggggttctagctgtcttcttcgt

SEQ ID NO: 315713 - DNA, 201 bp, Homo sapiens
gtacctgcggtgggtccggtggacgcggttcaggtgggggaccctcagcatcatctccctgaggctgcaccccacatcctgaatgctcccgtggaaagtcytgaaggggccggcatcccgcttcatacctggcgttaggtctgcacgtctgtcgctgagcggggtgcctgggctgccctcgtgggaaggatccttctgggg

SEQ ID NO: 315714 - DNA, 201 bp, Homo sapiens
tggcagggcctcagtgatcctgggcaatgacttatccctattttacacatgagcaaggggcgcctgagttgcaccaccttccctgagttcacagagctccrtggtggggccgggccctgtggctgcagcagggatgttcagggctgcgcgtacctgcgtcttcactggtgtctttcccgcgcccagcaccatgcctggcgc

SEQ ID NO: 315715 - DNA, 201 bp, Homo sapiens
ctagagtgagactgggctgtgtttagaagatgttccgctgttttgccatggaggtagggggcctggtgatgggcagtccctgtaccagcctgtgagccagkgcctgggtgcctggggggtctcgggaggtgcagacggggctgccagcgctgaaatgaaccagctctgttttgggttctgttccattccagactgttttct

SEQ ID NO: 315716 - DNA, 201 bp, Homo sapiens
ttggaaccaaaatctctgccagagctatggagtggatcactgcaaaactcaaggaggcccggggcagaggtaaggggtctggggagggaggccacagcctygtgatgcaggccgtcctgccttggtgaaaatgctgtcctatcggggagaagtagggtgctggttccttcttcagttcagtactgagctgcacgtgatgtt

SEQ ID NO: 315717 - DNA, 201 bp, Homo sapiens
tcatctgcactgcaagggaaatctgttttcagagcaaggggagacaataataataataataatccctagagtgagactgggctgtgtttagaagatgttcygctgttttgccatggaggtagggggcctggtgatgggcagtccctgtaccagcctgtgagccagtgcctgggtgcctggggggtctcgggaggtgcagac

SEQ ID NO: 315718 - DNA, 201 bp, Homo sapiens
ccaggtgctggccccactgcgcggctgttctcagtctcactgggcttccaggccgggttcagcatggttctgaggaatctcagttctcatctcgccccgtrattctgctcccccacctgcccatgttgacagggtgttattaatcttttttaaaatcttttataggaaaaaaatttaccaccgatgattccatttgtgtgc

SEQ ID NO: 315719 - DNA, 201 bp, Homo sapiens
atgttggccaggctggtcttgacctcctgacctcaggtgacccacccaccttggcctcccaaagtgctgggattacaggcatgacccaccgtgcccagccycctactttgtggaattcttatgctgaggaattaaatgagtgagcaaagcagacacaactctctggttccgtggagactgcgtttatagatggggagagag

SEQ ID NO: 315720 - DNA, 201 bp, Homo sapiens
ggccggggagtgtgagtgtgtcctggcacaggcaggcagaaggtgtccaacgtgcaactggagagcgcagaggtggctcaagtccccttcctcgcaggagyctggaaggctactgcatagcgtttgccttagtagaaaatggaccatttttgaagcctaggtccctgcaggcctcctggctaactcggctgtcaaagcccc

SEQ ID NO: 315721 - DNA, 201 bp, Homo sapiens
tcacttgtttccgtgggagagatccagccgtggctgtcgacagcagctgccgactgtgcccaatagagaaggtatctgggaaagagcccagcacggggcckgggagtgtgagtgtgtcctggcacaggcaggcagaaggtgtccaacgtgcaactggagagcgcagaggtggctcaagtccccttcctcgcaggagtctgg

SEQ ID NO: 315722 - DNA, 201 bp, Homo sapiens
agccctgagtcgtgtccggtattctcgactccggtccaacgacacccttttcctttaggagctttgcgggcaacctgaacacctacaagcgacttgccatyaagctgccggatgatcagatcccaaaggtaggtggccggcctcccgcgatgccccgacctctcctgcgggcctcccctcatggcctctgcctcagtgaat

SEQ ID NO: 315723 - DNA, 201 bp, Homo sapiens
taggagctttgcgggcaacctgaacacctacaagcgacttgccatcaagctgccggatgatcagatcccaaaggtaggtggccggcctcccgcgatgcccygacctctcctgcgggcctcccctcatggcctctgcctcagtgaatgaggccacctgttttcaggcctggcacggcatgagccactgccaaagtgtgcagc

SEQ ID NO: 315724 - DNA, 201 bp, Homo sapiens
ggtgtctttcccagggcgggacgatcattggcagtgcgcggtgccaggccttccgcacgcgggaaggccgcctgaaggctgcttgcaacctgctgcagcgmggcatcaccaacctgtgtgtgatcggcggggacgggagcctcaccggggccaacctcttccggaaggagtggagtgggctgctggaggagctggccagga

SEQ ID NO: 315725 - DNA, 201 bp, Homo sapiens
tgaacacctacaagcgacttgccatcaagctgccggatgatcagatcccaaaggtaggtggccggcctcccgcgatgccccgacctctcctgcgggcctcycctcatggcctctgcctcagtgaatgaggccacctgttttcaggcctggcacggcatgagccactgccaaagtgtgcagcaaatggagctcacgtgtgcc

SEQ ID NO: 315726 - DNA, 201 bp, Homo sapiens
gcatcgcccaggtgcccctactgcgtgtcaggtgacggcgggtgtgcctggttgaggacaccttctagtctcatgtgtgaaacacaagcgtttgtttgacrtagtctgttgtgtagttaatgttgtctcacttatgtcatcaatgattcgagaacctccgctgacagtcaccacccacgtctgcgacaggctctgaaggtt

SEQ ID NO: 315727 - DNA, 201 bp, Homo sapiens
agaaaatagaatagcacagcggttctcacggactaagctggcaggggacagtcccctaacatctcagctaacacctaacggtgtctgtgtccggtgaaagyggcttcagcagggacagtcacagagcagcgtggagtgagctggcttgtggggtcgtcttttccgtccccttctatggggcctgggagaagggagcggcag

SEQ ID NO: 315728 - DNA, 201 bp, Homo sapiens
accgcatgtttgggcgcggtgggggggccttgctgcactcactcttgggggagctctgggatggtgggcgcgccccgggcctgggctggagtgactgatckcttctctgtgaccagacctgcgaccgcatcaagcagtccgccagcggaaccaagcggcgcgtgttcatcatcgagaccatgggcggctactgtggctacc

SEQ ID NO: 315729 - DNA, 201 bp, Homo sapiens
gcatcaagcagtccgccagcggaaccaagcggcgcgtgttcatcatcgagaccatgggcggctactgtggctacctggccaacatgggggggctcgcggcyggagctgatgccgcatacattttcgaagagcccttcgacatcagggatctgcaggtatgtgacggggctggcctcagggcccgtccccttgggatccact

SEQ ID NO: 315730 - DNA, 201 bp, Homo sapiens
atgccgcatacattttcgaagagcccttcgacatcagggatctgcaggtatgtgacggggctggcctcagggcccgtccccttgggatccactgggtgctrcggagtgaatcatcgtgtctagggtggtttgctttccgaggggcatggagatggagatgctacagaacatgccacgcttgatacacttcgcatcgcccag

SEQ ID NO: 315731 - DNA, 201 bp, Homo sapiens
gatctgcaggtatgtgacggggctggcctcagggcccgtccccttgggatccactgggtgctacggagtgaatcatcgtgtctagggtggtttgctttccraggggcatggagatggagatgctacagaacatgccacgcttgatacacttcgcatcgcccaggtgcccctactgcgtgtcaggtgacggcgggtgtgcct

SEQ ID NO: 315732 - DNA, 201 bp, Homo sapiens
tttgctttccgaggggcatggagatggagatgctacagaacatgccacgcttgatacacttcgcatcgcccaggtgcccctactgcgtgtcaggtgacggygggtgtgcctggttgaggacaccttctagtctcatgtgtgaaacacaagcgtttgtttgacatagtctgttgtgtagttaatgttgtctcacttatgtca

SEQ ID NO: 315733 - DNA, 201 bp, Homo sapiens
tgtcctccctatctgggaggaggctccccaagacccaagccgcgagagctgcagcctccttggccacgctcactgccacacttggttggcacttcccagcctgcagtgcctggcacacagtaggtacttagtagaagtttattgtctgattaacaaaatactctcttccagtccaacgtggagcacctgacggagaaaatg

SEQ ID NO: 315734 - DNA, 201 bp, Homo sapiens
ggcccgtccccttgggatccactgggtgctacggagtgaatcatcgtgtctagggtggtttgctttccgaggggcatggagatggagatgctacagaacaygccacgcttgatacacttcgcatcgcccaggtgcccctactgcgtgtcaggtgacggcgggtgtgcctggttgaggacaccttctagtctcatgtgtgaa

SEQ ID NO: 315735 - DNA, 201 bp, Homo sapiens
agcctcagggactgtgtcccaagactgcagtgggtgtctgaacctggggatagtacccgccccctgtatacacgaggttgcttccatctgataaccaaggyggctactgagtgactcgggcaggaggcacagacagcatggagacgcagggcacagggatgattcacgttctgggtgggacagacaagagagcacgagatt

SEQ ID NO: 315736 - DNA, 201 bp, Homo sapiens
tccaggtggcaagaacgatattatgtgatgggctgctttttcttctctcagtagagtgtatattatttaattataagatacaattgaaaatctctttctcytttctatattcccgactccccgggccttgaatgaagaaagtatttctcaggctgtttttgtttgtttgtttgtttgttttttctacttgcttggatatct

SEQ ID NO: 315737 - DNA, 201 bp, Homo sapiens; identical to SEQ ID NO: 65756

SEQ ID NO: 315738 - DNA, 201 bp, Homo sapiens
tcctcgagaatatctcagtgtccccattcttttaccattttattctgattctatgttagtacttgattttccctgacatagaagactattgcttgtagctrgagatgagagaacatattcacattcacgtattaatttcaggggaattttctgtcagatgtgaaattatggtaaaattccgtatattaagatgatcatagc

SEQ ID NO: 315739 - DNA, 201 bp, Homo sapiens
ccaagcggcgcgtgttcatcatcgagaccatgggcggctactgtggctacctggccaacatgggggggctcgcggccggagctgatgccgcatacattttygaagagcccttcgacatcagggatctgcaggtatgtgacggggctggcctcagggcccgtccccttgggatccactgggtgctacggagtgaatcatcgt

SEQ ID NO: 315740 - DNA, 201 bp, Homo sapiens
accagacacggacagcaccgcgggtcgcggctaagggctctgccatgcacatggaatcctggggcctcctccttctgcccagatagtcgggcagacacatygagtgctggcagataagccgccttttctccacatgagccctgagtcgtgtccggtattctcgactccggtccaacgacacccttttcctttaggagcttt

SEQ ID NO: 315741 - DNA, 201 bp, Homo sapiens
catgtttgaactgttaggttgtatttatcgttttctgtattacagacgacttgatgacaaatgaccaatcctctaatgttcaatataaaaatatcaattgyataaggagataaggggcatttggctaaaataaaattcagtgtgccccaccctctccacatgtaatttgctctaaaaaggcatgaatgactaaattagccc

SEQ ID NO: 315742 - DNA, 201 bp, Homo sapiens
ctgcctcagtgaatgaggccacctgttttcaggcctggcacggcatgagccactgccaaagtgtgcagcaaatggagctcacgtgtgcccgtgacccagcrctcacctgccttctgttttgcagaccaattgcaacgtagctgtcatcaacgtgggggcacccgcggctgggatgaacgcggccgtacgctcagctgtgcg

SEQ ID NO: 315743 - DNA, 201 bp, Homo sapiens
gcacatggaatcctggggcctcctccttctgcccagatagtcgggcagacacatcgagtgctggcagataagccgccttttctccacatgagccctgagtygtgtccggtattctcgactccggtccaacgacacccttttcctttaggagctttgcgggcaacctgaacacctacaagcgacttgccatcaagctgccgg

SEQ ID NO: 315744 - DNA, 201 bp, Homo sapiens
cacccgcggctgggatgaacgcggccgtacgctcagctgtgcgcgtgggcattgccgacggccacaggatgctcgccatctatgatggctttgacggcttygccaagggccaggtgagtcacccaggatgccgtaggcaggcagacaccctggctctgagcacagtggacgtggcggcgggggggtgccctccatggccct

SEQ ID NO: 315745 - DNA, 201 bp, Homo sapiens
agttctcatctcgccccgtgattctgctcccccacctgcccatgttgacagggtgttattaatcttttttaaaatcttttataggaaaaaaatttaccacygatgattccatttgtgtgctgggaataagcaaaagaaacgttatttttcaacctgtggcagagctgaagaagcaaacggattttgagtaagttggctggg

SEQ ID NO: 315746 - DNA, 201 bp, Homo sapiens
agtgcccatctgccccaccagccccagtgcgtgctgtctgtggagtgtgtctcatgctttcagatgtgcatatgagcagaattaattaaacatttgcctayaactccaacagtcctctgttttagttttttaagtaggagattagtacctcaatctatgggtggctactaaaggttttctcagttttgtgggcaaactatg

SEQ ID NO: 315747 - DNA, 201 bp, Homo sapiens
cctctatgaaggctgagactcaaggcagaagaggtttcatttaagacctgaggctgagacagagtgagcctggttagaatgccccatgcgtgcctaactcyggcaggcagacttcaggcactgttggctccaggctccacacagccacccctatcattttctatgggtgggtctttaatttggggcttaatagaaagcgag

SEQ ID NO: 315748 - DNA, 201 bp, Homo sapiens
taatcttttttaaaatcttttataggaaaaaaatttaccaccgatgattccatttgtgtgctgggaataagcaaaagaaacgttatttttcaacctgtggyagagctgaagaagcaaacggattttgagtaagttggctgggttccctgaggcaataagaccccaatgtgagtacgggacaggggaatggccattgctgtt

SEQ ID NO: 315749 - DNA, 201 bp, Homo sapiens
ggggcatgttttcctctatgaaggctgagactcaaggcagaagaggtttcatttaagacctgaggctgagacagagtgagcctggttagaatgccccatgygtgcctaactccggcaggcagacttcaggcactgttggctccaggctccacacagccacccctatcattttctatgggtgggtctttaatttggggctta

SEQ ID NO: 315750 - DNA, 201 bp, Homo sapiens
cgacggccacaggatgctcgccatctatgatggctttgacggcttcgccaagggccaggtgagtcacccaggatgccgtaggcaggcagacaccctggctstgagcacagtggacgtggcggcgggggggtgccctccatggccctcataccttttcatgcctcagtccgggatcctgtgatattgtgactgaatgactac

SEQ ID NO: 315751 - DNA, 201 bp, Homo sapiens
ttataggaaaaaaatttaccaccgatgattccatttgtgtgctgggaataagcaaaagaaacgttatttttcaacctgtggcagagctgaagaagcaaackgattttgagtaagttggctgggttccctgaggcaataagaccccaatgtgagtacgggacaggggaatggccattgctgttgctgtcggcaactcattca

SEQ ID NO: 315752 - DNA, 201 bp, Homo sapiens
tcctgaaattggctttatcatctagttgattcagccgaccctacaaaccctgtgtttctggcaagaccgctcgctgtgctggccaggcggaggcatctccygccagtgactgcaggcctcactgctgtctcctcttacctccacaggcacaggattcccaaagaacagtggtggctcaagctacggcccctcatgaaaatc

SEQ ID NO: 315753 - DNA, 201 bp, Homo sapiens
ctcagatgagttcatgaaatcctgatttaagattttaaaataatgaagattgttagttgacttgttcagtttattaaaatcctcatcttactgagcggggrgaacacttgatactttttcttaacaggccaagttcaggctacgggaatcacaggttttgttctgttccaactataaggacctagaaataaaaacatgaat

SEQ ID NO: 315754 - DNA, 201 bp, Homo sapiens
ttcaccacgttggccaggctggtctcaaactcctgacctcaggtgattcacccacctcagcctcccaaagtggtgggaatacaggcctgagccactgtgcscagccaaaacatctgaacttttaagtgatgccaaacatcaccagctttaggattcttttgttggtgaggtttgagtaatggggattttaagggaactgtc

SEQ ID NO: 315755 - DNA, 201 bp, Homo sapiens
tctagaccattaaccctggggctgctggctgcccgggtcagactggagggggctggtgggaaggaccgagccagtctctacctaccccatccatgatgcaycaggtcctgacacattctttcttcttttcatcattgttttaaaagactcaggatgtgcagaaggcgatggacgagaggagatttcaagatgcagttcgac

SEQ ID NO: 315756 - DNA, 201 bp, Homo sapiens
gacaccccaagtcagaatgacctggaatgagctgcacacaggcacacacgtgttatgagctgagcctgggacacagggtccaggcctcctaacttgcacayactccttcctcaccacctcctattcttatacttttaagccagagcccatgaatcccctgcaatgatgatgaaatagtaggcatatgtgtgatcttcttaa

SEQ ID NO: 315757 - DNA, 201 bp, Homo sapiens
aatcttcacagtgttgtgtccacaaacagcaggtgacaccttctctttttcctcagaagcctcctgagctaagcagtcccagggctctgacctcacagccrggccgtgtggggctggctgccaaccagcattaggacacacttggcggccggtcgtctagaccattaaccctggggctgctggctgcccgggtcagactgg

SEQ ID NO: 315758 - DNA, 201 bp, Homo sapiens
ggttatcagattaaagctgtgacccatccccagctcagatgagttcatgaaatcctgatttaagattttaaaataatgaagattgttagttgacttgttcrgtttattaaaatcctcatcttactgagcggggggaacacttgatactttttcttaacaggccaagttcaggctacgggaatcacaggttttgttctgttc

SEQ ID NO: 315759 - DNA, 201 bp, Homo sapiens
ccatgaatcccctgcaatgatgatgaaatagtaggcatatgtgtgatcttcttaaagaatccacaacggttatcagattaaagctgtgacccatccccagytcagatgagttcatgaaatcctgatttaagattttaaaataatgaagattgttagttgacttgttcagtttattaaaatcctcatcttactgagcggggg

SEQ ID NO: 315760 - DNA, 201 bp, Homo sapiens
tgaggtaagagaaccccgtttcctcccattgcttttccgtcatttattttagcaacttgtttcttctgtgctaaggatgagccggatttattcttcttcttttctcccctttgttagcttggctttatgtcacactggccagaacagggtaaaatttttttagcttctctgccttagggagagcctgtctttattgattaa

SEQ ID NO: 315761 - DNA, 201 bp, Homo sapiens
gcagttcttttgtgcaggctttttgctctagagatcctgaacgttggccagcaatttcccctcacagtttaagtggggccttctattttttgaatgtttgstaggacaacctccttgtgactatccatcaaaacttccagttttgaggaagatctgactgctgaatgaattgttcatgtttgtagaactgcatgttcgtag

SEQ ID NO: 315762 - DNA, 201 bp, Homo sapiens
ttgaggtaagagaaccccgtttcctcccattgcttttccgtcatttattttagcaacttgtttcttctgtgctaaggatgagccggatttattcttcttcttttctcccctttgttagcttggctttatgtcacactggccagaacagggtaaaatttttttagcttctctgccttagggagagcctgtctttattgatta

SEQ ID NO: 315763 - DNA, 201 bp, Homo sapiens
aaacttccagttttgaggaagatctgactgctgaatgaattgttcatgtttgtagaactgcatgttcgtagaactgtgcatgttcttccttaaatcagttytgtaagttacatattctaagaaatctttaaactgaagtttcaagaaacatgacttttttataatactcttgttaatggttccaacatggctgttccccac

SEQ ID NO: 315764 - DNA, 201 bp, Homo sapiens
ctattcttatacttttaagccagagcccatgaatcccctgcaatgatgatgaaatagtaggcatatgtgtgatcttcttaaagaatccacaacggttatcmgattaaagctgtgacccatccccagctcagatgagttcatgaaatcctgatttaagattttaaaataatgaagattgttagttgacttgttcagtttatt

SEQ ID NO: 315765 - DNA, 201 bp, Homo sapiens
cccctcagctttcttaatcagtcatagcagatgtgtgcttttattccggcaaaccactatcactgccagtgtccaacttagaaaaatgacagtctataaaraccagtgatgtgaatagtttcaatgggtttgtctttttgaagaactgactttggctttgattctttctacagcgattttcttttgctaatttagctatgg

SEQ ID NO: 315766 - DNA, 201 bp, Homo sapiens
gttgaggtaagagaaccccgtttcctcccattgcttttccgtcatttattttagcaacttgtttcttctgtgctaaggatgagccggatttattcttcttcttttctcccctttgttagcttggctttatgtcacactggccagaacagggtaaaatttttttagcttctctgccttagggagagcctgtctttattgatt

SEQ ID NO: 315767 - DNA, 201 bp, Homo sapiens
cggccacgattagcaacaatgtcccaggcacagaaataagcctgggctccgacactggcctgaatgctgttgttgaggtaagagaaccccgtttcctcccrttgcttttccgtcatttattttagcaacttgtttcttctgtgctaaggatgagccggatttattcttcttcttttctcccctttgttagcttggctttat

SEQ ID NO: 315768 - DNA, 201 bp, Homo sapiens
gagagagttcaggaaagctgtatctaagctccagcaaaggcggcctcttccgtaccagctgtcgctgcgtttacactgagacgagcacacagtcgggggcrtggctcaggtgtcagggctgcgctgttccacagccccctggggcagcctggcgggaccagaactcagacacgcctgggcacaaatcagcctcttgggaga

SEQ ID NO: 315769 - DNA, 201 bp, Homo sapiens
ctggcctcccttacctaccatgacacgccgagagctgagctgtcccactcgtgactaactcgccgttgcctgcaacctgctccgttgcctgcctcacacccaccccgctgtgctgcctgcaggcaccccctttcatgaggacctgggctgtgcccaggcggccccctgtgttgctggggcctgtgctgctctcgcacggcc

SEQ ID NO: 315770 - DNA, 201 bp, Homo sapiens
ggattgtgtgatttattatgcgattgttttaaatgcagtttttcattcattcgagtttctcgaagctaggttaaacaatttctttttttttcttttttttytttttttttttttttttttttttggagacagggcctcactctgtttcccaggctggaatgcagtgctgcaatcgctattcactgcagcctcgacctccca

SEQ ID NO: 315771 - DNA, 201 bp, Homo sapiens
ggagggattgtgtgatttattatgcgattgttttaaatgcagtttttcattcattcgagtttctcgaagctaggttaaacaatttctttttttttcttttytttttttttttttttttttttttttttggagacagggcctcactctgtttcccaggctggaatgcagtgctgcaatcgctattcactgcagcctcgacct

SEQ ID NO: 315772 - DNA, 201 bp, Homo sapiens
cacatggaatcctggggcctcctccttctgcccagatagtcgggcagacacatcgagtgctggcagataagccgccttttctccacatgagccctgagtcktgtccggtattctcgactccggtccaacgacacccttttcctttaggagctttgcgggcaacctgaacacctacaagcgacttgccatcaagctgccgga

SEQ ID NO: 315773 - DNA, 201 bp, Homo sapiens
ctccttctgcccagatagtcgggcagacacatcgagtgctggcagataagccgccttttctccacatgagccctgagtcgtgtccggtattctcgactccrgtccaacgacacccttttcctttaggagctttgcgggcaacctgaacacctacaagcgacttgccatcaagctgccggatgatcagatcccaaaggtagg

SEQ ID NO: 315774 - DNA, 201 bp, Homo sapiens
ggaccccagagggcacaatcccagggcagaaaggctgtgtttctagtgtgagtttctggaaactgactcagggcagcaggaatcccaagtacaaaccctcmgttcttaacactcctgctctccatgtgccctgacctcctctctgttcccgtcttgccagttctaaaggagtggaaatcgctttgctctaaagagttgggc

SEQ ID NO: 315775 - DNA, 201 bp, Homo sapiens
aacttttcccatttagatctgaagaaagagcgaaaaaccttttccagtgcccagtacctccttccagatctgggctgctgtgtccgcatcacagttccgcrtcctaacgagatgtttccttgcagcttgtcgtcacgcagctgggctatgacacacgtgtgaccatcctcgggcacgtgcagagaggagggaccccttcgg

SEQ ID NO: 315776 - DNA, 201 bp, Homo sapiens
gttccgcatcctaacgagatgtttccttgcagcttgtcgtcacgcagctgggctatgacacacgtgtgaccatcctcgggcacgtgcagagaggagggacyccttcggcattcgacaggatcttggtgagttgggaagggttgggcatcttcacaaggtctctaggaggaagcgtttctggagaggcacaggcaccagccg

SEQ ID NO: 315777 - DNA, 201 bp, Homo sapiens
cgggtcgcggctaagggctctgccatgcacatggaatcctggggcctcctccttctgcccagatagtcgggcagacacatcgagtgctggcagataagccrccttttctccacatgagccctgagtcgtgtccggtattctcgactccggtccaacgacacccttttcctttaggagctttgcgggcaacctgaacaccta

SEQ ID NO: 315778 - DNA, 201 bp, Homo sapiens
gctttgctctaaagagttgggctggaagcgggaggggctgtgagcacctgactgaggtcattggacgtcatggaaagataggaggtgacagggacagggcwggacgggaggctgcccctgacccacatggacctggtttccaggccagccgcatgggagtggaggcagtcatcgccttgctagaggccaccccggacaccc

SEQ ID NO: 315779 - DNA, 201 bp, Homo sapiens
actcattcaggggtttgaggaactggcttttctgaagctcagttaaaaaaatactaggtcttggctgggcgcggtggctcatgcctataatcccagcactktgggaggccgagacaggtggatcacaaggtcaagagatcgagaccaacctggctcatatggtgaaaccccatctctactaaaaatacaaaaatgagccag

SEQ ID NO: 315780 - DNA, 201 bp, Homo sapiens
ccatctctactaaaaatacaaaaatgagccaggcatggtgatgcacacctgtagtcccagctactcaggaggctgaggcaggagaaatcgcttgaacccgkgaggcagaggttgcagtgagctgagattgcaccactgtactcaagcctggcgacagagagagactccaccactgggtcttcgggaataattttaaacaat

SEQ ID NO: 315781 - DNA, 201 bp, Homo sapiens
gtagtcccagctactcaggaggctgaggcaggagaaatcgcttgaacccgggaggcagaggttgcagtgagctgagattgcaccactgtactcaagcctgrcgacagagagagactccaccactgggtcttcgggaataattttaaacaatggtttcatttgatcctgaaattggctttatcatctagttgattcagccga

SEQ ID NO: 315782 - DNA, 201 bp, Homo sapiens
gctactcaggaggctgaggcaggagaaatcgcttgaacccgggaggcagaggttgcagtgagctgagattgcaccactgtactcaagcctggcgacagagmgagactccaccactgggtcttcgggaataattttaaacaatggtttcatttgatcctgaaattggctttatcatctagttgattcagccgaccctacaaa

SEQ ID NO: 315783 - DNA, 201 bp, Homo sapiens
caacgcgctgctgatcatcggtggattcgaggtacgttaccgtttctctcttgccggtcttgcaggtgtgagccgcgccctgtgttggctaaacattaagytacttgttggctactggccacgatccgagatgataggttcccagacccagcggccactggagaattgtagaacagcaggatagcaggtggtaagacgtgg

SEQ ID NO: 315784 - DNA, 201 bp, Homo sapiens
tttttcttgtgagacttggttctcatgaatatttttcaaagatattttttcttgtaaaaccttggcatgaaacttatttctagcactggtaaataaaaaaacaagcttttaacatacagctcatatggtaagtaatgcttagcactcgtttcttgcttttctgagcgttttaaactttcttcactttctttgcgaaggaaa

SEQ ID NO: 315785 - DNA, 201 bp, Homo sapiens
tcatttccacctgcttttacttcccttggagggattgtgtgatttattatgcgattgttttaaatgcagtttttcattcattcgagtttctcgaagctagkttaaacaatttctttttttttcttttttttttttttttttttttttttttttttggagacagggcctcactctgtttcccaggctggaatgcagtgctgc

SEQ ID NO: 315786 - DNA, 201 bp, Homo sapiens
agagggaacgggtggagaatttgagagcggtcgctgcagttagctgagtttctttttaattccagggtcctctgctataaataactgttttttttttttttcagattgtaaatatgtaacaaatgcatagggtcaaatttatgaaaaccaaaatacgtggggcaaaaacaccccacaaatgatcatttccacctgctttta

SEQ ID NO: 315787 - DNA, 201 bp, Homo sapiens
gtagtgtggccgagactccaggggtgcccgtgagcacccgaggcgctgaggagggctgggtcgcagtctcctgtgattgtaccagcattaaaaatcgcttgtgtgtgtgtgtgtgtgtgtgtgtgtgctgagcctaaattttctttgagcctccaatacccattatgatgaacccctgccttgatgctgagggtagaaatt

SEQ ID NO: 315788 - DNA, 201 bp, Homo sapiens
cgtagtgtggccgagactccaggggtgcccgtgagcacccgaggcgctgaggagggctgggtcgcagtctcctgtgattgtaccagcattaaaaatcgcttgtgtgtgtgtgtgtgtgtgtgtgtgtgctgagcctaaattttctttgagcctccaatacccattatgatgaacccctgccttgatgctgagggtagaaat

SEQ ID NO: 315789 - DNA, 201 bp, Homo sapiens
gttttaccacctcttcttctgtgtggccaccagggggacgtagtgtggccgagactccaggggtgcccgtgagcacccgaggcgctgaggagggctgggtygcagtctcctgtgattgtaccagcattaaaaatcgcttgtgtgtgtgtgtgtgtgtgtgtgtgtgctgagcctaaattttctttgagcctccaataccca

SEQ ID NO: 315790 - DNA, 201 bp, Homo sapiens
gccggccacgattagcaacaatgtcccaggcacagaaataagcctgggctccgacactggcctgaatgctgttgttgaggtaagagaaccccgtttcctcycattgcttttccgtcatttattttagcaacttgtttcttctgtgctaaggatgagccggatttattcttcttcttttctcccctttgttagcttggcttt

SEQ ID NO: 315791 - DNA, 201 bp, Homo sapiens
ttttaagactctgaaaatttttgatctcactcccagaaagttttaccacctcttcttctgtgtggccaccagggggacgtagtgtggccgagactccaggrgtgcccgtgagcacccgaggcgctgaggagggctgggtcgcagtctcctgtgattgtaccagcattaaaaatcgcttgtgtgtgtgtgtgtgtgtgtgtg

SEQ ID NO: 315792 - DNA, 201 bp, Homo sapiens
ggacgtagtgtggccgagactccaggggtgcccgtgagcacccgaggcgctgaggagggctgggtcgcagtctcctgtgattgtaccagcattaaaaatcrcttgtgtgtgtgtgtgtgtgtgtgtgtgtgctgagcctaaattttctttgagcctccaatacccattatgatgaacccctgccttgatgctgagggtaga

SEQ ID NO: 315793 - DNA, 201 bp, Homo sapiens
gcctccagagcctccctcggccccttgacccgcatgaaccggcttcccctggtgactcagtcccctcccgtcccttcctggacctcagcacaggccctggsgctggcaggtgagcacccggcacccccgctaaccgcttggccctgctgcttcaggcttacaagagtgcgtgcgacatggccgaggcacgaggccgccacc

SEQ ID NO: 315794 - DNA, 201 bp, Homo sapiens
cagtgcgctagaaatagccttttacaaataccctgaatgagagcttctcgttctttttttcccccagaaaagtatgttttaagactctgaaaatttttgawctcactcccagaaagttttaccacctcttcttctgtgtggccaccagggggacgtagtgtggccgagactccaggggtgcccgtgagcacccgaggcgct

SEQ ID NO: 315795 - DNA, 201 bp, Homo sapiens
cccgggagaagcacgaggagttctgtgtccccatggtcatggttcccgctactgtgtccaacaatgtgccgggttccgatttcagcatcggggcagacacygccctgaacactatcaccgacgtaagtccgtgtgcgccctgccaggcgggcgccggctgacgctaaccccggggccccggccctttttatctaccagtgc

SEQ ID NO: 315796 - DNA, 201 bp, Homo sapiens
actcaggatgtgcagaaggcgatggacgagaggagatttcaagatgcagttcgactccgagggaggtgaggtgctttggagaaagctctgccctgtcaggracacacacccctcaggcccagccactgcaaacgtgcttaggggttgtgcttattccatgtcactgtgaaaaatcagaaagtcaggcagtactcacagcac

SEQ ID NO: 315797 - DNA, 201 bp, Homo sapiens
gaggctgaggcaggagaatcgcttgaacccgggaggcagaggttgcagtgagccgagattgcaccacctcactccagcctgggccacaaagcgagactccrtctcaaaaaacaaaaacaaagtaagaacctcagaaatgagactcttacccatgagaggtttagtcatctaaccgatcatgtctgtcctgcgccctttgtg

SEQ ID NO: 315798 - DNA, 201 bp, Homo sapiens
ccagcctgggccacaaagcgagactccgtctcaaaaaacaaaaacaaagtaagaacctcagaaatgagactcttacccatgagaggtttagtcatctaacygatcatgtctgtcctgcgccctttgtgcttacaacctgccgatccttgtctgtggtcttaaggcaactgtgtgttgatctcggagtgttttcgtgatgcc

SEQ ID NO: 315799 - DNA, 201 bp, Homo sapiens
aatcccagcactttgggaggccgaggcgggcagatcacctgaggtcaggagttcaagaccagcctgaccaacatggtgaaaccccgtctctactaaaatayaaaaattagccgggtgtggtggcgggtgcctgtagtcccagctacccgggaggctgaggcaggagaatcgcttgaacccgggaggcagaggttgcagtga

SEQ ID NO: 315800 - DNA, 201 bp, Homo sapiens
tgtaatcccagcactttgggaggccgaggcgggcagatcacctgaggtcaggagttcaagaccagcctgaccaacatggtgaaaccccgtctctactaaaatataaaaattagccgggtgtggtggcgggtgcctgtagtcccagctacccgggaggctgaggcaggagaatcgcttgaacccgggaggcagaggttgcag

SEQ ID NO: 315801 - DNA, 201 bp, Homo sapiens
atattttttctattcatgaagattagtcccatggtaacctttccatttacttttagaaaaagtaaaaactggccgggcgcggtggctcacgcctgtaatcycagcactttgggaggccgaggcgggcagatcacctgaggtcaggagttcaagaccagcctgaccaacatggtgaaaccccgtctctactaaaatataaaa

SEQ ID NO: 315802 - DNA, 201 bp, Homo sapiens
gccagccacaacggcatgagtgaaaaggcagacgtttaccgctccttaattaaaaccacagactggggaaggcggccgggtggggaccggcgtggcgtccygcggaccgcgtggagtttggggtgtctgacatcgttctccacgtggctattttcagcgttctcccggggaagtacttggaagagatcgccacacagatgc

SEQ ID NO: 315803 - DNA, 201 bp, Homo sapiens
atctgccagccacaacggcatgagtgaaaaggcagacgtttaccgctccttaattaaaaccacagactggggaaggcggccgggtggggaccggcgtggcrtcccgcggaccgcgtggagtttggggtgtctgacatcgttctccacgtggctattttcagcgttctcccggggaagtacttggaagagatcgccacacag

SEQ ID NO: 315804 - DNA, 201 bp, Homo sapiens
cacatggacctggtttccaggccagccgcatgggagtggaggcagtcatcgccttgctagaggccaccccggacaccccagcttgcgtcgtgtcactgaaygggaaccacgccgtgcgcctgccgctgatggagtgcgtgcagatggtgagtgggcagcccatggccaagggcagggcggagacggctgggacagaagctg

SEQ ID NO: 315805 - DNA, 201 bp, Homo sapiens
ccagcttgcgtcgtgtcactgaacgggaaccacgccgtgcgcctgccgctgatggagtgcgtgcagatggtgagtgggcagcccatggccaagggcagggmggagacggctgggacagaagctgcttgtcaggccagcctgggcaccttgggtgtctcgtcggtgcacgatgcattacacggcctttctgagaaggaggtg

SEQ ID NO: 315806 - DNA, 201 bp, Homo sapiens
ttttcctttaggagctttgcgggcaacctgaacacctacaagcgacttgccatcaagctgccggatgatcagatcccaaaggtaggtggccggcctcccgygatgccccgacctctcctgcgggcctcccctcatggcctctgcctcagtgaatgaggccacctgttttcaggcctggcacggcatgagccactgccaaag

SEQ ID NO: 315807 - DNA, 201 bp, Homo sapiens
gacggcttcgccaagggccaggtgagtcacccaggatgccgtaggcaggcagacaccctggctctgagcacagtggacgtggcggcgggggggtgccctcyatggccctcataccttttcatgcctcagtccgggatcctgtgatattgtgactgaatgactacttatttaaggcaaggcattgcttctggagtaaaatct

SEQ ID NO: 315808 - DNA, 201 bp, Homo sapiens
tcgccatctatgatggctttgacggcttcgccaagggccaggtgagtcacccaggatgccgtaggcaggcagacaccctggctctgagcacagtggacgtrgcggcgggggggtgccctccatggccctcataccttttcatgcctcagtccgggatcctgtgatattgtgactgaatgactacttatttaaggcaaggca

SEQ ID NO: 315809 - DNA, 201 bp, Homo sapiens
gtgtctaacaacccagagatcacaccccgacctccagctcccacgtgccacgctgacccctacccacgcctgcttctgcagcagggatgcagtcagcgccrcgtgaggctgatgatgctgtgagcaaaagcggctccagagagtaacgtggccatgcccgggccgtgcccacgtcctccttccaccctaaagagcccggac

SEQ ID NO: 315810 - DNA, 201 bp, Homo sapiens
tctcctcttacctccacaggcacaggattcccaaagaacagtggtggctcaagctacggcccctcatgaaaatcctggccaagtacaaggccagctatgaygtgtcggactcaggccagctggaacatgtgcagccctggagtgtctgacccagtcccgcctgcatgtgcctgcagccaccgtggactgtctgtttttgta

SEQ ID NO: 315811 - DNA, 201 bp, Homo sapiens
ctacccacgcctgcttctgcagcagggatgcagtcagcgccgcgtgaggctgatgatgctgtgagcaaaagcggctccagagagtaacgtggccatgcccrggccgtgcccacgtcctccttccaccctaaagagcccggacactgccatgggttggccccactgggtctcaggtcagtaaaacaaatgacaggatgcact

SEQ ID NO: 315812 - DNA, 201 bp, Homo sapiens; identical to SEQ ID NO: 65736

SEQ ID NO: 315813 - DNA, 201 bp, Homo sapiens
tggtacaagcttggctcactgcaacctccaccttccaggttcaagtgattctcctgcatcagcctcccgaggagatggcagtacaggcacccaccaccacrcccagctaatttttgtatttttagtagagatggggtttcaccacgttggccaggctggtctcaaactcctgacctcaggtgattcacccacctcagcctc

SEQ ID NO: 315814 - DNA, 201 bp, Homo sapiens
agcctgggcatgggggtaccttgcgttacgttggctgtttcttttagtccttaccctaatcccagaggagtgtgtgtacccatttctcatattaggaaatraggcattgagaggttaggaaacggacccatggtcatgggtagttagtggcagagccagaattaccccgggctcttcagtgactcttgctcctgtttccac

SEQ ID NO: 315815 - DNA, 201 bp, Homo sapiens
gacgtggcctacgagtggcccagttccagtaaagcaacttaaccgagaagcaaaagcttgactccttaacccgggcctcatctattcagtgagctcttaatgtatttcaggcctgtggaagtaattctatctcttgagtccagagtccagtggctacttagagactaaggtagttatacctagaattttgtttaaaatcac

SEQ ID NO: 315816 - DNA, 201 bp, Homo sapiens
agacgtggcctacgagtggcccagttccagtaaagcaacttaaccgagaagcaaaagcttgactccttaacccgggcctcatctattcagtgagctcttaatgtatttcaggcctgtggaagtaattctatctcttgagtccagagtccagtggctacttagagactaaggtagttatacctagaattttgtttaaaatca

SEQ ID NO: 315817 - DNA, 201 bp, Homo sapiens
aagacgtggcctacgagtggcccagttccagtaaagcaacttaaccgagaagcaaaagcttgactccttaacccgggcctcatctattcagtgagctcttaatgtatttcaggcctgtggaagtaattctatctcttgagtccagagtccagtggctacttagagactaaggtagttatacctagaattttgtttaaaatc

SEQ ID NO: 315818 - DNA, 201 bp, Homo sapiens
gcctggttagaatgccccatgcgtgcctaactccggcaggcagacttcaggcactgttggctccaggctccacacagccacccctatcattttctatgggygggtctttaatttggggcttaatagaaagcgagtccattgaggatgagttaatccacatcatggagtggtcgctatgttcctttcatgacctctttaggc

SEQ ID NO: 315819 - DNA, 201 bp, Homo sapiens
ttaatagttattccttcttaagattaaatgctgtggaaagtgagttatgtagatgaagttacccgtgggcattgctgcatttcctgatcttgtatattccstggagaaaaagatggggatgcatttagcattgaaaggtaattgttggccaggcgcggtggctcacgcctgtaattccagcactttgggaggctgaggcag

SEQ ID NO: 315820 - DNA, 201 bp, Homo sapiens
gagaccctgtctcagaaaaatgataataaagaaatgataccaataacaaagagtttagaatggttgatttctctacccacggccattctgcctcacccctmgtggggcaccccccgaacgcgccatggttacggcgatgagacgtgctgtttgctccccgcgcaggccagatcgataaggaggccgtgcagaagtacgcct

SEQ ID NO: 315821 - DNA, 201 bp, Homo sapiens
ttgtagaacagcaggatagcaggtggtaagacgtggcctacgagtggcccagttccagtaaagcaacttaaccgagaagcaaaagcttgactccttaacccgggcctcatctattcagtgagctcttaatgtatttcaggcctgtggaagtaattctatctcttgagtccagagtccagtggctacttagagactaaggta

SEQ ID NO: 315822 - DNA, 201 bp, Homo sapiens
aacaggattctgagctcctgaccaggggctgaacttgtggctatttgtttatctgattagccaacaaatacctactttgtgaaattcttttttttttttttgagatgaagtctcgctctgttgcccaagctggagtgcaatggcgcgatcttggcccactgcagcctctgcctcctgggttcaagcgattctcctgcctca

SEQ ID NO: 315823 - DNA, 201 bp, Homo sapiens
tcaagcaattctcatgcctcagcctcccaagtagctgcgactaccagctcgtaccagtgcatgtcaccacatccagctaatttttgtatttttagtacagrcggggtttcaacatgttggccaggctggtctcaaactcctgacctcaaatgattcacccacctcagcctcccaaagtgctgggattacaggcttgagcca

SEQ ID NO: 315824 - DNA, 201 bp, Homo sapiens
gatggacgagaggagatttcaagatgcagttcgactccgagggaggtgaggtgctttggagaaagctctgccctgtcaggaacacacacccctcaggcccrgccactgcaaacgtgcttaggggttgtgcttattccatgtcactgtgaaaaatcagaaagtcaggcagtactcacagcaccgctcttgcagtagcaggcc

SEQ ID NO: 315825 - DNA, 201 bp, Homo sapiens
agcattaggacacacttggcggccggtcgtctagaccattaaccctggggctgctggctgcccgggtcagactggagggggctggtgggaaggaccgagcyagtctctacctaccccatccatgatgcaccaggtcctgacacattctttcttcttttcatcattgttttaaaagactcaggatgtgcagaaggcgatgga

SEQ ID NO: 315826 - DNA, 201 bp, Homo sapiens
tgtttgtacgtgtgtgcatgtttttgtgaggtagtgtgtgtgcatgttagtgtgtgtgcatgtgtgtatatgcatgtgtacatttgagtgtgaggtagtaygtttctgcatgttagtgtgtgcatgtatgtttatatgcatgtgtatatatgtgtgtgaggtaatgcatctgcatgtgtgtgcatgtatgcttatatgcat

SEQ ID NO: 315827 - DNA, 201 bp, Homo sapiens
aaccagcattaggacacacttggcggccggtcgtctagaccattaaccctggggctgctggctgcccgggtcagactggagggggctggtgggaaggaccragccagtctctacctaccccatccatgatgcaccaggtcctgacacattctttcttcttttcatcattgttttaaaagactcaggatgtgcagaaggcga

SEQ ID NO: 315828 - DNA, 201 bp, Homo sapiens
cactccagcctggtcaacagtgagaccctgtctcagaaaaatgataataaagaaatgataccaataacaaagagtttagaatggttgatttctctacccayggccattctgcctcacccctcgtggggcaccccccgaacgcgccatggttacggcgatgagacgtgctgtttgctccccgcgcaggccagatcgataagg

SEQ ID NO: 315829 - DNA, 201 bp, Homo sapiens
agaagcctcctgagctaagcagtcccagggctctgacctcacagccgggccgtgtggggctggctgccaaccagcattaggacacacttggcggccggtcrtctagaccattaaccctggggctgctggctgcccgggtcagactggagggggctggtgggaaggaccgagccagtctctacctaccccatccatgatgca

SEQ ID NO: 315830 - DNA, 201 bp, Homo sapiens
agggactggtgttgatgtagaatcaccatagggttgggggatgcgggagtccagcctcccagggccatctccccaagcagggagccacgtgcccactgcasgctaaacaaagtgactccttctcgctcgtttcagaaatgagagctgcagtgaaaactacaccaccgacttcatttaccagctgtattcagaagagggcaa

SEQ ID NO: 315831 - DNA, 201 bp, Homo sapiens
aaagaaacgttatttttcaacctgtggcagagctgaagaagcaaacggattttgagtaagttggctgggttccctgaggcaataagaccccaatgtgagtwcgggacaggggaatggccattgctgttgctgtcggcaactcattcaggggtttgaggaactggcttttctgaagctcagttaaaaaaatactaggtcttg

SEQ ID NO: 315832 - DNA, 201 bp, Homo sapiens
gctgcaccccacatcctgaatgctcccgtggaaagtcttgaaggggccggcatcccgcttcatacctggcgttaggtctgcacgtctgtcgctgagcgggstgcctgggctgccctcgtgggaaggatccttctggggtgttgatgctgttgccttgtccacataggtacctggccctggtgagtgccttggcctgcggtg

SEQ ID NO: 315833 - DNA, 201 bp, Homo sapiens
tattccattttctcatgaaaacactgttttgagatgagattcctggtcattctgccatctgccagccacaacggcatgagtgaaaaggcagacgtttaccrctccttaattaaaaccacagactggggaaggcggccgggtggggaccggcgtggcgtcccgcggaccgcgtggagtttggggtgtctgacatcgttctcc

SEQ ID NO: 315834 - DNA, 201 bp, Homo sapiens
aacgagatgtttccttgcagcttgtcgtcacgcagctgggctatgacacacgtgtgaccatcctcgggcacgtgcagagaggagggaccccttcggcattygacaggatcttggtgagttgggaagggttgggcatcttcacaaggtctctaggaggaagcgtttctggagaggcacaggcaccagccggccacagaggct

SEQ ID NO: 315835 - DNA, 201 bp, Homo sapiens
agctgtcagccgcccgggagaagcacgaggagttctgtgtccccatggtcatggttcccgctactgtgtccaacaatgtgccgggttccgatttcagcatyggggcagacaccgccctgaacactatcaccgacgtaagtccgtgtgcgccctgccaggcgggcgccggctgacgctaaccccggggccccggcccttttt

SEQ ID NO: 315836 - DNA, 201 bp, Homo sapiens
agtgtgtgtacccatttctcatattaggaaatgaggcattgagaggttaggaaacggacccatggtcatgggtagttagtggcagagccagaattaccccsggctcttcagtgactcttgctcctgtttccactgcaggtatgaacgctgccgtccgtgccgtggtgcgcatgggtatctacgtgggggccaaggtgtact

SEQ ID NO: 315837 - DNA, 201 bp, Homo sapiens
acgtgtgcccgtgacccagcactcacctgccttctgttttgcagaccaattgcaacgtagctgtcatcaacgtgggggcacccgcggctgggatgaacgcrgccgtacgctcagctgtgcgcgtgggcattgccgacggccacaggatgctcgccatctatgatggctttgacggcttcgccaagggccaggtgagtcacc

SEQ ID NO: 315838 - DNA, 201 bp, Homo sapiens
cactcttgggggagctctgggatggtgggcgcgccccgggcctgggctggagtgactgatcgcttctctgtgaccagacctgcgaccgcatcaagcagtcygccagcggaaccaagcggcgcgtgttcatcatcgagaccatgggcggctactgtggctacctggccaacatgggggggctcgcggccggagctgatgccg

SEQ ID NO: 315839 - DNA, 201 bp, Homo sapiens
tatgaacgctgccgtccgtgccgtggtgcgcatgggtatctacgtgggggccaaggtgtacttcatctacgaggtcagtgtctgcccctcaccccctgtcrcccttcttccacctgcccagagccctgcagtcaccggcgctcgctcacccctgcctcccccatgctgagcacagccgaagaggtgggcaggggagcaaga

SEQ ID NO: 315840 - DNA, 201 bp, Homo sapiens; identical to SEQ ID NO: 65749

SEQ ID NO: 315841 - DNA, 201 bp, Homo sapiens; identical to SEQ ID NO: 65751

SEQ ID NO: 315842 - DNA, 201 bp, Homo sapiens
tgatgcaccaggtcctgacacattctttcttcttttcatcattgttttaaaagactcaggatgtgcagaaggcgatggacgagaggagatttcaagatgcrgttcgactccgagggaggtgaggtgctttggagaaagctctgccctgtcaggaacacacacccctcaggcccagccactgcaaacgtgcttaggggttgt

SEQ ID NO: 315843 - DNA, 201 bp, Homo sapiens
tggactgtctgtttttgtaacacttaagttattttatcagcactttatgcacgtattattgacattaatacctaatcggcgagtgcccatctgccccaccwgccccagtgcgtgctgtctgtggagtgtgtctcatgctttcagatgtgcatatgagcagaattaattaaacatttgcctacaactccaacagtcctctgt

SEQ ID NO: 315844 - DNA, 201 bp, Homo sapiens
tgctctaaagagttgggctggaagcgggaggggctgtgagcacctgactgaggtcattggacgtcatggaaagataggaggtgacagggacagggcaggaygggaggctgcccctgacccacatggacctggtttccaggccagccgcatgggagtggaggcagtcatcgccttgctagaggccaccccggacaccccagc

SEQ ID NO: 315845 - DNA, 201 bp, Homo sapiens
atttgatagaaactttggaaccaaaatctctgccagagctatggagtggatcactgcaaaactcaaggaggcccggggcagaggtaaggggtctggggagrgaggccacagcctcgtgatgcaggccgtcctgccttggtgaaaatgctgtcctatcggggagaagtagggtgctggttccttcttcagttcagtactgag

SEQ ID NO: 315846 - DNA, 201 bp, Homo sapiens
ggctgcaccccacatcctgaatgctcccgtggaaagtcttgaaggggccggcatcccgcttcatacctggcgttaggtctgcacgtctgtcgctgagcggsgtgcctgggctgccctcgtgggaaggatccttctggggtgttgatgctgttgccttgtccacataggtacctggccctggtgagtgccttggcctgcggt

SEQ ID NO: 315847 - DNA, 201 bp, Homo sapiens
cgtcagctttcatcccactgcttagaagaatggtgtacaatttaaaacttaggaagtgtttatgtctggaattttccatttaatattttcagaccgagggkgactgtgggtaataaaccatggaaggcaaacccacggatggaggcactaccgtgttctgccaaaatatgctggctgaagccagggtttactgaaggcaga

SEQ ID NO: 315848 - DNA, 201 bp, Homo sapiens
acctaatcggcgagtgcccatctgccccaccagccccagtgcgtgctgtctgtggagtgtgtctcatgctttcagatgtgcatatgagcagaattaattaaacatttgcctacaactccaacagtcctctgttttagttttttaagtaggagattagtacctcaatctatgggtggctactaaaggttttctcagttttgt

SEQ ID NO: 315849 - DNA, 201 bp, Homo sapiens
gtttttgtaacacttaagttattttatcagcactttatgcacgtattattgacattaatacctaatcggcgagtgcccatctgccccaccagccccagtgygtgctgtctgtggagtgtgtctcatgctttcagatgtgcatatgagcagaattaattaaacatttgcctacaactccaacagtcctctgttttagttttt

SEQ ID NO: 315850 - DNA, 201 bp, Homo sapiens
tacctaatcggcgagtgcccatctgccccaccagccccagtgcgtgctgtctgtggagtgtgtctcatgctttcagatgtgcatatgagcagaattaattaaacatttgcctacaactccaacagtcctctgttttagttttttaagtaggagattagtacctcaatctatgggtggctactaaaggttttctcagttttg

SEQ ID NO: 315851 - DNA, 201 bp, Homo sapiens
aatacctaatcggcgagtgcccatctgccccaccagccccagtgcgtgctgtctgtggagtgtgtctcatgctttcagatgtgcatatgagcagaattaattaaacatttgcctacaactccaacagtcctctgttttagttttttaagtaggagattagtacctcaatctatgggtggctactaaaggttttctcagttt

SEQ ID NO: 315852 - DNA, 201 bp, Homo sapiens
gtaggcccgagactgcatgaggggccacaaagccactgtcatgtgacttttaaaagattagtgtcttattttagccattgtggggaaaaatgtataagtaaattccaagatgataaaaaacatctgaactttttgagacagagtcttgctctgttgcccaggctggagtgcagtggtacaagcttggctcactgcaacctc

SEQ ID NO: 315853 - DNA, 201 bp, Homo sapiens
ggtaggcccgagactgcatgaggggccacaaagccactgtcatgtgacttttaaaagattagtgtcttattttagccattgtggggaaaaatgtataagtaaattccaagatgataaaaaacatctgaactttttgagacagagtcttgctctgttgcccaggctggagtgcagtggtacaagcttggctcactgcaacct

SEQ ID NO: 315854 - DNA, 201 bp, Homo sapiens
aggtaggcccgagactgcatgaggggccacaaagccactgtcatgtgacttttaaaagattagtgtcttattttagccattgtggggaaaaatgtataagtaaattccaagatgataaaaaacatctgaactttttgagacagagtcttgctctgttgcccaggctggagtgcagtggtacaagcttggctcactgcaacc

SEQ ID NO: 315855 - DNA, 201 bp, Homo sapiens
caggtaggcccgagactgcatgaggggccacaaagccactgtcatgtgacttttaaaagattagtgtcttattttagccattgtggggaaaaatgtataagtaaattccaagatgataaaaaacatctgaactttttgagacagagtcttgctctgttgcccaggctggagtgcagtggtacaagcttggctcactgcaac

SEQ ID NO: 315856 - DNA, 201 bp, Homo sapiens
tatctacgtgggggccaaggtgtacttcatctacgaggtcagtgtctgcccctcaccccctgtcgcccttcttccacctgcccagagccctgcagtcaccrgcgctcgctcacccctgcctcccccatgctgagcacagccgaagaggtgggcaggggagcaagatcctgccagccagggccgttcctcagcccacagaag

SEQ ID NO: 315857 - DNA, 201 bp, Homo sapiens
ctgtgcagtcgagcgccacggctgctcatcggatgatccaggatgggtccttggcaattttcgggttctcgggtccgaggatggccaggccgtgtgtgctyttcccagtgccgaggtatctgagaggaaggcaggcgtggtcagcaaggactggcttctgcgtgagcgctgttagagtcagcacgagggcttccagtccca

SEQ ID NO: 315858 - DNA, 201 bp, Homo sapiens
gcgaccgcatcaagcagtccgccagcggaaccaagcggcgcgtgttcatcatcgagaccatgggcggctactgtggctacctggccaacatgggggggctygcggccggagctgatgccgcatacattttcgaagagcccttcgacatcagggatctgcaggtatgtgacggggctggcctcagggcccgtccccttggga

SEQ ID NO: 315859 - DNA, 201 bp, Homo sapiens
gctgctgtgacaccgcaggctggttcctgctccatgtatttaactgctggctgccgtgtgtctggctctgcaccctccctggctcctcctgggtgtcacgygcctgtctttgtccatggaatgctggtctgggactaaaaacaggaaaatcacagtctttcatagctagttactaactcacaagatgaaaatgagaaaaat

SEQ ID NO: 315860 - DNA, 201 bp, Homo sapiens
ttaatccacatcatggagtggtcgctatgttcctttcatgacctctttaggctcacgtgactgccgtgagcataggaaggacgacggggacagcagccacrgtggcccagcagtgtgaggcctttcgggtgcagctgcagctgccagaaacccactgtctgggccctgtgtccgctcacgccgttttctctctcccgactc

SEQ ID NO: 315861 - DNA, 201 bp, Homo sapiens
accgcatcaagcagtccgccagcggaaccaagcggcgcgtgttcatcatcgagaccatgggcggctactgtggctacctggccaacatgggggggctcgcrgccggagctgatgccgcatacattttcgaagagcccttcgacatcagggatctgcaggtatgtgacggggctggcctcagggcccgtccccttgggatcc

SEQ ID NO: 315862 - DNA, 201 bp, Homo sapiens
acgagggcttccagtcccagacgctgtctcccccgctccccactcacctatcgctcacggccaggagcttgtcgtggctgacagcaaagagctgctctctrtgggcctgcttcatctcatccgagaggccgtacaagaagtggtccattcctagaagacaatccacaggcacgatggagccgctgcccgggagctcgcgtt

SEQ ID NO: 315863 - DNA, 201 bp, Homo sapiens
cagagaggagggaccccttcggcattcgacaggatcttggtgagttgggaagggttgggcatcttcacaaggtctctaggaggaagcgtttctggagaggyacaggcaccagccggccacagaggctggcaaggtgctccccgagagatgcccgcggcccggccctcatcttaacgatccttgagacctttggtgtagacc

SEQ ID NO: 315864 - DNA, 201 bp, Homo sapiens
gtctgattaacaaaatactctcttccagtccaacgtggagcacctgacggagaaaatgaagaccaccatccagagaggccttgtgctcaggtgagagagasagaccaggggctgatcttaccctcaccgccacaccctggttcttagattctagtctgtgacttgggctggatgagtggtcatttctttgccgctagagtg

SEQ ID NO: 315865 - DNA, 201 bp, Homo sapiens
atctccctgaggctgcaccccacatcctgaatgctcccgtggaaagtcttgaaggggccggcatcccgcttcatacctggcgttaggtctgcacgtctgtygctgagcggggtgcctgggctgccctcgtgggaaggatccttctggggtgttgatgctgttgccttgtccacataggtacctggccctggtgagtgcctt

SEQ ID NO: 315866 - DNA, 201 bp, Homo sapiens
cagcatcatctccctgaggctgcaccccacatcctgaatgctcccgtggaaagtcttgaaggggccggcatcccgcttcatacctggcgttaggtctgcaygtctgtcgctgagcggggtgcctgggctgccctcgtgggaaggatccttctggggtgttgatgctgttgccttgtccacataggtacctggccctggtga

SEQ ID NO: 315867 - DNA, 201 bp, Homo sapiens
ggctgcgggggagattcagttggaaaagtaacccatgaggttttgtgcctctgggggtcctgaggccccacccgtgcctgggattctctaagacaaaggasaagtcttaaagccttacagcatcttaagtcttagatcacatttagagagacccggtacaggtggaacagtgcaaccctcagaattctgcactggcccttc

SEQ ID NO: 315868 - DNA, 201 bp, Homo sapiens
agcacggggccggggagtgtgagtgtgtcctggcacaggcaggcagaaggtgtccaacgtgcaactggagagcgcagaggtggctcaagtccccttcctcrcaggagtctggaaggctactgcatagcgtttgccttagtagaaaatggaccatttttgaagcctaggtccctgcaggcctcctggctaactcggctgtca

SEQ ID NO: 315869 - DNA, 201 bp, Homo sapiens
tgtctaagtgccaggtgacagagtccattgtgtgtaactgctgccagctttgtctggcttctctttccttaactatgcagaatccggttgccttgagttckgagaaaataaagaatcggccagggcagtggctcacacctataatcccagcactttggaaggccaaggcagaaggaccacttgagcccaggaatttaagac

SEQ ID NO: 315870 - DNA, 201 bp, Homo sapiens
tcattggcagtgcgcggtgccaggccttccgcacgcgggaaggccgcctgaaggctgcttgcaacctgctgcagcgcggcatcaccaacctgtgtgtgatyggcggggacgggagcctcaccggggccaacctcttccggaaggagtggagtgggctgctggaggagctggccaggaacggtgagtggacacctgctcctc

SEQ ID NO: 315871 - DNA, 201 bp, Homo sapiens
gcagtgcgcggtgccaggccttccgcacgcgggaaggccgcctgaaggctgcttgcaacctgctgcagcgcggcatcaccaacctgtgtgtgatcggcggrgacgggagcctcaccggggccaacctcttccggaaggagtggagtgggctgctggaggagctggccaggaacggtgagtggacacctgctcctctgtcct

SEQ ID NO: 315872 - DNA, 201 bp, Homo sapiens
ttctatgggtgggtctttaatttggggcttaatagaaagcgagtccattgaggatgagttaatccacatcatggagtggtcgctatgttcctttcatgacytctttaggctcacgtgactgccgtgagcataggaaggacgacggggacagcagccacggtggcccagcagtgtgaggcctttcgggtgcagctgcagctg

SEQ ID NO: 315873 - DNA, 201 bp, Homo sapiens
ctgagacagagtgagcctggttagaatgccccatgcgtgcctaactccggcaggcagacttcaggcactgttggctccaggctccacacagccacccctaycattttctatgggtgggtctttaatttggggcttaatagaaagcgagtccattgaggatgagttaatccacatcatggagtggtcgctatgttcctttca

SEQ ID NO: 315874 - DNA, 201 bp, Homo sapiens
actcaaggcagaagaggtttcatttaagacctgaggctgagacagagtgagcctggttagaatgccccatgcgtgcctaactccggcaggcagacttcagrcactgttggctccaggctccacacagccacccctatcattttctatgggtgggtctttaatttggggcttaatagaaagcgagtccattgaggatgagtt

SEQ ID NO: 315875 - DNA, 201 bp, Homo sapiens
gtgcacaagcacccactgaaatacaaaccttagtgaacacaggtaacaccccttgatgtgtgctgtatccagttgttctgtgggattgacatgtgttcacycatttaagcctcacactaaatctaagatgttatccccattttccttacaagaaaaccgaggcatagggatgccaactgggctgggtgcacgagggaggac

SEQ ID NO: 315876 - DNA, 201 bp, Homo sapiens
tcttagcttcccttgtttcagccctgagcattacagcttgacttactataccaataaacaaaccattaacttatcaatgaattgattggcatcatgcttcscttctttagttggtctcgtggaggtagagaggaggatgtagatagcagaggctgggaagggggtgtggacaggaggggatgcagagaggtggatgggtgc

SEQ ID NO: 315877 - DNA, 201 bp, Homo sapiens
gacactcaatgacataatattcttggaaaaagcagtagcatttctgacttttcatattcagctcggaggtgtattgtctcgggctcctgtgcagtcgagcrccacggctgctcatcggatgatccaggatgggtccttggcaattttcgggttctcgggtccgaggatggccaggccgtgtgtgctcttcccagtgccgag

SEQ ID NO: 315878 - DNA, 201 bp, Homo sapiens
tggttgatttctctacccacggccattctgcctcacccctcgtggggcaccccccgaacgcgccatggttacggcgatgagacgtgctgtttgctccccgygcaggccagatcgataaggaggccgtgcagaagtacgcctacctcaacgtggtgggcatggtgggctccatcgacaatgatttctgcggcaccgacatga

SEQ ID NO: 315879 - DNA, 201 bp, Homo sapiens
atggaccatttttgaagcctaggtccctgcaggcctcctggctaactcggctgtcaaagccccttttctctgctttctgagctgtttccaggactgagtgrgtgctccctctgtttctctgctttctgagctgtgtccggggctccctctgtttctcttccagccaccagaggaccttcgttctggaggtgatgggacgac

SEQ ID NO: 315880 - DNA, 201 bp, Homo sapiens
agctcctgcttttacaatttttaaagtgagaaatctcacacttgtgacccaaaataaacaccttttccccagaagtgctggtgctcccctgtctgaggaarggggtgtgggggacctctcctaatctggaggatgcctgagctgctgggatgtgtagatgggggtggccacggaagcctgagctcctgggatgtgtggatg

SEQ ID NO: 315881 - DNA, 201 bp, Homo sapiens
tacctggcgttaggtctgcacgtctgtcgctgagcggggtgcctgggctgccctcgtgggaaggatccttctggggtgttgatgctgttgccttgtccacrtaggtacctggccctggtgagtgccttggcctgcggtgcggactgggtgttccttccagaatctccaccagaggaaggctgggaggagcagatgtgtgtc

SEQ ID NO: 315882 - DNA, 201 bp, Homo sapiens
ttgggcatcttcacaaggtctctaggaggaagcgtttctggagaggcacaggcaccagccggccacagaggctggcaaggtgctccccgagagatgcccgyggcccggccctcatcttaacgatccttgagacctttggtgtagaccagtctctaggcctgcagccattcagatgcggggagagctccctaatgtgggaag

SEQ ID NO: 315883 - DNA, 201 bp, Homo sapiens
ctgaaagaaaaagcctactgctgcaacacaacggtataatttccctttgtctgtaactttaaaaaaaaaaacttacatatgagacgtccgagaaagccacscataggtgaactacgcgcataggtgaactagcttactccatttatgatggattcggcgattgcctaaaaattctagtcaaaaccacctctacatatagaa

SEQ ID NO: 315884 - DNA, 201 bp, Homo sapiens
aactcatctgaatttctacgttgtagtacgtttgggcaaaatgagtcttcctaatttagtaatatcttccttgttggtgaaagacggcttagaactgcggytggtagttgcttttcacatgttccatgggcgtcgtgactttgcaaattaaagaatgagtcatttcctagcaacttagctcacgcatgcactagacaggga

SEQ ID NO: 315885 - DNA, 201 bp, Homo sapiens
agagaagaaagttgtgctgttcggcaagagagaggttacagcgggaggaggaaatgatcagggtgagatgacctgcattttgaaatgctgagtttgatgtwcttgagagatggccactagttaatcagtaggtcattcgaattctttgtgttataagctaggtttgaatataaagtaaataagactatgtaatatatatat

SEQ ID NO: 315886 - DNA, 201 bp, Homo sapiens
ccaggaagccctcagggcagtcccacaggagcagagctgcacgaggccaggtgctggccccactgcgcggctgttctcagtctcactgggcttccaggccrggttcagcatggttctgaggaatctcagttctcatctcgccccgtgattctgctcccccacctgcccatgttgacagggtgttattaatcttttttaaaa

SEQ ID NO: 315887 - DNA, 201 bp, Homo sapiens
aaggctgagactcaaggcagaagaggtttcatttaagacctgaggctgagacagagtgagcctggttagaatgccccatgcgtgcctaactccggcaggcrgacttcaggcactgttggctccaggctccacacagccacccctatcattttctatgggtgggtctttaatttggggcttaatagaaagcgagtccattga

SEQ ID NO: 315888 - DNA, 201 bp, Homo sapiens
tcacgttcactcattcacccactcatttcactcactcatttacccactcactcacttactccttcactcatccactcactcactcattcactgactcactmactcacccattcactcatttactccttcactcactcactccattcattcagcagcacccatggcaggttcactctgtcctgggctctgctgttgccctgg

SEQ ID NO: 315889 - DNA, 201 bp, Homo sapiens
ctatgtctttccacttaacatttcctaaaatccccgagttcttcatcattcctttatgaaagaccggtgggaacgaggtcttcagagagcggggtgggggsgggggaagaggagcaggggtgaggggccgccattgggtcttagttgtgctcctgcatcacctgcttcctagtgttggcacgggctgtgtttgatgggtaa

SEQ ID NO: 315890 - DNA, 201 bp, Homo sapiens
tgtcctgctgtaatttaagctaatttccctattccactatttagtgaaaaattctctccactgggaggaaaaaacaaaagctgctttccaggaagccctcrgggcagtcccacaggagcagagctgcacgaggccaggtgctggccccactgcgcggctgttctcagtctcactgggcttccaggccgggttcagcatggt

SEQ ID NO: 315891 - DNA, 201 bp, Homo sapiens
ttttcttttgctaatttagctatggatgctttttgcctctgtgtgtgtatgtgtgagcataaattagtgtcctgctgtaatttaagctaatttccctattmcactatttagtgaaaaattctctccactgggaggaaaaaacaaaagctgctttccaggaagccctcagggcagtcccacaggagcagagctgcacgaggc

SEQ ID NO: 315892 - DNA, 201 bp, Homo sapiens
ggtccttggcaattttcgggttctcgggtccgaggatggccaggccgtgtgtgctcttcccagtgccgaggtatctgagaggaaggcaggcgtggtcagcraggactggcttctgcgtgagcgctgttagagtcagcacgagggcttccagtcccagacgctgtctcccccgctccccactcacctatcgctcacggccag

SEQ ID NO: 315893 - DNA, 201 bp, Homo sapiens
ctttgacccaaaggccatgcccagggtaaactaccctggctctggtgggtccaaaccaagctggggcgagtcagttggttaatccagggctgccactgtgkctgcaggaaacagtcggctccttgcatttggtttcattcatgaatttcatatcctgttgttgaatattcttctgcagatttcagaaattgttcatattat

SEQ ID NO: 315894 - DNA, 201 bp, Homo sapiens
ttcactgaggcaggaggcagggctcccagccggggctttgcagtcacctagcaagagatggtgggtccagactggctactgtgcagatggcgagaaacctycaagggtctggaggtatggagggcacggagggcagatggggtttgcttgctaagtacacgcaggcataaacagaggaggcaaggatcactccattcctgg

SEQ ID NO: 315895 - DNA, 201 bp, Homo sapiens
gtgctccccgagagatgcccgcggcccggccctcatcttaacgatccttgagacctttggtgtagaccagtctctaggcctgcagccattcagatgcgggragagctccctaatgtgggaaggcagtgcttggtgttggcacgacgtggaccccagagggcacaatcccagggcagaaaggctgtgtttctagtgtgagtt

SEQ ID NO: 315896 - DNA, 201 bp, Homo sapiens
ctcccaggctgctggtggctcatggggccctcaggggacactcatcccaggtggagggaaaggatgctctggagctgatgctcacaggggagggggctccragcccgcacagggcagtgaggatgggaactgcaggggcagggccggcttctttgtgggcagcctgaggaggttggcttttatgttatgtgagattcgaag

SEQ ID NO: 315897 - DNA, 201 bp, Homo sapiens
atgcccgcggcccggccctcatcttaacgatccttgagacctttggtgtagaccagtctctaggcctgcagccattcagatgcggggagagctccctaatrtgggaaggcagtgcttggtgttggcacgacgtggaccccagagggcacaatcccagggcagaaaggctgtgtttctagtgtgagtttctggaaactgact

SEQ ID NO: 315898 - DNA, 201 bp, Homo sapiens
aataacttttcccatttagatctgaagaaagagcgaaaaaccttttccagtgcccagtacctccttccagatctgggctgctgtgtccgcatcacagttcygcatcctaacgagatgtttccttgcagcttgtcgtcacgcagctgggctatgacacacgtgtgaccatcctcgggcacgtgcagagaggagggacccctt

SEQ ID NO: 315899 - DNA, 201 bp, Homo sapiens
tgttcctcatccttaagcagcagcgctgcatggctgtgggtgcggccctcgtgccttttcactcctctcccgatgggcctgagcttgttagccacgacagmaagacagaccctccaggcccagaggtggttccgagacactagtggcttcagctcccccaaatccagcggcagtggagagctaggtggaggctaacagact

SEQ ID NO: 315900 - DNA, 201 bp, Homo sapiens
tgggaaatccgtggtctcacagccttcagagccgagagcccagaacagagatttacccacgtgtttattaacagcaagccagtcatcagcattgtttctayagatatcaaattaactaaaagtatcccttatgggaaatgaagggatgggccaaattaaaggaataggttgggctagttaactgcagcaggagcatgtcct

SEQ ID NO: 315901 - DNA, 201 bp, Homo sapiens
gattaattaattccattatggcacctggaatgtgccgagaccagctcagtcggggagaccgtaacccagcggcgctagaggaattaaagacacacacacasaaatagaggtgtgaagtgggaaatccgtggtctcacagccttcagagccgagagcccagaacagagatttacccacgtgtttattaacagcaagccagtc

SEQ ID NO: 315902 - DNA, 201 bp, Homo sapiens
cagtgcttagaatagcaaaaagtgggaaaaccagcaaaaaactatcaataggagattaattaattccattatggcacctggaatgtgccgagaccagctcrgtcggggagaccgtaacccagcggcgctagaggaattaaagacacacacacacaaatagaggtgtgaagtgggaaatccgtggtctcacagccttcagag

SEQ ID NO: 315903 - DNA, 201 bp, Homo sapiens
ttgaaagggtggcatgcagtagcctcggggagtcagtccttcatatcttttcagctgtgtcttactacgattaagattttatttctgtgtgtgtgtgtgtkttttttgtttgtttgtttgtttgtttttgagacgggatcttgccctcttgcccagcctggagtgcagtggcttgatgtcggctcactgcaacctccgcct

SEQ ID NO: 315904 - DNA, 201 bp, Homo sapiens
tttgaatataaagtaaataagactatgtaatatatatatacacacatacatatacatacatgttagatacatagtaaacatgcatttacctctaaaatatrtatccccaaggtttttcagccaaatagatactctcattcagaattgtcaactttcagaggcaatggtgactccagcatcgctgacctggcccaatgtaat

SEQ ID NO: 315905 - DNA, 201 bp, Homo sapiens
ctgcattttgaaatgctgagtttgatgttcttgagagatggccactagttaatcagtaggtcattcgaattctttgtgttataagctaggtttgaatatamagtaaataagactatgtaatatatatatacacacatacatatacatacatgttagatacatagtaaacatgcatttacctctaaaatatgtatccccaag

SEQ ID NO: 315906 - DNA, 201 bp, Homo sapiens
ttgtccatggaatgctggtctgggactaaaaacaggaaaatcacagtctttcatagctagttactaactcacaagatgaaaatgagaaaaatgtaaattcyagcaccccatgtttatagtcggcctgtgtgtgccatccacctggcgctctctcagactgagaggagataaattagctggtgtctttcccagggcgggacg

SEQ ID NO: 315907 - DNA, 201 bp, Homo sapiens
agtacaggcacccaccaccacgcccagctaatttttgtatttttagtagagatggggtttcaccacgttggccaggctggtctcaaactcctgacctcagrtgattcacccacctcagcctcccaaagtggtgggaatacaggcctgagccactgtgcccagccaaaacatctgaacttttaagtgatgccaaacatcacc

SEQ ID NO: 315908 - DNA, 201 bp, Homo sapiens
ctgctgcaacacaacggtataatttccctttgtctgtaactttaaaaaaaaaaacttacatatgagacgtccgagaaagccacgcataggtgaactacgcrcataggtgaactagcttactccatttatgatggattcggcgattgcctaaaaattctagtcaaaaccacctctacatatagaatgatctcctacatggtt

SEQ ID NO: 315909 - DNA, 201 bp, Homo sapiens
ttctgaaagaaaaagcctactgctgcaacacaacggtataatttccctttgtctgtaactttaaaaaaaaaaacttacatatgagacgtccgagaaagccrcgcataggtgaactacgcgcataggtgaactagcttactccatttatgatggattcggcgattgcctaaaaattctagtcaaaaccacctctacatatag

SEQ ID NO: 315910 - DNA, 201 bp, Homo sapiens
ttaaagaaatctgtgatgccagagggctaaatacatcatgctgttgcattattggtcttccaaagaagcaagtgcaggaccacatgatggtgtgtcgtgtkctaacctattttagaattttacagttgactgagtctcccaagaagaaatcctgaggctgctctatagaaattttctatcaagtaatgaaatcagtgaggg

SEQ ID NO: 315911 - DNA, 201 bp, Homo sapiens
ctgtgccggaatgtgatgcacacagcggccagcatatccaaaggccccaggaggacctggggtggctggaacaggacctggtgccgggagcaggcggggcyggggattcccgacaaaggcttgatgtgtacttgaagtgagcaaagggttttgaataaaccaagaactggatcagatttatgttttttatagatggggtcc

SEQ ID NO: 315912 - DNA, 201 bp, Homo sapiens
ctcccgcctcagcctcccgagcagctgggactacaggctcccgccaccacacccggctaattttttgtatttttagtagaggtggggtttcaccgtgttarccaggatggtctccatctcctgaccttgtgatccgcccgccttggcctcccaaagtgctgggattacaggcgtgagccaccgcatctgtcgtagcattat

SEQ ID NO: 315913 - DNA, 201 bp, Homo sapiens
caccttttccccagaagtgctggtgctcccctgtctgaggaagggggtgtgggggacctctcctaatctggaggatgcctgagctgctgggatgtgtagaygggggtggccacggaagcctgagctcctgggatgtgtggatgggggtaggggggtggccatggaagcctgagctcctgctcctgggatgtgtggaagggg

SEQ ID NO: 315914 - DNA, 201 bp, Homo sapiens
tagggcccacctgggtactcctaggattcacctttatcaccgcatgagggagcattcccaggttctagggattagggataggactgggattcctttggggrctgctctcccgcccaccactgtgccggaatgtgatgcacacagcggccagcatatccaaaggccccaggaggacctggggtggctggaacaggacctggt

SEQ ID NO: 315915 - DNA, 201 bp, Homo sapiens
tgcgcccctcatctgctgatgcaggtgatggcatttagggcccacctgggtactcctaggattcacctttatcaccgcatgagggagcattcccaggttcyagggattagggataggactgggattcctttggggactgctctcccgcccaccactgtgccggaatgtgatgcacacagcggccagcatatccaaaggccc

SEQ ID NO: 315916 - DNA, 201 bp, Homo sapiens
gttccctggcgcctcctccttccatgtgggtgtgcagcatcccgctccagggccttcagcctctgcgcccctcatctgctgatgcaggtgatggcatttarggcccacctgggtactcctaggattcacctttatcaccgcatgagggagcattcccaggttctagggattagggataggactgggattcctttggggact

SEQ ID NO: 315917 - DNA, 201 bp, Homo sapiens
cattctgccatctgccagccacaacggcatgagtgaaaaggcagacgtttaccgctccttaattaaaaccacagactggggaaggcggccgggtggggacyggcgtggcgtcccgcggaccgcgtggagtttggggtgtctgacatcgttctccacgtggctattttcagcgttctcccggggaagtacttggaagagatc

SEQ ID NO: 315918 - DNA, 201 bp, Homo sapiens
aagggagggaaaaaaggctagtggcgagaggttttcttagattgattttatgaccttgtgcaaacccttaatgggtctcaattcatatgagcacaatggaratgataatattacaataccagggagtctctgataagattaaatgagctaatatttgtaaaagcatccttttacccaaaagcgtctctacggatgtagaat

SEQ ID NO: 315919 - DNA, 201 bp, Homo sapiens; identical to SEQ ID NO: 65869

SEQ ID NO: 315920 - DNA, 201 bp, Homo sapiens
atggctgaagattgagaaggtagtttcagattgggcccagaacataccaatggttagtaatctggtagagaaggaggcacctgcagaaacccaaaccaatmaaacagaaagactaagcaggacatgataaggcggaagggaaaccaggagagtacagtgctagggaagccatggccagacagtctcacaggaggaagtgaa

SEQ ID NO: 315921 - DNA, 201 bp, Homo sapiens; identical to SEQ ID NO: 65871

SEQ ID NO: 315922 - DNA, 201 bp, Homo sapiens
tttaagtagtatgaatttcagtactgttatgaaaaccatcttatcacgtaaagctttgagatcctgtgtgtggagttcttaaccaatccttttattttttwtcttccagaaactttgattttgaggatgtttttgtgaagattccccaagcaattgctcaactgtccaaggaagctggagttgaaaaattcattcatgttt

SEQ ID NO: 315923 - DNA, 201 bp, Homo sapiens
aatgaagataggtggccttttccgttttgggttttatattgtcgtcctgatttgaaccgtagattttagccttctccttgcttttggatttttttttttttcctcaagggccccagctttcaggggttacgttgtatattttacacaccattcagcttgccctgcttctgtaaaggcagcatatttgaatatctgaggttt

SEQ ID NO: 315924 - DNA, 201 bp, Homo sapiens
tgcagaacatgaagtatactggatttctaacttaaagtagtccttaaattgtgtagagtaatgacagcagagctgtcaacttttttaaaaaaataattttrgcttaaaaaaattaaaaattttttttctttttttagaaatagagacagggttttactgttttgtgcaggctggtcttgaactcctgggctcaaatgattc

SEQ ID NO: 315925 - DNA, 201 bp, Homo sapiens; identical to SEQ ID NO: 65873

SEQ ID NO: 315926 - DNA, 201 bp, Homo sapiens
tactcccaaacccttggccccccaggactctgtggggccccagcaaattcctagtgttcctcagatgctagttgaaaacccactgctactgggcacagtggtgtacacctgtagtcccagctacttgggaggctgaggtgggaggatcacttgagcctgggagtgtgagtccggcctggacaacatagtgagaccctgtct

SEQ ID NO: 315927 - DNA, 201 bp, Homo sapiens
ggattccctgataatgcagaacatgaagtatactggatttctaacttaaagtagtccttaaattgtgtagagtaatgacagcagagctgtcaacttttttwaaaaaataattttagcttaaaaaaattaaaaattttttttctttttttagaaatagagacagggttttactgttttgtgcaggctggtcttgaactcctg

SEQ ID NO: 315928 - DNA, 201 bp, Homo sapiens; identical to SEQ ID NO: 65875

SEQ ID NO: 315929 - DNA, 201 bp, Homo sapiens
ttaaagggcctcagcctcaggattccctgataatgcagaacatgaagtatactggatttctaacttaaagtagtccttaaattgtgtagagtaatgacagyagagctgtcaacttttttaaaaaaataattttagcttaaaaaaattaaaaattttttttctttttttagaaatagagacagggttttactgttttgtgca

SEQ ID NO: 315930 - DNA, 201 bp, Homo sapiens; identical to SEQ ID NO: 65876

SEQ ID NO: 315931 - DNA, 201 bp, Homo sapiens
taaattctttgatgacttgggggtcttattcaactttttatcccccctaatgattaacatagtgtattgtacagagtaaacatttagttaacgttaccgamtgaaattgttgactgacttgtttttagtttcttttttttcccttgcgggaaacaaagtcccggggtaagaagtgattcctaacacttcagcagccagtac

SEQ ID NO: 315932 - DNA, 201 bp, Homo sapiens
gtgttaaaatttgacttagttttttaatatgtgtcttctcatcaaatattttataaattctttgatgacttgggggtcttattcaactttttatcccccctaatgattaacatagtgtattgtacagagtaaacatttagttaacgttaccgaatgaaattgttgactgacttgtttttagtttcttttttttcccttgcg

SEQ ID NO: 315933 - DNA, 201 bp, Homo sapiens
gtccacaacactttgtttacacctctttttatagtgttaaaatttgacttagttttttaatatgtgtcttctcatcaaatattttataaattctttgatgmcttgggggtcttattcaactttttatcccccctaatgattaacatagtgtattgtacagagtaaacatttagttaacgttaccgaatgaaattgttgact

SEQ ID NO: 315934 - DNA, 201 bp, Homo sapiens; identical to SEQ ID NO: 65877

SEQ ID NO: 315935 - DNA, 201 bp, Homo sapiens
cctttttagctctgtcatttgattacctgagtaaagtgtactgttacctgtttgtctcggaaagagtgagggaatcagcagggagtctgagatgtcatttytgttgtaataaatggagcttggatgaaatggcaccatattatgactacagcagatggcccattttgaaacttgcattgaggaggctgcagaagtgttgag

SEQ ID NO: 315936 - DNA, 201 bp, Homo sapiens
actagttgtctagacatttgacctcttttctttgctcttcatggttttaaacatttggcctttttattttccgagtttattatctgaaaaactaatgactrccttttgtaagtgcattcacttcctcagagtcagctacattcattatattatttctattatgcacaataattatgttaatcttaagactgttggatctta

SEQ ID NO: 315937 - DNA, 201 bp, Homo sapiens
gagttgggaatggtaagagatgagcttggcaagttgtgggcaaaagcaaatcagaggggcctcaagctatctgaaggtaagtgcattcctactacagaaartacttggatgagccttggattatgcgtacttggaaaatacttggatagcggtgattatttgagctcttgagaaggctcattcttttaagaagctttctgg

SEQ ID NO: 315938 - DNA, 201 bp, Homo sapiens
agtgcttagagtttgaattttaaattgtgctattataatgaaggaatcaatatctaaattagttactaacagatttatttgttgcacttttacaatatcaraatctcctcattgcttgcattaaatcagaatttgagggaacctggaatctactttaatgaatgattcttctgttaccaaggtctgagaaccactgcccta

SEQ ID NO: 315939 - DNA, 201 bp, Homo sapiens
gaaataaggtaagtaacaaattgatctgggaagtggttcacagagccagagtttcttgggccatttgaaacatgatttcagtgagaagggtttatcacagmcatatgtagaattaaaaggttttctgattccctgcatccagaactaggggtgtgtgtgatgttttgacgttttgattgattgccttctgtttgcagggaa

SEQ ID NO: 315940 - DNA, 201 bp, Homo sapiens
ccacagtgagataccatctcatgccagttaggatggcaatcattaaaatgtcaggaaacaacagatgctggagaggatgtggagaaatagtgacgcttttmcactgttggtggaagtgtaaaccattgtggaagacagtgtggcaattcctcaaggatctcgaagtagaaataccatttgacccagtaatcccattactga

SEQ ID NO: 315941 - DNA, 201 bp, Homo sapiens
tctttgacaaatctgacaaaaacaagcaatgaggaaatgattctccgtttaataaatggtgttgggaaaactggctagccatatgcagaaagctgaaactsgatcctttccttacacctgatacaaaaattaactcaagatggattaaagacttaaacgtaagacctaaaaccataaaaaccttagaagaaaagctaggca

SEQ ID NO: 315942 - DNA, 201 bp, Homo sapiens
ttccttctgaaactattccaatcaatagaaaaagagggaatcctccctaattcattttatgaggccagcatcatcctaataccaaaacctggcagagacarcaaaaaaagaaaatttcaggccaatgtccctgatgaacattgaatcgaaaatcctcaataaaatccagcagcacatcaaaaaacttatccagcacgataa

SEQ ID NO: 315943 - DNA, 201 bp, Homo sapiens
gccccagcaaattcctagtgttcctcagatgctagttgaaaacccactgctactgggcacagtggtgtacacctgtagtcccagctacttgggaggctgargtgggaggatcacttgagcctgggagtgtgagtccggcctggacaacatagtgagaccctgtctgtggaacaaaaacaaggaaagaaaagaaaaagtcac

SEQ ID NO: 315944 - DNA, 201 bp, Homo sapiens
caatgaatccaggagctggtttttttcaacaacatagatagactgctagccagactaataaagaagaaaagagagaagaatcaaatagatgcaataaaaartgataaaggggatatcaccactgatcccacagaaatactaagtaccatcagagaatactataaacacctctataccagtaaactagaaaatctagaagaa

SEQ ID NO: 315945 - DNA, 201 bp, Homo sapiens
gatctaaaattgacactctaacatcacatttaaaagaactagagaagcaggaacaaacaaatttaaaagctagcagaaggcaagaaatagctaagatcagrgcagaaccgaaggagatagagacaggaaaaacccttcaaaaaatcaatgaatccaggagctggtttttttcaacaacatagatagactgctagccagact

SEQ ID NO: 315946 - DNA, 201 bp, Homo sapiens; identical to SEQ ID NO: 65868

SEQ ID NO: 315947 - DNA, 201 bp, Homo sapiens
aactgttgatgggagctcctttctcgtcctaggttttatattgtcctgatttgaaccaaataaaataaaatcttgaacttaccatgtcacaccctagtggyctggttaaggagactgtcacatccattgtgccacaaactgatcttcatttgggttttcatccattcattcaacaaatgtttattgaatgcctactatgtc

SEQ ID NO: 315948 - DNA, 201 bp, Homo sapiens
acctgctcctgaatgactacgggctaaataatgaaatgaaggcagaaataaagatgttctttgaaaccgatgagaacaaagacacaacattccagaatctstggagcacatttaaaacagtgtgtagagggaaatttatagcactaaatgcccacaagagaaagcaggaatgatctaaaattgacactctaacatcacatt

SEQ ID NO: 315949 - DNA, 201 bp, Homo sapiens; identical to SEQ ID NO: 65870

SEQ ID NO: 315950 - DNA, 201 bp, Homo sapiens
gatctcctagtgttatgacattagcatagagaagaagcagaaatagattagtgttggttaaaaaaaaatatattggaacattaaatcttcccaattcccaraagtgaatcttcccacttcccaaaagtgaagatgcagttcttcactttctccaatttaaaaccatcgagtttaattttggagaaatatcttgctaggcac

SEQ ID NO: 315951 - DNA, 201 bp, Homo sapiens
gacttcctacttgtgttgtcctgtaaggaatggagttatacattttcccttttaaaaaatacttgctaaactttcttactatctctggtaatattcatacrgattatttgtaatccctttaaattttgatttattttcatttcattttcacattttcatttattcttgactcagtgttcacaagctaagtataatacttgt

SEQ ID NO: 315952 - DNA, 201 bp, Homo sapiens
actgtggccagactgcctctccagattccctcctctctgggccaggcatctctgaaaaaaaggcagtagcccaagtcagggacttatagataaaacccccmccatcctgggacagagcatctgggggaaggggcagttgggggtgcagcttcagcagacttttaacatccctgcctggcagctctgaagaaagcagcagat

SEQ ID NO: 315953 - DNA, 201 bp, Homo sapiens; identical to SEQ ID NO: 65872

SEQ ID NO: 315954 - DNA, 201 bp, Homo sapiens
cagttttgtccttctggggtttcaggctcagagaaggcacatgtttgggtcaaccagagtgagttttgcttagcaagtatagtgggtaggggcctgggagwcaagattttgctgaggatatttgcagaggaataactgtgatgctgagccttgaaatctaagctgggaggatgcgggcttcaatgtacctttggctgtgag

SEQ ID NO: 315955 - DNA, 201 bp, Homo sapiens
gcctttatgactgaatgaagttgacaaatataaattactaaggtcatttttaggagtgataggcagtataataaagcagtaatttcttcccagaatggacyaaaggcatcctctgttcccaggtcattctttcagctaggttccggcatctcctttgtcatgcaagctctagattggcagttggcaaactttttctttgaa

SEQ ID NO: 315956 - DNA, 201 bp, Homo sapiens; identical to SEQ ID NO: 65874

SEQ ID NO: 315957 - DNA, 201 bp, Homo sapiens
ggaagatggtacatcttgtttataaattggtaagaatggtccaggaaagagatgtcacttcatgactcaggagatgaggccgacagaaaaggagcaaagtscttcaggaattgagaggagttggatacagagtgcaaatgagggtttgacctttgtaaaaggcaaacatttcttcaactttaacaaggaaaagaattcaag

SEQ ID NO: 315958 - DNA, 201 bp, Homo sapiens
tgacatcatgcaccttcgtcccatgggtgacctgggccagcttctgtttctggtaagggcctttatgactgaatgaagttgacaaatataaattactaagrtcatttttaggagtgataggcagtataataaagcagtaatttcttcccagaatggaccaaaggcatcctctgttcccaggtcattctttcagctaggttc

SEQ ID NO: 315959 - DNA, 201 bp, Homo sapiens
ccttgtgatccgcccatcttggcctcccaaagtgctgggattacaggcatgagccactgtgcccggcctaatttctactcttaaatggtttaaaaaaaaaagaaaaacaaacaaacaaaacaaaaaaaacttttttaacctaacatttaaactacttgggatttgttttagtttatggtgagaactaagacattatctcac

SEQ ID NO: 315960 - DNA, 201 bp, Homo sapiens
gtagtagtttgtgtttattattgcccttgatacttaaattgctaaagtactgattgcaaaataatgttacaagtttttagagaaaggagctatttgtgttsacagttttaaaaatattaatatttgccatgcttgtatactttggggttttgtttaaggttctgccattactgcaatagccacatctgtgtgtcacggccc

SEQ ID NO: 315961 - DNA, 201 bp, Homo sapiens
ttttgtttctacttacatgaaagttgagcagctaactctaaaattctattctaaggagttagcaataacttgaaaactggaatgtatccaaaagagattckcattcctgccatatgaagaatatttgacaggacagggaatgtttaacctggagaagaaaatatttagtggggctataattgctacacttaattgtagaag

SEQ ID NO: 315962 - DNA, 201 bp, Homo sapiens
tccttactcttcactcttatcattcccttttatgcatcctcaactccccagcccaactcccattgtcgtaaaaaacattgaccctgattaaacaaaacttyccacgtaatttgctgcctgccactgagcaatggagaacggggctagggaaaacttcagactaactggccttattttaaattcatgaatacaaatctcaag

SEQ ID NO: 315963 - DNA, 201 bp, Homo sapiens
catcttttgcctgtcttatcctatgtcctcatttccttactcttcactcttatcattcccttttatgcatcctcaactccccagcccaactcccattgtcrtaaaaaacattgaccctgattaaacaaaactttccacgtaatttgctgcctgccactgagcaatggagaacggggctagggaaaacttcagactaactgg

SEQ ID NO: 315964 - DNA, 201 bp, Homo sapiens
atcccctgtgttatatgtattgattcttaccctcctacccacccctaaccccagacaaccactgatctttttattgtctctatagttttgccttttccagsatattacatatatggttagaatcattgcagtatgtagcctttttaggtggacttctttcacttagcaatatgcatttaaggttctttcatttcttttcat

SEQ ID NO: 315965 - DNA, 201 bp, Homo sapiens
tgcccatatgttattctcattaaccctttaaactgtgagcttcatgaagccagggttttgtattttactgtgatagtcacagtttctagaataattcttgkcccataattattaaaaaaaaacaatagccatgtgaggttagtgtgacattaccttctgagaaatttcaaagtaataaaagcaactattattcatagaatg

SEQ ID NO: 315966 - DNA, 201 bp, Homo sapiens; identical to SEQ ID NO: 65878

SEQ ID NO: 315967 - DNA, 201 bp, Homo sapiens
agtttaaactgtatgccacacactattctaagtaatgtatgatttataatgtgtatatcatattggtactacatagaacgtgcatataattttttaaataratacttaaaaaaattaatgcagtgtgcaagcaaatatgtctggactattggtttgggtattgcagtaggaaactaatgtaggtttttaagcagagaaata

SEQ ID NO: 315968 - DNA, 201 bp, Homo sapiens; identical to SEQ ID NO: 65880

SEQ ID NO: 315969 - DNA, 201 bp, Homo sapiens; identical to SEQ ID NO: 65881

SEQ ID NO: 315970 - DNA, 201 bp, Homo sapiens
cacttaattgtagaagagggattagacttgttctttgtcattctggaggaacacagggataaaaacttctgggaagcagtcactgattccccttgtggtaraactttctttctgttagaatggctcaaagcagaatgggcagctacaggaagtagtgagtttcccaactccacaggtgttcaggcaaaagccagatgattt

SEQ ID NO: 315971 - DNA, 201 bp, Homo sapiens; identical to SEQ ID NO: 65882

SEQ ID NO: 315972 - DNA, 201 bp, Homo sapiens
gacccttagggatggttttgtactactccagtgatgtttttaatatataaaaggatattgctgtaaattctaaaacacaaacaaaacacttttagggagtragtatggttataaaaccacattaattttgatggagtatcacaatgcctccagaggctgaaaaacgggtggtttatagcacaattactagtgctgtgcgag

SEQ ID NO: 315973 - DNA, 201 bp, Homo sapiens
tgccagctgctcaagacagtgggagtgcatggcccaagggaggccaatggagttcttctaggattagaattttgcctggtggctagagtaaaggacaaagsgacaaggtagtttacaatattggcaagagagtgatgagaagatggtctatggaacctaatctggaattcagagggaaggacaggaacagtcggaagagtt

SEQ ID NO: 315974 - DNA, 201 bp, Homo sapiens
gctggtctccagatctcctagtgttatgacattagcatagagaagaagcagaaatagattagtgttggttaaaaaaaaatatattggaacattaaatcttmccaattcccaaaagtgaatcttcccacttcccaaaagtgaagatgcagttcttcactttctccaatttaaaaccatcgagtttaattttggagaaatatc

SEQ ID NO: 315975 - DNA, 201 bp, Homo sapiens
aaataaggtaagtaacaaattgatctgggaagtggttcacagagccagagtttcttgggccatttgaaacatgatttcagtgagaagggtttatcacagayatatgtagaattaaaaggttttctgattccctgcatccagaactaggggtgtgtgtgatgttttgacgttttgattgattgccttctgtttgcagggaac

SEQ ID NO: 315976 - DNA, 201 bp, Homo sapiens
gccttggcctcccaaagtgctgggattacaggcatgagccaccacacctggccaaatttagctttaagttaaatcattgctgtttaaaagtttaagtagtrtgaatttcagtactgttatgaaaaccatcttatcacgtaaagctttgagatcctgtgtgtggagttcttaaccaatccttttattttttatcttccagaa

SEQ ID NO: 315977 - DNA, 201 bp, Homo sapiens
attcacccgccttggcctcccaaagtgctgggattacaggcatgagccaccacacctggccaaatttagctttaagttaaatcattgctgtttaaaagttyaagtagtatgaatttcagtactgttatgaaaaccatcttatcacgtaaagctttgagatcctgtgtgtggagttcttaaccaatccttttattttttatc

SEQ ID NO: 315978 - DNA, 201 bp, Homo sapiens
ctatataggaattattaggataggaataagggactctgaaaagctatggcatctttagcatggcaaaatattctttttgtcaaatataatatcaattcacrtaccatactagaatttaaatatttaccaagtcacaattgtataatatatccacattatgttaatgttgatccttttttcaatccattctcttttaggacg

SEQ ID NO: 315979 - DNA, 201 bp, Homo sapiens
aatattgacatgttacatgtgtgaacctcaaaaacatggtaaatgaaagaagctagatacagaagatcacatgttgtgtgattccgtttatatgaagtatstataaaaggcaaatgtaagtagattagtgattgcctgagcctgggagtaaaatccaggattaaatggctgtggaggatcttactagagtaaggaaaaata

SEQ ID NO: 315980 - DNA, 201 bp, Homo sapiens
gatagaggactactatctagaatatacaaagaaatcttagaactcaatgagaagatgatccattttttaatatgagcaaaagacatgaataggcatatcarcccagcagatgtacttaatcactaaaaaacatatgaaaagatgctccatatcattagtcattacagaaaatgcaaatcaaaaccattatgagataccagt

SEQ ID NO: 315981 - DNA, 201 bp, Homo sapiens
tggcgtgaggactaatttgaacagttctttgtatggattgtttattaacaaataatgtttcaatcctatagtccacaacactttgtttacacctctttttwtagtgttaaaatttgacttagttttttaatatgtgtcttctcatcaaatattttataaattctttgatgacttgggggtcttattcaactttttatcccc

SEQ ID NO: 315982 - DNA, 201 bp, Homo sapiens
gccttcgacaaaattcaacagcccttcatgctaagaaccctcaataaactaggtattgatggaatatatctcaaaataataagagctatttatgacaaacscacagccaatatcatactgattgggcgaaaactggaagcattccctttgaaaatcggcacaagacaaggatgccctctgtcaccactcgtgttcaacgta

SEQ ID NO: 315983 - DNA, 201 bp, Homo sapiens
cattgtttacatgctggtagggagatgctggtaaaaagagtgaggctgaggatgtggaagagagagtaaattggacaggttcctgaaaaagtgaaaggacrtgagctctaaagcattgaaagtggcactgttcctcccatcaggtaagagaggaggagaaaattgtgctttatataccggggtttgtagatttagtggtga

SEQ ID NO: 315984 - DNA, 201 bp, Homo sapiens
tgagaagcatgagctatgtttctcttcattttaacagtattatgaattactcctgtcttggatgtatgtaatttttatttgttgtgacatgaagagcacactcatgctcctatataggaattattaggataggaataagggactctgaaaagctatggcatctttagcatggcaaaatattctttttgtcaaatataatat

SEQ ID NO: 315985 - DNA, 201 bp, Homo sapiens
agaaccaatgacaaaaactacatgaatatttcaatagatgcagaaggccttcgacaaaattcaacagcccttcatgctaagaaccctcaataaactaggtrttgatggaatatatctcaaaataataagagctatttatgacaaacgcacagccaatatcatactgattgggcgaaaactggaagcattccctttgaaaat

SEQ ID NO: 315986 - DNA, 201 bp, Homo sapiens
atgagaagcatgagctatgtttctcttcattttaacagtattatgaattactcctgtcttggatgtatgtaatttttatttgttgtgacatgaagagcacactcatgctcctatataggaattattaggataggaataagggactctgaaaagctatggcatctttagcatggcaaaatattctttttgtcaaatataata

SEQ ID NO: 315987 - DNA, 201 bp, Homo sapiens
gaaccttgagaaaaggttagatgaattgctaactagaataaccagtttagagaacaacataaatgacctgatggagctgaaaaacacagcacgagaacttygtgaagcatacacaagtatcaatagccgaatcgatcaggtggaagaaagcatatcagagattgaagattaactcaacgaaataaagtgaaaagacaagat

SEQ ID NO: 315988 - DNA, 201 bp, Homo sapiens
ccagtctggctttcagtcccactaatccaataaaattgctcttatttatgccacctacagccacatcctccagcttctgtggtcctctgtcctcttcctayttcactttcagcatttggtaaagttaaccattctctccttgaaacagtttcttattttgggtttttagattctgtttccttctgagtttttctcctacct

SEQ ID NO: 315989 - DNA, 201 bp, Homo sapiens
tccattctatttgccattcattcataaaatacctattgatacacactcatacaacattacacacaactgtgatgatgaataaacacattcagcaaaatcaygatgtataagatcagcatagaaaaatcaatatatactagtaaatgaacaatgtgaaaataaaattaagaaaagaattttattcacagcagcataaaaaat

SEQ ID NO: 315990 - DNA, 201 bp, Homo sapiens
gtgtgaaagtcttggttttccatgtcaactagcagctgcaaaatatatttctccttttcagttcccagtttggtacattagcatgcaatcagttatatagyctagataagaattacaattcaatatattcaatacaggtttcataaaatactacacaaaagacattagttccagtgaagaggtacatggactaggatttca

SEQ ID NO: 315991 - DNA, 201 bp, Homo sapiens
ctgtaataatttctacttaaaaaaaattgtggcaaaatatacatagtataaaatttcccatctgctatgggctaaattgcgccccctcataattcgtatgytgaagccttaacaccattgtgaatttatttggagttaggacttttggaggaaattgaggttaaatgaggccataagggtgaggtcgtaattcagtaggat

SEQ ID NO: 315992 - DNA, 201 bp, Homo sapiens
ttgtgcaagaggacctaataagttgtggaaatataaattagaactcctaaaaattgctttctatagtaataatagctaacacttatgtagtttaaactgtrtgccacacactattctaagtaatgtatgatttataatgtgtatatcatattggtactacatagaacgtgcatataattttttaaataaatacttaaaaaa

SEQ ID NO: 315993 - DNA, 201 bp, Homo sapiens
tttaatatataaaaggatattgctgtaaattctaaaacacaaacaaaacacttttagggagtgagtatggttataaaaccacattaattttgatggagtakcacaatgcctccagaggctgaaaaacgggtggtttatagcacaattactagtgctgtgcgagattgattatttcttttatgctctttgctaaaatttgct

SEQ ID NO: 315994 - DNA, 201 bp, Homo sapiens
ttaaatgaggccataagggtgaggtcgtaattcagtaggattggtgaccttataagaagaggcaaaaagagagatctctctctccctgtgtgcacatactraggaaaggccatatgtgaggacacagcaagaaatctgctgtctacaagccaggaagagagcccttatcaggaaccaaactggctggcactttgatcttga

SEQ ID NO: 315995 - DNA, 201 bp, Homo sapiens
ccacagttaaagaaaaaattacaagccattgcgctagagagagccatctgcagtttctccttagacagatgttcagatggcacacatggccactaaatttrcataatatttcaggaagttcacagatttcccgaagcccactcatgaatcacacttctggttaagaactcctagattcatatgctagttggtgataagtgc

SEQ ID NO: 315996 - DNA, 201 bp, Homo sapiens
atggatgtacgaaatatccctgatttcagttatttggtgtatgtactgagaagtggaattctgtagcatatggtatatctatttttactttttcgacaagmcaccatagtgtattccacagtggctgcaccattttacattgccaccaacagtgcacaaggtttccactttctccagatctttgtcaatatttgttatttt

SEQ ID NO: 315997 - DNA, 201 bp, Homo sapiens
gatggaccaaaaagcagaggtagcctcacaggtcgaggtggttattttcttaaaaaaaaaaaatcagttcagactgctctacagcggtctgtcttcctgcrgttctcataggctagcttacatcttgggcagagagatgcttatcacatgtgctatatgtatttctctttccagatgggtagcaagagtctttgaaataag

SEQ ID NO: 315998 - DNA, 201 bp, Homo sapiens
ttgtctgggctccagtaagtcattcttgtttggcgtaacgatgggaaaaataatactagacattgcagtgtagatatttttcctcttgaaattgtagatakgtatctacacatttctcatctcttcagccccaggaaaaaactttgcttctttctctgatattttgaggctaaggcagtggcataagactataattttcct

SEQ ID NO: 315999 - DNA, 201 bp, Homo sapiens
tttgactcttgtttttatgttgttaatggagaaattactagatctggggttataaaagaggaaagaattaaaaagaaataagaaaatagtcatgaatggcyccaactaacactagtctttaaaagacactcttcctatcttcagtctgtaagtggttgctgtcaagaagggaaagtctatctccctaatgatccttgcttc

SEQ ID NO: 316000 - DNA, 201 bp, Homo sapiens
gaatagaaaaagagagaaagaggaaatgaagaaggacttgttaagcaaaaaggaaccagaacctgaagatttggaaaattctcagcttatccatattgcaraaaatgagaaagcttgttttgaagagaacactaagagtgtggctgaacaaccatttgatgaagagattgtggatgcgactcaccaactaacaagctatct

SEQ ID NO: 316001 - DNA, 201 bp, Homo sapiens
ggaatctgaggctttatatgttgctggagaaattccagccagcttcctttttcatttatttatactatgcattagaatgttgtttttcaagcctttaaacrgctgtggaaccctgtgctcactgaagttttacgtcaagtcctgctgggtaaatccaataaaagagctggtctggttgcagtgatgggtgatactcaacgc

SEQ ID NO: 316002 - DNA, 201 bp, Homo sapiens; identical to SEQ ID NO: 65884

SEQ ID NO: 316003 - DNA, 201 bp, Homo sapiens
cattgtatagggtagggagtatatttcctcatgtcctctggattctgtgtcgtagtagtttgtgtttattattgcccttgatacttaaattgctaaagtaytgattgcaaaataatgttacaagtttttagagaaaggagctatttgtgttgacagttttaaaaatattaatatttgccatgcttgtatactttggggttt

SEQ ID NO: 316004 - DNA, 201 bp, Homo sapiens
aagtgcttagagtttgaattttaaattgtgctattataatgaaggaatcaatatctaaattagttactaacagatttatttgttgcacttttacaatatcrgaatctcctcattgcttgcattaaatcagaatttgagggaacctggaatctactttaatgaatgattcttctgttaccaaggtctgagaaccactgccct

SEQ ID NO: 316005 - DNA, 201 bp, Homo sapiens
tagtttgtgtttattattgcccttgatacttaaattgctaaagtactgattgcaaaataatgttacaagtttttagagaaaggagctatttgtgttgacasttttaaaaatattaatatttgccatgcttgtatactttggggttttgtttaaggttctgccattactgcaatagccacatctgtgtgtcacggcccaccc

SEQ ID NO: 316006 - DNA, 201 bp, Homo sapiens
tgcgcagacaggcgagaaaggtaagttttgacccagcttagcagccgtagtcagccgggagtgctgtcgtgggggattgtgggaaaagatggcggctgccscacaatcccgggttgtccgggtcctgtcaatgtcacgtaagtgttaccgggaacggcggcccctggtcgggattccgagacggggatttaaggttttgga

SEQ ID NO: 316007 - DNA, 201 bp, Homo sapiens
gggagtctgagatgtcatttctgttgtaataaatggagcttggatgaaatggcaccatattatgactacagcagatggcccattttgaaacttgcattgargaggctgcagaagtgttgagtgctgaggtatacccctatgttttcatccgattgctttctgctattataggaatgggacgcgagagataaagattctatc

SEQ ID NO: 316008 - DNA, 201 bp, Homo sapiens; identical to SEQ ID NO: 65885

SEQ ID NO: 316009 - DNA, 201 bp, Homo sapiens
agccaacataccaccatcctaggtgacccagggttggtcattgtgtttcactggacttcagcctcctgatctatatttgggacagggatgtcagtaaaaaygctgtttgatgagggaatgcccgtctccttacagagagaaaggtatatcagtgttgaaggtaagttctccacctgccctttctgcctgcatcagaatctt

SEQ ID NO: 316010 - DNA, 201 bp, Homo sapiens
gtacagttcagtagtattaagatatttacattgttgtacaaccaatccccagaactttttcatcttgtaaaactgaaattctgtaccccttaaacaactcyctgttccctccttccccccagcccctggcaactaccattctgcttttggtttctatgaatttgaccacctcatataagtggaatcatacagtatttgtct

SEQ ID NO: 316011 - DNA, 201 bp, Homo sapiens
tttatctggaggaaaatatcgcctttgaaatacaagtcatgtcttaatagtggaaagaatggatgctttattcacttgtctctaaactcaaaacaggtttrtttggttattgtttaggctgttggagagaaagtagtgagagatgcatttccggaagccattatcgtaaagccgtcggacatctttggaagagaggataga

SEQ ID NO: 316012 - DNA, 201 bp, Homo sapiens
gacagctcatctgccatatcaacagatgagtatcataaggaggaagagttccatgtttctccttagaatgggtgcagctagagtccagtcttggtcgtagygatgcatttagcattgcagagcagactagttgtctagacatttgacctcttttctttgctcttcatggttttaaacatttggcctttttattttccgagt

SEQ ID NO: 316013 - DNA, 201 bp, Homo sapiens
taacaggctgctagatggttgacacaaaccagagaatctgtaaatagaaggaaaaatggaggctgaagaaattctactttgatttttctccttcttcaatrtaagcttcccttaaaataaaaaaattggaagagacccaacccaatctgtaaggtgcaggacatttttgtggattatattttttaaaagttctgtgtaact

SEQ ID NO: 316014 - DNA, 201 bp, Homo sapiens
caggtgtgtgccaccacgcccagctaatttttgtatttttagtagagatggggtttcaccacattggccaggctggtctcaaactcctgaccttgtgatcygcccatcttggcctcccaaagtgctgggattacaggcatgagccactgtgcccggcctaatttctactcttaaatggtttaaaaaaaaaagaaaaacaaa

SEQ ID NO: 316015 - DNA, 201 bp, Homo sapiens
tgctgccaccatactgtcctttttctaacaggctgctagatggttgacacaaaccagagaatctgtaaatagaaggaaaaatggaggctgaagaaattctrctttgatttttctccttcttcaatgtaagcttcccttaaaataaaaaaattggaagagacccaacccaatctgtaaggtgcaggacatttttgtggatta

SEQ ID NO: 316016 - DNA, 201 bp, Homo sapiens
tttactgtgatagtcacagtttctagaataattcttggcccataattattaaaaaaaaacaatagccatgtgaggttagtgtgacattaccttctgagaartttcaaagtaataaaagcaactattattcatagaatgcttaatgtgctctaggtaatgtgctacatggtttatgtatgtttaatcctcttaacagtcctt

SEQ ID NO: 316017 - DNA, 201 bp, Homo sapiens
tagtttacaatattggcaagagagtgatgagaagatggtctatggaacctaatctggaattcagagggaaggacaggaacagtcggaagagttgatacagkggaagcagaatcagtgcactagagttcttgagaaggttgagaaacaggtatcccaggagcagatgaacaaagaacaagcaggctggaaattgtaggaaat

SEQ ID NO: 316018 - DNA, 201 bp, Homo sapiens
aaatgttgagggcctggttaaaattggaggcatgaatttatagtggtaccaattcatggtttttattgatttattttcctgccagctgctcaagacagtgkgagtgcatggcccaagggaggccaatggagttcttctaggattagaattttgcctggtggctagagtaaaggacaaagggacaaggtagtttacaatatt

SEQ ID NO: 316019 - DNA, 201 bp, Homo sapiens
acttcctaggcacactctggtttctctaggtttggagctgcctcagtctggtttctcctttcgctttccgcttccccggctcacatattcaattgtgcacyaccttgggaggggacaaaagatcttaagcagctgtaagcgaagaggagaatgcgggggacacgttagggatcgagagaatcagaattctgatatggttgt

SEQ ID NO: 316020 - DNA, 201 bp, Homo sapiens
ggcacctgcagaaacccaaaccaatcaaacagaaagactaagcaggacatgataaggcggaagggaaaccaggagagtacagtgctagggaagccatggcmagacagtctcacaggaggaagtgaatacttatgaatgccattgagaagtcaagcaaatgttaactgtaaagtctccttggatctactgacatggaggtca

SEQ ID NO: 316021 - DNA, 201 bp, Homo sapiens; identical to SEQ ID NO: 65879

SEQ ID NO: 316022 - DNA, 201 bp, Homo sapiens
ataccatactagaatttaaatatttaccaagtcacaattgtataatatatccacattatgttaatgttgatccttttttcaatccattctcttttaggacrcatggggtcacaggtaatcataccctatcggtgtgataaatatgacatcatgcaccttcgtcccatgggtgacctgggccagcttctgtttctggtaagg

SEQ ID NO: 316023 - DNA, 201 bp, Homo sapiens
catcagcacataaatgttaactcatatttaaaacaaacaaacaaacctattcctgtccttgttttctctagttccatttctcctttttcagaaggattgtstatactcctcatctacttccttgcctcacagcctctcttgtttgctccagtctggctttcagtcccactaatccaataaaattgctcttatttatgccac

SEQ ID NO: 316024 - DNA, 201 bp, Homo sapiens
aggactgagtgtagagctattgagtcagaatttgtgagattagctccttgcaccttaaatttttaaaagcaccacagataggcttgatgttcagcctgagrcaagaattaggagtgtttagaggatccttttttttttgttttccatcttgggtagaactcctgcataccactgggaaggtggtggtgcacatcacttata

SEQ ID NO: 316025 - DNA, 201 bp, Homo sapiens
ttctgtgtaactgagttttatgaattacatgattacctttatctggaggaaaatatcgcctttgaaatacaagtcatgtcttaatagtggaaagaatggakgctttattcacttgtctctaaactcaaaacaggtttgtttggttattgtttaggctgttggagagaaagtagtgagagatgcatttccggaagccattat

SEQ ID NO: 316026 - DNA, 201 bp, Homo sapiens
aggaatcaatatctaaattagttactaacagatttatttgttgcacttttacaatatcagaatctcctcattgcttgcattaaatcagaatttgagggaayctggaatctactttaatgaatgattcttctgttaccaaggtctgagaaccactgccctagactattacatatacttagtccagtgacccttagggatggt

SEQ ID NO: 316027 - DNA, 201 bp, Homo sapiens
tgtgtattgtctttttatagtcccagtcggtacctccttttccacctggtgaagtacatctttgctgtggctcacagattgttcctcccattccccttgcygctttttgcctatcggtaagtagagtgctccttttgtgtgacttctgaaaaagccagctccacacacttgttcctaatgttctcccttagggttataggg

SEQ ID NO: 316028 - DNA, 201 bp, Homo sapiens
ggtacagatagggtcttgctattttgcccaggctggtctggaactcctggcctcccaaaatgttgagtttaaaagtgttagcccctgcacccagccaaggwtggccttctgagctaagcccacatcttatacactggctgcttaaggtcgtgctgtgctctctcgtgtccctgagctctggctccgggccagagcatgtgg

SEQ ID NO: 316029 - DNA, 201 bp, Homo sapiens
ggagtccttctcaggccatatttagttcgctttaacagagctttcatgaatcaaagcacagaaacacttggcgttttatttacagaactctggaatagatwttggagacgtttcttccagaatggcactccgggaaaaactgaaatgtaaaacttttgactggtacctgaaaaatgtttatccactcttgaagccactcca

SEQ ID NO: 316030 - DNA, 201 bp, Homo sapiens
tagttacactgtggctaggttttcttacctaccagagctttaggtgaattccccaattcttcaacttaagacccaaagccctcattatttctgagttcctkatgctttgttctctccttctgcacctaggctgagtctctctgttttcattctcccaaacacacacagaacactgccatttcagtttctacaagacattct

SEQ ID NO: 316031 - DNA, 201 bp, Homo sapiens
cttatgctttgttctctccttctgcacctaggctgagtctctctgttttcattctcccaaacacacacagaacactgccatttcagtttctacaagacatyctttcttttaatattttgtgatttttaaaatggactttgcttaaaatatagggtcatccttttcctttttttttggatcaagcagttctgcccatatcca

SEQ ID NO: 316032 - DNA, 201 bp, Homo sapiens
tggactttgcttaaaatatagggtcatccttttcctttttttttggatcaagcagttctgcccatatccagcttcttggtttgtgtgagactatttgcctyttaaaacatctaagtacttattaggatttttctccagtagcagatcttgaacatcagagctgcatggagtgctttattctgacatctagtggccatgaca

SEQ ID NO: 316033 - DNA, 201 bp, Homo sapiens
cactttccttggggataagggagcagaggcagcccctcctttggtccatgtaggaggacttcctgaaagaagtatgattcaggagttgtttgaatgacagragagaagcagttcagtagacttctaaggaaagatgatttagataagaaagttagaggaggcaatataaaggcaggagtgggaggactgagcttacattct

SEQ ID NO: 316034 - DNA, 201 bp, Homo sapiens
atgagcacaaacacatggtctacttggcctggaacatacctctccaggtgagtcatggaattgaacagcagcacggaagaatgaaagaggaggaggtggcrgttatgtaatggggagggataaagcaaaagtgccatcgcagccctaaagaattagggtaaggtcctgatggtgtgataataatggctcttaacatttatg

SEQ ID NO: 316035 - DNA, 201 bp, Homo sapiens
aaacaagtaccctccaggacatccctagcttttttatttccacacagtcatattgtgactgtcccaagctgtacaaagaattgtctgtaaaatactgaacygtcaaaggatgatctaaatttttacatgggatgatccacaatgagccccaaaggaaaattctgggaagagggcagatacacaagtggtttctgcttttcc

SEQ ID NO: 316036 - DNA, 201 bp, Homo sapiens
  misc_feature (1)...(201): n = A,T,C or G
tgctgtcaatctccttctggtattttctagcaaggggactttacaaaacctgtttacgggtggtctccacagggagcttcctttacatctgaataaacgcnacggggcagtgataaagagactctcccacttggaggtggaattgcaggatctgagtaagtttacaatgctaacctggaaggtgtgtgtgtgggtgtgtgt

SEQ ID NO: 316037 - DNA, 201 bp, Homo sapiens
tggaaagcaagtttcataagtgctgtttccatgaacgtctcattcactactcatttctattcatacatcgaaattccatagatgaataaatgagtgggtgygtctaggaaagagagagaaaaagacaggcagacagggatgaagggaagagtgatacggggcaagagagtggatgaaacagagggaagatcatcagctcca

SEQ ID NO: 316038 - DNA, 201 bp, Homo sapiens
atggcgctggatctgggtcatcaattcttgcaagtggaatggcttctactcctaacactcccagcttctttctcaatgagaaagaaagcatgtgtatgtcygtttatggcgacttcaggtggggcctgtgcgtgtgccggggtgtctctgttggagagaggagaggaagctctgatgcctcgtccccagcttccctgggaa

SEQ ID NO: 316039 - DNA, 201 bp, Homo sapiens
gatactccagcacaaatcttactgggtggaaaggtgaggtaaataatagatgacgtcatggatcctggagggcatcttctgcataaaacatcctctgcctsggtctatcactatctgttcattcttttgagttaaggcagtgtttcccgaattaatgtgacaattagatttatatagaccaattgtttaaaatatagattc

SEQ ID NO: 316040 - DNA, 201 bp, Homo sapiens
attcctaggtatttgtctttttgatgctattggaaatgtgactgtttttaaaaatattttatttaaattggcaaaattgtatatcttatcatgtacaataygatgttttgaaatgtatacacatcgtggaatggctaatatatatctaaattaacatatgcattacctcacaattattttcagtgagaatacttaacatct

SEQ ID NO: 316041 - DNA, 201 bp, Homo sapiens
tttttagtagagacggggtttcaccatggtctctatctcctgaccttgtgatctgcctgcctcggcctcccaaagtgctgggattacaagcgtgagccacygcccccggcctgagatgatttttcatttatttgtgtttctttaatttcattcaccagtattttaaagttttctatgtagatatctttcacctccttggtt

SEQ ID NO: 316042 - DNA, 201 bp, Homo sapiens
agcactaggggcttagggccaacctctgaacaaatactgcttgaacaataaactactctgactcagaggcaactactaggaagccaggattaaaaataaartcatgcacatccctggtaatctggaagactatgtgcatacctaaggctgtgctctctcaggagttaccacagagaagaaaatccaagctaccagtatgtg

SEQ ID NO: 316043 - DNA, 201 bp, Homo sapiens
agcctccatgccacatatatcaaggaatctaatcaaccaaggaggtttaaatccaatctctgatgaataagtggcttatgatgacccagaagcaacccctrggtagccaggctaaaagagaaaaacaagaagagaaaagaaaaaaaaaaaaaagatcaagatcatgagcattaaaggctgaacactgcaggagaaatagat

SEQ ID NO: 316044 - DNA, 201 bp, Homo sapiens
tcctgggttatatacagagttactagatgctttgtctaaaatgataagtttttaataagaaattatgagacatacaaagatacaggaaagggtaataactygtgcacaagagaaaacaaagcaacagactttagaaggggcccagatattggacttatctggtaatgacttcaaagacatcattataaatatattcaaagc

SEQ ID NO: 316045 - DNA, 201 bp, Homo sapiens
aactcttcccacactcacagcttttcaggcaatggggcgaggatctttctgaggcccagcagaaggcggcccaggacctcttccggaagtttggttacaaygcgtacctcagcaaccagctgcctctcaatcgcaccatccccgacacgcgagactacaggtgggatgaaccaggcttgggcttctagggtcctcagtttg

SEQ ID NO: 316046 - DNA, 201 bp, Homo sapiens
ggcgcctcattctctgtcctttctaacagtgttgccgtgtgttttgtccccttcagatgaaaaacctattggatgaaaatgtctgcttggatcagggaccytttccaggcaacacccccatcatgtattactgccatgaattcagctcacaggtatcttccacaatcttcctggccctgcctgggcaagtctgtcgtggct

SEQ ID NO: 316047 - DNA, 201 bp, Homo sapiens
gagaaaaatctcctcctgcctctgggagggaggagagaagaggtgaaaaggaatcattttgaaatatgccagattattctgtttttcttaacaaggtctgyctgaaagagaaactattttaccagagcctaacctgctggagttttatgatagcctaactgctgtggtttgaatgtttgtcttctctgaaactcatgttaa

SEQ ID NO: 316048 - DNA, 201 bp, Homo sapiens
aattacctgaacccgggaggcggaggttgcaaggagccaagatcatgccactgcactctatcctggacaacagagcgagactctgtctcaaaagaaaaaamaaaaaacaaaaaacaaacaacaaaaaaaatcaaacccaaaacaaaaatgtgtaagatacagatgaacacaatttgaaagaaactagaggatgtgtggaac

SEQ ID NO: 316049 - DNA, 201 bp, Homo sapiens
ctagtagctgggactacaggcacctgccaccatgcccggctaattttttgtattttttttttttttagcagagacggggtttcaccatgttagccaggatrgtctcgatctcctgatctcgtgatccgcccaccttggcctcccaaagtgctgggattataggctggagccgccgcacctggcctggacattttttttttt

SEQ ID NO: 316050 - DNA, 201 bp, Homo sapiens
taatatattattatcagcagaagcttaatgtctctgtgtgtgtgtgtgtgtgtgtgtgtgtgagagagagagagagagagagagagagagagagagagagrtgatggaaggaatttggcaagtgggaataaatttggagagcagagtttgaaaacttttgggcaaagctaattatgggcattacttcataaacggcaatct

SEQ ID NO: 316051 - DNA, 201 bp, Homo sapiens
atgtcagggtggcattgtaacaaacactgaccctgagttgtaatgctgtctctgctaagtcactgtggactaagcttctataagatgaccttttttccccctccaagccctgaaattctgtgcttgtgacaaggtgatctctgatccactgtggtgtctggaggaacaaagtaatttcccatctagagtttatttcattcc

SEQ ID NO: 316052 - DNA, 201 bp, Homo sapiens
gcaatactatcttatcatccattattttaagatgatgatggcttaacactatttgcataaacagacaaccaaacaattgaaaaaaaaaaaaactaataaawactctacaccttgactttgtccccccactttttaactttttgttgtttctatttatatcttactgtactatgtcttgaaaaggttttgtagttattattg

SEQ ID NO: 316053 - DNA, 201 bp, Homo sapiens
ttagatattctctctttttttcttagtctggataaaggtttgtcaattttgtttaacttttcaaaaaaccaactttttgtttcattgatttttttgtattytttatttcaatttcatttatttctactctgatctttattatttcttttttattttttaactttcattttaagttcaggggtactagcgcaggtttgttat

SEQ ID NO: 316054 - DNA, 201 bp, Homo sapiens
tctgcgagtggccgaaatctggatggatgagcacaaacacatggtctacttggcctggaacatacctctccaggtgagtcatggaattgaacagcagcacrgaagaatgaaagaggaggaggtggcagttatgtaatggggagggataaagcaaaagtgccatcgcagccctaaagaattagggtaaggtcctgatggtgt

SEQ ID NO: 316055 - DNA, 201 bp, Homo sapiens
tgtttcccggatgtgggcagcgcagcagcgcctcccttcggcgctggtctgtttcccagtgcttagaaaatgcctgccgggatcccagccctctgctcctwgtggctggtcgttcctggtgtcctcggtgtgttggggaaaatgtaggccctgggagggatggcgcctcattctctgtcctttctaacagtgttgccgtgt

SEQ ID NO: 316056 - DNA, 201 bp, Homo sapiens
gcgcctcattctctgtcctttctaacagtgttgccgtgtgttttgtccccttcagatgaaaaacctattggatgaaaatgtctgcttggatcagggaccckttccaggcaacacccccatcatgtattactgccatgaattcagctcacaggtatcttccacaatcttcctggccctgcctgggcaagtctgtcgtggctc

SEQ ID NO: 316057 - DNA, 201 bp, Homo sapiens
gagtagctgggattacaggcacatgccaccatgcccagttaatttttgtgtctttggtagagacggggtttcaccatggctggtcttgaattcctgacttygtgatccgcccgactcagcctcccaaagcgctgggattacaggtgtgagccactgtgcctggcgagttacatgttttttaaaggataggtatatgaaagg

SEQ ID NO: 316058 - DNA, 201 bp, Homo sapiens
gcaggagttctacccaaagccctgctattctttccatcagctaggacacaatgtgccatgaggagccagccagagccatctggtttactcctctttccttytttgcaaagatctttcttgttattcttggtgctcccacattttattcgctctgaaatgttgtgatgtcagagactcactaccacctgagttgaacctcaa

SEQ ID NO: 316059 - DNA, 201 bp, Homo sapiens
tcttgaattcctgactttgtgatccgcccgactcagcctcccaaagcgctgggattacaggtgtgagccactgtgcctggcgagttacatgttttttaaakgataggtatatgaaaggttcagatttgatttgatagtgttttaggagaattacttcttgtggccccgtgtagggaaaagattggaaacagggaactggta

SEQ ID NO: 316060 - DNA, 201 bp, Homo sapiens
tatgcttggttcaggtgccacacggacaatctagttcaacagtttctaacttttcaaagttaatgacccctttgagaattcattgctagctatggagtctstctccaggaaaacatacatatgacctatgtgcaagatttgcttacagtttcagaggttttttgcatcctagattaagcttccctgaactagacaatatca

SEQ ID NO: 316061 - DNA, 201 bp, Homo sapiens
atgatgtcactgccccagtgaagtaagtctgaggagattcagggaacttgagtagcatgtgggaaggcaggaatgaactgaatggattttgtttatctttsgtggtagtaattggggtgacgtggaaggaggggaggggatgaggtgaaggacaagggatagagggaaaaaaccccaataagttatcccagttaagaaatc

SEQ ID NO: 316062 - DNA, 201 bp, Homo sapiens
gccgaggcgggcagaccatgaactgaggtcaggagtttgagaccagcctggccaacatggtgaaatcctgtctctactaaaaatacaaaaattagctggtygtggtggtgggcgcctgtaatcccaaccacctgggaggctgaggcaggagaattacctgaacccgggaggcggaggttgcaaggagccaagatcatgcca

SEQ ID NO: 316063 - DNA, 201 bp, Homo sapiens
gggaggctgaggcaggagaattacctgaacccgggaggcggaggttgcaaggagccaagatcatgccactgcactctatcctggacaacagagcgagactstgtctcaaaagaaaaaaaaaaaaacaaaaaacaaacaacaaaaaaaatcaaacccaaaacaaaaatgtgtaagatacagatgaacacaatttgaaagaaa

SEQ ID NO: 316064 - DNA, 201 bp, Homo sapiens; identical to SEQ ID NO: 65913

SEQ ID NO: 316065 - DNA, 201 bp, Homo sapiens
attgcccattttatgctggaggtagtccagccactaatatatgatagtataaaacttttgtatcacgttgattgttgcactcagaatttctataggtgtgyacttgattgacaggagaactaaaggtacacttggatgagaagattaagctttacaaccagaagtatccaggactactgaaaataatacggcatcctgaaa

SEQ ID NO: 316066 - DNA, 201 bp, Homo sapiens
tggtgggatctcggctcactgcaagctctgcctactgggtccgcgccattctcctgcctcagcctcccgagtagctgggactacaggcacctaccacctcrcccagcttatttttttgtatttttttagtagagacgagatttcaccatgttagccatgatggtctcgatctcctgacctcgtgatccgcccgcctcggcc

SEQ ID NO: 316067 - DNA, 201 bp, Homo sapiens
gagaagattaagctttacaaccagaagtatccaggactactgaaaataatacggcatcctgaaaggaaaggtcttgctcaagcccgcaacactggctgggragctgccacagcagacgtggtcgccatcttggatgctcacattgaagtcaatgttgggtggtaaggctcaaagaggctagttcttctggaaagggcagag

SEQ ID NO: 316068 - DNA, 201 bp, Homo sapiens
gtgctctctcaggagttaccacagagaagaaaatccaagctaccagtatgtgggtcaaaacgtaaactccctgaattgtgattgcagcctccatgccacawatatcaaggaatctaatcaaccaaggaggtttaaatccaatctctgatgaataagtggcttatgatgacccagaagcaacccctaggtagccaggctaaa

SEQ ID NO: 316069 - DNA, 201 bp, Homo sapiens
attaagcctggagaaaagagagatttgggtgctgactcttcatagtggcaacagctcttgcccacagggtgcccgtgccccgagtctagcccacccaaggragagatgtggaagataacagacctgagtcctcactttctgagttcataatcccggcttctcctttgtaagtgttaggtccttgggtaactcaacgtcttc

SEQ ID NO: 316070 - DNA, 201 bp, Homo sapiens
tgagatactttcagaattaactgaattaattttatcaatgagtaactcagagtcatttggttagatattttgcatactgctaagtgatttgcctgcaagtkgtttacttacacgtgaggaagtcagtggtaggctgagcccaagaacaaagccatagacaagctttattaaaagagagggaagagagggaagaaaactacc

SEQ ID NO: 316071 - DNA, 201 bp, Homo sapiens; identical to SEQ ID NO: 65919

SEQ ID NO: 316072 - DNA, 201 bp, Homo sapiens
ctttatttttagtttatgcgtgtttttataggtgaagtatgtttcttataggcaacagatcagtgggtcttgttttttcattcatttggccactctatgtyttgattggagagttaagtccatttacattcaatgttattattgataagaaaggacttacttctgctattttgttatctgttttctgattgttttgtggtc

SEQ ID NO: 316073 - DNA, 201 bp, Homo sapiens
tatctctctttctgttctgagctacctaaagctgggggtggagtgacacaagcaaccccgtgaccaccgccactgtgactgctctgggtcagacctgaagstagcacagaactgggtctcactcaaggcctgctgtaaccactcactgtgtacttcctatgttcccttgagaccctggtgctctacaatcagtaggtggca

SEQ ID NO: 316074 - DNA, 201 bp, Homo sapiens
actcagctcttcgccctcaaccctctcagtttccttttgtcccttgctccccgatccccatctcttttccttctctctgcttctactccccttgaaaactrtagctcttgcctggactcccccccgccccgcccccgtttctccagcagctgcagcgattggccttgtccgcctgaactccgcagaggcgcccctccctgt

SEQ ID NO: 316075 - DNA, 201 bp, Homo sapiens
gcttaactgatttttggttcttatgaaggtgctttgcttgtgtaaatagtggttaaatttgtatccttgtcagggggatgattggtggagccttctagtcmaccatcttgctccaccacttctcccaacctgaatttttgtgctctataagggaattcaggatgcaaaccaagaaaaatagagaaattacaagtgcagatt

SEQ ID NO: 316076 - DNA, 201 bp, Homo sapiens
tgaaggtgctttgcttgtgtaaatagtggttaaatttgtatccttgtcagggggatgattggtggagccttctagtccaccatcttgctccaccacttctmccaacctgaatttttgtgctctataagggaattcaggatgcaaaccaagaaaaatagagaaattacaagtgcagattcaagatatgtcagtgtattggtt

SEQ ID NO: 316077 - DNA, 201 bp, Homo sapiens
ggctagatctgtccactcattctctcaagaacttctcaacgtgaaaaagcacttataacagtgcctgacacgtagtaagcagtattatcattttaagatastttaactgtcagggaaaggacattaggaatgatcacagtacacctcaggtgcaagggagaagagaggcaggtgcaggggaaatactacttattttctagt

SEQ ID NO: 316078 - DNA, 201 bp, Homo sapiens; identical to SEQ ID NO: 65924

SEQ ID NO: 316079 - DNA, 201 bp, Homo sapiens
gcaccttggctctgtctctcttcccctccagggaggagctgtcataaacagagataccaagcggtgtctggagatgaagaaggatcttttgggtagccacrtgcttgtgctccagacctgtagcacgcaagtgtgggaaatccagcacactgtcagagactggggtcagaccaacagccagtgatcttcagatggcgctgg

SEQ ID NO: 316080 - DNA, 201 bp, Homo sapiens
ctctgatgcctcgtccccagcttccctgggaaggtcgtgatatatatcaaatgccattcttggaaactccttgaaataaccagcatcttttggctgttacrtggggagagaaggaggaggttggaagtttatctttgacttctgcccacgatgtttagccttccttcccgacagctactgtcgccatctgccccacacctc

SEQ ID NO: 316081 - DNA, 201 bp, Homo sapiens
ctggactctagagagttctactcacaacccagtacagcctaaatggaggaggtactcaatgtcagggcaaggtgcttggaacagctttatctgctctcccctactgcttgtcctcatatccaagctgggctttctgcacactcttgttctagggcagagccaatcttggctcggattcaggaggaccgcactgtgattgtg

SEQ ID NO: 316082 - DNA, 201 bp, Homo sapiens
agtcccctcacctctttgggactcagggtcttcatgaggcaaagacaagagttgagctggaatattgtgaaagatatctttttctgtggaaaaaaaaaaaagtcaatactatactctatggcctatacgctatgttccatggggtgtagataagacttaattcaggattttttcctgtggaacaatgcaataaaaaaatac

SEQ ID NO: 316083 - DNA, 201 bp, Homo sapiens
aggaggtttaaatccaatctctgatgaataagtggcttatgatgacccagaagcaacccctaggtagccaggctaaaagagaaaaacaagaagagaaaagraaaaaaaaaaaaagatcaagatcatgagcattaaaggctgaacactgcaggagaaatagattttgtagactctgcaaattagtttaactaggttaccaat

SEQ ID NO: 316084 - DNA, 201 bp, Homo sapiens
ctgtgctttagatatgcatacacataaacatctcaatgccttaaacagcagtattgctgcccgcatgtcccacctccagccctaaggcggttttctcctayctcagtagatggaatatacaatcgggttttacaccgagacattccattgcccagggacgggcaggagacagatgccttcctcttgtctcaactgcagaaa

SEQ ID NO: 316085 - DNA, 201 bp, Homo sapiens
tgtatgttggactatctttgcatcgcatccctgaaataaatctcacttcatcatgccatgttggccaggctaattagtcctgctgtgaacaggaccacctrcacaatttgcagagcccagtgcaaaatgaaaatgagggaccttcattaaaaaataattaagaatttcaggatgataaaagtaatgaatgaaatcaatagg

SEQ ID NO: 316086 - DNA, 201 bp, Homo sapiens; identical to SEQ ID NO: 65912

SEQ ID NO: 316087 - DNA, 201 bp, Homo sapiens
agcttttcaggcaatggggcgaggatctttctgaggcccagcagaaggcggcccaggacctcttccggaagtttggttacaacgcgtacctcagcaaccarctgcctctcaatcgcaccatccccgacacgcgagactacaggtgggatgaaccaggcttgggcttctagggtcctcagtttgatttgaggatgagctttg

SEQ ID NO: 316088 - DNA, 201 bp, Homo sapiens
tatatgatagtataaaacttttgtatcacgttgattgttgcactcagaatttctataggtgtgcacttgattgacaggagaactaaaggtacacttggatragaagattaagctttacaaccagaagtatccaggactactgaaaataatacggcatcctgaaaggaaaggtcttgctcaagcccgcaacactggctggga

SEQ ID NO: 316089 - DNA, 201 bp, Homo sapiens
agcgtggtaggttgctagccactgctatgggctaattaccttccagaaactgcatctcacttaggcaaccgtgaagagaagacacaggagacatcacgtckatccaatatgattaaatagtcctattagctactgagatgaacataatattttctaagctcaatattagaatgtgtgttttgattagtatgttttgtaccc

SEQ ID NO: 316090 - DNA, 201 bp, Homo sapiens
tgccccagtgttctgatcagtgattggatgcatgagagggcacccagtgttcccagaaagaggggtctcgtcagcgtcttagtggagaaggacaagtgcaygcgagactgcagaggagtatttgctggcctctctagctgagtgaactttgacctattctagacagcagtaaactggcaccgattatggtgcaatgtttga

SEQ ID NO: 316091 - DNA, 201 bp, Homo sapiens
tccacagtatctcttttacctttttggtgtaatctacagggcctcattagaaggggctggcccgggggtttgtgattgttcttggtagttcatcttttttyatcttccagcctaaggccgaactcttaaaagaggcaatggaaagtagtcgaaattacacaggtgttggagacagacagacttaagtcaaaatcctgcttt

SEQ ID NO: 316092 - DNA, 201 bp, Homo sapiens
cagcagacgtggtcgccatcttggatgctcacattgaagtcaatgttgggtggtaaggctcaaagaggctagttcttctggaaagggcagagaggagataktgtgcatgtactgaacacaagacaggatactgtggacacagggaaagtcagcaccaggccttaaataaagggaatctccaaaacagcatgcttttatgca

SEQ ID NO: 316093 - DNA, 201 bp, Homo sapiens
aaggggctggcccgggggtttgtgattgttcttggtagttcatcttttttcatcttccagcctaaggccgaactcttaaaagaggcaatggaaagtagtcraaattacacaggtgttggagacagacagacttaagtcaaaatcctgctttgcctcttaagagtttttgtgcaacatacaagccctctaagccatacctgc

SEQ ID NO: 316094 - DNA, 201 bp, Homo sapiens
gtaaagggattgctgggttgaatggtatctctgtctttagatctttgaggaatcaacacactgccttctacaatggctgaactaattcacactcccatcawcagtgtacaagcattcctttttcttcacaaccttgccagcatctgttattttcttctttttaataataaccaccttacttcaaactatactacagggcta

SEQ ID NO: 316095 - DNA, 201 bp, Homo sapiens
gtaaaaatgacaataataagaatgtcagggtggcattgtaacaaacactgaccctgagttgtaatgctgtctctgctaagtcactgtggactaagcttctrtaagatgaccttttttccccctccaagccctgaaattctgtgcttgtgacaaggtgatctctgatccactgtggtgtctggaggaacaaagtaatttccc

SEQ ID NO: 316096 - DNA, 201 bp, Homo sapiens
gggctttctgcacactcttgttctagggcagagccaatcttggctcggattcaggaggaccgcactgtgattgtgtctcctgtgtttgacaacattcgttytgacaccttcaaactggataagtatgaactggcagttgatgggtttaactgggaactctggtgccgctacgatgcactgccacaagcctggattgatctg

SEQ ID NO: 316097 - DNA, 201 bp, Homo sapiens
tggctgggaagctgccacagcagacgtggtcgccatcttggatgctcacattgaagtcaatgttgggtggtaaggctcaaagaggctagttcttctggaargggcagagaggagatattgtgcatgtactgaacacaagacaggatactgtggacacagggaaagtcagcaccaggccttaaataaagggaatctccaaaa

SEQ ID NO: 316098 - DNA, 201 bp, Homo sapiens
ttaatgttaacaaatgaattttgagtcttttctgggttataccttaagccataatcattctttggcagagaaaactaaccttttttggatggtggttgatrtggttaggctttgtgtccgcactcatatctcatcttaaattataatccccataatccccatgtgtcaaaggagagaccaggtggaggtcattggatcatg

SEQ ID NO: 316099 - DNA, 201 bp, Homo sapiens
ctcatatctcatcttaaattataatccccataatccccatgtgtcaaaggagagaccaggtggaggtcattggatcatgtcgggggggttttccccaggtkgttctcctgatagtgagtgagttttcacaagatctgatggttttataagtgtttggtagttcctcctgctttcattctccttcctgctgccttgtgaaga

SEQ ID NO: 316100 - DNA, 201 bp, Homo sapiens
tggatcatgtcgggggggttttccccaggttgttctcctgatagtgagtgagttttcacaagatctgatggttttataagtgtttggtagttcctcctgckttcattctccttcctgctgccttgtgaagaaggtgccttgcttcccctttgccttctgccatgattgtaattttcctgaggcttccctagccatgctgaa

SEQ ID NO: 316101 - DNA, 201 bp, Homo sapiens
agggggaaagagagagagcaagctctttctttttaagagcactacctgaaagttgtgtatattatttcttttcacattctgttggccattacctagttacrtggccacacctgtgtgcaaaggagtctgggaaatatagattttagttactgggttatgtgcccagatgtttcttctatcactgtagatatagagcagaat

SEQ ID NO: 316102 - DNA, 201 bp, Homo sapiens
gcgagttacatgttttttaaaggataggtatatgaaaggttcagatttgatttgatagtgttttaggagaattacttcttgtggccccgtgtagggaaaakattggaaacagggaactggtaagaaacactgagtctcttgactaaggcagggtggttaaggagaagaaatattggagtctgttgtagctgaacggttgag

SEQ ID NO: 316103 - DNA, 201 bp, Homo sapiens
agatgataatatcttctgtatgcgacttttgggaggattaaatgagatagcgtgtgtaaagcatttcacgtggtgcctggagcagaagagtgttcaatackcattagccattgtgatccatttattattaatgattatcagagggtgtggaatactatgctgaaatctgacagaggctaatgtagaagctctgcctttaac

SEQ ID NO: 316104 - DNA, 201 bp, Homo sapiens
tattcacatcactcaaatattttgagcttaaatgttaaatgtcactcaaatgttatgtgagatgtaagctttttaaaaattatatcaaggtaggtggaatrctgtattttctccctaattttaggaaaatttcacaatcaacaactacatgttgagtttctaccatgtgctagccactgggcagggaggaggatgtcagag

SEQ ID NO: 316105 - DNA, 201 bp, Homo sapiens
agttttatggaaagcaagtttcataagtgctgtttccatgaacgtctcattcactactcatttctattcatacatcgaaattccatagatgaataaatgastgggtgtgtctaggaaagagagagaaaaagacaggcagacagggatgaagggaagagtgatacggggcaagagagtggatgaaacagagggaagatcatc

SEQ ID NO: 316106 - DNA, 201 bp, Homo sapiens
aaagaatcatggtttttctttaagcttttaagttcagcttacaaattttactattttatctataagcctaacaagttttgacaatcccctttaaagaagaytttttaatttaataaattaaattccattaaacatgatgagctgtatttacaaatttaatatgttaaatttcctttcttaagaacttcaattacctgactt

SEQ ID NO: 316107 - DNA, 201 bp, Homo sapiens
gatataacatcatacagagtgaaaggaaagattggatagcagtgttgaagtaattaaaaaaaaataatatgttataaaaatggtctcttatagatgtcttyggaagacatatccttcccaactcccatccctcagtgtcattctcatattcgtgaatgaagctctgtccattatacaacgggccatcaccagtatcatcaa

SEQ ID NO: 316108 - DNA, 201 bp, Homo sapiens
aatgcagctctgtcatttactagctggtaaacatgggcaggttacttaaagggagatacctgtatggtgaggactaaatttatgcaaagtgttaggacagyatatggcacaaagtaatatattattatcagcagaagcttaatgtctctgtgtgtgtgtgtgtgtgtgtgtgtgtgagagagagagagagagagagagaga

SEQ ID NO: 316109 - DNA, 201 bp, Homo sapiens
ttgttgcactcagaatttctataggtgtgcacttgattgacaggagaactaaaggtacacttggatgagaagattaagctttacaaccagaagtatccagractactgaaaataatacggcatcctgaaaggaaaggtcttgctcaagcccgcaacactggctgggaagctgccacagcagacgtggtcgccatcttggat

SEQ ID NO: 316110 - DNA, 201 bp, Homo sapiens
gttttatggaaagcaagtttcataagtgctgtttccatgaacgtctcattcactactcatttctattcatacatcgaaattccatagatgaataaatgagwgggtgtgtctaggaaagagagagaaaaagacaggcagacagggatgaagggaagagtgatacggggcaagagagtggatgaaacagagggaagatcatca

SEQ ID NO: 316111 - DNA, 201 bp, Homo sapiens
ctccacaccatcgtgggctatggaagagtatgtattatgaaattgcactttggattttaaatgtttgactgtgaaagacaatgcggcctgaatctcgtgaytgcctgtcctgcccaagacgcccttcctacctcagctttctactcagctcttcgccctcaaccctctcagtttccttttgtcccttgctccccgatcccc

SEQ ID NO: 316112 - DNA, 201 bp, Homo sapiens
ggctttccagatattcaaaaagacatgggtgttatggtctaagctgtacctgctttagggggcaccccaagcccagtaatgctgtggttcttccagactcrtagaagtaccaccttgatggtcttggataagatccgggagaatcctgtggattaccaggcagagacccttgttctcttcccttacgtctcccaaacaaat

SEQ ID NO: 316113 - DNA, 201 bp, Homo sapiens
catctttgaggatgtcaaagagctcactggaggcaaagtgagagtcaggggactaagggaggggtcagggacctgggccagattttttttttttttttttttcctgagacagagttttgctctgtcacccgggctggagtgcaatggtgcaatctcagctcactgcaacctccacctcccaggttcaagcgattctcctgt

SEQ ID NO: 316114 - DNA, 201 bp, Homo sapiens
tcaccatgttggccaggctggtctcaaactcatgacctcagataatccacctgcctcggcctcccaaagtgctgggattataggcgtgagccaccgtgccrggccatatttatgactttaaaagaaacacaagagtatcaagaggaaaatatcccaacacaaagaaatgataaatgtttgagatgatggatatactaatta

SEQ ID NO: 316115 - DNA, 201 bp, Homo sapiens
ttataagccagagagatactttgggacacagggaccttgctagcaatacaacttagtaattcttatcgaagacccactgtgtgctagggactttgctgagkgctaggaagacaaagatgtataaaacacaaagacctaactgtggagcaagggagattcttctgtcagtaagatggtgtgttgtgtcaaaccggcagcata

SEQ ID NO: 316116 - DNA, 201 bp, Homo sapiens; identical to SEQ ID NO: 65931

SEQ ID NO: 316117 - DNA, 201 bp, Homo sapiens
ttccaaagaaagacttttctgaccaccctatctcatgtggcccccctctacctctatttacagcaccctacttctcactatttatcacaattactttaaamattacgtgtctatttatttacctgtttattacctatctcctaacaccagaatggaagttcctagttctagcacagcatctagcacagaatgctgtaagta

SEQ ID NO: 316118 - DNA, 201 bp, Homo sapiens; identical to SEQ ID NO: 65927

SEQ ID NO: 316119 - DNA, 201 bp, Homo sapiens
ctggtcagagattttactaggaggcagcgtaacaaaatagttaagtgcttcagctttggaattagaatggatatagattgcatttaaatgaaatttttttwaaaaaggagattttttttaaaaaaagtaaactgtctgctctatgataattaatgttagccattgttattgagtgttaagagcagtgtcctaggaagtagg

SEQ ID NO: 316120 - DNA, 201 bp, Homo sapiens
attatcctctaagctcctgtgttcctgtatccctcatatttgttcagctctccagggagactggtggggctctgattcctttgagggtccccagaaggcayatgaggcacagcagggacccacatgttatgctgacaatgtcagtataagagactgcaccacctccgtcatccccactcagtactgttccctgcccccacc

SEQ ID NO: 316121 - DNA, 201 bp, Homo sapiens
tccctcaatgaggaaggtgagcactaccaaggctcagaccgtacttacagctgtccccttctccttatccccaccccatctcccagccttttttgtttctstgcccttcctgattagccctgtcatgcctttctccctagcagtctttcttgtctaacccacaaagtgagcgggctgtcagggaggctttgttcagtggct

SEQ ID NO: 316122 - DNA, 201 bp, Homo sapiens
aggcactgtgctcggaagttagacccacggcgtgaaggggcagaaattcgggtaaggaaaactccaggtggcttgtaagaatatttcaaaggccaggtgcrgtggctcacgcctgtaatccctgcactttgagaggccaaggcgggcggatcacaaggtcaggagatcaagaccatcctggctaacacggtgaaacctggt

SEQ ID NO: 316123 - DNA, 201 bp, Homo sapiens
aagcaggtcaaggaagatacacccatggtagcctaggaaattggcagtagttggtgggtggggaaaaggagggtttggctgtatgcctagctttcacaagrtaggggatgaggaagatgatcatgatattgcacagaggacccaacactgaattgtgggagctagaggttgcttgaggcaaagtaaaaaggcttcggacac

SEQ ID NO: 316124 - DNA, 201 bp, Homo sapiens
ccctgagccgggctggcagtcactgcgggcgaggaggctggggtcacccgagccggagccccctccttggcgggggcgtccggcaccacctcagtgaggcygcggcgcagggcagagagacgccacacagccaccagccgcagcaccaggatcagtaaggctcctgggacagggcaggggacgggcttgcccccactccca

SEQ ID NO: 316125 - DNA, 201 bp, Homo sapiens
aagcattgtggtgtatgtgtgtgtacttaggatggggacaagaggaatgggggagagagaatcttaggaggaagaaatcccaggggaactttggccctccwgcttcctctgagtcccttcataaacatttgtttatcttgtaaaataatttgttccatttctaattagtacataatgagagaggcagtgtgatggtttgtg

SEQ ID NO: 316126 - DNA, 201 bp, Homo sapiens
gccgagtgttgcttggctcacgtgtctgagtgcagggccgggctcacgccgccagtcctcaccttccctagtcctcgtgtgtattttaggagatgcgtggrtgtggaacagcctcctgcctccggtccaggtgtactggggtctgtgtgttgtgtttctgcgtgttctcggcaggtaatgtgtgatgcgcgtgtattattg

SEQ ID NO: 316127 - DNA, 201 bp, Homo sapiens
actaggaggcagcgtaacaaaatagttaagtgcttcagctttggaattagaatggatatagattgcatttaaatgaaatttttttaaaaaaggagattttytttaaaaaaagtaaactgtctgctctatgataattaatgttagccattgttattgagtgttaagagcagtgtcctaggaagtaggtaccctgcctcaaat

SEQ ID NO: 316128 - DNA, 201 bp, Homo sapiens
gaaactcatccagtctgacaccagttcacaaagaacacctgtgattccagtctgatctaggcaactctagctgctttcccactaccctcaggtttgccttrtcagccatggatatggaacagaaagactatgactcgcgcacagctctgcatgttgctgcagctgaaggtactgaagggttaaggaggggaggaggagggt

SEQ ID NO: 316129 - DNA, 201 bp, Homo sapiens
gggagccagagcccaaactctaaatgtgctgtagaaaaagggccaagtcattgactgcaccactccttcagccagaggtagaaaggatttactcttcagcsatctggtagagccccaagaacaagttacatgtggacaaagggagggagaggtatcatggtgattaataaattcaaacaaagctgaatgataagaccccag

SEQ ID NO: 316130 - DNA, 201 bp, Homo sapiens
ctacttgggagattgatgtgggaggatcacttgagccctgtaggtcgaggctgtagtgatccatgattgcatcaccacactccagcctaggcaacagagcragaccctgtgtcaaaaataaataaataagtttattacttaaaaattttaaaaagaaatatcccagtattagagataaccaattaatattgtgatatattc

SEQ ID NO: 316131 - DNA, 201 bp, Homo sapiens
aggggttgggggcttcagctgagaccctgacagtgtgaaagggctgatgtcctgaagagaaatgctctcccctctcttccttgcagtgctttcctaagggrgtggacatgatggctgcccttgatctctacttccaggtaagaaaacactgctcagggccgagggaacaggacagactgtccttgcccttgccctttccct

SEQ ID NO: 316132 - DNA, 201 bp, Homo sapiens
attcctctcaggtggggcaacattcccctggatgatgctgtgcagttcaaccatctggaggtggtcaaactgcttcaagattaccaggactcctacacacyctctgaaactcaggctgaggcagcagctgaggccctgtccaaagagaacttagaaagcatggtatgagcacaggtcatggacagcccctgctcaagaaaa

SEQ ID NO: 316133 - DNA, 201 bp, Homo sapiens
acctcaccactactcgagtctctgacacaacactacctcaccactactcgagtctctgtcgtaagggacaccaataggtattatttattattaatgacatyatgcagtacttttatttctttcttttttgagacggagtctcactctgtcacacaggctggagtgcagtggcaccatctcgactcactgcaatctccacct

SEQ ID NO: 316134 - DNA, 201 bp, Homo sapiens
gaccgctgtgtctgccagcaccactgcccactcccggaagcgctccacattcaaggccaccttggtgggctccaatcccaccaagccatatttgacacccrtatcatctctgaagagtgccaggctgctgtgggcggttttttcttccagtttgaaactgacgcctgcgggcagagcaaaaagacgggataataacagggg

SEQ ID NO: 316135 - DNA, 201 bp, Homo sapiens
tcctctccagctgccccagtggctctctaaccccactaccaggtgcaccagcccatactagaagccttatttccagaaatgtggaaatctgctggcctcaagagaggaaagcctcttgacaagacctgagttcagaagggctagtcaacctgtgaggtattaatagagcttcttaaccaagtggagcctcaatgtcccttt

SEQ ID NO: 316136 - DNA, 201 bp, Homo sapiens
cttgaacctgggaggcagaggttgcactgagccgagattgtgccattgcactgtagcctgggcaacaagagcaaaactccatctcaaaaaaaaaaaaaaaagaaaaagaaaaacaaccagaggtgttgcagctcctgaattgtgcttcacattgctggctcttctccttggggtctcagcttagatgtcatttccaaagaa

SEQ ID NO: 316137 - DNA, 201 bp, Homo sapiens
ggaggcagcgtaacaaaatagttaagtgcttcagctttggaattagaatggatatagattgcatttaaatgaaatttttttaaaaaaggagattttttttwaaaaaagtaaactgtctgctctatgataattaatgttagccattgttattgagtgttaagagcagtgtcctaggaagtaggtaccctgcctcaaatgggc

SEQ ID NO: 316138 - DNA, 201 bp, Homo sapiens
tgggaggatcgcttgagcctgggaggtcaaagctgcagtgagccatgatcgtgccactgcactccagcctgggtgacaaagcaagactgtctcaaaaaaaagaaagagaaagagaggagccaatggaagtgcggtgttttcagaaggataaaaaaagggccattataaaattgaacacatttgcagcagcaggaccagact

SEQ ID NO: 316139 - DNA, 201 bp, Homo sapiens
atctttgaggatgtcaaagagctcactggaggcaaagtgagagtcaggggactaagggaggggtcagggacctgggccagattttttttttttttttttttcctgagacagagttttgctctgtcacccgggctggagtgcaatggtgcaatctcagctcactgcaacctccacctcccaggttcaagcgattctcctgtc

SEQ ID NO: 316140 - DNA, 201 bp, Homo sapiens
ttattttttaatccattgtttcaatagataatatattccatatggttcaaaattcaaaatatacaaaagatagtgaaaagtatcctcccatccctttttcytggcacctatgtcatctctgtagaaggagatgaatcaatcttacctatttatgtatttatgtatttgagatggagtctcgctctgttgcccaggctggag

SEQ ID NO: 316141 - DNA, 201 bp, Homo sapiens; identical to SEQ ID NO: 65975

SEQ ID NO: 316142 - DNA, 201 bp, Homo sapiens; identical to SEQ ID NO: 65938

SEQ ID NO: 316143 - DNA, 201 bp, Homo sapiens
tcaccttctctggtgataactccagcacccagggatggagagtcatggggaccctattaggtctcggtgcagtgttggcctatcaggaccatcggtgtagkgtaagtagggaaagtgcttcattgtcagaacagactgggtgcagtggctcacgcctgttatcccagcactataggaggccaaggtgggtgggtcacttga

SEQ ID NO: 316144 - DNA, 201 bp, Homo sapiens; identical to SEQ ID NO: 65939

SEQ ID NO: 316145 - DNA, 201 bp, Homo sapiens
agcaggagtgaagatgtttcattatcttgggcctgggaaaccacttccccaggcttctccctccccccacccccataggaacaggatttggccttagcttytgggcctatcggctgccttccctctacttcctaccacctcttctgccttcctttgagctctgttgggcttggggatcttagttttcttttgtttatttcc

SEQ ID NO: 316146 - DNA, 201 bp, Homo sapiens
tccaaagaattttcactggttgcctgcatctttggctctgctgtgatctgattggaggagggacagtttctggtacccatcctctgatttatacatatgcrttttttcccctctggcctttagatggcctcagccccagccaccatatacccctgcagtttgcactttaattgatggtagttcagttggggtacttgtttt

SEQ ID NO: 316147 - DNA, 201 bp, Homo sapiens; identical to SEQ ID NO: 65941

SEQ ID NO: 316148 - DNA, 201 bp, Homo sapiens
ttctgtattacagcaaaaggctgtccctcccaaacctgggattctgggctcactgagttcacctgcgagtcagccctacctgcactgctctggtctagtayaaacaggctgctggcattgaggtaggtggcagagagagtaatggtcccatggcccaggggcaaggtgaagactgctcctattcccatctctaggtttcct

SEQ ID NO: 316149 - DNA, 201 bp, Homo sapiens
actcgttcccaccctacattctgagcactaatacatcccactccttgcaggaggcccaggcatatgcagatgacaacagcttattgttcatggagacttcmgccaagacagctatgaacgtgaatgatctcttcctggcaataggtaaggtcagaacatcctgaggtcctcctttttccctcgtttataggcaaaattata

SEQ ID NO: 316150 - DNA, 201 bp, Homo sapiens
aaggcccagtttcccctcacgcagcctcttaggtagcgtttcccctaatcgtgggggttggaccccagagtcttccaaagaattttcactggttgcctgcrtctttggctctgctgtgatctgattggaggagggacagtttctggtacccatcctctgatttatacatatgcattttttcccctctggcctttagatggc

SEQ ID NO: 316151 - DNA, 201 bp, Homo sapiens
caaaggcccagtttcccctcacgcagcctcttaggtagcgtttcccctaatcgtgggggttggaccccagagtcttccaaagaattttcactggttgcctrcatctttggctctgctgtgatctgattggaggagggacagtttctggtacccatcctctgatttatacatatgcattttttcccctctggcctttagatg

SEQ ID NO: 316152 - DNA, 201 bp, Homo sapiens
catgaacagtcccagcagaacaagagccagtgttgtagcaactgagggggtggctagcagcaaacaagtatggagctagcacaagagctaagaaataacckccatccctacccctcagcacacaacccctacggtaacagcacactgagccctggctcccaagggctgcctcctgacagctccgtcatggcactttttaac

SEQ ID NO: 316153 - DNA, 201 bp, Homo sapiens; identical to SEQ ID NO: 65943

SEQ ID NO: 316154 - DNA, 201 bp, Homo sapiens
gacggggtttcaccatgttggtcaggctggtcttgaactcctgacctcgtgatccacccaccttggcctcccaaagtgctgggattacgggcgtgagccaytgcgcccggccgtatgtgcatatttctaggatccatttctatatgtttctcaaaggggtccatgacccaaaggttgaaaaacatcactgagttagttttc

SEQ ID NO: 316155 - DNA, 201 bp, Homo sapiens; identical to SEQ ID NO: 65944

SEQ ID NO: 316156 - DNA, 201 bp, Homo sapiens
ccactgcgccgggctaatttttctattttgttattgttgttaatctctcttttttttttttttttttttttttgagatggagtctctctctgttgcccagrctggagagcagtggcgtgatctcagctcactgcaacctccacctcccaggttcaggtgattctcctgcctcagcctcccgagtagctggggttacaggca

SEQ ID NO: 316157 - DNA, 201 bp, Homo sapiens; identical to SEQ ID NO: 65945

SEQ ID NO: 316158 - DNA, 201 bp, Homo sapiens; identical to SEQ ID NO: 65982

SEQ ID NO: 316159 - DNA, 201 bp, Homo sapiens
aggtgtggtggtacatacctgtaatctcagctacttgagaggctgagacacaagaatcacttaaacccaggaggctaagtctgcagtgagccaagatcaasatcgggccactgctctccagcctgggtgacagagtgagactccatctcaaaaaaaaaaaaaaaattgtcagaataaaggaatcagtcctagtaaactcca

SEQ ID NO: 316160 - DNA, 201 bp, Homo sapiens; identical to SEQ ID NO: 65949

SEQ ID NO: 316161 - DNA, 201 bp, Homo sapiens; identical to SEQ ID NO: 65947

SEQ ID NO: 316162 - DNA, 201 bp, Homo sapiens
gcagtttgttttttaagagatggggtcttgctctgttgtccaggctggagtgcagtgccgcgatcttggctcagtgcaacctcgaactcctgggcttaagsgatcctcccgcctcagcctcccgagtactgggactacaggcgtgtgccaccaaggggcgattattattttttttttctacgcaaaataaaagacggctat

SEQ ID NO: 316163 - DNA, 201 bp, Homo sapiens
tcgtgatctgcccgtctcagcctcccaaagtgctgggattacaggcgtaagccactgcgccgggctaatttttctattttgttattgttgttaatctctcytttttttttttttttttttttttgagatggagtctctctctgttgcccagactggagagcagtggcgtgatctcagctcactgcaacctccacctcccag

SEQ ID NO: 316164 - DNA, 201 bp, Homo sapiens; identical to SEQ ID NO: 65948

SEQ ID NO: 316165 - DNA, 201 bp, Homo sapiens; identical to SEQ ID NO: 65946

SEQ ID NO: 316166 - DNA, 201 bp, Homo sapiens
gtggtggtacatacctgtaatctcagctacttgagaggctgagacacaagaatcacttaaacccaggaggctaagtctgcagtgagccaagatcaagatcrggccactgctctccagcctgggtgacagagtgagactccatctcaaaaaaaaaaaaaaaattgtcagaataaaggaatcagtcctagtaaactccacagg

SEQ ID NO: 316167 - DNA, 201 bp, Homo sapiens; identical to SEQ ID NO: 65952

SEQ ID NO: 316168 - DNA, 201 bp, Homo sapiens
gaggcgggcggatcacgaggtcaagagatcaagaccatcctggccaatgtggtgaaaccccgtctctactaaaaatacaaaaattagctgggcgtggtggygcacacctgtagtcccagctacttgggaggctgagccaggataatcacttgaacccgggaggtggaggttgcagtgagccgagattgtgccactgcactc

SEQ ID NO: 316169 - DNA, 201 bp, Homo sapiens; identical to SEQ ID NO: 65950

SEQ ID NO: 316170 - DNA, 201 bp, Homo sapiens; identical to SEQ ID NO: 65951

SEQ ID NO: 316171 - DNA, 201 bp, Homo sapiens
ctcgcagtgagtgttacagttcttaaaggcagcgtgtccggagtttgttccttctgatgttcagatgtgtttggagtttcttccttctggtgggttcgtgstcttgctggctcaggagtgaagctgcagaccttcacagtgagtgttacagctcataaaggcagtgtggacccgaagagtgagcagcagcaagattcattg

SEQ ID NO: 316172 - DNA, 201 bp, Homo sapiens; identical to SEQ ID NO: 65953

SEQ ID NO: 316173 - DNA, 201 bp, Homo sapiens
agccagtgttgtagcaactgagggggtggctagcagcaaacaagtatggagctagcacaagagctaagaaataacctccatccctacccctcagcacacarcccctacggtaacagcacactgagccctggctcccaagggctgcctcctgacagctccgtcatggcactttttaacgcttcagcaacaaacaccaggcag

SEQ ID NO: 316174 - DNA, 201 bp, Homo sapiens
agtgaagatgtttcattatcttgggcctgggaaaccacttccccaggcttctccctccccccacccccataggaacaggatttggccttagcttctgggcstatcggctgccttccctctacttcctaccacctcttctgccttcctttgagctctgttgggcttggggatcttagttttcttttgtttatttcccagctc

SEQ ID NO: 316175 - DNA, 201 bp, Homo sapiens
gtttgttccttctgatgttcagatgtgtttggagtttcttccttctggtgggttcgtggtcttgctggctcaggagtgaagctgcagaccttcacagtgartgttacagctcataaaggcagtgtggacccgaagagtgagcagcagcaagattcattgtaaagagggaaagaacaaagcttccaccgtgtggaaagggac

SEQ ID NO: 316176 - DNA, 201 bp, Homo sapiens; identical to SEQ ID NO: 65954

SEQ ID NO: 316177 - DNA, 201 bp, Homo sapiens; identical to SEQ ID NO: 65955

SEQ ID NO: 316178 - DNA, 201 bp, Homo sapiens; identical to SEQ ID NO: 65995

SEQ ID NO: 316179 - DNA, 201 bp, Homo sapiens; identical to SEQ ID NO: 65956

SEQ ID NO: 316180 - DNA, 201 bp, Homo sapiens
gccttcagtctccacccggactacgccatgttggggtttgtgggtcgggtggccgctgctccggcctccggggccttgcggagactcaccccttcagcgtygctgcccccagctcagctcttactgcgggccgctccgacggcggtccatcctggtaagtgcttttctctaggagctaacgttccattttgccgccccatg

SEQ ID NO: 316181 - DNA, 201 bp, Homo sapiens
ttactaatataagaagctgtcttttttttttgaactgcatctctaatagggaaaagaaacttgcacacaaaaacgctgacaccttctgagaaaggatctgwggtcgtttctccgatttgggaaccttcagtatgtggcttctctactcctttgtcaggttttacgattatgtatgattactgcaggtagcgctggtatatg

SEQ ID NO: 316182 - DNA, 201 bp, Homo sapiens
ttccaggttttctttttggtagatagtcccatcatttgaaagctaattttgggagggctggattggacgtggtacatatgtttcagttaagcctattttgkacttttcacttaacttgaataggtttttatttcctttctactatagttttgccttactaatataagaagctgtcttttttttttgaactgcatctctaat

SEQ ID NO: 316183 - DNA, 201 bp, Homo sapiens
aagttgatatccctccgcttcttactctttttttttttctcccccatcatacaggtgaatatgaccatctcccagaacaggccttctatatggtgggaccyattgaagaagctgtggcaaaagctgataagctggctgaagagcattcatcgtgaggggtctttgtcctctgtactgtctctctccttgcccctaacccaa

SEQ ID NO: 316184 - DNA, 201 bp, Homo sapiens
gtctttgtcctctgtactgtctctctccttgcccctaacccaaaaagcttcatttttctgtgtaggctgcacaagagccttgattgaagatatattctttytgaacagtatttaaggtttccaataaaatgtacacccctcagaatttgtctgattctcttggttctgacaacatagtcaacactgaagggttatgtattt

SEQ ID NO: 316185 - DNA, 201 bp, Homo sapiens
cgcgccaccatgcctggctactttttgtatttttagtagagaccaggtttcatcagttggtcaggctggtctcgatctcctgacctcatgatccacccacygtggcctcccaaagtggtgggattacagacgtgagccactgcgcccggcggaatgcaatatttttctaacagcaccaaactaggactatggagaacaaga

SEQ ID NO: 316186 - DNA, 201 bp, Homo sapiens
atgtagacacctaagacctttttttcttttaggtgtctgcattattgggccgaatcccttctgctgtgggctatcagcctaccctggccactgacatgggyactatgcaggaaagaattaccactaccaagaagggatctatcacctctgtacaggtaagaaaaattacatagatgaagatctgatttgtataaaggcagg

SEQ ID NO: 316187 - DNA, 201 bp, Homo sapiens
caaaagctgataagctggctgaagagcattcatcgtgaggggtctttgtcctctgtactgtctctctccttgcccctaacccaaaaagcttcatttttctrtgtaggctgcacaagagccttgattgaagatatattctttctgaacagtatttaaggtttccaataaaatgtacacccctcagaatttgtctgattctct

SEQ ID NO: 316188 - DNA, 201 bp, Homo sapiens
cctcctgagtacctgggattacaggtgcgcgccaccatgcctggctactttttgtatttttagtagagaccaggtttcatcagttggtcaggctggtctcratctcctgacctcatgatccacccaccgtggcctcccaaagtggtgggattacagacgtgagccactgcgcccggcggaatgcaatatttttctaacagc

SEQ ID NO: 316189 - DNA, 201 bp, Homo sapiens
ggcaaaagctgataagctggctgaagagcattcatcgtgaggggtctttgtcctctgtactgtctctctccttgcccctaacccaaaaagcttcatttttytgtgtaggctgcacaagagccttgattgaagatatattctttctgaacagtatttaaggtttccaataaaatgtacacccctcagaatttgtctgattct

SEQ ID NO: 316190 - DNA, 201 bp, Homo sapiens
ggaacaaagctgtatgtatgtagagagatgtataaaactgactgggccaggcgtggtggttcatgcctgtaataccaacactttgggaggctgaggtacgyggatcatgaggtcaggagttaagacaccaccctggccaacgtggtgaaatcccgtctctactaaagatacaaaaaattagctgggcgttgtggcaggcgc

SEQ ID NO: 316191 - DNA, 201 bp, Homo sapiens
tctaaccttcctccatatttctcctggtctgccctgtcctcgcctcctccctctctccacccagagaaagccccgcccttccctcctccctccccaccccmgtctgtcacacagggacatcaccctacagcagttcaggctgtgtggttcgcaggaagcatacactggctttttgattcttgctagttcccagctcacagt

SEQ ID NO: 316192 - DNA, 201 bp, Homo sapiens
gctccaattcagaggcccctgggggctgaaggttggggagggctttttggcgcggggccaggggtggagtaggggcctctaagcttccttccatctgcctrtgacgtccttggcagcagcctctcccgcagtctctcctgtgtcatgatctggacagaaggtggagcccctgagctgcttgtgctggtagtttgctcccag

SEQ ID NO: 316193 - DNA, 201 bp, Homo sapiens
ggctgtgtggttcgcaggaagcatacactggctttttgattcttgctagttcccagctcacagtttgggaggatccaacaccaacctttacgtgaagtggrggcccaaggacagtgaggagctgggtggtcccagcctggagctgtgccagcctgacatgggtgagtatggggaccagccccggggaaggcctgagggatg

SEQ ID NO: 316194 - DNA, 201 bp, Homo sapiens
tttcacctgaagaaattaggatgcagaatttctgattgacaaaagcctactacttgaggtttttttttttgagagggagtttcgctctcgactcactgcarcctccacctcctgggttcaagtgattctcctgtctcagcctcctgagtagctgggattacaggtgcatgccatcatgcccggctaatttttgtattttta

SEQ ID NO: 316195 - DNA, 201 bp, Homo sapiens
tagggaagccgaggacccacgggctgcgttcgtgctgctgggtcgggaaggaggaagcgtgacagctggagcgggtatcgagaagggtctgcgctgggacrcgggggtgcagcgggagggctgggcccgaacccggtgggtaacgtttcccagaccttcccctccatccctcccgctcattcggagggatggtgaagcccg

SEQ ID NO: 316196 - DNA, 201 bp, Homo sapiens
accaaaaaggtcagtgatgtcctaaagctcttcgaggatggcgagatggctaaatatgtccaaggagatgtgagtggcagctgggaaatcttcttcttgaycaactcttcccatctttgtttttgatccccaacttccaggaattattctgggcctgcccctcactatcccctctagagataccctagtgtccattgtcac

SEQ ID NO: 316197 - DNA, 201 bp, Homo sapiens
taagggataagggggtctgagctgtgtgatgaggcccttacctatatatcagagatgcaaggaccacagccatcaacaccagcaagatgcccacgatcagyggaacctgcccaaggcctgcttcttgacctgtgagaagaatcccaggcactgcttcactcagtgtctgctgcttgccagctgccctctatccactccctt

SEQ ID NO: 316198 - DNA, 201 bp, Homo sapiens
ctccgattattcaaggatgttcctgatagccggattttggtgtgtggtggagacggcacagtaggctggattctagagaccattggtcagtgcagggaggrgcgtggggaaggtattggggtcgtagtcttgcagagctaactcactccatccttctcttcacctgcctccgcagacaaagctaacttgccagttttgcct

SEQ ID NO: 316199 - DNA, 201 bp, Homo sapiens
tcaactcttcccatctttgtttttgatccccaacttccaggaattattctgggcctgcccctcactatcccctctagagataccctagtgtccattgtcamtctgactattgctttaggataaaacaagggattctattaactcaggacttaatcaaagaaaccatactcctgcctcagatgcttctcagctctgcattta

SEQ ID NO: 316200 - DNA, 201 bp, Homo sapiens
ggagggaggtgtttggtcaggttgtggagtttgggactctgggcttgcccccgtgggatctcctgagtgtgaagtcagtggtggatggaagggagttggtyagggaagttcaggatggcagcaatcaggagagaatgagacgttggttgggtgcccaactgccgagctgttctgttagcggcccgcccggtatcttggtct

SEQ ID NO: 316201 - DNA, 201 bp, Homo sapiens
aagacagagtctccctctgttgcccaggctggagtgcagtggcacaatctcggctcattgcaacctctgcctccctggcccaagcaattctcatgtctcarcctcccaggtagctgggcttacaagcctatgccaacacaccggctaatttttgtatttttagtagagacaggtttcaccgtgctgcccatgctggtctcg

SEQ ID NO: 316202 - DNA, 201 bp, Homo sapiens
ggcagcagcggggaggggacaggagtgcctccccgatttcccacacgcacagagtggcatttagaatagagagctcatacttttaggattcaagtcagacmcctctatttagggattcatgcacaatacagcttttcttccctctactttcttcccctcccaggcctctggaccggatcgtaaaaatagcaaaacaagcca

SEQ ID NO: 316203 - DNA, 201 bp, Homo sapiens
ccccagggtttgggtgaccggaagcagagaccccaaacacgagaccagaagggggcgcaggagacaccccgtaggagagaatgaatggggaaggcggtcckgggggcggggcaaaggaggggccccgggatgggcggggcacagacccctttccaagtccgaacccctgccccgagagcccggagagaagcggctccgcgc

SEQ ID NO: 316204 - DNA, 201 bp, Homo sapiens
gcacaatctcggctcattgcaacctctgcctccctggcccaagcaattctcatgtctcaacctcccaggtagctgggcttacaagcctatgccaacacacyggctaatttttgtatttttagtagagacaggtttcaccgtgctgcccatgctggtctcgaactcctgacctcaagtgaaccacctgcctcagcctcccaa

SEQ ID NO: 316205 - DNA, 201 bp, Homo sapiens
cttttcccaccttagacccctcaatttctatcaccatcacgggagaaggtagcgaagggtggctccatcagggagaaaactcaagctgaaagttgtattarggtcctcttcccttcacacctctaaacctcagtgacccaacaaatgaagatacgggagaggaaaaggtactatgtagaaacgaggaggtcttcagcaaat

SEQ ID NO: 316206 - DNA, 201 bp, Homo sapiens
gaccttaggtgatctgcccacctcggcctcccaaagtgctgggattataggcatgagccatggcacccagcgaaaaatatgttttgataaaattggataasattttgataaaatttgccaaaatgctttccaaaaatgacttatcaagtcatgctgtagctaacagcaaatgagaatgccaatttattcataaactcatta

SEQ ID NO: 316207 - DNA, 201 bp, Homo sapiens
ccaggttcaagtgattctccggcctcagcctcctgagtagctgagattacaggcgtgcgccatcacaactggctaatttttgtatttttagtagagacagsgtttcgccatgttggccaggctggtctcaaactcctgacctcaggtgatccacccgcctcggcctcctaaagtgctgggattacaggcgtgagccacctc

SEQ ID NO: 316208 - DNA, 201 bp, Homo sapiens
ggggaggttaagtgacctgtgacacagggaaattgggagtgcagtacagtgctgagttgcaagggaagatcttgggacatgctgtggggagcagcatgggkacttgggaaagaggggagaccgggagggagagattgagctctgtactgaccttcatgtcccgaactctccaggatgcctctattgctcatcgattccaca

SEQ ID NO: 316209 - DNA, 201 bp, Homo sapiens
gggaagatcttgggacatgctgtggggagcagcatggggacttgggaaagaggggagaccgggagggagagattgagctctgtactgaccttcatgtcccraactctccaggatgcctctattgctcatcgattccacatcatgcgagagaaatatccggagaagttcaacagcaggttagggaaaggagggggcagtgtg

SEQ ID NO: 316210 - DNA, 201 bp, Homo sapiens
tgggggaaattggtggagaatagtcaggctggtctaggagctaaagggaggaaaggtaaaggggaaaggtaagtcgagggcagtggctcacacctgtagtyccagcactttgggaagctgaggtgggaggattgcttgaggccaggagttcaaggtgcagtgagcagtaatcatgccactgcactccagcctcagtgacag

SEQ ID NO: 316211 - DNA, 201 bp, Homo sapiens
tatcctacagatgatgcgagtggctgaatacctggattgggatgtgtctgagctgaggccggtaaggcagctcttccttcatgtcccttcttgtaccttcytccctggtgagtcctgcatctgccttacttcatctctgacaggcaacctggttcccttggctaggatggctgggctggatatcctaagaggcagtggaga

SEQ ID NO: 316212 - DNA, 201 bp, Homo sapiens
acacaccccaaaacacatacattgaaagtgcctcatctgaataaaatgacttgtgtttcccctttgggatctgctaagtaagtggtacacttccttctttyataccttcactccttaaatgacgtagattctcccaagaagcaacagaaaaaccagcatcaggctctgagtatttatttcagttaatagtagtctcccagg

SEQ ID NO: 316213 - DNA, 201 bp, Homo sapiens
catttctctaggagagacttctagaagtagaattgcttactcggagaatatgaacatttttattttattttatttatttttttgagacggagttccactcytgttacccaggctggagtgctatagtacaatctcggctcactgcaacctccacctccgggttcaagcgattctcgtgcctcagcctcccaagtagctggg

SEQ ID NO: 316214 - DNA, 201 bp, Homo sapiens
taacacccacccacttctcgtctttgtcaatcctaagagtggcgggaagcaggggcaaaggtgaggagaaatatattgggtcttctaagatgagaggcagrgcctgcctgcaacacttagaaggtggaaggggatgtgtgtgtctggaggggcataccttgaggaacacacaaagagggtgaggttcagaagatcaccccc

SEQ ID NO: 316215 - DNA, 201 bp, Homo sapiens
agttccagtatatattaaaccctcgacaggtgttcaacctcctaaaggatggtcctgagatagggtgagcacaggttagggactgtatcacagtgttttcrtgggtctgtgtatctgtatatgttaggagagtgcaggaaagagtgcagattgggagaggagggctagagatccccaagaggccagaattcagaatatttc

SEQ ID NO: 316216 - DNA, 201 bp, Homo sapiens
aaagggagaggtgggacaaacaaaggataaaacatgagccaaagtggagggagccctgacttctgatctgcttttttgtaaccagatgtggtgtgtctcartgatgtttcctgctacttttcccttctggagggtggtcggccagaagacaagttagaatgtgagttgcccttctgaagtgaggtggcagggcagtgaagg

SEQ ID NO: 316217 - DNA, 201 bp, Homo sapiens
cctgtttatgtaaaactttactccctacttcgtccccagacctaagtgacaagagactggaagtggttgggctggagggtgcaattgagatgggccaaatytataccaagctcaagaatgctggacgtcggctggccaagtgctctgagatcaccttccagtaaggaagactccaccagggtccctgagggaaggtgtggg

SEQ ID NO: 316218 - DNA, 201 bp, Homo sapiens
cagggaagactgggggaaatataggtgtttctgtcaactccaggaaaatcacagcatcatatgagagtactcagacctgctgcccactgaggagggggctrttctcaccaatgggacaagagcagaagatgcggggtagacgcagccagtgactgctgctatgtggcaactggggtacggagaagtcttgcttcataagtc

SEQ ID NO: 316219 - DNA, 201 bp, Homo sapiens
tggagttgacatctctgccagtgtggtacccatgacctctgaaactggcaccttctcaggtgtcatacctgtgctctctgcagttggcatctgcacaggtrcagtgcttatgacttcagtggttggcacctgcacagatgtggttccagagggctctgcagttggcgcctgaccaggtgtagtacccacaacttctgtagt

SEQ ID NO: 316220 - DNA, 201 bp, Homo sapiens
tggaactggggaggagccacaggaggtgagaggaatggcagcctgcaggaccacctgggcagtgactgggccaggctccaggtaagtatgagtgaccacargtgcccgagagatcagggttccactactgtctccaaagtcccaggtgtaggagaggtcagcttcagccagatagccactggggtcatggagctggagggc

SEQ ID NO: 316221 - DNA, 201 bp, Homo sapiens
acagggcagaaggcccctgggaatttgtggagctgggagctgagaagaggcctctctgggacccagagctcagtgctaacctgtcttctccactcctaggktatgaaggacagaatctggcaaagatcctcaaggatttagagatgagtaaagtggtacatatggatcgatggtctgtggaggtgatacctcaacaaactg

SEQ ID NO: 316222 - DNA, 201 bp, Homo sapiens
ctatggtacttcgaatttgccacatctgaatccatcttctcaacatgcaaaaagctggaggagtctttgacagttgaggtgtgtgtaataagacttaaccytacatccttttcagcttcttaatagccaagtttctccctccatggcacccttaggaacttcccatattcttgaacctatgcttctttaacctcccagctc

SEQ ID NO: 316223 - DNA, 201 bp, Homo sapiens
acctgccaagaccagcaggtaaagtgggaggatgagggcgtggagaaagggtggacatagaccaaagtgcaaaactccaccctagaattaaggagagaacrtgagtcttgacaggaggtgtccttagactggggaaaataggtctaaaaggaaagaggaacgtgaagaaggtggggagattgtctcaagcagggtagagcc

SEQ ID NO: 316224 - DNA, 201 bp, Homo sapiens
ggtaagtatgagtgaccacaagtgcccgagagatcagggttccactactgtctccaaagtcccaggtgtaggagaggtcagcttcagccagatagccactrgggtcatggagctggagggcaaaggtcagaggctgatttctcaggaagtgcttgttccctccatccaaggcccgcaactgggacacgctcacggagaaag

SEQ ID NO: 316225 - DNA, 201 bp, Homo sapiens
gtttctccctccatggcacccttaggaacttcccatattcttgaacctatgcttctttaacctcccagctctcctaccccaattctccaagtcctcaagayacactagtccctatttccattccttgcacacctccaaatcctgccttctccagtttgtcatctggtggagggagcgatcacatctatgatcatgccatga

SEQ ID NO: 316226 - DNA, 201 bp, Homo sapiens
gccacctgccaagaccagcaggtaaagtgggaggatgagggcgtggagaaagggtggacatagaccaaagtgcaaaactccaccctagaattaaggagagracatgagtcttgacaggaggtgtccttagactggggaaaataggtctaaaaggaaagaggaacgtgaagaaggtggggagattgtctcaagcagggtaga

SEQ ID NO: 316227 - DNA, 201 bp, Homo sapiens
gggttggggcggggccagtgagcaggatgcctgggtctccagttcctgccagtgagtccctaggcctccatctctctcccttgctgtaccaccttcaccascatccatgcgaccccaagagccttaatgactctagaagagactccaggcaggggaagctgaaaggacctttcactccctacttttggccagggccttctg

SEQ ID NO: 316228 - DNA, 201 bp, Homo sapiens
ctgaagaaaaaagtgacccagtcccctttcaaatcatcaataactacttctctattggcgtggtcagtggaatggggcctggggagaagggagaaaggggkggccaagcagtcagaggctggaggagagcagaaaaggagggggaggttaagtgacctgtgacacagggaaattgggagtgcagtacagtgctgagttgca

SEQ ID NO: 316229 - DNA, 201 bp, Homo sapiens
acaccccaaaacacatacattgaaagtgcctcatctgaataaaatgacttgtgtttcccctttgggatctgctaagtaagtggtacacttccttcttttawaccttcactccttaaatgacgtagattctcccaagaagcaacagaaaaaccagcatcaggctctgagtatttatttcagttaatagtagtctcccaggga

SEQ ID NO: 316230 - DNA, 201 bp, Homo sapiens
aatccccagctttacacaatcatgtgtacaaccaatattcagcacccactacatactgggaagggtatcccaggcagacagaacagtaagactcattgctytgagcaggggagagcttggcatgcctgaggaacagaaaggagcacagtgagaccagatggcggggtgtgaggagagagtggaacaagaggagggcagagg

SEQ ID NO: 316231 - DNA, 201 bp, Homo sapiens
tgcctaggtcttcctggcccttctactttaagtttgcacagcatttcacctttctcctttccagtccatccaagcctccctgccttctcttgccctacaamtggccttgccccttcctaaacccttaccagtaatggtgaaggctgagctggaatgagcaagaggcacatagctccgggatccccggcgatggtagacagt

SEQ ID NO: 316232 - DNA, 201 bp, Homo sapiens
acccctgcttccacagtcacatctccttttacaactcttttctcctgccttcctctttcacttataaggacccctgtgattacattggtaccacccagatratccagtatgatcccccatctcaaaatcctcattttttttttttttaagacagagtctccctctgttgcccaggctggagtgcagtggcacaatctcggc

SEQ ID NO: 316233 - DNA, 201 bp, Homo sapiens
ggaacacacaaagagggtgaggttcagaagatcacccccaacccccgcgcctgccatgaacttttctttttcccacacacagggtgctctggaagttccartatatattaaaccctcgacaggtgttcaacctcctaaaggatggtcctgagatagggtgagcacaggttagggactgtatcacagtgttttcgtgggtct

SEQ ID NO: 316234 - DNA, 201 bp, Homo sapiens
cacctgcacagatgtggttccagagggctctgcagttggcgcctgaccaggtgtagtacccacaacttctgtagtaggcacttggccagctgtggtgttakgggcctctgcagttggcctgtgcccatctgtggtgcctggaactggggaggagccacaggaggtgagaggaatggcagcctgcaggaccacctgggcagt

SEQ ID NO: 316235 - DNA, 201 bp, Homo sapiens
tatattgggtcttctaagatgagaggcagggcctgcctgcaacacttagaaggtggaaggggatgtgtgtgtctggaggggcataccttgaggaacacacraagagggtgaggttcagaagatcacccccaacccccgcgcctgccatgaacttttctttttcccacacacagggtgctctggaagttccagtatatatta

SEQ ID NO: 316236 - DNA, 201 bp, Homo sapiens
ttggcgtggtcagtggaatggggcctggggagaagggagaaagggggggccaagcagtcagaggctggaggagagcagaaaaggagggggaggttaagtgwcctgtgacacagggaaattgggagtgcagtacagtgctgagttgcaagggaagatcttgggacatgctgtggggagcagcatggggacttgggaaagagg

SEQ ID NO: 316237 - DNA, 201 bp, Homo sapiens
tctggagttgacatctctgccagtgtggtacccatgacctctgaaactggcaccttctcaggtgtcatacctgtgctctctgcagttggcatctgcacagrtgcagtgcttatgacttcagtggttggcacctgcacagatgtggttccagagggctctgcagttggcgcctgaccaggtgtagtacccacaacttctgta

SEQ ID NO: 316238 - DNA, 201 bp, Homo sapiens
actcttttctcctgccttcctctttcacttataaggacccctgtgattacattggtaccacccagatgatccagtatgatcccccatctcaaaatcctcattttttttttttttaagacagagtctccctctgttgcccaggctggagtgcagtggcacaatctcggctcattgcaacctctgcctccctggcccaagcaa

SEQ ID NO: 316239 - DNA, 201 bp, Homo sapiens
gggatgagtaagacagccttgggttatgcttgcccggattggccctgtaagggctttgacactccctagcatctactgtgccttcctagactctgaaggaygacggacagcacatgtggaggcccaagaggttccccagaccagtctactgcaatctgtgcgagtcaagcattggtcttggcaaacagggactgagctgta

SEQ ID NO: 316240 - DNA, 201 bp, Homo sapiens
gaggcaggagtaatcgcttgaacccaggaggcggaggttgcagtgagccgagatcatgccactgcacttcagcctggacgacagagctagactccatctcraaaaaaaaaaaaaaggtattttctttttaaaaaactattcaaatagctgaacatggtggctcacacctgtaatcccagcactttgggaggccaaggctgg

SEQ ID NO: 316241 - DNA, 201 bp, Homo sapiens
aaaaagatccggatctaccacagtctgaccgggctgcattgtgtatggtgccacctagaggtcagtttgggagccatcccttctgggtgcgtcttacccckcagagctgccttctccacgggcctccggccacacctcctttacaggcacagttgcccctgctcccaagggctctttccagcccagactgccaggttgaga

SEQ ID NO: 316242 - DNA, 201 bp, Homo sapiens
ctgcaggtgtcatacctgtagcctctggagttgacatctctgccagtgtggtacccatgacctctgaaactggcaccttctcaggtgtcatacctgtgctstctgcagttggcatctgcacaggtgcagtgcttatgacttcagtggttggcacctgcacagatgtggttccagagggctctgcagttggcgcctgaccag

SEQ ID NO: 316243 - DNA, 201 bp, Homo sapiens
agcctcagcacagacaagcccacatcccccaaccatgccagtatcgtaacttcctcctatactacgcaatgacaccctctacacacacacacacacgcacrcacacacacacacacacacacacacaaccccctcagccaggtgtagcactgcagtcttcagtgtttgtggaggcttaataagttttgaggcttcaagcaa

SEQ ID NO: 316244 - DNA, 201 bp, Homo sapiens
gcgtggcgtgggtggctcggggagtgggtggctgagcggagctggggtccctggccagaggcggaacaaaatggggtcatggccaggaagacgcgctaackcagtaagagtcactcagagggccggaactgccggaactgccgaagacccgagatgggagagagctcaggatggggagagtctgcagagattgacgatggt

SEQ ID NO: 316245 - DNA, 201 bp, Homo sapiens
ggtgggtaacgtttcccagaccttcccctccatccctcccgctcattcggagggatggtgaagcccggttcctgggacccgactcggagggaagtcctctwcggaacctccacagtgccgcacgggtggagaagggttcttgtttggcctccaggtccccaacttcccaccccatcctctccccacctgtcactgggaagt

SEQ ID NO: 316246 - DNA, 201 bp, Homo sapiens
tgtgcccatgactggaaatgggaggagtgggagatggggagatgtcagaaaaagatccggatctaccacagtctaactgggctgcattgtgcaaggtctcrgctctctacccaccttcgctatacctggactgcttgctccagctctcagagaagaggagtaaagagtggtactgttttggaggatctgaaatatttttcc

SEQ ID NO: 316247 - DNA, 201 bp, Homo sapiens
tttgtccttattttcttcccccaatgcagattgaccctgttcctaacacccacccacttctcgtctttgtcaatcctaagagtggcgggaagcaggggcaraggtgaggagaaatatattgggtcttctaagatgagaggcagggcctgcctgcaacacttagaaggtggaaggggatgtgtgtgtctggaggggcatacc

SEQ ID NO: 316248 - DNA, 201 bp, Homo sapiens
gttcgtgctgctgggtcgggaaggaggaagcgtgacagctggagcgggtatcgagaagggtctgcgctgggacgcgggggtgcagcgggagggctgggccmgaacccggtgggtaacgtttcccagaccttcccctccatccctcccgctcattcggagggatggtgaagcccggttcctgggacccgactcggagggaag

SEQ ID NO: 316249 - DNA, 201 bp, Homo sapiens
ttaagactgattataagaaaatagacaaggtaagcctgcttgtcttattttggtgctattccaaaatgcagatggtccttgagcagggacattggttaaatgtttgactttcgcagagcctcctagttacaagcagaattagaccagatagagtatgaaatgtcaacaaagctagttattaagtgatattgactgcagtgt

SEQ ID NO: 316250 - DNA, 201 bp, Homo sapiens
attcagaagtacatttgtatctgaccctgaaatgtcttggtagtagaagcacttgatgttttggaaattttaaaaattaacttttagcaaaatagtgtgakccacattgggagtgccagttctaagagagggcaccttgagctctttcttctcctgccatttatctaggccatggaccttgaaggtcttttctgctccagt

SEQ ID NO: 316251 - DNA, 201 bp, Homo sapiens
tttttttttttttttttttgaggctgagtctcactctgtcgcccaggctggagtgcactggcacagtcttggctcactacaacctctgcctcctgagttcragcgattctcctgccctggcctcgtaagtagctgggactgcaggcgcccgccaccacacccggctaatttttgtatttttagtagagagggggtcttgcc

SEQ ID NO: 316252 - DNA, 201 bp, Homo sapiens
ttctttttggaagttagcaggatcttctttgttcccgtgttctgaaatttcatgggatgcaggttcagtatgcctttctttttttttttttttttttttttgccaccccacccccgccccccgagatggaatctcactctttcacccaggctggagtgtggtggcacaatctcgactcaccgcaacctccgcctcctgggt

SEQ ID NO: 316253 - DNA, 201 bp, Homo sapiens
cgggttcaagtgactctcctgcctcagcctcccaagtagctgggattacaggcatgcaccaccacacccagctaattttgtatttttagtagagatgggggtttcaccacgttggtcaggctggtctcaaacccctgacctcaggtgatctgtccaccttggcctcccaaagtgctgggattaccagcatgagccaccacg

SEQ ID NO: 316254 - DNA, 201 bp, Homo sapiens
ccgggttcaagtgactctcctgcctcagcctcccaagtagctgggattacaggcatgcaccaccacacccagctaattttgtatttttagtagagatgggggtttcaccacgttggtcaggctggtctcaaacccctgacctcaggtgatctgtccaccttggcctcccaaagtgctgggattaccagcatgagccaccac

SEQ ID NO: 316255 - DNA, 201 bp, Homo sapiens
cccgggttcaagtgactctcctgcctcagcctcccaagtagctgggattacaggcatgcaccaccacacccagctaattttgtatttttagtagagatgggggtttcaccacgttggtcaggctggtctcaaacccctgacctcaggtgatctgtccaccttggcctcccaaagtgctgggattaccagcatgagccacca

SEQ ID NO: 316256 - DNA, 201 bp, Homo sapiens
ggcaacagactggagatcctatctaaaaaaaaaaaattagggtgacattttctcagatgctcactgaaagaatgttgaaggagtttcacctatttgttctrgcttttattagccttaattaccccgtgattatctttaacaattcctaaaagtcattgtgtttctgagtttttcagctctgacagtgttgcctgtttgtaa

SEQ ID NO: 316257 - DNA, 201 bp, Homo sapiens
tttagcaatgaacttaggttcattaaaacacattggtatttataccctgagcaaacaggagtcctcctgtgttctgggcactgggtgggggcacaggggcwtcaccagatgcaaacttgatcttgactaggagggcccctcctagtcaagtagattcacaccttaagtcagtaaatcctagccactcctttagtcttcatc

SEQ ID NO: 316258 - DNA, 201 bp, Homo sapiens
ctgcacagcacttctcgtgggtttgccttcccttactgccttaccctgtgccttcttgttatgctttctgtgtggggctggccactgctttcctgtccccrttaacactgcagtacctatccctaagagaggctgcccttcctgccatctcccttactctgaggatgacttactcatcctttttcttttatttatttattt

SEQ ID NO: 316259 - DNA, 201 bp, Homo sapiens
agcccaagaattcatccccaaggcaattaagataaaccacaaatagaggatgggtgccttggctcacacctataatcccaacactttcgggaggctgaagwgagaggatcacctgaggtcagaagttcaagaccagcctggccaacatggtgaaaccctccctctactaaaaatacaaaaattcgctgggcatggtggcag

SEQ ID NO: 316260 - DNA, 201 bp, Homo sapiens
aagcccaagaattcatccccaaggcaattaagataaaccacaaatagaggatgggtgccttggctcacacctataatcccaacactttcgggaggctgaastgagaggatcacctgaggtcagaagttcaagaccagcctggccaacatggtgaaaccctccctctactaaaaatacaaaaattcgctgggcatggtggca

SEQ ID NO: 316261 - DNA, 201 bp, Homo sapiens
tcagtgccttggctttcccaactctattctcctgtgtctccgaggatggggggttcaaagctcatctgcccccacctctcctgcagtgagccccacagtasctcacacccaagcctcacaggaagaacagcagtgggtcccccactggctgtgcgcccccgaccggctgtgcgccttggcctttccctggtccagaatctg

SEQ ID NO: 316262 - DNA, 201 bp, Homo sapiens
agtaatacttttagccatcccttttatttcctctctcaggatgaaattgattctgcagtaaagatgttggtgtcattaaaaatgagctacaaagctgccgygggggaggattacaaggctgactgtcctccagggaacccagcacctaccagtaatcatggcccagatgccacagaagctgaagaggattttgtggaccca

SEQ ID NO: 316263 - DNA, 201 bp, Homo sapiens
gagccccacagtagctcacacccaagcctcacaggaagaacagcagtgggtcccccactggctgtgcgcccccgaccggctgtgcgccttggcctttccckggtccagaatctgacagcactcacacctctgacttccacacttgggcttctagccagtgtccaggcacaggatgagcaggactgaggagcgtgtctgtgt

SEQ ID NO: 316264 - DNA, 201 bp, Homo sapiens
gtacaaagagcccaaaaatgttcagagcttctcctcaggttttctcattcttagattttttccaaggaaataatcctgagtaagagaaagctttccacacraagatgttaaaaatgataatagcaaaaagttcaacacagactcagtacaacagaggaaacgttaaattagaattgttacagggtggattattatgcgggc

SEQ ID NO: 316265 - DNA, 201 bp, Homo sapiens
ttcattaaaacacattggtatttataccctgagcaaacaggagtcctcctgtgttctgggcactgggtgggggcacaggggcatcaccagatgcaaacttkatcttgactaggagggcccctcctagtcaagtagattcacaccttaagtcagtaaatcctagccactcctttagtcttcatcactggcatttgatggttt

SEQ ID NO: 316266 - DNA, 201 bp, Homo sapiens
tctggtacagtgtggccctctccccactagctgagtaagacacatagttcctgaatttgtgctctctgtggcccatcccctcctgggccccacagacacascagaagcaaagctgagccgcttcgttgatggatataaatgctggtggtgagacaagagcaagtgcctataatagtccatgaagctgattcagccaataga

SEQ ID NO: 316267 - DNA, 201 bp, Homo sapiens
ttttcttttttttttttttttttgagacagagtctcactcatgggttttgccatgttggccaggctggtcttgaactcctgacctcaagtgatcctccccrcctcagcctcccaaagtgctgcgattacaggtgtgagccaccatgcccagccgtgttagtataattttcatggcactttatttccttattctcaccccat

SEQ ID NO: 316268 - DNA, 201 bp, Homo sapiens
tgggcactgggtgggggcacaggggcatcaccagatgcaaacttgatcttgactaggagggcccctcctagtcaagtagattcacaccttaagtcagtaartcctagccactcctttagtcttcatcactggcatttgatggttttcctcttcttcatggccccaaatttctggttctctttttattatattatctatgtc

SEQ ID NO: 316269 - DNA, 201 bp, Homo sapiens
cacaggggcatcaccagatgcaaacttgatcttgactaggagggcccctcctagtcaagtagattcacaccttaagtcagtaaatcctagccactcctttrgtcttcatcactggcatttgatggttttcctcttcttcatggccccaaatttctggttctctttttattatattatctatgtcctttactgtaactcacc

SEQ ID NO: 316270 - DNA, 201 bp, Homo sapiens
ctgcaacttttagaagtggtcccattgagttgattccattgatgtttttaaattttgaattaatcataaattcagtgaagcttcaatgccaagaaaaaatrgatactaaaatcttttggttgtgcattatattcccaaaggattattttaaaataaaataacaatataaaatatatttcaaaataatgatctatagtagac

SEQ ID NO: 316271 - DNA, 201 bp, Homo sapiens
catgatgggtcccaaaaggtgtcaagaatccttgctctaaagaagtcattttcttgtcctctgggaacttgccagtccaaaggtattgtcacctacactckggggccaagatagaaaggatggtattctacctcctggtggtattccagggatccagaaacactcctgggccacattctcttctcagctgctccagaattg

SEQ ID NO: 316272 - DNA, 201 bp, Homo sapiens
gccactacgacctccagcagctgctggtgggtgggccgctgggcgtggggaccggctatgtgagcagaccccgggcgagcctcagcactgcctcataggcracgaagaccaccatgttgacagggaaggcgcggcagcaattgagtaccagccccttgaaaaggacccggggtccctcctctcgaacgctggtcaccatac

SEQ ID NO: 316273 - DNA, 201 bp, Homo sapiens
ggcaaaacagcattttgtgttgtaatttatttcctgttttgttggttgtgttgatctcagctgttgttttaatccaaagaccttttacttcatgttggggdtaaggacctttagcagaaggcctaaagaggtttgtgttcattaagattgtgcatggatcactcacttttcatcttcatttcagtaatatctgatcactaa

SEQ ID NO: 316274 - DNA, 201 bp, Homo sapiens
aaagcccaagaattcatccccaaggcaattaagataaaccacaaatagaggatgggtgccttggctcacacctataatcccaacactttcgggaggctgawgtgagaggatcacctgaggtcagaagttcaagaccagcctggccaacatggtgaaaccctccctctactaaaaatacaaaaattcgctgggcatggtggc

SEQ ID NO: 316275 - DNA, 201 bp, Homo sapiens
aaaagcccaagaattcatccccaaggcaattaagataaaccacaaatagaggatgggtgccttggctcacacctataatcccaacactttcgggaggctgragtgagaggatcacctgaggtcagaagttcaagaccagcctggccaacatggtgaaaccctccctctactaaaaatacaaaaattcgctgggcatggtgg

SEQ ID NO: 316276 - DNA, 201 bp, Homo sapiens
ccagtgcttacgtgttgaccacaatgtggccccgagtctggcccatgccactactcattggcatccaattttaataactgtgactttgccttcagtgaagrccgccctccgtttgggatttcattctcgttgtctttgcaggatgagctcaggtttctacaaaaatgtggtgaagattcaaaagcatgttaccttcaacca

SEQ ID NO: 316277 - DNA, 201 bp, Homo sapiens
gcaaaagcccaagaattcatccccaaggcaattaagataaaccacaaatagaggatgggtgccttggctcacacctataatcccaacactttcgggaggcwgaagtgagaggatcacctgaggtcagaagttcaagaccagcctggccaacatggtgaaaccctccctctactaaaaatacaaaaattcgctgggcatggt

SEQ ID NO: 316278 - DNA, 201 bp, Homo sapiens
tgcaaaagcccaagaattcatccccaaggcaattaagataaaccacaaatagaggatgggtgccttggctcacacctataatcccaacactttcgggaggstgaagtgagaggatcacctgaggtcagaagttcaagaccagcctggccaacatggtgaaaccctccctctactaaaaatacaaaaattcgctgggcatgg

SEQ ID NO: 316279 - DNA, 201 bp, Homo sapiens
ctgcaaaagcccaagaattcatccccaaggcaattaagataaaccacaaatagaggatgggtgccttggctcacacctataatcccaacactttcgggagkctgaagtgagaggatcacctgaggtcagaagttcaagaccagcctggccaacatggtgaaaccctccctctactaaaaatacaaaaattcgctgggcatg

SEQ ID NO: 316280 - DNA, 201 bp, Homo sapiens
gctgcaaaagcccaagaattcatccccaaggcaattaagataaaccacaaatagaggatgggtgccttggctcacacctataatcccaacactttcgggasgctgaagtgagaggatcacctgaggtcagaagttcaagaccagcctggccaacatggtgaaaccctccctctactaaaaatacaaaaattcgctgggcat

SEQ ID NO: 316281 - DNA, 201 bp, Homo sapiens
ggctgcaaaagcccaagaattcatccccaaggcaattaagataaaccacaaatagaggatgggtgccttggctcacacctataatcccaacactttcgggmggctgaagtgagaggatcacctgaggtcagaagttcaagaccagcctggccaacatggtgaaaccctccctctactaaaaatacaaaaattcgctgggca

SEQ ID NO: 316282 - DNA, 201 bp, Homo sapiens
tggctgcaaaagcccaagaattcatccccaaggcaattaagataaaccacaaatagaggatgggtgccttggctcacacctataatcccaacactttcggraggctgaagtgagaggatcacctgaggtcagaagttcaagaccagcctggccaacatggtgaaaccctccctctactaaaaatacaaaaattcgctgggc

SEQ ID NO: 316283 - DNA, 201 bp, Homo sapiens
atggctgcaaaagcccaagaattcatccccaaggcaattaagataaaccacaaatagaggatgggtgccttggctcacacctataatcccaacactttcgsgaggctgaagtgagaggatcacctgaggtcagaagttcaagaccagcctggccaacatggtgaaaccctccctctactaaaaatacaaaaattcgctggg

SEQ ID NO: 316284 - DNA, 201 bp, Homo sapiens
tatggctgcaaaagcccaagaattcatccccaaggcaattaagataaaccacaaatagaggatgggtgccttggctcacacctataatcccaacactttckggaggctgaagtgagaggatcacctgaggtcagaagttcaagaccagcctggccaacatggtgaaaccctccctctactaaaaatacaaaaattcgctgg

SEQ ID NO: 316285 - DNA, 201 bp, Homo sapiens
tagcccctgatagcccccatcattggaagccacatgatgccaggagggggggtgctggagcctcagaagcactggctgcagtccacccacccctccctgawgcgtgacggcaggcaaggccccctccctcttggagctgtcaggtggctgtggtgagctgtgcaaggcacctggcgccctcccacgggcagccccctctgg

SEQ ID NO: 316286 - DNA, 201 bp, Homo sapiens
cggccaccccaggcccctctcaggtgggcatggcagtcccggcagcaccccctctgagcagcctgctgtggggaagaagccgggccgggagccctcagtcrtggtgccagcccagctcatgctccccgccccgaggcccccagcctgtgggaagcccctgcctgtaagggacagctcgtgaagacacaggaacagtggtgg

SEQ ID NO: 316287 - DNA, 201 bp, Homo sapiens
ccacagagaagaacaagaaggctctttgatggggaaggtgacttgaggctccttcccgggccactgtagcctctggctggggcaagatccccgatcgcttstcccaagctgagccaatggaaggcgatagccccctgggtcttcacaggagccatgctttgtgggctgtgcccctgctttgggcacatccagtgtaccaga

SEQ ID NO: 316288 - DNA, 201 bp, Homo sapiens
tcttagtcttctgggagtatagggtaccacacagtcctcacattttttcttctgaaaagagctgccatttttacctacggtttcagactcactttgagcayggaaagatgacttgggaaagttcctggagagttttacttgcttaaagcgggcagctgccaggggcatgtggctggctggaacatggctcgtccacagaga

SEQ ID NO: 316289 - DNA, 201 bp, Homo sapiens
ggggcaagatccccgatcgcttctcccaagctgagccaatggaaggcgatagccccctgggtcttcacaggagccatgctttgtgggctgtgcccctgctytgggcacatccagtgtaccagatgcaaaatcctgcccaggtggtctggccacaccagaagtgtctttctgctggccggtagcattaaaacttcctgcatg

SEQ ID NO: 316290 - DNA, 201 bp, Homo sapiens
tacagtgtggccctctccccactagctgagtaagacacatagttcctgaatttgtgctctctgtggcccatcccctcctgggccccacagacacagcagargcaaagctgagccgcttcgttgatggatataaatgctggtggtgagacaagagcaagtgcctataatagtccatgaagctgattcagccaatagatgcac

SEQ ID NO: 316291 - DNA, 201 bp, Homo sapiens
tagcaatgaacttaggttcattaaaacacattggtatttataccctgagcaaacaggagtcctcctgtgttctgggcactgggtgggggcacaggggcatyaccagatgcaaacttgatcttgactaggagggcccctcctagtcaagtagattcacaccttaagtcagtaaatcctagccactcctttagtcttcatcac

SEQ ID NO: 316292 - DNA, 201 bp, Homo sapiens
gaccagcctggccaacatggtgaaaccctccctctactaaaaatacaaaaattcgctgggcatggtggcaggcagcctcaggaggctgagacagaagaatygcttgaaccccagaggtggaggttgcagtgagccaagatcacaccattgcactccagcctgggtggcagagcgagactccatctcaaaaaaaaaaaaaat

SEQ ID NO: 316293 - DNA, 201 bp, Homo sapiens
ggcctgctacttctctgagcctaagtttccacatctgcaagatgagaatgaagatacctacctcatagaactactgtaaagcttcaaaacaaagtgtgtaragcagctaacacagagcacacagggccacctggtcgataaatggtagtagaccttatcattatccatagtcaaattcatatcacaattcaaattgtgatt

SEQ ID NO: 316294 - DNA, 201 bp, Homo sapiens
cagagttctggaggagacacatgcctggtttaaatatctctgagatgttagcgtttgcaactgtctctttaagtaggatgcccaggcgtgggtgggtcatygttgtcctggaatctgactagctagtgtaatgcattgagcagcttctctgggttgggtgaagctgcacttcaggatgtgagtctgtccctctcttgtcac

SEQ ID NO: 316295 - DNA, 201 bp, Homo sapiens
agctggcatgttttctggccgccctcatcagggtccttactctccccacaggatccttactttagaatgacaagggacgtcgcccccaggatcggctatcytaaaccagccctgctgcactccaccttcttcccagccctgcagggcgcccagaccaaaatgagtgccagcgaccccaactcctccatcttcctcaccgac

SEQ ID NO: 316296 - DNA, 201 bp, Homo sapiens
ctggacaccactgaatggtgttgacagggcccctgtggcctctcaggtggaaaagcactttccggggaactgtggtttctttataatggctattcaaatayggctgaataaactcagacactcccgggcccacgtagagaggggctggggcacgccctgcagggggcccctgtggctccacgtctttacccttgcctgtct

SEQ ID NO: 316297 - DNA, 201 bp, Homo sapiens
caggaggccgaggtgggtggataacctgagatcaggagttcgagaccagcctggccaacatggtgaaaccccgtctctactaaaaatacaaaaagtagcgrggcagggtggcaggcacctgtagtcccagctactcgggaggctgaggcaggagatcgcttgaacctgggaggcggaggttgcagtgagcagaaattgtgc

SEQ ID NO: 316298 - DNA, 201 bp, Homo sapiens
ttatggctgcaaaagcccaagaattcatccccaaggcaattaagataaaccacaaatagaggatgggtgccttggctcacacctataatcccaacactttmgggaggctgaagtgagaggatcacctgaggtcagaagttcaagaccagcctggccaacatggtgaaaccctccctctactaaaaatacaaaaattcgctg

SEQ ID NO: 316299 - DNA, 201 bp, Homo sapiens
gttatggctgcaaaagcccaagaattcatccccaaggcaattaagataaaccacaaatagaggatgggtgccttggctcacacctataatcccaacacttkcgggaggctgaagtgagaggatcacctgaggtcagaagttcaagaccagcctggccaacatggtgaaaccctccctctactaaaaatacaaaaattcgct

SEQ ID NO: 316300 - DNA, 201 bp, Homo sapiens
tgtggcccatcccctcctgggccccacagacacagcagaagcaaagctgagccgcttcgttgatggatataaatgctggtggtgagacaagagcaagtgcstataatagtccatgaagctgattcagccaatagatgcacgatggggtagatgaacttttgaacagtccatgtgaaaagaccaccacctgagcaaccccac

SEQ ID NO: 316301 - DNA, 201 bp, Homo sapiens
agttatggctgcaaaagcccaagaattcatccccaaggcaattaagataaaccacaaatagaggatgggtgccttggctcacacctataatcccaacactktcgggaggctgaagtgagaggatcacctgaggtcagaagttcaagaccagcctggccaacatggtgaaaccctccctctactaaaaatacaaaaattcgc

SEQ ID NO: 316302 - DNA, 201 bp, Homo sapiens
cccttcaaaaaggagcagagttctggaggagacacatgcctggtttaaatatctctgagatgttagcgtttgcaactgtctctttaagtaggatgcccagrcgtgggtgggtcatcgttgtcctggaatctgactagctagtgtaatgcattgagcagcttctctgggttgggtgaagctgcacttcaggatgtgagtctg

SEQ ID NO: 316303 - DNA, 201 bp, Homo sapiens
tgtagtttgaaacacagattactccagaatcacagtcctttatggcccaagtgctatatctgatggaatagttatctctgaatggaggttggtgtttataraacattctgtatatggtaaaaggaatttaaggagatttaaaagaaagaatgttctgtataaactgtaagtggaaatgtttgtatttcccttggtaagcaa

SEQ ID NO: 316304 - DNA, 201 bp, Homo sapiens
tagttatggctgcaaaagcccaagaattcatccccaaggcaattaagataaaccacaaatagaggatgggtgccttggctcacacctataatcccaacacwttcgggaggctgaagtgagaggatcacctgaggtcagaagttcaagaccagcctggccaacatggtgaaaccctccctctactaaaaatacaaaaattcg

SEQ ID NO: 316305 - DNA, 201 bp, Homo sapiens
ccaagcagatcaaaaccaaggtgagcagtggcccaggcagagggcagccagcgggatcagaaacatgccctggggggcacacgcacacacacaccactgcrcagtgctttgggcctcagccacccagccaccgtagcaatgctgaactccaggattgccaactttgctccctgcagaactcaaggcagcctgtccttccca

SEQ ID NO: 316306 - DNA, 201 bp, Homo sapiens
ttagttatggctgcaaaagcccaagaattcatccccaaggcaattaagataaaccacaaatagaggatgggtgccttggctcacacctataatcccaacastttcgggaggctgaagtgagaggatcacctgaggtcagaagttcaagaccagcctggccaacatggtgaaaccctccctctactaaaaatacaaaaattc

SEQ ID NO: 316307 - DNA, 201 bp, Homo sapiens
gcccccggccaccagcacgcccgggacatctgcagagagaccacagtgccttgactgggagcctgatcggggcgcccagggcagcgcaccctggactcacrcttccggcccgtcctcatttgcaacaggcttgggagaggggaatgggacttgtccacaaccacacactgactctgtgacacagcaagtctgtcctgactc

SEQ ID NO: 316308 - DNA, 201 bp, Homo sapiens
aaggcagcacgtggaatggacagactggagacagtccttacctcatgtggaacctaggacaggtaaggccctgtcctccaccccagagctcactttgtctkagagcagctgaccagcagtggaagacatttgctcagcgatatattagttatggctgcaaaagcccaagaattcatccccaaggcaattaagataaaccac

SEQ ID NO: 316309 - DNA, 201 bp, Homo sapiens
cttgacctcctcatccttctgggctccccgccctgccaggttccagcccctgctcacctggccggctgtggccagcggggctgagccactcgcagaggacsgcgtaggaaaggaagtaggtggcaaaggagtggccgtcccgtaagaccagggccgagctgcccttgtagaggccgcacagcccctcctcacgggctaccg

SEQ ID NO: 316310 - DNA, 201 bp, Homo sapiens
aagcctcgaactcctgggctcaagtgatcttcctgctatagcctcccaagtagctgggattacaggcccaccaccatgcccagctaattttttttttttttcatttttttgtagagtctcactatactgcccaaagtgccagggttgcaggtatgagccaccatgcccagccatgggcaagttttttttaacccctctgtg

SEQ ID NO: 316311 - DNA, 201 bp, Homo sapiens
gcaaaggagtggccgtcccgtaagaccagggccgagctgcccttgtagaggccgcacagcccctcctcacgggctaccgtggccaggcagtgcagtggccygcggtacttgggctctgggcaggctgggggcacaggacacatggggggcacagccaacggccccgaggccgaaagccgccgctgctgcttctgcgcctgt

SEQ ID NO: 316312 - DNA, 201 bp, Homo sapiens
cgtgatttacatactttttggaattttttttgttttgagacagagtctctctctgttgcccaggttggagtgcagtggcatggtctcagctcactgcaacytctgcctcccaggttcaagtgattctcatgcctcagcctcccaagtagctgggactacaggtacatgccaccatgcctggctaatttttgtatttttagt

SEQ ID NO: 316313 - DNA, 201 bp, Homo sapiens
ttggggatcacaaaggatggagcaaccaacttgttcccagaagcataggtgtcaggagaggctgtgaagagctgaggttcaaattggaaagataatcaatmagcagagttcaggcagagaagggtgtgagacatttcaggcaggcaggcaggcaggcagcagggagcagcagggattctgagagagcacatgagcaagggg

SEQ ID NO: 316314 - DNA, 201 bp, Homo sapiens
cgtggccaggcagtgcagtggcccgcggtacttgggctctgggcaggctgggggcacaggacacatggggggcacagccaacggccccgaggccgaaagcmgccgctgctgcttctgcgcctgtgtctgcgtctgcaagcggactttggccacctcagtgggcgacgtcaggaacacctggagcagagaaggaagcagggg

SEQ ID NO: 316315 - DNA, 201 bp, Homo sapiens
cgtgaaatgaggaagatggtagttccattctccttgtctctgaccacacagaaagttgcatcatacacacacacacacacacacacacacacacacacacaagatttcaatagtgtggatgattcccacgcaaagtatatgccttgtgatcatgatcatctgctatttcctcagtctaatttcattcccatgtgcttctta

SEQ ID NO: 316316 - DNA, 201 bp, Homo sapiens
aaatatttaacaaatggataggatagagtaaaataaatgacaccacaaatgtatatgtttggttcataaagataagtcatttgtaagataatggttgaaastgtaggctctagagtcaaactactagagtctataacgcatctctgccatttccttgtgatgttaacatgggcaagttttattttattttatttttatttt

SEQ ID NO: 316317 - DNA, 201 bp, Homo sapiens
ctcatctgcccccacctctcctgcagtgagccccacagtagctcacacccaagcctcacaggaagaacagcagtgggtcccccactggctgtgcgcccccraccggctgtgcgccttggcctttccctggtccagaatctgacagcactcacacctctgacttccacacttgggcttctagccagtgtccaggcacaggat

SEQ ID NO: 316318 - DNA, 201 bp, Homo sapiens
ccttgtgatgttaacatgggcaagttttattttattttatttttatttttagagacagggtcttactctgtcacccgggctggagtacagtggcgcaaacrtagctcactgaagcctcgaactcctgggctcaagtgatcttcctgctatagcctcccaagtagctgggattacaggcccaccaccatgcccagctaattt

SEQ ID NO: 316319 - DNA, 201 bp, Homo sapiens
tactggcgggcagcacgacctcaccttgacctcctcatccttctgggctccccgccctgccaggttccagcccctgctcacctggccggctgtggccagcrgggctgagccactcgcagaggaccgcgtaggaaaggaagtaggtggcaaaggagtggccgtcccgtaagaccagggccgagctgcccttgtagaggccgc

SEQ ID NO: 316320 - DNA, 201 bp, Homo sapiens
ctgcccgccgcgttctggcactgtgaggcgcggagcctgccaccgacccctcgcccctttcctctgagcgccgccgacccaccccgtctccctttcccacyggcacccttcatcgtctccgcctgttcgcttttcccgaggagagaggcccccatttttatttagcgcctgccatgtgccagaggctttgcgtagtgttgc

SEQ ID NO: 316321 - DNA, 201 bp, Homo sapiens
tgtcacctacactctggggccaagatagaaaggatggtattctacctcctggtggtattccagggatccagaaacactcctgggccacattctcttctcasctgctccagaattggctgtcttgatgccacccttccccagattgcagaatcagcgtgtcctgatctctgtgagatgattttgatgcaacccaagtcttta

SEQ ID NO: 316322 - DNA, 201 bp, Homo sapiens
tccagggatccagaaacactcctgggccacattctcttctcagctgctccagaattggctgtcttgatgccacccttccccagattgcagaatcagcgtgycctgatctctgtgagatgattttgatgcaacccaagtctttatcatgttgttctgttaaacaattctatagtcctttccactcctcatcccaatacaata

SEQ ID NO: 316323 - DNA, 201 bp, Homo sapiens
tctttatcatgttgttctgttaaacaattctatagtcctttccactcctcatcccaatacaatacccagtttctttaagtgcctattatgctcctccaccrcagtggaaactttcagaatgagcacaagattcaagttcttgaaaagggggaactgggggttaattttcaagaggctttttagctttctccttgaaggtct

SEQ ID NO: 316324 - DNA, 201 bp, Homo sapiens
atgatgaggcttagagaagcccagccacttgaccaagtttccaccaccaggaatcagcagcactgctctcctggccctgagcagccattaccaagcagggrttatgagctggtcttctcccagagagcgttctcactgagagacatagaacggagaaacgtccatccacgggacagtcctgctggccccaggagggatgca

SEQ ID NO: 316325 - DNA, 201 bp, Homo sapiens
gagtaggcagttttgctctttacacgcccagtacttttgtttagggaagataatagagtacttcactggttataactgcatttctttgtttcagagtgtastatttgttaaacaggtgaatctacttctcttaacaaagtctcaatgtcctatttgcaatttatgtggtaaacactgaagacaatggtccttaaccttttg

SEQ ID NO: 316326 - DNA, 201 bp, Homo sapiens
cagtcccggcccctccagcccggggcccgccgctcaccacacgcaccggaagcgctcggttctcccggaggcagaccggccagcacactaccatccagtcrcgttccgacgcgacgccgcggccgccagccaatcagtggcggcctctgccccgcccccgcgcgaacagccaatgacggcgccgtcgggccggaagttgtt

SEQ ID NO: 316327 - DNA, 201 bp, Homo sapiens
cttttaagataatgttcatgctgttatttggcggggaaagcaatctttcttttagtgtttaaaaaaaatggaacatgatgggtcccaaaaggtgtcaagaatccttgctctaaagaagtcattttcttgtcctctgggaacttgccagtccaaaggtattgtcacctacactctggggccaagatagaaaggatggtattc

SEQ ID NO: 316328 - DNA, 201 bp, Homo sapiens
ggcctctgccccgcccccgcgcgaacagccaatgacggcgccgtcgggccggaagttgttccgtccggacggcgtttccacggacgcccaggagacagccsgttgctgagccgggagcgctgactggcccggctgggcagggtaagcgaggggagtaaggccggggcggagtgaggaaacaagggagggagtgatggaggg

SEQ ID NO: 316329 - DNA, 201 bp, Homo sapiens
actttgttcctgggctcactttagaggaccatggagtgatggggagagcgcagctttggagtcagccaggcctgctcctcttctcatcctgctccctgtcygcatggccatgggcctgctacttctctgagcctaagtttccacatctgcaagatgagaatgaagatacctacctcatagaactactgtaaagcttcaaaa

SEQ ID NO: 316330 - DNA, 201 bp, Homo sapiens
aagctgggattgaaacccaggcgtctgtgaccccagaactcctgatctttccactgcactgtgccgcctcggtgaacagatgcggggaatttacagtttcyctttccaccgcccacgactacacaaaatcagtcacactgacgctgagggtggggaacgggaagagggtggggaggttatttggaggccagcggggggtga

SEQ ID NO: 316331 - DNA, 201 bp, Homo sapiens
cacagtcttggctcactacaacctctgcctcctgagttcgagcgattctcctgccctggcctcgtaagtagctgggactgcaggcgcccgccaccacaccyggctaatttttgtatttttagtagagagggggtcttgccatgttggccaggctaatcttgaactcctgatctcaggtgatccgcccgcctcagcctccca

SEQ ID NO: 316332 - DNA, 201 bp, Homo sapiens
tagtaatcctttttattcctataaggtcagtagtaataccccttcttatattcctgattttggccgtttgagtcttctcttttattccacacccccccccmcacacacacacacacccagtcactttggttcaaagtttactaattttgttggtttgtagtcagcattttttatcttagcatggcatggttcttctcactg

SEQ ID NO: 316333 - DNA, 201 bp, Homo sapiens
tgctgccagtgccccaactgtgcagactgcccccagtctaggcacctgtaactctgtcctctcttgacatgaaaccttggaatggaggggaaactgtgacrctcccttggccgaggggagagggattctcaataactgcttcttgaagagacttcaaccagcgctcctgttttcataacccgctttcctgcccccactcct

SEQ ID NO: 316334 - DNA, 201 bp, Homo sapiens
gccgaggggagagggattctcaataactgcttcttgaagagacttcaaccagcgctcctgttttcataacccgctttcctgcccccactcctgtaagtgcscaaggtcactaaggcccgaacctttgggtgattccgtaacagtgtacactcggtcaccttccagtatttccatgatgtcttagcatttgtttttctctca

SEQ ID NO: 316335 - DNA, 201 bp, Homo sapiens
tatgaactttgtcataaatgacagtgtatattgtgtcactgctactgtcccaaagtgttcatggtagcactagaataacagataaaaatgaagtgttttcragccaatgacttgctgtgattctatgggtaagctcctctacctctctgagtctcagattcttgagctggaaaaggacagtgacaacaatgcctgccttgt

SEQ ID NO: 316336 - DNA, 201 bp, Homo sapiens
aagtgttttcaagccaatgacttgctgtgattctatgggtaagctcctctacctctctgagtctcagattcttgagctggaaaaggacagtgacaacaatrcctgccttgtagggttgtgacactaactaaggtaacacgtgtaaaagcatttaacacagtgcctgccacagaataggcattcagcacatatcagctatta

SEQ ID NO: 316337 - DNA, 201 bp, Homo sapiens
gcccttccttgagggccttcctgctcaggaaagactgttgccattccattgaagtctttactctgagatcattgctaattatcagagaagaaacagaactraaatgttttcatctaagtcaaagccattttccatgatttcagtatagactatcaatgagggaaaattcacttgaagaccgacattaattcagttcaacaa

SEQ ID NO: 316338 - DNA, 201 bp, Homo sapiens
actttgagcacggaaagatgacttgggaaagttcctggagagttttacttgcttaaagcgggcagctgccaggggcatgtggctggctggaacatggctcrtccacagagaagaacaagaaggctctttgatggggaaggtgacttgaggctccttcccgggccactgtagcctctggctggggcaagatccccgatcgct

SEQ ID NO: 316339 - DNA, 201 bp, Homo sapiens
tatcagagaagaaacagaactgaaatgttttcatctaagtcaaagccattttccatgatttcagtatagactatcaatgagggaaaattcacttgaagacmgacattaattcagttcaacaaataaagaatgtgagaaatcatggttgtcaatgaatataaattttaccttaataaacaaatatatatatatatacctatt

SEQ ID NO: 316340 - DNA, 201 bp, Homo sapiens
acaggccttctcacctgtcctcttcttttagttcaaaaaaatcgtaagacactctcttcataagccacctggtactgtgggaaaagtgatggccagctgtsgtaagactgagatccatcctctgtcctgtcagtaacccactgtgggatcatgcttgtccatcaccctcaggctcttagttttttcatttgtagactgccc

SEQ ID NO: 316341 - DNA, 201 bp, Homo sapiens
cctcacgggctaccgtggccaggcagtgcagtggcccgcggtacttgggctctgggcaggctgggggcacaggacacatggggggcacagccaacggcccygaggccgaaagccgccgctgctgcttctgcgcctgtgtctgcgtctgcaagcggactttggccacctcagtgggcgacgtcaggaacacctggagcagag

SEQ ID NO: 316342 - DNA, 201 bp, Homo sapiens
tttctggagggagagacaccatcgaggagcacaggcagtttgggggcaactgtgatgtggacgtgtctttcatgtacctgaccttcttcctcgaggacgaygacaagctcgagcagatcaggaaggtgagcagggaaccccaagggcccacagccgcctcctgccacccactcctgcccatggggcctggaaggctccaac

SEQ ID NO: 316343 - DNA, 201 bp, Homo sapiens
cagcacctaccagtaatcatggcccagatgccacagaagctgaagaggattttgtggacccatggacagtacagacaagcagtgcaaaaggcatagactaygataagctcattggtacgtcctctgctttcttcccagaaaaagctgcaacttttagaagtggtcccattgagttgattccattgatgtttttaaattttg

SEQ ID NO: 316344 - DNA, 201 bp, Homo sapiens
gtttcctcagtctagttcttttaatcagccatttaataaaccaaaatatttcattctgaaaatccttcaagtttcatcccaaatgattaccaagaaatgtrttagaaaaataagactttggtcaaccatcacaagaaggatactatctagctcaacaaatatttcttgagcacctgagttgtggtactcccctaaggtgag

SEQ ID NO: 316345 - DNA, 201 bp, Homo sapiens
gacgtgtctttcatgtacctgaccttcttcctcgaggacgacgacaagctcgagcagatcaggaaggtgagcagggaaccccaagggcccacagccgcctyctgccacccactcctgcccatggggcctggaaggctccaacagccaggcatgaaggcttggtcggaggtgctcaactgaaacaaggtgaaaactgagtag

SEQ ID NO: 316346 - DNA, 201 bp, Homo sapiens
gtagctgaaggtataggttattgttgtggtaacaacagatctcacttctgagtgccacccacgtgccaggctctgcatgggtggtgtgggctgagctggtrcccgaggcaggaaggagccgctcaggacatgtggagccatctctcacgtggctgtctccctccgggcaggattacaccagcggagccatgctcaccggtg

SEQ ID NO: 316347 - DNA, 201 bp, Homo sapiens
agagggacactaaaggggcaggtgagcagtgagcacaggaggacttgcttagagccgcatccccagaacgttccctcttataagaccttaaaactgagtastggcagccaggcgcggtggctcatgcctgtaatcccagcactttgggaggctgaggtgggtggatcacaaggtcaggaggtcaggagttcgagaccagcc

SEQ ID NO: 316348 - DNA, 201 bp, Homo sapiens
attgcactccagcctgggtggcagagcgagactccatctcaaaaaaaaaaaaaatcaaatagtaatttgccaaaagtttttagcaatgaacttaggttcaktaaaacacattggtatttataccctgagcaaacaggagtcctcctgtgttctgggcactgggtgggggcacaggggcatcaccagatgcaaacttgatct

SEQ ID NO: 316349 - DNA, 201 bp, Homo sapiens
accggccgaggacggccaccccaggcccctctcaggtgggcatggcagtcccggcagcaccccctctgagcagcctgctgtggggaagaagccgggccggragccctcagtcgtggtgccagcccagctcatgctccccgccccgaggcccccagcctgtgggaagcccctgcctgtaagggacagctcgtgaagacacag

SEQ ID NO: 316350 - DNA, 201 bp, Homo sapiens
tgcactccagcctgggtggcagagcgagactccatctcaaaaaaaaaaaaaatcaaatagtaatttgccaaaagtttttagcaatgaacttaggttcattwaaacacattggtatttataccctgagcaaacaggagtcctcctgtgttctgggcactgggtgggggcacaggggcatcaccagatgcaaacttgatcttg

SEQ ID NO: 316351 - DNA, 201 bp, Homo sapiens
gatgtctaggcaggcctcatttcatcacgcagcatgtgcaggcctggaagagcaaagccaaatctcagggaagtccttggttgatgtatctgggtctcctytggagcactctgccctcctgtcacccagtagagtaaataaacttccttggctcctgctcttgtcattgtgctctgtctgggaggtctgaggagggagcag

SEQ ID NO: 316352 - DNA, 201 bp, Homo sapiens
aggccctcacagatgtctaggcaggcctcatttcatcacgcagcatgtgcaggcctggaagagcaaagccaaatctcagggaagtccttggttgatgtatytgggtctcctctggagcactctgccctcctgtcacccagtagagtaaataaacttccttggctcctgctcttgtcattgtgctctgtctgggaggtctga

SEQ ID NO: 316353 - DNA, 201 bp, Homo sapiens
gtgctgggattacaggcgtgagccactgcgccagcccctcgcatgggccttgcctgagcctctcgcgtgactgctgctttccctgcccagcctctcagcartgccctgccaaaatggagacaggcgcctttgccccaacactcatctgctccttttgcacaatcccaacttatctagttaggactctgctctagaattctg

SEQ ID NO: 316354 - DNA, 201 bp, Homo sapiens
ggacaggtaaggccctgtcctccaccccagagctcactttgtctgagagcagctgaccagcagtggaagacatttgctcagcgatatattagttatggctrcaaaagcccaagaattcatccccaaggcaattaagataaaccacaaatagaggatgggtgccttggctcacacctataatcccaacactttcgggaggct

SEQ ID NO: 316355 - DNA, 201 bp, Homo sapiens
ggcttcctgaaattccaaaccctcttcctcctattgtattgacttgctcataaacaataccaacagacaaaccaacagagaatgcatggaacagattatcygtaccttaggccgtaaattccacgcagataacgtcaagatatgggcaggttccaaaagagtttctgcctctcccaacctacagttatctgggctgaggca

SEQ ID NO: 316356 - DNA, 201 bp, Homo sapiens
aacctacagttatctgggctgaggcagccccctttttgaagctgtgtccatggaatttatgatctgatgtagggttgttctgttctactggcacttcacgsttacaggagaacaaccccaggacagagcccagcagtctgcccaaacacttcaaattctacctgcaaagaactccaggccttgctcaacccactttctggg

SEQ ID NO: 316357 - DNA, 201 bp, Homo sapiens; identical to SEQ ID NO: 66089

SEQ ID NO: 316358 - DNA, 201 bp, Homo sapiens
gatctgatgtagggttgttctgttctactggcacttcacggttacaggagaacaaccccaggacagagcccagcagtctgcccaaacacttcaaattctayctgcaaagaactccaggccttgctcaacccactttctgggtggaatataataaaaaattttccttaattcacatactataaaacttatttttttaaatgt

SEQ ID NO: 316359 - DNA, 201 bp, Homo sapiens; identical to SEQ ID NO: 66073

SEQ ID NO: 316360 - DNA, 201 bp, Homo sapiens
ggcataaatgggttaacagtcatcccccatttctccctccccactggcaaccattagtctgctttctctatatctagatttaggcattttatataaatggratcatgtaacatgtggccttttgtgtctggcttcttttacttggcataacattttcaaggttcctccatgttgtagcatgtatccatactggattccttt

SEQ ID NO: 316361 - DNA, 201 bp, Homo sapiens
cacgtgccaggctctgcatgggtggtgtgggctgagctggtgcccgaggcaggaaggagccgctcaggacatgtggagccatctctcacgtggctgtctcyctccgggcaggattacaccagcggagccatgctcaccggtgagctcaagaaggcactcatagaggttctgcagcccttgatcgcagagcaccaggcccgg

SEQ ID NO: 316362 - DNA, 201 bp, Homo sapiens
acttgggaagctgagacaggaggatcccttgagcccaggagttcaaatccagcctgggcgacatagcaagaccctcatttctttcttttttttttttttttgagacagagtcctgctctgtcacccaggctggagtgcagtggcgcaatctcggctcactgcaagctctgcctcccgggttcacaccattctcctgcctca

SEQ ID NO: 316363 - DNA, 201 bp, Homo sapiens
attgtatctgtccagagataagcaatgttgacccttggcttggggaatataaggagaagtcactttcagaatactgttctctagattctcctatccagacmtctggaaaaggtagttattcctcttgtatttggggacactttacccagaaacaaaggacattcatcctcgagcgttggtttcccaccctgctgaacattg

SEQ ID NO: 316364 - DNA, 201 bp, Homo sapiens
ttgtatctgtccagagataagcaatgttgacccttggcttggggaatataaggagaagtcactttcagaatactgttctctagattctcctatccagaccyctggaaaaggtagttattcctcttgtatttggggacactttacccagaaacaaaggacattcatcctcgagcgttggtttcccaccctgctgaacattgg

SEQ ID NO: 316365 - DNA, 201 bp, Homo sapiens
cagtttgcctggtattggtctgagagtcctcggggctgggtgattctgagcaaggatcatatggtgttggcctggtatccccagggaagtgtaccaagctmacagtatgtcggcactgatgtttggagggattccaggagtcccagtaactgcatagctggatccatcttttaaacacattattccaaacctacacatctt

SEQ ID NO: 316366 - DNA, 201 bp, Homo sapiens
accatttcagtagaagtttcctgtctatatttatatcataagcaccaaaggtaacaaattctagttattatccatgttgtttcgtctctgtctatattttycatttccaaaagtgcattagtgccttgatatttttctcagaaaatcacactcttcctcttctcctttttcctttagagatatgaatcaggttcttgatgc

SEQ ID NO: 316367 - DNA, 201 bp, Homo sapiens
atctgtattgcagttgtagttaggtcagtatctgtacactgacattattatgaccatggaaatagacgtggacagctgaaccatcacggatagaatgagtwctctaactttctcgcccagcttttgttttctctggagttaatatttgtcttaatatctgtttgcttgacttttttatgtcaatgatactaatgataatgt

SEQ ID NO: 316368 - DNA, 201 bp, Homo sapiens
gccaccacgcccggcccgacttccgacacttttaactcctgttatctgttatcttttcaaacaccttgcttgtcaccagattgtgtcaaccatctcacatkccccagtagtttactttgactatttgggaccctgatttaaatcattatttgtgtgtgtgtgtgtgtgtgtgtgtgtgtgtgtgtgtgtattttttgagac

SEQ ID NO: 316369 - DNA, 201 bp, Homo sapiens
ttgttgtggtaacaacagatctcacttctgagtgccacccacgtgccaggctctgcatgggtggtgtgggctgagctggtgcccgaggcaggaaggagccrctcaggacatgtggagccatctctcacgtggctgtctccctccgggcaggattacaccagcggagccatgctcaccggtgagctcaagaaggcactcata

SEQ ID NO: 316370 - DNA, 201 bp, Homo sapiens
cacaccattgcactccagcctgggtggcagagcgagactccatctcaaaaaaaaaaaaaatcaaatagtaatttgccaaaagtttttagcaatgaacttargttcattaaaacacattggtatttataccctgagcaaacaggagtcctcctgtgttctgggcactgggtgggggcacaggggcatcaccagatgcaaact

SEQ ID NO: 316371 - DNA, 201 bp, Homo sapiens
ggagaaagtcgaggcagcagccctcgaggccctcacagatgtctaggcaggcctcatttcatcacgcagcatgtgcaggcctggaagagcaaagccaaatytcagggaagtccttggttgatgtatctgggtctcctctggagcactctgccctcctgtcacccagtagagtaaataaacttccttggctcctgctcttgt

SEQ ID NO: 316372 - DNA, 201 bp, Homo sapiens; identical to SEQ ID NO: 66081

SEQ ID NO: 316373 - DNA, 201 bp, Homo sapiens
tgacattattatgaccatggaaatagacgtggacagctgaaccatcacggatagaatgagtactctaactttctcgcccagcttttgttttctctggagtkaatatttgtcttaatatctgtttgcttgacttttttatgtcaatgatactaatgataatgtatctccaagccctttccctgtccagtgaatctcctttca

SEQ ID NO: 316374 - DNA, 201 bp, Homo sapiens
agcctgccaagttgctggaattatagatgcaagccactgcacccagctcatattttaaaggaaataaatagtactgaaagaaagtaatgtcaaaaaaaagytacttttttacagaaagagatttactcaccaggtaggcctcaaacgattaaaccaagttgttttaaaacaaaattataaaataaataaaagacccagtgg

SEQ ID NO: 316375 - DNA, 201 bp, Homo sapiens
taatttttgtatttttagtagagagggggtcttgccatgttggccaggctaatcttgaactcctgatctcaggtgatccgcccgcctcagcctcccaaagwactgggatgacaggtgtgagccaccacgcccggcccgacttccgacacttttaactcctgttatctgttatcttttcaaacaccttgcttgtcaccagat

SEQ ID NO: 316376 - DNA, 201 bp, Homo sapiens
gagcaggactgaggagcgtgtctgtgtcctcttctggtgcaggtcaataagcatgcgttttctggagggagagacaccatcgaggagcacaggcagtttgkgggcaactgtgatgtggacgtgtctttcatgtacctgaccttcttcctcgaggacgacgacaagctcgagcagatcaggaaggtgagcagggaaccccaa

SEQ ID NO: 316377 - DNA, 201 bp, Homo sapiens
aactcctgagtctgagcgatccttccacctcagcctcccgagtcgctaggactacaggcgcacgtcaccacaccagctaattcctttttttttttttttttggcagagaggagggctcactaagttacccagactggtcttgacctcctggcctcaatcgatcctcccccctcagcctcccaaaatgctgagattactggc

SEQ ID NO: 316378 - DNA, 201 bp, Homo sapiens
agtcgaggcagcagccctcgaggccctcacagatgtctaggcaggcctcatttcatcacgcagcatgtgcaggcctggaagagcaaagccaaatctcaggsaagtccttggttgatgtatctgggtctcctctggagcactctgccctcctgtcacccagtagagtaaataaacttccttggctcctgctcttgtcattgt

SEQ ID NO: 316379 - DNA, 201 bp, Homo sapiens
acacctgtaatcccagcacttcgggaggccaaggcaggcagatcacttgagcccaggagttcaagaccagactggactacacgacaaaacctggtctctasaaaaaataccaaaaaattagccaggctggtggcacacacctatactcctagctactcaggaggctgaggcaggaaggtaacctgagaccaggaggtcaag

SEQ ID NO: 316380 - DNA, 201 bp, Homo sapiens
aactccaggattgccaactttgctccctgcagaactcaaggcagcctgtccttcccacatgaatcaggtgaatttgttttgtgtcctttcatttaggtaawattttgaatttttttttctttttttccttttctgcttttcttatcagcactgttctgcaggcaaagtcatggcaatttccttaaagttataattagtgtg

SEQ ID NO: 316381 - DNA, 201 bp, Homo sapiens
ctatggccaccacatagcagtgactctatcaggcacttagatgctaggagacaccactactaggtggtttttttcttcctcctgtttattggtattttccrtagtttttcattctataactttttttttcctttttttttttttttttttgagacggagtctcactctgtcgcccaggctggagtgcagtggcacaatctc

SEQ ID NO: 316382 - DNA, 201 bp, Homo sapiens
ccccatctctattgaaaatacaaaaattagttgggtgtggtggcacgcacctataagcccagctactcaggtggctgaagcaggagaatcgcttgaacccrggaggtggaggttacagtgagttgagatcacgccattgcactccagcctgggcaacagagcgagactccatctcaaaaaggaaaaaaaaatgctatgagc

SEQ ID NO: 316383 - DNA, 201 bp, Homo sapiens
tgtttgaccctggaagacaggggttgcagtgagccgagatcgcaccactgttctccagcctgggcaacagagtgagactccagctcaaaaaaaaaaaaaaagaaaagaaaaaagaaaaacttgtttatggatctgggacatttatcattcacttagggaccagtagagccctcgaggtgagcagttagcatgaggtcagga

SEQ ID NO: 316384 - DNA, 201 bp, Homo sapiens
accctgcagccagcacagtggcagcagcttgcagcaagtaatgaccagtcttctaagaaagggcagcgtgctctaactcagaaataccagtcagacgccgygaagctacagtcctgccacagtttgggggtactggagactttccctccttgtaggggttagggtgtcccaggtgcctcaatcccaagggcgcatggagtc

SEQ ID NO: 316385 - DNA, 201 bp, Homo sapiens
tcccggcacctcaggaggccgaggctggctgatcactcgcggttaggagctggagaccagcccggccaacacagcgaaaccccgtctccaccaaaaaaatmcgaaaaccagtcaggcgtggcggcgcgcgcctgcaattgcaggcactcggcaggctgaggcaggagaatgaggcagggaggttgcagtgagccgagatgg

SEQ ID NO: 316386 - DNA, 201 bp, Homo sapiens
ctcaggtttctacaaaaatgtggtgaagattcaaaagcatgttaccttcaaccaagtgaaaggcattttcggcttcactgacagcgactgcattggtaagrggcccactgctgctgtggaccactccctgcacccttcaaaaaggagcagagttctggaggagacacatgcctggtttaaatatctctgagatgttagcgt

SEQ ID NO: 316387 - DNA, 201 bp, Homo sapiens
tctcggcactttgggaggccaaggcaggcggctgggaggtggaggttgtagcgagccgagatcacaccactgcactccagcctgggcaccattgagcactragtgaaccagactccgtctgcaatcccggcacctcaggaggccgaggctggctgatcactcgcggttaggagctggagaccagcccggccaacacagcga

SEQ ID NO: 316388 - DNA, 201 bp, Homo sapiens
ccttcccacccctgccctgctctccttccatggctccaccccagcagatgtgcaaatggtttgcctcccacgtgcatgccttcatggccctctccataaakttccatgtgtctttcagatgcattggcttcgtagacttttagacttttggtccttgagacttgtggctgggccttctgatcccctcctctacttgatgtt

SEQ ID NO: 316389 - DNA, 201 bp, Homo sapiens
agaggcgctcctcacttcctagatgggatggcggccgggcagagacgctcctcactttccagactgggcagccaggcagaggggctccttacgtcccagaygatgggcggccaggcagagacgctcctcacttcccagacggggtggcggccatgcagaggctgcaatctcggcactttgggaggccaaggcaggcggctg

SEQ ID NO: 316390 - DNA, 201 bp, Homo sapiens
cttcccacccctgccctgctctccttccatggctccaccccagcagatgtgcaaatggtttgcctcccacgtgcatgccttcatggccctctccataaatktccatgtgtctttcagatgcattggcttcgtagacttttagacttttggtccttgagacttgtggctgggccttctgatcccctcctctacttgatgttt

SEQ ID NO: 316391 - DNA, 201 bp, Homo sapiens
tgacagtaataacagcaacaacatccaaaacactaaacacttttaaatatcaaaatacattcatcataacttctttttttttttaatttatttatttatttttattgatcattcttgggtgtttctcgcagagggggatttggcagggtcacaggacaatagtggagggaaggtcagcagataaacaagtgaacaaaggtc

SEQ ID NO: 316392 - DNA, 201 bp, Homo sapiens
ttcccacccctgccctgctctccttccatggctccaccccagcagatgtgcaaatggtttgcctcccacgtgcatgccttcatggccctctccataaattkccatgtgtctttcagatgcattggcttcgtagacttttagacttttggtccttgagacttgtggctgggccttctgatcccctcctctacttgatgtttg

SEQ ID NO: 316393 - DNA, 201 bp, Homo sapiens
tttccatgtgtctttcagatgcattggcttcgtagacttttagacttttggtccttgagacttgtggctgggccttctgatcccctcctctacttgatgtytggtgcgtggcttcaggcatagcaggcccttgaggccttcagtcagctgccagccgagccagctccctgggatgcgctgccggggctctccgtgaggagc

SEQ ID NO: 316394 - DNA, 201 bp, Homo sapiens
tggctcgtccacagagaagaacaagaaggctctttgatggggaaggtgacttgaggctccttcccgggccactgtagcctctggctggggcaagatccccratcgcttctcccaagctgagccaatggaaggcgatagccccctgggtcttcacaggagccatgctttgtgggctgtgcccctgctttgggcacatccagt

SEQ ID NO: 316395 - DNA, 201 bp, Homo sapiens
caggtgatctgtccaccttggcctcccaaagtgctgggattaccagcatgagccaccacgccagccttggttatagttttaaatgtatttttcctttatcracattgggatgcctgtggtctaaagagtcaggggttctcaaagcctttgtgaaatacagtggccctccagcccacctctccctatttcctgctcaattct

SEQ ID NO: 316396 - DNA, 201 bp, Homo sapiens
ttcttgaagagacttcaaccagcgctcctgttttcataacccgctttcctgcccccactcctgtaagtgcccaaggtcactaaggcccgaacctttgggtrattccgtaacagtgtacactcggtcaccttccagtatttccatgatgtcttagcatttgtttttctctcatgctgttaggcactgatcattcatcagctt

SEQ ID NO: 316397 - DNA, 201 bp, Homo sapiens
cactgaactgctgaccctggcagaatttaaatttttcatgctagctgcaagtctctgaatctgcttgtgttcttgccttgtttgtatgtctgcttcacgtyggtttcacactggtttctgcctttcccagtcaactccacaggtaaacgtgtgtctgctttgcctgatgcaggtatctttgcctacagatgacttcctggc

SEQ ID NO: 316398 - DNA, 201 bp, Homo sapiens
actgaactgctgaccctggcagaatttaaatttttcatgctagctgcaagtctctgaatctgcttgtgttcttgccttgtttgtatgtctgcttcacgtcrgtttcacactggtttctgcctttcccagtcaactccacaggtaaacgtgtgtctgctttgcctgatgcaggtatctttgcctacagatgacttcctggca

SEQ ID NO: 316399 - DNA, 201 bp, Homo sapiens
tttttagtagagatgggggtttcaccacgttggtcaggctggtctcaaacccctgacctcaggtgatctgtccaccttggcctcccaaagtgctgggattwccagcatgagccaccacgccagccttggttatagttttaaatgtatttttcctttatcaacattgggatgcctgtggtctaaagagtcaggggttctcaa

SEQ ID NO: 316400 - DNA, 201 bp, Homo sapiens; identical to SEQ ID NO: 66087

SEQ ID NO: 316401 - DNA, 201 bp, Homo sapiens
gttgcacttagtcccctcaacggtaatgttagcaggcttctccatgcccattccacagatgaggaaaccgaaggggaagcagaaaagtaatgcgacccttkcccaaggtttcgaataagtccaagctgggattgaaacccaggcgtctgtgaccccagaactcctgatctttccactgcactgtgccgcctcggtgaacag

SEQ ID NO: 316402 - DNA, 201 bp, Homo sapiens
agggtggggaggttatttggaggccagcggggggtgaggggtggctgatgcaatgaccagctaatggctcgattctcaagagggtttcattggtctcaacmtggccccccaggcaacccacccctgattggacagtctcatcaagaaggttggtcaagagctcaagtgtttctgagaatctgggtgatttataagaaaccc

SEQ ID NO: 316403 - DNA, 201 bp, Homo sapiens
agctattagtaatacttttagccatcccttttatttcctctctcaggatgaaattgattctgcagtaaagatgttggtgtcattaaaaatgagctacaaakctgccgcgggggaggattacaaggctgactgtcctccagggaacccagcacctaccagtaatcatggcccagatgccacagaagctgaagaggattttgt

SEQ ID NO: 316404 - DNA, 201 bp, Homo sapiens
tagtaatacttttagccatcccttttatttcctctctcaggatgaaattgattctgcagtaaagatgttggtgtcattaaaaatgagctacaaagctgcckcgggggaggattacaaggctgactgtcctccagggaacccagcacctaccagtaatcatggcccagatgccacagaagctgaagaggattttgtggaccc

SEQ ID NO: 316405 - DNA, 201 bp, Homo sapiens
gtaacgtagttacatcttgctttacagtttacaaagtgctaccatgccttttttttctcattttgttctcataagagcctggggtagatgaagttcctggyggcgccattttataggttaggaaacttgactcttaggaagtgattgagccaagaaaggtttgatggcgatacagtctctgtctgccatgtccccacttcc

SEQ ID NO: 316406 - DNA, 201 bp, Homo sapiens
ctcaaaaaaaaaaaaaatcaaatagtaatttgccaaaagtttttagcaatgaacttaggttcattaaaacacattggtatttataccctgagcaaacaggrgtcctcctgtgttctgggcactgggtgggggcacaggggcatcaccagatgcaaacttgatcttgactaggagggcccctcctagtcaagtagattcaca

SEQ ID NO: 316407 - DNA, 201 bp, Homo sapiens
atgacagtaataacagcaacaacatccaaaacactaaacacttttaaatatcaaaatacattcatcataacttctttttttttttaatttatttatttatttttattgatcattcttgggtgtttctcgcagagggggatttggcagggtcacaggacaatagtggagggaaggtcagcagataaacaagtgaacaaaggt

SEQ ID NO: 316408 - DNA, 201 bp, Homo sapiens
aatgacagtaataacagcaacaacatccaaaacactaaacacttttaaatatcaaaatacattcatcataacttctttttttttttaatttatttatttatttttattgatcattcttgggtgtttctcgcagagggggatttggcagggtcacaggacaatagtggagggaaggtcagcagataaacaagtgaacaaagg

SEQ ID NO: 316409 - DNA, 201 bp, Homo sapiens
tttcaggcaggcaggcaggcaggcagcagggagcagcagggattctgagagagcacatgagcaagggggcttgggaatcagattctggcttagctactccstggtaatggagccatcagcctcttgtctgctattgcagggcacatagagtaacacccagctttgagagttgggagaattcaggataggtttctggacatg

SEQ ID NO: 316410 - DNA, 201 bp, Homo sapiens
taatgacagtaataacagcaacaacatccaaaacactaaacacttttaaatatcaaaatacattcatcataacttctttttttttttaatttatttatttatttttattgatcattcttgggtgtttctcgcagagggggatttggcagggtcacaggacaatagtggagggaaggtcagcagataaacaagtgaacaaag

SEQ ID NO: 316411 - DNA, 201 bp, Homo sapiens
gtctaagcaaatactaatgacagtaataacagcaacaacatccaaaacactaaacacttttaaatatcaaaatacattcatcataacttctttttttttttaatttatttatttatttttattgatcattcttgggtgtttctcgcagagggggatttggcagggtcacaggacaatagtggagggaaggtcagcagataa

SEQ ID NO: 316412 - DNA, 201 bp, Homo sapiens
ggtctaagcaaatactaatgacagtaataacagcaacaacatccaaaacactaaacacttttaaatatcaaaatacattcatcataacttctttttttttttaatttatttatttatttttattgatcattcttgggtgtttctcgcagagggggatttggcagggtcacaggacaatagtggagggaaggtcagcagata

SEQ ID NO: 316413 - DNA, 201 bp, Homo sapiens
aagagattgagaccatgctggccaacatgatgaaacctcatctctactaaaaatacaaaaatcagctgggtgtggtacgcacctgtagtcccagctactcrggagcctgaggcaggagaatcacttgaaccccaggaggcagaggtagcggtgagctgagatcgagccaccacactccagcctggcaacaaagcgagactc

SEQ ID NO: 316414 - DNA, 201 bp, Homo sapiens
gccttcccacccctgccctgctctccttccatggctccaccccagcagatgtgcaaatggtttgcctcccacgtgcatgccttcatggccctctccataaatttccatgtgtctttcagatgcattggcttcgtagacttttagacttttggtccttgagacttgtggctgggccttctgatcccctcctctacttgatgt

SEQ ID NO: 316415 - DNA, 201 bp, Homo sapiens
ctggccgccctcatcagggtccttactctccccacaggatccttactttagaatgacaagggacgtcgcccccaggatcggctatcctaaaccagccctgytgcactccaccttcttcccagccctgcagggcgcccagaccaaaatgagtgccagcgaccccaactcctccatcttcctcaccgacacggccaagcagat

SEQ ID NO: 316416 - DNA, 201 bp, Homo sapiens
gccattcctcgtgctgtctctttggcaactgcggttgcagctcctgaccagcctccaccttcgctaaataagaacttccttttttttttttttttttttttctttttttgagatggagtcttgctctgtcgcccaaactggagagcagtggcatgatctcggcttactgcaatatctgcctcctgggttcaagcaattctc

SEQ ID NO: 316417 - DNA, 201 bp, Homo sapiens
gagaagcccagccacttgaccaagtttccaccaccaggaatcagcagcactgctctcctggccctgagcagccattaccaagcaggggttatgagctggtyttctcccagagagcgttctcactgagagacatagaacggagaaacgtccatccacgggacagtcctgctggccccaggagggatgcatgcagcaggcatt

SEQ ID NO: 316418 - DNA, 201 bp, Homo sapiens
ttcctataaggtcagtagtaataccccttcttatattcctgattttggccgtttgagtcttctcttttattccacacccccccccacacacacacacacacccagtcactttggttcaaagtttactaattttgttggtttgtagtcagcattttttatcttagcatggcatggttcttctcactgcctttgtgacttatt

SEQ ID NO: 316419 - DNA, 201 bp, Homo sapiens
gcgatagctcacacctataattccagcactttgagaggccgaggcaggtggatcacctgaggtcaggagttcgagaccagcgtggccaacatggtgaaacycctgtctctactaaaaatacaaaaattaaccaggcttggtggcaggcacctataatcccagctactcgggaggctgaggcaggagaattgtttgaccctg

SEQ ID NO: 316420 - DNA, 201 bp, Homo sapiens
attcctataaggtcagtagtaataccccttcttatattcctgattttggccgtttgagtcttctcttttattccacacccccccccacacacacacacacacccagtcactttggttcaaagtttactaattttgttggtttgtagtcagcattttttatcttagcatggcatggttcttctcactgcctttgtgacttat

SEQ ID NO: 316421 - DNA, 201 bp, Homo sapiens
aggctgaggcaggagaattgtttgaccctggaagacaggggttgcagtgagccgagatcgcaccactgttctccagcctgggcaacagagtgagactccarctcaaaaaaaaaaaaaaagaaaagaaaaaagaaaaacttgtttatggatctgggacatttatcattcacttagggaccagtagagccctcgaggtgagca

SEQ ID NO: 316422 - DNA, 201 bp, Homo sapiens
agtaatcctttttattcctataaggtcagtagtaataccccttcttatattcctgattttggccgtttgagtcttctcttttattccacacccccccccacacacacacacacacccagtcactttggttcaaagtttactaattttgttggtttgtagtcagcattttttatcttagcatggcatggttcttctcactgc

SEQ ID NO: 316423 - DNA, 201 bp, Homo sapiens
gagacggagtctcactctgtcgcccaggctggagtgcagtggcacaatctcggctcactgcaagctctgcctcccaggttcacgccattctcctgcctcarggctcccgagtagctgggcctacaggcgcccaccaccacgcccagctaattttttgtattttggtagagacggggtttcaccgtgttagccaggatggtc

SEQ ID NO: 316424 - DNA, 201 bp, Homo sapiens
gtgcagtggcacaatctcggctcactgcaagctctgcctcccaggttcacgccattctcctgcctcaaggctcccgagtagctgggcctacaggcgcccaycaccacgcccagctaattttttgtattttggtagagacggggtttcaccgtgttagccaggatggtcttgatctcctgacctcgtaatctgcccgccttg

SEQ ID NO: 316425 - DNA, 201 bp, Homo sapiens
taagaaaaacccagcagcactgaactggaagccagaagatctgggttctacccttcatttgggttctaatttgcattgtgcaagtcatttcacctctctgrgactgttttctcatctttctaaaaaggggctttatacacaccagatggtatctcaagtcatgcctggtctgctagctctattccaatcaatcactagttg

SEQ ID NO: 316426 - DNA, 201 bp, Homo sapiens
tgagaaaatcctaccgaggaatttcccatttgtaatagtttgtcttggggagcaaagaggaggatagccaatgatcatgatgatctcctcttttctcacgcagagcaggtgttcatgataaaaagcaagtcttttgtgtcttcatgatctgaagagaggaaacaacacggatcaagatgatcctagacctcctaatcatgg

SEQ ID NO: 316427 - DNA, 201 bp, Homo sapiens
ctccctttcctgtggatgcagctgagattctggacagcctagacttcttcctcagtgtcagagtaagattgcctcaatggggcggggcaggacacactgcygacctcaccactgggcgccctgggcagccactgcgaggcctcgtcattttcgagttggtgagacaccgcggcagtcgacttggaagatgctctggtggta

SEQ ID NO: 316428 - DNA, 201 bp, Homo sapiens
gacttggaaaatgactcaatctttgagcaactgcttttgaccactaggatcagttgggaggcaggcaggcctctgagaccttcatactcaaaacccttcasgctgtaatctctggggcctatttcatctcccagttggcatcatgttagcggtggtgacaaacatatgtgttggcccctctttgacaccagggattcttaa

SEQ ID NO: 316429 - DNA, 201 bp, Homo sapiens
tttagggatttgtgaggtctttgaaagaattatattgttttactcaaagctgatttttaatcaactaaaacttgctttctagtcaaactgagtaagaaagytgaacaattctagaccatccataacgagagctaccgtttttgctataaagtttttcaggctccctttcttttcagtaaagctgggtccagggaaataatt

SEQ ID NO: 316430 - DNA, 201 bp, Homo sapiens
attttggaatgtataaaagaagcctctttcaaaaagaaatcaatatgacttgttttttcctaacatgggccagccctgggcacttttcatctgccaccacrccaggcctgctcttcagaggtgttcagctttaagactagggacagttcacaccagataactatgaggcagtgttctctgccactcattgactgtggaagt

SEQ ID NO: 316431 - DNA, 201 bp, Homo sapiens
aaatagctcttatgatatgatcgtgtggtttcacatggtcttaagttcaagtaacttgcccaaaggtgcacagttattaagagggataagaggaactccarattactgatttcagatccagtgttgtatcccttcaaaaggagatagaagaaacagggccacccggggttggtgaagatactgtcagaatcatctgttact

SEQ ID NO: 316432 - DNA, 201 bp, Homo sapiens
ctttatactataaaacttcatcactccttagaattgagcaccatacattgcacacttttccctagttgaaaagaattctgaaatatactcttattggcaakagagttctatgacaaagtggatggctaggctcagaaatcagagacctgtgaaaaatattctgtttctgcccttttttcgggggtggggtggggaagggaa

SEQ ID NO: 316433 - DNA, 201 bp, Homo sapiens
atggacaagttcaagaaactcctctcctggcaataggagacatgatttcacattagaaaagcaaagcaggggaaggaaactgaataggtaaagcactttgyctatttctgttttcaaagcacgtgtgtataggagaaaggagaagggagaatggtgaatatgtacacttttctacttggtcctttgggcaaacccatctga

SEQ ID NO: 316434 - DNA, 201 bp, Homo sapiens
caaccccctccctgagtcccattaattttctaggacagttcgcagaactcagggaaatgtgtttacacatttattataaaagatattacaaagaatatagrtggacagtcagatgaaggagatggatggggtttatgggggcttcattacataggcatgattaattacatcattggtcattggtgatcaactcaaccttca

SEQ ID NO: 316435 - DNA, 201 bp, Homo sapiens
tattctgaaatataaaagtaatcaattttaagaaagcttaaaataaattcaaggagattaacttcactgatcataagttctcacatttacatggcaaggtragttttctgaaccacaacaaccccaggatgactttagaaatgttgaaaaaccacagaattatagtccattgcacagcaagcattcacttactctatgttg

SEQ ID NO: 316436 - DNA, 201 bp, Homo sapiens; identical to SEQ ID NO: 66161

SEQ ID NO: 316437 - DNA, 201 bp, Homo sapiens
gggaggtggaggttggagtgagccgagatcccgccactgcactccagcctggcgacagtgagactctgtcgcaaaaaaagaaaaaaaaaaaaaaaaaaaargaaatagcctagccttttctaaatatgtcatgggccaataggatttctttccaatgtcttgatctgaaaagaaatgattcattggtttttaatgaaaaaa

SEQ ID NO: 316438 - DNA, 201 bp, Homo sapiens
gcttcaggtggacctgtcaaagctcagccctcatggtacggtgtgatcattggacatggctgagtccatgtttaaggaaagcccatgccttttctttctgsaagttgatcctttagtactcagccttgctcattatattcaccaaacatagaatccagctcagtgacttgaggaagttgttgctatgccttttgtgaagtg

SEQ ID NO: 316439 - DNA, 201 bp, Homo sapiens; identical to SEQ ID NO: 66163

SEQ ID NO: 316440 - DNA, 201 bp, Homo sapiens
ttattttcactgcatgctctctatggaaagaggatgtgctaagcaaacaagcattgtaaacaatatttcagaggcaaggttttggcctgctttaaaaaaawaaaatgtttgcaagtacaattaaaaaccagtataagggacaggggtgggatgaaaacctgtctctaagattacgaagcctgcgttatttcccctaaatcc

SEQ ID NO: 316441 - DNA, 201 bp, Homo sapiens
ccctcacaaggcagagaaaaagagacagcaagctctgtgttgtctcttcttataaaggtactactcccatcacaggagccctaccctcatgacctcacgckggggattagggcttcagcatacgaatttgtgtgtgtgtttgaatatggggaggagagatacaatcagtccatagcagccacaaaaaatgcattcagaaaa

SEQ ID NO: 316442 - DNA, 201 bp, Homo sapiens
catagcagccacaaaaaatgcattcagaaaaggaaagggtatgaattttgcccaggatttggagtgtatgtaaattacaccatttggtaaatcagtgcgttctctctctctctctctctctgtttcttttcccctcccccctcttttcttttcaaacacatattgatcacctgttgtggactttggaacactcaggagctt

SEQ ID NO: 316443 - DNA, 201 bp, Homo sapiens
atagcagccacaaaaaatgcattcagaaaaggaaagggtatgaattttgcccaggatttggagtgtatgtaaattacaccatttggtaaatcagtgcgttctctctctctctctctctctgtttcttttcccctcccccctcttttcttttcaaacacatattgatcacctgttgtggactttggaacactcaggagcttc

SEQ ID NO: 316444 - DNA, 201 bp, Homo sapiens
caggagccctaccctcatgacctcacgctggggattagggcttcagcatacgaatttgtgtgtgtgtttgaatatggggaggagagatacaatcagtccayagcagccacaaaaaatgcattcagaaaaggaaagggtatgaattttgcccaggatttggagtgtatgtaaattacaccatttggtaaatcagtgcgttct

SEQ ID NO: 316445 - DNA, 201 bp, Homo sapiens
tttcttttcccctcccccctcttttcttttcaaacacatattgatcacctgttgtggactttggaacactcaggagcttcccactgaactcagaataaaamctgcctaagaggccctgtgaggagggtccctgcctcccttccttcccctctagcccttctcctcacccgcctcttgcccagtcattgtgcctccccacat

SEQ ID NO: 316446 - DNA, 201 bp, Homo sapiens
ctgcctcccttccttcccctctagcccttctcctcacccgcctcttgcccagtcattgtgcctccccacatttggctcccttgagtcactcagaggttccytgagttccctgcctttcccagtgtggtgttccctccctatgttctcctggattccgtcccctctcatacctcagagaggctgtccatgaaccccaatcta

SEQ ID NO: 316447 - DNA, 201 bp, Homo sapiens
tggggtctggtggatttgctgtagtgttgacatctctggtcattttgccaagctgttttccttgctaattatgccgtcagcacaggaccatggaatattgrgtctgaaaggaaattcagggtgatcactgaacttagagaagtaaagtgacttcttcaaggtcataggaattctagtgtccaagaaggggccagaatccag

SEQ ID NO: 316448 - DNA, 201 bp, Homo sapiens
gcttggtccaaccgggaaacagttatagcttctggaatagaactcgctcttcagaaaaaatactacgcaagggaaggggggttgactccttcgctcccatmcaaaggtgggtgagagaaacccgagtcgttggagatctgccgacgtgatgggtgcgtgccccgtgtgcgcgcgtgagtgtggattccgcctgtgacactt

SEQ ID NO: 316449 - DNA, 201 bp, Homo sapiens; identical to SEQ ID NO: 66159

SEQ ID NO: 316450 - DNA, 201 bp, Homo sapiens
tacgcaagggaaggggggttgactccttcgctcccatccaaaggtgggtgagagaaacccgagtcgttggagatctgccgacgtgatgggtgcgtgccccrtgtgcgcgcgtgagtgtggattccgcctgtgacactttggttctgtgtcagagaatggtgacggtcgtgtgtagacggatgagaatggtgacggtcgtgt

SEQ ID NO: 316451 - DNA, 201 bp, Homo sapiens
agatcactgtcctagacttgatttcctgtagggaaggcaaggactctttcaagaggatcttttccaaagaaattatagtttatgatgagaataccaatgarccaagccgagtgatgccctcccagccacttcacatagtcctcgagtccctgaagagagaaggcaaagaacctctggtgttgaaaggtaatgcccctgctc

SEQ ID NO: 316452 - DNA, 201 bp, Homo sapiens; identical to SEQ ID NO: 66165

SEQ ID NO: 316453 - DNA, 201 bp, Homo sapiens
tgattgtataggggtggcaaaagaggtcacagagctagaacccagtatctttttagtgtggaaggaagggctgccctctgagtccttgctgtcagggcttytgttaccctgtgcaaagttagacatggcttcaggggaaatggtcgaaagtctgatggtgccagatacgggatgcatcccaggtcagcgcttcattctgcg

SEQ ID NO: 316454 - DNA, 201 bp, Homo sapiens
ccaccaccctgccacccccattctgaccttggaccatttttggcttggctttaaggtatgacaccaagttgggttggctctcaggggctttgttctcaggmagcccacaggttttagtgtggctcttcaaaagtaagtattatacgttgtatttctaaaagtaagctacactgggaattacaagtggcactatattcattt

SEQ ID NO: 316455 - DNA, 201 bp, Homo sapiens
tgccacccccattctgaccttggaccatttttggcttggctttaaggtatgacaccaagttgggttggctctcaggggctttgttctcaggcagcccacargttttagtgtggctcttcaaaagtaagtattatacgttgtatttctaaaagtaagctacactgggaattacaagtggcactatattcatttgggctgctt

SEQ ID NO: 316456 - DNA, 201 bp, Homo sapiens
attatataaatgaaactggtttaggatgtgtctttttttcccctctcttttaccttaactcaggttcaagcctttcttaagctctggtaacttgcatatayaacaaagttgaaataaaacagatttttatatagggaaagagagatgaggaagggaacatatccagttttctcactgtgaaacagagttagcaaggaagtg

SEQ ID NO: 316457 - DNA, 201 bp, Homo sapiens
tatattcacgaatgtaatcatactcattcagaaaaatataggaagagaaaatgagtatgacctgtagcctgaatttcattataaaagatttaaaaatatayattttatattaaaattgatgtaatcttttaattatgaagtctttgattctttagatgttttcatccataacccaagagcaagatcttggcatcagttttt

SEQ ID NO: 316458 - DNA, 201 bp, Homo sapiens
ttaaaggaacgggtcttatggttctcatgaggtgatattttaatctgccagcagaacatcagttaatcacatagaactactctggctctgtgaccaacctrtcatccctgaaattagaaaattattttccagatagtttggaagaaaaacaagttaaaagctattgaatgctttctagatgctgggcattgggctgtcata

SEQ ID NO: 316459 - DNA, 201 bp, Homo sapiens
ctggctgcgcgctcatgctggtcctagcgcagaagacccggcgaggtccgcgaattttggcttagcgtttgtcaagtcacctcgagcgactcggagagaayccggctttcccactagggacggtgatcgcagtctctttcctttagaaagttactccgatacttttgatcatctgtccatagtaaggaggaaaaatagcgt

SEQ ID NO: 316460 - DNA, 201 bp, Homo sapiens
ggtgatattttaatctgccagcagaacatcagttaatcacatagaactactctggctctgtgaccaacctatcatccctgaaattagaaaattattttccrgatagtttggaagaaaaacaagttaaaagctattgaatgctttctagatgctgggcattgggctgtcatatatgtgtcttatttagttctcagagaagct

SEQ ID NO: 316461 - DNA, 201 bp, Homo sapiens
ttgaaaactgtgataattctaacatatatgaagtatttcttacatgccagactctatgccacaagtgttatgtctcatgatccctttccaatttacatacragggactgaaactcggagaggttcaggcacttgtccagtgttactcagctggtgcctagtggatcctgggtgtagctctggtatacttctgctcagtttg

SEQ ID NO: 316462 - DNA, 201 bp, Homo sapiens
gggtgagagaaacccgagtcgttggagatctgccgacgtgatgggtgcgtgccccgtgtgcgcgcgtgagtgtggattccgcctgtgacactttggttctrtgtcagagaatggtgacggtcgtgtgtagacggatgagaatggtgacggtcgtgtgtagacggatgatagatggcatttttcctgatagctcttaaagtt

SEQ ID NO: 316463 - DNA, 201 bp, Homo sapiens
tctggaaccttagaattcattctcctagtagcctgtggatagaaggatgatatttcctgcttttgcacacattaataaacccactttctggagtaggaagyagatgaacaaaggtaaagaaaagtacaagtacaaagttaggtaaaaagaacaagaaagaatctgtgacgagtatgatgactacatcctaaagactctaat

SEQ ID NO: 316464 - DNA, 201 bp, Homo sapiens
gccttctggaatctgtgtttatggttgtcatatgtttcctcctgatggagtggggaggggcagggaaggggcctctgcagcgtgtcactcacctcctcaaytcccagaatgtttggggagggtttgatcttaaatacaagagattataacagtgaaaaatgtgttaatgtaactggcatgtctgttaacaaatcccagact

SEQ ID NO: 316465 - DNA, 201 bp, Homo sapiens
ttaggggcagcattcatagaggcagaatctgtcttctgacagagcacccagcttcacacagtgaaagtatgtgactgtcctctcagatatcaactataagrtttcgtcactaagttcattttatgctgctaaaacagaatacctgagattgagtaatttacaaagaaccataggttatttggcttatggttctggaagctg

SEQ ID NO: 316466 - DNA, 201 bp, Homo sapiens
gtttgatcaggtgtgaggtttacacagcactcaggggaggctggtcaccccaccctaatcttattatgcaaatgaactctccccttgcctggcgccatctwgtctgctccttactgtacacgtggccggcagagaagggaagatggagccgccattttgaacatgtctagtcgcaggtaattctttcctgctggcatccac

SEQ ID NO: 316467 - DNA, 201 bp, Homo sapiens
cattcatagaggcagaatctgtcttctgacagagcacccagcttcacacagtgaaagtatgtgactgtcctctcagatatcaactataaggtttcgtcacwaagttcattttatgctgctaaaacagaatacctgagattgagtaatttacaaagaaccataggttatttggcttatggttctggaagctgtgaagtgcaa

SEQ ID NO: 316468 - DNA, 201 bp, Homo sapiens
cctctttccctgtagctcctattggtatctaacatatcagcagtcacctgtcttcatgtgacttggggctaattcctgtgtacaaagggatttaaataagmctagtcctgctctccaaggacctaaattctattaaagctcttaatctggatatacacagaaaggaaaatacattttaaaagaatatgtattaataatgca

SEQ ID NO: 316469 - DNA, 201 bp, Homo sapiens
tatgtaaaaatctattcatgtacacttactaggtgaatctcttaattcctaccttgaggatggctagaaagccccatttctgctccagtgaatagaaagarctggaggaatgctgtggttatggagtccaggaagccctctcttacaaagattgggaggagctgaatgtggtatatcattattaaaagacacagagacttc

SEQ ID NO: 316470 - DNA, 201 bp, Homo sapiens
gtagggaaggcaaggactctttcaagaggatcttttccaaagaaattatagtttatgatgagaataccaatgagccaagccgagtgatgccctcccagccmcttcacatagtcctcgagtccctgaagagagaaggcaaagaacctctggtgttgaaaggtaatgcccctgctcccttcccaagcacggtcctgattagcc

SEQ ID NO: 316471 - DNA, 201 bp, Homo sapiens
ttttaatattgactcttgaaatgatatttgcacatgttaagaaaaatatattagcaatattttacctgtttgtttttactttcttgaatgcagctactagaaaaaaaaaatgcttgttattatagtagcctgaattccatgtctatcaaatgttgccgatctcaatgtggtaataacagtattattatccccactttttag

SEQ ID NO: 316472 - DNA, 201 bp, Homo sapiens
acagattcttgtgcttatagaatcttgagtggctctgatgttctgtttccatggagtatatcatagcatccatctgttcctggtataaacaaaatagtatscaacttacagcaatgtctctcccacttataataaaacacctaactctcatgtagcattttatccatattgagagctctgtgagatagaaattattatatt

SEQ ID NO: 316473 - DNA, 201 bp, Homo sapiens
tcattatttctatacaaaataaggcattgcaaagttgagatgaaagtttctctctccgtgcctctctcttccatcttcccttcatctcttgtctttctccyttttttcagaggaagctcaccagtgtgggaaggggcttctcatccactgccaggctggggtgtcccgctccgccaccatcgtcatcgcttacttgatgaa

SEQ ID NO: 316474 - DNA, 201 bp, Homo sapiens
cagttcctgggaaataatttctaaacccttggaactccccgagtgttaggagtgtctttgttatgcatgatgagccccttggatcacacctgtgtttatgktaatgcgatgactcaggataagagtttatcatcagaaagacatccacatgattagaaggtcagggctttgtattagttcatcttcttcagcagaagagag

SEQ ID NO: 316475 - DNA, 201 bp, Homo sapiens
ggtactattgttatccctgttttgtatacagggaaactgaggaacagacaggtgagaaacctgcccagggtctcatagctagtgtttggctgtgctggggattcaaacccaagaagtccagcctcaatactccttctctgaatcactgcactgcacttagggctctcatggactatgcgtgtgcatagatctgttggaatt

SEQ ID NO: 316476 - DNA, 201 bp, Homo sapiens
tagggctctcatggactatgcgtgtgcatagatctgttggaatttagaacaaaggtgatgatattgggggtaataagacattatttatcgaatacctggtygtgtatcaaaacctttacataggcttcctgaactatgaccctgatgggtagatgatattacatccacttaatagattggtaaactgaggcttaatgaggg

SEQ ID NO: 316477 - DNA, 201 bp, Homo sapiens
gctgagcagattttaactcttcagaatcccttttgtggaggctgtgatgatgacaatgggtagtttttatcttatttattttttaagtcttcactggtgamgttattttccatattttctttcttctacttcagaattatctcttcaggttcaaactttattgtcataattgcctagcagaataaactatcatatgtaagg

SEQ ID NO: 316478 - DNA, 201 bp, Homo sapiens
tggaattaacatccttaatccaaagaggaactgcatatatatatatatacacacacacacacacacatacacacacatacatatacatatatatgtgtgartgtatattttcatgtgtgtgtataatttttccccttcctctctccttttccttcattctttttttttctttcagtagtgtaattccagaaaaaaagagaa
